United States Patent Application Publication US 2011/0214205 A1 - sequence listing, part 13

SEQ ID NO: 44697 - DNA, 460 bp, Setaria italica
  Peptide Sequence Number=SeqID_110671
caatggccttttatcttgatatgcaagcgcagagttctcttcggccctggctttctgctcctcgagctcgtcgtactccctcctaagctcatcggagcctgagatctgctccagaagcacggtgagctccttggggttcttggaggcgatggattccacatcaccctggaagacaaggaagttgcgggcctttacgagaggatgccgagggatctgagcttggcgttgtagtcgtcccaggagacaaggcggccgtcgatgcggtactcactgccgccggcgccggtgatggtgcgggtgaagtggagctcctcctggttgggttggcggtagacgtcctggcggtagacgaggcggacggaagccctgcgacccttggcctccttgtcgcggtcatcgagggcgtagatgaggtccttgagctgcgcgccgcggaggtgcgctgagcgcacgccgagca

SEQ ID NO: 44698 - DNA, 663 bp, Setaria italica
  Peptide Sequence Number=SeqID_110672
cggtgtcttctagctgataagaggaatttcccactttctgaagtaacaacattactaaggcacaggtacagctggtaggtggattttgacttattcctcttaataaacattgaatcattgtatttccttctcgaggaccaggctgctttagagacacagggaaggtgagcttggcgttgtagtcgtcccaggagacaaggcggccgtcgatgcggtactcactgccgccggcgccggtgatgggtgcgggtgaattggagctcctcctggttggttttggctgtagacgaggcggacggaagccctgcgacccttggcctccttgtcgcggtcgtcgagggcgtagatgaggtcctccgagcacgaagctgatggcatccatcaggttcgacttgccggcgccattggggccgatgatggccgtggaatcgaagaagggcccaatcgtcttcgtaccacccttgtacgacttgaagttctccacctccagccggtggatccgaccgccgccaccgtcgggatgtcgctggtgcgcccatcctccgccgccgccaccgtcgggatgtcgctggtgcgcccatcctccgccgccgccgccgccatcttcttccctccaccttcaagctagggtttcgaccggaccggaggcattcgaaaacagac

SEQ ID NO: 44699 - DNA, 546 bp, Setaria italica
  Peptide Sequence Number=SeqID_110673
ggctgcgcgtgggagagccgacgcccgacgggtcacgggagtagggcaggaggtgggatgtgctgtgatgttgggccggctgggccgaatccaggcgcggaaacgtttccgatccgaagttttcggcccatttaatcggggatacgtggatacgccacgtccgggtggagtatccgtgtttcgtagattaaaatcctctaagactgctgtttcagacagagattcctctaaaaagattaaaatccaacaatgctagaaaactgtccatattctacgaggatcctatggaaagaaataaggaaacaagatattcagttataacaatgcatactaggatgagatactctagcaaaccacaatagaataaattctgcagctatttccaggtagttgggttagttctgactacactgattaaagaaagttcaaggaaaacatacagtaagatcttctgcttaataccaattagtaggaaatatggcaataaagcatatccctggagaagttttggcattcatcaaacctaagtcccagatagcagtcagt

SEQ ID NO: 44700 - DNA, 570 bp, Setaria italica
  Peptide Sequence Number=SeqID_110674
actccccttcttggctgcaagtcgtcctcgactcgctccaatggcattctaaggtagttgctttgatgttggagcacggagcgacgaccatgctgcatggccacaaccagtaatgctccccttctttggccttacccatcatataacggcaagtgttgaatgacatcctgaatatgagggtctagtttcaacggctcaacaatctctgtataaccaagccaaacaggaggtgacggcaaccaacaagtcttcttgtcgagttcaagctttttcttggttatattcttctcgcacaatgtcattttcttcagaaaaccactttgctcctttttttgcagttagttcattttcagcagcctgattctcttcctgcacttgctgaagggactctctgcctctgcaagctcagcctccattttctgtctttttcgatggtatagagttgccacagggaatgctctgccttcaacagtttcaggtcctggtggaggcgtagatgcttctctgcctcttctttttgcgccttcttctgcttccgctccatgacaatggtccttttatctttgtatt

SEQ ID NO: 44701 - DNA, 814 bp, Setaria italica
  Peptide Sequence Number=SeqID_110675
agattaaaatccaacaatgctagaattagaagtacagaactgtcacaaaatatgatgttctggccaaggaactgaaacgatgaaatatagatggctcctgtcaaaatttatcaacaacgactcctgtttcagaccaaatcaaagacagaggagaccaaatccgtcaggcagaaggaactctgctcacaataattggtccatcaagattcctctaagaagattaaaatctatgcagcacggatacggatacgcgtatcggtatcggaaggatacggatacgcggatacggcaatttcttaaacaacctgatacgcggatacattttaactatttttttaataaataaataacaatgcatattaaattgcaaaatagatgttcaaattcaacatagagacatttaaggtctattgcactgagaataacatgatagcaggttctaatttaggagaggatgggagcctgggactgcaatcaatcaatataaactcatatcaagattctggagattggccaattatcatcacgttacctcctacttgcaatctatatgctactattctccaagcaattgtatttgaaccagttaagtaattgaaaagaaaggataatcaacaactgtgcaatagccaacattataaagatcacactgcccctgaacttaatccaccaatccaatcatcctcccacagcaaataatataacaaaccactgtccaaactgcagctacaacccattaagaacccattaagaaatcgtttccaccacagcttcatccaagattgcacaggcagccaaggcgaaacaaggaaga

SEQ ID NO: 44702 - DNA, 843 bp, Setaria italica
  Peptide Sequence Number=SeqID_110676
cgttgtatttttggcactgatagtcttcatagttttcaacatatctgagcttttttttgtgaactggctatataaaatgttagctctgtagcagtgaccaaagtgcatgcgcttgtgaggatcttactcctgtaaaagcaccatttttattcagttaaaagtgagatctataataataattataataattaaatattaaactgattagctgaaacagtatgctgctgcagtccttgtagggtacctggatgtttttggagctagcattgacagaaccaggtttagtttttggagtgtcgttactgatgcattcctcttcgtgaatgtttctaaacaaacactagttgatttccatcagaattatattcgtatgattttatctttttagcaacatattattttaaaaattaattgtcccacatcaggtctcctgccagtttgccaaaaaaacatacttgcaccatagtaaaaaatgttatctatttggtaggcgaaggagtacattatgtccgttgttcatggccaaattttaaaaaatggcctgtttttacctcacataattttgaaatctgattatatgctgtgctggatagatcataatcatgtaggctcctaattgtgctgttgttctaccaggtcacttttagggacactggccgtgacatcccagccacatctgaggagaatgatgagctattccagttgaaagagcagttagaaaagtacaaggaggaagcacaagcaaataggaactacatggttcagtacaaagaaattgcggactccaatgaagttgcgttaaagcaattggaatctgcccatcaggactacaaggcagaggcc

SEQ ID NO: 44703 - DNA, 550 bp, Setaria italica
  Peptide Sequence Number=SeqID_110677
aatttcagatgcaattgatctcaatgttctgcctggatgattgcagctgcttatcgtagtctgctctagatgcaggatggcgtaggatttcccatgctctctgcacgctcaaaaattcttgttgctcactggaaggcacagatgattcaagagtcatatgtcctttgtcaggatgtgtgttaagagcagcagacttgtacgctgcacggatttcgccatatgtagcatcttcactcacagataaaacctcgtacaaggttttctggatggaacctagaaccatagtggaagcttgaccacagctagatctacaccggtgcaccaatggagtggagacgctgagaaggtaggcggcgatttggcctcgggtcctcgccaagatgtgcaggcgtagggcgttgtcaacgattcctcttcggctcttcaggcggccccaagaggcgaaggaggctacgcagcgtggctcccccgtggcccagaccggtggcgaggagaggagatgggtcctcttagggtgcgtagctactagcgactggcggcgctgcgtagc

SEQ ID NO: 44704 - DNA, 518 bp, Setaria italica
  Peptide Sequence Number=SeqID_110678
gatccgccttggacctcttgtgccaaggacgtttagctcatatgacacctgagcgatgttgtaactaacagaaggcaacttcggagagactttttgtggagttgaacctcctgctggtccttccaacaggaggaactacagccccattatagggggcgtgtgtatcataaattaaaaattttagttgccaaggaagttcgaccttatttttccaatgtaggttctgctcgatcttgaggtgttgccagaatccattgatatggtgtactctgtgcatgtggtcttgcggtgtcttctagctgataagaggaatttcccactttctgaagtaacaacattactaaggcacaggtacagctggtaggtggattttgacttattcctcttaataaaacattgaatcattgtatttccttctcgaggaccaggctgtcaaagaaacaagtaatgaatcatggacaagaaagatatccactgcttgaggtttggagctaattctcaataacattcagttcagg

SEQ ID NO: 44705 - DNA, 628 bp, Setaria italica
  Peptide Sequence Number=SeqID_110679
aacttgggccccgcgggatgttgcagaggaagtagcaccctgtatctgagaagtacctgaaggagcagcggcttcctcctcagacatttattcccttgcaatcagttcgcgtgaagccaataattgagaagctgcgaacccttggtggatctgcgcagttggtttttgatgtcattcaatatccttttgtcttcttgccccacacaaattattttatttatttaattctgcagatgatttctttcgattggtcaaatcttgtttaactttgatatgtacatacatttatgtgcaatagattatatgctgcagtcttgaagctatgcatcttattttttcttttgtttagtagattatatttaatatcatcaagaaattcatatacacatgctcatgctcaatggtgcatgtccgacagtaggtacacagttgtgtttccatgcaacccttcaaacattaacttgttcccctaccactaccactgcctaaaatagtaatgctgttgtgaatcaatctctcagcattgcaagcataagcccaattattgaaaaagcgctactgtttttagcccctgacttggtcatttccattagatgtgctatccatcttttgccatctatactccctt

SEQ ID NO: 44706 - DNA, 980 bp, Setaria italica
  Peptide Sequence Number=SeqID_110680
cttttgatcatttgggttgtcctttgcagccaaagggcgaaccctacaaaacactctcatgttacccttcaatgcttgcaggtattgaagggtaacaaggtctccctgctcctgaagctccttaagctcagcccaatccctctgccgttcataattttcttgggcggatcgccaacgcttgtactgctcatctagtgcactctttgaggaagccaattccatttctaatttttctacctgtggtaatctctgagaaacatctgtccttagaacagaaatctcattcacgagagaggtgatttgcttctctttagactcaatcgcactggcagcttcttcacactttatcagatagctcttctccatgtaagataacttatccctcaatttagcaatctcatcttccaaggcttccctgccaacctcggcattctatgatactcctggagctggtcgtcagctaactgcagttttccacttttgtcttgtccttgctcattcaattcctcaagagcatttgtgacatcaactagagaactttgcagccttctcatctcttccagatgcttcttgttatcatcctttttttctcaatctctttcttgcaacttttgatttttgattatgaagctcaggttgcttcttgtcgagttcaagctttttcttggctatactcttctcgcacaatgtcattttcttcagaaaaccactttgctccttttttgcagttagttcattttcagcagattgattctcttcctgcacttgctgaagagactctctgtcctctgcaagctcagcctccattttctctgtctttttcgatggtatagagttgccacagggaatgctctgtcttcaacgaaggaatcaaggagtgagcataattaaataaactgcaggcaaagctcgagcaaagactaactgcaggcaaagctccttggggttcttggaggcgatggattccacatcaccctgca

SEQ ID NO: 44707 - DNA, 1594 bp, Setaria italica
  Peptide Sequence Number=SeqID_110681
ttttttttttttttttgggtcaaacaagctaccatagcattattatcgactcattctcatcccggtctccttcactttaaacatgttataaacttatcccagactgcctccaagcatactcaaacatgaaactgcaaaagcctgctagatacccagttcagactctttacatatttgctccctccaaacaaactcttgaaactccaacagtagatggtgatacaacagcattcggttttcttacaccatgaactgatcagagctgctgtcgtttgtcctgtcaggatgaacatatcaggtaaactgctgaagcaccgcgttctatggagaccttaaacctgcgggttcagggagtagaaggcccatcaggcagttttgtcttcctcttcctgccaaggatggttgccttttgcaacctcacaccaccagcacgccatttcttgaaagcagccattgattccctagcagattcaacacgcgagtttcttctttggtaaggcgtggtacaaacttgggcactgtcattgtggaagaactgtgagacttgcttagaacctctttgtaccgactggtgaatgcatagcgcaagaacatgccaatgctcttgtcattcaccctgtaaatgtgaaaacacaggaaagtaggcaaaagtactgagacttttttttttgggagtgtaacacaatctccttaaccataaggaggcactgatatcccaattgaaatggctcgttgtgggaataaactagccattttcatgtgacaaccaaatatgcactagtattaacattgaagccatgggtctcaacattctataacagttttaacatccatagggcaacctgactaggcatccatgaataccagattatgataacatagttaaacatgtgtccgtaaaaagctacattacatcatgggaaaggggaacgactgaaaattgctcgaggtttcagactgccagaatgacttaagcagtatatatggcgcatttcaaaactgtaagttactattaataactttggcagggatgtttgtcaggttacgctgaaatttggtacagtagaccagtggtatcaatcatagaatcagcagtgaagtagtttcaacatatagaaccaacactacagagggactggtggtaacgatgataaaatcagcagtgaacctttttctgtcatatagaatcgaactgacaatgtatgtctctgaagggaaatgcatcaggtagctaggcaactgaaatggatattctaatataagtcaattgcttttcaattccaggaccacgggacattgcttttgtaagaatacaagcaaacatgtcttttcgggggaatagattgatgtaatcattgaaacactcaaacatcatagggaacataacatagtatactgtcatataaaatacagccaaatgagctctgatcccaccaaagtagatcattgtaagcgcccataggatgatccttaaccacaaaattgcaacttttacagttacttaacctgtctatatcaatgttcatcatatgacagttggtacgcatagagaatctgaatattctgattagacaagccaaaaaactattgggtg

SEQ ID NO: 44708 - DNA, 1740 bp, Setaria italica
  Peptide Sequence Number=SeqID_110682
tcagaccaagctatagctgcccttgctgttagtcttccaaaaggcccaacagaggtgtttgctgtcctagcagaaactgacctaaacatttctagtatgtacccctccttgtcgtcaccgtcacctattgttgttgctcatgttgaagaactttgctatctgctggagaacaccactaccagcatggatgacatttttaaaagtttgctagagaagtataaagatccaagtggattatgtcgactatcagtttataattataaccttataacagagctaagtttgaagcaaacaaatatgttttcctttgctccaagtggagaaaagttgctgacagcaccgcctaataaaaaggcttcacgggatttattcattaaaaagttctcctgcaagtccccagtatatcacaattgcaggatctatgctagtgatggaagactactttgctattgcgaccgcaaaaaactggaatggtatgttcaacgtaatttggcaaaattattgaagatagtcctccagcaatcatgcttctatttgaacctaaaggtcgtccagaggatgaagataatgagttttacattcagagcaagaaaaatatttgtgtttggatgtggagaaaagagccactatattagatatagaataataccatcatgctacaggatgcattttccagagcatctgaagagccatcgttcacatgatattgtacttctctgtgtagactgtcacgaaattgctcattcagcagctgagaaatacaagaggcgagtagcggaagaatttggaatacccctttttgtgcaaaagatagtgaactcgggtgatataagtttgattacccacacatcagtatctgaagataaattgaatggaacaggtgtctccccattgcagctaaggactgctgcaatggctcttctacggcatggatcaactatgccattgaagagatgtgaagagctaatgcagattgtaaagtcatactatggtggtagggatgtgactcctgaagatctcgagatggcattacttgttggtatgagtccccatgagcgaaggcgtcttgaaaagaaaaagggttattcatttaaagctcaggctcaaaatattattacaaagagcagcagcagcaacatctcagaaaacagttgggtcatggatcagaaaatagtcatgccttatctgagcaatttcctgaggatggaactgagagtaatggtcaacaagagtttgatgagacagagagtgaaaaccagctagaggatttaaccttgagccagggaggttcaagtttgccagtcagtatggaggatacaacttttggtcatgacactgcgacattcgagacagataccaagcagcaagcaagtggcgcctgcattcctgcaaacggctatctcaacagggatccttctatccgtgacaattctaatcaggccatttccaagaatgctgagaagaagatatccttgttgggtcatgggcatcatggtaaacaagttgtggagcttttgctttccaatggtggggaggaagctattaaccagttctgccaaaggtggaggcaggtctttgttgaagctgttcacccgcgctacttaccttctggctggaatattaaccacagcggacggcgggatttctgtgacttcagtgtctacaagccatcaaagaatgcgactccaccctgaagcggttaggctatggatctcgtcaatatgtttgctgttgttgtac

SEQ ID NO: 44709 - DNA, 892 bp, Setaria italica
  Peptide Sequence Number=SeqID_110683
acaacaaggtgaagacctgctgtagaccgacaggaaggatgatgatcgtccgtggccggtgggccttcctcgtagcgccggaggcgacctgcgggagggagcagccgacagtggactgtgatcggcggtcggcagcggggagcagggatcgaggatgcctctagctttcagaaatagaggagagaactgccgttggcccgttgcagctgtgcttgtgtgggcttcggccggcagccgctatgcgcgcgtgcaccagcgaaggcggtgtagctaggggcccgaggccgcgtgcggccaccaggaggttgcgactagcgagggcggcgcagcggctgctgcctgctggcttgtcgagcgccgccgcacactgggactgctggcctgtggggaccgcggcttgggaaggtgggctgcgggttgggccgtttctttgactaggccgctgagctacctgggtgggctgcgagatggacctgtatgcatgctccacaatactcatcatatagccctgctaactgggctggcatccaaaccaaaaccacacctatctattctagcatgcaaagaaaatgcaacccaccccactccagtcttccacccgcagaaatcaaaccccaccaatccaatcatcctcccacagcaaataatataacaaaccactgtccaaactgcagctacaacccattaagaacccattaagaaatcgtttccaccacagcttcatccaagattgcacaggcagccaggcgaacaggagcacacaactgccacaaaatatgatgttctggccaaggaactgaaacaatgctagaattagaagttacagaattgtttacagactcctgtttcagactagagattcctctaagaagattaaaatccaacaatgcta

SEQ ID NO: 44710 - DNA, 1008 bp, Setaria italica
  Peptide Sequence Number=SeqID_110684
gatgaggcgggtatggagtgcatgctgcaacgcatccgccttggacctcttgtgccaaggacgtttagctcatatgacacctgagcgatgttgtaactaacagaaggcaacttcggagagacttttgtggagttgaacctcctgctggtccttccaacaggaggaactacagccccattataggggggctgtgtatcataaattaaaaattttgtgccaaggaagttcgaccttatttttccaatgtaggttctgctcgatcttgaggtgttgccagaatccattgatatggtgtactctgtgcatgtggtcttgcggtgtcttctagctgataagaggaatttcccactttctgaagtaacaactgtgcacaggggagaaaaatgattttcaataaatttgatcaggagaaataagataatccatccatttgattatttgaagacaaaatattctcatggagacgagattaaaacaccatgtaatttcagaactgaagaggtttgcaggatatgatatataacagcaaaaccaatcactcaagcaagagaaacatatcaggttgagaataatccaatatgctccaaatgaaataggataaaacttatgagtagtgctattgaaatttgaaagtgtgcaaagcacatgacataccattactaaggcacaggtacagctggtaggtggattttgacttattcctcttaataaaacattgaatcattgtatttccttctcgaggaccaggctgtcaaagaacaagtaatgaatcatggacaagaaagatatccactgcttgaggtttggagctaattctcaataacattcagttcaggattactctaactgaaggaggtgggattgcttttgcctttacctgctttagagacacagggaaggtgagcttcccacaaaaactccgggctcaacacaatctctttacacatctccctccatgtcctacaaacagctgcaaagcaaacaacatgcttccgtgctggccaggtg

SEQ ID NO: 44711 - DNA, 1333 bp, Setaria italica
  Peptide Sequence Number=SeqID_110685
tctgccttgtagtcttgatgggcagattccaattgctttaacgcaatttggaagctctcccgtaattccatgcctttttgtcaagatcagctgagagcatgtgaacttgatttcgaagttgaacattttgctgaactaacccattgatatctttaaaagctatctgattgtctttcatattctgctctacattggaaagaacactgcctatgcttgcagaaaaagacaccattatttacattaggaaggctagaaccacaacgaagctgtatgtcttgacattctttcagaagaacagcgacttgtttttgcaggtcatctatttccttctgtgccacactatgatcacgttcccgccttttcagctcagactttagattcctaataatattttcgaaattatcatgctccagcaatgcttgctgcaatttctggtccattagagcataagcttcgaccattctctcatgctcagctcgttcatctaggataagttcagccttctcttctatttcatgcaagaccctttccagaactgcttcagcgtgtctcctcccccgcctctcatgaagaaaagcgtcagtagcttcttgatatttctcatagatcttagcaagactccaaccgtcacgaagaagagaagcagctaatgcagttccagaaacaccactaggtacctttgggacaaccattaggtcattctgattcaactcatcagaaataggcagttcttgtattcttgcgtctattaaagcagtagagtctgctgcaacgctggtcaatggaatgaggctcaattcactggacttccttgtattctccaaatcaaattgacacttttcaagcttctgcttcaagttggcagcttccttttcaaggtctctcctaaataaggtctccttctcaagtttttccttgtattcatcttcaacttgggtcagatgtgtctctaatgctttaataacaccttcaagctccccagccttcttcgaccattcctcagaactttctttgtgaagttcagcaagtttcatgacagtcgaaagctcagcacccagacgttgttcattagcagctgcagcatcctttgttgagcacaattccttttccatgtaagataccctttgctccagttcagagatacgttctttgcctcgcctcaaagagctagaagattcagaaatctctctttcaagctctgcaatcctagctgacatcctagcctcctcatccatatttgttttccttagttcagctaagttcttcacttttactttcagttcttcatcaagccacagattgtgcttttcaagcagctccttctcctgggtaa

SEQ ID NO: 44712 - DNA, 981 bp, Setaria italica
  Peptide Sequence Number=SeqID_110686
aaaggacttaccctagaccaaacctacggacctctgccttgtagtcctgatgggcagattccaattgctttaacgcaacttcattggagtccgcaatttctttgtactgaaccatgtagttcctatttgcttgtgcttcctccttgtacttttctaactgctctttcaactggaatagctcatcattctcctcagatgtggctgggatgtcacggccagtgtccctaaaagtgaccttccttgatttcagctttgcctctaaatcagaacatttggcctctgcaatggcagcccttgattcagcatcagaagcagctttcaacgagctctgcagcccctttctcatatcctccacctgtttcatacagctgtcaaacatatttttctgatcaaggttcagaacacggacaaggtctccctgctcctgaagctccttaagctcagcccaatccctctgccgttcataattttcttcggcggatcgccaacgcttgtactgctcatctagtgcactctttgaggaagccaattccatttctaatttttctacctgtggtaatctctgagaaacatctgtccttagaacagaaatctcattcacgagagaggtgatttgcttctctttagactcaatcgcactggcagcttcttcacactttatcagatagctcttctccatgtaagataacttatccctcaatttagcaatctcatcttccaaggcttccctgccaacctcggcctctgccttgtagtcctgatgggcagattccaattgctttaacgcaacttcattggagtccgcaatttctttgtactgaaccatgtagttcctatttgcttgtgcttcctccttgtacttttctaactgctctttcaactggaatagctcatcattctcctcagatgtggctgggatgtcacggccagtgtccctaaaagtgaccttccttgatttcagctttgcctctaaatcagaac

SEQ ID NO: 44713 - DNA, 1725 bp, Setaria italica
  Peptide Sequence Number=SeqID_110687
aaagaagctagtcacgatgaagcggttgaggagagagacgaagctgcaaatgatatgaatacagcttcagatccaatgcatgtgaaagtggaaagttgaggcagtttccggttgggctggcaactaggtgcagtgggttgtcctgagaaatctatatgtatactatgcatacacagcgtgatataccagtacttttggtacatcagcatcccaggaaatacagtcacttgaagtctgcatagtatacatatagatttctcaggacaacccactgcacctagttgccagcccaaccggaaactgcctcaactttccactttcacatgcattggatctgaagctgtattcatatcatttgcagcttcgtctctctcctcaaccgcttcatcgtgactagcttctttctgggaaagcatctccttcaatcttgcaagctctagatccttggcttccaactcctcttgcagaatggacaccatttcatttgatctctctacgtcatttgttacaccatccatgtgtttatacaaaacatcaaattgattcctgagctcattgttctgagacttcagaaccgcaattttcattccaagctcatggatttttccttctgatgccatggccccaatctcttcattttcttcttgcaaagttctacatttagccattagcatttttccaagtttgcttgatggagtaaaattgacagcagcaacattgtcctgaagctccttgatttttttctctttctcctccacaagattctttaagcgtgtaaattcttcatgaattgctggatcaagcaataatctccttgtctgcattgatggtggccttaattgagtttttaaatctctaaccgcggacttcagttctgcaatctcctgctctcgtttagcaaatgttacgataaaagctgcctcccttttctttgctttctccagctgctccctcaatgactcctccgatgacttcaggttactgaggtatgaaaccactgaaacaggatctggattagctccagaaggtacagctggaattttctgaaatgctgaatgccacttctcgatttctgatttagcagcttccagttccacctggcaggatgcaaggctatgtttacagtcctgcaaactttcacgaagagacagaatcattcccgtcgcagctcctggagcactttcctcaacctttgtctttgccttcttggaagcaaagacgtcatcgtcatcgtcgtccagatcgccaaatggcctcttctcacctgcagagaggaaaacagcagccacaacaagcaagcagaaataagaaaccaagtgggacgcgatcacccaaaagaagccaatgccagccgcagacatgcccccaaaaattttctgcaaaaaccctaaaccaatactcgcaggcccaaggatacctggatccgtgttcatctgaaccgacggccggcacggaggaaggtgaacggagatcctgcctgcaaggttgggggattgttgtcctctatcagttggaagcaaacaggtggaggtcgccggcggcgggcggcggtgttcaaccgggcttgacgcttgaggacggcggtgggggattgtgcttaggaggacccggcggcctatgcagcacggatacggatacgcgtatcggtatcggaaggatacggatacgcggatacggcaatttcttaaacaacccgatacgcggatacgttttaactattttttt

SEQ ID NO: 44714 - DNA, 3087 bp, Setaria italica
  Peptide Sequence Number=SeqID_110688
tactacaaatacaacctctttcacaagcctgcttatgcttctctatagactcttctacttgtttcttctcctgttgaaccctttgaagaatattcagttgtaatttctcgttccttttacggtttgctttttctttcttgttatcatctctctccttctccagggttctttccagtgtctgtatcctgaaatccttttcttttatagcttgctcaagtgtattttctgacattgtcttctgacttgatttaagatcctccatctgtttctgtagactttgattttctttaatgacctcttccttctcctttatcaagttgtcaagttttctcttaatggagaaattaatcttcttaagcctgtccatctcagatttcagggatgcctctacatcattcagcttcttttccctggaatctaattcagactgactgacagcaagcttctcctccaaatttcttatagcaacttctttctcagaaagaagtttttttgtcactttcaagctccatagatgtctctctcaaggttgatttgatattttgaagttcattcttcatgccctcataagtgttcaaatcaatgcctttgctattttcaaccaactcagaaatcctttggttgagatttgctatttcggccttctgcatttctagttcctttttgcagatttcagcgtttacctccttctccagtacaaggctctgcaatctctcagattccattttagccttttgagcttcatcgcggaatttctggcattcttcaaaattatgcctattctcctctctaagctgtatgttgctttcacgaagcaagttaatttctctgacctggagctgcagtgacttgaattcttcatccttgagcattaatgtcctggcattatcaacctgactgcgcagcaagtcctgtgcctcctttgcagactttaatgcactttccagttctatctgaagccgtgacttctcctgttttagcaatgatatctccgtttcagcaatttcttttgatctgcgcagatagctgatgacactatgaagatcatcttctgcatgcgagtcagtacgttgagatgaaagcccagcagcacttcgttctttctcagctaaccgaatgtgtaaagattctaactgattgtgtagaattttattctgatcattcagctcattatacttccgcagggcgtcatccttttctttcaataatcctaccttttcttgctcaccaagtgttcttagggcatcattttcagctttttgcgcatctgctgtctggcgaagaatagtgatttcatgctgcaacgaagaaagctgcttagaagtatttgtcagctcctgtattgtttcagattgcagaataacctgccgttcataattttcttgggcagttcgccaacgcttgtactgctcatctagtgcactctttgaggaagccaattccatttctaatttttctacctgtggtaatctctgagaaacatctgtccttagaacagaaatctcattcatgagagaggtgatttgcttctctttagactcaatcgcactggcggcttcttcacacttcatcacatagctcttctccatgtcagataacttatccctcaatttagcaatctcatcttccaaggctttcctgccaacctcggcctctgccttgtagtcttgatgggcagattccaattgctttaacgcaacttcattggagtgcgcaatttctttgtactgaaccatgtagttcttatttgcttgcgcttcctccttgtacttttctaactcctctttcaactggaatagctcatcattctcctcagatgtggctgagatgtcacggccagcgtccctaaaaatgacctttcttgatttcagctttgcctctaaatcggaacacttggcctccgcaatggcagcccttgattcagcatcagaagcagctttcaacgagctctgcagctcctttctcatatcctccacctgcttcatacagctgtcaaacgtatttttcttatcaagggtcagaacacggacatggtctcgctgctcctgaagctccttcttaagctcagcccaatccctttctagtcgcttaatgtgctcctcatgatttctcctttccatagaccttgcattctctcgaacctcctcagtggtatgtattgtgtcgagcgtagcctgcagacgatgcactcgttctgttaaatcatggacttcgtccaaagctcttttctctgacttctctagaatctctttttcatgcttcaacatggagacctccatcgatatcttccttgagttctcctcaaaagcttgcttagaatccgaatcttcacgaagtctacgttcgtaatcaactatcaaatgcattaactccgcatttctgagtgaaatggaattagtctccttcctctgatgctcaagctccactgtaaacccattaagtctatcccgagcaaaaccagcttcaagcactgccttatcacgctcagaccgcagagacacaagctcagtcctcaactttgtcagctcttcatcgaggcttctggctcgctcggagacttgctcataagctttctttgagacttcctgtgatccttcaaacagaaccatcaggtccgttctgtcgctatcttgcaaattactaggtactgattcaacattcgaacgagtcttctgctgctcctcacagagcttccgatacatcgccacggatcgatgaagagattcaatcattattgcttgttcttcagatttcttcatcactttttcaaccctagatgcagcatcatcagtaattttcttcaactcaatttggaagctctcccgtaattccatgtcctttttgcaagatcagctgagagcatgtgaacttgatttcgaagttgaacattttgctgaactaacccattgatatctttaaaagctatctgattgtctttcatattctgctctacattggaaagaacactgcctatgcttgcagaaaaagcaccattatttacattaggaaggctagaaccacaacgaagctgtatgtcttgacatttctttcagaagaacagcgactttgtttttgcaggtcatctta

SEQ ID NO: 44715 - DNA, 1965 bp, Setaria italica
  Peptide Sequence Number=SeqID_110689
ggcactccaagaggttctcaagaagcacaggacatgggaaacagtaagtaaacattttcaatattagaaacaaactggaacctgaagaaaacaggtggatgcttaacttgaagtgatcggattgtctgcagatgaatttgtgacattttgctgataaaactattagtaacgagcaacctgacatttgcagtccctaagccatgatgaaagaaaattactagaaatagtttacctgtgaatagcaaaaagcaaagccagtgctgcgacagtcttctccccaccggataactgttccatatctctaaaccgtttggtaggtggcattgctgtgtacttgattccatgtagaaatggttcgtcttcattttctaggttcaaatatgctgttcctccaagtggatgcgtatgactttttgtcagctgcttatagattttgtctatgcctttagatatgtgatcaaaggcctccatgaacagttcatacctcctttgcttgatggagttatatttatcagatatctctcgctcttctttcctagttgcctcaaacttttctgtaatctccttttcctttctttggagtgcatcatattgatccagtgcttttagattgggagcagtgcgctcgatttcagctaaaagcgcacctgttttttgtttgaacactgcctcatgtttgtcacgttcagacggccgcatatcctgcagatagatttcgctgagctggctgtaatcaaggaccggttcttgggaggatggcccggtatccattggatcattcactgtaggaagcttcaactgctccagttcacacttctcatgaatatcccgttggcgtgacatgagttgcaggagttgcccctcctttgacttcactcggcgatccagctttgccaatgtagatgcaatactaccattctgctcctttagttcatcaataaccttctcacattcatctgacttggatttccagtcttcagcctcagctttcagttcatccatctgagtcaaaatttcttcagcttcaaccttagcaccagactctctctcctgtaagcccttaagctctttctctagagactcatatgtctcccttaacttcacaattggtgcttgcatatctcgcttttgttcatattcaagctgatatttcaattttgacatttgggtgtttagggtcagcttcctctcctgcagtgcttgagcatcttttagttgcctttcttcatactcgcggatattcttcacaccaactgaaatgctaaaatctctgtacaccttgtccacaatctcattgatttttttctcaagcttggttacttctgcttctttctcagcaagacggatctcgagctcctccttttcaggctccagacgattaatctcttcctcaatattattcctctccgatgccactttgagtagcttcgctgtgaggttactatgttcaacattcaagtactgcaactttttctcaagtccagttattttctcagatatggcaagctcctttctctgcaactccctgggagacccaagctctgacatttcagattccagctgatttttcttcttcttcaaagattctattctgctatcatcccatttgtttgatcttgcttccattcccccacttattccaccagtcatagtgccagatttagtcagcagaatcccatcaacggtaacaactttatacctttcaccactccaacttaaggttttggcttcgtcaagtttatcacagacaagtgtatttccaacagcatacagaactgctttctccaaagctcggtcaaactgaatgacatcaaaaaccaactgcgcagatccaccaagggttcgcagcttctcaattattggcttcacgcgaactgattgcaagggaatgcattaagtacctgaaggagcagcggcttcctcctcagacatttaatgcattcctttcccgtgttttcatcttcc

SEQ ID NO: 44716 - DNA, 4972 bp, Setaria italica
  Peptide Sequence Number=SeqID_110690
cctttccacttttaaaacctaatagttataaaattatcccagactgcctccaagcatactcaaacatgaaactgcaaaagcctgctagatacccagttcagactctttacatatttgctccctccaaacaaactcttgaaactccaacagtagatggtgatacaacagcattcggttttcttacaccatgaactgatcagagctgctgtcgtttgtcctgtcaggctaaagagatgtgcaccgaaggtgcatcagactacaagaactataaaaatgccgttagccttctttctttacagctcaaatcagtgaacatacatgaacatatcaggtaaactgctgaagcaccgcgttctatggagaccttaaacctgcgggttcagggagtagaaggcccatcaggcagttttgtcttcctcttcctgccaaggatggttgccttttgcaacctcacaccaccagcacgccatttcttgaaagcagccattgattccctagcagattcaaacacgcgagtttcttctttggtaaggcgtggtacaaacttgggcactgtcattgtggaagaactgtgagacttgcttagaacctctttgtaccgactggtgaatgcatagcgcaagaacatgccaatgctcttgtcattcaccaaaggaacaatcttgcatcctagctcataaaagtaggggcaacgaaccctcaagtccacacaggaggcatcagcttggatctcttttcgagttttctgtgtgtagcatggaggaggattcattgacacagcttgttccagagacagtagcccatgcgcaagccaaaacgggaggtccaccttggcacccttctctacaaagttactttcagcgccaggatctagcaggccaacaccatttgcagttacttggaaaacaactgaaataggctcatcctccatgaggatatcatcgatgtcgtaataacccggcatctgaccaagagtgcaggatcacaactacttactcctaattctgcaccaccaatttggatgttgtcaatggcaatggaaagtaaattaaactggatatactgcaacgcgaacttgcggaagaaaatatcacctcgattgggcgaatcagttcgaaggctcacctttgcgtcagctatgagtaattttgagagaatattcctcaaaattttctgagagaagcaaaacgaatttcgaggcttaccttctatgcagcacggatatggatacgcggatacggcaatttcttaaacaacccgatacgcggatacgttttaactattttttaataataaataacaatgcatattaaattgcaaaatagatgttcaaattcaacatagagacatttaaggtctattacactgagaataacatgatagcaggttctaatttaggagaggatgggagcctgggactgcaatcaatcaatataaactcatatccagattctggagattggccaattatcatcacgttacctcctacttgcaatctatatggtactattctccaagcaattgtacttgaaccagttaagtattgaaaagaaaggataatcaacaactgtgcaatagccaacattataaagatcacactgcccctgaacttaatccaccatccatgcttgcatgggcccttattctgtagactatggattatacttccaaattgcctggatacactacacagaaaatgtaaatctctatgcactttacggatgctatgctaccattactgggaggaactcacggttcacgggaggcctgcactaccactatcagaggaagtcacgcacctgaacaggggctggggctccttacgccggaggccgacgggagtaatcacgggcggacggaggccgacgggaggcagcctgcggccggcgggaggcggacggaggctggcaggaggcggcctcacggacggcggccagcggacggcggccgacgagaggcggaggcgctgcgtcagccgtcaggtcgagcgggaggatgcggcgatgcgctgcgtggggcggctgcgcgtgggagagccgacgcccgacgggtcacgggagtagggcaggaggtgggatgtgctgtgatgttgggccggctggggccgaatccaggcgcggaaacgtttccgatccgaagttttcggcccatttaatcggggatacgtggatacaccacggatatgtatccggggcgtatccgtatccgatacgggatacggtccccaggtggagtatccgtgtttcgtagacctacatgttcaacattcaagtactgcaactttttctcaagtccagttattttctcagatatggcaagctcctttctctgcaactccctgggagacccaagctctgacatttcagattccagctgattttttttcttcttcaaagattctattctgctatcatcccatttgtttgatcttgcttccattcttccacttattccaccagtcatagtgccagatttagtcagcagaatcccatcaacggtaacaactttatacctttcaccactccaacttaaggtttggcttcgtcaagtttatcacagacaagtgtatttccaacagcatacagaactgctttctccaaagctcggtcaaactgaatgacatcaaaaaccaactgcgcagatccaccaagggttcgtagcttctcaattattggcttcacgcgaactgattgcaagggaataaatgtctgaggaggaagccgctgctccttcaggtagggaaccggctgattgggtgctttgggtgctttactgaagttccaaactttccagcaccttgaccttttggttctgttgctttttgtttgaaaagactcttcgatattttgtgtgtggatggtaaaacactgtgtccttcattgtcttcatgcaacatgctcttttcctgcacggcgcgcactcgactgttgaccatgcacttgcgaaccttatcagcaaattttagtgaccctaatgtggcatggacaaacataggatcttgagagatgtttacaaacaacagcacttttgaatggccctcaaaagagttctgcaaaaagtgggtcagcttggaacccctaaatggcaaaaactcccctttcggaattgcttcaaaaacttgccctagggcaagtaaacttttatttatgttaccagtttcattccttgttgcgtccaacacgtcagtagtcttgctcactgattcgctgccagctaagtcgatcatctgcagcacaccttcaatcttgtggtttgattgcttattgtacccagaaatgatcaacttgaatacgaagtgacttctagatgaattttcattcatttgggtcttgccaacagacctatgtttcaaggcctccttgaatagataagccgcatcatcttcatcgcggactggttgttggacaagaccagaaaccatcactcgtccgtgttcatcagtacgaacatcacagtttttcttcatgcttgtgtctaacaaatcataaatcttttcattgtatatctcaaacatagaagcctcgacatcgaagttccactggatagatgccccgattttgttaaagatctctgttaaagcacggggtatcatgcccttatcatccggctttcctatcattgtataagttttaccagaaccagtttgaccataagaaaatatggtgaccttatagccatctaatgcacttcgcacaagctctgatatttcattaaaaattacttcctgcgaacatgtatccttaaacaccctatcatatgtgtgagaaacaacgtgaccattgtgcaccacctggagcccacgtccagagtattccagtgattctggaaaaataattagcttttgatcatttgggttgtcctttgcagccaaagggcgaaccctacagaacactctcatgttacccttcaatgccatcatttgattatgaagatccttccttaaatcctcagattccaataacaatctctcaatttctattacgttctgcttcagagacttcttctcatcttctatgtaagtcacatgtctcctcagctccaagcatgccttctcagcttcctccagcttttgctccagattgctttgctccaaacatgtcctgtcagcttcctcaagtttccgctcgaagaactgaattttcttttcagcttctaggagcttctgcttgaaacactcaacttcttctgtttgagatgtttctacttcctggcatcttcgtgttatccttacttttgttgcatcattctttattttgcttgtcttacaatcccattctacactacataaaaccatatcctgagggccattgttcaaagtgaattccatcattctccgttctctatgataagtactgttttcattaaacttatatatccttattgtacacttgtttccattgattttattggctctgacccaacttccgctgccattcttcattttccgagtaaatccaccacctctaccttttgctggtgtcaatttcaggacaaagtaagctatgccatttttggcatacttctttagttcttcaatatcttcatcatatatgttgattttctggatgtcactgggaagttcgcaattagggttatcaaccccattgtgacaggatctcttcaagttcaccatgagtatattcatcatcaatctctgcaatggcagcccttgattcagcatcagaagcagctttcaacgagctctgcagcccctttctcatatcctccacctgcttcatacagctgtcaaacatatttttctgatcaaggtccagaacacggacaaggtctccctgctcctgaagctccttaagctcagcccaatccctctgccgttcataattttcttcggcggatcgccaacgcttgtactgctcatctagtgcactctttgaggaagccaattccatttctaatttttctacctgtggtaaatctctgaagaaaacaatctgtccttaagaaacaagaa

SEQ ID NO: 44717 - DNA, 2020 bp, Setaria italica
  Peptide Sequence Number=SeqID_110691
aaaatcatgcaggttcaatcaccaatgggaactttcttatcatgtggcaatgccactgaaagtggagtatattacagatggtcccaaatggaacgcgtaatcacttggaagggagggggccaacaatacatgcatccacatatgtccacttcatggctacagcaagcaagcacaattacaaccaagacaacacgactgaaatgcagagagataccaggggagtaatgccaggcatctgtgttctcttttacctttgttctccatttattcacaggccaattttgtatcaaagctgctcagacaaatagcaaacgcctggaaagccgagagagggtagcgatagtccatcgtgaacatatcccttgccacttttccgaactgtagaatcaccttgtcaggatctgacggagcaggctgcgagggagttggagctcctgcaggtggtggggttgttgccgcaatcagctggaagttcttcaccgaggcgattgtcacacggccacggaagttgaggcaccagcactgcagctgttcatgccacctaggtggcttattacgaagcacaagtggcctctccttgacttcactgtcctcgtcatgatccaatctaccactagcaatgcccgagatgcgagcgctgctgccaatgcctgagatgcgagcgctgctgccaatgcctgagaagcgagcactgctgccgctgccagctatgtcggagaagcgagcactattgaaatccatggatgagtccatgattgacttggacaatgaggtggtgctacggaatgactgcgagaaggaagctgtgctgcggaatgagtcctccagagctcgaggtacaatctgctctggctgtccaggtactatgccacctggctctactgatgaggcgggtatggagtgcatgctgcaacgcatccgccttggacctcttgtgccaaggacgtttagctcatatgacacctgagcgatgttgtaactaacagaaggcaacttcggagagacttttgtggagttgaacctcctgctggtccttccaacaggaggaactacagccccattataggggggctgtgtatcataaattaaaaattttgtgccaaggaagttcgaccttatttttccaatgtaggttctgctcgatcttgaggtgttgccagaatccattgatatggtgtactctgtgcatgtggtcttgcggtgtcttctagctgataagaggaatttcccactttctgaagtaacaacattactaaggcacaggtacagctggtaggtggattttgacttattcctcttaataaaacattgaatcattgtatttccttctcgaggaccaggctgtctgctttagagacacagggaaggtgagcttcccacaaaactccgggctcaacacaatctctttacacatctccctccatgtcctacaaacagctgcaaagcaaacaacatgcttccgtgctggccaggtgctctcatcagcctcgagtctccgtatgatatcacggatgagttcaggaggtaggcttgcccagcggctttctctgattatggaaggtgaatcatcaagctcatgcgatgagctctgtgtcttccctttgtgatgcccagtaaggccatagatgcttgcaagggtcacctcaaagctgcgcctggacaagctgccgaagccatccctaacatcacggactatgctacgaaatgacatctacggtaaccaatgctagataacaaggcatacaaaatcgaggagactatggcctctttagaagtgataacaacgacagaaagtgcatatgcaaaagaaactgcctctacaatctgcccattcctcgaagccgacgccgcctcgccccgccaccggggacacgcaggccgcagatcagtgcaccaggcaccagccccgagcgtcccgcgggctgtccctcacggccagccggccaccccgcggggcacgcgcggagcaggaggggagggtggaggggggagggggggggggggacgggtgagggaaggg

SEQ ID NO: 44718 - DNA, 4175 bp, Setaria italica
  Peptide Sequence Number=SeqID_110692
ttttttggacccggaattctctaatcacatacgaatatttaacagctaacggcactcatagatatctcatgtttgctatgaaaatttacaattcagatgttatttggcctccagcaaaacctagcggttatgtttgtttgccccaatctactatcaccatatttggtggccattccctcaaccatgacctgtaaatgtttctttcccagcaaatagcttatggacagcatcacaattcacaaagacatcagcccatacagcaaccttcatgtttgagtctaactacacgcgacgaggttttaaaaggaaaaaaaaacactacatgagatgactaatcacttatgtacacaagttacagcgttattctggacagctagcaagcagataggcaattacatgttgcttcacgcttccctgtacttagtcagatcgaaggtgagagttctcgagcaacttcgttctgagtccctataaacgccgaccagtgcttcagctttgtcatagaaactatccttcagcgatatgactatactctggaatccacattctccattcctaccttgttcatcagcaacacgctcacatgactttgatctgataaacccagcaaccttggcaacatttaaattgtccagagcagcatctacttcatccaatatgaagaagggtgatggcctgaaactgtgaatagcaaaaagcaaagccagtgctgcgacagtcttctccccaccggataactgttccatatctctaaaccgtttggtaggtggcattgctgtgtacttgattccatgtagaaatggttcgtcttcattttctaggttcaaatatgctgttcctccaagtggatgcgtatgactttttgtcaactgcttatagattttgtctatgcctttagatatgtgatcaaaggcctccatgaacagttcatacctcctttgcttgatggagttatatttatcagatatctctcgctcttctttcctagttgcctcaaacttttctgtaatctccttttcctttctttggagtgcatcatattgatccagtgcttttagattgggagcagtgcgctcgatttcagctaaaagcgcacctgttttttgtttgaacactgcctcatgtttgtcacgttcagacggccgcatatcctgcagatagatttcgctgagctggctgtaatcaaggaccggttcttgggaggatggcccggtatccattggatcattcactgtaggaagcttcaactgctccagttcacacttctcataaatatcccgttggcgtgacatgagttgcaggagttgcccctcctttgacttcacttggcgatccagctttgccaatgtagatgcaatactaccattctgctcctttagttcatcaataaccttctcacattcatctgacttggatttccaagtcttcagcctcagctttcagttcatccatctgagtcaaaatttcttcagcttcaaccttagcaccagactctctctcctgtaagcccttaagctctttctctagagactcatatgtctcccttaacttcacaattggtgcttgcatatctcgcttttgttcatattcaagctgatatttcaattttgacatttgggtgtttagggtcagcttcctctcctgcagtgcttgagcatcttttagttgcctttcttcatactcgcggatattcttcacaccaactgaaatgctaaaatctctgtacaccttgtccacaatctcattgtttttttctcaagcttggttacttctgcttctttcttagcaagacggatctcgagctcctccttttcaggctccagacgattaatctcttcctcaatattattcctctccgatgccactttgagtagcttcgctgtgaggttactatgttcaacattcaagtactgcaactttttctcaagtccagttattttctcagatatggcaagctcctttctctgcaactccctgggagacccaagctctgacatttcagattccagctgattttttttcttcttcaaagattctattctgctatcatcccatttgtttgatcttgcttccattaccccacttattccaccagtcatagtgccagatttagtcagcagaatcccatcaacggtaacaactttatacctttcaccactccaacttaaggttttggcttcgtcaagtttatcacagacaagtgtatttccaacagcatacagaactgctttctccaaagctcggtcaaactgaatgacatcaaaaaccaactgcgcagatccaccaagggttcgcagcttctcaattattggcttcacgcgaactgattgcaagggaataaatgtctgaggaggaagccgctgctccttcaggtacttaatgcattcctttcccgtgttttcatcttccactacaactgcatccatgaatttccccatggcaacggtaacagcaagattatatttcttctgtgagggcctacaaagttcatgcatgcgaccatggactccagggaataaccgctttagactaccaacagtttccttcaatcgagcatcgcgctcactttcatgcttgtcagctttaagctcccgtagttgtgtatcaatttcatccaccctctgcttcagtgtttggtacctagatcctgaagattggcgttcctttgcaattctgttatgttcctcacgcaattgtgcaagctcattttcatgtttcgggatggaatgaagaatcttgttaattcttgtctgcaattcacgctcttgtgatgatagctcttcctcacggctatgcagctgctgcatgttctcctctaaattcttttttgcttcaacgtaagcatttaattttttgtctataacttccttttcatctctcaactttgctgtcttcattcctgcgtcctccttaattctatgatactcctggagctggtcgtcagctaactgcagttttccacttttatcttgtcctttctcattcaattcctcaagagcttttctgacatcaactagagcactttccagccttctcatctcttccagatgcttcttgctatcatccttctttttgtcaatctctttcttgcaacttttgatttttgatttgagccgagatatttgctctttcaatttaagaagctcaggttgcttcttgtcgagttcaagctttttcttggctatactcttctcgcacaatgtcattttcttcagaaaagcactttgctccttcttttttgcagttagttcattttcagcagattgattctcttcctgcacttgctgaagagactctctgtcctcagcaagctcagcctccattttctctctgtctttttcgatggtatagagttgccacagggaatgctctgtcttcaacagtttcaggtcctgctggtggcgtagatgattctctgcctcttctttttgcgccttcttctgcttccgctccatgacaatggtccttttctcttgatagacaagcgcagagttctcttcggccctggctttctgctcctcgagctcgtcgtactccctcctaagctcatcggagcctgagatctgctccagaagcgcggtgagctccttggggttcttggaggcgatggattccacatcaccctggaagacgaggaagttgcgagcctttacgaggatgccgagggatctgagcttggcgttgtagtcgtcccaggagacaaggcggccgtcgatgcggtactcactgccgccggcgccggtgatggtgcgggtgaagtggagctcctcctggttgggttggcggtagacgaggcggacggaagccctgcgacccttggcctccttgtcgcggtcgtcgagggcgtagatgaggtccttgagctgcgcgccgcggaggtgcgctgagcgcacgccgagcacgaagctgatggcatccatcaggttcgacttgccggcgccattggggccgatgatggccgtgaaatcgaagaagggcccaatcgtctgcgtacccttgtacgacttgaagttctccacctccagccggtggatccgaccgccgccaccgtcgcccctggaccggatgtcgctggtgcgcccatcctcagccgccgccgccgccatcttcttccctccaccttcaagctagggtttcggtcggaccggaggcattcgaaaacagacagacgggag

SEQ ID NO: 44719 - DNA, 716 bp, Setaria italica
  Peptide Sequence Number=SeqID_110693
gaagacctgagggctcaactagatgtggatgtgaagagcttggatactgtgaggcgaatcagaagctgagagttgagctggctcagaaggcgaaagagatgcagtgcttgagaaagcagaatgagggaatgagaaagcagaatgaggatctgcaggccaagaatgatggcatgatgaagcagaataaggacctgcaagccaagaatgatgtcctggtgaaggagaatgaggagctgagatccaatatagatggcattagcaagcagaatttggagctgcaaatcaagaatggcggcctaacaaagtggaatgaggagctgctagcaaagaatggcagactgacaaagcagaatgaggagctgaaggccaaggatgtcgacttggtgaagcagaatgaggcggtccaagccaataatgataggatgaggaagcggaatggggaactgcatgccgagaatgctggcctaacaaagcggaatgaggtctgcaagtcaagaatgagggcctgacggagagtaatgagaagctgcaagcaaagaatgacaggctaacgaagtggattggggagctggaagacaagaatgacgacctggaagatttgaacggaactcttgtgagcaaagagcgtcaaaggacgatgagctacggaaagcccgaaaagagcttacatgggtttggaggacgagttaaatggccggccagctattgggaccaag

SEQ ID NO: 44720 - DNA, 268 bp, Setaria italica
  Peptide Sequence Number=SeqID_110694
gcgagggcgggctggcgcggctgctgctgctgatgcagagcgggtgctcggcggcggcgcggcagatggcgtcggagctgctcaagatcttcaaggtgagcggcaagagctgcctcgccgggtacgactccaagaacagccacatcatgccgttctgaccgcccggtgggtggagtgactatgcgaagcggttgcatgggttgggtaggaatggaacagaggaattcctcttgttttcccttcttaatttaacaattgttctattttc

SEQ ID NO: 44721 - DNA, 354 bp, Setaria italica
  Peptide Sequence Number=SeqID_110695
tgtgcaattggtttataattagtctatgtttaatactcctaattagtatcaaatattcgatgtgataggaattttagaaggtacgaaacaccccattacaatcaattgattttgggtgatttatgtcacagagctgaatggtaggcaacaagataaactttaaatggaatgcaattggtgatcaccaggcataaagaagaggaagatcctggatgggagtatggaatatgtgaagggatgatattactgtagaatggttcttaatcaagggaaaagaagggctacatgcgttgtacctgacaacttatgaatgggcaattgtttaatgtaaaccagtacataaatttgtctcaa

SEQ ID NO: 44722 - DNA, 1094 bp, Setaria italica
  Peptide Sequence Number=SeqID_110696
ttttttttttagaagaaactaatgtaatgcctttataacaaagtatggaagcacataagatgctatcaaccttgaaacgaagcatgtttcctgtcatagtttcttgacaaacccttgccagaattccagaatgtagcccacaaatcaggctttattattacaaagagcagacactagctgttgccgcaacaagcggaacgcacagtttgaaagaaagaaagaaaaacgatttgacattccaatggggaagctcttattcagctatattgtttttttttcctaaagctatgttttcttctttgtacacagctgtgggcttctacaatctgaactcctagctgtaagttcacaaaatgcggcaaacaatgtaatcttctatggagtgtccaatttagacagtattttgtacaccctgattacaagagatgacagggtaattgatggccccttttgtactcagtatgtcgtttcgattgtgggagtctcttttctccacctggtggcgtttgatttgcattttggcttgaaccgggacatttgtgtgaagcttgttagttcggaagcaactttcatgtgtcccatcatacttcgtaacactgagattagttcctgcaaatcaaggaattaggttacatccaaatcgctgtatgtgctacgtcctattagaatttgcaccttgagaattatggcaaggagagttcagaatctcagaacctgaagtatccaatccatctgctgaaaaatctagctgtttctcaactgatttcatggcagccattctttttgacctgatctgatatggaggtgaagcatcagagctccttacagatgtcaataacccatcaagaggacccagtgacaaaagtgcagttttaaacgaccctggagtatttgtactggctcccttcccattaggagtgtaaaagctatcagtgtttactccacccatcttcaattcattatctgaagtaggtgttgatttatcacgttttctttccttaatattgaaggtgtgcatggaaagctgtcagcagcagtcttcagaatcgaatcaacagttagtggacttgacactttgccaatcgttggagacg

SEQ ID NO: 44723 - DNA, 240 bp, Setaria italica
  Peptide Sequence Number=SeqID_110697
ccgtgaccgacaccgccatgattagggcaaacacctaaccattccaggaaccaaaatggccatgatgcgtcagacaaggatattgccagtgccgtttattctgacaatatggattttctttcccctgctgttaccagcaccaatgatatgtaaggttgcagctgacggtggttactggttaggttggtgtcccttggtggcttaggttcttttcctattgatacttttcttattgcaact

SEQ ID NO: 44724 - DNA, 301 bp, Setaria italica
  misc_feature (301)..(301): n is a, c, g, or t
  Peptide Sequence Number=SeqID_110698
cggcgctgcaggttgtgttggtaggtgccctgctatggcttggaggtggcgatcccttgccgtcgccgatttcttcttccattcgttcgtgtcccaaaatccagtgggcgaacaatttatttgtgattttgtccttcctctgaacgcttgtaaactcgctcgttgcccacaagaatgtactgcatgttcaattcgcgcgaatgtggtggttatccatgcatttgtgtgcaatttgcaaaactctgtgaaattatacaaaataaatcaaactgggtttgttccaaaactttaaaaaaaaaan

SEQ ID NO: 44725 - DNA, 1032 bp, Setaria italica
  Peptide Sequence Number=SeqID_110699
tagacaaactagacaacaagtttacaacaatgtgtttcctgtgaaacatgttgcatgctagatgttgagctagaggcttcaagagaaggagagacagcatctgtaataacagggcgcagaacattttggggtagaatagattccaaggtcccaaaagaacttgagcctagcccactagtagatggtagtaacaaattttgacgagaggtgaaagccatgttgctacccccattacttccatctcctagatacagatcttctgtctggtctgccatagggaaatctggaagatagtctgacacagataaatcttgactattcaactgaggctttgtatcttctgaagtcgatgtccaatccatcggcagatcaccatcaccgttaccatttatcagatctatgacacctgaagacgatgaatcagtttctatagtatctccattctgctgaacagcatcacctctatgtctatctgatttctcatcatgagctggagcagctttccaagatccatcagcaaatacaaggacatcaatgacatcattcccattctcttctaaaatctttgccatcttttggtcaatgcgcagatcagtgaagtttgaaggggtgttacaaaatggacagcgccagtttggctttcttgagttcatctccatgtaattatcataatcaaaacactgatagtgtttgcagaggcgccctttaataggagtttttatgcgcttaaaacttataggacaatttagggaaactcttgatggtccctcaagtacatcagaatctgcaggataaacagtcataggttgcgcataatcctccagttttggagcactgaaggacgtcgaattgtttacaaatgctacagctatgatataattagcattaaaatatccagcagcttggataatatttgccccatatttgagcattttggtgatatcagtagggaactggggtcccggttcctgtttgatatgcacagagctcagttgtccaattaacaaaaaatgaagcttaaccagaggttcc

SEQ ID NO: 44726 - DNA, 1053 bp, Setaria italica
  Peptide Sequence Number=SeqID_110700
aatgtctaaaaaacactgaataaatataaaaaggcaagattaagtaagtacctgatagtgtttgcagaggcgcccttaataggagttttatgcgcttaaaacttataggacaatttagggaaactcttgatggtccctcaagtacatcagaatctgcaggataaacagtcataggttgcgcataatcctccagttttggagcactgaaggacgtcgaattgtttacaaatgctacagctatgatataattagcattaaaatatccagcagcttggataatatttgccccatatttgagcattttggtgatatcagtagggaactggggtcccggttccattgaaacattagtcctcttgtccacaccctttccattgaccagaaagctcacatgtggtgggcttgtgacacatgtcgaggcatccaaattttccttttgtacgacgattagcctaatcttttcatctcgaggtaggttcctctcaataaagaagtcagccattaatatatcatagccaacctttgcttccatagaaatgattagacgctcaaacttcagccgagggtaatacctaggcattatttgtgatataatttcaagcacagtgctgtcactagctgcctggcccgaggatgtgcagaagttgccagagagctcattagccatgctgagaatgtctctggaatctgcaggctgaaaccatttactggaacaagcattcttgcacgatatcactagtaccataagcgaagattgtataaatgtttctcttctcagctcatatacctttctcaaaatgccaggtatgtcaccggccatgggaggaatatcaccagccgagaccgcaaaatcaatccctcttgcgaaggcgtagacgaggtgggcgaactcgttgatggggaggcggccacgccgtccaggtgggccctgatgcggtcgccgatggccttcaggcggatcgcattcacggtcagcgccctctgctgctggtcattgtgtggctgctgcgcctgcggctgcggcggcggttgaggcgccggagcggcggctga

SEQ ID NO: 44727 - DNA, 380 bp, Setaria italica
  Peptide Sequence Number=SeqID_110701
aacgaagcctggatgggattgagtgcgccatgctactggtaattctgattaagcttggagcgtgtacctctgtattgatgctggcctgtatcttggtttgatgggctttaattattagttatgcaattctttatgcttctttcagggccatgctgtgcaagagctaactgaatctgtagatattgtttgaccaccgagatgcataagagattttccttgcttcaattttcaagaataatggatctcattggaaattagcactttgtaaatgctacattggtgagttcttgtgtcattatattttctctttatgctgcaggaatggtgtcagctttcataaacagagtgtgacatgcaaaaatatacattgacaaccttag

SEQ ID NO: 44728 - DNA, 476 bp, Setaria italica
  Peptide Sequence Number=SeqID_110702
aaacacgatgagatagttttattctttccaccggataaatattaggaaccttgtcctttaaaaagattttgccatctggagacaatctgaactagccttatattctacgcaatcatagagaatgggtagttacaaaatggcaggcagctaaatgtatcattgagcaggaacaaaatctcaaatgaaggcaatctacagcaatgaacttttactcgccattgctctgttcaagcaaagattctcactggcagaccactggaattggcagtctaatcatgtggcaaagcttctgtcgccagcatcccccaaccctggaactataaaacctttctcatttacttctggatcaattattcctgtgtacacatggagcccagggaacttgttattgagcttttgcagcgcaggaggtgctgcaacagcagatacaactttaatctgcttgctggtaactccacgttcgattaacaagtcaa

SEQ ID NO: 44729 - DNA, 560 bp, Setaria italica
  misc_feature (13)..(13): n is a, c, g, or t
  Peptide Sequence Number=SeqID_110703
ccaccccaaccanacccccgcgtgggcgtggcctcgtgagtcgggtcgggttggagccacccgagacccgtttgggcggctgctccagttcctttccccttttgtctctcgcgactgctattttctctctccccttcgtccagaccgagaggagggtgcgaagacagggaggaggggcgacgagcagcagcgtggccacgcccaaatccagccattcgatcgaggcccctcgccccctactcgctgaatcccagcccgagcccgccaattgggcgcgccgcccacgctgaggacaaaggaagaaaaacattggcgtgctgagaagcccagccgcgcttttcttggaccacagatgaagcgaactcgaaggcgtacgtgggagagggatgactgatgagggatgctagtgacattgatgaacttgttacgggcgtgctggcgaccgtcatcgaaccggcatgcccgaacaggctcagatgttgctggtaggcaggatggacttttatggtacaaggataccggacagcatgtcaatggggaattctccatggctgttgtcc

SEQ ID NO: 44730 - DNA, 1706 bp, Setaria italica
  Peptide Sequence Number=SeqID_110704
taactaacaaagaaagaatacgaagacggggtagtaccgaccgaccaacttaccaacgagctagtgacattgatgaacttgttacgggcgtgctggcgaccgtcatcgaaccggcatgcccgaacaggctcagatgttgctggtaggcaggatggacttttatggtacaaggataccggacagcatgtcaatggggaattctccatggctgttgtccaggccaataacttacttgaggaccagtgtcagattgagtcaggcccattgagcttcctagattctggaccatatggcactttcgttggtgtttacgatggacatggtggtccagagacggcttgctacatcaacgatcatctcttccagaatctgaaaaggtttgcatctgagcagaattcaatgtctgctgatgtactgaagaaagcgtatgaagctacagaagatggattcttctctgttgttaccaaacagtggcctgtaaagcctcagatagcggctgttggctcatgctgcctggtcggtgtaatctgcggtggcatgctttatgttgccaatgttggggattcccgtgttgttttaggaagacatgttaaggccactggagaagttttggctgtccaactgtcagcagagcataacgtaagtattgagtcagtgagaaaggaactgcagtcaatgcacccggaagataggcatattgttgttctcaagcacaatgtttggcgtgtaaaaggactaattcaggtttgcagatcaatcggtgatgcttacctgaaaaagcaagagttcaacaaggaacctctatatgcaaaatttcgcctccgcgaaccttttagcaagcctatactaagttcggagccatcaatcagtgtgcaaccactacaaccacatgatcagtttctcatatttgcatctgatggactttgggagcacttaaccaaccaagaggctgttgatattgttcaaagtagccctcgcaatggctgcgctaggaagctgataagagcggcactgcaagaagcagccaagaaaagagagatgaggtactcggacctcaagaagatcgagcggggtgtccgccgccacttccacgatgacataacagtcatagtagtgttccttgactcgagcctcgtaagtagggcgagcactcaccgaggtcccgctctttccctgcgaggtggcggcgccagcatgcgcagcaacacgctcacaccaacgtgactagaggagtgcctgcctcaccgagacgacacgcctgactgaaggaggttatttttccttgtgtctaatgtgttatataatgatgtgtcggccaagaccaccccacccatccactcaacgctgtaaagaaataggagaggcagagaagctcctctcccgttccggtgtcctttaatcccatcacagtaatgtacgtgtcaaggttggctcgagtcaataggttggttctctgttgtctaaattgatgatgctccgcggtcacctggaaaggcaagcatgtgtccgttccgattgctggaattaaccctagtgcatatatatattatgtatatggaataataataagcagccaaaaggaggagtaacttatttaactgatggtgtcaagtgtatgtataatgttttgactcggtactgcatctaaagctgttgttttattgaccactggcgaagtggaattgcttgttccttggttaaaaaaa

SEQ ID NO: 44731 - DNA, 363 bp, Setaria italica
  Peptide Sequence Number=SeqID_110705
tcctttagtctgttatcgctcgtgctaatagatagttgtagattgtcccttatttgagatgttttaatgagattatcggatggtatttctaaggcattcactatctcctccaaggtttgagttgtcgcagttgcagtcattgcaaggatacattgaacattaagctttctccgaagtagtgatgctcggagccttagatatgaaggtctaaaattatgagaccattcagaaatgcagtgagcttcatcaatcgcaacaagagatattggtagtgcatccttaaatatgagcagaaattcttcattcaagaatctttcaggggaaacaaaaagcacctttatgtcccctccacgcaacctttgt

SEQ ID NO: 44732 - DNA, 518 bp, Setaria italica
  Peptide Sequence Number=SeqID_110706
aatctgcacgtagcattcaaaaacagtactttcaggtaccaggatggtaggcagcatgacacaacaagataaccgccaccaagtcaccttgtacatatgttaagttccatgcaatccaagcgcagtgcataaggaacagtctcaatatgcctaccagttcaccccaagacagaaaaaaaacccaatcaggtcccacgaaccgacaagtttcagacaaatccacttggatgttctttgcttcaggaacctcatactgcaacagaaagcagcttacaccatttacagattcccactcatggcactcatgcacaatgcagtcctcaagtcgatattctagtcagctgagctgactgtgcagcatcagatccatcacaaaaggctaactgttcgggatccaagggcaatagtgtttcgtaggatattgtatatgtacaaagacttgattcctccgcttcaactcaagtgactgacggtctctcgtaggttggccacaggaagacagcaaacgccaagtgctg

SEQ ID NO: 44733 - DNA, 173 bp, Setaria italica
  misc_feature (137)..(173): n is a, c, g, or t
  Peptide Sequence Number=SeqID_110707
gaagatgaatgtgcgtgcgtgcaattacgccgaagccagattcaagccccacactttgtgagtaaattcatgaacctgctacggtgtactggaccttttagcaacaataaagcagcatcacttattccaaaaaaaannnnnnnnnnnnnnnnnnnnnnnnnnnnnnnnnnnnn

SEQ ID NO: 44734 - DNA, 286 bp, Setaria italica
  Peptide Sequence Number=SeqID_110708
caagaatcccgacccatcaccgccggccccggccggctctgcccaacggtcctccacccgttggccccgctcctcatctcgcttcttgtgctgggtttggagttggagtcatggggaagaaagggaagtggtttagcgcggtcaagaaggtgttcagtcctgaatccaaagagaagaaggaagagaaactgcgaaagaagctagcagctagcaatcccattccactagatctaaccccatccgcctccttggaagtcaatgtttcggtgccaccccctccagcgct

SEQ ID NO: 44735 - DNA, 487 bp, Setaria italica
  Peptide Sequence Number=SeqID_110709
ttttcaatattttttttgtatactgatggcctgtctgtcttgccatcgatccatccttgagatagcaattagtgaccgtaacctttgttccatgggaaatatgacttcatggacatttgacttctttgagagtataacagaatcttacttttgcgatcaatattgtactaagagcatcttatcctgtgatattgtaggcaaggagggcattgagagcgttgcggggacttgttcgattgaagtccctggttgagggtgattcagttaagcgtcaatctgcaagcactctgcgctgtatgcagactctatcacgggtgcagtcacaaatacgttctaggagagcaaagatgtctgaggagaaccaggccctccagcgccagctcctactcaaacaggaattggagaacttcaggatgggtgagaactgggatgacagcactcaatccaaggagcaaatcgaggcgagcctaataagcaggcaagtagt

SEQ ID NO: 44736 - DNA, 1046 bp, Setaria italica
  misc_feature (972)..(972): n is a, c, g, or t
  Peptide Sequence Number=SeqID_110710
ctccctcatcatctgctgtctccaagctgtccaaatccccttccccttctaaaacttccccaccacatcactgtgagagcgaggacgaggagagaggaggagcgcatcgtggcaacaggcagcaagagtgattgtttcgaggagcgtggagtggagccatggggaagaagggcaagtggttcggcgcggtcaagaaggtgttcagtcctgaatccaaggagaagaaggaggagagacagaggaggaaatccgcagctagtaacccaactccactagatctgaccccatctacctccttggaagtcaatgtttcggtgccaccccctccggctcctccagttcttcaccagactgaggagattagggtccctgaagctgagcaggagcagcgcaaggacgtcaccgtagaggaggctcctgctgcccctgcacaggcgttggtgcagccacctggtgtgccaagtgaagagcttgctgcaatcaagattcagaccgccttccattgtaaccggcaaggagggcattgagagcgttgcggggacttgttcgattgaagtccctggttgagggtgattcagttaagcgtcaatctgcaagcactctgcgctgtatgcagactctatcacgggtgcagtcacaaatacgttctaggagagcaaagatgtctgaggagaaccaggccctccagcgccagctcctactcaaacaggaattggagaacttcagggtatgcaaaccatctcaaagcttcacagtaaaaatattcattgtgcttgtgttgttcaactaacatcagtagtatcgtagaccgccatatgtatccaggggagccttgccccccaagtcttgtactcaatatataccagctgatgcctcaatgcaatacaatcaaccaatctattgtacacaatctattcttcctacaagtattgttttctcctttgctctaagcctcgagataatttcaaaatnttattaagggcattaaacatattctgtttgtggataatgctatttcagatgggtgagaactgggatgacagcac

SEQ ID NO: 44737 - DNA, 1302 bp, Setaria italica
  Peptide Sequence Number=SeqID_110711
tggtctacttggtttgtaaggttaatttcttatttaagtcgttctaagtcttgcaagcactctgcgctgtatgcaaactctagcacgggtacaatcacagatacgttcaagaagactgaaaatgtccgaggaaaaccaggccctgcagcgccagctcctactgaaacaagaattggagaatttcaggatgggtgagcagtgggatgatagcactcaatccaaggagcagatcgaggcaagcctaataaacaagcaagaggctgcagtaagacgagagagggcgcttgcatatgcattttctcaccaatggaagagcacttcaaggtctgccaatccaatgtttgtagacccaaacaacttacagtgggctggagctggttggagcgttggatggcagcaaagccatgggagggccggagtgggactgacaaggagagcaacattgaccgtggatccgtgaaaagcatgaccttgaaccttggagagggtgagatcacaaaggccttcaaccgtcgggactccaaggcagacaagtcatcaccagctactccaaaactgatccgtccagcctccaggcagtccccttcgacaccatctcctagagtgacaccaatctttgcgaggaagaaatccgccacaccaaagaatggccctttgctggtggatgatgatgcaaggagtgtgttcagtgttcagtctgagcgaccaaggaggcacagtatagccacctcagctgcacgggacagtgatagtgttgcaggctctccatccatcccaagctacatggttcccacagaatctgcaagggcaaagtcccgcctccagggttcggcattgaccaatggtgcggagacaccagaaaaaaggaggctctgctggaccggtgaagaagaagttgtccttccaagcaggaatgtcatctccctcacctatgaggaggcattctggccctcccaaggtggagtgtggtgaatattgttgagccaacagaagcagaggccttggtaattaatggtggaaacaaatgcttcatatgacaaatggtgagaggggcaatggattctgcagatatatttcattcgtgagcaaaggttgaagttatagttatactggctgtatgaagagttggcatttgtatttttaaccaattatgacctcactgttttgatgtatgaaaagatccacggtttgtcagtttgattagatatgtagtggaaaaaaaggttccatttatcgtgtgcaaaactacatcggattgtccctcaaacacgctttctatttatgtgagccgtacatttgttc

SEQ ID NO: 44738 - DNA, 1860 bp, Setaria italica
  misc_feature (1841)..(1860): n is a, c, g, or t
  Peptide Sequence Number=SeqID_110712
cgaatcccgaccccatcaccgccggccccggccggctctgccccaacggtcctccacccgttggccccgctcctcatctcgcttcttgtgctgcgactctttcttgccgaagggtttggagttggagtccatgggaagaaggggaagtggtttagcgcggtcaagaaggtgttcagtcctgaatccaaggagaagaaggaggagagacagaggaggaaatccgcagctagtaacccaactccactagatctgaccccatctacctccttggaagtcaatgtttcggtgccaccccctccggctcctccagttcttcaccagactgaggagattagggtccctgaagctgagcaggagcagcgcaaggacgtcaccgtagaggaggctcctgctgcccctgcacaggcgttggtgcagccacctggtgtgccaagtgaagagcttgctgcaatcaagattcagaccgccttccgaggttacctggcaaggagggcattgagagcgttgcggggacttgttcgattgaagtccctggttgagggtgattcagttaagcgtcaatctgcaagcactctgcgctgtatgcagactctatcacgggtgcagtcacaaatacgttctaggagagcaaagatgtctgaggagaaccaggccctccagcgccagctcctactcaaacaggaattggagaacttcaggatgggtgagaactgggatgacagcactcaatccaaggagcaaatcgaggcgagcctaataagcaggcaagaggcagcaataagaagagaaagagcgcttgcatatgcattttcacatcagtggaagagcacttcaagatctgtcaacgcaatgtttgtagacccaaacaacttgcagtggggctggagctggttggagcgctggatggcagcaaaaccttgggagggccgcaatggggctgataaggagagcaacattgaccgtggatctgttaagagcatgagcttgaaccttggagagggtgagatcacaaaagctttcaaccgccgggacttaaagccagaaaagccgtcaccaccaactccaaaactgacccgtccagcctccaggcaatccccttcaacgccctccgctaaagtggcaccattacctgcaaggaggaaatctgccacgccaaagaatggactttcacaggtggacgacgatgcaagaagtgtgttcagtgtgcagtctgagcgaccaaggagacacagcattgccacctcgactgtgcgggatgatgagagcctcgcaagctctccgtcacttccaagctacatggttcccacagaatctgcaagggcgaagtcacgcctccaaggatcagcattgactaatggcgcagagacaccggagaaaggaggctctgctggaccggtcaagaagaggttgtcctttcaaggtggaacagcagctgcctcaccaatgcggcgacattctggtcctcccaaggtggagagtgcagtgaaggacattgttgccccaccacagccagaggccttggtgatcaatggtggaagcaagtgagtcatatgacaagtgccaggagggggggagtggattatgaagatatattttatccatgaagaaaggttacgtgatatcagttctacgaatgatttgaattgttttccagttacgaccacattgtttgctctataagattcacagtacctgccagttgattccatttgttgtttctgtaaaacaaatatcgattcatcactagaatccatgatgtttgtatgtaaacaggtcttctatttatgtgagccatatatttcttctaaagtaaaaaccaaaaaaaaactaacgaagactannnnnnnnnnnnnnnnnnnn

SEQ ID NO: 44739 - DNA, 2074 bp, Setaria italica
  misc_feature (2026)..(2026): n is a, c, g, or t
  Peptide Sequence Number=SeqID_110713
gtggcggcgacgagcccgcgctggagatcgagctcgacccgtacgtccaccgaacgggcgacgtctggcacgtcttgctggagagcgtggagggatacgccagttatggcttccgcaccgggctgttcgcattgttcggcatcgaccgcccgctgctcgatccgtatgcaaaggtaatcgggaacttcgtccctgacgacactgttaatgacgaggggctcgctgtgccatccgtaaggtgccttgcatccttggtgaatgcacctagctacaattggggcagggacaagcacccatctttgccgctggagaagctggtggtgtaccgggcaaatgtggctttgttcaccaaggacaagtcgagcgggttgccagagaatgttgccggtactttctctgggttggctgcaaaggtagaacacttcaagagtcttggcgtcaatgcggttttgctggagccagtgttcccgttccaccaggtgaagggaccatacttcccataccatttctttcaccaatgaacttgtatagcagtgaacgttctagtctctcagctatcaggtctatgaaggatatggtcaagacaatgcacagacatggaatagaggttctcttggaggtgttttcacgcatactgctgaaggaggagcagagtgtcagatgatatcgatccatggcatcgatggttcatcatactacattgctgatgggattgttggatgcaaggcaagcgtattgaattgcaatcatccagtgactcagaggctgattttggacagcctccgccattgggtgcttgatttccatgttgatgggttttgcttcatcaatgcccctttccttgtcagaggtccaggtggtgagggcctgtcacggcctccccttcttgaagccatagcatttgaccctgttctttcaaagactaagatcattgcagatccttggtctccacttgacatatctaatgtgcaatttccattccctcattggaaaagatgggctgagatgaacacaagattctctatggacgtgcgcaagtttctcaagggagaagcacttattagtgatcttgctacacgcttgtgtggcagcggggacctattttcctcaaggggcccagcattttcgtttaactatgtgtccaggaattctggacttactcttgttgatcttgtgagcttcagcagtgatgagcttggttctgagttcagctggaattgtggtgaagaaggaccatcagagagcaatgcagtcctccaaacgaggctaaggcagatacgcaatttcttgttcattctatttgtttcccttggtattcctgttctgaacatgggtgacgaatgcggacactctactgctggttcaacatcatacgaggatagagggcctctgaactggaaagccttgaagaccatttttgttaaggaagttactgggtttatttcatttctatctgcactaaggagtcgacgagcagacatttttcagagaagagaatttctaaaacttgaaaatatacattggtatgggagcaacctatctgagccccagtgggaggatccgactagcaactttctttgcatgcacataaatccagagctgggcgaaaatacgccagattcagtcagaggtgatttgtatatctgtttcaatgcaaacgaggaatcagtgagtgctactttaccagctcttgcagaaggatccatgtggctgcgcttggttgatacatcacttgcattcccaggtttcttttcaagcgagtctaaccctaaagtacaccaagtgccaggattttcctcttatcaagtaaaagcacatagttgtgttttgtttgaattgaagagggttctttcctagtttcttatgtcaagcatgaagcccgagtggtttcagtaataaatagaaactttgtggatacaactttgagaggccctcggttccaataagttgcaatttgcaaccttcttgtacatgagaacgttttcaataaaaatccctcaattttactccaaaaaaaaaaaaaaanaaaaaaaaaaaaactaaaagagaactagaccaaggacacacagggata

SEQ ID NO: 44740 - DNA, 544 bp, Setaria italica
  Peptide Sequence Number=SeqID_110714
ggcttccattgaagtgatttccagaaatatcaagcacttgaagactcaaattttggacgaggaaccaggaaatgataggccaccaaaagcatgttattttggatgtagagctcttgcagcatggacgaagtgagtaaatcagcaggaataggaccacgtaattgattggagctcaggtcaagtacagtaagtttggggtactgaacaacagcttcagggatggtgtcagataggccattatgtgaaagatttaggtagtttaggcgaaggaactgagagctcacatcaggaattgtcccagttaggttgttctgactgagatcaacatattccaaatcactggtccatttggcaattactgataaattccctctaaacttgttatttgatagatctaacacagtgcagctcccagcaagcaacggaagatccccaaaaagagcattggaggacaggttaagggttgcaaagttgttgatgtgatcatattgatatgccctgtcaggttatagcacttaggtccagctcgcttaggaccagagaa

SEQ ID NO: 44741 - DNA, 400 bp, Setaria italica
  Peptide Sequence Number=SeqID_110715
ggggcttccgaattcattctgaatacttctgtaatttgatggcagcgttggagctggcattcttctaggcaaattagactgtaatttaggtcagtaaggcatctgacaaaagcatcatctgtaatgaacattgagtttgtaacagagagaagatgccttaaaccatttggatatcgattcttcgtggatatctgcacacggcgctgctttggctgaagtttcatcatgggaaagatgctagctgcctcacattgacagacatctagataaggtgatcgcctctggatcttagtaaaaatctcaccttttatattctgtggcttcttggctctcacattgcaaggacaggcttggacattaaatgactgaagaaactgtcctttcttcactaacttgttag

SEQ ID NO: 44742 - DNA, 355 bp, Setaria italica
  Peptide Sequence Number=SeqID_110716
tttttgtttcttaaactcaggctagattttagaagttcagaaaacagataccagaaggttacaacttcagaagttcagagaacagagacaattacaagttcagaacaaacagtgtcttctcctcgctcagccgatcaatctccatcaccttcgatctttggccacccgttttcggcttgtgacttgacaaacgaggctaggagcttgatgtcatcttcagatagccgggggccgaaggtgcactgtcctcttgggggtgcatttctctccaaagcccggcatcctccctttcccgtagtatgtgatgttatacaattcctcctctgtaacgactccatttctctcgagatccttc

SEQ ID NO: 44743 - DNA, 311 bp, Setaria italica
  Peptide Sequence Number=SeqID_110717
atctgcttgagtttttgggtttttgtagggcaggaggatggcgttggcaaattaaattcgttcattgagctttttagtaccactagatctttgaacttagaattgatactgttttagagaatgtaagatgggagtgcaagatcttttgttggttgcatactggtattgcttatgtttaccattcagttaagatcaggcagttgaatctcgtgaaaatggtcctactgttctgtgaaaaaaagctcaaataccttagtcatctccagcttgtttcaccacatagaagctcatgaacatagctgctagtatat

SEQ ID NO: 44744 - DNA, 296 bp, Setaria italica
  Peptide Sequence Number=SeqID_110718
ctaggactttgccttgactttactggagaatatcttcagaatgcgcatatgatacattggagatgatccttggtgatatctttgcaaaaatacctgggagatgactttctttggtcaggccttgatctactatttcgcgcacaccagcttcctgattggacgtttccaggttggttcttcgtaacgggcatctagatatttcgtctcgaggtaacccaaacggttctgtaggcttggcggaagcaactttataccatcacaatttttaatacgaagaactctaagagatgagtatg

SEQ ID NO: 44745 - DNA, 675 bp, Setaria italica
  Peptide Sequence Number=SeqID_110719
ttttcaattccattgcagcactgccaggagaaaaagtcagttttgaaggaacaggttaacaataatgagaaaattcagtatttgatacacagaacatacacgggagaaagttcagcactttcagttcatatcaagcagcagcttggacagcttgtcgagcaacaacatgagtacgttggactgttggtctactctatggcaagtatcctctgcggtcaatcggtcatgtatgtggataaacaaatcataaaatggaagtgctgcctgtgtttcgcttgtgctggaggctgaagcaaacacgaatgcaaacacgtcttagttcaaaacaaaaaataaaaagactggacgtatgctaaattcttctgtgcttgcagtatgggacttcgtttctgctcaaaataaaggtcttcggtttgaagaaggaagcacaactggagcacaccgctctgtgtgctaaattcttcagcttgcaatctaggacttgttttctgtttaaaatctagaactttgccttgactttactggagaatatcttcagaatgcgcatatgatacattctaaacaagagtcgcagtaatccatcttttgcaggtctggtaggatcctgactgataactttcttggtcaggccttgatatactatttcgagcacaccagcttcctgattgaacgttt

SEQ ID NO: 44746 - DNA, 673 bp, Setaria italica
  Peptide Sequence Number=SeqID_110720
aacaataatgagaaaattcagtatttgatacacagaacatacacgggagaaagttcagcactttcagttcatatcaagcagcagcttggacagcttgtcgagcaacaacatgagtacgttggactgttggtctactctatggcaagtatcctctgcggtcaatcggtcatgtatgtggataaacaaatcataaaatcaaagtgctgcctgtgtttcgcttgtgctggaggctgaagcagacacgaatgcaaacacatcatagttcaaaagaaaaaataaggataaacgactggagcccgcagctctgtatgctaaattcttctgcttgcagtctgggacttcgtttctgctcaaaataaaagtcttcggtttgaagaaggataaaagactggagcacgcagctctgtgtgctaaattcttcagcttgcaatctaggatttgtaaacaagagtcacaataatccatcttttgcagatctggcacgatccttggtgatatctttgcaaaaatacctcggagataactttctttggtcaggccttgatctactatttcgagcacaccagcttcctgattgaacgtttccaggttggttcttagtcatctccagcttgtttcaccacatagaagctcatgaacatagctgctagtatatctgatactgatgatatcc

SEQ ID NO: 44747 - DNA, 738 bp, Setaria italica
  Peptide Sequence Number=SeqID_110721
gcataaacttctggatccagctataagtgtttagataccccgaatgtgcaatatatgaaagttgatggatttaagtgacacaagtgcacataaatataggtattagtggtgcattgtactcaatataatgtatatatcaacaacgctcgttaaatttttatcactgaatcctaccacatcttgtaatagctaacagaatgtttaagtacagagttgcattttaggcaacaacaattgagctcctgatcatttgttaaaagaacaagaaactggagattaccttcgtaacgggcatctagatctttcttctcaaggtaacccaaacggctctgtaggtttggcggaagtaactttataccatcacaattttcaatctgaagaactctaagagatgagtatgcttgaggcccatccggtaaggataccagtctttcgcatccataaagcgtgagtttttccagcaaccggaggtcacctgataaggattgaagcttgccgcagttagaaatgtgcaaggtcttgatagacggaggaagattggcaacctctgacaaaccatcgcaggtccaaataattagagattctaggcatggaaggaaaggatggttggctgcagatgacagcttcagtacagctgtagacgttgtggcctcactgctgctggaccctggaattaatgatgacgtattcggccttacaacaccttctccactcaccaatctcgtatcctcctggtcg

SEQ ID NO: 44748 - DNA, 273 bp, Setaria italica
  Peptide Sequence Number=SeqID_110722
tgagctctgacagtaaagatatcaaacagaaagaggcctcgaactatgttgctgaaagattttggtccaacagaccaacacaccacgtgagaactccaatgagtgctgccatggaaagcgggaaatgccagtttccaagatccaacgtcgtttgagaaaagaaaaaatggtgatgagtagtttctctctgtctcctttcatcaaaagggtatgcatctaagcatgtcaatcgaatgtttagatactaattatgagtatgaaatataggttaat

SEQ ID NO: 44749 - DNA, 335 bp, Setaria italica
  Peptide Sequence Number=SeqID_110723
tattgctccatcatcaaagatgcagatgcatccatcagtcttaaagcagtctcatcatttggcttgtcaaatgaatgaatcgttgagaattgatcaaattggcagccattgatgcgaacgacaatccaattacaaggtggaagcatgcggtcattgccaaacttcttcacgaactcatgcataaattttccttctcgaagaatgtgttgatgattttcccaaaactcaggccctatgatatcgatatgtgctactgtaactttcaatcgtggtctttttatgggattcccatagtcatcaatcttcactgttgtttctaccttctctcggtaaac

SEQ ID NO: 44750 - DNA, 355 bp, Setaria italica
  Peptide Sequence Number=SeqID_110724
cgggccggagagggtctgcgcagcaccaaccagatcagtgagctttaatgttcaaaagagatcgatatggtttatttattaacaaataaaggaaaggaagtatagtagccagctgagctctgatgtataagccaaagaacagctcagtggatgacttcagagataagtgataagtgatgagtcacaacaaacagtatcccggggtcctagcgccgggaatcttaccctagccttgctcctgagatccatgccagatccaccgatcctgtaaccgaaaaggagccatgcattaatatagggtcaaatcgctaacaaactgaccaactgctcgccgtgctcctcggatcagagcaat

SEQ ID NO: 44751 - DNA, 526 bp, Setaria italica
  Peptide Sequence Number=SeqID_110725
ttccaaaatcaagcagtggacctgtataggcagcttcagcaaatggatgaaagagaacagcctcttggatgagatcttgaggagcctccactaattcttttgaagtaacagtggacaacttagatttctgcagtagtgaaagacctgctacaagctcaagatgaccagttccagaagcgcgataagccataagatcacccaataactgtgccacgacacatatgtcatcatcttccaacacactcgaatacttgacccgccctagacagcacaaaacttcacggattccatgatcaaacacctcccggtagtgagccctccacgcaatatcatgtgatgcataaaatgatctccaccttagtacatcagaaccagtgacacactgaactacaattgccacccacatactgacaagaaaaactattaacaagaatgcgcttccactccttgttgttctgaatttttcctgtaaaagcactgttttaaagacccttcggctaagacatcctttatgatggcacacatc

SEQ ID NO: 44752 - DNA, 2117 bp, Setaria italica
  Peptide Sequence Number=SeqID_110726
atgccattactcaacaggaatggcagcacgcgatggcagaggagcttgctgctcttgagcgcactatcacatgggatcttgtccctcttccctcacatgttcgtcctatcacatggtatgagaatccaatcttacgatgaccagttacttaatttagctgctgacttagctcagaggttgttgcctgcatttgacactcctacaggtattccatttggatctgtcaatttaaagtatggagttgatgaaaatgaaagcaagataacatcaactgctggtggtggtactttgacactggaatttggcatattgagtcgcttaactaataatactgtttttgagcgagttacaaaaaattcagtgcgtggaatatgggcacgcagaacaaaactcaaccttgttggtgcccatataaatgtctttactggtgaatggacacagaaggatgctggaattggcacaagcattgattctttctatgaataccttctaaaggcatatttattgtttggggacgaagagtacctgtatatatttcaggaggcttacaaggctgccatgcactatctccatcatgatccttggtatgtggaggtaaatatgaattctggtgctactgtttggccactattcaatagcctgcaggctttctggccaggacttcaggttttagctggagatgttgatcctgctattcgaacgcacgctgccttcttcagtgtctggaaaaagtatggtttcacccctgaaggttttaatcttgctacatccactgtccagaatggacaaaggagctatccgctacggccagagttgattgaaagcacatattggttgttcaaggctaccagagattatagataccttgatgttggaagggacatattagcaagccttcaatatggtgctagatgcccttgtggctactgccacatatcagatgtggaaacacacaagcaggatgaccacatggagagttttttccttgcagaaacggtcaaatatctctggcttctctttgatttagccgctggccctgataacattgttgaaaatggaccatataagtacatatttagtacggaaggtcatttactacctgttactcctgagatagtcttggtagatgagcattgttcttattttggagcattctgtaatggtggtgcagaccgtggatatggtataagtgctagttctatgaagcataaaaaagcaaactatactcatttagatgatatccaaaccccttccagtcactattcagcatccaacatgtttgcaacaagaggttacatcaagggagtttgtccaggattgactcatgcacagaaacttgggatatcatactctgatgaagagggtaacgtcatagagcagacttctgaaggtcatgagcatcacgatgaatctgcaatagaatctagcgtccgaacccaatcaagtaatgttatacttatatctcacccagttgcaagccaacaggatcaggctttggagagcagctctggaaatggagatcatgctgatattgtggtaactgctgattctgattccataagccatgataataatgatggctcactcggagcaaacactgaagaacttactgaggacaccgagcgcacctccaaacattcagaagatgaagatatcgctcagaatttgaatttgaaggaagatatcagctgacctttagttcatatagggaccaatttttgtcacttatctgcagaatcttcaggatcaaagctcgctcaatgcagaacaagttattgagcaagcaaggttagagcctggtggatgctgtcagtatgtggcccattaactagttgagatgagctgataaggtcatggggccatggttgcgtcgaggacagtgacctacaacctccggaattgatatttactttcagatgtgttctttctatagtatgatattatagggtgggaactcaccaatttgttctttctgtatttgttgcataggttcttttgatcaatagcaaatgtaaagttttgtacaccagaactatatgaagagacagtggatacatgatgagctttattcaatcacaaattattagggcaaaaaaccacttaaaaaaaaaaaaaaa

SEQ ID NO: 44753 - DNA, 460 bp, Setaria italica
  Peptide Sequence Number=SeqID_110727
ccgagaggctctcgatccattttatgttcatgggagagtagcggcagttgtcgagggctgatatagctcattatcttggtattccagaggctgatgtgtcacttcacaggttgtactatccaggcattgagcctcctcatcatgctcatgacctcgttttcccgacagatgagtagattactcccttgtttgttcagcctttccttccaggcaccccaaggactcctgaccgcttgactcctgaggcgtatgtggttcacaatgctctcaagaggtctctactttacaaagttgggaatgccaagtcgatcaccagactgcagcagtggcttctccacatcatgacacactaaccgtttgacatcattgatcttatttgtgtgaggtggaggatgcttttatggatgggatgggcatgaaccatcagcagccatatgcacattggattagttggttattg

SEQ ID NO: 44754 - DNA, 381 bp, Setaria italica
  Peptide Sequence Number=SeqID_110728
tcatgtgggtggtataaacttacatttagtaaatgctaataaaacttgaccaaccaaataaaatgctgaaatgctattaaaccttagcctatccttgattggccttacactacacatttcccacacttgttgagcccttgctaaaactactgctcagaacaaatcaacgatgtggaggttctacaagattgggaggagtaataagcgtacatgttctcggtcaactgcctgtggagtcgccgtgcttgttgaagatccgctgtgataataataaattttttctattcggtttaaaagactatcggtcatgtaataataatatactctctttacattatgacattgattgtgatattaacaaaaaaaaaaaccaaaaaaaac

SEQ ID NO: 44755 - DNA, 382 bp, Setaria italica
  Peptide Sequence Number=SeqID_110729
caagtcctgtggaggacagattcagggccgataccctgtgcttatgcctgtgactgcaaatgatgccgatccactggcagaaatcagtgcttatttcccatgaggctagtgaatctgactgcaggcttaggcctgccttcagtgctagcaacgcatcctggtcagtctcatttctgctcagcaatgcttgagtgcatgaagttggtgccaacaggagcagatggggcaagataagcaattttagaactggaaacattttgccctctggcactgaagaacattgaacaaaactaaatttagtgactgggtatgttccactcgaaataataagaatgctagtaaaatatatcattgacattaatcatcaatacaaagtttaata

SEQ ID NO: 44756 - DNA, 313 bp, Setaria italica
  Peptide Sequence Number=SeqID_110730
agtgaatcttgacatgtttaagttgggtctcagtaactttgcaacaaactttgccgcctccagcagaaaccaagacgagaagcctcaaggagaaagcaaagcgccttcaaaagaactttgaaacattatacttgaatttcttgtaatcaattgcccttattcatgaataatattttgagaaaggatgacctcggaaactagctactgaactgatgcagtgattgtctgatttttatttgaagcaaagcaccgtgtgtctttattacgtactcaattgatgtatttgtgctactttgttgtattctaaaaaaaa

SEQ ID NO: 44757 - DNA, 793 bp, Setaria italica
  Peptide Sequence Number=SeqID_110731
ccgtgccgcaagtccagcctccagctccaggcccgccggcgccgtctcccatagccgctgctcccgccggcgagtgaccgccgcctcagcaaggagaggagagcggcgatgggcgacgagcgggtcaaggcggaggcgctgcagatcctgggcctcttccaggtgctcccccgcctcgtcgtcttcgacctcgactacaccctctggccattctactgcgagtgccggtcgaagagggattcgccgagcctcttccggcatgccaggggcatcatgtacgccctcaaggagaaggggatcgacatggcgattgcgtctcgctcgcccaccccggacatagccaaggtgttcatcgacaagttggagctccagtccatgttcgtcgcccaagaaatattctccagttggactcacaagaccgagcatttccaaaagatccagaggaaaactgggattccctacaagtccatgcttttctttgatgatgaggacaggaatattgaaacggtatcaaaaatgggagtgacaagtgttctagtagagaacggagtgaatcttgacatgtttaagttgggtctcagtaactttgcaacaaactttgccgcctccagcagaaaccaagacgagaagcctcaaggagaaagcaaagccttcaaaaaagaactttgaaacattatacttgaatttcttgtaatcaattgcccttattcataattgatattttgagaaaggatgaagaaaaaggaaataagaaacctaacggaaaaactaaagtaacttaaacttaagtaaa

SEQ ID NO: 44758 - DNA, 441 bp, Setaria italica
  Peptide Sequence Number=SeqID_110732
gggtgctcttgaatttgacaccaagctctgcaagacaaacgtctcatcaaagtcatcaatgcgaggtcctggagatgtgcaaggctctttcatcgcagaagctatcattgagcatgttgcgtcggcactctcagtagacactaacaccatcaggaggaagaaccttcatgatttcgaaagccttgcagtgttctatgaagaaagcgcaggtgaaccctctacatacagcctggtgtccatgtttgataagctggccttgtccccagactaccagcacagagcagaaatgattgagctcttcaacaacagcaacaagtggaagaaacgagggatttgttgtgttccatgcacgtatgaggtgagtcttcgaccaactccaggcaaggtgtccatcatgactgatggttccattgcagtcgaggttgaggaattgagataggt

SEQ ID NO: 44759 - DNA, 284 bp, Setaria italica
  Peptide Sequence Number=SeqID_110733
ggccacgccgcgcgcttggcttggtggctggctggctttggaactcccccgggttggccggccatgtcctccctcgctgcaccgccggcggccccgccaccggagagggtgcgcctgctcgtagcggcgcctccctcgcgtgcccgtcctccgggtcgggggttgcattgcgcggtgcggggaacggcagggggaggacccggtgccgggtgcggccggcggcagctggtgctgcagcggtgctccccggcggcgagtccagggtggccggcgacggcggcgtt

SEQ ID NO: 44760 - DNA, 473 bp, Setaria italica
  misc_feature (441)..(473): n is a, c, g, or t
  Peptide Sequence Number=SeqID_110734
tctattgtttattgtaatcctagtattctagttcagtggcctatgatattttctttggaaaaggatgaaacaaacatgctgctgtactcaagttatggttttgtccaagatatcttcattattaaacagtcatatctttcctttcagcactccaggggggaggaggtgatgaattaaaagttcagatatgtacatgactaccttccagcgtcattgatgaatgacaatctttaatatagaagcaattttgagtatggacgaacaaatcgtttgcaagaacatgtcacttagagtttgttctgctctccccttttgttaatttggctttgctgtgcaaaacatgatatggtggcctataatttattacctaaatgactaatagaagtgtacatcgggtgacagtaaaaaatatatgtacggaatatgtcaaacaaatttttnnnnnnnnnnnnnnnnnnnnnnnnnnnnnnnnn

SEQ ID NO: 44761 - DNA, 729 bp, Setaria italica
  Peptide Sequence Number=SeqID_110735
atggaggccggcttggcggcgtagagcgaagcgacggtgaagacggcggcggcggtggagaggagggagaaggtgaagaggacgatgaggtagaggaactggtaggcgaagaggcggagccactgcgcgggtcggcgccggagctggcgcgctggatgcggaggaggacggggtgggtgaagagggagtgcgccagcacggcgaaggagagcgggaagacgaggcaggcggtgaggagcgcaaaggtgcgcggcgccgcgcgcgggatcgacgccgagacgcggaccagctccgccgcccccagcgccgccagatcgcccgacgccagctccatcgctccggcagccgcggctagcgtcggccggccccggcttatttggtcgggagatctctttggtcgggggatgtatgctttgcggggtccggccgacggctgggtttgggggaatttggcggagtttgggcggtttctcaggcgcgagagacggtgtgcggtggtgtgccgccgctggcggtggaggaaagcacggccggtggaaatggaattggggaaaggggttggaggatttggttggggatccgccgtggaatggccgtagcagaccgcgtgtcgagtgtgtccagccggcgggcgggcggggcggggcggcgcggtgcggtgctcggatcgggccgggagcgcgtgcgtcacgcggatcgtcgtcggcgtcgctatgcggcttcaagagg

SEQ ID NO: 44762 - DNA, 780 bp, Setaria italica
  Peptide Sequence Number=SeqID_110736
ggtggggggtggggtgaagaggggcttggagggggggagggagtgggagagggagatgggcttggaggagcggcggcggagggagaaggagaggggctggttcctcggcttcgtggagcggttcctggacgcggacgtggcggcggccgcgccatgggaccgggagcgcgcggccaggatgctcccgcagctgaagcgcgtcaacgactggctcggcgagatcgggaagcgcagcgaggctcctccaccgacgctgccggacgcggacggtgaggcggcagccgcaagcaccgcccccgtcgccgcgaacggcggcctaggcgtgcccgaggagacgatcgagcggctaaggaagaagatctacgagtatctcctcaccaacgtcgactccgccgccgcaatgctcggcggcggcggcgggccgaccgcgccgacaaacgggagaagggctgacacgtggatggccggtagcagtgtgaaatttgattgggccaaaaaatgggcttggctagctaatctaggctttctcttgtttctttactgggcttttgtgattttctcttgtttccgttctttcttcgagggttttattacaggaaaaagaaaaggtgatgaaaaattgacctgtatttatcactgaggacgactgggtggctccgaaataattatattgctcgattggatgggtttcttctaagtttttcgggctggaaagtgattctttgcctgaataatatctgccccacctcatccatgttcttttaacaaaaaaaaaaaaaa

SEQ ID NO: 44763 - DNA, 380 bp, Setaria italica
  misc_feature (364)..(364): n is a, c, g, or t
  Peptide Sequence Number=SeqID_110737
ctgcaggtgttgataattcaaacaacaagcacagctacacagcaagataaaggatttgatccaacaggatgggagcttgctcttgttgccactccaagcaccaatacgaatccactggctatggagagtagtttggtaggttttttgaatctttcattaaggatatctaccttttggtggttgccgcaatttcccaagtcaagatttgggaactgctatgctgctacctactgctttcttgcaagtttgtcaagctcctatacttctactgttatggtcaactcagttgctgtctgaaaagtgaaaaccagtaaggtggtttcctgctgctaaaatctaggagcaacggctagctgattgctanttatcaaagtgcattt

SEQ ID NO: 44764 - DNA, 1742 bp, Setaria italica
  Peptide Sequence Number=SeqID_110738
cgcctactgcatccacgcgcttgcccggcgactcgccaagacgcggaattggatcgttgccctgaagacacttgtggtgatccataggcttctccgcgaaggtgatcctacattcagagaagagtttcttgcgtttacacaaagagtgcggattttgcagctttcaaacttcaaggatgactccagccctattgcttgggattattcttcatgggttcgcacatatggtttatttttggaggaaaaactagaatgcttcagggtcttgaagtatgacattgaagctgagcgttcgtcaaaacaaggtcaaggacctgaaaagggtcacagtagaactagagaattaaattctcaggacttgctggagcaattgcctgcgctgcagcaattgttatatcgacttattggatgccggccagaaggagccgcaaataacaattatctggtgcaatatgctctagctctggttcttaaagaaagcttcaaaatttactgtgcgataaatgatggaattatcaaccttgttgacaagtttttcgagatgccaaagcatgaagcactcaaagctcttgacatttacaggagggctggtcagcaggctggaagcctatctgacttctatgaaagttgccggggcttagagctcgcaagaaatttccagtttcccactttgagggagccaccacaaacattcctatcaaccatggaggagtatgtgaaggaggctccacgaatgctaccagttacagagccactggaacttcctgagcgacttcttctgacatacaaaccggaagaagcagaagcagctcctgagcctgttcctattgtagaggaaaaaccacaaattgttgaagaacctgctcaagtaccatctacttctgaaatagcctcacctcctcccaagcctgagatcgcagatactggtgatttactggggttaagtgatccaaaccctaatgtgtcggtaatagaggagagcaacgctttggccttggctattatgccaacaggtgttgataattcaacaacaagcacagctacacagcaagataaaggatttgatccaacaggatgggagcttgctcttgttgccactccaagcaccaatacgaatccactggctatggagagtagtttgggtggtggatttgacaagctcacattggacagcctatatgatgacggaacttacaggcagatgcaacaacagcagctgtatggctcagctcctcccaaccctttcatggcaagcgatccgtttgcaatgtcgaaccaagtagcttccccaccgtcagttcaaatggctgccatggctcagcagccccagcccttgatgattgaagcaaatcctttcggaccgccactacagccgcagcacgcgggcatggctcctgcagcaaaccccttccttgacgcggggttcggcgcgttcccggcggcgaatggaatgcacccacaggccaaccccttcggagcggcgcagcttctctaggcatacaccacttgtagagatccatacaagatgagcaatctgcgtgccgggaagtgcagttttccaccaatcaggccaatcaccacgtctgctttgtgtcgccatccctacaggctttgtccgcttcgccattcctgtatagctcctcgttttgctgtgcattggttttcaccatctaggggtggccattggaccctcctccctgtaaagaaattgttaagtttgttaccttagtaattagttaaaa

SEQ ID NO: 44765 - DNA, 493 bp, Setaria italica
  Peptide Sequence Number=SeqID_110739
ataattttactatgtcatatccatcttcctaattgtggtgtcatcaattcagcaagctcttataggtctagtctgaattagttcaccatatggtggtacttgtttagggcatctgtgagatttgttgtagctagtgtgacatgcatgtagcatgtatagcctgttgcattgagcagcacctttcactagtccaatgtctaataaagttaaaggcaaaccatgggacgatcaagtgccttatgatgatatgaattatgtaatggtaatattgagatctcatgaacacaaatacacctaaaatatatgctaaataaatcatatgatctagaatcatgataacttccaagtagcatgggtgctaattacgtagattaaagccatttgttcttgtttggtgttcttattagttcttacatatgttcttgtcatgtattaggacatcttttttctgcctagttatctacagtgatttacatcagcatttttgtcaaaa

SEQ ID NO: 44766 - DNA, 242 bp, Setaria italica
  Peptide Sequence Number=SeqID_110740
gtaatttctatgatgaatgactagtttaacacatgtgaaatagctatgttcttcatattatggcagaagagttcatattaattggacattaacatactataatgagctttaggttattgaatttccttgatatttgagtctacttgtcaaagttggtgatttatgctacctactcatagcagctgctagaggattgagcaaaccctaggcatcctttgttgggtcatcttagactaaagatg

SEQ ID NO: 44767 - DNA, 245 bp, Setaria italica
  Peptide Sequence Number=SeqID_110741
cgccgcgctctgcgacgcgccgcggctgcacctgcgttgcaccaggctcctcgccaaggagttcgccgccgtcgagcgcaccgaggcctggcgattcctccaggagaacgacccatggcaggagctccaactcctgcagcgcctgcacgaggccgacatgggaatggcggacatcgggacatggccggacctccatgtcgcgttcgtgggcgtacgacgtgacaccgcaagagagtgtttttctt

SEQ ID NO: 44768 - DNA, 673 bp, Setaria italica
  Peptide Sequence Number=SeqID_110742
ttttcctcgcaacaaatcttcgtcctgaatctactccagctcagtgcgactgactgacgcttggtttccggtgcgtgcagcggcggcgcaagtggcggcggaagcgcgcggagcagcgcgtgtacgtggagctgagcgaggcgatggactgcctcgaccacatctgcacggaggggtgcacggaggtcgggccggcggggcgggcgccggcgccgtcgccgtgcgcgcgctacgccacctgccggggcctgcagctcctcatccgccacttctcccagtgccaccgcaagagctgcgcccggtgccagcgcatgtggcagctgctccgcctccactccgcgctctgcgaccgccccgaccgctgcaacaccccgctctgcacgtaagcgccagagctcactcctcaccagtttgcttcgttacagcctaagcttacacctgacatgacattgttgtgtgtgttgtgccatgcaggaggttcaagcagaaggagcaggagaaggcggccgtgaaggccggcgatgatggcgacaaatgggggctcctggtgaagaaggtgaaggctgccagggtcttctcttccctggccaacaggaagcagatgagctccacctcccagtgctgagcaaatgcagtatcagccggggatggttagggttagttattaggttag

SEQ ID NO: 44769 - DNA, 1720 bp, Setaria italica
  Peptide Sequence Number=SeqID_110743
gttcctcgcagcagacgcagcagagcacgcagcgacgtctcccccgtcgccgtccgtccccaacccaaacatctcgcgcgctcctcttgccaccagatatttttttttattgttcccctgcgagctggttcctcccatttcctcgccgtcgcgtcgtgattcttatccgccgccggtgaaccggaggagaagatgtgcgaggcgccacggctccgctgcgacgccggcgccggcgaagcggtcgccgccgctgatgtcgacgtcgtgaccaccagaggccgcaggaggatcccggcgcattcctctgtcctggccacggcgtcgccggtgctggggagcatcctggagcggcgcctgcggaaggacagggagagcggcaagaaggccgggcggtccgtcgtccggatccgcggcgtcaccgacgacgccgcggccgcgttcgtccgcctcctctacgccggcaggtgcggtgatggcgaggaggaggacatggagcagcacgcggtgcaggtgctggtgctggcgcacgcgtaccaggtgccgtggctgaagcgggcgtgcgagggcgccatcggggcgcgcctcaccgcggactcggtggtggacgtgctgcagctcgccgcgctctgcgacgcgccgcggctgcacctgcgttgcaccaggctcctcgccaaggagttcgccgccgtcgagcgcaccgaggcctggcgattcctccaggagaacgacccatggcaggagctccaactcctgcagcgcctgcacgaggccgacatgcggcggcgcaagtggcggcggaagcgcgcggagcagcgcgtgtacgtggagctgagcgaggcgatggactgcctcgaccacatctgcacggaggggtgcacggaggtcgggccggcggggcggggcgccggcgccgtcgccgtgcgcgcgctacgccacctgccggggcctgcagctcctcatccgccacttctcccagtgccaccgcaagagctgcgcccggtgccagcgcatgtggcagctgctccgcctccactccgcgctctgcgaccgccccgaccgctgcaacaccccgctctgcacgaggttcaagcagaaggagcaggagaaggcggccgtgaaggccggcgatgatggcgacaaatgggggctcctggtgaagaaggtgaaggctgccagggtcttctcttccctggccaacaggaagcagatgagctccacctcccagtgctgagcaaatgcagtatcagccggggatggttagggttagttattaggttagtgagtgtgatgagattaagtgagcagttttttttgggtctgttttgatatgccaggtctctgttgagctatgtgctgtacaattgtacatgcctactatgttactgtccatgcctttgttacattattacaccctgtgatatagcatagtagtaagttggtagagttctttagcaaggtggggaatcaatgagcccgaaatcgttgtaaaaattgcatgtattttagcagggaaatatgagataaataaacatgtttatgatatactaaaaaaaaaatggcagactgatgaaacctgcatttgtttgactccaatcatgatttcatcatccaatttccttttgataaagatgtgatcaactaaaatctcattacgcataagaaaaactcaggctttcatgagtctttatttgcacttagttggagtcatgatgaacaaaat

SEQ ID NO: 44770 - DNA, 421 bp, Setaria italica
  Peptide Sequence Number=SeqID_110744
cctacaacccgaaggatccgccctcggcgtacagcaacgcaactgtccacagccgcctcgatggatacacatcgatggcaaggaaggtccatggcccaaagtaccatccgagtgcccatgaccttgatggagaagtggtcatgagggcgggaggaggcaagaagcatggccggttctagattggtgatgacacaatcgatacggccagtactcccactctctcccagctttgagcatggagcatgagttccagcccagcgatatgcccatggctgaactctacacagttccagatggaggcactctaggcccagctggaagaggaaaggaggctacgagaggagctagcggcgacgatggaggcagagcggtagaggatggatgctgagcgtctccagatgtttgaaatggtgcgggagtg

SEQ ID NO: 44771 - DNA, 749 bp, Setaria italica
  Peptide Sequence Number=SeqID_110745
ttggatctaagcagttcaataataaataagaacaaggcctacttgaaatagagctaaaccctacaccgatcatcacaggatatgcctccgaactgatcttccacctttcatacaccagcttgcatgcaccagcccatattaaaattactgaaaggaaaataactctagaagaattcgaactctagaaagttatctgtgcccttctgattggcagctgaagcagcagccttatcattagctgggaccggcttcggtgggcgatcgagctcaacaggctttggtacatctggagggctcgcgcagcgtatcagcgcccagttgacaccctcaaagaacgggtgctgcttaatctcagtagtccctcgtttgtagccaagacgatgctgcggatccttgaccagcaatcctcttatcaagtccctagctgagaaactcacaattggtgactctgggaaccgcaggggctgaccaacaacgttgaagagtgtagcccggtttcctgaccccttgaaaggggtcttgccaaatagaagttcatacaggaatataccaaaggtccaccagtccacagcactgccatgaccttctcccttgattatttctggcgccaggtactcatgggtgccaacaaaagacatggagcgagcatccgtcggctccgcgatgagctcaggcagtgggctaacttggttcacaatctcaggcttggcttcggcttcttctccttctttgacttggacttggaggag

SEQ ID NO: 44772 - DNA, 627 bp, Setaria italica
  Peptide Sequence Number=SeqID_110746
taggtaagtctatgaaagaaaaagacccaaattaatcaggagagtttatcaatccaccatccaccaagatgtcgcagctgatctctgttagccgcagcgtggctgcgacactcctcctgctcctttctgcagctgccgcggcagaagctcaggctggcgcggcctgccacaacgacattgtcgccctgcggaccacctgctacgagtacgtccaggagggtggccgggcggtgccgccgtcgtccaactgctgcgccaccttgatgggcctcaccaacgtcccctgcgtctgcgactatctcggttccgacctcgacattgacctggacaaagtgttctacatcggcaggcactgcggagtcgccatccccagggcctgcggaggtcagatgtaaagcaggtctgagacagagaaccagctgaatggagaagttggctaacatacgccaaggcagcacgcaatgctcggattaatgaataaagttggaaaacttttagttcgatgatgttcagatataagaaatgtattggtgttcacctatttaaagctgtagttagctttattcacataatgtggttctgtatcaatgccagattcaatctatggctactgagatgtaaaaaaaa

SEQ ID NO: 44773 - DNA, 275 bp, Setaria italica
  Peptide Sequence Number=SeqID_110747
taacacatataaaattctacattctacatgcatgtataaattgaaaactctccattcattctcactctaaaaagtacaaatttctctagctactaagcagaaaatatagaatactaatcatgagaggagggaaaagttcctaacctttagaacagttggaagaataaaaatccccccaaatcatgggaaatattggcagcaccctcccctaggttgccaatgggagtgaagaagcttgagctcttggtcaaactgttgagctcaggctcggggaa

SEQ ID NO: 44774 - DNA, 913 bp, Setaria italica
  Peptide Sequence Number=SeqID_110748
agaagtagcactagcaacaaagaatacgcgacaagtccgagaagtgagtgagatggctcgtcgtcttcgccgcccgtctcccgtccccgtcacccgcctgctcctcctcgccggcctcgccgccatcgccgtggccgtcgccatcgccgtcgccgccccagcagcgaaggatccagaggatgggcagatccggatcagcgtccagtaccctaccgaggaggagtcgcagtggctcgaccgctgggcggagaagtaccgctccaaggagcctggctccggcttctcggtccagccggccaccgacgaggagtcggcgtacctgaaccgcatcttctccggcagcaagaactccggctacgagggccgcatcgaattcgacgacaacgaccgtcctaggctcgtcgtggacaaattccactccggagctcgctcgtcggagcccagcgatgatctgaagaacaaggagggggagtctcacgccgagcacgacgtcatggagctctaggaacatcatccagacctaattgtgaggccactgactgcctggtggatcggcggaataatggaggattaatttttcaaaaaaagaataatggaggattggcggatgaggaaaccgagttcctgtgtcacgtaggagtaacgtgttaacatgttctggtagctttgttgttgtggtgtggcagccagtagggtttgccttgagaccgagagattagtgaagtgatacgtctggtaacttattggatgggtcattctgttgtgtggtaatgtcgaccttgagacgaactagtcttatttcgcgtctagaaaaccctcctgcaaattcctgctacgccatcccgtttttttgtcaaaagaatttcacaaattgctaaggtaaaaaaaaaaacaaaaaaactaaaaaaaaacg

SEQ ID NO: 44775 - DNA, 943 bp, Setaria italica
  Peptide Sequence Number=SeqID_110749
ccggcgccgaccccttcttcctccgcttcgaggccatgcgccgctccgcgccgctgctgggaccgctcctcgccaccgccggcgcgtccgcggtcgtcacggacatcgtgctggcctccgtcgtcctgcctgtcgctagggagtgcggcgtcccgtgctacgtcctgttcactgcctccgccgcgatgctcgccttctgcgcccacttccccggctacctggacgccaactccgccgccggccgcgcgggcgtcgtcggggacgtcgacattcccggcgtgtaccggatccccaagtcctccgtaccgcaggcactgcacgacccgaagcacctcttcacccagcagttcgtggcgaacggacgcggcctcgtcgacgccgacggcatccttgtcaacacgttcgacgccttggagccggaggccgtcacggccctgcggaaaggcaaggttgtctccagcttcccgctcgtgttcgccgtggggccgcttctcccggtgatgtttccggcgaaagatcctgccggttacatgcagtggctggacgcgcagcctgcgcggtcggtggtgtacgtgagcttcggcagccgcacggccatctcgccggaccagctcctggagctcgcagcggggctcgaggccagcggccaccggttcctgtgggtggtgaagagcacagtcgtggacagggacgacgccggcgagctcggcgacctgctcggccacgggttcctggagcgggtgcgggggcgcgccctcgtgaccaaggggtgggtggagcaggaggagatcctgcagcacgggtccgtcggcctgttcgtcagccactgcgggtggaactcagtgacggaggcggcggcgttcggcgtgccggtgctggcgtggccgcggttcggcgaccagcgcatcaacgccgccgtggtgacgcgcggcgggctgggcgc

SEQ ID NO: 44776 - DNA, 1187 bp, Setaria italica
  misc_feature (1176)..(1187): n is a, c, g, or t
  Peptide Sequence Number=SeqID_110750
gctccccaccttccttccctcggcgtcgtcctcgccaccgccgccgctcccgaccccgatctcctccaccaaggacgcgctgtcgctcctcaccaccctccagacgcagctcttcgaggccgtcgccgagctgcaagagactctcgacctgcaggacgcccgagtgcggcttgcccgcgaggcgcgtgccaaggacgctgcgctgctggccttcgcgaagaagctgcacgaggcccaccacgtgcttgaccgcctcgtcgacgactacgccgactaccgccgcgaccccaagcgcccgcgtggtgccgctgcggctgacgaccccgagccggtgtcggacggcgacttcggcgcgtccctgcactccaggatcaagctggaggacatactaatctacgcgcaccacataagttacacgacctttgctccgccggagcatggcgctgggctgcctctccgtggggcgttgccacctgcaccacaggaaagtgagatgcggtcgtcgaagttgtatcagtttgctgatatggatgtaggggtgcccaagaagccattggaagcgaaggaggggatcacagtggaggtggaggccatgccgctgtatgagccgccgccacaggaaggggcgccgaggctaccagacaccctgccacccatgtttccgaaggatcttaagccaccaccgggatggaagcctggtgatccaatcacgctgccactggatgacattctacctggtgtcaagggtgaagaaccaaaggcccctgtgccacaggcacctgtctcagtgcggccaatggtgccaatgggcccagcgccaatacaagtcgcggctgttcagcttgattttgggagcagtagcagtgatgagtacagtagtgacgtcgggagctcagaagaagatgacgaggattagtgcttggtaagctccatcatttcatcattaatgtgttttaaagccaccgtaaccatgcaatagcaaagacatatatcataatctttagctgatgttgttccttcctgtctgttctgactgttccagcacaaaatctagcatattggttggatccattgatggttgagatccgtactggtttagttgctagatcgctgttcgttgttcttataaatggttcctcatcagttctgtttcctgggcatttgtagttctagttnnnnnnnnnnnn

SEQ ID NO: 44777 - DNA, 271 bp, Setaria italica
  Peptide Sequence Number=SeqID_110751
cgcaaggtggtggtggaggcccgcggcggcggcgcgccatggcgtcgccgcgcgggcgttgtccttcggttcccggctcgggctcgactcccagaatttccacacgagggacctgtcccagttgttgtgggtcggtccggtgcccggtgacatctcggagattgaggcctactgccgcatatttcgagcagctgagcagctccacactgcagtgatgtcggcactctgtgatccagagacaggagagtgccctgtccgctatgatgtggaa

SEQ ID NO: 44778 - DNA, 365 bp, Setaria italica
  Peptide Sequence Number=SeqID_110752
ccacctcctcgaattagcagtatggctccttcacagcctcctcctcctcctccttcgccgccgcctctgccaaattctggggcagcaaaacagcaaaatgtttgtgcagccccaccaccacctccaccacctccgccacgaacggctcatggaatagctaataaaggccctccgccaccccctcctccccctccctcttctagcaaagcacctacaactgctgctgctgctacttcaaaaggacctccacctccacctccacccccacccggtacttcatcaagaactgctggtcctgctgttccatccccacccccacccccgccattgcctggtgctaataaaaactcctccggccccaccac

SEQ ID NO: 44779 - DNA, 173 bp, Setaria italica
  Peptide Sequence Number=SeqID_110753
acgaccaaatagttggggtgacaccagagccttttgttaacagcatggaaggaaccatggatccatgattctcaatgttgccgtagaaatgtaatccttggcattgacttagaagtcagattctgagaaacaccttgctaacagatggtttcggtgattctgtcagcggaacc

SEQ ID NO: 44780 - DNA, 1052 bp, Setaria italica
  Peptide Sequence Number=SeqID_110754
tattgaaaagcaaattccgtgctcaggcggttgttactgcaaccagagtatttgctgctctcgcccttcctctacatcatcatcatccgatgacaggtcagcttcaactgtttgaagtagcttcacatcctccttttccatggcctccttcatctgtacaagttgcgtattcaacttccagatcttcccttgcagacttgagatatgatgctttaatgcctcgcgcctttggagctctatagagcgtgccaatgcctgtctcctcgttaatagattcctaggcttcacgatttggggtcgcctgtagtttttaccccggtagaaaatgattgcatatcctttagttgtcttatcgactgaaatgaggacaccttcactctcagcttctagagagattgcaatatgtttcacttgtgcgaagctctttcccctgacaataattttaatcaattctcgatgcttccaatgcaagtgcatgttttgcacagttccatcaaaaacatctcgtctgccaagcatcaaaaaggccctcattttcaggccaattctgcgaaataagaagcgctcctcatctgtaactgtttccaaatcagttggaagctctgccggagagagaaattgctgaactttcgccaaagcagagagagctttggcaatttttgtttttgctagaatcagttttctcttcaagctcttcaaaagagaggcatgcttcatcaaggccaaatacttcatctcctcttccctctgcttatcattaagtgagtgtccccatcgagattttgcttctgtagtttctgcaagagttccagcaactagaggacccttcaattcattgggaatggttgtaattgaggctgatgctttaagccgagccagctcttcctcatccagttgagtaatggcttgttcttgcttctccaccaagacctgccttactttaggcgctatgaaatcattgcccctgtagaagataatgtactccttattcctcgacaagagcactcctcctgtcaatttcttgatttcttccgccattctgtcattgcatg

SEQ ID NO: 44781 - DNA, 491 bp, Setaria italica
  misc_feature (483)..(483): n is a, c, g, or t
  Peptide Sequence Number=SeqID_110755
atggacatggccgacgcgttgttgcggccgccgcagctgttgttgatgctggtgatggtgctcacgcaagcgctcgccggttcagcactcgtcaggctcggcgcttgttggaacggcatcatctcatcaagtaggccgtgcggggaggtcggagagaggagagcctgctgctggccgccgaaggggagctggttgttggccgccgccgtcggcagcaggaggccgcggaggttgacggagagcaggttggcgcagtggccgcaccgcacggtgaccgtcttgaagaggctgctgcacggcacgcccaccgcgaggatggtgtcgcagcacttgcagtgcacgtagcagagctgctcctgctccgccgccgtctgcaactgcggcggcgcgaggtgctggtccatggcgaacgccgcctccggcaccgacgacatcatcgcgccaagcttttgccgtgcttgcacagaacagtcgtagcccccnccgccggc

SEQ ID NO: 44782 - DNA, 424 bp, Setaria italica
  Peptide Sequence Number=SeqID_110756
tcctgtcccatcacgtcggcggttgcgctgccgccaacgcagccgctgcgacaccgccacgagaaagatcgggacggcaaccggagcgcctactccatctccgctaggatcggccgtcaccaaccgcttcgtccttctccgccgcgtcgcggaccttgacctcttcggcttcaatggcgggagacccagaaactggtgaatggcctactgctatgcaagtttagagggctacatatcaaaaggctgatgggacatggtctattccaacgggtgaagaaataatgatcaaactacatgaagttgctaggacacatcaagaaaaaatttcttctgcgcccgtgccaatagtggagcccttcgcactagttcttggtcgaaagtcaaaccatattcacatggtagttggcattcgtgctgtaaaccg

SEQ ID NO: 44783 - DNA, 280 bp, Setaria italica
  Peptide Sequence Number=SeqID_110757
cgatcgtcactgccctggatctggggattctggcgacggcatatgaggaaatggaggcaaagattgggaagaaaaccgacgcaccttcacttgccccagcgacggccggaagatccagcgccgattcgagcatgggggcgaaggagtagtggggctaggggatgcggatggggatggggctccaagtagagcgtcaaatgtggctgggctcgagctcctccgccggcatccgcgcagcatgcgcatgacgggtaggatgggggtgggggggcgggcgcgc

SEQ ID NO: 44784 - DNA, 320 bp, Setaria italica
  misc_feature (253)..(320): n is a, c, g, or t
  Peptide Sequence Number=SeqID_110758
gagaagcatttaatgtgcccgcagttgtgtttattggaatatatattgctggaattctaagtcattcccatcctttgaggattcatatttctgtattactttaatcaaatgagttgtaaggtttgtgggttgagcacttcccatgccaaaggcataaatacgttgacactattcagtcaagatgtgtctatcataatatgatctatcctggaatattttgaattataaataagttaaaaaaaaacaaaaaaannnnnnnnnnnnnnnnnnnnnnnnnnnnnnnnnnnnnnnnnnnnnnnnnnnnnnnnnnnnnnnnnnnn

SEQ ID NO: 44785 - DNA, 403 bp, Setaria italica
  Peptide Sequence Number=SeqID_110759
ctggaggtaaatgttaaatgctccatcgacagcaaactttactttatgtcgcagtgatctaactgtcagtctaaggtatatagtttaaaggactgcctttatttaactatgcatatagtttttattggaattttcaactttaaccaccaaaaaaactacaaatactgcagtaggggtaaaaaaataaactttaactggttgcttaaactgaaacaactgtgttcatgcttgtgtgtgtatccatcacccttcggcactaatgtcttaaaacttcgtctttatagcaagtaccagagtggtggatttggctgtaccgcatcacgccaatgtcgtggacgctgaacctcctcttcaccaacaacaagttacgtagtaataggtagaacaaattaaagtaaactaa

SEQ ID NO: 44786 - DNA, 437 bp, Setaria italica
  Peptide Sequence Number=SeqID_110760
aagaatagactagatgctagtgtcgatgtctttgagcagcaaagaaaccagcagtaaacctgcgctggttcttgtgtgtcacgctcctggtgctgctgcttctgcttctgaaaggagtgaaaccggcatctgcaatgctggtaggtgaagaatagtgaacgctgcggctgcggcgaagccagtggagcctgtccttgagccgaggccggcaatggtggacatgagcacgtccaacagaatcaccgggcagtgatatctcagaagagtccaagccattcccagctgaggacacggagcggctgccattgaggcgattgccttgggactgtgacgaggacgacctcgcaatggcgccaccgccggggtggagggcgtaccttgacctggaggactcggagaaggacctgctgagcagatggcccgcaggcttgccgagg

SEQ ID NO: 44787 - DNA, 235 bp, Setaria italica
  Peptide Sequence Number=SeqID_110761
tttttttttcaagaacggccgtaccaccgaacttcctcaatttgtaaaaacatgatcaaaatttcacatcagcataccacgttcacgtttcaccatcaaattcctccctcggtactttgcacgagtatataaacctcttgggtcaatctatgtgtaaaaaacattgcatgctcttaactgcccagcgttcgaaaagtgtgcaatatcagcattgcacacagagaattaaaccgtg

SEQ ID NO: 44788 - DNA, 315 bp, Setaria italica
  Peptide Sequence Number=SeqID_110762
caatgtagaaggtcgtcctgttataagccgtccaacaggtaatttgtgttttctaagtttacaggatctttataacaatctgaaaacaggaagtgttcatgtttcctacacatgtttgttgtgcattgatttcctaaacttttgagttgtagactactagctgtgctatccttgtctacatgcttatccagttatcccaaatgcctagttctgggatgctgacacctttaaccaaagtgttcatgtatctatgacaatcagtgttgctttaaagatactggtgatacttttattggcttggtgttaggaaacatc

SEQ ID NO: 44789 - DNA, 452 bp, Setaria italica
  Peptide Sequence Number=SeqID_110763
ttgtcagctgcgttcttgagctgcacgaccaaattgaagcaatccatcgtcagcagagttatcggttatcatagactgcagcaattccgacaaataacgatcaaggtaatcaggcaatccccaaaggctcaccatgatgacgaggatgcggacaaggacagccacgaagtcggtgaagagggtgagggcgtgcttgatgtagtccatgtcaccacggtgtgccctctcgatgatctcctgggtgtcaaacaccatgtaccccaggaaaaccaggaggccaaagtagagctcaaacgtgaaggtggcgctggagtgtccaaagatggatgcagcaaactagacaagaccaagaagaaagaaataggaagaagtagacaagaacgtaaagtaaagaactaaaagtaaaccccccgtaaaaggttaaaactaaaaggttaaaacttaacccttaa

SEQ ID NO: 44790 - DNA, 389 bp, Setaria italica
  Peptide Sequence Number=SeqID_110764
tccctggagggcggcagggagattaggaaggcgatggcggccaggcatccgacggtggtgagggtgccgccgacgttgaggaggatgtggaggtagacgccgagcgcggagaaggcgagggcgaagcacagggtgaggtacacgtgcttgaggtgcgactgcacggcgggggagatgtggcccagacgcttgagcgagtcgaagccgcccgtcctcctcctatgctgcgattggaagccgaagagggactccatggcccgctcctccgattgaaggtagagtaggatgaaatcgattgctgagaaggaaaccctagccctagccaatcgatcgatccccaaatacttattcccttcccgagatcgagaggagaggggaggtagacgacg

SEQ ID NO: 44791 - DNA, 486 bp, Setaria italica
  misc_feature (1)..(63): n is a, c, g, or t
  Peptide Sequence Number=SeqID_110765
nnnnnnnnnnnnnnnnnnnnnnnnnnnnnnnnnnnnnnnnnnnnnnnnnnnnnnnnnnnnnnnaatttttttgtttctatttggtcaaaattgattctgtgcatgcacatggatgtacaaagtactgaataaacaagggatggttccgcacagatcgggaattcagcaattcattgcgatttcttcacagcttgttatcaggctcagaccaatgccaaccaacattcagtaaacacaggcagacagatccgagttgtttgtagcgcgcaaggtatatgcaaagctccagcagactccacacgagattcacaaaagaactaacaaactaagagaaaccaaagaacaattcgtttccaccacagcacccacttgtatggcagcttcgttcccatcctcaacgcacttgtagtagcagtagcagtagtagtagtacaagtagtaagtagcggtggcttctatgtgcacagggcgggtgggacagcttag

SEQ ID NO: 44792 - DNA, 1253 bp, Setaria italica
  misc_feature (1)..(21): n is a, c, g, or t
  Peptide Sequence Number=SeqID_110766
nnnnnnnnnnnnnnnnnnnnntttttttttctttacggggaaattacctgactaattcattgcgatttcttcacagcttgttatcaggctcagaccaatgccaaccaacattcagtaaacacaggcagacagatccgagttgtttgtagcgcgcaaggtatatgcaaagctccagcagactccacacgagattcacaaaagaactaacaaactaagagaaaccaaagaacaattcgtttccaccacagcacccacttgtatggcagcttcgttcccatcctcaacgcacttgtagtagcagtagcagtagtagtagtacaagtagtaagtagcggtggcttctatgtgcacagggcgggtgggacagcttagctagtgctcacgacctcctattcttcctcttcttgtcctccgacttgtcagctgcgttcttgagcatgatgacgaggatgcggacaaggacagccacgaagtcggtgaagagggtgagggcgtgcttgatgtagtccatgtcaccacggtgcgccctctcgatgatctcctgtgtgtcgtacaccatgtaccccaggaagatcagcaacccaaagtagaccctcaaacatgaagctgctagtggagtggccaaagatggaggcggcgaactgcagccagagcaggatggagaggccagaagagagcagcccaccaaggtagaggtactccctgcgcttggccacgatggcagcgcaagagaagcatgcgaaggcaatggcagtcccaacaaatgctgtcaccaggatgcttgggtcaaagtctacagcgagcttgatcagaggtccaactgacgccccttccaggagggcagccgccatcagcagtccatacctcttcctctcctcatagacgggcaccgagaagagccaggcgatgctgccaacgcagccgagcatggtcagcatcccgccaatgttccagacgacgtgcaggtaagcgcccaccgccgacgaggccagcgccacgcatagggtgaggtaaacgagcttgaggtgggtctggacggcgggggtgatctggcggaagttcttgagcgagtcgtagccccatccgccgcccggcgccgcgccgtacgccgccgacgaggacgagtagaaggcgtccatctccctcccctggcttgctccgccgatgcttctctgtcttcacgggaaacgaatcgggtcgcctcgcacgcaaggcctcgtgaggaggatcggttgttcgagtcgtgtcgggtc

SEQ ID NO: 44793 - DNA, 1002 bp, Setaria italica
  misc_feature (1)..(55): n is a, c, g, or t
  Peptide Sequence Number=SeqID_110767
nnnnnnnnnnnnnnnnnnnnnnnnnnnnnnnnnnnnnnnnnnnnnnnnnnnnnnnttttttaaggttataaattttcaactcaagatacagcaagcaatttcatcgtcgacagcaaatcaacaaccaagcattcacttacttacaacatacatcgaaacagagtagcagagtagcagtagaggagtacatagtggtagagagagttgatagctcagcgcttcttcctcttcttctcctcctcttcagatctctcctgcgcattcttcagcatgatgacaaggactcgaacaagaacggcaacaaagtcggtgaagagggtgagcgcgtgcttgatgtagtccatgtccccctggtgtgccctctcgatgatctcctgggtgtcaaacaccatgtaccccaggaaaaccaggaggccaaagtagagctcaaacgtgaaggtggcgctggagtgtccaaagatggatgcagcaaactgcagccagagaagaatggagagtgcagacgagagcaagcccccgaggtacaggtactccctgcgcttggcgatgatggcggcgcccgagaagcatccaaaagcaattgcggttccgacgaacgccgtcaccaagatcctcggatcgaagtgaaggaccaggtcgacgagcggtcctacggaggccccctgtaggaacgcggcggacatgagcaaagcgaagcggttcctctgctgatcctgggagggcggcagggagattaggaaggcgatggcggccaggcatccgacggtggtgagggtgccgccgacgttgaggaggatgtggaggtagacgccgagcgcggagaaggcgagggcgaagcacagggtgaggtacacgtgcttgaggtgcgactgcacgggcgggggagatgtggcccagacgcttgagcgagtcgaagccgcccgttatgctgcgactagacgacttaggacgaatagaataggacggacgacccgaagaaagacaataccaaaaagacaaata

SEQ ID NO: 44794 - DNA, 517 bp, Setaria italica
  Peptide Sequence Number=SeqID_110768
agatagtttatgtgaatataccttgcctttagcggctaagtagctaacccacctgtcagtgacaggttgcgacaagctgcgactgatagaaagcaaagctccaaatctctccaattttcgctttgacagtgatcgccacgtacaagtatcacttgaaaaagcattgcaggtgaagaagctatacatcaactgttatgtccctgtttgtgcgctgagcttgcatccagcacgcaaaatcttggagctggtttacatccaagcaataagatggtcaacacaccgttggtacctagcaaatttctgtacctcgagtgcttgagtataactcttggaggatcgaccattgctcagagctttgattattttctatggcttcttctccttccttggagactttcatcttggatgcaagtttgttttccttcttgagtatttgagcaaccatgatggaacccttaactgaaggttgtctttaattccatctctaggtatcacagcgactcatggagcatcccgg

SEQ ID NO: 44795 - DNA, 271 bp, Setaria italica
  misc_feature (241)..(241): n is a, c, g, or t
  Peptide Sequence Number=SeqID_110769
gtgtgaatgtgactccaagatgaatgggatgggaacttggattcattcagaggatgtttggttccacggactaaagtttagtccacggactaaagttcagtccttattacattgaattgaatgtttagatactaattaggagtattaaatatagattaattacaaacatagactcatatggttcgatgcgtccgctgtcttaggttgttgagaaacaaaaaaacaaaaactaaaaaaaagngaactagccaaacggacacacagggagtag

SEQ ID NO: 44796 - DNA, 312 bp, Setaria italica
  misc_feature (286)..(286): n is a, c, g, or t
  Peptide Sequence Number=SeqID_110770
aatggtctgttgtaccgacactttcccaccaggtcagcagtggttttggtgcaaactccctttcgttcttttgtgtcgcgtcccggtaggatttggtgtatgataaatgctgagagtacaagttagatcaaaagaaaagatgaaagagctgaagcctgtgaagtgtgaagtgtctttgagttcttggttgaggatgtaacccatggtatttgtatgccatcacacacgtcttgttcatttatgatcactctgaatttacttgttttaggaaaaaaacctaaaaagngactgccaaggcacacaggggatagg

SEQ ID NO: 44797 - DNA, 503 bp, Setaria italica
  Peptide Sequence Number=SeqID_110771
agacggcggcgtccagggtgcggaaaccgccagcttcggcaacctcctgtgcggcgtcgacgagccgccgccgttctggccgtgggccgaccaccagcacttccattgatccatcacggatatcacaagagcattgcaatggtgtgatcgcaggaagatccgacgaattcatttggattcttgatgacatgaaggaagaggctcaaagctgtgtgtcatctgatctgatcgatcggcgaggtagccacgagatattgagaaggtgatgcaatttgggtaatgaggttgatgagaaggggccgggttgtaagtggaataagtgtggccgtgtaatttaattaggtagattttggtttgaattttgatagtatcttttccacttttttgttttttttgtttttcctcttttgttgacacataaaaatttgtgaattgtgagcactgttgtaatttgtataggtgcatgatgttttcttttgcaaattgaatggatgaagagcaat

SEQ ID NO: 44798 - DNA, 264 bp, Setaria italica
  misc_feature (245)..(264): n is a, c, g, or t
  Peptide Sequence Number=SeqID_110772
tgagggaggaattgaaattcagacgtttattccttggttctaaaatctgatgaactgattttgttgggtggtgaggatacactgccagacctattaactgggcagatattttgctaattgagcagatgcctactttttcttgtgaaatctttatttgtggtaaacactaaacgaactactcgtgtggtagcactttgtgaatgtttgctcagatgatgatgggagattatttctaaggtttaaannnnnnnnnnnnnnnnnnnn

SEQ ID NO: 44799 - DNA, 384 bp, Setaria italica
  Peptide Sequence Number=SeqID_110773
aatggctcgacagcaatcttcaagatatggaaacgagggtgaaggccatgatcaaacttatagaaatagacgctgatactttcgcaaagaaggcggagctgtacttcaagaacaggcctgagctggtaagccttgttgaggagacatatagatcttaccaggcgctcgccgatcgatgcgatcggatttcgggggagctccacaagtcaaatcacaccatagcaactgcgttcccggagcaagtccaactgtcactgcaaaacgacaatggcgacggattcccgaaaggcatcacagggatcaatatcagcagaggaactagcccagctccaaagagggcacaaacacatagaaggattagctctcagatgagcaaagacaagg

SEQ ID NO: 44800 - DNA, 688 bp, Setaria italica
  Peptide Sequence Number=SeqID_110774
agccccatcttccacatggtgtccgcaacgcagaccaccctggctgcgaccgcccgcgtcgtggagctgaagctcggcgagcttggcatcgagtaccgcctgtccgcagccctgccggcgatggtctggcggcggcatcgagcggtgcctgtcggaggcgctggcgccgcatctgcatggcctcgccggcgcctggaacgacctcttctgggcggcgcaccctggcagccgcgcgatcttggacagctatgaggccgctctcgggctgcagccggagaagctggcggccagccgccgtgtgctgagtgagtacggcaacatgcttggcgcgaccgtcttcttcgtcctcgaggagatgtggagacgccggggagctaacgaggaggaacgggagaaatgcgcgtgggggtcatgttgggtctcggcccggggatcacggtggagacgatgctgctgcatgctgccggtagccaggacgaagactagaatatcaccgtcgtcacaccttcctaaatatacgtacgacagtacgagagagttgacatgcgcttggtctatttgtaatgagtgattgattggatgatttgaaacgtttccagttgagtctggatgatttgaaacttttccggttaagttaatatttcatatgtgcatgtttatgactaaaaaaaaaaaaaaaaaaaactag

SEQ ID NO: 44801 - DNA, 803 bp, Setaria italica
  Peptide Sequence Number=SeqID_110775
caattcacacacgggtttaggtcaaggatctgctcttcttgaagattacgcttgattttcagcttggggcaacttacagggcgttcgtaccatggtatagatgctggtggcggcgccggcggcggcggtgaagactttagctagcctagctaatgattgatgtcttgcaaactgttcaacctctacctcatgagtttctctttgtgaagcagcaggaggcagtgcagcgcttccttccacagcaatctgaacctctgaagaaagggtaggttcagtggctgcccttgctctcctctctttctcgacagtgactatgaacgtgccaacttcttcagcaggtgtactccttgaacacatgctggatttcattggagatgcagtaagttccatcccaagactttcagctgcctctgcttcagcttcaccattcattgactcacccataaaaaatgcatcagttttcttgcctgattgaccaactccatgaatttggggtaaatgaaaaggcagggaaactgatgctggatgcaggagtgagatttcctcaaccttgcgcctcttcacaggaaattagcattaaccttaagcatagcaggctgtgatctgttctgtttacttattcagagcagtggatcgacagattcagcaatataaaaggttgcatatatggaagtaataaagccgtggatgaaaatgtaagctgggtgatatattttaatcatctggttgacaagatagtaagaatcaaactactatacatccgagcatggatattgccttttgccacaaactgataacattaa

SEQ ID NO: 44802 - DNA, 245 bp, Setaria italica
  Peptide Sequence Number=SeqID_110776
aacgggcaaaaagtgatctccaacctcttgagggaggaaaggctgtgcagacccacaggaagacagaatgatgtggtgaggaaagagtaatcatcagtgtggagccttttcagtccagcgcacagctcatagccgtgacttgacagatgttccagataaaaagtaagccagggcatttggaccggaagtcctctggtgcgtcgagcgattcacaattcccaacaatcaactcttccagcgttgtg

SEQ ID NO: 44803 - DNA, 1094 bp, Setaria italica
  Peptide Sequence Number=SeqID_110777
ctcaggctcagttccatcgtattggcctcgtctgttaatacacgagagaggattagagcctgagggtgcgtcgctgtacttgcagagcatttttcttttgtatggatagggccccctccttcgatcttgggcgttgggcctcctgtctggcaaacatgagccctgcaatgggtgatctgcaagaaacagggatgtgtggatgctttgtgaacagcacgtagttgtatgagatttagtagtggaacactggaacgtacagcagcttgaatgcctcagaaggcaacagagtgaaacccgctttgctggtagacaagtctgcttaacaaccacccagtaatcagttcacatatttcccattaattttgacttttggcttccttgttgttgttgctagcattctgcattcatcagctagctccttgctgcaaccagagctgatctcaatttcttcaagcgaaggtgggagccccttttctggcagccttgagagagacgggcaaaaagtgatctccaacctcttgagggaggaaaggctgtgcagacccacaggaagacctgcgaggttggagcaatcctcaaatcgtagctcctgcagggacgtgaggtgcggaagcactctctcttgctcctccgttagtcccgtcacttcccccataggatcgcataactctaggcatcggagggaggtgaggcacttacagaatgatgtggtgaggaaagagtaatcatcagtgtggagccttttcagtccagcgcacagctcatagccgtgacttgacagatgttccagataaaaagtaagccagggcatttggaccggaagtcctctggtgcgtcgagcgattcacaattcccaacaatcaactcttccagcgttgtgcaggaacgcagctgtagcgatttcagtcgtgggttgttaaacagatctaatttccggaggcgggtgaaattcccctctagtgcggtgagtgatgcacaataatgaacattcaactcttccagcgctgtgcaggaacgcagctgtagcgattttagccttggattgtcaaacagatctaatttccagaggcgggtgaaattcccctctagtgcgg

SEQ ID NO: 44804 - DNA, 164 bp, Setaria italica
  Peptide Sequence Number=SeqID_110778
agtttaagtcgcttgatttaagaaatttaaacgtcgagaaggctacatttacccggcaactctatctccatcggcggtggcgggcgctttcgacgcatcatgatgaagcaagtcatagcaaccactaaacctgctagtaatgcacttgcagcagacagcactag

SEQ ID NO: 44805 - DNA, 704 bp, Setaria italica
  Peptide Sequence Number=SeqID_110779
tgggcttgatgtcccggtgcaggatggcgtccttgtcgccggtgtggaggtattctatggcggagccgatgcccagaacgatcttgtacctctccggccatgtcagcagcctctccgacgacccgtggaggtggtcgtcgaggctcccgttggttaccagctcgtacacgagcagaagcttgtcgtctccaccgccgtcgcaccacccaacgagcttcacaaggttgcggtgcttcagctggcccaagatcatgatctcggtgacgtagtcccgcctggtttgctccaacagcagcgtcaattttttcactgccaccggcgcatcaacgcgccgacgatctcgcaggtcccctctgtacactgctccaaaggtgccggcgccgagcttcctgtcctgggagaagctgtcggtcgccaaggtcagctcgtggtacgagaatttcctggcaactggcaactctatctccatcggcggtggcgggcgctttcgacgcatcatgatgaagcaagtcatagcaaccactaaacctgctagtaatgcacttgcagcagacagcactagtattacccatagttggatcttagtactactgttagatggatctgtacgtccgcgtaacatcagtaattgacggaattagtagacgctgagatgaacaagtaagatccaacaagaattcaattaattacgtttaaaaatatac

SEQ ID NO: 44806 - DNA, 641 bp, Setaria italica
  Peptide Sequence Number=SeqID_110780
ggtatcaggctctgaacaaacaagtgtgtcaacaggttcatttcttcctcttccagcacttggaaatgcaagatcatcatgcggatcaattttttcaatgcttccctccgagaaaagggactgcagctccatgagcaaatgtctgggatctgccgagcatgttccagtataatttttcattttgcacactgcttcctcagacaaagcaccttcatgtttataattaggagttgctagactaaatgaaggattcccaaaggtacctgctacaccagaaacaattttcttcgaagatatggtggacccttgaagtgatgattccactgagcagccatctaaaaaactcttgttgcaggttatgatccgtacgataatcttctggtaaacccgaaccagatggagtcctttgaccaacgatgtccacaacagacccattgtctgaagtattagtaacatctttactacagttaaggccagattccataactattgcgctttccttcttggggttaagctgcccaatctttcaaatttgatgtttcttcggatggaagcagcaccactccactttctatgtatctggcagcggcagcctccacaatatcatttgtcgcagggtccagaagcaacttgctcttccc

SEQ ID NO: 44807 - DNA, 376 bp, Setaria italica
  Peptide Sequence Number=SeqID_110781
tagtacgctttcctggcctacaaagtaaaagactaggacatcttgccatgccatgcggttggctttaaatgttgtggactcctttgtcctttttaacatcagcaagtaaaaggactagcagatgcagctgtataagctatgattggattgaactgttgcatctcatagtatggtattggtacctgatgccttgcaaaccattggcttgctttgagtaaaaataataactgtgcatggagcatgaatattaagtgtgctaatgcagttaccagcatttgcatatttcttttcctagcatgacgttctctgtgatgacagtatggaccaattcgtttcttatatgttgtactgactgtatttactttactatgcaggg

SEQ ID NO: 44808 - DNA, 267 bp, Setaria italica
  Peptide Sequence Number=SeqID_110782
gcagcatcaaatcgctagcagtagcagattactacaactgcaaccaagctgtaagcgcgaaattaacagcggcagcgccggcaggggcaggacggcagcaacctagctgccggggcggcaatgcaaatgccggcaaggcttagctcaccgaagccgcgcctccaatgccttcctcagctcctcgcccacgtcgtccggcgcggccgccttctcgggcgcgacttccctcgcggcgccccgagggcggtccggcttcgcgggaacgcg

SEQ ID NO: 44809 - DNA, 405 bp, Setaria italica
  Peptide Sequence Number=SeqID_110783
gctgtccggggaggggcgcagctcgcacaggtgagtacttccgcttggcgcctcttgtagccggcggcagccatggcacggtggtggtggtgactgcggtcgacaaatgagagaaaatagaatggaaggtgaccggtgacgtcacgggggatggggaatcttttaagacatctgcgcgccacaggtggtgtggcggacgaaaatcacgccacacatttgacgcggaaaacggtggcgacctctgttcggaggtgtggcgagccttacttgaagcatgaaccaagcactgacctaaacacccgtggtaagcctaactttaggtgtggcaaaccgtggccgggaaccaaacaccccctacatgtgctcagccatctcctctactgggtccgcccctgcatcctttta

SEQ ID NO: 44810 - DNA, 446 bp, Setaria italica
  Peptide Sequence Number=SeqID_110784
taagacaaactaggcatacgtgtcatatgaatttgacctagccaatctgactagagaggcatggtccacacgtaacttgcctcgtggttgaggtgattcttctttacttttcgctgagactatttcctatgttttcttgactaagtgttcggcaagtatcctaaatgcgtatatttctagaacaaacgctttgacctttttcactacgtgatttctctaagcattgatggtagtactatggtgtatatacagggatttcttcattgtccttgtggcgtcctttttagattgcatctccgttccccttttgtgtgatgttaggcgtagccaatggttgagaggctttgaacgtttatacgttttttagaatcttagactcaatctgcaccgtatgtgagggatatttctttgacgtccttgttgcgcaataaattattgttgctttt

SEQ ID NO: 44811 - DNA, 537 bp, Setaria italica
  Peptide Sequence Number=SeqID_110785
aagtcgttcaaggagccgagcttgatttgcgtaaagccaccattcagatcctgcagctcaaaggacatctttgacaatgctctgcaggcatttttactagcaaacatcgcatataacatatgctccacctgatccatggaacatcctggaaaaggggaaattgagtgaaaattcgtgcaacctgatcaaaagatgatgtgttgtgttatatattttactgccaaggaaaatttatgtaagttggagtcggacacattctgttacactgttatgtacaataaagtacagagatagtatttgaagagacaaggtggttatataaaaaaccttgaattggcttaaattaatacaaatatccatggagtgcagccatacattttactaaaatcctaaatgaccaaacgattccaccagggatctatccaatcctcagaacctttactgaacatgtttggtgaagcattgggactgcactctaatcctcagaaaagcttgattgcacctatctaatgtactgaacaagacgtacctagcaac

SEQ ID NO: 44812 - DNA, 404 bp, Setaria italica
  Peptide Sequence Number=SeqID_110786
gtcagcagctgcgcgtcgacttcgttggtgctgccggttctttcctcttccaagatcttgacggcgtcggccgatgcacgccagaggggagatggtttgcggcttcaagctggaggcccctgtcgatgtcttggttgagttctcgtcctgggcgacgtgctccttctccgtctccggcggatctagaggatgtgcgatgtccaggagatctgcgtcaagacctaagaacttttgtttcaaattcgaaatgttctagggtcttgcatgaaactttacattactggaggatgtgtgctgaggacttgattgtaatttctagttcctccagggtgttggttgtaagatccaggctcttttaataaacgggatccagtcccttcccacaacgaactaaaaaaaaaaaa

SEQ ID NO: 44813 - DNA, 233 bp, Setaria italica
  Peptide Sequence Number=SeqID_110787
gtgcatcacttggtaaacactgcacgtttccctaagattttatatcaccgctgttcgtcctcttccacgtctgcttcttgttcaacacatcgagacagtgcaccattctgaagctgttgaagatgttttgcactctcttttgcttgctgactcagctatcaaagagatgaagagcaagacaaagcagtggaatgacagaatcaagcaagacaaaaaatcagaccagctacggt

SEQ ID NO: 44814 - DNA, 444 bp, Setaria italica
  Peptide Sequence Number=SeqID_110788
tttttttttttttaacttaggtgcgtagaaaaacgattatataggaaaaacgaatagtaattacagtgtttaccaagtgatgcacaatgctgagcaactccattcatctctcagcacgagcagcagaaagattcagtaatcgttccttcctcacattacattcagcacacgtttacaactgcacgtttccctaagattttatatcaccgctgttcgtcctcttccacgtctacttcttccttttcatactcagagccagaaccttccatgtctccaaatgggtcctcgtcattgctaccatcatcctcatcctcatcctcatcctctgacagttcttcaggataatcaaaaagtggattgtcttcagcattcgaatcatctgtgtcatacgggtagtcatcgtcgtaacattcatcttcgccatcatctacttgtaaccgtaga

SEQ ID NO: 44815 - DNA, 1453 bp, Setaria italica
  Peptide Sequence Number=SeqID_110789
taaaaggaaaacgaaaaataaaagaaaactaaacgaaaatttaaactaaccaaagaacctaactaaccaatactaccgaagaccctacctacttacctaccgaccggtagactagagcctcttcctcgtcttgttgacgcccccgcgcggccgcgccgcatctcctcgctcggcgcttgctcctcaggggggaaaaaaaactaaccctagcagctggcgggcggcggcgccggccatcttctgatcttcccatctccgtttctcccactcctttcaaagtccaatccggcaatcgcaatccccaagagccaaggcaaggaccaggccggaggagcgaagcgtggaggtcatggcgtggagccaagccatggacgcgacttgttaaccctaccccaccgccggtcatggcgtctgcagcggcggccgccggcgaagcctccacctcggggtccgctgcgagggagaaacccatcgtcgtccgggtcaagcgcaagccctcacagacccgcccggatgctttctggctagagattaatgagaggccggcgaagaaggcgatgctcgatttctccagcctctccatctccgagccctcctcttcctccgccggtgctgaagcttcagaggaacaaccacgggtcaagaagcttcttgttcaacacatcgagacagtgcaccattctgaagctgttgaagatgttttgcactctcttttgcttgctgactcagctatcaaagagatgaagagcaagacaaagcagtggaatgacagaatcaagcaagacaaaaaatcagaccagctacggtcagcagccagacagaggcatgaggatgtgggaagaaatgctcgctttgcacaaatatggaagagtcggaaaggacaaaagaatgaagctgatgaatcattaagagaaatatgccatctttacgacgctgtccaagtagatactgatgaagagaagcatccagcagaaccacggatcacttctttcgaagagggtgctgttttgtgcaactttcttccacttatacgggagtacttgccatcagctgctgaggaaattgagtcggatattatttcattggcacaatcagaagattcagaagtttatgacatctatactgtcaaggaggtggatgatacaaacatggaggatacctcggcagcttcatatccacggttacaagtagatgatggcgaagatgaatgttacgacgatgactacccgtatgacacagatgattcgaatgctgaagacaatccactttttgattatcctgaagaactgtcagaggatgaggatgaggatgaggatgatggtagcaatgacgaggacccatttggagacaagaacaattctggctcttagtatgaaaaggaagaagtagacgtggaagaggacgaacagcgggtgatataaaatcttagggaaacgtgcagttgtaaacgtgt

SEQ ID NO: 44816 - DNA, 296 bp, Setaria italica
  Peptide Sequence Number=SeqID_110790
gcggcgaagggccgctcgtcatggtgttcggcgcgccggggtcgttctacggccggctcttccccgccgagacgctgcacttggtctgctcctccttcagcctccactggctctcccaggttccgcaagaactggtggatggactatggagtgctgataaacaagggaagcgtctcggcggggaggacgagctcgccggcggtcaacgcagcctacacccggcagttcgagcaggatttcaagcgctttctggcggcgggagcggaagaagtcgtccccggcggatggatggtgct

SEQ ID NO: 44817 - DNA, 297 bp, Setaria italica
  Peptide Sequence Number=SeqID_110791
tgcagactctgcaccatatactctctcaaatgaaggtcgagtatgccagcactgaaataaaagatgaggagtggcttgtcaatgcaatgagggatttcttgaacgacaagaggtacagattattccattgcaaattaattttgcacttaatagattaatttcttctcatatcatgactaacctatatttaaactgaagtaaacgtacgcatgcaaatttcctagtcttcctgaacggtaaaaaaaaaaaaacaaaaaaaaactagagagagagaccgccaaggcacacagggatagg

SEQ ID NO: 44818 - DNA, 383 bp, Setaria italica
  Peptide Sequence Number=SeqID_110792
tatttggccatagaaaccatatgccggttacagattgatgggaagatagcttctaaaggtgatgggcagccatatccacaagaagaacttattaacaagtatttcaatgcttctaactatggaataatgaaggttcttgctaagatggggatatccaccctggcatcgtacaaaggtgctcagatttttgaggctcttggtcttgcttcagaagtgaccagcaagtgttttgaaggcactcctagtagagtcgagggcgctacttttgaaatgcttgcacaagatgcactttatctccatgatttggcgttcccatcaagaactttaccatctggaagtgcagatgcaaacgctgttcccaaccctggggattaccactggac

SEQ ID NO: 44819 - DNA, 287 bp, Setaria italica
  Peptide Sequence Number=SeqID_110793
tgtcagcattgactgccggacaggaagacaaaagattaattccactccaatattcttcctgccacagtaatggcagagcataacgaaaggacaccaaaatttcaggctagagtaggtgaaataaacaaaattggcacatttcgcggtgcattttctccgagttcgtgctgtcctgcaaaacccacccactaggcttgcaatcaacagatagaggagaattatgaattagactatcgtttcctttaccatttccaatttcccccctccagaattgagctcagtcgcta

SEQ ID NO: 44820 - DNA, 1846 bp, Setaria italica
  Peptide Sequence Number=SeqID_110794
ctgacgtacctcggtacacacatatgttccatttgtcatatgcaccttgtcttacagattgtcatattgccttttctctgaatcgacggcaatagtatgtgtataggagatgttggattattgattgagtacatgtctgaggatcccaaagattacatgatctaggaaacggtcaactactaaatgatcagactgccctggagacccggagcttgagtccgtgcgccatggagaggatggtcatcatgcggtactcgacggggtgtccctccagcagctggaacctgtagaagcggcagaggatggccagcgccatcttcatctgcaggtacgccgagtccttgcccaggcagatccttggccccgcctggaacgccgtgaacttgaacggcgacgcgttccggaacgccccgtcctcgttgatccaccgctccggccggaacctcgccgcgtcggcgccccagttgtactccatcctccccatcgagtagggcacgtacgtcaccatccctcccgccctcaccttcgtcccgtccggcagcacgtcgtcctccaggatccccttcgggtcctgagggacggcggggtagaggcggagcgtctcggtgacgcaggcgtggaggtacaccagcttgccgaggctgtcgtaggtgaggaggcccgcgaactgcgtgacgcgggcggcgaacgactcgtcgtcgtcggcgtcggggccgcaggggacaagttctacgccctcctcgcgcgcgcgctccgcctcgaacgtgcacagctcgcggcgcagcttctcggccacgtccgggtgcgacatggccatgtaggtgaaccacgacagcgtcgtcgccgtcgtgtcccgcccggcgatcacgaagttgagcaccacgtcacggaggctcttgtcgtccccgagtccgccgctgtcctcgccggcctcgcccagctcgatgaaccgcgacaggatgtcgtgcttgatcttctcttccttgccgctggatcgggcttccatgatctcggccttcctccggcggatcacgctgtaggtgaactcgtcgacgagcttgatgctctgctcgaggagggcctctgacccgacgtggaagaacctcttcaggcgccagagcgggtcgatgaaccgcagcgtgacgatgatgttggcggcgtcgaacgcctgcgcgaagctgttctcggggagatcaggcgacagcgtgccgatctcaaccccgaacccaaccttgcagatcgagtccagcgtcatcctcatgtacagttcctgcatgtccacaactttgcctgccttggaagcttggcgcagtatgcctgacagcttcagcgagtattctctgaacacaatggcgctgaaatctctcaggttcttggaggcgaactcgaagctcgccgtcttcctctgcttcctccacaactcgccgtcggcgttgaatatgccgtcgccgagcagcacatccatgtaggatctgtacacgtcccccttggggtaattggtgaagttggtcttgagaacatgctcaacattcaccgggtccgcgatgtaggtgtaggaggtgaagggcatgtcgacggtcactgacctgtgcttcgacaggtactcgacgagccagtcgtgcatcctgtggtagttcctcagctgctccaccgtcgcgccgatgaccggccatgatctcgggcctttctgcttcctcaggctccacttgtgaaccaggatccacgagaggaggacgaggaagatcgctatgtacttgtggagccctgccagtgggaagaacggcgccgccggcgtggcatgagcttccaccatggtgtgctcctgatgaaagggttcagtccgcag

SEQ ID NO: 44821 - DNA, 514 bp, Setaria italica
  Peptide Sequence Number=SeqID_110795
agtgaaataagatgctgattcctgttgacattgaacttagcatcttttatcactggcaagtgaaataagatgctgattcctgttgacattgaacttagcatctaccttgtaaaatagaatttgggttcctcttgtctaatcatccacgtttctgtcttgtgtcctgggagctacgagaccgagtacgtggatgaagcacggaactatggaagagatggctacctgcagaccttgctgcatgcacttatcatttggatatgttctgttgcttgtaagacaactagccagtcagcattccatttcctgtattatactctttcctatggatttacaagatatacttgaaagtctgcttcatttcatctaacaattatgctgacttgtggattgctgacaagcaaggttatatgtgtaacactgttgcttaatgtgtaagcaaatctttgcacgtgcttggaacacttttcatttgtgtgccagcatgtactcttactaagaaaaaaaaaaaaaaaaa

SEQ ID NO: 44822 - DNA, 404 bp, Setaria italica
  Peptide Sequence Number=SeqID_110796
ggaactatggaagagatggctacctgcagaccttgctgcatgcacttatcatttggatatgttctgttgcttgattctgccagggcctctgctgtgtgcgcattttatatgcgtaagggccaacataagaaggtaccctggttgatatctgggtaacgagatgtgtttgaacccatcaatacattgctttcttttgttttaggttgagagaatgatatctatatttcattaatgttggattttgtcattcatacgtcctaatcaattggtcttttcagtaatataaattatcttagtctatacttaatgttttttctagctattgccgaaattatacatcctaattattttttcctcctgcattgagcactttagaagcttatgcccacccacaacttgtagat

SEQ ID NO: 44823 - DNA, 428 bp, Setaria italica
  Peptide Sequence Number=SeqID_110797
ggcagcagcaattgcagaagcagcatatggaatctaaaccaagtagcaataatgaaggtaagtttggttagataatgttgggttcacaacatgtccaacacctttgctgtgctatgtcctgaccaatttagttactgctgaaagatatactgttgcttgtacagaagtaaaagcaatggatggagatgaaactacacatctgaaagatgataatgatagcggctctacgggcaatgacgaagctgaaaataagcatgattctttagaggtattcgttggtgaagcagacttcactgtggggaagtctcctgctcggaatgatactttagttagcacgggagcattcagtgacgagatgacaataggtgtttcaggtcttggagagggttcacccaagagtgagagatcagcagacatgttctgtgatg

SEQ ID NO: 44824 - DNA, 3679 bp, Setaria italica
  Peptide Sequence Number=SeqID_110798
gacgccagcgtcacgacgactctccgctagctgtggcgcccgacgacgacgtagaggagggggagatactcgatgacgccgccgccgccgattccgcagccccacaggattcccttgttccggagcgcttggacaatggtgctgatacacattcaaatgcagatgcaatgatgccgcaagcttctgctctgcctaccctccctccatcctcaaaagatggaaggaagtcacttagcggtgcccctgagtctgaaagcgggggtatcctatcaagtgacgctgatgaaaacaaagggtatgagcagagccaaagcctttcaaaatctacaagggagaaggaaaggaggcacatagatgagcgtcactcgttgtcttataaagattatcattccaaaaatcactccagaacatctccttacccaaggcatcacgagtgaagctcgttcaagagatcactcgaggtctacagagaaaagtgatggcgctaatggtcctcgtgcaagtcttagggatggttttgatcatgacagcaatgatcggaatggcaagtctggcagacatgctactagtaggcaggagaatgaaagagagaggagcagtagccgtgttgttcatgatagacctggtgacaggcacggcagtcgggaaaggtatagggatgataggatagatggagacaaatttgattcacttgaagctactcgtaggctcagagaaagaagcaggagtcgtagtagatcagatctaagggaaagtgctcgtgttcgtgatcaaagccgggagagggaaagacggagtggtagttcaaggcataaagatcatgagaggaatagggatacaagtaaagatcggcatagagaatctgacagggttgacagtgtacgtgaaagggagaaatatgatagggacagggaatggcatagggttaagggaagtgaaactcgtagaaccagagaagcacgggacaaagttagtgacagtgacaggcacagggattcaacacactcaaaatacagcacgtccgatggttacaaagagagggctagatccagggagaaatatagagatgccgaccataaaagccggaggtctgaagaaatgaaggaaaattctttaaacaaggaggaagatgaagaggagtaccaagagaaaattgaacagcagttagctatgcaggaagaagatgaccctgaaaaaattaaggaggaagcaaggaggaggaaagaagccattatggcgaagtacaggcagcagcaattgcagaagcagcatatggaatctaaaccaagtagcaataatgaagaagtaaaagcaatggatggagatgaaactacacatctgaaagatgataatgatagcggctctacgggcaatgacgaagctgaaaataagcatgattctttagaggtattcgttggtgaagcagacttcactgtggggaagtctcctgctcggaatgatactttagttagcacgggagcattcagtgacgagatgacaataggtgtttcaggtcttggagagggttcacccaagagtgagagatcagcagacatgttctgtgatgacatttttggagaatcacctgcaggcattagaaaatcgggcaaggatgatggtttgcatgttgagagaaatgctcttcatgacaactgggacgatgcagatgggtactacacttatcggtttggggaattactggatggccgttatgaaatcacagcagcacatgggaagggtgtgttctcaacagttgtgcgggctaagatcttaaagctggtaaagatgatcctgaagaagttgctatcaaaattatccggaacaatgatactatgtacaaggctggcaagcaagaggtttcgatactggaaaaacttgcaagtgcggaccgtgaggacaaacgccactgcgtgcggtttatttctagtttcatgtaccggaaccatctttgcttagtttttgaatctctcaatatgaatcttcgtgaggttttaaagaaatttggtcgtaatatcggacttaaactgactgcggtgagggcatattcaaagcagctcttcatcgccttgaagcacctgaagaactgcaaagttttgcactgcgatataaaaccggacaatatgctggtgaatgaggctaagaatgtgctcaagctatgtgattttggcaatgctatgcttgctggcatgaatgaggttacgccttatcttgtcagccgtttctatcgggcacctgagatcattcttgggttaccatatgaccatccattagacatatggtcagttggctgctgtctatatgagctttacactgggaaagtcttgttcccaggtccatcaaacaatgccatgcttcggcttcatatggaattaaagggcccattccctaagaagatgctgcgaaagggtgcctttacgatgcaacactttgatcaagatcttaatttccatgctactgaggaggatcttgtgacaaaaacggctgtgaggaggttaattttgaacattaaaccaaaggacattggttctttgatttcaaactttcccggcgaggatccaaaaatgctatccagttttaaagatcttcttgataaaatatttatcttagatccagaaaagaggataaccgtatctcaagcacttagccatccttttatcactggcaagtgaaataagatgctgattcctgttgacattgaacttagcatctaccttgtaaaatagaatttgggttcctcttgtctaatcatccacgtttctgtcttgtgtcctgggagctacgagaccgagtacgtggatgaagcacggaactatggaagagatggctacctgcagaccttgctgcatgcacttatcatttggatatgttctgttgcttgattctgccagggcctctgctgtgtgcgcattttatatgcggtaagggccaacataagaaggtcctgggatggagatcgctgacccactactcacttgacatggtaaatcctttgaactctggatgtcttcctttgttttattcttaaagagttcacctaatagttggtagtgttttggtataccatggatggttcattttttcagttttggcagcctttattattttggatgtgtttctaatatttagagtgtttcattgagttatttcttttttcattcattttatgtttcatcaaacattaatctactcaataattttctacggtgtgtgtgcaccaaaattatccacaataatgggttgtgaaattcaagtatataccaattacttcaccgtaaaagctctcctctatcatgcaatggagtttgagtttcatcatttctgtaaaaaaaatataggagctgaaaaccactcagactactagttttagaaccaagtgtccaggttgcgctgcaggaagtggcttagtgccctttggtgccttgccccataccacacagctctgtgctctgcttctgtggtttcttaacccaggttgctgtccgagttgagtggtttggtcgctgaaacttgtgtatggcgcatctgctacattctttccccctagggtgtgtgtggggaggaaaagagacttgagttgaaaaagacagttttaacagacttgagttgaaaaagacagttttatttgccacatgttaatcaagaataaacactggttgcattagacttaaaaaaaaaaaaa

SEQ ID NO: 44825 - DNA, 394 bp, Setaria italica
  Peptide Sequence Number=SeqID_110799
cggcctagttgatactcaggcggttagactcgagtttggacttgaaacatcaccttcatttgtacgtttatctgtattgtagaagcccataaatggcgaaccatctacatactattgtaatgttggtcttgaacggattcttgtatctagttacattctatggactactaggtgcattccattccagtacccatgatctggtcctgaaatccaaatttccctggctttcttctttatttgcaatctttctagaactatgtaaatatgataaatggaatgtatccaataaagcactcttaatgttaaattatgatagtaaacacaattattcttgcttctaaaccattcgacgcgccgcatggacatgtttctcagtgtttgagtatggcactgt

SEQ ID NO: 44826 - DNA, 313 bp, Setaria italica
  misc_feature (313)..(313): n is a, c, g, or t
  Peptide Sequence Number=SeqID_110800
gcattcttgggaatgacgggaatcttaacgaggatgcaattcaagagtatgcagatcgtcttaaggatttgttgccatcagaccacctcaagccactaaagggtttgaaaagtcgtgccttcttggacctactggtggaggtttcttgttttctatgaggatgatgctgtgctaatgcagctcatgttgtgagtgaagttgcttgttgttagcggagttgtcattcttagtcgtagttgttgtagggttgcagttgttgtttttttcttccattgtcgacccctttttcagggattaaagttaaaaaaaaaan

SEQ ID NO: 44827 - DNA, 453 bp, Setaria italica
  Peptide Sequence Number=SeqID_110801
agcagcctggtagtatattcttctattctgcagtctaaagcttcaggccaccttctttgagcaggggtgatccatggcaaaggtatgaaaaagaaaaaatcactctaataatcttgttattagcaagttatcgagacgcctcaaacattctatatcagtcttggtcgggcgcacattgtcagctttcatcctttctctgaacccgtacggtgtaaccttagcgctggcataggctgcaagtaacaaattataaggcggagtcctccctgggtacctgatctgctttagcctatcaaatatcttctcggagttatgtatgtcgcccttttttgcataggcactcagtaaggttatgtacgagcggaaaaggggatgtctgtcaggattctcttctgtcacattcaccagaaatgagtcggctttcgctaactcacctgaattcgcgtagagctt

SEQ ID NO: 44828 - DNA, 597 bp, Setaria italica
  misc_feature (3)..(3): n is a, c, g, or t
  Peptide Sequence Number=SeqID_110802
tgntaaaaccaagacgcattgcgttgtagtccgatttagctactgaaccataaaactgcttaacaaatgaatgcagccaagacaatgtcatagaatctttgccaatccccttgtaatgttctctaatgaatgaaagttgatgcacaggtagcaccttcttaggtccgtttcctgcagcattgtttttctgaatttcctcctcccactgtttccatttgtgtatctttgcacctcccagaagcatggttgtagcactgaaaaagacatgcgccacagcaagaacaaatatgaaaatgtgcagctggtgcaaggcttcttccgacagcagtggaacttttccctgcatctggcagagcccggcctcggccccagcctcaccctctccgagcacccgcgccctgctgatccctccgaggatctcggcggcggtaaaacgcgctctcgtggcggcgaccccggcaggctggtgagcctccggcctctggcacggcagcatgtactctgtccagctgggagggatgcatgtcctctggatcgtctcctggaacgccgtcatcagcagggatatgaaccccagaagcatcagctcttctttga

SEQ ID NO: 44829 - DNA, 713 bp, Setaria italica
  Peptide Sequence Number=SeqID_110803
ttttttttatttctttaccactgcgcgtccatcatcaggtttcaacaaattaacagtgaggcctcatcaaaactcaaaagtatcaggttcgggatcatctgagtaattttcgacgcagatgactacttgtgagattacagatatatcagcactattttacggctgctgtgagtgaagttacctgcgaaaactatgccatgtctatgctttacaacacaggaaaactacaacgtgatacgagacatcgctgcagagcacaaaagttactatcgctccaccactctctgcttccaactgcctctttgtcttccccagctgccgtttcaccgttccaattctaggccacatcgtcgccgtgcatgatttcggccgtggagttgtgcatggattcggccgtggagttgccctccttcaaccccgatctcttcttggccttctccgcccagcccaggacgccctgctgcacgtgctcgttgaagatctccttcttgtagtagctccccatctgggttacaattgcatacagaggcagggtgctgtagctgcagagaagctgaataagaaccccgataacaagcctcggcacaataaaacgaacttgccccatgatgcatgagtcgaatccataagtgctctagagaaggaaaagggaaggtacacaacgtttgttttagggttagttatcacatctcagtgcagtttaggaatgatgt

SEQ ID NO: 44830 - DNA, 871 bp, Setaria italica
  misc_feature (1)..(50): n is a, c, g, or t
  Peptide Sequence Number=SeqID_110804
nnnnnnnnnnnnnnnnnnnnnnnnnnnnnnnnnnnnnnnnnnnnnnnnnngttttctatgaaccttggaattttaattgattaaatgattaataggccaccgagttccatttaacctaacagcatccaacttttaccagaggcctctgacactgcaagccgccgcatcgccattgccgatggcatcagcgcctacctcttctcgccttgtcacctgtgaggctccactcgaacaactgcgcagaccacaaagccaagatattacggcaaaataaatgcactacttcacggcctgctgggacaaacaactctctgcaaaaattgtggcatatgagcatgctacatcattacaacacggacaccctactgctcgatcactctgtgtttccaacggcctccacgtccgccccagctttcgccatttcaatcgtagcagaaggccctgctgaatcggcgttgctagtcgattcggccttgtttgcagcccccttcaatcccttcctcatcttgaccttctgcgcccagcccaagacgccctgctgcacatgctcgttgaagatctccttcttatagcagctccccatctgtgttacaattgcgtacagaggcagggtgctgtaactgcagagaagctgaataagaaccctgcaagtacaaggacggatggaggagtcagaacagattgaagtttgcctattccctatagggaacaaatggaacaataaactggaggcatttgaaatatctgaaataccagcctacaaaaataatatctgaaatacccgataacaagcctcggcacaataaaacgaacttgccccatgatgcatgagtcgaatccataagtgctcagtactccagaagaagaacgc

SEQ ID NO: 44831 - DNA, 486 bp, Setaria italica
  Peptide Sequence Number=SeqID_110805
cttggctgccatggccgccggtgctgccttcttcaagagcggcagcccgtctcatcagctcgagcctcgccggcggacgtgccgatgccgacccggccgcgccgctgccgctgccgccattgttcttgagcgctttcctcttcttggccttctgcgcccagcccacgaggctctgctgcacgtgctcgtcgaagatctccttcttgaagaaggtccccatctgggtgacaatggcgtacagaggcagggtgctgtagctgcagacgagttggatggtggccccgacgacgagcctcggcacgatgaaggggacgtgatccatgatgcaggagttgaaaccgtaggtagtaagaatccagaagaagaaggcgatctcaaacgcgttctggaagaggatgaagtggatcaggtacaagacaattttggccgtccaaaccagaagtgttcatctgacgggttgacgaccaagtcgccctcgattgcgga

SEQ ID NO: 44832 - DNA, 349 bp, Setaria italica
  Peptide Sequence Number=SeqID_110806
aacgacggcgcgcgccgactcgccgccctacggcctcgactacccgacgcaccgcgcgacgggccgcttctccaacgggcggaacgtgccggacatcatcagcgagtacctcggggcggagccggtgctgccctacctcagcccccacctcgacggcggcgacctgctccggggagccaacttcgcgtccgccggggtcggcatcctcaacgacaccggcatccagttcgccaacatcatccgcatccagaagcagctccgctacttccagcagtaccagagccgcgtgcgccgcctcctctgcggcgacagcgacgccgtcggccgcctggtgcagggcgccctcgtg

SEQ ID NO: 44833 - DNA, 475 bp, Setaria italica
  Peptide Sequence Number=SeqID_110807
ggcttggtgcctgatgatgatgatgagcctcgtgcagctgctgctgatccagcagcctacaacaatggtggagtgccagcctcgcgccttcttcgtgttcggcgactcgcttgtggacagcggcaacaacaactacctggcgacgacggcgcgcgccgactcgccgccctacggcctcgactacccgacgcaccgcgcgacgggccgcttctccaacgggcggaacgtgccggacatcatcagcgagtacctcggggcggagccggtgctgccctacctcagcccccacctcgacggcggcgacctgctccggggagccaacttcgcgtccgccggggtcggcatcctcaacgacaccggcatccagttcgccaacatcatccgcatccagaagcagctccgctacttccagcagtaccagtacctaagtaagtaccgtacgttagtacgtaccgtaccttaccttacggtacta

SEQ ID NO: 44834 - DNA, 1277 bp, Setaria italica
  Peptide Sequence Number=SeqID_110808
tttttttttttttgttttgaacccttctcaatatattcagatgtgatgccttctggcatctcagaagggtcattcgaaatagcaggttgcattgcacagatatatagatacaaatatgatctcacttgtaatctgaactcaagcgctgaaatgaaacgaaatagtagaggacactcttggtgttcacacttgccaacactcataaaatccactccagctagattgctatttacatcacgacattatagatagaacagaagtatcccactctattcccaaactctccggcttgaaactcaagtaatatgccttcttgatgtcttttgttctacattctatgattatcaatctgccctgcaccttgactcattcacaaccgattttggtgtcaaagctgctcaggcagatggcaaatgcctgaaatgcagagatgggataacggtagtccatggtgaacaggtccttccctaccttgccaaactggagtataacgtcgtcatcctcctggttacttggagttggagcactctcacctgaagccaccaactggaagttctttacggacgcaaccgttacccgcccatggaaattgaggcaccagcactgaagctgttgatgccaacttggagacttgttcttcagcgccaccttactttcattctgagcacctgaactatccagttgacctgatttcgatctgaagaatggaactgatgcaaaagagctagagttactagatggaaattcagtctgcgtgggagcagtccctccttctttaatcgctgatgcagggatagaatccataacacaattcatctttcttggccccctagaacccaagacattcacttcataagaaatgtgggaaactggatagttcccagcaggcggaccacccttcatgggagaaacttgggctgaaccgatcatgtgtgcagatggaccctttgaaaccacagctccggcacaaggtggatgagcatcatagacagtaaattttgtgcctaggaagtttgatcttaacttgccaagataggtaccattcccctttgaatcaagcgaaatcagatattcagtgcatgaaggtctacggtatttgcgtgcagcaagtaggaatttcccatcatcaactaatgcgtcagtgactccaaggcacagaaaatatgactgagtagcccggttcctcctaatgaaacatttgacaggggcatcccttgggccaggctgcttgagagagatggggaaggtgagcttcccagacgccttccggctacggg

SEQ ID NO: 44835 - DNA, 484 bp, Setaria italica
  Peptide Sequence Number=SeqID_110809
aataaatgatgtatcgccacatatgcaagctgcagaacatgctgtgttaaagagatatgagcagtcattcatattcacggtatgtgccgatcattgcatcgatcttcttcttgagaatatagcagcacttgataacgtgaaagatgtcctaacgaaggcaaaggaaatcactaggtttttgtatggccatgcactgccaatggaactgaaaaggctgtatattggggatgccgagatcataagtaattctaacctgaaatgtgtggctatgtttgacactctagaaaagcttgtgtctcggagggaaaatctggtggagatgtttaactctgcagactgggtttcctctgatctggcttctactaatctgtccatgggtatatgtgaggtagtacagatggaaaatgcattctggagtgctgctgcccacgttttgaaggtcacaggcccacttatcagagttttgtacaaactggaagatgac

SEQ ID NO: 44836 - DNA, 709 bp, Setaria italica
  Peptide Sequence Number=SeqID_110810
tggttaaaggttggtagtattgatctgataaaggtggaacaaattgcgcatgcctggctccctgtatggctgcaggagcactgccgtccgggaacgggaagaaggacgggtgggtgtggaggtagtggtggccgtggtggccgtgcgacagtggggtgggcgggaatgccgggttgaggagctgtccctcgaaggggaactccgggtacgccgggatgcgtggcttcttccgcggcggcgagaaggaggcgaggtggatggccggaatgctcgagacgagctccaccagccacgggctcacccgcttcacgttctgcaggaggtccggctcgtcccaggtcacctgaaggaggcgccacggcgactgaggccagcggatggggtcagcgacctggacgccggcgacggtgcccatgaaccagctgatccgggtggagtcctcggtctcgaacgccatcttgaaccgcatccccggcgaccactgaacccgcatcgccgcgcggaccgacgcgacgcgcacgcagaactccggcgtgctcgcgcgcgggtagtacaccacctcgaacggctggccggcgctcgccagcctcgctgcctcagccacgtcttccgggcggaccttgccccgcgccttggcggacccgcacgggctcacattgcctcgcatcatgcccgcgtagtggtcccacccgggcatcgggagtgcttc

SEQ ID NO: 44837 - DNA, 165 bp, Setaria italica
  Peptide Sequence Number=SeqID_110811
caataactatgtaatgtcttccaattgcagcaaagttattgttgaagctgttgaactctgatactgtcatatacagcacatgatggataaggattaagttgctatctacgatggatcatctgttgtaagaaaacggagcacagatcaactagtgcgactgagtcg

SEQ ID NO: 44838 - DNA, 242 bp, Setaria italica
  Peptide Sequence Number=SeqID_110812
taaagatgcaagtgataaaaagatcttagttgacatgttaatctgggctattgacaaccctccaccagcaaattatttgctaatatctggtgaccgggacttctcaaatgcacttcataagctagtacagagacggtataatattctactagcacaacctccaaatgtgtctcaagcacttacagctgcagcaaaacatgtttggctatggaaaagccttgtggctggggaaccaccattgg

SEQ ID NO: 44839 - DNA, 413 bp, Setaria italica
  Peptide Sequence Number=SeqID_110813
tttcattgaacctggacaccttcgtgtcgtcattcactggtcgtctctctgctttgcctttgcggcttcccgcctatataaagagagatccaaggttcaggccaaaccaagcctgaaactctggaagccttgaagaataatctttaagcatatactagtaacgttgtgcattgtcgtgcccaacacatacacagccatgatgacgaggaaggcgaccgtggacgccagggaggcggaggagatcaggcggaggaacgctgagctcgagagggcggtggcggaggcggcggcgagggaggagcggctgcggcgggagctggaggcggcgctggcgcggctggccgtggccgaggagggcgaggagaggctgtgcgtgcagctgggcgagctggaggaccgaaggaccgtagaac

SEQ ID NO: 44840 - DNA, 251 bp, Setaria italica
  Peptide Sequence Number=SeqID_110814
gcagcattgtgactgtagtccctgagtcaactgtggagatgatgggctttctgaagcacttgggagtattaggcttgatgtagactctaccagtaaaccatggtctacatcactagccaatgttgcattatcatcactggctggcttgaatgatttgcttgaatgtccagtgtgtacaaactcaatgcgtccacctatactccagtgcccaaatggccacacgatttgctccagctgcaagttgggcaatg

SEQ ID NO: 44841 - DNA, 374 bp, Setaria italica
  Peptide Sequence Number=SeqID_110815
tgcctacttggactgccaaaggttggtgcgccgccggatgtgtcagataggctctcggccatggcggcgaagctggacgcacagccggggccaagccggcggcggcacgagccgacgcgtgctgacccggagctcgaccagttcatggaggcttactgcaacatgctggtgaagtaccaggaggagctggcgcgcccgatccaggaagctgcggagttcttcaagagcgtggagaggcagctcgattcgatcaccgacagtaactgtgaaggcgctgggtcgtccgaggatgaccaggacgcgagctgccctgaggagatcgatccctgtgccgaggacaaggagctcaagcaccagctcctgaggaagtacgg

SEQ ID NO: 44842 - DNA, 1072 bp, Setaria italica
  Peptide Sequence Number=SeqID_110816
cacagctctgctctcctctcccgtgaacgacctgcagcagcagcagctatagcctagcatcttgagaagctggccgagaatcccaacaagatggggcgcggcaagatcgagattaagcggatcgagaacgcgaccaaccggcaggtcacctactccaagcgccgcacggggatcatgaagaaggcgcgggagctcaccgtgctctgcgacgccgaggtcgccatcatcatgttctcctccaccggcaagtaccacgagttctgcagcccaggaaccgacatcaagaccatctttgaccgctaccagcaggccatcgggaccagcctatggatcgagcagtatgagaatatgcagcgcacgctgagccatctcaaggacatcaatcgcaacctgcgcacggagattaggcaaaggatgggtgaagatctggacagtctggagttcgacgagctgcgcggtcttgagcaaaatgttgacaccgctctcaaggaggttcgccacaggaagtatcatgtgatcaccacacagactgaaacctacaagaagaaggtgaagcactcgtacgaggcgtacaagaacctgcagcaggagctgggcatgcgcgaggacccggcgttcgggttcgtggacaacacgggcgccggcgggtgggagggctcgtcggtgacgacgctgggtggcggcgcatcggcggcggacatgtacgccttccgcgtggtgccgagccagcccaatctgcacggcatggcctacggctcccacgacctgcgcctcggctgatctgatctagctagcagttgcctgcttgccacgcgtgcagctggtgtcgctgcacgcccaatgcaaagcaagttcatcacggagtaatcgtccaggtattattgctacgaataaatgaagagcatgtaccgtccggcaccagctagctctcttcgtagtactgtcatgtaatgcattattgtctgtgatcgtctatgattattgtatcgtggcactacgtttgtactgttgattacattgtttgcaaatataatgctactgtattactgcatgatgatgtgatgacttgaac

SEQ ID NO: 44843 - DNA, 248 bp, Setaria italica
  misc_feature (186)..(248): n is a, c, g, or t
  Peptide Sequence Number=SeqID_110817
taagaagagagtgttgtgtatcttcgatgatctgcccatgttcacatgctataattggtctgttcggttatcacttgtcagttgccactcctgtaagaagatagccgtgaacttttcatgttggtgtgtactgctagacgtagcaacatcttaatgtgcagaatcccagatgtttaagaaaaaaannnnnnnnnnnnnnnnnnnnnnnnnnnnnnnnnnnnnnnnnnnnnnnnnnnnnnnnnnnnnnn

SEQ ID NO: 44844 - DNA, 994 bp, Setaria italica
  Peptide Sequence Number=SeqID_110818
gcggcgagatgaagtcgtcgctgcggagccggcaggagccgcggcgggtcagcaacggcgtcatcatcggcgccatgctgctgtcgctctgcgtcctcagcatcgtcaaggccagatactgcgccacccccttcggcaaggccgaggaccagctccaggagcagatgaacgccagcatccggatggagacggaggagtcgccggcaaggacgcccggagaggaggaagaggatgaggaaaaggaggaggtgctgcccagcacggcgcccgcggtgaccaagccggccgccgtggccacccccaccaccggcggcagggacaagaaggggaaggcgaagccgacgtgctacatgacgagcaagcggtcggagcggtgcgacgcgtccggcgacattcgggtggacgggaaccgctccaccatctacgtcagcgggatagaccgggagtggcgaaccaagccgtacgcgcgctaccacgaccccgtcgccatggcccacgtccgcgagtacaccctcaagccgctcggcgacggcgcgccggcgtgcacccggaaccactcggtccccggcttcctcttctccaacggcgggttctccggcaacctctaccacgactacaccgacgtgctggtccccctcttcatcagcactcaccagttcaagcgccgcgtccagttcctcctcagcgggatgaagccgtggtgggtgggcaagttcacccccttcttccgccagctcacccggttcgacgtcatcgacgtcgacaacgaccaggaggtgcactgcttcccccgcatcgtcgctggcgccaccttccacaaggacatgggagtcgacccgcggcggtccccggggcacgtctcggtggtcgacttcaagcgcgcgctccggcgggcattcgggctcgagcgcgaggcggcgtcccgcggcggggccacgggcgccgggaagccccggctcctcatcatctcccgccgcgggtcccggcggttcct

SEQ ID NO: 44845 - DNA, 254 bp, Setaria italica
  Peptide Sequence Number=SeqID_110819
taaatcagtgcttaatgtattgttggactgaggttgttaatgtttaatttttcatagcttctgctacccattgatattagtatattataacctaaggtctggaatgttgtttataaatacttgcacttgtgtcaacagcttctttacaaatacactcatacttcctacaataaatggaccaactgagggcctgatgttgatctatgtgtcccatttgtttacatttcttactggtaaccccccaaccccaaatt

SEQ ID NO: 44846 - DNA, 1623 bp, Setaria italica
  misc_feature (1585)..(1623): n is a, c, g, or t
  Peptide Sequence Number=SeqID_110820
acgaccccctaccaacctccgaccacccccgctcccgccgccgaccggccggccgcgagcccgaccgagccagggatgggtttcatcggcgcgcacggcgtggagacgctgaagcggtacaagtacagcggagaggaccgctcggtggtggccaagtacgtgctccagcccttctggagccgatgcgtcaccctcttcccgctctggatgccaccaaacatgatcacacttacaggatttacatttctggttctatcagcgctgcttggttatatatattcacctcgtcttgacactgctccccctaggtgggtccatcttgcccatggattacttctcttcttgtaccagacttttgatgctgttgatggtaaacaagcaaggcgtactagctcatcaagtcctcttggagaactttttgatcatggatgtgatgcacttgcctgtgcttttgaagccttggctcttggaagcaccttgatgtgtggaggatggacattctgtttctgggtggttgctgctgtcccgttctatcttgcaacctgggaacacttctttacaaatacactcatacttcctacaataaatggaccaactgagggcctgatgttgatctatgtgtcccatttgtttacatttcttactggcgctgaatggtgggcacaggattttcggaaatcgctacccatttttggttggattccacttccatttctttctgaaatcgaaatccccttatatgttattgtgctgattcttatgatcatgggtgctgttatacctactgttagatccaatgtcagtaatgtccaagaggtagttgaggcgcgcaaaggaagcatggcactggcattagcgatgatccttccttttattgcgctgttagctggagtttctatctggtgttatctttctccttcgagtattatgaggaaccagccacatttgcttgtaattggaactggctttaattttggatatttggtgggaagaatgatacttgcccatttgtgtgacgagcccaaaggtctaaaatctgggatgttcatgtctttggtgtttctctgttttctgattgcaaatgctcttattgcaaagatcaatgatgggacacctttagttgatgagcttgtgctgcttgttctgtattgtgcatatacagtgggcctttacctacacctcgccgtttcggttgtgcatgaaatcaaggatgctcttggaatctattgcttcaggataacgaggaaggaggcttgaatttcttgcgttctggatatattagttaacaaatgctagtacgtagcaacaattcatcaccatgaacgctggaagtgtgcccctggaaatgccacaatcacctgctggttgttctgagaaatatagggattgcaatgcgtagttatcttggtcatttgacagtgacactgtaatgtacattatggggttatggatgtatggtagtaagagggcccttagaagatatgacgaagggacgcaaatagtgttggaaaattaaaatcatgcttggagaaattgatagtagcaggcgattggcttcggtttttctctaagtttaaaaaaaaannnnnnnnnnnnnnnnnnnnnnnnnnnnnnnnnnnnnnn

SEQ ID NO: 44847 - DNA, 986 bp, Setaria italica
  Peptide Sequence Number=SeqID_110821
tctttcgtactaaaggttgtaaaggtaacgtccggtcgggcgtgccggtgatcggcatcggcgacgcggagcgtatgcccggcgcgatcgggtgggacgagctcctcgccgccgctgaccggaccggcgcgccggtggtggcgctggagcccgtgcagcagtcggacctgtgcgcgctgccctactcgtccgggacgacgggggtctccaagggcgtgatgctgagccaccggaacctggtgtccaacctctgctcctccatgttcgccgtcggggaggagctcgccgggcaggtggtgacgctggggctcatgcccttcttccacatctacggcatcaccggcatctgctgcgcgacgctgcggcacaagggcacggtggtggtgatggaccgcttcgacctgcgcaccttcctgggcgcgctggtggcgcaccgcgtcatgttcgcgcccctcgtgccgccggtcatgctggccatggtgaagagccccgtcgccgccgagttcgacctctccggtctcgccctcaggtccgtcatgaccgccgccgcgccgctggcgcccgacctcctcgcggcgttccaggagaagttcccgggggtgcaggtggaggaggcgtacgggctgacggagcacagctgcatcacgctgacgcacgccggcggagacccgcagcggggacccgtacagatcgccaagaagaactccgtcggcttcatcctgcccaacctggaggtgaagttcgttgacccggacacgggccggtcgctgcccaagaacacccccggcgaggtctgcgtccggagccaggccgtcatgcaggggtactacaagaagaaggaggagaccgagcgcaccatcgacgccaagggctggctccacaccggcgacgtcggctacatcgatgacgatggcgacgtcttcatcgtcgaccggatcaaggagctcatcaagtacaagggcttccaggtcgcgccggccgagctg

SEQ ID NO: 44848 - DNA, 528 bp, Setaria italica
  Peptide Sequence Number=SeqID_110822
aaggccaccggcgccgacaagcccgtcgagcacgcgggccggaccgcggggatcaagaaggcgctcgtcttctaccacggcaagccgccgcgcggggtgaagaccgagtggatcatgcacgagtaccggctcgccggcgccggcgccaagaagcccggcaaagacggctccctcaggctggacgactgggtgctctgccgcctgtatcataagaagaacgagtacgaaaaaatgcaggggcacaaggagaaggtcgtggaggcggaggcgtcgctcaccgacacgcgcacgccggagtcggagatcgacgacgacgcgttcccggcgttcgacgacatggctcccgctcccgctcccaccaccgcccccgcccccgccggcgccgtccagcccaaggaggaggtgcaggatttcggcagcctcggcggcgacgactggctcgcggggatcaacctcgacgacctgcagatggacgccgacttacaacatgctcgtgtcgccggtggcccccaaggcggatcaggacgg

SEQ ID NO: 44849 - DNA, 416 bp, Setaria italica
  Peptide Sequence Number=SeqID_110823
cggcgcctctgcaggcctgcgatagttggaggtggatttgtcccaatgcagcaaaatgcaagtggcttcgagatacgtgggaactcaaaaggacggctctcatacaggctaccatcaacatacagcctcaattcactttcacccttcccaagcaaaccatgcttatttgtgtgctccaacccaacaaaataccaacactgaggcttgaacgcataagtaaagtgcaaagaagctttcttacccctcccgccaacactctccaccactaagaactggccatgaaagtatgcctctacaccctgattatctgaagagagaaagctgaaaagccggggacatgtgtgttgttccttctcctgcaagggcactagctgccgcagcagctgacattgctgatgattttcccgatgttgccg

SEQ ID NO: 44850 - DNA, 361 bp, Setaria italica
  Peptide Sequence Number=SeqID_110824
tgggtgctggattcttgggtaaaggttattctggtgatttgtgacgacttccttgatgtgaggtgttcacctcggagatggtattgctttgatgcattcttgattgctgctgctactactgcataaacctctacagccatatatgggtttatctagtattattgaccccgtttctagcttgttgctattaagagttgacatggcctacccgcttctcaggttcagccgactacgacttgaagatggatgagaagactagggtgttgaccttgctcaagttgcctgttggatatggagatccactcacttgatgcgctacgcttcgtaggtctttttctatgtttgatgcagtcctggcatg

SEQ ID NO: 44851 - DNA, 204 bp, Setaria italica
  misc_feature (150)..(150): n is a, c, g, or t
  misc_feature (158)..(158): n is a, c, g, or t
  Peptide Sequence Number=SeqID_110825
gaatgcagtcagttgattgttttcatattcagaatttgttcaaattcctgtaaactatataaaatatatagcttctatttcaaccaggaactttgtactcaattaatttgttatataaacgagtgatggtagattcgcttcaaaaaaaanaaaaaaanaaaaaaaactaaaaaaagagaactagaccaaggacacacagggata

SEQ ID NO: 44852 - DNA, 386 bp, Setaria italica
  Peptide Sequence Number=SeqID_110826
gccggggcgatcagcaggcagttgcactggctgtcttgctggggtcaaagttcttctcaggatgggctaatgggcctaaaaggctttttatgctatttttatgaggattttttctactgcgcgtgggcctcgccccgggctgcagcccggggcccagatccgcccctgggggtgaccttggttccagcaccaggtgtcgcagtccggcgagacgtacggcgggcacacccgggggttgcactgcgcctgggcccccgtcgtcaccgcttcccttacaccggcagtagtggagaagaggaggccgatcacggccaccgcgacgacgacgagggcgaccttgcaggccgcagaaggaaacttggctgccatcgtttcggcctctctag

SEQ ID NO: 44853 - DNA, 465 bp, Setaria italica
  Peptide Sequence Number=SeqID_110827
gtgattaccaaggttatctgattccttttgccttggtgtgaaatgagtatagtatacaatttcaagaaatgcagaatagtaagcttttccttctctaaaaagtagccaagtaacattcctgtggaattgaaggaattaaagtttttctacagggataattacattacaaaagcggctggtgaaaattcctacatgattcacaatcctgattttgtttcctctgaaaatattatgagtaacacccttagtacttgtttggataaacccattccctcccgaaacatgtggattagagtggaaaatgaactgatttcaacctcaatccttcccaatacgcatgggttggaggggatttatcatgtctccaaacaaagcctaaaagtgtcctgaaaggcttttgcattccaaaacaggtgattaatgaaaaatcctacaaaaacatgtaaaaattcctctggaaatcat

SEQ ID NO: 44854 - DNA, 1906 bp, Setaria italica
  Peptide Sequence Number=SeqID_110828
acagatgcctcagcttgggagcatatgcgatgagggggatgaaggggaggtggataggaggagctctccggttttttctttcttttcatctcagctcgtttgctgttactgctagcgacggttgttcattgtatgtacgtgcctaagaaggagttggaggaggaggcaataatcagattggggggagagggagcgatccatttgacatggagtttgccacaggggcgatcggcacactcctccccaagctaggcatgctgctcaaggaggagtacgacctgcaaaagagtgtgaaggagggtattaggttcctcatggccgagctcgagtgcatgcaagttgggcttaagaaggtctccaacgtgccggtagaccaactggacgagcttgtcaagatctgggctagggacgttagggagctatcctacgacatggaggacatcgtcgacaccttcatgctgcgtgtagatggccttgaggcaaacaagaaacacgacatcaaggggttagtccagaggtgctgcaattcattgtccaaggtaaagatttgccacagcataggcaataaaatcaaatatatcaagagccaagttgaggaggtgaagaaacggcatgataggtacaggattgatgatgtaattgctcagcacccgactgttgaccctcgcatctttacgttgtttgaggaggtgaccaatcttgttggcattggcaagacaagtaatgatctaatcaaaaggttgttcgggggagatgattctaccaataaaaaactcaagattgtatccattgttggatttggaggactagggaagactactcttgcgaaagcggtatttgacatgcttgaaaagcaatttgagtgtactgcttttgttccggtgggccgagaatcagacataaagaaagttttcagaaacatcctaattgcacttgacaagcataagtacatgggatttgacacagcagcactgagtgattggcagcttattaatgagctccgggaacatctcgacaagaggaggtatttgattgttattgatgatgtatgggagacatcaacgtggaagttaatcaaatgtgctctggtggatggtagttgtggaagtagagtaatcacaacaactcgcatttctcaagttgcccatgaagttggtgatgtttatgtcatggagacactttctgatgatgattccaaaaagttattctacacaagaatattggatccagtctctcaaggcgatgaatgcaaaggtcaaacaaacaatcaattggatgaggcaaccaaaaggatcttaagaaaatgtggtggcgtaccattgtctataattacaatagctagtttgttggttgacaaacccgtggaggattggtccaatgtatacgactccattggttttgggcctaaagatcaaaacggtactgttcagaacacaaggaatatattgtcattgagctactatgatctaccttcatacctaaagacttgcctgctgtacctaagcatatttccagaagaccactggattgagaagaattctttgatatggatgtgggtagctgaaggttttcttaaggaggagcagggaaaggggtcattcgaggatggtgagagatgcttcaccgagctgataaacaaaagcatgatccagccaacaaagagtgatgaggatgccgctgtagatggttgccatgtccatgacatggtgttggatctcatacgcagcttggcaactgaagaaaactttataaaaatactagatagggagcatcaagattgctcttctccatggagcagtagtgtccgcaggctagcattgcacgaggggagcaaccaagataaaaacaataacctagctgacggcatggcaaagctgaggtcattcaatgccattaagtgccctta

SEQ ID NO: 44855 - DNA, 465 bp, Setaria italica
  Peptide Sequence Number=SeqID_110829
ttcctttacatacctcgacggtctttacaacagataaagcaacgcccttatagtttcctaatgattccaagctactacacatttcatcgacaacaacctgaggatgctcatttacattcttggtcatgaggatgctcagaggtgaggaaagggttagactgacatggtacgatggtagcgtgaaattgttagcgtcaggagcctgctttcttcctcatgttcctccatttgaccctcaggtcgcacgggaggcgtgtcctgtgaaacacgttcctgccgtgttctaatatctgaacccatggaatagccccgttgtcccgtggggtgaatttttccattgcctcccttaaagctgcttcctcctcttctgtacaacagagtttggagcgccttccagtcggcgcagcaggattcgaagcttgggtgggtatgcatattttcttttccttgacggtgaaggcattg

SEQ ID NO: 44856 - DNA, 417 bp, Setaria italica
  Peptide Sequence Number=SeqID_110830
gaggaagagtattgtcattcctgttgatgaggggcggaaggttggcaggaagggtaaagtgaagggcaagcgtgactttgaaagtgagatggaagaagcaagtatagacattaagaagagcaagaagggtaagattgaggaggggaagaagaaaaagaagagcgtgatgtgtggaggagatgatggtgaagtccttgtggatggactagaagataagaagagcaagggggtgagatcggatggaaaggtcaataagacgaggaccagggtaaaagtataaggttaccgttgatagtctctgcttgttaaatggtggactggcaatgacaatgttctgcattgaagacaggtggatattcaaagcaatgataaactggcttagtcaattgtaatatgctggaagaaccataccgtttg

SEQ ID NO: 44857 - DNA, 485 bp, Setaria italica
  Peptide Sequence Number=SeqID_110831
agaagactgacaagaagaaggcgctgatggatgctgaagccaatggtgatgagggagttgccaatgagagtggcaagaggaagaggaataagaaggatcagatcaagaatattgagatgcagggagaagttcaggtggaaacagagaaaaagaagtggaggaagagtgttgtggtttctgtcgatgaggagaagaaggttggcaagaagggtaaagataagggcaagcgtgatttggaaaatgagatggaagaacccagtataggcaataagaagaataagaaaggaaagattgaggaggggaagaaaaagaagagcatgaagggtgatgaagtctgcgtagatgagagcctggaagacaagaagagcaaggggaagaaattggatggcaagatcaagaagacaaggagagggtaagactgtaagagtatggttacagttgatattattgctggaaatgcctgttctgcattgtaccgtttatta

SEQ ID NO: 44858 - DNA, 1766 bp, Setaria italica
  Peptide Sequence Number=SeqID_110832
cgccgccgacgccacagaagccacacccggtgccccgtgagacggtggccggcgccgtcgcttcactgaccaagtggatgaagaagcgcgccgaggaggggccccccaacctcctcgccgacgagcgcgacgacctcgtcatcgtccagctctccctccgccgcgtccccgcgtcgcccacgaccaggccacgcctgctcccgctgccgcaccccgtcgtcgcgcacgacggcgcctccgtctgcttcatatccgacgaccgccccaactcgcggtccccgtccgcctccggcctcctcgatgcgtccaagtcgctccaccgcctccccgtctcagaggtcatcccgctctccacgctccgcacagattaccgcccgtacgagtcgcggcgccgcctcgcggcctcccacgacctcttcatcgccgaccgcgccatcctcccgctgctgccgcgcgtcctcgggaaggcgttctactccaccaagaaggctccgatcggggtcgatttcacccgcgtcgggtggccggagcaggtccgcaaggtgctgggctccgcttttctgtacctgcgaacggggacctgctcggggatcaaagtgggtaggctggatatggatgaagaagagatcgtggagaatgtgatggctgcggtggaggcagctgtggaaaaggtgccaaagatgtgggccaacgtaagggcactgcatctgaaggctgtggattcagttgcgctgccaatttaccagattgtgccggagttgggtatgaagattgaggtgcctgtagcgagattggagggggaacttggttctggtgaggtcattgatgctgcagaagtggagactcttgggaagaagattgacaagaagaaaaggacattgaggtatgctgatgccaatgatggagcaggagttgccagtgaggagagtggcaagaggaagaggaacaagaaggagcagattgtgatgcaggaagaagtccaggcagagatcaagaaaaagaggaggaagagtattgtcattcctgttgatgaggggcggaaggttggcaggaagggtaaagtgaagggcaagcgtgactttgaaagtgagatggaagaagcaagtatagacattaagaagagcaagaagggtaagattgaggagggggaaaagaggggagatgatggtgaagtccttgtggatggactagaagataagaagagcaagggggtgagatcggatggaaaggtcaataagacgaggaccagggtaaaagtataaggttaccgttgatagtctctgcttgttaaatggtggactggcaatgacaatgttctgcattgaagacaggtggatattcaaagcaatgataaactggcttagtcaattgtaatatgctggaagaaccataccgtttgtcaaaggttaaaaactgttgtatcagtagcaagatctcctagcaattatgttccaggatgctataacattttggtctctcagggtttattctgaagttcttcaggttttgttagcttaatagcttaagcctctggggtatgaaagtatggtgaaactgtttcttctaagacaatgcactccatctgatcgcaacaattttgtattcatctaagaatagggttgtgttggccttctcctctgaagtacctctcatgtcctagattctgtctggtatactaggcgatattatttgcattatcagactgtattttctcccaccatgcacacagttatccagattttacacaattaacatgatgctttacc

SEQ ID NO: 44859 - DNA, 837 bp, Setaria italica
  Peptide Sequence Number=SeqID_110833
agttgtactatcatgcagttgccagagtatgttaatttatggtggaatggaaaagatcattttgggccaacagcaagtacagatgtatccttgattacaactctgatcatgatttgagttacaaggatataaataaaccatcaacccaatccagcataaattaacatactctgggcaactgcatgatagtacaactatacagatacttattaaattattagtcaatgggaacttcaacttccatcttgagctcggaattgccaagaatcttcataaagtctgggagagtgaaatgtgaatcttttgtgtagccagcttcttctaacacatgagtcaagactttctgtctctgttgctctgtcataaatgaacccgtcagatctcgcaagatgctcaacatgtcatcaaatgcaaccttcccattgcaatcagtgtcatagaccctgaaaataaattccatcttttgctgcaggcttgtgcgggggctaaacgctgacaaaaacgccacaaactccttgaagttgagcccatccagcatcctcaggagcctctgagagaggggattgacggcgaactcggggacggacatgaactcgtccgcggagacgaagccgccgccgttgcggtcgagctggcagaagcggtggtacagggacacgatctccggctgcgagaatgcgtggttgcagtggtcctggacctcctcgatgtcgtactgggtgagcatggaggaggtgctccccatctcggccggaccccgcggacggcggcggcggggaacagggggagtaggagatcgccggagccggatgagacgatggtgaccggtcggggaat

SEQ ID NO: 44860 - DNA, 808 bp, Setaria italica
  misc_feature (801)..(801): n is a, c, g, or t
  Peptide Sequence Number=SeqID_110834
gcaccgggagctacgacgtggacatacagaatgttacttgcggacctgggcacggcataagcatcggcagccttggcgtgcacaactcgcaggcgtgcgtggcgaacgtgacggtgcggaacgcggtgatccggaactcggacaacggcctgcggatcaagacgtggcagggcgggatgggcgccgtgtcgggcatcaccttcgacacggtggtgatggagaacgtgcgcaactgcatcatcgtggaccagtactactgcctggacaagcggtgcatgaaccagtccacggccgtgcacgtcaccgacgtctcctacaccaacgtccggggctcctacgacgtccgcgccgcgcccatccacttcgcctgcagcgacaccgtgccctgcaccaacatcaccatgtccgaggtcgagctcctgccagccagcggcgagctcgtcgacgaccccttctgctggagcgcctacgggacgcagcagacgcccaccatcccgcccattacctgcctgcaggaggggctgccggatgcactcctcgacaacccggacctcaagtgccgatgacaagctgtgcagctgtacgtagtgctagtagaacttactctgatgaatcgctcgtatatatctattctaggtgacttaattgggtacagtaccacaaacgtcatctgagttacgtgcagttgtacatgtgtgctttcgctccctctcaataaacttgcattgaccgtttgtaatgtggattcgaaggataataataagtccagacaatcacgggtgtgttcgcaaaaaaaaaaanaaaaaaa

SEQ ID NO: 44861 - DNA, 3179 bp, Setaria italica
  Peptide Sequence Number=SeqID_110835
tgcagatacatagacactgagaatcattcttttagacccaaaaactcacaggtgttcacatagacacaaggaaatggctacaacaatttgcgcagaacggggaacttttcatcctctctgtttccaactacagtaagctccttccttttttgttgttcaacctaaatcttttgctttgttataaagccaagattttcactgcactagcactatatacagcacaaaagagagaatactttgctacccatgtcatcaggaaactttatcctgcccctattgcatcagacgatgcgaaatgacaaaatgcagcatcaagtcttccggtccgatttgtacactttgacattgtatggaaagagtattagattccttcagggctacttccaagttggccaattatttcactgctcagtctgaaactatcttttgttgggtccccagaaagatcacatccatcctgcatgccatctttcagggagatgtttgtgccatccgccaggatcttattgccattttctatatgcttgggatcaaatagcattgggcgacatcgcttgtcttcattcatcaagcttgaattctgaaaatgatttataagagcagatttcccctggattcgagcatatgccaatgaaactactttctcactgttaaatttttcccactttcgaccagtaaaagccttgtagaatgatacaatgtaagcaggagctgtcatattgatgaaggcatagccaacattgcacttattcttgaaatcgataggcaagtagaagaaatcataagccccttcatgggtttcatctatcacatccaaaagcatcttcgacgtatacttgtttggtatgttttttatcatcaatgttgtccgagtgtcttttccagtaacgattttctctaaatctagctgatactgcatcctgctatcttcttgatcccccatatgtccaattgcatggtttcggccaggctcaagtggaccctcaaaaccaaccaaatcactttgcacagatggagcattgaaacgggaatgcacaccaaagtttgtcacaaggtttccaccagcacggctgggacctatactcccaaacttaccctgtctcatgtacgatgtgtctggtgattcaggattatagccaaagttactttcaaggggcaagacagatggagcagacccaacatggtactgggaaaagtactctgatggtccaaaggaaccacgaaggttcctatagagactaccctggcgttgcgtgatgctattgggaaaatgtgaattgccaataggtggagaatgaaaggctgaaggctgagaatgctcccgcaaggtatgcttattagcccaaagaaatggtgtccccgccagagttgtgaaaccagatgcagtagaagcagatgaagctgcagaagacacaagcgggctcgcactcacaattccaccatgttgttctggaaatgaatgtgaattgtgaaaattggaaacaccatgaaatatatgatcggcaaggatgttcctgttggagcttttcccaatgggtttcattggaggatatcctggagataacccagtaatatggttaccacccaaggggctcatcccactattaaatgcattttcactgagtgtattgaactgattatgttctgttgggcttccaagttgggaccacaaacttggtggggagttggcagaaggtgatccaagatggagcatagtgtgccttgcatcatcttgctcgaagtcatggttaatttgttgcacaaaacttcgacgagctccaccaggacggctaggctccaactttacccgtttaccagcaatatcacttttgtttaatgacctcagggcagcttctgctgcacggacatcatagtactcaataaatctatggtgcctcttttgtggtgtctctcttatctccctcacttcaccaaatgcaccaaatattcgaaggagctcctcatttgaaactgctggctccaaattaaagatcacaagagttccttggttcatatctttatctgacggattctccttgggaatggagaagtggatgtcaagcttcctcctccttagaggtttattttgtagtgtccgcatagctgtacgagcatctcgaatatcatagtaagatatcataacaaatcctctgtgtttcgttgcagtatacatggaccgaatatctccaaatggctcaaacaatgagcgtaactctgaatcttcaacattactgttgatgttcctcacaaacagagtcctggagggatgttcaccaaatggatgctccccagtcactgtcccaacacaactttggaggctgtattgactgctgccgcttccggtaccattgatgatactagtttttgctgtaccaactgtgatggtttccagagggtcaacatccaactccatacccccgctattacggaaaacatcatactcttccagttcctcagcttgattttgcaatttaacatggtcaaaatcattaattacaccagcaaggagctcttcttcatcatcaggtaaaaggtttccaatcaaatgctgcgctacatcatccatagtatctgtcactctgttgttagggcccggctgctttcttgcgggaaacatttcatttattggttgagcaaggtgctccctttctacacctggtaatttaagacctgatggcaatgagcaggagaacaagacagcatcattagatccattagttgtagttgtagatggaactccccaagcccatatgtttctcatctggtgagtccttctagatggaatatttgcaggttctgattgctttggatgaaccccaggttggtccatttcatcagaaaagaaagacacggacgaccgccagaaagaatctgacttggacaatccgtccaaggaagctgtgcttcctcagccgcgaaaggagaagccaatccaagtcctggtgatcccccggctatcgctgacgcgtaggaggccggcgtggtgagtttggggcgagaggccggaccacgaggacggccaagaagaccaagcgttcgaccaaagccggaagaggattccaggagcaatggctcggacggccgccgggccgcgccctcttcgacgcgcccgaggctggagctccgcctccgcgggtcgggctcggcgagcgaatgggaacgggaagggaccaggagag

SEQ ID NO: 44862 - DNA, 772 bp, Setaria italica
  Peptide Sequence Number=SeqID_110836
caccttgagcttcttcagcttgccgatctccggcgggatgcaggagctgatgctggtgttgaggagcaccagctccaccagcgtgtcggccatgtcgccgatgctcggcggcaggcagccggcgagctcggtgttggcgagcacgatgaccgacgccgtcgagttggccagcgtccgcgacgacagggtcacgttgaagcggttgttgttggcgaagatcgcgtcgaggctgagcttcccgccgaacacggagtcggggaggtcgccgtcgaatttgttgaagcggaggtcgaggtacttgagcgacggcagcgacgtgaggaacgacgggaacgcgccggagaggaggttgttgctgacgtcgagctcgaagaggagccgcatgtgctgcatcgaccccgggagcgtgccgtggaagcggttggagttgaggtggaggagcgccacgtcggcgaggagccccaggtggtcggggaggaaccccgcgatgcggccgtggttgaggtcgacgccggcgacggtgaggatgtgcgggtcgtcgggcgccgccgtgcagaagacgcccgtgtagttgcacacgaaggggccgcaccagttggcggtcaggttcttggggtcctcggtgatggcgtgcttccacgcctgcagcgcgatgtacgccgcgtcgaggcggtcgttgaacggcgagaggggcagcgtgggcggcggcgccgccgccggcgaggggaaggagccgggagtggttgggagaggcatggaaggatgaggcaga

SEQ ID NO: 44863 - DNA, 482 bp, Setaria italica
  Peptide Sequence Number=SeqID_110837
ctgcccagctgctcccacgcgttccacatagactgcatcgacacctggctccaccacaacgtcagctgcccgctctgccgcaccgtcgtcaccggcggcgtcgcgctcccgctcgcccgcgacgaccacgaggggtcctggcgggagctgcaggtcggcgacaggcacatcggcccagcggcgaggatggggtacgggagctcctgcaggttcccgaccaagagcggcgccgcgcaggagcccatcacgcgatccttctccatggactgcttcgccggtggtcttggccggaaaccgccgcagaaggaccctgcagctggcagctcagaggccgggccgagcctcgccaacgctgccgccgctgccgccggcagcagcagcaacgtcgtcgccgaccgcggcgccggcgagacgagcgggcggttccgtcggctgctctcgtcgttcgggctcggccggagctcgcggagcacggtgctgcc

SEQ ID NO: 44864 - DNA, 1326 bp, Setaria italica
  Peptide Sequence Number=SeqID_110838
acttgatgcgcccgtcgatcttgttctgggtgttgaggaggaggatggtgcggtcggcgcgcggcggcgggggctcgacgtgcgccgggtgcgccaccgtcgccacgctctgccggaaccggtacgtggtgtcgttccaggccgggcccgtgggaggggtggtgggcggggggcggcgggtgctgctgcggccgccgtagtagctgaggatggcggtgccggtggccgtgctgggcttgcggctaacgacgttggaggcgagccagtagttgcggttggggtcctggtcggccttgatgagcacggagtaggtctcgccggagtagatgttgaggttcttcaccacgaacggcttcacgtagtgcccgtcggcctcaaccaccgtcatagggtgtccctcgatctcaaagttgagcgccgacagcgaggtgacgctggcgatccggaaccggtacgtcttgcccggcacgacggcgaacaccggcgcggcgcactccgggtgggtggcgttgcacgccccggcggccatggccgagcagttgacgaacctcccgcggccattgatcagcagcgactgcggctccccgacccagacgatcggcacggacgcgagcccggtcgactgctcgtaggtgctcctgtgccaccagtcgttgagcaggacgctgtgctcgccgtcgtagcggaacggctcggcgtccggcccgccgggagccgccgcgacgacgatgaggccgttgagccccgcggaacgctgcatcccgtagtgggcgtggtacatgtaggtgcccgggcggtcgacgacgaaggtgtaggtgaagacgtcgccggggaggatggggcactgcgtcacgccctccgtgccgtcggcccagggggtgccgatctgccggatgccgtgccagtggatcgccacgttctccgtgagcagcgagttcttgacccggacgacgacggtgtcgccctgcgtcgcgcggatggtcggcccgggggtctgcccgttgatggtgacggcgagcttgcgcacgcagtcggagtgcgtgaactggtagctgatgtcccactcgtggtggcgcgtggcggcgcgcgccgccgcggccagggagagggtcaggaagaggcagcagaggaggcgcggcggccggcccattgtgagctctgatgagcacagagcaggcgctcgcggctctcgtgtataggtagctacttttgtcgctgtcagggatgggaactgcgcgcggcgctccggcgccggccggatgtggcagcagctggtttggagtgccttgctgaaagctgagctgaggctggtaggctagttagtag

SEQ ID NO: 44865 - DNA, 459 bp, Setaria italica
  Peptide Sequence Number=SeqID_110839
agagacaaacaggagagtagtgaaaataccattgaccccctcgcagttgaaaagtaatagtctggggaaactttcaggaacaagtggatctgtttctgagcatatgggttcaattcctgagctttcgtgcttccgaattgatgaagacagtgacattgcagaagaaaatgagtaccaagacatattacctggatctgtaggtacccagaggcaatctggcagaaaagtacttcaggatatcactagattatgtcaaaacactgggaattctgcttcttgttccataggtatcatggatacaagtgacacaaacttcaccacagaaacttgcagcagtgaactcaatcatcaaccaggtctcaggaatgatggtgataacaagaaagctaaagaaagttatgcttctttagtaaagaaaggagggaaaatgtctcgttctttccgtgacagattaagcaa

SEQ ID NO: 44866 - DNA, 1189 bp, Setaria italica
  Peptide Sequence Number=SeqID_110840
cgtttttaggtaactcactctgctcgacggaacagcagtcagcaacttgacctggtcttcaatggaggtacagatggccgctcaagccgccaagtcagccggacgcagcacgccgcctcatcaccacggcggcggcgcgaagcccgtccccggctacctcaggccgtcggcggggtcctgccaccacgtctgcaagtacggcggcacgcacgcgttcgaggacaaggaggccacgaagaataagaagccccatcccaaggcccggaagcagccggcggcggccgccccggctgagagccagagcagggtgatgggcaaggtgcggtcggtgttccggcgccgcgtcggcgattccagcagggccgctgagaaggcggcttccgccggcaaggggagtaagggaggtggcgacagcgtggagtggaaggacatcgtggcctatgatactacggttccacctcatggatcttctccacagcagcctggtaaggtctcggccccgatcatcggttccggcgaggccgagaaggaggatgtggtgaaggggaacaagtcacacgaaaagaccaagatcgtcactggacaagtgggtgatggtgtaggagctcaaggtgaaacactggacaagaagagcgcaaagcctccgaaagggaagaaacccatggcgacactgctcgtcgagaagatgtccattgatcaagaactcctccaagggtaccaaatcctctccccttccctgatacaaagccgcgcgagcctattgcgtgaccttgagaaagagatggtccatgaagctaccaacgcgaaagaagtgaaaccaatgtattcccttgacgaagaagaagagtacgccgctgcagccgaagcaagcaggcccatcccggctcaccggagggtgaagagcatgagcatgagcatcagcagccggtcggtgcggtacccgttcgcccggcaggcgagcaagaactcatcagcaggcaccttcaagctgcgctccaggagcaccaaggcacccatagcgccgccggaggaggagaagaagccggcgaggctgaggtccaggaggggcgaggatccttcgtcagggagcactggcagaagcatccagctcaggatcaggagcctccggaggcggggtgtcggcggttccggtggcgcgggcgccgggttcgtcgtgccggcggtggtg

SEQ ID NO: 44867 - DNA, 356 bp, Setaria italica
  Peptide Sequence Number=SeqID_110841
aagagctggtgcgacgcatatgcatgggctcaagaggaaaagaagaagaaaaagaaggaaacgagacgcccgagctcccgggcaactgccatggaggcaacggcagcggcgtcgacgcatgcagcgagcgaacgccgggtgctcgccgccgtgatgattgcatgtcgagaatcggagcccttttccgccccggtgcgccatgcacgagttgtgccgttggcgcgcatgatcggccgtgtaggccacacccgcgtacgccccgcgcatgatgccatcctgatgccaaaactttgtcataactcggaaagattatcatgctaatttaactaatcaaactcgctttgggtaatttaaag

SEQ ID NO: 44868 - DNA, 308 bp, Setaria italica
  misc_feature (255)..(255): n is a, c, g, or t
  misc_feature (261)..(261): n is a, c, g, or t
  Peptide Sequence Number=SeqID_110842
gactacggcgtgtgttaatagctagccggcggaggaggcccgggagctggccgtgcattgcatgcatggagcactttagatcctttgcgaatgaaattctgccgtttcttctttcttcttcgatcgccatgcgtattccagatattttccgttctctttcttctgttaattattaaattgttggtacctactactacctccctgcttctaagttctatgagagatcaatgaattctgttggtaaaataaaaaaanaaaaanaaaaaaactaaaaaagagaactagaccaaggacacacagggatagga

SEQ ID NO: 44869 - DNA, 812 bp, Setaria italica
  Peptide Sequence Number=SeqID_110843
tcggcttcgggggccggcccgaggccgaggcggtgaaggtctcgctctccctcgtgtacatgttcatcttcgcctggctggtcgccgccacgggcggcgcctcctacaacccgctcaccgtccttgccgccgccgtcgcatcccacggcggacccgccgtgtacctattcacagccttcgtacgaatccctgcccaggtggttggggcagttctgggagtgaagctcattcagtttactttccctaatgtgggtaagggagctcgcttaagtgttggtgctcatcatggagcgttagctgaaggattagcaactttcatggttgttatggtatcagtgactcttaagaagaagaagatgaaaagtttctttatgaagacatggatcacaagcatctggaagaacacaattcatatcctgagctcagacattactggagggattatgaaccctgcatctgcttttgcttgggcatatgctcgaggagatcatacaacatttgaccacctactggtatattggctggcgcccctccaagcgaccctgttgggagtatgggtggtgaccttcttaactaaacccaagaagatcaaggagcaagaagcagatgaaaacaagaccaagaaggaatagactattcttgaattactatccaccatcatttgtgcagttagagcttcatttcatcttcttaacaagacaagatgaatgctttgaagctaatctacggaatgttaatctcaccttgaagtttgcttgggcatatgctcgaggagatcatacaacatttgaccacctactggtatattggct

SEQ ID NO: 44870 - DNA, 550 bp, Setaria italica
  misc_feature (11)..(11): n is a, c, g, or t
  Peptide Sequence Number=SeqID_110844
cgccgcgcttnacggactcggtttggcactcacatgggaaggcccggaccatatggagtgtgtccgcggcacctatggatacgcggccccggagtacatttgtacaggcgctcttaacctgacgagcgacgtctacagtttcggtgttgtgatgctgcagctgttgacggggaagagatcagcatgtttcaatgaattagtaaaatgggaggagggggcaaagaaggaccactttgctcgctacaccttggtggagttggagagggaaaagcaggacaactttgctagctacggcttggtggacttgaccgtgccactgattgaggcgggtgagctgtggaaggtgctggacaggcgcccggcagtgaagccaacgccgagacagctggaggcggcggaattggtggcgcaggcggcagtgcgctgcgtgcggctgcagtgggaggcccggccgtccatttcggaagtcgtggccaccctcgagacggcgcttgagctggcccgttgcgatggctagtcctggttcgggagtcggtgaatgtatctctca

SEQ ID NO: 44871 - DNA, 395 bp, Setaria italica
  Peptide Sequence Number=SeqID_110845
cccagctgctaagcgatcgagtgagaaggtcaagcagctagctagctagcacagctaagatcataccgtgttgacgactgtgtgtgcgtgaaagaaagtgaaagagagaacaatgggtgctgctactgtgacctcctcgcctcggtccatggtggctgttgccttcttggcggcagctactacgttcttgttggcagcagccacggcggcgcccgtgccggcgatctacgtgttcggcgactccctcgcggacgtcggcaacaacaaccacctgccgacgctcctcagggcggacttcccgcacaacggcatcgactacccggggaggaaggccaccggccgattcagcaacggcaagaactccgtcgacttcctcgccgacagccttgggctgg

SEQ ID NO: 44872 - DNA, 911 bp, Setaria italica
  Peptide Sequence Number=SeqID_110846
tgcaagcgaacgtcgttgacgacggtgcaatgggcgctgctaccgtgacctcctcgcatcgttccatggctgttgctgttgccttcttggcggcagctactacgttcttgttggcagcagccacggcggcgcccgtgccggcgatctacgtgttcggcgactccctcgcggacgtcggcaacaacaaccacctgccgacgctcctcagggcggacttcccgcacaacggcatcgactacccggggaggaaggccaccggccgattcagcaacggcaagaactccgtcgacttcctcgccgacagccttgggctggcatccccaccgccatacctcgccctgtccagaagcaacgcaaactacgcaaatggcgtcaacttcgcttccggtggtgcaggagtctcaaacgccaccaacaagggccaatgcatcagctttgacaagcagatcgactacttctcgtcggtgaacgcgtccctggcacagagccttggccaggcgcagaccacggcgcacctggccaaatccctcttcgccatcaccatcggcagcaacgacatcatccactacgccaagtccagctccgccgccggcaacctgccgccgcagccgttcgtggacgccctgatccagacgctcacggcacagctccagcggctctacgacctgggcgcgcgcaagctggtgttcctgggcacggcccccgtcggctgctgccctagactgcggaagctgagcgccgccagggactgcagcgccgtggccaatgacgcctccgtccggtacaacgccgccgcggcgtcgctcctgggcggcatggcggcacgccacccggacatgcactacgcgctcttcgaatcctccgccgcgctgctcccgttcatcaacacgcccgcggcgtacggcttcgcc

SEQ ID NO: 44873 - DNA, 374 bp, Setaria italica
  Peptide Sequence Number=SeqID_110847
ttatgcagggaccatctttcacaccggaatatgataatatcactttggttgtagcgtgtacaacaccacaaaatcatggagtgtgccattctgtggatcatcttacacaccggaatgtgacgagtccttaaagccagcagttggcatgacatttgacaacattgaatcagcgaaagaattctatagagcctatgctgcacatgttgggtttccagtacgagtgggccagcacaaggcaaaggatggtgtggtgacgcataaacgtttatactgctcgagagaagggttccgtaagcctagagatgagacacaatctgaacctgagtgcagcgagaagaggaaatgtgaaaggaaaatcactcgatgtggatgtt

SEQ ID NO: 44874 - DNA, 425 bp, Setaria italica
  Peptide Sequence Number=SeqID_110848
taatacaactaccaaggtagctgctagcatgcttaacatatgtaatatccagcatgttccattaacttgccctcagaatatgaacgggaagcattttcctcaattattctaccaaatgcatcatttctaagaaaacttgtgataatctaaattggagtaactcatgggatgagcaagcagcaaaatttcacaagtctgtcaaagagtagacatatttagttcttttcaggatctctaatattcagtagataacatatagagttgtaaatacccttattcttcccattacaataatccacaaattaaattatatgtggaatcttgagtgactccagaaaccaagttccactaacaggaagacaacaaaagaaaataatatacgcataaatcaaaaagtgcactcccaaaaagcaagcaagcatctc

SEQ ID NO: 44875 - DNA, 451 bp, Setaria italica
  Peptide Sequence Number=SeqID_110849
atggatcagtctgagatctcggtggcataccttcgttccatcacacgtggtgaaccctgatcatccaaggcattcgaggaagcctgatcattttggccttttgggctaacacacgccgcaccagcatgagtcgtcgtcactgttggaaaatgaagaaaagaaaaggacatatcaataacaatgcaccacttaaaaagtgtcagtgaagatgttcttatagcagtttcttcgatccgctaaaaaataggtttggatagtgaataacattatcatattcacataattattctgctaaatagaagatttacgaacgaatttaccagcctcctgagcaaaaaagttttttaacagtgaggacaccttgtcaggccttcaacaggtggatctgataaatcttgttaaaagattagccatggcttcaaaactgtgaactgccaaaacatgtaaatat

SEQ ID NO: 44876 - DNA, 186 bp, Setaria italica
  misc_feature (130)..(186): n is a, c, g, or t
  Peptide Sequence Number=SeqID_110850
acacatggttacaggattacaagatgcaacgatggcatcctcacaaaaaaatgatgtattgatgccaacttttgacaggggaaatcaaatttgaatctgtctagataccttatgacagatttataatttnnnnnnnnnnnnnnnnnnnnnnnnnnnnnnnnnnnnnnnnnnnnnnnnnnnnnnnnn

SEQ ID NO: 44877 - DNA, 350 bp, Setaria italica
  Peptide Sequence Number=SeqID_110851
gaggtcttgcggcgggtggagcgggccgggtcggggagggcgcggcggtggtggggcttgaggctggcgctctgcgcgtggccgctggcgttggggtagagcgtggggacgaaggggcggccgttgaaggcggcgacgaggcggagggattggtcgagggagggcaccaggtccgggacgaggtgctgcagggagccgatgaggtccagctgcgcctcccggcgggcggtgatggactcctccagggtccggcactgctcgcgcatggccgcgaggtcgtcgccgccgccggggcggcgtcggtctgcgcctccatggtcggtggcgacgaggtcgacggcgagggtttt

SEQ ID NO: 44878 - DNA, 117 bp, Setaria italica
  Peptide Sequence Number=SeqID_110852
ttatattttagtgttgcattgctatatggcttatgaatgcaacactaaaatatatggcttatgaatgacatatatttttagtgttgcattcataagccatatagcaatgtacaaaat

SEQ ID NO: 44879 - DNA, 496 bp, Setaria italica
  Peptide Sequence Number=SeqID_110853
actacaatactcatggtgccagatcatcaaataaagtttgacatttggtttgtactttgttctgagaggttctatatttaattaaaatgcaaagcgcataattagcagagagaatggctatactcgttcagtgcacacctattagaggttgaagtttctatatgcccataatatggactgacgtacatcggctgcaacacgttgggcatccagttatttcttactatggttgagacgtgaaactgaatgtgtcacgcccctgggacaaggaacacaacaggtatctgcgaccgcgaaaggttgctgaccaatccttggctggcttcctgcctgtaatggtgcacgagaatgtagatgagaagtagagaattgtggtgagggaatggggttaaatcttttaattgcttcctaatgatagtagaggcagtatcttaatatagcaggatgtacaatctcatataagcaacggatgctaacaaacgtgttacattaagat

SEQ ID NO: 44880 - DNA, 336 bp, Setaria italica
  Peptide Sequence Number=SeqID_110854
gcccaggtttccacaatgagtgtagagtgtaaaatattctggccgcagatcactatatgatcccctgatgtggatggtctaagggggcagctctccaagatgggtgatcttaagacattcataggtccatgttaagacactaggaatgatacccattgacagacatctgacatgtacttgagttcaatggtcgaataggagatgcacaaggcacaagccaccaaactgaaagctgattctattcagtcaagcctgcagcatcagccatgatctctttggaatccatcttggtcatgcaggcatagcgttgcagcttctcattgaacaacacgaggg

SEQ ID NO: 44881 - DNA, 2075 bp, Setaria italica
  Peptide Sequence Number=SeqID_110855
gctttcttttacatctgtaaggtaatatgtatcgatgtatgcattgtatgaatgaatatatgtatgcatgtatgtaagtaacgaatagaacagaagagaaaagaaaaggaaggaaatgtacaagcctatatctagcttgaggagcatggggggtaagaaagaatgagcacagaaaagaatgcagcgcagcgggggagaaagaatttttccttttgtcaggtaggcttctttgctttcaactgttgtaactagtatcacattattcgaaccagggtcttggcagagcagcttcgcatgatcctggacgctaccaagttcaggaaggcatcatcaccattccacactaggaggcgcaaacaaaaagggcagcagcaatgtggttaggttataggcacgacgacgtctaggtgcttcttcagcagccagccagtagggtagttgagctggggaggttccaagtcgaaattccagaccatgacccgactgcagttgtccgcgaggccttccatttgagtctcgtcctcaacgagcttctcgatgaatcgagactcctgcaagccacctctgccacctgagtggagtataatagactctagagtgggactgttccatctctggggatcccaaagtatagtgctgttgaaagcaaacccagagaaaccaattggaaaccgacgaggtacaccccttctctgatttgtatgccatccagtgacttgattacccctacaaaggggcccttctaaaacaaccctatacctggccccaacatgtattgctactggccacgtaccaaagcgcctgattttccgcatctcttcaaataaatcaactgagtatgctcgctcctcatcagcaaaatggactataccatctaaacgatgcttctttatatgaaaattgcattgttcttttgacaaacaataatcttccttatgtttgtggtgttccgggtgcagatgagatgtctgtacataaccccagaagacctcaggatctccgctgtttcacgggactggtatggccactctgccacaatccacagaagaggaggtggcacattttttaacacatgtgccagacgattcaaataatatgcctgatgtggccgaacagaagttgttgtcacaattatcagctgcttcctcacaacaaaatcagagtcactaacagaaggtacgacatgagaggcttcaatatagtccacctcatcatccaacattgcaggcactggaggactctcatcaacctgttgttcttcgactgcttcagtctctgctgcaaacgactccaactttgtactcttaagttccagcatttgtctgtcaaccacatctccgtcgaacggaagcatctcattttcagagtctatcttattcgataaatcaacagagaacagtggtgtgaatccgatgagaattcccaccaagaaacacacaagcagatggaccatgggcctcttccagttcgcccccttggactttggcctctccaaggaccgagcgtgcctgtgcgacgacaaagctgcccataaagacttgaggccgctcgacatcaggacagggtccatagaggccaccgacgtcaacagccccctcatcgcgacgtaggactgcgagtacgccagcttgggggacggcgaggggtcgaattccgaccagtccttaaccgacccggccgacccctcccgctgcattgcgccagcattccttcgggccattgcaggagctcaacaccagcgtaagcatgtacagcaccgtagtccagcgacaaaaggagaagcaaacaatcccaagcgccggcggatctttattccgcggccgcccagggggacgacgacggaaggacgagagatggagaaagatggcgcgaggacgcctgatccgggtggcggcgcgcccggccggcgcggaggggattgggagtagaatcccagcccagggaagcgtgcgcgtgccggatcacctcacgaggcaattcccgatggctccttccctgttcttttgtccgcctaggaattcgtctcgggaggtaggagttggtgagggtagagagcgagagtagtaggtagtatt

SEQ ID NO: 44882 - DNA, 382 bp, Setaria italica
  Peptide Sequence Number=SeqID_110856
gggtgtgatcgctctgccattgaatttggtgccatgtgcttgtttaatggacatggattctctctaacttcgttcagaattatgcgatccttttgctaattcgaaatactcatgtgttcaagtatcccgatgtgatatttacacatttcttcctaaggtctccagtggattcttttacaagttgattttgtaataaggagataaataagatgttcagcatctccaggattcttgtggtaattcgtggagtagctataacattgttcaacttcaattattgttcaccaggtggcactgggcgggtgctacaattgtataagattttttgggcttctagatttttcaaagaaccaatgtttcaactcctttgttttctgctgtt

SEQ ID NO: 44883 - DNA, 514 bp, Setaria italica
  Peptide Sequence Number=SeqID_110857
tagttcttacttttagtttttttttttttttttttctttttccctatgaaaactgttcaagagatgttttctacaaacttcagtatttatcagaaaagggcgtgttcatgagctatgtcttagcatttttacaacaaaatgcatgctgcccttcaggcaggaattaaatcgatcgaagctataatattttgacacgctactacaaactctaggaaccacaggatggccacagaaaagataggcacatctctctcactctctttcctttctctctcacacaacaacacacaggacctgcaggctgggcccagcagggctcgtggctcttctgtggagcgcctgatgggtcggcccggccctaaaaacccacagcccaacgagctagtccctccagcacacgagcatggtgacgcagcggcgcatgatgtagaaccgagctcgctgctccttcaccatgctggccagacggcctggcaccgacctggtggccgggcctctcgacgcccggcccttg

SEQ ID NO: 44884 - DNA, 418 bp, Setaria italica
  Peptide Sequence Number=SeqID_110858
ggaacgccatctttgtaagggtaggtgatctttgtcatctggttcatctcatcttttgtaaaattctaacattggaaagtttggcaagtgtctcagatatgccacaatttctcttggatacaccaacactcttctcccacaagcctacaccttgccatcctagcagggttttccgaagcatccgaagtctgtatgccacatcattcattagaggacgtttgtcgatatctaaattcaggcattcagtagccaaacttgctaattcttcaagaatcctcacgttgatgctattagtgatttcagcatcaaatagctcccttgacctgttccctttagcataggcgctacacatagtaccaatgaggctaacattgccctgtttgacccttcttctagctattagttccaggagaacagc

SEQ ID NO: 44885 - DNA, 423 bp, Setaria italica
  Peptide Sequence Number=SeqID_110859
cgccacttggtccaaaaccacttctggggcgctacgtggaggttgatttcccggtggtcatggaagctgccaaagctgaactagtcaaactcgtcgggaaaggagagtagttctcgtcagcacgccaaacagaacgagggccttcgctggctgcctgtcatgtacagaatctaatgctcgcaagccacaaccaaagaaacggatagacaggcaacacaggcacttggactatgtgctaggaagcgtcctgaaaatgaagcgccaaccagatcaggtccttgttcagtggagccgtggtatttattcgagcatgcagtgctgtcaatcaagcgtgctacgtgggacttcggaacttacaagaccgtagacggggtagacggtttagtaatttagttagtaaaggtacgtacttagggtacgtta

SEQ ID NO: 44886 - DNA, 2647 bp, Setaria italica
  Peptide Sequence Number=SeqID_110860
cccgcgccccgttccccctcctctcgctccctccatcccttccggcctcgcgctccgtctccgaagcggcaggcagccatggacgtcaacgaggaggccatggcggcgcacaagcgcgccttcctcgacttcctcgaccaagacgtcgggaagggggtgtacatgcaggcggtccgcgacatggtccagaacaagcgccaccggctcatcatcggcatggacgatctccgcaaccacaacctcgacctcgcccgcagggtgatacggagccccggggagtacatgcagccggcgtcggacgcggtgtcggaggtggccaggaatctggatcccaagttcttgaaagaaggggagcgcgtgatggtgggcttctcggggccgttcggcttccacagggtcacgcccagggatctcatgtcctctttcatcgggaccatggtctgcgtcgagggaatcgttaccaaatgctcgttggtaaggccaaaagttgttaagagtgttcacttctgccctgtgaccggggactttctctcacgggaatacagggacatctcttcttttgtaggcttgcctactggctctgtttatccaacaagggatgacaatggtaatttgttggtcaccgagtatggaatgtgtgaatacaaggatcaccagacattgtctatgcaagaagtgcctgaaaattctgcacctggacagctcccaagaactgtcgatgttattgtggaagatgatcttgtagattgttgcaaaccaggtgaccgtgtctcaattgttggtgtatacaaggctcttccagggaaaagcaagggaagtgttagtggtgtgttcagaactgtccttatcgggaataacgtgtcacttcttaacaaagaggcaaatgcacctgtctatactcgggaagatctgaagcggatgaaagaaatatcaaggagaaatgacacctttgacttgctgggaaactcacttgccccatccatatatggtcatctatggataaagaaggcagtagtactattgatgctcggtggcgttgagaagaatctgaaaaatggaactcacttgagaggagatataaacatgatgatggtgggagatccttcagttgccaagtcccagctcctgagagctgtcatgaacattgcccctttggctatctcaacaactggtagggggtcatctggtgttggtttgactgctgctgtgacttctgatcaagagacaggggaaagaaggcttgaggctggtgccatggttctcgctgatcgtggcgttgtctgtattgatgagtttgataaaatgaatgatcaagaccgagttgctattcatgaagttatggagcagcaaactgtaaccattgcaaaggcaggaatacatgcctcgctgaatgcgagatgtagtgtaattgctgcagcaaatccaatatatggaacctacgatcgctcattgacgccaacaaagaacattgggctgccggattcattgctctcccgttttgatttgctttttattgttcttgatcaaatggatcctgaaattgatcggcaaatttcggaacatgttgcgcgaatgcatagatattgcaccgatgatggaggagcaaggtcccttgataaacaaggatatactgaagaagatgatggtgatgctaatgcaggcatttttgttaaatatgatagaatgctccatggtcaggatagaagaagaggcaagaaagccaagcaggacaggctaactgtcaaatttctgaagaaatatattcattatgcaaagaaccttatacaaccgaagctcactgatgaggcatctgatcatattgcaacttcatatgctgagctaagggatggtagtgcaaatgcaaagtctggtggtggtacacttccaattacggcaaggacattggaaaccataattcgtctgtctactgctcatgccaagatgaaattgagacatgaggttctgaaatctgatgttgaggctgcattgcaagttctaaattttgcaatataccataaggaattgactgagatggaagagcgtgaacagagagaaatggagatgaaacagcaagctgatcatgacgcaggtgtaaatgatggcactgcagatgggcatggaagctctggaaatgatccaatggatgtcgatgtaggaaatgcatcaaatgatcaggatgttcctacagagagaattgaagcatttgaagcaattctgggtcaacatgtgttggcaaaccatgtagatcaaatgtcaattaatgatatcgagcagacagttaataaagagtcagctgcaccttacaccagacgtcaagtagaattcatcttggagaggatgcaagatgcaaaccggataatgatacgagatggcatagttcggatcatataaccaccaagattgtttaacagtgaacccgcagatcaagctgtgtcattgtgacctagttgtgtaaaacttatccagattgtctggatccaggcatccagctgatgctctgcatctgtaaccagctacttgttgaagtatttgtttcttaatgtttatcaccaaggattgagatgatcattggttccctaggtacttttagttcatgtaatgtaatgtaccatttatctgacctagtaatattagtacatgaataaac

SEQ ID NO: 44887 - DNA, 423 bp, Setaria italica
  Peptide Sequence Number=SeqID_110861
cttcacggtggagatgagcagatccacgcggtcgatctcccggctgcactcctccatccagcctcggagcatcgcgtcgaaggccctgtccagcttgtgcctggcgatgcacttacttgcagtccatgagttccgggttcatcacccggatcccccggatccccgcgtgggtgttcaccttgatgccgtccgtgttcttcagcggcatctccacgtcgacgaggagacccacctcatcgaccgggaggttctcggtcacctgctcggcttgagcgaggctggagatagtcaggacttgctggggctgggctatggagaggaaaattggaggagaacgcgcggggcaggatcggcggcggcggcggcggcagcttacgcgacgacggtgaacagtttcccggttatgctagaaacacatgcgcg

SEQ ID NO: 44888 - DNA, 452 bp, Setaria italica
  Peptide Sequence Number=SeqID_110862
atatatgtgcgtgcgtgagctttatcgataggcgcgcgtgccttgtggcagtccaagaaggcggtgaggaggccgtggtagcgagggtgggagacgatcttggccttgaccgggtctagatcaccgacgcggccgccatggccgctaccgctagaagcatgtcccgccggtgcaacaacttgagcccgagctccaccgccggcggttgagctagggacggtgtagacttgcacggagactttggaagacgacggcaacggacacagcggcggccttgcagcagcgcccgggtggccatgggctccaagatccgagagatcctccatcaacagctagtaggtttcttgatcttggtaacgaggagagggaggagaggaagaagagaatagctacctagggctgagcatggagatttgtttgcttcagcctagagatcttttgcagtacagtag

SEQ ID NO: 44889 - DNA, 584 bp, Setaria italica
  Peptide Sequence Number=SeqID_110863
actagacttgaaacatttggacaacagaaagccatatatttctcgtatgctctcaggagaagtctgtccatagcacgtcgtgagaattccctctgctgagactcttttgcagttctaactataccatccaatttcaatagcaagtttttcttctccacaacctctttatgaagttggccttctaatttacagatttcagtatcaatatcctcatcctcactctgtgcaagatcaggcacaggttcaatagatacaccaacttcactcagctcaattataattcgatcactgaagcacatctcactgtactgaaactcaggccacaccttggctttatccatgacattaccgcctttatgtgacagctcatcattatatttccaatcagaatccatcatcagaccatttggccccctcgctgaagcttcaagattcattaaaggttctaacttgtaattatgtgaatgagacttccatcctccttcatcaaaatgaatttcatgtgtatcaaatggatatccctcgcttatgaaagtattaccaacaatgcttacataagcgagggatatccatgtgtatcaaat

SEQ ID NO: 44890 - DNA, 244 bp, Setaria italica
  Peptide Sequence Number=SeqID_110864
ttttttaagtgtggtaaagatataagcaaatcaagactttaagaaaatagcagatgttctaagcaactaaagccgaagcaaaatctcaaacacatagcctgctaacaaacacgtgcgagcatcttgaacctggatggatatcggagtttcttctgcaccagggatcaataatggagtgcatccggcccatctcagcacgtgtgattactgattagagatcatgaggccagtggccataatcatc

SEQ ID NO: 44891 - DNA, 372 bp, Setaria italica
  Peptide Sequence Number=SeqID_110865
aaagaattaatgtggaagctgaacaaatcaatttctttgatctgcatttgttcataatatcaataaactcgtttctcccaacaccagtaagccttagtgcatcagcagcagtgaagtttggaatactatcatatggttgttcattcttcattgcttcaaaaaggatgtcgcaataatatctgaatggtgagatccttgatactcggcagatatcgtgcaaggtggtacgggtataacttgcaagatttctccggaggtagcgcatcatttcttcataatattccccttctctgcatactctacgggcaaagcaggtattccattgcaaccgttttcggatacaaaagtccacaatcctgcggttgtcctact

SEQ ID NO: 44892 - DNA, 402 bp, Setaria italica
  Peptide Sequence Number=SeqID_110866
tttttttttttgcacttaataaggtgacatgactgaaatcatagttatatgtaaaaagattcagatgttcggtatatttcaacatgctttgtttataacaagtggtactgagaattgtagcggtagtccaaattgtagtatcaagctcagtagaacggagtaggaccaccgatgatcgagaggttgggcgtgtgctcactgtattcaactattgatgtaggaggcaattgtccaatacaaatctcatgcactgttgataacagaggaaacagctcctgccaccctcgataagttaagacttcataaacttctcttgctgtggacactccctggagtttttggccatgcaacatctctgcctccagctcatcaaaagaccttttgccaccgtttcttgcaaag

SEQ ID NO: 44893 - DNA, 749 bp, Setaria italica
  misc_feature (265)..(265): n is a, c, g, or t
  Peptide Sequence Number=SeqID_110867
ccgccaaggcatgtaggttattaggtcagccacaccacagctctcaaagaatgtgttatctctgactgaaggaaacagaagcttagagaatgcacgcatttcccgcaaaccaatcctcataattgcagcctttgtattgtttcccatatccaatccatcaacaaggcctgctgcaatagccactatatttttcagagttccacacagctcaactccttcaatatcttctgcaacagaaactaggaataaggtgtggtaaaaaagnttagcccatcggtttgccacttccttatctttcctatatccaattgttgcttcactgaacatctcaacagcaatctcatttgcaatgtttgcacccatgagaacacagcaattgattccaagtgtatctgcaattaacttagatatcatgcacggtccttccatcttgacctccatgcccttaatgagggagatagcttcagctcctggccttagcttcccaacgagcttcttacatataccctccacaaattgatggggggtcacaaaaaccagcatattcgcatctttgactgcactttccaagtcggggtcagcaataacattcgctccaagctttatacctggcaaatatttgcagttctcattttcttcgttaatggactcagatagcttcttgcctgttggcagtatctcctcaaacacccacatccttacttcgtcatagaaggggggctaaactcccgtgttggaggcgatgaggc

SEQ ID NO: 44894 - DNA, 970 bp, Setaria italica
  Peptide Sequence Number=SeqID_110868
aacaacgacccaaacctactacgaatacaatacggtaggtacctactccgttctactgagcttgatactacaatttggactaccgctacaattctcagtaccacttgttataaacaaagcactgttgataacagaggaaacagctcctgccaccctcgataagttaagacttcataaacttctcttgctgtggacactccctggagtttttggccatgcaacatctctgcctccagctcatcaaaagccttttgccaccgtttcttgcaaaggcttccgccactcttctgtttctcccgccaaggcatgtagttattaggtcagccacaccacagctctcaaagaatgtgttatctctgactgaaggaaacagaagcttagagaatgcacgcatttcccgcaaaccaatcctcataattgcagcctttgtattgtttcccatatccaatccatcaacaaggcctgctgcaatagccactatatttttcagagttccacacagctcaactccttcaatatcttctgcaacagaaactaggaagtaaggtgtggtaaaaactgcactttccaagtcgggtcagcaataacattcgctccaagctttatacctggcaaatatttgcagttctcattttcttcgttaatggactcagatagcttcttgcctgttggcagtatctcctcaaacacccacatccttacttcgtcatagaaggagggcaacttggcggtgttggaggcgatgaggcgagaggcgacgctgccccagttgccgctgccaatgaccgccacccgatacttggcgtgcccgttctccatctccggcgagggtccggctcagaacagcaaaaatgcagatcaagaaaccaacgagtccagccgccggccaagcaatgaatcgagcaaaccaagaacaagcagaagcgtatatataatataccacagagattggtaggggcgggcggagagg

SEQ ID NO: 44895 - DNA, 414 bp, Setaria italica
  misc_feature (338)..(414): n is a, c, g, or t
  Peptide Sequence Number=SeqID_110869
tgggaaagaactgacagtttccatggacgatggaccaacagtcagagattcacaccttcaaggcttcaacaatgaaccttagagttccgttttttcccggttcgaaaacaggaaattgtacatatatagaaatggagaacatatggtttaggctggatcaaaagcaatcttgtgtgccagggtcatagtgcatgacagatcgacaggaaggacgatcttcctggaaattgcggctggaataagtttcgagtttgtcaatgcgaaactaaagactggaaatcgtgtctgcacaaaactaatgaaaagttgttttcctgcggaaaccaaaaaaaaaaaannnnnnnnnnnnnnnnnnnnnnnnnnnnnnnnnnnnnnnnnnnnnnnnnnnnnnnnnnnnnnnnnnnnnnnnnnnnn

SEQ ID NO: 44896 - DNA, 477 bp, Setaria italica
  Peptide Sequence Number=SeqID_110870
tcaaagaggaatcaaagaacatcaaacggagatttggaaagttatcaaagattaatctcgtcctgaagctatggacgtgccaggccgacatgcattcaaaaataagattccagaacatcagaggcgacttggcgacgaagttgggcgcgaggggataaatggaagggccaggccgatcagcctagaccccccaggccgatcggcctagggctttccttgctcctctcacattcctatttcaatcacacgtcttccagactataagtatgccctaaattcatcggcatacaagatcaatccaccagaactcgacgaatagagagacacacactagagggagctgagggccactgcaagtcttcgaggttgtgtaggagatggcttaggctcgaccctagctgccatggtcatccctgcgcggcgaggccatggtggagttatgaagccgagccttgtgactatcaagggttatgtaca

SEQ ID NO: 44897 - DNA, 319 bp, Setaria italica
  Peptide Sequence Number=SeqID_110871
accaagggaggtagaccttcagtttctccttggggaaagcccactaaggcagggtaccgatcaccaagtgtcgccagccgtaaagcttagtgtgctggaacaaagctcatatggaacagtccttttttttgtttctcttccttatggttgagaaaataaagaacagatggtggtggtagagggaattgtgatacatcaacttggttgtgatgtaagaagtaatgcttttattccaatgtttgttactattattatgattgccttttttgcagaaattagctcttcctcagaactgatggctggatttctcttctttatt

SEQ ID NO: 44898 - DNA, 484 bp, Setaria italica
  Peptide Sequence Number=SeqID_110872
gcattgctctggttcgatgggtccaaggggtacatttccgccgccgcaagattccacaagagctcagtaccaactctcacaccccaggatctaccacggcagatgtctccagtcggttttcccttgcggcattgtctggtagagagcataaaggaaaggaagctgcttctgcactgtactcttctctgggcaatggagatattccttctgttaactctggtccatcattgagcttacctaggatagctctagctggtgccaagcctgctttcttcactcaagtcagaggaaatgaagaaggaaaacagacattttctctttctgagattcagaaatggacaacagatgatgtgctttgggcacagagaatgaagcgtcaagctgctctctcttggcagaatgatctgaagaagaaaccatggcttcgtacacaagctaaccgcttcagtagcttggcagcaaagtctgttggtacgagtaaagg

SEQ ID NO: 44899 - DNA, 1875 bp, Setaria italica
  Peptide Sequence Number=SeqID_110873
tcggcactcgcagccgccgccgccgccgccgccgggcgccgggaggcgactaacctcctgccccgccctgccgccgcgcgccgccggctcctgggattctctcgcctcagcgcacgaggcctgccgtgaccgtcggacggatcttcccttccccacctgcggggactgaactggacaccgccctgtccccgccggtgcctggagagcccgattgcacgcttcggagagtcttaactcgttcctgctacactccacccctgtcagcaagatggcacgccaatccgctatctcgctcatgagagatcgggccaaggtgggggtgctgaagcgtctaactctgagctcgtcgaagactgcaggtaggaactcgtccgggcgcatcacctctttccaccgtggaggaggggccaagaggttgcagaggaaagtcgatgtgaagcggggcacctcttccctgggcattgtcgagcggattgagtatgacccgaatcgctcctctagcattgctctggttcgatgggtccaaggggtacatttccgccgccgcaagattccacaagagctcagtaccaactctcacaccccaggatctaccacagccgatatctccggtcggttttccttgcaccattgtctggtagagtgcataaagaaaaggaagcttcttctgcactgtactcttcagcttcctctgcactgtactcttctctaggtaatggagatgttccatctgttaacactggcgcatcaatgagcttacccaggatagctttagctggtgccaagcccactttctttgctcaagtcagaggaaatgaagaaggaaaacaaacattttctctttctggaattcaaaaatgggcaacagatgatgtgctttgggcacagagaatgaagcgtcaagctgctctctcttggcagaatgatctgaagaagaaaccttcgccacaggcacaagctaaccgcttcagtaccttggcagccaagtctattggcacgagtaaagggccaaaggcaaaggttgattgtgtaccagtatcttatatattggccagccaccattgtgtgccaggtagtacagtgatgaactatgattcctcgaagccttctaagagttcagcctcttcatcatcagctaatcagtttgatataattgacctcaactcaaaggttggaaattgtataccattagccaatgcacgaattggaacatgggtgcacgatattgaatgtcgtcctggtcagggtgggaagatggttcgagcagcaggtacatatgctaaggtagtccaggagccaggtgcacagtgtgttctgcgccttccttcaggtgctgagaagattgtggattcaaaatgccgtgctacaattggtatagtctctaatccaagccatggtacgcgcaagctaagaaaagcaggtcatagccggtggttaggcaggcgccctgttgtccgtggtgttgctatgaatcctgtggatcatccccatggtggaggtgagggacgtaccaagggaggtagaccttcagtttctccttggggaaagcccactaaggcagggtaccgatcgccaagtgtggccagccgtaaagcttagtgtgctgtaacaaagctcttattggaatgatgtttttttgttttcctattgttgagaaaataaagaacagatgttggtggcagagggaactgtgtgatacatcgactttggttgtgatgtagtcagcagacaaagaagatagttttcattccaatgcttgtcatcaaaactcattactggatttcttctttataaccttctgtttgtaactggtggcatatttggttttggtgctactgttctgatggagaagggatgttctaatattttgacaga

SEQ ID NO: 44900 - DNA, 396 bp, Setaria italica
  Peptide Sequence Number=SeqID_110874
cccccccaaaccccaaaaccctaaccgcgtcgctcatggcctcgccgccgccgtctgcccagctccccacctccgcggccgccgccgcgggcaacggccgggccgcctcccttcgccggtggacgcgctcttcctccagaacctcatgagccgcgtccagctacgccctcccttcctcgacaccaactccttcctcacccaggacctcgacgacttcctcctcaacgaattcgccgcgctctcggccgccgccggggcgtccgatgacgacgaggacgagggagaggacgacgagctcgccggcggcgagggctccggggaggcgaggcggcggcggatgctggccagggaggaggccaagctggagaaggagatcgtgcggatggtccttcttct

SEQ ID NO: 44901 - DNA, 655 bp, Setaria italica
  Peptide Sequence Number=SeqID_110875
ctcaatggtgtggtgccttctgattattcaagggaaccgaacaattaggcaaaagcattttctcagcaagcacatgccgtagcgcttcaattccccaaaattcatctacagttttccccacatttgttctccttacgtccagtgtctggagattgtcaagcttatacatggatgaggggagctcctccaagttgctgttcctaatgccaaggtacctcaagtggattatgcttccaatctcatctggcagcttttgcatcttaagaccattcaggtcgatgactcggaggaatctggagccctgtaagaagtggagtccatataatgtatttgagccaacattctctgaaatgctacaggctctcgagcacaactccgcaaggttgccccataatgactgaggttgcagctctccaaagcttgagctgctgcgttggtcttctgcaaaatcacagagaagagagcgcagcttggggaacgcattaggaatgtggacatatgcatccacataattctgtatggcaaggcgccggactgtgtttggatttacaacattagcttgatggtggatttcaaggaaacaagagtcttgtgcttcagactccataaaggcatggagcagattgtgaatggatactagcttgatgcatcctcc

SEQ ID NO: 44902 - DNA, 1086 bp, Setaria italica
  Peptide Sequence Number=SeqID_110876
tacttaactaattaatttacaagtaattttagaaattgtcacattgttctgcagagattcaagaattcagcattgttgcaatacatgatagaaagtttaataatgccgaaatgattactccttcattcttccggtactgtccatttaaagatccatcgagtcttttgcgacaccagtgttttggtaataaaacaagtacagaatggtcacctcatacttgctgctactactatataatccaccattcatagtaaatggaggtacaactctcagggaaagtaattgctgcaaacttgatggcgaaaaactaacttcattttcctgctagatgagcgtgaaacagcattcaccgtaagttacaagagaaccaggagttcgcagtggctacatggggactgttctcttgttcttgattatctgaaacaggcacttccacagaaatatctcctcacagactgattcgaacttgtcttcattttcttcctggtaacttctcttcgccttggtggttgaagcactactttaatcgcagtatcaaacacagcttttatgttccgctgtgtctttgagctgcattctatataggccacagcacctatctgctttctgagctcctctccctgttcagtagtgatgatggaagcagcaggatggtcagcaagataagatctgtcttcgcggagatctagtttggttccgacaagaactacaggaatgctaggcgaaaatcggcgaagttctggcatccacttcttcaggacattctcatagcttgccctgctgacgagggagaaggagaggatgaagacatcagcacccctgtagctgagaggcctcaatctgctgtaatcctcctgacctgccgtgtcccagaggcccaagttgacaatcctcccatccacggagacattggcactgaagttgtcaaacacagtggggatgtaatccgtggggaacttgttgcaggtgtagcagatgagcatgcaggtctttctcacggcgccgtccccgacggtgacgcacttgatgaacttggccaccgagctcgccgccgccgcactcatctcttccgccgccctgacttcc

SEQ ID NO: 44903 - DNA, 706 bp, Setaria italica
  misc_feature (45)..(45): n is a, c, g, or t
  Peptide Sequence Number=SeqID_110877
cagtggtctgcgcgcatgctcgccgtagcagtggaactgaacatnaaggtcggatcccatcttcgcctaatgacatgtgccatggtggagacctgaggcgaactgcgcttctgagatcagtgcaaatgagggtgcagagcccccatccatgtgatctgttgtccagcagtggacatggacaagaacaagagggtgatcatgtacatgctgatgagcttgaccatgatcagaaacgagctgtgggtgttcagttggatcagagatctttctcttgtccaaagtcaatccaggatgctgagtaccaaagcccgacaaactgcggcctgcgttcggaccatgatgtggattttgttgaggatcagattacggtgtgaccagccccaagattaaccatgataacatctccggtgaaccttgtgtcaatgtgaatgggctatttgtgagggatatgaataccttatgggtcctcactggttaggatgcaggtcatacctgacaagtgggcccgcccgaccgtgcgggctgaggacataaagttatttggagtcacgttaaagcaactagatagtttaaatctacccggatatcatgggatacgtattgtaatccaacttaaattaccttccatgtaactaccgattagattcaaattgacttgtaattctggtcgtcagcctatataaggtggtcaaggtcacccccagga

SEQ ID NO: 44904 - DNA, 524 bp, Setaria italica
  Peptide Sequence Number=SeqID_110878
tgaagagggtgattctacttcacagagctcttcagcgtcagcttatgagccagttggtagtttggatcttgtcacaccttcaatagagaaggtgacatcgccagaagaagaatcaggcacttcagccacccagttggatgtgccacactttcactggtttgtttctttgtgcttcaaacagtctagtggtaggatcagtgtaggaatgcaacaagcatgacatgcttttgattctaacacttaaccattgtgctcacaaccagtgtggacccagaccactcatatgaggaactgctcagcaaaggtcaagtgttcgttaggtccaaaaggttacttgagaggagatcaaagaaacgtaaggttcccagagcattgagtaatgacgttctgtgcagtgttgtcaactcaaagaagaaagagaagccaaagaaatttggcagagttcttgacccagacgagccttttaagttgttttttacgggatcgtgagacgacagaattcttgacagcaaaagaggagaagc

SEQ ID NO: 44905 - DNA, 1764 bp, Setaria italica
  misc_feature (1716)..(1764): n is a, c, g, or t
  Peptide Sequence Number=SeqID_110879
tagtaggagtggcagaagaccagcttcatggttccaaggataccttaaccatgaagggagaaaaggctttgcttgagttgctgctcgacatggctctggaccagcatgtcgacgggaagaagctcattggtcaggagacggaagatagtgatttcgagagctatttgagagaagcaacaaaccgagtgctttaccagccagcattcactgaagagggtgattctacttcacagagctcttcagcgtcagcttatgagccagttggtagtttggatcttgtcacaccttcaatagagaaggtgacatcgccagaagaagaatcaggcacttcagccacccagttggatgtgccacactttcactgtgtggacccagaccactcatatgaggaactgctcagcaaaggtcaagtgttcgttaggtccaaaaggttacttgagaggagatcaaagaaacgtaaggttcccagagcattgagtaatgacgttctgtgcagtgttgtcaactcaaagaagaaagagaagccaaagaaatttggcagagttcttgacccagacgagccttttaagttgtttttacgggatcgtgagacgacagaattcttgacagcaaaagaggagaagcaaatgttcagtcaaatacagaatcttatgaaactagaggaggctcagcgcaaattagaagttcaatgcggtcgtgagccaacagttgcagagtgggctgcagctgtaggaatgagctgcagggagctgcagtcttctattcgtattggaagacgatgccgagagaagatggctcgctccaacttccgccttgtgatacatgtagctaggaaatacgagggatatggtcttgacattcaggacctagttcaggacggatgctgtgggttgatgaagacctttgagaagttcaatccaagcaaggggtgtagattcccgacctacgcatattggtggatacgccaatcaattaaaaagtccatattcaagaactcaaggctaatccgattgccggagagtgtgtttgcgcttttgaggaaagttgggaaagcaaggctggagtgcataatggaaggggaacagcccacaaatgagaacgtggcaaggcgtgctggcatcacaattgagaagctggcgaggctgagagcaaagaccagaaaaccacggtcgatgcaagaccgggtttggtcagatgacggtgtcacgtaccaggagatcacagaggacccaaactttgagcccccagagctgagcgtggacaggctgatgatgaggcagcaggtccgcaacttcctggcgatcctgagccccagggagaaggagatcatcgagcaccggttcgggatccacgacggggagcccaagacacttcatgtgatcggcgacatgtatgggctgtcaaaggagaggatccggcaggtgcagaacaaagcactggacaagctcaaaaggagcgtatcggcacagggctttgacgtttactttgatttgctaacgtgaagaggccaataagttggttttgatacccccccaccccccacccccaaagaaaaacaaagggattttagcagctagacacgtccccaaagccagtgaatgaccatgtatagaactgaagcaacaaaaaaaatgcagcataattgtgtataaaggagattcagtgtcatgattttttgttgatgaaagtgtgcattcccaggaaagtgttggtgcnnnnnnnnnnnnnnnnnnnnnnnnnnnnnnnnnnnnnnnnnnnnnnnnn

SEQ ID NO: 44906 - DNA, 649 bp, Setaria italica
  Peptide Sequence Number=SeqID_110880
catcaatatgagtattattgtcctatatgcaatccttatggtttttcacatacatctgaatgcgtaaacttagtgacacgtacttgtctgttgctctctacaatatatcgacactgagtggttcataatcgatctgtgatacgagattacaacttgcaataatcaaaatacagcatgagaatgagagcgtattgtcctatgtaatctaaatgacagacagatgtgggtgtagtatggcatggctgcctctccgttggttgacaacatgggaccctgtagctttttccttaaatcatcattaaaccatgtatatatataatgctggccatgtatgtcatcatccacttgtcccgcataacccctattgctggcgtcaacattacagaaacaatcttctaacctgctctagagttaggaacattatcacattccacgacccaatccgacaaaagtttgcgatgaaccccttgtagaaagcaccaggtccatcattctttagtgtcttcgcaaaacaatcaagtgtacttctgtacgttgaatcacccatcattcttgatttcaccacatccactggagagccaatgcaaacagcaaaaacccagcaccaagtccagcttgttttgaattcgtcgtagctggccaactcagc

SEQ ID NO: 44907 - DNA, 742 bp, Setaria italica
  Peptide Sequence Number=SeqID_110881
ctcggcctgaccaaacctcactacgggagcggccgccgccggcgagagtgggggatggcgacggcctccgccttcgccgctgtcttctttagcagcgccttcgccgcctgcttcgctgaggtgtgcaccattcctttggacacagccaaagtgcgccttcagctgcaaaggaaggcaccccagtcactgccacctgctgctgcagccacaggggcaggatgggctgccagtgctggaggaacgctggccacaatcctgtctatcgccagggacgaaggggtggctgcactctggaagggaatcatccctggccttcaccgacagttcctctatggtggcctccgcgtcggcttgtatgagcctgtcaaagctttcttcgtcgggggtactgctgtgggtgatgtcagtttaataagcaagattcttgctgctctcaccactggtgtcatagcaattgttgtggcaaatccaactgatcttgtcaaagttagattgcaagctgatggaaaggctaacactgtaaagaggaactattctggagcccttaatgcatatgctactataatccgacaggaaggtattggagctttgtggactggccttggtccaaatgttgcacgcaatgccataattaatgctgctgagttggccagctacgacgaattcaaacagctggacttggtgctgggttttttgctctgagacacgcaacaggagataggcaaggcacacaggggatagg

SEQ ID NO: 44908 - DNA, 502 bp, Setaria italica
  Peptide Sequence Number=SeqID_110882
ggttttgtaggtcttggtgagaagacggtgccggcggctattcccgcggctcctagtacgcagccgcctgtcgctgagaagaaacgtgtgcgactgccgccacgctcaacccggtgagcttttatttcttttgaatgacgttgggtttgtcttggagtcatgccgtgacactttgttggtgcagggatgcagaggagactatccctgtagagacagggatagtgccgaaacctttgactacagcatctattcctctggaggacttcattgttgaagaggtacctgaggttgacgtcggccgtcttggagctactatgtcaatgctgcaagacgtaattcgctcagtggaggttcctgctacggcatcaggttcaggaagcgttgctttgtcatcatctactggcggatcggtggccgtagtagatgttggaaaagccaaacaggcgactgctcctggtaagtgcctgtagtctgtttattgtagtcgtagttggtagctgac

SEQ ID NO: 44909 - DNA, 372 bp, Setaria italica
  Peptide Sequence Number=SeqID_110883
ggcgaggcgagctgggcggccgggtcggcgaggagggggacggcggaggggctggggaggaggagggccggttcgagggagagacgctggagcgtgacgggcacggtgaggtgcgactcgatgaggcgctgcaggtcggcgacggtggcggaggcggggtccgggaccgtgatgcggtccgtgccgtcgcggctgcggatgcggaggatcatcgcggcggcggcgagttgctgctctcgcttagcttcggcgatgggttttgctgggattcaggggtgtgctggtgcgatttataggccgacccccagggtgggttgcggaatctgtgcgcgaggaggaaaaggagcagggtgcggggaggaggaagccgag

SEQ ID NO: 44910 - DNA, 1810 bp, Setaria italica
  Peptide Sequence Number=SeqID_110884
cctctcaccaacactcttttccactccaccgacggagccaactaacgccctctcctcttcgtttcatttccatgactgcctttgtttaattaggctgctgtctcgccgctcttattacgactagttagttaacgctgctactcattgccttcttttcttggccacatcaagcagagagcacgccaggccattgctgcagctctcgcaggctgtagcagcagcaccaggcaaatcagaaatcaggcaagatgccgcacgccaagacggattcggaggtgacgagcctggcgccgtcctcgccgccgcgctccccgccgcgcacgcgccccgtctactacgtgcagagcccctccagggactcgcacgacggcgagaagacggccacctccgtccactccacgccggcgctcagccccatggcgtcgccgcgccactcccactcctccgtcggcagggactcctcctccagccgattctcgggccaccccaagcgcggccaccacaagggggacaaatcgtcggcggggcgcaagggcgcgccgccgggcaagggatggcaggagatcggggtcatcgaggaggaggggctcctggacgacgaggagcacaccaggatcgtgcccaagaagtgctactacttcctcgtcttcgttctcggattcgtcgcgctcttctccttcttcgcgctcgtgctctggggggcaagcagatcccagaagccgcagatcgtcatgaagagcatcaagttcgagaacttcatcatccaggccggcaccgacgcgtcgctggtgcccaccgacatggccaccaccaacgccaccgtcaagttcacctaccgcaacaagggcaccttcttcggcatccacgtcacggcagacccattccagctcgcctacagtcagctcacgctagcaaacggagacctcaagaagttctaccaggctcgcagcagccgccggaccgtgagcgtcgccgtgctgggcaacaaggtgccgctgtacggcgggggcccgacgctgatggcggcgccggcggccggcggcgggaagcaggcggcgagcagcagcagcgtggcgccggtgcccatggtgctccggacgacgctgcactcgcgggcctacgtgctgggcgcgctggtgaagcccaagttcaccatggccgtggagtgcagggtggtcatgaaccccagcaagctcaacaagatcatctccctggagaaggcctgccactactcctaaaaatttcttcttaattatcctatctttcttctgaatatatacacactactgtatttatattatctccattcatcatcatcatcagctgaaacagatcttcttcttcttcttcttcttctaaatgtaatattattctctttttttgtgtgaattctttcttttctgttttctcttcaattctgtgtattttttcttttttttttgcccaccaatcatatatggctgctgtaagagtaactaagacagacagatcattcattcctaggtagttattaccgtaccgttatttcgtttacttttctttttattttttgttttttttctttttaatcaagattcatactccagcaagcaaggcagcattagcatggatctatactgaatttcagttttgttcaagaaaaaaactgaattgcaacatggtttgctactgctgctgctgcagagcatcaagttcgagaacttcatcatccaggccggcaccgacgcgtcgctggtgcccaccgacatggccaccaccaacgccaccgtcaagttcacctaccgcaacaagggcaccttcttcggcatcc

SEQ ID NO: 44911 - DNA, 461 bp, Setaria italica
  misc_feature (3)..(3): n is a, c, g, or t
  Peptide Sequence Number=SeqID_110885
ccnctttggcattgatgagcaaaggcgagaatacagcgaagtattccgcacgataagatagacgatgaatgcaaggtaaacaaccagcacaacacacaagcttgagcgaagcactgcacctcggacatcagtaatgtagaatgaaacgataagatatccattgataagcattagaaagaccgtaacaatccagctaatcacctgagagcacaaaaggtgttaatatagcaaattaggctgggcggtgttactaattgtgtaaaggagcctcatgccatcagagaaataacaacaggttaactacgtcttcgattaactgtgagttaggcgaaccatattgaagaaggtacatacaaatgcatgtacacagaataacctagctaaatgatataagagttctcatgcctgggtaagttctatggcataaaacattgaagaatcaatgttaaggcgtctcgatt

SEQ ID NO: 44912 - DNA, 2224 bp, Setaria italica
  misc_feature (8)..(8): n is a, c, g, or t
  Peptide Sequence Number=SeqID_110886
ggctttanaacaggttgagggcaaaaggaacaatacatatgtagatcacaaagtgcagttgcttcactatatcttgcaagaatctccattcaaggtgcagcggaagatacggtgagatcctggaattcaggactgcaccatcaaactttacagatcattcggaaacttcatctgctcagtcccagaaggaaatttgcggcagctgagtaatcaggcaatgccattatgtcaatagtgttttcgcatcaccataataatcagaaatgagaaagaaataacaaatctatctactgcgtgtaccctcaaatatgagagtgccccggtgcctcagtccatcctaaaggagaagcctactaccagatatcccataaatacaagcatacaagggatatgcatataaagacttctctggagccaatacaaatgggcagcggtacaatctttacatggagcagcagctttcttcgggtataatccactatcccagtccatcatggtggtgaatgacaatgctgaaatactcatgacctctttggcattgatgagcaaaggcgagaatacagcgaagtattccgcacgataagatagacgatgaatgcaaggtaaacaaccagcacaacacacaagcttgagcgaagcactgcaccccggacatcagtaatgtagaatgaaacgataagatatccattgataagcattagaaagaccgtaacaatccagctaatcactttggtgatgggaccaactacgaatgatcccatgacttgttcctttgaaacaagggtgatgagaggtattagtgcaaatggaatctgtatggactgaagaacattgagtgattcattcagaatatccatcgtaggatcttcagtatcaaaaaacagagccacaatcatagttggaataatggcgaaacttcgagtaatcattgctcgtagccacttcttcagtcgaagattaaggaaacctcccataacaaattggcctgcgtatgtgccagtaattgtgctactctgtccagatgctaacaaaccaatagcccagatatagaggatgggaaagaatgcagttccatatttttcctgtaagtactgcccggcattctcaagacctatattaccagcctgttcagtcccataaaatcctttggcaaaaaccgttgtgacacagatattaataaagaaggacacaatgagtgcaagaattgactcaatgttgtagtagtacactgcttcttgaacacgggatttcttgtttgtgtcaatcttcctggactgcactagggcggaatgcaagaaaacattgtgaggcatgatgatgcagcccacaattccaacggcctgcttaatggtctttgaactcaactttggaaccaccaaaccaatgagaagttcctttccactaggcttcgtttcaccaaacatgaccgcaaatgacacagccatggttgcaatcaatacagcaaaaaatgcttccagttttctcacaccataattctccaggaagagaaagatgaagcaatcgagagcggtgatgacgacgccgccccagagcggcacagtgcctcccgacaggatcttgatggcaatcgcgctgccaatcacttcctgtatgtcggcgccgacgagcgcgagctcggtcatggcccagagcgcgcgcgtggcccagggcgggtactcctcgcggcagagctcggcgaggtgcttccccgtggccaccccgagccgcgcggacagcagctgcacaagcgcgcccatgaccgtcgatatagcaaattaggcgtgggcggtgttactaattgtgtaaaggagcctcatgccatcagagaaataacaacaggttaactacgtcttcgattaactgtgagttaggcgaaccatattgaacaaggtacatacaaatgcatgtacacagaataacctgtaaatgatataagagttctcatgcctgggtaagttctatggcataaaacattgaagaatcatgttaaggcgtctcgattaataacacaattaagaccagaaattgaaactaggcattcttctattaaggaaagaacttaaggattcccatcagcttctagttctttcagatactgaaataaaacagcacagtgaaataacatatcatggtctcatgcagaaatagtcaattggtcattaactaccttcaaacatgattttttaatgaacaaaactcaaagaaaaaaaacttactttggtga

SEQ ID NO: 44913 - DNA, 250 bp, Setaria italica
  Peptide Sequence Number=SeqID_110887
ggcgtcgcgtacaggcaggcagcaggctagctaggtcccgtactcccgtgcccgtgcgtgcgtgcggccggcggcgccgtgatcgatgacccccgccgtgctccggccggatggaggcgtcagcagcggcagaaggaggaggcgggggaggcagcgccgccgctcggagcagcccggccgccgtgcaggccaccaacgacgatgccgcaaccagcaagctgtcttgtgttaacaaagggtacatgaagga

SEQ ID NO: 44914 - DNA, 453 bp, Setaria italica
  Peptide Sequence Number=SeqID_110888
gaccgacgaggcgacaacaacactcaaaagtagcagcgaactttgcaccgtttcagctatctccaacacagggatactttggacaactgttctgttacaatcctttgcattgcagatattcagaccagcaacgacaagcgaccgctgcaaatatatcctgctggcaaaccagatattcagaacaacaatggccatcgagcatcactgaacatataatccacgcagacccacaatttcacaaccaacagcaagcaatcactggaaaatataatccttgcataccagatactcagatcaacaatgatatgcaatcatggacaaccttaacacataggccaggactgcttccaacacaagcccaacatgcccaacagaaacatccattagcaagcccaacatgcacaactgctcagagaagacttatgaactcactgtgcaaaaaagtccgccaga

SEQ ID NO: 44915 - DNA, 2055 bp, Setaria italica
  Peptide Sequence Number=SeqID_110889
tttttagaaaggttaacaacaacacactgacccattccatgcctgtcgcaaagcacatgatacattgttgacacgggcaacacaacacacatgaaaatcgtaagaacggcacgaaaatgctgaattacagctgatgaacacaccaagataatcaaacggctgatatgaccacaccaacaaaggcaccatccgtggctcactagatcctactggcctatctataatctatcacggcgcagaaggcgcgcagtgttagtctggataatccattcgcaagtacatacacagaccttgatccggcagggcaagtgccacgctgcaggggcacatgcggagtatggccttgtaccgagtccaagtgaacacggtgcacatcaggcaattcattggtcgattcgcactccaagaatgcactgcgcgagatgggtcaggtacggctccgcatgtgaactgttgctcagtgtaggagcaaggctctggagctctgaattgaacgccgcttggaatttcaggattgactctgacatgacaacattctcggatgctagtttcagctgctggtctctgtcctgcgatttgtttgtccttgatcttgacttcccagatttcgatgtattctcggagttagcaacttcgatggatggcattaagagctggatggaagtggcatactgaaggcataaagctttcagcttctcaactttcacaaggagctctggcgacaacagtaagcattcttttagacacttctggaggaagaaatcatggatctggatgacctcatctatgctccttgcagtttgaaggcgatcatgcatcaaatgccaatttggttcaagaacctcaaatgttagataatgcagaaggctatttacaaacttgagcatgctgcgacagagaattgatgaccgcaaaattggtgttcctagaatcttgacagaacggaatacttgttgtatttgccatgctgcacatagctggcgactaacatgcttgcagtggaacaataggcgaaagatcaattggtattttgtcaaagccttccttgaaattacaagagatagcggccactggaccttgttgctaaggcagaatgtttccaaacccgtgatgcttaattgcatcgactgatcaatatctgctgcagcaagcttatctgcagggcaatcacaatccaagtctttcagagtggccagtttcttaaggagggagcttcgttccacacagcaaattaatcttcatgagttggatcagaagcagctgcagtactccgcaaagcaatgtcaagcagagactgaagtttttcagcagatatttcttctggtttcttcgtaagctcctctcgagcaatatccatgaaatggaccaaaaagtcaccttggtcaaggagtagatagcgcttcagggatcgcagtttcccaatgagatcatacttatctttcatcagagttaacaattcaccacttgcaaaatcataagcagacttaatacattcgagatattggtggtttgaaccaaagctcataagcttagaattttctgagaaggaaacctgaacattgtgcccacattctctcataacattaaggtactttcctgtggtcagaatcattgcggcaacattagtaaggaaactaggaattccttcttttaggctgtatcgctgctgccaatatttggcatcataatcttgagtgaggctctccttctgcagagatttgttttcagcaatgaagaattcaccataaggatcatcaataactccctcatacacccacctttctagcatcctgaggtatgctgcacttgtatattctgtcatcttctccaataaagaccgaacagcactatcgccacccatcgcctttgcctggctttgaagtagattaagtgttgcagaaccactggtattgttggaagtagccttctccactagaactgccagtgcattcaatgaactcatcatcctctgacaaaagaaccataatccctgaacagaaagccttccaatgcggaactggtgctccagttgtagctaacctattcgtctttgta

SEQ ID NO: 44916 - DNA, 253 bp, Setaria italica
  Peptide Sequence Number=SeqID_110890
cgagagtgggctactaaccagcagtactgccagcagctcggcgtcgaccccgggagcaacctcacctgctagaggtgttgcttgggttcatggatgcatgcttggctctatagaaggataaacatacttggtgaaaccgagtacaagtgctagtgattgtaataataaataattcagggggctggacctgaataataacgaagcagtttgtaatagtatatgcggattgcggcgaacactttagcaattatct

SEQ ID NO: 44917 - DNA, 284 bp, Setaria italica
  Peptide Sequence Number=SeqID_110891
accaccgccgcgacggagatgacgcccctcacccccgccgccttcctcctcctcctcctcctctgccttccggaggccccacccgccgccgccgccggtgacccgaccccgactccatggcccccgcagttccacgcgacgctggtcatggactcccacggcaacatgtccatcgccgacctctggtacgactggccgggcggccgcaacctccacgtcatccgctaccagctcgccgacgacgcgccctactacgacaacgagtggaacaacggcacctcctt

SEQ ID NO: 44918 - DNA, 490 bp, Setaria italica
  Peptide Sequence Number=SeqID_110892
ttcactggatgctacactccaaggggaaaagtcccagataggatgaatgtggagccgacagtgccctcgcacggggaaaatttgttaaatatcttagcttgtgaaaaggtcctgatcgtgtggagagatatgtttttgtgcctgggaaaatggagagcaagaatgacaatggctggcttcacaccattgcccatttaacagcaatgtcatcagtggaataaaatcgatactgaaatcgtactgcgataggtacaagttcgaggaggaccacgggggacttcacttcggctggggggagaagactctcatcgtctcctccgcgtggcaatagagcattaggctcgctcatggagttgcattagtattgctgtattttaggagcttctggtgcagactgtaaaagatgtgaaccgctgggctgttaactgaaccttagtaccttacctaatcgtagatgtctgcttgtcagaataattgagtttggctaatt

SEQ ID NO: 44919 - DNA, 645 bp, Setaria italica
  Peptide Sequence Number=SeqID_110893
cacggccagcttctggaactgctctggctcgagcacctggagaatatcctcgagctcctcgatgagcagcacctccttctggcagttggtgacgggccagtggcgcaggatccccgtgacgacggcgccggcgagcccgggctccttgtgcacgaactggagcacgcagtaggcgagctggcggtggtacgtgtgcgcccaccgcgtccggtgcagcggcatcagcacgcgcgtcaggaactcccggtgctcctccttgagcggcacggcgaagccgttgatgatgctgccgcagatctccagcagctcggcggcgccgcaggggcgctcgcccgggggagcctcgtaggcgagccgcaggagcgcggtggccatggagcgccgcatgaaggcgcgctcgcaggtgagcttggagtagagctggtggtacgcggtcttgagccggtcccgctcccgggggtcctcggaggcgaacagcgcgaggagggacgagaggaaggcgcggtccacgtggtggcgcagcgccctggcgtccgcggcggcgaccacggagaggaggatgtcgtagaccacctggaggtgcggccacgccggggccagcaccgccgccggcgcgtcctcgtcgaggccgtcgggcggcagcgg

SEQ ID NO: 44920 - DNA, 992 bp, Setaria italica
  Peptide Sequence Number=SeqID_110894
gctaacaattacatacgaataaggaaaagacagacaacagctagcaaaatgaaaatgttacacttctaccactacacaaattctcaaggtgtcctacaattttatactttactcaacttctgactgctatattaatttaggctgaagtttccatcctattcatgaatttcaggaacagacatagaggtacagacttagcaaatggggcactctcacagagagaaagctacatattgatccattatctcgaattttaggaacttttgcagaattataaacatgttatcgggatgttgtgtcgacactaaccattctcgcctttcttggtatgggtgtccacttcagctgttactgacgagctgccaccagtcttgccactgccctccttcaatctctttgcaaaaagcttagcgatctgcaagtgcgtttttgccatgatttctgttctcttgagctccatttcccccttcttaatctcagcttcagccctcatcctctctgtctccctgtacatctccattctggcgtgctcaatcttcaagtatgagctagccagcagctcgatgctcttggctatatcaaactctgtgctctttctcttcttgggccggtccctgaccttgtccacctcctctacgtcctcgttcgccaccttactccttggagagctcacgttggcatcgctatctgcagccctgctctccttctgcacgctgttgtcaaccttctccgctttctccgggacagcgccatttgtgtcaatgttcatcagatcagagaatgcaccaggacccgcatccggcaactgcgcggcaaaatctgcttctactacctcggcctctgctttcgccggagctcgcaggtctatactgttacccaactctgcctgtggcacctgaccagagcagatggccggacccttaaggagtccgtccatacgggcaaagaaccgccacgacgggccggcggcggcggggcctgcgcgcgccacc

SEQ ID NO: 44921 - DNA, 367 bp, Setaria italica
  Peptide Sequence Number=SeqID_110895
tctccgactcagtcgcactagtaagaaggcaggaggaaggatacaactttacaaaagtgaaggtaattctttaaaatttaaatctaataatctctttcgctgtagttcagtttatgtggcagatacagttattaggacaatcaaatatgcccgaataatagactactttagttagaagctaacaataacactgcaacatattgatatgattttagttatggtttcctatcaattttatattggcaatgcatcttggagaatctctcttttaaggctggtagggcttccctctcatttcccaccaacctacatttaaatttccaatacattttgcatatcataatttccttctgctcaactacttggc

SEQ ID NO: 44922 - DNA, 373 bp, Setaria italica
  Peptide Sequence Number=SeqID_110896
acattacgctaaaccagatgtaaccagtctcatgaaacattgtcactcataagaacaataaagagatatagtggcaagtcaaattgtcataccaagctgaatatattttgcttttgttctcaggcatacttcaatgcactaggagacaaaaattacctcaagtcaaaattccaatattgttttgtggtgggtccaaagcatgtctgtcctctctcttccgtttcaacacgttcaattcctttgccgtcggccgcccgattccacctacaacctctttcgcgcccggccggtcttgtccttgtaccgtgccggcggcgggagacctcctcctccgtctcgacctccgccgacccccttcggaggtcctgggcac

SEQ ID NO: 44923 - DNA, 449 bp, Setaria italica
  Peptide Sequence Number=SeqID_110897
aaggtaggtggcatcgtcacgggatgctgttctttggactacaatgatctcagcttatggcaaatttggtcgggtacaggatgcagtcagcttgtttgataggatggcacaattgggcataaagcaggatggcatagcatatcttgcagttttgtcagcttgtagccatggtggacttgtcagagagggttgtcactacttcaatttgatgtctgatggtcaaagctcagttaagatgcatcctgagcactacggatgcatggcagatcttctatgcaggagaggttacctagaagaagctcttgaattcattgagaatatgccatttgagtctagcattgctgcttggagtgcattacttaactcatctcgaatacatgggaacgccaagttgagtcaacttgcagcatcccgtttgatcaagcttgatcctgacgaaccacagaccg

SEQ ID NO: 44924 - DNA, 466 bp, Setaria italica
  Peptide Sequence Number=SeqID_110898
tttttagtttaagtttacggtttaaaaaagttttaattttaaccgtttcttttaggttagtttgttccttaaggtcactagtgcctagcgctttttgaaacattggtcagatgtggcaattgtttgtattctaagattctcaaaatgcattgctgttcaatgatatcttctgctgaagttgtgactagaatgttcttgttgatggaggactgtctcgtgattcaagcacgttctgaactttaactcttcgaaaaattgtggtgacttgtattaggtaggtgctgggacaaacccactcgaaggagcagctttggggatgtctcttttggaatcttttgctgaagctggctccttcctgaccctagcaacaactcatcatggacaacttaaaacactaaaatacaggttcctggcattccaagctcgaaattatcttgtattacggtaagaataaaattgtaacaat

SEQ ID NO: 44925 - DNA, 2118 bp, Setaria italica
  Peptide Sequence Number=SeqID_110899
cttatggacaagttgatgcgcaatgctaataatgaagattcctttatgcattgtaaatggaagatgttgtattagaacaactggggataagtcttcgacttttgatggattactgctctccagcggatcagatgctggaagtatgatagaaccaattgctgctgttccgttgaacgatgagttgcaggaatcaagagctctagtggctaaagctgaactggatgtcttatcaaaacttactgataagatccttctcgagcttgatagcattcagagtttgctgcaggaaacaattaaactcgataaggtcacagctcgcgcaaaatacagtatagcatatgatggcacatttcctgacctgtatttgccaaactttgagaatgaaactgttactagtgctacaggtgggtctgccaagggaacttcctcagcacagccccctaagaaggcatggaaactgtacatgccaaatgcataccatccactacttctccagcagcaccaggaaaatctcgatcgtgccaaaagggatgttgctagtgccacagcggagatccgtaggaggaggatatacgggcaagatattgcagaagatcaactggcatcagacctcagttctatgaaacttagggtttcccagctggagaaagaccagccagtaccagtagattttatgattgctgaagaaactacggtcttggtcataactggcccaaatacagggggtaaaacaatcagcttgaagacagttggcctggcatcattgatggctaagataggtctatacattctagcttctgagccagtaaaaattccatggttcaatgctgtttatgccgacattggagatgagcaatctttaacccagtcactgtctacattttctgggcatctgaagcagattggtgccattcgcgcagagtcaacttcagagtccttggtccttctggatgaggtaggtgctgggacaaacccactcgaaggagcagctttggggatgtctcttttggaatcttttgctgaagctggctccttcctgaccctagcaacaactcatcatggacaacttaaaacactgtttgtgagcaataactcatttgagaatgcatgcgtggaatttgatgaagagaatctaaagcccacattcaagatactatggggaataccaggccgttcaaatgctataaatattgctgagaggctgggtttgcccccggatatagtagaaagctctaggtgtttacttggaacagctggtgcagagataaatgcattgataatggacatggaaagattcaaacaagactatcaacgacatcttcagaagtcacaacatcttcttatgcagtccaaggagcttcataataacttggaactggcacaaaagaacattgtagaccacacttctgctcagagaaaacggagggtgagagtaatttcagagtacgctgttatggcccgttctatcatccgtaagaagtttcagcagttccaggaatctgcaatagctgaaagagtgaaagaagaagagaaggctgcgaacaatgccaaatctgagagagtcaaggatcccattccatcaactactgctgccattggaaagacacagaatacagataacaacttgggtgcagcagccgacgatgaagaagatagaattccagaagttggagattcagtttatgttcctaagctcaagaaccaagctactgtagtcaaaatagattcgtctaagaatgaagtgcaagttcaagccggtatgatgaagctcaaactaaagctgcaagatgtcaaggttcagaagcggaaagtatccagatagaacaattgcacttacctgcgccagcagagattcagataagtcacaagtgtgcatattcaattcgtaacatttaattcgccacactttttcagcaatcatataaccattcaagtggaaatgtagattcactatctgcatgtagttttttaagtcttagcagactagtggttgtcaaaaaaacatcaacacagcacagttgcagaacagtcttagttatgattataacctgtttatgtaatataatttatcactaagttataactgtacgatcattagaatctgccatacggcatcaa

SEQ ID NO: 44926 - DNA, 634 bp, Setaria italica
  Peptide Sequence Number=SeqID_110900
atcacctgcaagcagaagcagcgtcgagagccaagaaacactagcagctagctagtttcagtttccatgcaagattggagcatggagcagatggccgatgaggcgtcggtgaacgagcagagcacggagcggctgcccatggccggcggcgagcagataagtagggtcgacggcgccatggcgtggctggacctcacgctggccgtgaaagcctcgcaagatgatctatcggcgccggccacggacggcgactcctcgtcctcggacggcgagccggccaagcctgcttctcctccttctccggctgcgggcgccgccggcgccggcgccgcgccgcacaaggtgttctcctgcaacttctgcatgcgcaagttcttcagctcgcaggcgctgggcgggcaccagaacgcgcacaagcgggagcgcagcgcggccaagcgctcctcgtcctcggcgacggcctaccaccacctccacgcgcagaggatggtcatggccggcctgccgctcgaggcgcacgccgcgttcgtgcacgccgccctgcgcgtcagcccggcgagctcggccatccacaaggccagccaggagctcgccgcggcgcgggcggccgccaccgccgcgggcacggcgccca

SEQ ID NO: 44927 - DNA, 275 bp, Setaria italica
  Peptide Sequence Number=SeqID_110901
acttccttccttccttccttccttcctcctctctcttcctctctctctcttccatgccgccgccttctgcactcttctgacttgttttttctgtgtttcttgccgtcctagttatgggcaccggcgaggtggatggacgcgcattgtcggagtcggagcagcagtagcggcgggcaagcaggcgggggatctggatccgaggcaccaccaccgggttcctcacggcggcgacggaggcggcggcggcggaggaggaggagggaggagggaggagc

SEQ ID NO: 44928 - DNA, 490 bp, Setaria italica
  Peptide Sequence Number=SeqID_110902
aatagagttgatggtacctgcagtgatataaccctgaaggaaacgcacattgatgggatatctccatcctttgaagtgtatttgcctaacagcaagtttaaaaaatcatccccaggaacccctagtttcctcttatgtctgttaaggaataagccccccacaagggttgaattggaaatggtggaaaacaatttgggaggcattcctcttaaatattgccatgtagataatgggcgtgttagctttctttccttcgacaaagttgctcttccaagcttgccctgatgggtagcaggcacatttgttagcgctccttgttgtcactgatcttgtaataacatacattgaaatagcgagatcttctaagatatatttgcctcagcaattattcttgtttgaagcacggttagtttcatttttatagtataggttactggctacctgatagtacatgagatgttccatcttgagctgaatgggtcatgttgag

SEQ ID NO: 44929 - DNA, 435 bp, Setaria italica
  Peptide Sequence Number=SeqID_110903
tacaagtgtactacgtaactgattaatgtccaaaatcacgcattccaaatatttgtatcctgaaaactgtgtggatagggtattttctacttcagaaccaatttttatatcactagatatcctcttcccatgacaaaatgttttgagcaagttttagatatattggtaatgtagagcaaagacattgcactggattaattcctagccagctacccctgagggaaaggtagcttgatgaccatgtagaaagtttgttactcacctttatgacaattgcaggtgactagagctgtcatctggtatattgagaatattgatgatattgaactaggcagtttgcttgcaccctttagtaaaacaacatttgggctctggtggctttacataccttttgtgtagtgccactgttgttttgtaaaataaatttagttgcta

SEQ ID NO: 44930 - DNA, 337 bp, Setaria italica
  Peptide Sequence Number=SeqID_110904
agtcgcactagtatttcacacaaatactcgctgttgctcgacttcatgcaggataggtctaggcatgcatagcaattcagatgccctctgtccctgctttgcccaaaaggattggctggcttggaaccactacatatggacccaacagcatgacatgctgaaggactaatcaagggatccagatcttactgatacattccaaaaggaaattagttttcactcgattatgaattagcctgactacaaccaacattttctactgaagcagcataatgaatgcagcacctgaatcaaccaatgcatatatcaacatttttttttctgtaagttcaaagtt

SEQ ID NO: 44931 - DNA, 670 bp, Setaria italica
  Peptide Sequence Number=SeqID_110905
tagtagcttcagggaatggcatctacaaggccttgacttgcaaggatcctccaagtctttatcagctttcagcaatgcaaatcctcttcgaaatatgtccatgcttccgtttgggtttcatggctgctaattatgctatacttgaagcctgcaaaggtgaagaaagattgcacattatcgacttcgatatcaatcagggcagccaatacatcacattgatacaatttctgaaaaacaattcaaataagccacgacatttgaggataactggtgttgatgatcctgagacagtgcagaggccaatcggaggtctaaaggtcattgggcaacgcctagagcagcttgcagaggactgtggggtatcttttgagttcagggcagtgggtgctaatctcggggatgttacacctgcaatgctagattgtcgtcctggggaagcacttgctgtcaattttgcattccagctgcaccaccttcctgatgagagtgtttcaattatgaacgagagagaccagctccttcgcatggtaaagggcctccaaccaaagctagtgacccttgttgaacaggatgccaatactaatactgcaccctttctgacaaggttccgtgaagtctatgattactactatgcactttttgattcactggatgctacacttccgaaggg

SEQ ID NO: 44932 - DNA, 1188 bp, Setaria italica
  Peptide Sequence Number=SeqID_110906
cctgcagctgctccccacttcccgttccgcaccttcgcgtcatcgcttccctccgttgcccaccttgtcggtctccgatcctgctcatggcgccccgttgattcgcccctgtacttgctggtaccatctccctggccgcatcagaggattttctcgatcaattcaagcagaggaagctgcaaaccgatttggtgttatctgagatcctgaaccagattagcctaaaaggtccagaggtatttgggaaaagttatgtcttttgttaggcgagcagacccatcaacggcttacacagataatctttacattcataaatttgccgcaccaagttcaaacttcgctgcacaaagattttcctctgatacacagttgtttcgttatggccctgaaccctacaatggtgagtatgggcacatgggtttcactggatcatcatctgctgtattccagaactcattttgcagtcagcaggcttcactaacaccatactgtgtaactgccgatgaacgatccccaagtgttgcagatactcagtccaactcatgctctgatgcagcaaaagaatcgccagtggtctccaatgtctctcagcacaactcccagtctgtgtcagatactcaaagctctgaaattgaagtacagtttgatgaagatgagattagattgaagcttcaggagctggagcacgctctacttgacgatggtgatgacatcttgtttgagatttcacaggcaggtagcataaatgatgaatgggctgatcccatgaagaatgtattgcttccaaattcaccaaaagaatcagaatcaagcatcagttgtgctgttagcaacagcagaacggcacggactccaaagcagttgcttattgactgtgccacagcattatctgaatacaacatagatgaagcgcaggcgatcatatcggacctccgtcagatggtctctattcaagggggacccttctcaaaggattgcagcctacctggtggagggccttgctgcaagaatagtagcttcagggaatggcatctacaaggccttgacttgcaaggatcctccaagtctttatcagctttcagcaatgcaaatcctcttcgaaatatgtccatgcttccgtttgggttttctattggtcttgtcttaatttattgtctttatttacttttgttaagttcctttgttctt

SEQ ID NO: 44933 - DNA, 167 bp, Setaria italica
  Peptide Sequence Number=SeqID_110907
gtcgctggtgcgcaaggtgaccttcaaggccttcctgctggcaggtaccccagggccgatgattgatatgagtgatgttgctcttcctgggtcctgggattggattgggagttactctatttgtatttcgtgaataacgtagcatctgttctacttacaaaaaaaaa

SEQ ID NO: 44934 - DNA, 510 bp, Setaria italica
  Peptide Sequence Number=SeqID_110908
gtaatagtttccggtggttttcaaccatgcacacaaaagccaatgagcaaaaataaagcaaattaaactgatacagttcacctcgctgctgcctcctatcgttggtgccagtggcggggttggcttccaatagaattgacgcattctttgcggtttgcgcaactgcttgacccgtcattgcaaggtggtgtttctgcgcaggcatccatggcggcttcgtcctggttgctgatagcctgatagagcttcgtcctgacctccattgcccccgatctagtgcccaacacttacttggagcaaatgttcgactcaggaaagcctgaagcagctcaaactgaaaaatgtcagcaggttatacaaagccatgcctttgcaaaccctttattcaagctttcactatatatcaggtcatgagacgtggagtgaaacgccttaagttgggttggcattgtagtttagcagtctagtcccttactttgttggttctttcgtattgtattgtaattagta

SEQ ID NO: 44935 - DNA, 627 bp, Setaria italica
  misc_feature (221)..(221): n is a, c, g, or t
  Peptide Sequence Number=SeqID_110909
ttacccaattaatgtatactggctatatgagttggatggatattgtttctcaacaggaaaatttatacacataagagagatgtgaacaaatattactctatcgctgtacaatcaaacaacatcatgcagatttccccatgctctactggaacataaataagggatccccataaataatgaagagagcttagtatgtcatcatgcaatttaatgcaaaaacngtacaacaagggggaaagatgcatcgacaccaaaaattgtgtctcaacacaacatagcaaccaaacgagctcaaaattcaaatacgtggaaaaaagggtaaacaatgagataaattaataagaaaatctaagttttatgtacgctagaatgcaagctggcatttttgttaagaaccaataatggaattacaacaggcagtacacaatatttacatgttgaaaaataaaagacctgttctcatccctagaataagccacgttgggccagactataacacttggaattgtgatcatttcactcttgccaatggaatagatttcatggccgcatattgtgccaactttccttctcctggttattacaaccatgtaataaggaccaagaaactttacaaaaccaactatt

SEQ ID NO: 44936 - DNA, 507 bp, Setaria italica
  Peptide Sequence Number=SeqID_110910
agcatgcaattcaattttaggtgcttcagtaagccccagcgcatgaagttgacgccttaaagcagctaaaccgtatgcaaattgtgcaacatttgtgcggtccaagcagtctatacaatttgtcctgaggacacccttctgtaacaaaataggtaccaacttagctacgcattcgctttgcacgctgctacttttgtcatcatgtggtttggtaacagttctttcgccacttgtggcatcctcagatttggctgatgtacttattttgcagtggaggaattcagttagatccaacacatccgatgccaccttgtttaacagtgcaagcacattggtacctttcctggaagcagcatttagtacttcgcattaaggtacttacaagataatccactaacatatcaagggagatcttacaaaagattcgcttggaatacaataaattaccttcgagaaagcttactcaaatccatgtgtaaaaattttagacgcttgtcctctgcttgt

SEQ ID NO: 44937 - DNA, 770 bp, Setaria italica
  Peptide Sequence Number=SeqID_110911
tatcctctatgttgtacaacagaagccatgtgacttgggattccatcagatgtgtcttcaaaaacaatctgttcagtctcaacatcattggcgaccctgcccttttcattcacaccccgtttcaagaatctcgttccagcaaaatggcgcgagcgcctagctataagtgtcaaccaaaaatccttcccggatactgagagcttcgagagcaaatgttcgactcaggaaagcctcaagcagctcaaactgaaaaatgtcagcaggttatacaaagccatgcctttgcaaaccctttattcaagctttcactatatatcaggtcatgagacgtggagtgaaacgcctaagttgggtggcattgagttagcagcagccctacttgtggtcttcgatgatgaatagacagtactgtttaaaaaatccatggactaaggcaacagtccaactggtattcttgagatgattccgaattgctcgtgtcagaaattcattccatacaaacattgtttcataaacaatgtccagtattcttctcagttatgttcttctgaaggctgcgcatgatgttgtaagagtagctgaagaagaaatcctttgaaagatcaaccgagcaaagtaggcgcttatatcttatagtaagttgacccatacagcttcataaaacattcaccgctggctcctgtaatacggcctcctcctcctcgctgccaattctggagcacatgtaccattgatcctctttcaagttgcccttgttggcttgttccaag

SEQ ID NO: 44938 - DNA, 408 bp, Setaria italica
  Peptide Sequence Number=SeqID_110912
ttccatcagatgtgtcttcaaaaacaatctgttcagtctcaacatcattggcgaccctgcccttttcattcacaccccgtttcaagaatctcgttccagcaaaatggcgcgagcgcctagctataagtgtcaaccaaaaatccttcccggatactgagagcttcgactgccaaaccaaaacaagtgtattagcatgtcttcctacagcacatggtttgtaatgccaattttacgatatgcttttgtggtccttgaactaggatcaagagacagtgcccaacacttacttgctaaggaatgttaaaacagaaaaaatatagcaatgaatttcataactaagcattaggggaaaacaattaaactgtccagactatatgatgttactctgtatcagcaacatacaaagat

SEQ ID NO: 44939 - DNA, 289 bp, Setaria italica
  Peptide Sequence Number=SeqID_110913
agctgttgcataggaagcaacgcagtgttgttttcgtccactattgcagttagatacaggtaggctgttctccaacaaaatattaccatctgatagcgacctctttatgaatgacctcatctcgctacatcagatgaggattactaaattagaagagtctgaagaatcaatacaagaatagtacaattgacagaactaccggccagtctagactgctgaaatatctagttttgtattgattcttcagactcatctgatagcgacctctttatgagtcgctagactgagt

SEQ ID NO: 44940 - DNA, 1246 bp, Setaria italica
  Peptide Sequence Number=SeqID_110914
aagtatgcagaaagtggttaacaaactactgttgagatgaaaggaatgtggaattggctacttataaatgtaatttttatctaaattaaactataaatctaaaggcttagaagttgtaacaaaaacctcgttccagcaaaatggcgcgagcgcctagctataagtgtcaaccaaaaatccttcccggatactgagagcttcgactgtttaaaaaatccatggactaaggcaacagtccaactggtattcttgagatgattccgaattgctcgtgtcagaaattcattccatacaaacattgtttcataaacaacctgtccagtattcttctcagttatgttcttctgaaggctgcgcatgatgttgtaagagtagctgaagaagaaatcctttgaaagatcaaccgagcaaagtaggcgcttatatctgttctcatccctagaataagccacgttgggccagactataacacttggaattgtgatcatttcactcttgccaatggaatagatttcatggccgcatattgtgccaactttccttctcctggttattacaaccatgtaataaggaccaagaaactttacaaaaccaactattccatagcattttgtgacaaatttcagtccaccagtcaacctattcccctcatgaatccgccaaagcagttcttggcattcactctccgtgtaaatagttggatcctcctcgacacccagctcagtacactccatccgatcaatctttaagaccctccagtgagccctgctcttgtctcttccaataaggtaaaatttcgatctggtttcgtagagccgaaacttttgcaggaatttaccacccgtcatagcctccatcggatcagatcgacaaacaaacaccaggtcctgaccgagaaattgtaaaaaaccaaagactccctgtagttgttcagctcctcgtcggctgcttcaagtagagcatccttgtcgcttacaaacacaaatgctccaggagagagaacccaatcaaatctcacacctttcggatcaagaacgccaacaaacgaatcgaaatcgatccaattcaaccccccacaacgagagattcccccaccgttggatctgcgcagagcgcaagacccggaaaccaaacaaatcgactgcaaaaccgaacacaaagaagaggagatttcctttccctgggctcggcagcgagagatttgttgtggaatggaacggaggattccacgctccaactacccccc

SEQ ID NO: 44941 - DNA, 602 bp, Setaria italica
  Peptide Sequence Number=SeqID_110915
gggttgctgccttccatttgtctctttgctcacagaagatcttgttgtgagctgcagaaccaccatattgaatagctaatgtatcacccattcgttcatagaaatccatcagatcgtcagccagaggagcatgcaattcaattttaggtgcttcagtaagccccagcgcatgaagttgacgccttaaagcagctaaaccgtatgcaaattgtgcaacatttgtgcggtccaagcagtctatacaatttgtcctgaggacacccttctgtaacaaaataggtaccaacttagctacgcattcgctttgcacgctgctacttttgtcatcatgtggtttggtaacagttctttcgccacttgtggcatcctcagatttggctgatgtacttattttgcagtggaggaattcagttagatccaacacatccgatgccaccttgtttaacagtgcaagcacattggtacctttccttcgagaaagcttactcaaatccatgtgtaaaaattttagacgcttgtcctctgttagccccttattaatgtaatggatagccttagcaaattctgcacggagcaaagattcacgaggcttcttctcgcgg

SEQ ID NO: 44942 - DNA, 398 bp, Setaria italica
  Peptide Sequence Number=SeqID_110916
taccttcgtgctgaatgtgaagctttattagcagaagtttctgcaattggaggagaattctacattccgcctaagttgcaaggcaagttttggttaggatggtgcccttggtgagaatcacgagagggatgttggaagtataaatcgtttgagctttcaagttaaccgaatggcttttcttcaagcgtgtggagttgaatatgctcaaactaaactgtacaaaggaaacatttttgtaaagagcaatgttcttttagcggtaaggtgacgtgcagcgacccaccccacccaccccttcaagacgcctaggcgaataaggcacgcgacgaggcgctacaatagggtagcacaaacatacactgatacatacctttttgctgccaattctggagcacatg

SEQ ID NO: 44943 - DNA, 325 bp, Setaria italica
  misc_feature (1)..(28): n is a, c, g, or t
  Peptide Sequence Number=SeqID_110917
nnnnnnnnnnnnnnnnnnnnnnnnnnnntttttttgtttttttttttttttttttgctttccgaaattgaactgatataagcagcaaatatttctatttctgtaacatactatttacaacaacagtgctcttttttcaccttttttcttcttttttttaaaaaatacttttttatatttttttcataatttctatggagaaagggaaaatgtaagctaagctaaaagaatcagatatactttggcctatttattgtctaagctatggtcaaattcttcaccacagcaaattgaatcctgtacccaacccagccgccgccatctcc

SEQ ID NO: 44944 - DNA, 667 bp, Setaria italica
  Peptide Sequence Number=SeqID_110918
taaataataaggggtcggttcgcttcgctgccgcctggagaccccccgcaggatccttcgttcggcttcgtctctatctccaccagcttgtaggtttggatccgcctggagaccccccgcaggatccttcgttcggcttcgtctctatctccaccaggctcaggatgtattttgatcattggacgactcgggaccttggtgagcgtcagccaacatcgtggcggtctaccgacgtactggggaagcccaagaaaaccatgaaaaaatgtgtccgccggctgaacatgttgagtttcacttatcctccggagttcaatactggagagaaccagcgcctacgtggactaaatgctaaattgctcgacgtatttaggttaattgcccattcatatgattgtcttgcggaagagcaggataaatatgataacctgttaaccgtatggttaaatcaagagagaattgatagtaccaaggctacacttcgtgaccttcgtgctgaatgtgaagctttattagcagaagtttctgcaattggaggagaattctacattccgcctaagttgcaaggcaaggtacgattgaagaaatatgtccctgttggatcgctgcagcacttaactggcgcagatcacttttttcaagaacaactaccggatggtgcccttgg

SEQ ID NO: 44945 - DNA, 1364 bp, Setaria italica
  Peptide Sequence Number=SeqID_110919
gtagcgttgaagggttcgaaggaactcctgagattgggttgctgccttccattggcctctttgctcacagaagatcttgttgtgagctgcagaaccaccatattgaatagctaatgtatcacccattcgttcatagaaatccatcagatcgtcagccagaggagcatgcaattcaattttaggtgcttcagtaagccccagcgcatgaagttgacgccttaaagcagctaaaccgtatgcaaattgtgcaacatttgtgcggtccaagcagtctatacaatttgtcctgaggacacccttcttgtggcatcctcagatttggctgatgtacttattttgcagtggaggaattcagttagatccaacacatccgatgccaccttgtttaacagtgcaagcacattggtacctttccttcgagaaagcttactcaaatccatgtgtaaaaattttagacgcttgtcctctgttagccccttattaatgtaatggatagccttagcaaattctgcacggagcaaagattcacgaggcttcttctcgcgggtctttattaagttcaagatgattattggattcccatatctaagtgcaaggttctcaaaatgaagacgagtcgccttgtagtccacatcggcttttaaaataatatctggtctaatattaagtcttgaagtttcctgaaaccagacaagaggtattgatcctctatgttgtacaacagaagccatgtgacttgggattccatcagatgtgtcttcaaaaacaatctgttcagtctcaacatcattggcgaccctgcccttttcattcacaccccgtttcaagaatctcgttccagcaaaatggcgcgagcgcctagctataagtgtcaaccaaaaatccttcccggatactgagagcttcgactgtttaaaaaatccatggactaaggcaacagtccaactggtattcttgagatgattccgaattgctcgtgtcagaaattcattccatacaaacattgtttcataaacaacctgtccagtattcttctcagttatgttcttctgaaggctgcgcatgatgttgtaagagtagctgaagaagaaatcctttgaaagatcaaccgagcaaagtaggcgcttatatctacagaaaatgagagacgagaacataaatcacttcagaaaatttgaaacttgtagtgtatatctgaaaatgaatattacaagtagaatgctactggagcaagaaaatttgaaacttttctatatacctccaaccacatgaacaccttacacaaggctcagaactgcaagaattccctatttattgttattacttggcttattattgtagtttggtattggtattatttgttt

SEQ ID NO: 44946 - DNA, 1515 bp, Setaria italica
  Peptide Sequence Number=SeqID_110920
gccctcctgaaatttctgaaacattaggattgggagttttgattttctgaagtttcctgtcagattgtgtccgtcttctgcgtagcattgcttcctgtctaccatgttaacctctgtttcaggcttgtgatgtaattagaaagttgtagtgtgtttaataaactttccaggatgtaaaagaacataaattgtggttaattactctatatgtgtagcctgaacgtactttcttgcactattgcttgttgctcgtttgcactgtacagacgatattaaatatatttttgatttgttaatttttgtagttcacttatcctccggagttcaatactggagagaaccagcgcctacgtggactaaatgctaaattgctcgacgtatttaggttaattgcccattcatatgattgtcttgcggaagagcaggataaatatgataacctgttaaccgtatggttaaatcaagagagaattgatagtaagttcctttagcctctttcaattgtttggctgctaaacagattggttttgattaatgtttgttttaaccaaattgttgcaggtaccaaggctacacttcgtgaccttcgtgctgaatgtgaagctttattagcagaagtttctgcaattggaggagaattctacattccgcctaagttgcaaggcaaggtacgattgaagaaatatgtccctgttggatcgctgcagcacttaactggcgcagatcacttttttcaagaacaactaccggatggtgcccttggtgagaatcacgagagggatgttggaagtataaatcgtttgagctttcaagttaaccgaatggcttttcttcaagcgtgtggagttgaatatgctcaaactaaactgtacaaaggtaatttgtttcttccccttctatctgcttacctgctttgtaaaatgatttaatcctgtgtaaaaatgaattaatcctgtgatacaagatttttagctagccctgtgttctgtttgaatgatttagggatgtgctgtccttatgttgaaatgactgtacaggacacatttttgtaaagtgtgctgaaattcctgcaatttgctcttttacttaagttttttagctagcccagtgttctgtttgaatgatttagggatgtggtgtcctgatgttgaaatgagtgtacaggaaacatttttgtaaagagcaatgttcttttagcggtaaggtgacgtgcagcgacccaccccacccaccccttcaagacgcctaggcgaataaggcacgcgacgaggcgctacaatagggtagcacaaacatacactgatacatacctttttgctgccaattctggagcacatgtaccattgatcctctttcaagttgcccttgttggcttgttccaagtagcatgcattaccttgcaggtttcaacatgtgatgaatgtaataatgtaacagaaatactttgtaaccatcaatgaaatgcaatgaggatcaaacattcaattgaaatatcttttgatgatactagaaaaa

SEQ ID NO: 44947 - DNA, 315 bp, Setaria italica
  Peptide Sequence Number=SeqID_110921
ctcggatttagagtggcaaattttaggccaggccaggccttaaacacttgtctgctggtcattcaaaccacttccttgcttgctgaaatgttagcgatatctgtgctcagtgcggtacgaaatctagaccccttgtgttattacctactatagtgaaaaggagagtaatcaatattcgtgcccagtgctgtaggaaatgtaaatttctcttatttactagtacaacttaaatgctgaccacaaattagcattagcatgtccatcaattcacctgtttccaatttgtttcaccacataaatgcctaaattgctcag

SEQ ID NO: 44948 - DNA, 605 bp, Setaria italica
  misc_feature (573)..(573): n is a, c, g, or t
  Peptide Sequence Number=SeqID_110922
gtaactggccgtggtccaggacctcgaggccgtggtttaggtgcagtggtcagcgatcaagcaggagagagaggacagggacgagagaagggataggggaaactgattgatttcatcacctggctgacttcctgattacatcagctccatataaatagccagctactttcccttgcccaacttaacaaaacctgccagctaatctcctattaaacagaaacgcaaccaaactctaacagaagctaacaacttgatcccgtagaacctggactcctaactgaaaacttatgccttgctgtgcataacaggctgcggtgtcaaagtcgatgcatcaatgcaacgcactgatctaaaatctaacaaacgtttcagcttttgcggaacatctgaccggtgtacgttagggtcaggcatctctctatattgctagtggcaattatcaagtaaaagaagtactactgtccgtgtaaatagtataacgatgctattttgatagacagttttgtaatagaacaggtgaatggcaatgctcataaaaaaggtgatatgtccgctggtgatgaaatgttttangagtgtcatatcttgagatgccattttcacgt

SEQ ID NO: 44949 - DNA, 254 bp, Setaria italica
  Peptide Sequence Number=SeqID_110923
aatgtacatcctcacaatgacactgtacgcaatcatgtcaagtacagaagaagaacctttcagttcaaggtaaatagtttcagcatcagaaaatctctccatcatgctgaaaacatcaatcatagtgcaagaaatacggagatttggttgtgttccagacttaggcatttgattgtatatcctaacagcatcattgtaactgccagcctctttgcatgaacatatcaatatatgatataaattttcctcgaaag

SEQ ID NO: 44950 - DNA, 503 bp, Setaria italica
  misc_feature (16)..(16): n is a, c, g, or t
  Peptide Sequence Number=SeqID_110924
aacacaatctaatgtnaggggctcgatcagctggaggccactcaggcatgacattcctagtttgatatatagcgcagatatcttatttgagaaggcatgggattcagaggtgaaaacatctccaaaagctccaaagatgattgtttgtagagcatatccagtgttttctgctcatcggaataatgccccaggtatattagaagagcagctaacatgaaagccagaacaggccagctcccttgttcacagtgcattagcagtaaattatgctgacccaaggaaagccagctttcgctggacttcaagatacagtgaatcatttccatagtcaggattggacatccctcatagtggccagggtagtctaatacagtcataccgtaatcagataaaatgtggtatatagggctttcttccttcctagtcccaaaattcgagatcatgaatgagtgatcacgaaaattttccagaagatctcctgcaatgcctctaatatgtgcttc

SEQ ID NO: 44951 - DNA, 829 bp, Setaria italica
  Peptide Sequence Number=SeqID_110925
cagcagagctgatgctgtacacgacggatatgaagcccgcggggtacaacaccaagtgggaggagctgcacgccgagtcgcagaaggcgctgctccagatcgaggataagatacgtgagtacaaagatgagagtgagaggttggatcagtgcagtcgtctttatgactcctcaatctcgaatgtcaattttgagcttgatgcgagtcgcattgctcaggaactcggaggtaccaccactgtgatggagagagagaaggcttccatccaggaattgatgactgtcgttaatgaaatgatgtggaacacggaatttgctatgaggtcatacttgatgttgaggccaagattcgtccgtccaggtgctggtgttgccaatggtggttcttcaaatccttctgcaggtgctccacccaatcagccagtggtagatttctacagtggagtcccaaagcgcccttccctttttatgcagcatactgtcaatagatttgaatgttatctcgctgagtgttgcaagtggatcggtgagctagagcagctggttcagatggagaataataaaagatcatcagattctctggagtctcttccaaaagttatgtcaaatgtgcatgactacttcatttatgttgcttctaaggtggaaaatcttcatcagtatgttgagtcaatgaaaactgaatatcttaatgaacagcgtcatatgggtaatgggaatgatccgtttctggaggcaaacagaagagaagcagctaaacaagaagcagctgccaaaagggtccatccaactttgcatttgcctgctcctgcaccgagccaacaagacca

SEQ ID NO: 44952 - DNA, 772 bp, Setaria italica
  Peptide Sequence Number=SeqID_110926
gatgctagtgtaggagtggatgctgttccaaatggtgtggtcaattgagctgatccagatgcgccaaaaaggccgcctgatggagaataataaaagatcatcagattctctggagtctcttccaaaagttatgtcaaatgtgcatgactacttcatttatgttgcttctaaggtggaaaatcttcatcagtatgttgagtcaatgaaaactgaatatcttaatgaacagcgtcatatgggtaatgggaatgatccgtttctggaggcaaacagaagagaagcagctaaacaagaagcagctgccaaaagggtccatccaactttgcatttgcctgctcctgcacagcccacaacacaaattgctgcaccagcagcaagccaaccacagcaatctttttttccatctggcgcaacttcgtcaagtggtttttcagcttttagcactcctgctgccgctccatcctcatctagtctctttgcaactccaacaactccagctccatcaggcggcctttttggcgcatctggatcagctcaattgaccacaccatttggaacagcatccactcctacactagcatcaacaccagctcctggatttgggactagcacatctttgggtggaacatcattattttctacaccatttggaggtggagctacagcttccggctccagcttcggtggtgcatcgaaagggaggtctaagccccgggggcgtcgctgaaccaatgtgaaacgtgggtgctcttgtttctcctcttggacccct

SEQ ID NO: 44953 - DNA, 365 bp, Setaria italica
  Peptide Sequence Number=SeqID_110927
gtcccttggcatcaaagtgctacgctgaccaaaatctgacaagccaaaatcattgcttgctggaatgagcctgcttatctctgattttgctcttgcaagatatctgcgtgaccgattaacagtaatcagtcactagcaaaaacgtttgcattaacccagcaatctgaatcaatgagttcttcatcatcgtccgcaagctccgaggccagcatatccagcacggcagcaaggcctcccagctcaggccccaggtcctccccagcgacgaactcccgcaccacgttgtccacctcgatcatgctacacccaggcgtcttcctcgtgctccggttccttatctccttccgcgtcgctcgccaccgtcc

SEQ ID NO: 44954 - DNA, 199 bp, Setaria italica
  Peptide Sequence Number=SeqID_110928
taacaaatagtgatgagtccaagatgtggtttctggtatatgtatgagaataaagtattatgatccgtaggaataccaagtttttgtgactatacaatgtgatcgagtccaagatgtgtttctggtatatggcattagaattaaagttattatgatccgtaggaataccaaagtttttagttctaatcttgatatacct

SEQ ID NO: 44955 - DNA, 510 bp, Setaria italica
  Peptide Sequence Number=SeqID_110929
gagtgatgcaaaggagagattctttgggttagtggcatgcagctgggagaagcttgtggcatcaggaaggacaccagcttctgggcttgatgaaggagagtttgaatcgatcttggatttgtctacttgagttgtgtgcataggttcttgttcagttaacaaagagattgttcctgtggacgagaagagagaagatggcaccccctgcagtggcggcggcgccgtcgacgaccaccatggtttgcgcaaggcagggacgactccatcaacgctacgaaggatgctatcgccttgtctcaggatgcatcccatacatgctcagagaggaggatggggaaagaagctgccaggatgtgctaggcaggctgcaggtgctcatgatctcgacgccgaagcgaggcgatctcatcttcccaaagggtggatgggaggacgacgagagcatcgacgaagctgcgtgcagggagccttcgaggaagcaggcgtcaagggcattatcagcgtaggtgg

SEQ ID NO: 44956 - DNA, 464 bp, Setaria italica
  Peptide Sequence Number=SeqID_110930
aagaagacaacaatccgagtcgagcacacgggtgtctccgactcagtcgcactagtcgccggtgctgccgctgctgctctcgggaggtgctgccgccttgaggaccggctggcgagctgaagccggggcctccagcacgacgccggtggcgaagcttatctcgccctcctgcaggaaagggaagcgtcggccttctttggcgtaagcagacgacgcgccgacgaaatgctgcctgttgctggtgcccagagggatttggtggtgagtgtaatatggactctcctctgttttgattacgcccggccagttcgcatcaagcctcggtgctgcaaacggtgagaatcgtgttccttgttgactcgccatgaagcttgcagaagccatggtatctggttgtggcttcctgcggcggcgattgtgcccatctaggcgctttctacagctgcgcttggtgtcatcaaact

SEQ ID NO: 44957 - DNA, 425 bp, Setaria italica
  Peptide Sequence Number=SeqID_110931
ggcaaacaagatggaaacggcctctgttacattgctttagcactggcataagtttctttgagtaagggcgtacactggattatgacacgagctccagaagcaagcctttcttcaatcttaaccgctttctcttttcatcatgaaatgttactactcttgtagatcgtggtgatggatcggtcattcttttgctcgcacttcttgacaaagtcttggatgaagcttcattgctacatccttgttcaccattgttatgtctgacatctgtggttatggttaccaatgtcccacttttgggttgctgacatggtgccattttgattgtttgtgagataattttgcttctgccctccaaattatccaaaattccctacggaggcttctttctcagaaacacagtattggtcataagatgaggagtgctt

SEQ ID NO: 44958 - DNA, 408 bp, Setaria italica
  Peptide Sequence Number=SeqID_110932
gatgttacttctttcaatatggtgctttgcatgactactgttgtatagatcgtggccaataagtacatcttatcctatgaccctttgctatgaccctttgcaaataagtagaagattgttataagcgtcaatactcagtataattgatcgctgctgtgagttccctttcagcttatcgtaggcatacattattgctagcacggtaaagccaaccaacacgaatgatgaagtaaacgtagcggtacttctgtataccaacacccttacttaaatgtaccggtgtcattccctactggcacatatattcttatatgctagccagcttgtaaaattaaccaattaaaatattatttcaagatagaaataacttattggcttaattggttaattttacaagctggctagcat

SEQ ID NO: 44959 - DNA, 612 bp, Setaria italica
  Peptide Sequence Number=SeqID_110933
ctgaataattggatatcgtatccacttaaagctgccttgtgtagtacgtctttgtgtctctctttatattccaataaggtcggtgatcttgatgccacacactcagatgtgtgttcatctccagatactactccatgctacctgccctttgtgttttgttcaataactgggtatcatatcccaaccagtatgccgtctgttttgtgtttgtttccttctagttccaaaagggtcatcatgatgttaccttctttcaatatggtgctttgcatgactactattgtatggtaccatcttgtggccaataagtacatcttatcctatgacctttgctatgaccctttgcaaataagtagaagattgttataagcgtcaatactccttataaattgatcgctgctgtgagttccctttcagcttatcgtaggcatacattattgctagcacggtaaagccaatcaacacgaatgatgaagtaaatgtagcggtacttctgtataccaacacccttacttcatcattcgtgttgattggcttaaccgcagcttagttcttatatgctagccagcttgtaaaattaaccaattaaaataattatttcaagatagaaat

SEQ ID NO: 44960 - DNA, 261 bp, Setaria italica
  Peptide Sequence Number=SeqID_110934
gtgacataaccggttactggattatgcatcttacacttgtcaaaacaatatgccacgggagagatgaacaagtaaaaagtatgtaaattgaacaaaatgatcacttcgttacatcacaatatgccatgttccacggtatttacaagctgcttacagttcacagaacacacctataatgacactgggaaaccaaggaaccacaatttgcaaacttacttaaaggcagaatgaaataattaaacaaataacagctgcaatttg

SEQ ID NO: 44961 - DNA, 1065 bp, Setaria italica
  Peptide Sequence Number=SeqID_110935
ttttttagttttttttttttttaacctataaacacaatgcagaccactgtgttgttaccatttttcaaattcagttacaaataaagggataatgacatatcaatacatacttcatttaaacatacaattgatacgacttgaacaagaagtaagacgcatgcttgaaatgaacagaatctacacgtttcagacgcatgtgcccaggagcagcatatctgaatattcagaaacacgttcttattacagcgacaaagactggagattcggagttacttaagtacacagctgtttgatcccgttgttattgccacagtagctatgaagaaaaatggaaaaagatgaaagacacaatctgatctacaggtttcctcagcccattgatgattccacggttctgatctgcagacttcccatcatgcccttagctcaacataggaacctgagatccctgaggtgccaatcagggagatctttccccactcagaacctatgccactgcatctcattttgaggtgtatcatttttgtccccaactcagtctccaccttctttcttagataattttcctcagggccaaaggactccagatatgtcatgtagcgattatatgcagctttaacagcatcttcgatgtaaccaggcaagggacccacattctcaccggtcaggccacatagatcatcaagagccattcttagggtaactaaggttccgccaaattcttcacaagcctcagcagcacaaaatacatttttcaaagcctcttgaccagccttatcatcagtagctttagatactgctttctttgcttcttctacaagagaaactggaagttcattccaactagcggccaacaaatccttaaatgcacattctatctctgggtcagatattgcaggcaaatgcttttcgtttgaactgaagaagcgcctcaggttccatgagataggattgtttccacctgagagcgcgcagatcgggcgcgagagcggcgccaacctggcggcggggcgcctcctcgcctccacgcgcctccccaggttccggcgccctttcggctccttg

SEQ ID NO: 44962 - DNA, 268 bp, Setaria italica
  Peptide Sequence Number=SeqID_110936
cttcctccattctgctctcccaaatcaattcgcaccgccgcatccgatttaaggggaggaggaagatgacggtgggcatgatcaacgcgaacccggtggtgcacgagcggacggagcgcgccgcgcacccgcacgccggcgacgcgctcgacccgctcgacgtcttcgatacggtgcgggacatcaaggacccggagcacccgtactcgctggagcagctcagcgtgctctcgcaggagtccatctccgtcgatgagaagctcgggcg

SEQ ID NO: 44963 - DNA, 579 bp, Setaria italica
  Peptide Sequence Number=SeqID_110937
cggagggagcccgccccgctggtcccggagacttgtcggtgcggggcgtgggctcggtaacggaggcgcaagaaactgctactggaggaggaaatggtggagcaccctcggatggtgaagtcttgaaagtgcaagaggttggggaagcaagaaaccactctcttggaggcttggattcggctgtggaggtgaaagaagctgctgctcaaggcagtggtggcgagaggctgacgaaagcgaaagatttgatttcggagaggccaaacttagctgaggacaagaatcttagcaacgaaactcttggttcggcagctgcatcagcagagaaattggaggtaacggggtcctcgcgagatgtcaatttctctgttcaagcttcaggtcctgcaatgaatacgagagatgaattcttgcgaggcggccatgatgatgatgggcgcaattcgtctgtgcatggagcttatgcttctcagaaaggggggcactgggaaagctcagataattcaacgttggggaacaacccaggaggagctccagtcaatccagatgagcaagaaagggctaagagcagcatcgatt

SEQ ID NO: 44964 - DNA, 464 bp, Setaria italica
  Peptide Sequence Number=SeqID_110938
cgccgaccggaagaaggagcggctgcagctggcggagatcaagcacgcgcgcctcgccatggtcgccttcctcggcttcgccgtgcaggccgccgccaccggcaagggcccgctcaacaactgggccacccacctcagcgacccgctccacaccaccatcttcgacacgttcggaggatcctcttaagccgccattgctccgtcgtccatcgatcgaaacgtgttcttgaattaattaactgtgatctctatcagctggcggagatggatgaacccatgcgtgcgtgatatcattttgtgaataagaagtagaagaagggtatggtgggaagatcgatccgatagtttgttaatggaggtctcgttaattaggagagcttgctgatggggacttgtgatttgtaatatatgaaccagtgatgaattaatgcattcacttgtacaaacaaaaaaaaaaaaaaaaa

SEQ ID NO: 44965 - DNA, 640 bp, Setaria italica
  Peptide Sequence Number=SeqID_110939
cgctatatcaccactgtgttttccaaaatcgcgtatcgctgtattgccgtaccagtattgctgtatcggtgatacatagatgagatctgtcttgtttgttggaccatgaatgttggcatgaattttgcatcagattaattagagttgcaatatctgtgtttaattcgtaatgggaagatcacaccagactgtgctgacacaagaatttgaaaaccatttttctaactcctagctggcttacaagatggatctggactcccctggttaaaattggctgcaaccctgtacacatgtttgcattcgatgttagggttgtaaggcatactgaattcagagcaaccttatccagttcagtacatgaggctgtggcaacaaatcaggattacacaagtattggtcaagatggatatactattttgagtacttcccagttggagaaatgctgttctattcaccatacctcagcctcatcgttcttgccaatttctgtggttggcttgagcatcaaacttcagtgtccatattggagagaagggctccacgattacttgattacagtcctagagatgtgctgcatccatgctccatcacagaaaggtaaataaggagttgggcagctggcaaattgacaatcaaggca

SEQ ID NO: 44966 - DNA, 497 bp, Setaria italica
  Peptide Sequence Number=SeqID_110940
ggcggcagctggcggcgcgggcgcgggcagcagcagcccgagctcgtcgtcgttctcgacggtgacgcaccacccggcggcgctggtggggcagttcggggtggaggcggaggaggccgccgacctcacctacatgagcgagtacgcgtacaacagctacatgaacatgatggacctcgcgcccaactacttcggcagcagcgtctacgatcagttcaactgagcgtgcaggaggtcaggaagggattaactggagctcaggcaatcggctagctattttcgtgttgatgaatcgatcgatttgcagggctcgtagcagcagtagtagcaaccaagtcagtagtagtcgctggtataattagtagtatgttctatcgtcctgacgagaattaagtatattcagtaactttgttgagccatgtaggtaaggttagtaactggcaatctatgtgaatttgtggattatcatgacaaaaaaaaactaaaaaactaaaaag

SEQ ID NO: 44967 - DNA, 543 bp, Setaria italica
  Peptide Sequence Number=SeqID_110941
ccatgcttgtccacacctcaaattgcttgaatcttgatccagtgctggaatcatctaagttgtaaatggatccttatgatttgccttatcatacaaaccataagtcatcagcatcttccaagagaatgtagacatgcaacgaatgtgttagcagttagcactagcagtacatcttcatgtgacttgttttcccattctggttgtatataacaggacatgcttgttttacatctccagccacaagggtgggaagaagtccacggatatgcatctcatcataaagctttgaaatctctttcatgttaccgcatctaatgtaaccttgaatcagcgtccaatatgtaacataatttggatctacattattctcaatcatttggtcaagaagcttgattgcttcttccatataatcgtgaatacaaagaccatgaatcagtatagaataggtgaacacagtaggcttaataccatcctctatcatcctttgttttaacttaaaggcttcagttatgtgaccatccttacaatatttatcaagggcag

SEQ ID NO: 44968 - DNA, 263 bp, Setaria italica
  Peptide Sequence Number=SeqID_110942
ttaaattaagttaaagttaacgtactaaagtacgcaagcatgctaaccatcaccagaattggagcaacttctggttactgatttgcggtcacgtgcactggcaatttcattgcctttctcatgtgtgttgggcctcctttcttccatgatagcatccactatggtgtcaaagagctatctatgggcctatgcttcattccaatttgctattgtcatcctgtttgctcatatcttctacaacgtgttgagagtgaatgcagtcc

SEQ ID NO: 44969 - DNA, 457 bp, Setaria italica
  Peptide Sequence Number=SeqID_110943
ggcacatgacaaatctgtacataattcaagtaattcacatgtcgtttcctcttctggaaatgttggcaccaaggttactgatccactcaaggtcaatgattacgaagagccagtggtgtcaaattctgaacttgagagggtagtgtctgatgccaatgtgaaagacaaagaagacgctaaacgattacaagacacttcaagcaatgttcagggtgaaaccagttattcaaagaaagtagcaactcctgaacgaaggaatgcaggtgccaagaggcctcgaagtgctagtattgaggctgaagggtcagctattaacagtggtaagaaagtagttactgaatcctggcctgctgaagtgattcctcatgagaatgctgatccagcctccaaaaatggctgcaccatggcaagtgcagctgaactcaaaacaaatccttcaaagaaagcactgatttgt

SEQ ID NO: 44970 - DNA, 294 bp, Setaria italica
  Peptide Sequence Number=SeqID_110944
caagaagcttctagaggcactgtggaagtccatgcaggtgtggctagaacctccaagccatagtaagacgtcgagctctgcctccgtggacgtgctgatcggccgtgacctgagcatgtcagcgtggcatggcgcgttccgtgacgacgccgacgcgttcggagaagaggtggaggcggagatactggacgagctggttgatgagatggtgtgggacgtgctcctcaacgtggggactgatagaattaacgtaaggtaactaacttaactagaacgagtatacttgtacattta

SEQ ID NO: 44971 - DNA, 667 bp, Setaria italica
  Peptide Sequence Number=SeqID_110945
ccaagatccttcaggcaggtttctttctcgaagcttgctcagacacaggagtggacttcggagaggtccaatatcttcattggaggacagtttggatagttccaatgactggcgttttgatatggatgaaagtgaagaggttgaagattactatgtcttcaatgatcggcataggggaatgagaatggacattgatgacatgtcttatgaggaattgcttgctcttggggagagaatcggtactgtaagcaccggcctttcagatggtgcactttctgagtgtttgaagagaagtttctatgtgcccacagattcaacaagccatgaggatggtgatctcaaatgcatcatatgtcaggaggagtacttttctggtgtggaggtggccaagatggcatgcaagcactattatcatgtcacttgcatccaacagtggcttcggcaaaagaactggtgcccaatctgtaaatcggtcgcttctgctgtcagcacatagtgttttgttcagaaacaaagaaacatatagatttattatattggcataggactacactacatttttgttttagactacactgcatttttgttttagaatgaattattcatttcaatcccaaactgcacttcatctcattcaattcacaccccacagccaaagcaagctaaa

SEQ ID NO: 44972 - DNA, 552 bp, Setaria italica
  Peptide Sequence Number=SeqID_110946
ggcggagttcttatcgccaccaaaggcgttctccaggacccccgtctcctgaaggtgactgatgtctccgcacatcttgacgatgcagcgaccggtgatgccggacacgaggatcacgcttacggacgtgttgtgtattttaccgtggagaggcctcgtcgggctggcgtaccggtagagttccctgatggtgccgccatgtgagaccacgataactcgctcacctttgtgtttctcaacaatgttatgcaagcatgacacacatcgttccgacagttgatcaagactctctccaccaccctgagaaacaaactaaggactcaggaaacaatccataagagaatctacaacgatgatctatgtataaatctagttaaagaaaaacttcaaatcaaaatgtgatttgtgataatgcctgaaactaaaggtctttgtttctagatacagcatagctaaacaatttctaccaataagtatttctctgaactttgttgcttgtgtaatgattcaactgtctggattactgtataaccgatgaggactaactagatt

SEQ ID NO: 44973 - DNA, 482 bp, Setaria italica
  Peptide Sequence Number=SeqID_110947
cctatggacaaagttggcgacaaggttacgttgagtttcataagttaaagtgacggcgatgagagatttgtccgtgcaaagcgaagggctctttagtctttagtttgcgaagtgcatatcacaatatcattgatgaaggtttaaagtgaagagaaacatgctacaagctatcaattggtgagagtctagttgtggcaatgcatgaacaccaccatggaatgtccattatcaattggcaccattagaggaaaatgttgaaccaggaaaacatcgaatggtactttggccagtatgattattagagaaattgcattggaaaacatggaattctactttggccattgtgatcagcttgcaagcatagtagtcgatgaagatatttggagatgactaaggaataaggcatctcttgcagaaaaatgatcgagtgaggcactttccacattgtgtggaatgtgaacaccaacacaaagatgctaacg

SEQ ID NO: 44974 - DNA, 294 bp, Setaria italica
  Peptide Sequence Number=SeqID_110948
gcttgagcttgtgggtgaggtggtcggtgtactcgggcttgccgttcatcacctcgcagaacaccgcggagaggacctcggcgaggacggcgaggacgttggcctcgaagagcaccatggacgcgagcccggagcccaccgcggtgccgttcaccatggcgaggccttccttgggttgcagctcgaagaagccgtgctggatgccggcggccttgaacgcctccgcggcgccgaccttcttcccatcggccgtcacggccacggagttgggccggccggtgacgacgcccgcga

SEQ ID NO: 44975 - DNA, 479 bp, Setaria italica
  Peptide Sequence Number=SeqID_110949
taaccttaacctgaccacattgcttggcggtggacggctgatggggagtataatgcaaagtcagcttaattacatttacagcatccaaattacagcagcttcgtgtggaaaaacatggctgcccgtcgtcgtccatcaccatcaggcatccacgccgtcgccgtccgagtcgtcgccagcttgtggtggagagtcgtttcggaccataatctgggccagcctcaacgccgtctcccgcgcgcgaccccgcagcttgtccacctcgtcggccgccacaccctccagcactatctccaggcggaaggaggggtcgcggctcaggcagcaggccagcacgtactcggcggtctccgcggcgacagtgcgctgctcctccgtgggccgcagtccgtactcctccagctgatggcccgcgctgtcgacggcactgcgcgtcatctcggccgtcgtctccgcctcccgcttctggtccgcgacct

SEQ ID NO: 44976 - DNA, 740 bp, Setaria italica
  Peptide Sequence Number=SeqID_110950
gtggcaaactctctgtttttcaagacctatttatccactattctgtttaagctttttttaattgctttcaatataaagcaggacccaaggtctttggtctaaaaattctgtcttttcttgttgtttcgtcctcttaaggtggatactccatcactattgtgccatgctgatggctcttgtaagtctgacatgggagataaagggacaatcacaacctgattgtccacgtaaacagagaggcgtggaactttttctgtgctgggccattatgcaaggatttgtcatgatgttgcagaatagatatcagcgtcaaagactatatactaggattgctttggggaagcctaaagaatggatgtcgtatggggagagactgccggtgttgagggtcaattgttgctgttgtgtcctcttcttttttctcttgcagggatttcgaggggtttatgttggggtttttacttcttcgtacagctcatactggcgtcatccctgagtggcaggttgtggtcctgtgggatcctgctgaattgcaaatggcgaattggtaaactttagcaaaacaacaagttagaacaacccttagaatagggactaaagtaccaaggttacaaaagacaaaagaatagaaagaaaatacgaaggaagacaaaacgggaatactaggaataacaatagacccctacaacctaacaaggttacaatacaaccgaacaagaccaaagacttagaaaagaaca

SEQ ID NO: 44977 - DNA, 520 bp, Setaria italica
  Peptide Sequence Number=SeqID_110951
atataagttgcaaaattttgtttttagctttcctattttagtcataaaattgcctttgcatattttgtagaaaacagctgatttttatgaaaatctttttgatgacagcaccaagtgttctgtatcaaatagcattttcacacaattgactggcttatgattgcatcaatcttgcacaaagctgtaatcttctcataagtctatggccgctggagtactcatttttatttttcctttctgtgtagggattcgagggttatgttgggtttttacttcttcgtacagctcatactggcgtcatccctgagtggcaggtcagagactttagctgttaatgcgacaaggattgcatggtatttgatctgtgttataagctttgtgttctttcacaggttgtggtctgtgggatcctgctgattgcaatggcgattggtaactttgcaaacacagttgacaccttgatggctaagtccaggttcaaagcaaagatgaagaaatcgaggagcaaacgggatctgga

SEQ ID NO: 44978 - DNA, 525 bp, Setaria italica
  Peptide Sequence Number=SeqID_110952
gcaaatcagcaggatcccacagaccacaacctgccactcagggatgacgattggtaactttgcaaacacagttgacaccttgatggctaagtccaggttcaaagcaaagatgaagaaatcgaggagcaaacgggatctggatacatgcccctcacctacaggttcatcaccgacagccaaagcttgaaaaggacaagaggagaagcatgagcatcgcccgcgtttaaccagggcttgttaccgttgtaaagcattagtgttttttggccatcagctcctaatcctgactgtgtcaaagcttatcatactcatgtaatcatcagacaactaggttgctgatggtcctaggctgaaggtgatcgagaataaactcttggtgtttgtttatacttgtcctgaacatcgagtgggctaggtgtacttaggattgtaagacttagcaaaattttcccggtatagttgtcgtgagacgtgtcaacaaatacaaaacaatagtagaaagttagtaataacaaaaaaaaaaaa

SEQ ID NO: 44979 - DNA, 458 bp, Setaria italica
  Peptide Sequence Number=SeqID_110953
ggcgggtgcagggcctccggcggcggcggcggcgcgtcgacggacgcggcggaggacgacggagaggagggcatcggggtgctgagggcgaggtcggagccgaggtcagagcggcgcgggcgcggggcgcgggggagaccgaggtaaaggttcagatccatcctcctgctgctccccgcggcctcatcggcgtccatccgacggcgagccgcgccccagagccctaccctcccccgcttcccgaccaggccgccgcctttgactccccgcctcaccgatgccgcggtctgcaagaagcaaaccctatcttcacgcgcggaggcggcgcgggggcccgggtcatgggcggaggatacctggcaccccctcgctgccgctgtcgcgaaggattagcgagcggcggggcgctgccgccgacgacgaggggagcggcggcggcggtgaatggggtgggagac

SEQ ID NO: 44980 - DNA, 494 bp, Setaria italica
  Peptide Sequence Number=SeqID_110954
gtttctggtttctaaatggagacgttgcagtgtgctattttacatactccctacattaagccgttagctgtaccgcccgtacgttgagtaaaatgcaatcttgatgaagttgtatatctagtggttgatctcccttatcagagtaaatttgaggaaaattaaaagaaaacaccgatggagctcacctatgcatggatgctgacgatggagcacacgccttcgttgagggttagggtttgggagcttgggggtttggatttggtgcttctgggttccagaggctatcagccttagaggagttgctggggaggttgctgaacgagatggcagtaaggcaaggcagtggaggtgctactggcggagggatgagacgattgggtagggatggaggtgggggcgttgagctctgacgaggtccactatgacgattgggatgctgatttagtggttgactacggtatagaactaaatttgatgatttcaataaaatccta

SEQ ID NO: 44981 - DNA, 211 bp, Setaria italica
  Peptide Sequence Number=SeqID_110955
ctctcttgagtgcataatataaatataaatattcgtctggctaccatccacattctagaagccccactttatctattaattaacctttttgatgtatatagattttagactataatcaatcccatattttggaaaacacagtcatcagtaactttttagctgccgcgcagcaaatcgggccgtctcttgcgggctgtctgggccccgggcg

SEQ ID NO: 44982 - DNA, 420 bp, Setaria italica
  Peptide Sequence Number=SeqID_110956
ttcccctcgtcctccgtccatgaggatcaggaggcggcctccaggccagcctctcggctacctgctgccgtcagatccgcccgccgcgccacggccgtcgccggccgcgtcggtggatcaccaggagcgccccgcggcggacaagagagaggaggcaggcttgcacttgcacccgtttgccgccgcggatctcggggaagggcactcctcgccggcgaggtgcccggcattgctgccattgctgccgaaggacagcgtggtggagcgcggcagggtcctgggtgcacaacagcaggtgcctgcagatggccgcaggagcctagagaatggtcatcaccacgtgccggagccggtgatcaaggccggagtgcatctcagcaacggcggcgccggggcagcagtgtcagcgacgacgacgac

SEQ ID NO: 44983 - DNA, 415 bp, Setaria italica
  Peptide Sequence Number=SeqID_110957
ctctccagctccgttcccctccgtcctccgtccatgaggatcaggaggcggcctccaggccagcctctcggctacctgctgccgtcagatccgcccgccgcgccacggccgtcgccggccgcgtcggtggatcaccaggagcgccccgcggcggacaagagagaggaggcaggcttgcacttgcacccgtttgccgccgcggatctcggggaagggcactcctcgccggcgaggtgcccggcattgctgccattgctgccgaaggacagcgtggtggagcgcggcagggtcctgggtgcacaacagcaggtgcctgcagatggccgcaggaggtatgtgatgaactgtcgaactgatgcctgaaaaacggaacaggagcgagaacaagaagcgctgcctgcttgctgtgtgccat

SEQ ID NO: 44984 - DNA, 211 bp, Setaria italica
  Peptide Sequence Number=SeqID_110958
gccgcatggaagctgttccaggacatgcctgatcgtgatatccttgcttggaacacaatgataggtggcttcgtgatgagtgagaggttggatgatgcattgagattgttcgctgacatgcctgatagagatctggtatcatggaatacaatcttgcaacggatacggtccaacgaaggggacatggatagtggaaatacctggtttagga

SEQ ID NO: 44985 - DNA, 480 bp, Setaria italica
  Peptide Sequence Number=SeqID_110959
accaacccatgatgtagttctctcatgcgaggcaaacacaggtacagaataccatatactttacctgtgtttgcctcccatgatgtagttctctcatgcgtgttaatgggtgtacttaatgtatgttggggacagcattatttctttctttcttaagttttctgctgctgtgctgatttgcgaagctgtattcttgagcttccaatattattattgcagatgaagtggatcatttgaaaattactgctttaatcaagcattatattattttttgcttatttaatgcatcatgaccgcagtatcacattagaatgttattcccaatcttagtctggggcagtgttgtcatgatcagatggattaaatgaatggatcatttcacactattcaggatcagtgtcaactatgatattcatgctgctttgtatgtcttggttttggcggttattatcagtttttcactcgtttgacttttgtcag

SEQ ID NO: 44986 - DNA, 355 bp, Setaria italica
  Peptide Sequence Number=SeqID_110960
cgtcgtcgtccacggccgggttttaaggtacaaggaactgagaagagatcgaggagggagggagcccccacgggcggaagcagccagcgctgcgcttgggagggaatctgtgacgttgccgggctggatggctggaaattctgcctctgctgggggtggtagcgcccattaatcatggcgcacagtgcagtaacagtggctgcgtttgtagcgagcagatgagctggtgctgcttctgtgtgtgtgtggcaggatgtaatggtggggagtcttttggttacgttcattcggttgcttttgttttggatgcttcatggatgctaaacactcctaaatggggggcgacgtttattaa

SEQ ID NO: 44987 - DNA, 757 bp, Setaria italica
  Peptide Sequence Number=SeqID_110961
cgccgtctatccacacctgcaacatcgtcatcaaggcattagggaggaagaaattcttcgatttccttgacgacgccctgcagatcatgcggagaaacaacgtctttccagacctgaccacgctggagatcatcgtggatagcctagttgccgccaggcatgtcagcagggctgttgaagtgcttagtactgaccaatttgggttttggaattgggaaagcttgccacagaaaggaagcatttgctatcctcatcggttgcctttgccggaggtcacatgtaggccttgccaattcgctcttgcaggctgctcgaaaggagttgcttggtcttgataaccatgtgtacaatgatgtgatgggtggctgggcgaggcttgggagtgttgacaagatgcaggaggtttggacaaagatgcaggaggatggtctggtgccagatgaggtttcacattgccatctaattgaggcgttgggtagagcagggcggactgaagatgcactcagggtgtttgagaatatggcaagtgagagattgggtccaactacgatgacttacaatgcacttattttcaatttttactctactggggatttggacaggtgcatcaagtactacaaagatatgttggacaagaattgtccgccaaaacatcaacacatacttcaagataattaaagcctttctgaaagagcgcagggtggctgatgcacttcaaatgtttgagaatatgctggctcgaggcgttctgccaaat

SEQ ID NO: 44988 - DNA, 144 bp, Setaria italica
  Peptide Sequence Number=SeqID_110962
aaaggctggagtgaagcgatcaacacatgtaagtgatcacgaagcaaatgaatttgtatattacaagctatgagtagttgaatacttgaatacaaagagaaagctgtgaactgttttgctatgtaaggtgttcggctttatcgt

SEQ ID NO: 44989 - DNA, 399 bp, Setaria italica
  misc_feature (367)..(399): n is a, c, g, or t
  Peptide Sequence Number=SeqID_110963
aggtaggcgtggtcggcatccacggcgggggtgggggtgcagcggctgctgctggcgccgcggcgaagaagccgtgagactcagatcgagcgaggtggccgggctgtcaggctgtgttggtggttcggggacatgcgtgaggtggtagagcttcgtgactcgtgagtgtggtgtgttgtatggaaggttgtttagtggtatgagcaaagtctggctttttcttgtggtcatcgtgttgtgtcctgcatggttcttagtgctttgttgtatcctgtgcttgtgtgtgaaggacttgttctcaagtggttcctgccaaatcttgtgtgcttctatatgatccatattcttcgtggaccaaaaaaaaaannnnnnnnnnnnnnnnnnnnnnnnnnnnnnnnn

SEQ ID NO: 44990 - DNA, 1868 bp, Setaria italica
  Peptide Sequence Number=SeqID_110964
gtgcgagttacaactgagtgatcaggacaaacatactaccatgcaagacaagataaaacgaaggcacggcagactgagaacgcacaggagtgaaaacaagataatattgctagtacagtgaaactgtgaaagcaagatgcttgacacagcagatgacaccagaagtgaaccttaaataaagtacatatattacatgacacacattgcacacaaataaacgataaatagatagctacgacaagtacctccactgcgctggtcggtctcttgagacaagaagaacccttgatgatgagtaatcaaatgtaggacagtacaaatcatcagggccaatagcttctctcactccaatggtgtttccacggtcaaagctataagttggctgtatgtcttccttaaatgtgtcaaaggcaaacagccccataccgcaagcagccaagacaaggttcgagttgccccatacttgagttatcgcagaatgatggaaatgagcattgaattctggtaactcataggttgcaacaagcttcccctttctcaaagagtattgctgaactcgtgacctcaaaccaccttttatttgcagccgtccttctgtgctaccaataaatactgaatctccacgtgagaagattgagtttgccgtaccgccatgtcttgctattttaagaccaatgccagcaggtacacgaaaatcgaatacattaacactttcatgcgtactgaaaacaccatcatttccttccacctcagatgaactaaccctttgacgcactcccccgcccacctcagcatcagtgttattcacatgaaggcagtacactttcttaccagaagaagcaacagacagcaagggttgtgggttaagcgaattcacatcccacaaccctattgactcgatccctgcaattactacttttcccctgctacgccattgtagcgggctcgagtattccattcccattactggactgctaacttcccatttcatcactacaccaccatcacggatatcgtaagctgtgaccatcctttgcttgctagcagtagaaagcaggagaggtccacaaggtttataccaccattgttgtgtttctccatttgacaacgcagagctagatcttgatgaacctaaattagagagaggtccaagaacagcccggggtggtggagcaggatcatgagaagcctcctcctcaatatgaaatgcttttacttctctggtatagtaatcccagctgcaaaacccaggctccaatgcattgccagcagatgcagcaaccacatatctaccagaacatccatctacacctggggcgcgaatcaaccagcaatcgccccacgtattattcgataccatgctgggaggcttgtactcagatttgaactcatggtttgcaatatcataataggagcatgtgccatcaccatgagctagaagaacagcttccccctccgaaacaaaccatccacccgtagaagacttgtttcctatacctgataactgatcactgcaagactcctctgtttcctcctgaaccatcatggagggcttgttttcttgctcatcaaactcttctagtttctctttagcaagcaattcaatctcctccttgtgattgggaccaactggattctttgagctaccttggctcgatgtcttgctggttgcatctgctacttcatatatcttgttcttttccaatttcttagcacggcggtccttgaaaaagtcattttcttcaccatctaaagaagcaagaaactccatggctatacagttctcatcatcatcagggtcaggggcagcaggtcctgttgttccaggaataaccctctttgtatccgcagatgaatcatggtgagta

SEQ ID NO: 44991 - DNA, 550 bp, Setaria italica
  Peptide Sequence Number=SeqID_110965
aatacttggtaaagagattgaacggtgttcctatgaaacagaacttgaaaatcttcgccagagtgcataaatagtaggatcttcatgacaaatgttacaaaaagaagagggccatattggatagatttaaagcagctttacaatataatgtttctatgttgtaattgagatccatggcaactaatgtggagtacaggaagctatctttactttggccatgggatccaggcatcgtgcaacggattgggtctgaatgcagtggcagagtggctgcaagatgagttatttgtggacatgctattatgtggtgttcaaagcaatttctgaatatgacagtttagggacaagctgtgttttgcagcatcgtggcccagcaatgccatggatcatgggctttcaagtccatatgccaggtcatagcccaaggtcaagaccataagacacaagctgtgcacatcagaagggatcagaaaaataaattgagaaatacaaaagaggaatcgagaagttcatcttcctcctcaggtacccgagactccccttctccaaa

SEQ ID NO: 44992 - DNA, 261 bp, Setaria italica
  Peptide Sequence Number=SeqID_110966
aagaaagaaaagcaagaaaaggcaagaattgaataaaataattctggagatagagttggttaggataagcttgattagagatagagttggattagttagagatagagttttgattagaaaagattgtgtacatggcttatcttatacgtggtgcgtcaaaggccatccgcactataaatataaagggtcctggccattgtaatttttatcacacgatcaatatacaacacatttatcttttatttaaaaaaaaaaaaaaaa

SEQ ID NO: 44993 - DNA, 519 bp, Setaria italica
  misc_feature (503)..(503): n is a, c, g, or t
  Peptide Sequence Number=SeqID_110967
cccgactgcattgaaagtggcttccatttggaaacttactctcctagctgataaatagtttgaacctcttcttagttattacatctatgagcgtaaagcacagcgtgcatcatggaatacacaaaaatatatagcacttacaaagtacttcctgggattcttagcatggcacggacattgcatttggcttgaacaaatatatacatctcctgggatttgacaccatcttcctagaaccacacgccaattatggacaatcatcgaaggaacctagaacaaagatgcatggcaaggcaacaggcatagtttcctccgcatgctgcttgactaattaatttgggcatgactctttgctccttcagaatatcgctctcttaacaatgtcatggcctattaactagtttctaacttattcactatctgctcagatgatgcaaaatggagtttttgtttgaatatataagaccattgaccaacacatgcagattgatatgacagggaanaaacagagcagcctga

SEQ ID NO: 44994 - DNA, 517 bp, Setaria italica
  Peptide Sequence Number=SeqID_110968
ggtgcctgtgctcatgtgggaatggttagtgagggactccgttacttccattccatgtcgacctctggtattgcccctgatattgagcactatggttgcatagttgacctcctaagcagagctgggctactagaagaagcatttgagttcatcatgaagatgccaatggagcctaatccccaaatttggggatcacttctttcagcttgtagatttcatcagaaaatagatttagtgaggagagtcgggcaacacataattaagttagctcctaatgatgtgggaacacatgtgctgattgcaaacttacatgctgaaggtggtcagtgggatgatgtgcagcaaataagagagcagatgggaaagaggggcatagagaagtcacctggtcatagctccatccaagtctaaatcttcgtgatgtagtttaacgtgatacgtgatctgcctatagtacacgaggctgacaggagcaatgccaacgagtacagttttcttgttttttactaagtaaatt

SEQ ID NO: 44995 - DNA, 117 bp, Setaria italica
  Peptide Sequence Number=SeqID_110969
cgggctgtcgaggtctttctctttctcgggatccgggacggtgagctcatgcatcagccacttggtcttggtctcgttccttgggtcgcccacgtagtaggcgacccaaggaacgag

SEQ ID NO: 44996 - DNA, 1172 bp, Setaria italica
  misc_feature (1)..(33): n is a, c, g, or t
  Peptide Sequence Number=SeqID_110970
nnnnnnnnnnnnnnnnnnnnnnnnnnnnnnnnnaaaatttcaatccaagatcacccaatatccgcgagcgcagtaccacaataccaatgtccaacggtgttgatatatatgactgacaaagaccaatgttcacaaaggcacccaaaccacccacagatccagggccgtgtcacaacggtgaatcagttacattcgtttcacgagacaacggaactacttatgttccgagagggtagcgacaaccacagtgaccccattgcgcacgcttcagcatcaggttacgagttccagcaacatttcatatatacagcacagcaccaagaacgacttaataaagtctgcaagagcaaattatttctctaaaacagcttcaaaccacagacgcccagcagaattcagggtctgttctgtaactgcttgtcgatctttagtgccttctctacttgtccttgcctgagatatcgcaatgccgtgcagcattgccacctcgctgcgctacttgctcctccagagcttcagcgcaaaactgggtatgatgacaaagcaagacattgccatggcacccaatacccccgtatcaaagagtgcagaaccaatcttttccctctgagattcctccactggtaacagccccccaagcaccagaacacctgctccgagcagcaggaagaaaaggaaagacacgagcaccacgagtacagcagggttcagcagcaccttccaggttaatgctccaaacatcttactcgaatggatctgaatctccctggcaaaggtgcggagcgaaagcctgaaccccgccgcgcacatggcgcggaggagccgcagggcgacgatgaggacgagcagcgcggggaaggcgagggctccgatcgagaccttgaggaacgcgtaggtcaccggggaatcgtcgcccaaggcccggcgcgcggcggtcgcggcggccacggcccgcgcaggcgacccacgcgctcgcgaggtagaggtactggagcaatttcggcacggcgaggtccgggagcgcgacggccggctcccgcggcggcggcggcggctgggggtggacctcgagaaccacctcggcgacggccatgggagcgcggggggaggaggctggggaaaccctaggctctcgaagctcctctcgctcgcagtagcagtggaggcggagc

SEQ ID NO: 44997 - DNA, 879 bp, Setaria italica
  Peptide Sequence Number=SeqID_110971
cattttggagtcacctgacttgagctgggcgcgctcttatgatattcatctacttgtttcaaaagcttcagaacaaaaatatagcgaaaattttgggacacgtcgcccatgaagaagtccaaactttttcatcgagggtgtggttttttaaatggaaagaacatcgagtcataaaaaatgaatatttttgggtggaagaatacatgccgaatggaagcttggacaatattatccatggcatgtttccactgaaatatttatcattgtttaactcttggcaaagtttcatctgaattaacttaatttgctgtatataattaagcaatagtttctatgtgacatgatttatattttgcagatcctcaatttcattggtcctctcttttcgggataattgaagagcctcaatttcattggtcctctcttttccggataattgaaggtatagcccagggcatgcattgcctacatgaacaaggcattatccacatggacatgaaaccaagcaatgtcctcttggattctgatatgaatcctaagattattgattttggaatatctgaagtgttgaatgacaatcagatcacccgtgaaaatgtgtcggatattattttacgcaatgggagtgatgacacctatacgaattttagagggaccatgggatatgtagctccagaatatcttgcagaaggtattgtgtcaaagaagaacgatgtttacgcttttggcatcaccctcattcagattgttggtagcatccgcaggtttaaaccacctgagcaataccctttcgatgaatgggcttggagggcttgggaaagtggagggattgaggagttatttgatccggcgctgtttgatgagtctcagctaatggag

SEQ ID NO: 44998 - DNA, 2101 bp, Setaria italica
  Peptide Sequence Number=SeqID_110972
cgaagacctcgccatgagtctgcaggtctttcttctcacccagctaacaatccgaccagctcggaattggggagtgattgagtagtcatgctcggcgatcgatagcctggtacatgccagacggggggaagctattgatttgtaccccttgtcctgacaggaggggcttagatggccgatccggtggccgccgtggagaagatcgtcaagcttgggctggcgatcaaggaggcggtggacacggttcgccacaacgaggaggagtgccgcgagatcaggaagcgggtgctcagattcagtgccatcctgtcgcagctgcagcaaacaggtttgatgaatgatagcccggcgctgagcggcgcgctggaggatctggaggagagcctccagcacgccctcgagctcgtcatggcctgccaggagaggagcaccgtccgccgcctcatctcagcaggggagctgtccaagcagctgcgccgggtgaaggatgacatcctgaacaaagtgatgctggcgtccttcgctatcaatgcccacaccaccattttgttgctcactatccaggctggtggccatcctctgctccggcagcaagaggttacaggagtgacggaggcatcacataacaggtattcaactaactatgccagagtttttgatggacatggcacatctgaattgaatggtgggaggaacaacgtactagcaggaagcagagtgcccttattaccacccttcagagagtacgagttatctgagttgagggccgctacaaacaactttgcttacgacaagatcattggacgcggtggtcattctactgtctacaagggtgtattaaatgatggaaatgtggtttccatcaagacatttttggagtcacctgacttgagctgggcgcgctcttatgatattcatctacttgtttcaaagcttcagaacaaaaatatagcgaaaattttgggacacgtcgcccatgaagaagtccaaactttttcatcgagggtgtggttttttaaatggaaagaacatcgagtcataaaaaatgaatatttttgggtggaagaatacatgccgaatggaagcttggacaatattatccatgtgtgacatgatttatattttgcagatcctcaatttcattggtcctctcttttcgggataattgaagagcctcaatttcattggtcctctcttttccggataattgaaggtatagcccagggcatgcattgcctacatgaacaaggcattatccacatggacatgaaaccaagcaatgtcctcttggattctgatatgaatcctaagattattgattttggaatatctgaagtgttgaatgacaatcagatcacccgtgaaaatgtgtcggatattattttacgcaatgggagtgatgacacctatacgaattttagagggaccatgggatatgtagctccagaatatcttgcactgacatgaccctctgacgacacagggaaggtattgtgtcaaagaagaacgatgtttacgcttttgtcatcaccctcattcagattgttggtagcatccgcaggtttaaaccacctgagcaataccctttcgatgaatgggcttggagggcttgggaaagtggagggattgaggagttatttgatccggcgctgtttgatgagtctcagctaatggagatcaagaggtgcgtggaggtagggctgctgtgcgctcagcatgatccagcaaaccgccccaccatggaagatgttgttcagatgctatgtggtctgaaagagttaccgacaccaaagaaaccacagtacatggagaaaaaacggtctaattggatccctcctgattcaccgtctgccttgtcagatgtatcgttgagccccagatgagcattaacttaaaacctagcttgtatagcatctggtagacttataaaaattaatgaggctgaattgccctgatcctttctaccaaggcgaacctctgtcgccaatgttgttcatcctagtgatggatgtactcaacaggttgtttgggaaggcgagtgagcaaggtccgctacaaccacgcggccatcaagtcctctgggctgtggacaaacctgtcc

SEQ ID NO: 44999 - DNA, 892 bp, Setaria italica
  misc_feature (837)..(837): n is a, c, g, or t
  Peptide Sequence Number=SeqID_110973
tttttttttttgaaaatccgaacctggttgtctactgaacagggtctttcttcgccgttcaatcttcacttacatacaaaagcctctcgttagctagtaacctgctatctccagatcgtaatttcagttcttgcttcatccgaaaactaacttaccaaccacaagcagtatccaaagctctctgcaaacctataaggaggccttttcatgccgtcctgacacgcacaagtttcttggggtgcgatggcgatagagcaacacaactgtgccatgcaggttgcagggcacacaccgtagtagtcgggcttagttatgccagaggtcatgagccccatgatccggccgggcgtagaacatcgccggcgctgctcccacgaggcgcgcgtcgacgtagagcgcggcggcggcgttcggcggcaccgggtggaagccgtccatgaccgcgaactgcatctcctccgacggcttccagtgccgcttccgctggttgatgaaccagttgttgatctgcttctgctccagccccgtcgactccgccagcgcgaccttctccatctccgaggggtagggccatcgatagtgcagctcccaccagctaagcagcttctgccgggcctccttgggggagcttgcctttcttcctcttcttgcacagctccttcctcaggctgcccaccagctaagcagcttctgccaggccttgccgggtgagctccttgtcatcggagcaagggtcgatgccgagagcttcctctgactccatgccgctgccttcttcttggtcgtcttcgtcggacaaattatccagtccaattttatcatctgctgagatggganctccgaggggtgccggtgctagcaatggagttgagctgcgactccaccgtcgtca

SEQ ID NO: 45000 - DNA, 422 bp, Setaria italica
  misc_feature (249)..(249): n is a, c, g, or t
  misc_feature (327)..(327): n is a, c, g, or t
  Peptide Sequence Number=SeqID_110974
tccgctgcagcctgcaaaaagcttccagaagcaagggaagaaaggggaaggagccgagacgccgctccaaatgctttgatctccgtccgtgggctctcctcccgatcgatctcggctcctccatggcgcgcgtcctcccgctcagcatcgacacgggggagatggccagaggcgaagatatggtgacagacatgccaagttcttcagctggggcgtcgtgcgcagcagttgaccattctgagcaaaacncaaaggacgatgaatatgcgaggctggttacacgagctcaacatgcaacatctgatgtcagtgcgacaatttttaccngagcaaccaaggtcaagatccttcatttggtggatgaaagttctgcttggctgcttccttcttataatagtgggttacgtctttgtgaaatggga

SEQ ID NO: 45001 - DNA, 269 bp, Setaria italica
  Peptide Sequence Number=SeqID_110975
gctccgcgcggcgatgcggagcagcagccatggaggtgagctccagtcgcttcgctagggcgctccccaacctcctcgaccccgtctccaggcccctcaagcccccgcaccaccaccgccgccgccgcgccgtccataccctagcctcctcgcctggccctaccgccgatgccctcgcaccgtcgccctcctcggcctggccgccgccgtcactctcccggctccttgccgcggcgctgaggggcgccgcgcgggagggagctccccga

SEQ ID NO: 45002 - DNA, 477 bp, Setaria italica
  Peptide Sequence Number=SeqID_110976
aagagtgatggcatcgtcgatcgaggcggcgaaggcgcccgcgggcaggagcagtgccccgtaaccgaccatcttcttctttggcgcggcacggatggggatcggagagatcggcgatcgcagagcgcgcgggcgggaggcacgagcggctgagcggcaggggttctcgagttggcgggaggcagcgaggttggggcatccgagtatgtcgtgggttcgctcgattccgactcggacctctccactcgggcgttcgagtcggacagcaaggaaggcgcatgccattcagctacgttaacgcagtcgggagacgtattccttcaagtccgcctttcgtgaggggctcggcaagcgtgtttagcattccgatttccaaagtcctgtttgattccgagacaggctggaaaaatgcaagctggaatagcatagtaccgaacacaaacagcttcgcaagaaataactaaaaattggattttt

SEQ ID NO: 45003 - DNA, 198 bp, Setaria italica
  Peptide Sequence Number=SeqID_110977
tccggtgcggcatgcctgagagaaatttatcagccctgaagaatgctatagaagacggcgtggaaacacaggataatagctgcctcgccgaatcagatgctttggaaccatgcgagccccggctgaattctttttggtctttgctaggatgcatcagcaacaggttaaatttactacttactactaataaagtttcct

SEQ ID NO: 45004 - DNA, 1431 bp, Setaria italica
  Peptide Sequence Number=SeqID_110978
gcctccgcctctttcacccactctccccggcagcaccttgtcgggttcgattcgatccctcctcctcggccggcgtcctgcggcaggggccagcggaatcagcccaccaatggcagctgcgcggcggccggcggcgggggcgaagcccaggggcggcggcggaggcgcggggaggaggagcgcgtggctggccgcggacgggagcaagcgctggggggaggccttcttcctgctctacacgcccttctggctcacgctctgcctcggcgtcgtcgtccccttcaagctctacgagaggttcacggagctggagtacctgattcttggattggtgtccaccgtgccggcgttcctcatccccctcttcctcgtagggaaggcagatagcgttagaagtttgaaagatcgatactgggtcaaggctaatatttggattataatttttagctatgttggtaactacttctggacacattacttcttcacagttctgggcgcttcgtatacttttccatcatggcggatgaataatgtaccccatacgacgtttctcctgactcatgcttgtttcctgttctatcatatggcatcaaatatgacacttcgtagattacgtcactccacagctcacttgccacagtctattcggtggttatttgaagccgcatggattttggcgctttcatacttcatagcttacttggagacactagccattgcaaatttcccgtattatgaattcattgatcgggatataatgtacaaagttggttcattgttctacgcaatatacttcatcgtcagcttcccgatgttttcaaggattgatgagaaagatgagaagtggaacctgtccagggtagctgttgactctctgggtgcagcgatgctcgttacgataatactcgacctgtggcgcatatttttgggcccaatagtgcccatccccgagtcgaggcggtgcggtcagccggggctcgcatggttccaaagcatctgattcggcgaggcagctattatcctgtgtttccacgccgtcttctatagcattcttcagggctgataaaatcctcccctcaggctgcaccggagaggtgatgaactgatgacatgatgtgaagcgtagagcggctgttgttgcatcgaaaacgaaacgtgattgttgtcatcttgtaatgttatgtatcatgtcgttcggctgaattctttttggtctttgctaggatgcatcagcaacaggttaaatttactacttactactaataaagtttcctaaatatagcagtaatttgcatgtccctgaacgatacatctttgccttaccgtgctgtgcaacattaggatattgttatttttttttttggtttgcatgccgtttgtttccttcctatttgatggaaatataataataatgtatatcatcaagcgtgc

SEQ ID NO: 45005 - DNA, 407 bp, Setaria italica
  Peptide Sequence Number=SeqID_110979
tggctcctcttggtagtctgctattgcagggcagaacagtgaggtgagagagaggcagagagggacatggagatctgtacatcaaaaatggagacgacgatgagcactccaagatcgatcgagatcgtacgtgtagcagccatgagtgaggattttggttggatcttgcacgcacgcgtgcgtggggaataaagtaaagaagatgcagagcaaaaattgtcgagagttgtataatcaaaaagctttggtgtggctgggctttaaagctgcaagtgtcctctgcgtacgtcctgctccaagagaactagaccctgtagctgttggaggaggagggtcacttgatcaaggagagatgggacccactgcaaaaaactctagccctgtttgaaacgtcaaatttgaacttg

SEQ ID NO: 45006 - DNA, 388 bp, Setaria italica
  Peptide Sequence Number=SeqID_110980
ctgtgcctgtcgagtgttatgggatgaaactcctcattctctctccttataaatatcttaccaagttagcaaaattggtgatgtggcatggaaattaatgctcatgaaactcttcatgaaactcctactgagactagcctaagacgaggaaaaagtgatgatggttctcctttgtgaagttgtcttggcatttatatgcctctccgggtgagatttacagtttttctttcgaagtaaacctctccggatgaggtttacagttcataatccattagtttgttactggattaatcttagccatttttactccattgttggctttgggcacattgcaaatttccttaactgtactggaaacattttttttgccaattgtcaacactgtgtt

SEQ ID NO: 45007 - DNA, 494 bp, Setaria italica
  Peptide Sequence Number=SeqID_110981
taatatataactaaatataaaataagaaaatctttttaacaaatgtcctatgtaaatgctgaggtttatcactgaactccgaagagcatttacatcagacagcattctaggcatgacccaatgatggttgagcaagcgcatcaatatattgccagaaatggaaccatatgtgtcaaaacacgagaagaaatatgttaagtcagcaactatgcatttctggcagtttctgtagaaatgcgcatgctatgcaagttgtgtttggtggatccagggagccattaacttaggggtagatcatcatggaccattctcacataacaaacccaagaattcccaaaaaagataaataaataaacaacatagcataacaaaaaaacaactagaagaataaaagaaattaacacctaaacaataaacaaatagttttacagaccatctgaagtatctctgtttacattgcaagctacaaattttggacagcggagctagacttt

SEQ ID NO: 45008 - DNA, 409 bp, Setaria italica
  misc_feature (177)..(177): n is a, c, g, or t
  Peptide Sequence Number=SeqID_110982
agcaatcagtggatttcagtttataacgctagaaggcccatgaagcagagataccattacaatgtagcagatgccagacttcatcaacacatagagaagggtaatgaagatggattgttcattagttcagtagcatcttcagcgaatctttgggcccttattatggacgcaggaacnggtttcacatcccaagtctatgaactttcacccatattccttcattaaggatttggattatggagcaatgggaaaataactactacatcagtgccatagctggtgcaacgaatgggagttccttggtagtcatgtcaaaagggagccgctggggtgtagttatgtcaaggaactctggatattctgaacaggtagtagaattggattttctttatcctagtgaaggtatcca

SEQ ID NO: 45009 - DNA, 259 bp, Setaria italica
  Peptide Sequence Number=SeqID_110983
gagggagacaaatggtggtcatgtcgattatgatcaaaggcctgatatctttaggggaactattagatatgcgagtgttcatgcccatttggggcgcactggtagtaggagagacgatttggagtcactggcgtacacccttattttcctaataagaggaagataagggtgtacgccagtgactccaaatcgtctctcccactccaccgcaccaccaccaccaccctcgagtaacatgccgccgctccactgaaatcca

SEQ ID NO: 45010 - DNA, 153 bp, Setaria italica
  Peptide Sequence Number=SeqID_110984
ggaaagaaggttgagtgtatggagttccttttgacatgactaccaaggaactccatacactcaacaatcttacaaagttagtgaatcattcccctacaagtggatcaataagaaatggaaagaaggtttcatgttacataactacaccccagc

SEQ ID NO: 45011 - DNA, 406 bp, Setaria italica
  misc_feature (351)..(406): n is a, c, g, or t
  Peptide Sequence Number=SeqID_110985
tagaaaccaagaaaggaaggtggaaagcaagacaagaccaaataaagacaagaacgaaggaggatgtgacctggctagtggtggtgcagacgccgatggcgtcaaatgttttgcatcagcatgttttgcttcgctcctgactgctgtgcaagagtagacagcttgtagcctccttcggaggcaaagtcaatgagaaacccaattgtgtatagcgtatcgtgtcatttcattttgtttagtggaagccaagttccatgtttccgctggaaatgctaagttattgtgtgaggagaacaagtgtactgatataattcagtgtatcgattccattattcgataattctcattggnnnnnnnnnnnnnnnnnnnnnnnnnnnnnnnnnnnnnnnnnnnnnnnnnnnnnnnn

SEQ ID NO: 45012 - DNA, 385 bp, Setaria italica
  Peptide Sequence Number=SeqID_110986
gttttgcatggttgcactgcatccagacttcagattttttttttaccagcaaagtatgtaaattttgctattgctttgccattttgaatgttaagaacaatacagctgagcatgtatacttctactattaaatattaatcaataatttaaatgtatcacctagggtagttatatggctttgtgctctaaacgcttctttcctttcagataccattacaatgtagcagatgccagacttcatcaacacatagagaagggtaatgaagatggattgttcattagttcagtagcatcttcagcgaatctttgggcccttattatggacgcaggaactggtttcacatcccaagtctatgaactttcacccatattccttcataaggta

SEQ ID NO: 45013 - DNA, 289 bp, Setaria italica
  Peptide Sequence Number=SeqID_110987
tgcattgaaatttgagcaccggaacagtaaaggatgcaattatggccccccatatgagtggcaagtttataacgctctcaatggttgctatggcataccatcggtccactacaagggtcgtcagggcgactactatattcttgtaatggatatgcttggtcccagcctttgggatgtgtggaattcaatggggcaggcgatgtctgcgaatatggctgcttgcatcgctgtagagggtatatcaattcttgagaagctccactctaaagggtttcacatcaccatgcac

SEQ ID NO: 45014 - DNA, 668 bp, Setaria italica
  misc_feature (594)..(594): n is a, c, g, or t
  misc_feature (618)..(618): n is a, c, g, or t
  Peptide Sequence Number=SeqID_110988
ttatgagctctcaccagtttttctgcacaaggactggataatggagcagtgggagaaaagttattacataacagcaattgctggatcaaccaatggaagttcattagttgtcatgtccaaaggaactccttacactcagcaatcatacaaagtcagtgaatcattcccttacaagtggatcaataaaaagtggaaagaaggttttcatgtaacatctatggccaccgctggaaatcgctggggtgtggtcatgtcaaggaactcaggtagttctaaccaggttgtagagttggatttcctgtacccaagtgaaggcatccatcggagatgggagactggttacaggataacttccacagcagccaccaatgaccaagctgctttcatcttgagcatgccaaagcggaagccgatggatgagacgcaggaaacccttaggacctctgccttccccagtggccatgtgaaggagaaatgggcgaagaatctctacatagcttcgatctgctacggacgaactgtgtgctgacctgaccgcacatatggaaagttgaattgaggttattgtgcagcatggtggcatgagcgctaagngatgtgagatgttcgtgaaaacgntcctcatgataggattagtagatctgaagatgcggtatggtatatcctac

SEQ ID NO: 45015 - DNA, 938 bp, Setaria italica
  misc_feature (217)..(217): n is a, c, g, or t
  Peptide Sequence Number=SeqID_110989
tgtagtccctagtctagtcttctaattggatttcagtttataatgctaggcgacccatgaagcagaggtaccattataacgtggctgactcaaggctaagtcaacatatagaaaagggcaatgaggatgggctgtacattagttgtgtggcttcctcagcaaaacctttggcgtctcattatggatgcaggaactggttctgttctcaagtttatgngccaaggttgctgaggaagccacacaactaatgtacagcccatcctcattgcccttttctatatgttgacttagccttgagtcagccacgttataatggtacctctgcttcatgggtcgcctagcattataaactgaaatccattgagctgctgggctccctaatctaaccttctttttaggttgctcatcttcttccagatttacaagcaaccttccacgtttctgaccaaccttgagagctccatcaattctgattggtctggaggcaggtgattcaatcaaaccatcaaaaagtgaaataagcttggcataatttggctcttcatcaaatttcatatttgtgacgatctcaagaaaatggctacttctccagagatgctttgttgtttctgtccagctccattcaaacagtttcttgagatcgtcacaaatatgaaatttgatgaagagccaaattatgccaagcttatttcactttttgatggtttgattgaatcacctgcctccagaccaatcagaattgatggagctctcaaggttggtcagaaacgtggaaggttgcttgtaaatctggaagaagatgagcaacctaaaaagaaggttagattagggagcccagcagctcaatggatttcagtttataatgctaggcgacccatgaagcagaggtaccattataacgtggctgactcaaggctaagtcaacctgagacagggag

SEQ ID NO: 45016 - DNA, 2384 bp, Setaria italica
  Peptide Sequence Number=SeqID_110990
tggaggtgctgcggctggtagagttaacaaagcagctgctaagggaagagggaggtcttctcctgaacatagagggaagaggctcaaggctattgatttgcagactgatctgcgttgcaagaacctccctgaagctgttgctgttgaggcagttatcggcacagcccaggagggcctttgtttgagcaaggtagctgaccgggctgccagcttaagaatggatggtgatagtgcggacaaatttgcagctgctgaggatgacgccacggcaaccccggttcctgagagggttcaagtaggtaattccccagaatatttaactggtagaaagttaggcaaaggcggctttggccaggtctgtgttggaaaaagagtatctggtggatcttctcgtatgggttctgatgcatacgaggttgcactgaaattcgagcatcgaagtagtaagggatgcaactatgcccccccatatgagtggcaggtttatcaaactctcaacggttgttatggcattccatcagtccactataagggtcgccagggagactactacattcttgtaatggatatgcttggttctagcctctgggacctttggaattctgtaggacaggcgatgtctcctcatatggttgcttgtattgctgttgaggccatatcaattcttgagaaacttcactcaaaaggctttgtacatggtgatgtgaaaccagagaactttttgcttggtcagcctggatcacctgatgaaaagaagcttttcctgattgatcttggtttagcatccaagtggaaagaagcagcatctggcaagcatgttcaatatgatcagaggccagatatctttaggggaacaattagatatgctagtgtccatgctcatttaggtcgtactggtagtaggagggatgatctggagtcactggcatacacccttatttttttaataagaggaagattgccttggcaaggctaccagggagataacaagagttttcttgtttgtaagaagaaaatggccacttctccagagatcctgtgttgcttctgtccagctccattcaaacattttcttgagatggtcaccaatatgaaatttgatgaagagccaaattacccaaagcttgtttctctttttgatggtttaattgaagggcctgcttcaagacccatcagaattgatggagctctaaaggttggacagaaacgtggaagaacacttgcaaatcttgaggatgacgaacaacctaagaagaaagttagattggggagcccagcaactcaatggatatcagtttataatgctaggcggcccatgaagcagagatatcattataatgtagctgattcaaggctgcaccagcatatagaaaaaggtaatcaagatggcttgtatatcagttctgtggcttcttcagcaaacttttgggctctcatcatggatgctgggactgggttttgttcccaagtttatgagctctcacaaatgtttctgcacaaggagtggattacggagcagtgggagaagaattattacattacagcaatagctggagcaaccaatggaagttccttggttgtaatgtccaaaggaactccttacacacagcagtcatacaaagtcagtgaatcatttccttataagtggattaataaaaaatggaaagaaggttttcatgtaacatctatggctactgctgggaatcgctggggagtggtcatgtccaggaattcgggctacgctactcaggttgtggagttggactttctgtatcctagtgaagggatccatcatcgatgggagactggttacagaataacatcaactgcagctacacccgaccaagctgcgtttatcttgagcataccgaagaggaaaccaatggacgagacgcaagaaactcttcggacttccgcctttcccagcaaccatgtaaaggaaaaatgggtgaagaacctgtacattagctcgatctgctatggccgaactgtgtgctgacggctacgtcgaagctccaaggtgaagacgctcgagtttccagcggaggctgaagacctgcaggacggaacaaacttccacatatagcatcggattgcaaatggctggcattggcctcttgcaatatcctactctaattgtaaaggatcgtatgcgatgctgtatcagatgtgaaccttgtccacaagctaggatcatatttggcagtatttgttagatgtgctttgtccatttaccagtagcacatttagctttggcgatgtgccggtatatgattcagctcgtatcttcccttcttctcgatgggtacctgcacactctgaacaggaaaaacgcaagttttgacaaattggctataccataatgaaaagcgcaaaggtgaatc

SEQ ID NO: 45017 - DNA, 2553 bp, Setaria italica
  Peptide Sequence Number=SeqID_110991
tgttacttgtattgttgtgctatttgcagtatctgttgtttttctgtatattgatcgatgattgtaaatctgactgtgcatgtggagattggaaggagctcggagggctgggacgctgacctgagttttatggggagaggatgccagaactgcgaagcagtactcgtcaagcacgcctgaggtctaagaagctcgacgaaccgcagccaggagagccacctgtgaagccggcgtcgcctgctccgccgagagcaggaaagcgtgctcctcctcgtgctgccaggggcagaaaggttgctgctgggagaagagcgcctccggcatcaaagcctagaaggaagggggttgaaattgttgacttagaagctgatccagctttcgaagactcccctaaagctgtagctggactggaagttgctggtgcagccaagaacaaccttgctttgaacaaggtagctggcgttggtgttaataaaggtctgaaaatggatggtgaaagtgctgagaagattgttggggttgaagatgattcggcagctacacctgtcccagagagggttcaagtaggtaactctccagagtacgtaactgacaggaaattaggtaaaggtggttttggtcaggtctatgttggccgaagggtatctggtggagctgctcgcactggtcctgatgcctatgaggttgcattgaaatttgagcaccggaacagtaaaggatgcaattatggccccccatatgagtggcaagtttataacgctctcaatggttgctatggcataccatcggtccactacaagggtcgtcagggcgactactatattcttgtaatggatatgcttggtcccagcctttgggatgtgtggaattcaatggggcaggcgatgtctgcgaatatggctgcttgcatcgctgtagagggtatatcaattcttgagaagctccactctaaagggtttgtgcatggtgatgtgaaaccagagaattttctgcttggtcaggctggatcgcctgacgataagaagctttaccttatagatcttggtttagcatcaaagtggagggagacaaatggtggtcatgtcgattatgatcaaaggcctgatatctttaggggaactattagatatgcgagtgttcatgcccatttggggcgcactggtagtaggagagacgatttggagtcactggcgtacacccttattttcctaataagaggaagattgccttggcaaggctatcagggagataccaagagttttcttgtttgcaagaagaaaatggctacttctccagagatgctttgttgtttctgtccagctccattcaaacagtttcttgagatcgtcacaaatatgaaatttgatgaagagccaaattatgccaagcttatttcactttttgatggtttgattgaatcacctgcctccagaccaatcagaattgatggagctctcaaggttggtcagaaacgtggaaggttgcttgtaaatctggaagaagatgagcaacctaaaaagaaggttagattagggagcccagcagctcaatggatttcagtttataatgctaggcgacccatgaagcagaggtaccattataacgtggctgactcaaggctaagtcaacatatagaaaagggcaatgaggatgggctgtacattagttgtgtggcttcctcagcaaacctttgggctctcattatggatgcaggaactggtttctgttctcaagtttatgagctctcaccagtttttctgcacaaggactggataatggagcagtgggagaaaagttattacataacagcaattgctggatcaaccaatggaagttcattagttgtcatgtccaaaggaactccttacactcagcaatcatacaaagtcagtgaatcattcccttacaagtggatcaataaaaagtggaaagaaggttttcatgtaacatctatggccaccgctggaaatcgctggggtgtggtcatgtcaaggaactcagggtattctaaccaggttgtagagttggatttcctgtacccaagtgaaggcatccatcggagatgggagactggttacaggataacttccacagcagccaccaatgaccaagctgctttcatcttgagcatgccaaagcggaagccgatggatgagacgcaggaaacccttaggacctctgccttccccagtggccatgtgaaggagaaatgggcgaagaatctctacatagcttcgatctgctacggacgaactgtgtgctgacctgaccgcacatatggaaagttgaattgagggttatttgttgcagcatggtggcatgagcgctaagagatgtgagatgttcgtgaaaacgatcctcatgataggattagtagatctgaagatgcggtatggtatatcctaccgtaattgtaaagaaatgttgtacccaatgccggccgtgagaccttttcctcggatgaagctaatgcatttcggcatgaaaattcgctgcttttgccatgtctgtgttgaaatttctcccggatcgtcagtcaaaaatttgcgctca

SEQ ID NO: 45018 - DNA, 170 bp, Setaria italica
  misc_feature (138)..(170): n is a, c, g, or t
  Peptide Sequence Number=SeqID_110992
cctgaaacacttcagcagttactaacacgcatggtatgtagtatgtttctctttctccaactcggaaagagtcatgtgcatgtactatggcacatctttaccaaatttagattactgaaaaggggtttaaaaaaaacnnnnnnnnnnnnnnnnnnnnnnnnnnnnnnnnn

SEQ ID NO: 45019 - DNA, 436 bp, Setaria italica
  Peptide Sequence Number=SeqID_110993
tttttgagcatctctctcgggtagggggtgggatgagagtttggttggagttgctctcagtcgatgtgtctgcagttgggtagtatgtggttatctggattgtgcaattgaactgcctgaagattgagccgtatgaatgatgatgcttagagcaatttgaaattagtcatgctactagcggatttactgaagtttgtgatatgggtgctcttggctgctgataggaatggtgaaatttaagcctgttcagacggtggatgctgctgctgcccgctgcctgctgctgctgccgctgcagctgcgccgctctctgccgagcagcagcaggcagctgcaaagcagcgctccgaacaggctgtaagttgtcattcactttagttgaggatacatgttcttctatcagtgttcaggtgtcaaatttgtgctgtatccatga

SEQ ID NO: 45020 - DNA, 416 bp, Setaria italica
  Peptide Sequence Number=SeqID_110994
taaagctaacgaatccatgtagcccgttagaatgtggaagaatcataataagcaaacatgatggaacgatttttaaactaattaagaacaatgcctggtataaatcacatggatttaattaacacctccatgcgcttgagctgcggcaaaaggggcatgtcctagcacagggccggcggcagataatcttatcttacctggaacctagatggctcagaatgtctatgcatcttaccgtaagcaccaccaaggtaaatgttcgctcgccgcgcccgcgcggcagggaggatgaccggggaaccgccgccggacctatcgtcaccggatcataccacgaaccggcagcacaagggaagcggcgacgaggacgaagaaatggtcagtccgccggcccactcggccccggacagcacccg

SEQ ID NO: 45021 - DNA, 411 bp, Setaria italica
  Peptide Sequence Number=SeqID_110995
ggacgacgagagctcctcctcgaacaccacgagtctcgctctccaccataccccctcgcttctcggcggcctcctgccgtcctgcgccagggacggcgtctcctcccggagcgcggcggcgcgcctcgccatcgccagcgtgtcctcgaccccggcctgcttctcggcgacggcgcggccggcctcctgcttcgaccgggacagctagctccaggaccaggcacaggcacgacttctcctccctcagcaggacctgccgatcggcgctgcggtccttcttctccagcttcgggcacctcgcgtcgacctcctgcttcgcggccggcctcctccttggacttcgagaaatcctgtgttggaggagagcagagcaccccaccaccaggcacttcaccggcaggcgccccggtg

SEQ ID NO: 45022 - DNA, 442 bp, Setaria italica
  Peptide Sequence Number=SeqID_110996
actcagtcgcatgcggtgaggccatgaaaagctccagctaagcctttgtcaatatagcaccatgtcaaatctagatgcaataaattatggagcctcttgaatgactctggaaattccctgacaccgcagcatgacatgtttaaatactgtatattgaccaggctgcctatagcttctggtagccgtgagatataacgacaagatgctaagttcaaatattggagatgtgtgaggccacacaaagattcaggtattttcttgacaccagaacattcagataaatcaagatgatgcaaatttgtgagattaccaagtgaatttggcagttctcttatcccagaacaacctgacatgtcaagatgcatcatacattttaaatcaccaaatgataccggcagttttgatatgccagaacaatctgacaaacctagatagttcagac

SEQ ID NO: 45023 - DNA, 236 bp, Setaria italica
  Peptide Sequence Number=SeqID_110997
ttttttttttttgaggtctgagcccaatgaactaggtgaattacgaaaatctgacgtcttctgcacaaatccttctctgcagagctgcagctcacaggtgagctaatctgaatgaggaactaaaatttaaccaaagcaaatttatgaaccctgcctcgcctgaaatctattctattctatcctacaaatccacacactgtcatggcatgcaaaatgcaataaaaatgaacgtcgtg

SEQ ID NO: 45024 - DNA, 585 bp, Setaria italica
  Peptide Sequence Number=SeqID_110998
agtatttttctgttggttcatctagcctcgaatcagtcctctactcctctcctgagtgcagcctcttcttccttgttatttcctttcctagtctgctctttgctccttctgttggttcaaacttcctggccttctgcctatatatatgcttccctagcttttctgtgtttgatacacagatcctcatcttacagtgccatacccggccatcaaggtgactacagatatggcatacgagaaagaagaccctgcgcttgctgcaaatcagggaaaatattgggggattttcatatgctggcttctgggaaatggatgcctctttgggttcaacagcatgcttactattgaagattactacatgtaccttttcccgaagtaccaccccactagagttattacactgacatatcaaccattcgtccttgccacaactgccatattcacatatcatgaggcaaaggtcaacactaggttgcgcaatttggcggggtacactctgttcttcttgagctcatttgcagcaatcattatggatgttgcaacttcaggaagaggtggaattgcaccttttctggcatatgtatc

SEQ ID NO: 45025 - DNA, 250 bp, Setaria italica
  Peptide Sequence Number=SeqID_110999
attcatatcggaatgagctgtggtaaaatgagtcagaaataaattatgaggtaaaagcataaacctataataagaaaaaggccgagtgttgaaatctaaaactaagtgcatcttgtcttttgtccatggtcggccatgagataattggttcatgatggcaagtacattaatgctaagaactcaaaagtcattctagatgactaggaaattgtgacttgtaacacacagccccattaatcgaaaataaact

SEQ ID NO: 45026 - DNA, 971 bp, Setaria italica
  misc_feature (1)..(13): n is a, c, g, or t
  Peptide Sequence Number=SeqID_111000
nnnnnnnnnnnnncagtgctaagcgagttgggttagacttagtgttgggacccaacatgagccaccagcccaccattaacatttgagtatacatatatattattatttatacatcagtttatctccagtaaaatatacacaacagacaagagtgtcctcatcttacaacataaatacaatcagtattcagtaatcatccctggtatagattcatccaatccagcaggtccatattgagcaggcaaacctcagtggttaggagctgtcggatcacactcatctcatgatgatttctttgatttgttgtcctcccattccttccgagcctcttcgatcaacttgctcaccttgtcgtggaagccaggatatggttcgtacccaccgaatgtgtgaagaatctctagcagcacaaagaatggagccatcaagaaagcctggacaagattgtcaaggagagcaggcgctcgcttctcgaaaactccatgaccaatgaattgcatagtccaacagaacaattgagccaccaatacaaccttccatccagcggagaacccgaggcgggcggcgagggccccgctggcggcccagcagaggaagcagaggaaggccgcgagcgcgcccgcgcggcggtcgaggaggaagtagtatgccccgtagaccgcggcgccgatgccggcggcgtgcgcggacggggcggtgaggtggagcagcagcagcgcggtgaggaagatgggccagacgaagagctcgtggatgcccacgttgacagggttgctgtggtacgcgccgtagaaggcgtagtgcccctccaggtccaggaggccgccgccgccgccgccgcgaggcttcgccatggctcccttggggttggttgcttgcttgcctgcctgcctgcctcgggtcgctttgctgggtgggtttcgttcccgcggcctgctcgatgtcttggactggtcgtcctcgtgacctcg

SEQ ID NO: 45027 - DNA, 839 bp, Setaria italica
  Peptide Sequence Number=SeqID_111001
cacgggggacatcgtcgggatcgacctctcccggcgtaacctctccggcaccgtcccggccacggcggcaaggctgctggcgccgacgctgacatccctcaacctcagcgcgaacgccttctccggggagttgcccacggctctcttccagctacggcggctcgaggagctcgacgtcagccacaacttcttcaacggcacgttccccgacggcatcgcggagctcgccgcgctcacggtgctcgaagccttcagcaactgcttcgtcggcgcgctcccccgcggcctcggcgtgctccggcggctcgagcggctcaacctcggcggcagctacttcaatggcagcatccctagcgagatcggccagctccggcgcctgcggttcctgcacctcgccgggaacgcgctcaaggggcggctgccggcggagctcggcgagctcgggtcgctcgagcacctggagattgggtacaacgcctacgacggtggcatcccggcggcgctcggcaacctgacgcagctcctgtatctcgacatcgccgtggccaacgtcgccggcccgctgccgccggagctcggcgagctcgcgcggctggaatcgctgttcctgttcaagaaccgactcgccggcgcgatcccgccgcggtggtctcgcctccgcgcgctgcaggtcctcgacctctccgacaacatgctcgtcggcgccattcccggtgggctcggcgagcttgccaacctcaccacgctgaacctcatgagcaactccctctccggtgagatcccggcggcgatcggcgcgctgccgagcctcgaggtgctgcagctctggaacaactcgc

SEQ ID NO: 45028 - DNA, 566 bp, Setaria italica
  Peptide Sequence Number=SeqID_111002
gactcagtctagcgactaatagaaaatctctgaagttttgtattgctaaacttaaataatttctaccatgtgaactgtatatctaccaccagctaatagaagcttgaaagcattttgttcataatgtccagaactttgatgcatctccatagttactgaatcttacagtggcttatgagttctgatagaaaggcacgcagttgattctggacctgattttcatcttaatctctattaatgtgttctcaacagtcaacagtacatgctgaggacattatcagtgcctaaaacaatcaatgagtgcaaatgtattctttcataattcaaacttgatgcgctgtactagttacctagcctattaatcacattgcttcagtacaacagggtgtgcagttacttgtgctgtttgagcaatcatttatatagaacttacatcattatcagtgcctaaaacaatcattattacatcagttgtctatacctataatacacatgtcttataattccttcttccattgtgccttgtttacagcaaagacttcggagttacagtaatttgtgaaccc

SEQ ID NO: 45029 - DNA, 312 bp, Setaria italica
  misc_feature (260)..(260): n is a, c, g, or t
  misc_feature (272)..(272): n is a, c, g, or t
  misc_feature (289)..(289): n is a, c, g, or t
  misc_feature (291)..(291): n is a, c, g, or t
  misc_feature (293)..(293): n is a, c, g, or t
  misc_feature (296)..(296): n is a, c, g, or t
  Peptide Sequence Number=SeqID_111003
tttgggtctagcttgctgaaggcaatagagttcattatgtaggtgcatgaggcgaggtttctgtcagctatggagtctcttcatttttcgcagaaagaaaaggtagcaaatttacactttgtgtttatagggtttattagtgttcttctcgtggtgcttctgtatagaattgaaaatgtatgattcgattgacaattctgtggatgttacagaaaagatgatataaggcagtgttcaaagttttaaaaaaaaaaaaaaanaaaaaaaaaaanaaaaaaggaagaatganananaanatagtttaggttacta

SEQ ID NO: 45030 - DNA, 277 bp, Setaria italica
  Peptide Sequence Number=SeqID_111004
cctctgtggtacaacatatatgggatgatgaggacaccaaggctttctatgaatctttacctgatctcagagcatttgtgcctgctgtactactgggacaagctgaaccaacattggcagagcagcatggaaaggttcaccagcaatctaatgagtgtaccatgcagtcagagactgaagtacaagatactgaacatcaatccggtggaaaaacaaatgtggagcacaagaatagagtgaacactgaaaaaagaaagagtggataaagaaacatctg

SEQ ID NO: 45031 - DNA, 314 bp, Setaria italica
  misc_feature (285)..(285): n is a, c, g, or t
  Peptide Sequence Number=SeqID_111005
gcctcgccctcccttcagtccgccgctgctgtggcaactgccatggcgtcccgagccaccctcaccgttctcttcggcttctacgccgtcttctgctgcctctacctcctcaaagaagctaccgccgctctcatcccggccgttctcatcaccctcgcgctcaccccgctgctcacgtacgcgcacgtgtgggcgctcggccgtgccaacgcgggcggcgccggcgccgttcgtggcgcgccttgctgaggcgacccttctggcggcggtggttgctctcctttnaggcgccgcggtgcggctcggcctcggcg

SEQ ID NO: 45032 - DNA, 828 bp, Setaria italica
  Peptide Sequence Number=SeqID_111006
ttttctcaaaccagaatggagctccatcaagccagaacatgggcatgcagtaaagtatcatcttcttctaatggagttcccacaacataataaaacagaataaacggggcacactgttacacggcgatggaaccatcatcaacactctatgatggactaatctgccaggggtagcaaaaagtacaaaaaagaagtcccaatctcactgtctagcctcgtgaaataaccgatcaagtttcttttacagcctgcttgcttctccgttggtgcacatcccagttgaatacccgtgcaattgtaacctgagtgatggtttgctggtctctcaagaactgaagatcggcaacaaggacttctaagctagccttggcattttccaagttctttttcaagagggcattggcctcatcgcaggagtattccagcatcacatttgcacccaaccacaggcacacagagtcggtatcttcaatttttgcacgcgagtatataccctcggatagttcgaaatcagctacaagtgcctcacccaaagccttcttagcctgtagtgctgcaacaatgtccaagcatttctctatatcaggaattttcgcctgaagatctctttgttgtgctagaagcttcatctccactattttgtactgctgtagcctttcctggaggaaggcgagggcggagttcacgtcgagcccggcctggcggaggtaggcctcgacgtcctcgacgaaggccgccgccgggattccccgccgctcagccaccccctgcggcgtcgatgccgccgccgccgccgccgctgccatgaagggagagagggaggaagac

SEQ ID NO: 45033 - DNA, 484 bp, Setaria italica
  Peptide Sequence Number=SeqID_111007
tcggtgtcgtagatgatgtagccgcagaagatgagcgccgccaggccgccgtagaccatgagcgagacgcggccgagcgggaagaagagctggatgagcgagaacacgacgaggatcatgacgccggcgaagaggaacgggcccaggaagctgaagtcgtggccgcgcttagctgcccagaaggtgtacgccgtgaggctcaccaccaccacggacgtcaggatcgccgactcgaggatcacctgccccttggtgaaggcgcaggtgagccccacggcgaagctgatggcgacagtgaagaggccgagcagcagcaggttcaccgggtggtgctggtagtagtagtacagagggcagagcacgatgaaggggaggatgatgaggaagatgtagaggccgaagccgccgggcgtggagacgaagaagagcgcgacggggcggacgtagacgacgaccgcagcgacggcgacggtgagcagcatcg

SEQ ID NO: 45034 - DNA, 405 bp, Setaria italica
  Peptide Sequence Number=SeqID_111008
gcagttgcactgatgtaatctgtatgagaagttcctcagcaaattcaggaagaatgccttgcaacacaggagtagagttttggtaagggataaccatccatttgtgacaccaatgtactttcattgggctaaagctctccaaccagtccatgcccaagatcatgtcatatgactgcagaggcaacaccttgagctgctatttaaactgacacccttgaatagtccactcagcatcaggaacagcagaagaacaagacaatatatcactatttgcaactttgacttgaacatgagccggacaaagagacaacccaggcatcttggctacagcatgttgactaataaatgaattaagtgctaccagaatcaatcaaaatagtggacctgacatgtgcatcacaccca

SEQ ID NO: 45035 - DNA, 399 bp, Setaria italica
  Peptide Sequence Number=SeqID_111009
gtctaggttgaaatgttgaacttgagtgccactagctagttaactggatagttcaatttctgaaaattttagacgtggtcacgcgatctcaattgcagcggagcctttaaatttataataaccagctacataatactaaaccaatctttcaaactaaaagatactacatatatactacaaatttgggaattaagtgcgcacgcgtctgtctaaggattaataataccaccttaattattatctaagaccatagacacatctcattctttttaacaagaaaatttagctagtgaaatttttaatcctataaaaaatatctgatttgatgcatttcatctacttataagaaatatttttgaatcaagtttgatcagtacacaaaattaaaattaaatactg

SEQ ID NO: 45036 - DNA, 611 bp, Setaria italica
  Peptide Sequence Number=SeqID_111010
acttgtcactcaagctctttttcacagatccaagcgaccaaagttggatggttctatcacctctggctttttagctcaaacatcttctccagataacccacagctgattgcttcatggccttgtgatggtgcaaagctcagttcctctttttgtcaaggaaaatgttgagcagaacacactgtcatccatttggtgtcactcactgaaggaaaagactgtacccatcgttctctattttaatgagcctgtcaaaggattaaatcaatcaagtgtgaagttaaaatctgatttggactttggtaaggatgttcactggagggccctttcagtgacagattctgggtattctaactgttggaccacatatcttcagattacaaatgaatgtagcagttcgcagcaatattccgttgaagtgagcataccctcctcagatggcattgtgtctagaagtggctctaactacaattgtcctgtgcattttacatttactattgaattgataagcgacgatgcccagggtatagatctgtttgataagccagttgcctggaattgttcagaatcattagagtctcatggaaactgcaaagctatcccttttgatccg

SEQ ID NO: 45037 - DNA, 2546 bp, Setaria italica
  Peptide Sequence Number=SeqID_111011
cttggaagtgtgaaggacccgccgctctccctgagatccaatcccccgcacccgcgacgccggcgacagaggaggggaggaggcgatgcacggccggccgcggcgcccggcgaagccggaggacgagaaggcggcgtcagcgaaagccgccaagctccgggacctccaggcccaggtcctgcagaaccaccactcccgcacgtacaccaaggaggcgattggtttgagcttcaagctgctcgagataaatccagaggcctacactgcatggaactaccgtaagcttgcgttccagcacaacatcaaggagctttctgacccagaggccatcaggtctgctgttgacgatgagctcagggtggtcgaggttgctctgaggcagaacccaaagtcctatggggcttggtatcaccggaagtggttgctaaaccaaaagctagccccagtggattccaagcgtgaattcggcctcttaaataaactattaaaggtagatgccaggaattttcatggatggaattaccgaaggttccttgcaagattcatgggggtgccagatgaggaagagcttaagtatacgatggataagatcagtgacaacttcagtaattactcagcatggcataatcgtagtatacttctgtccaacctactaatccaacaaagcaaaggtttcgaatcaaagcagaagattttttccgaggagtttgaacttgtcactcaagctcttttcacagatccaagcgaccaaagtggatggttctatcacctctggcttttagctcaaacatcttctccagataacccacagctgattgcttcatggccttgtgatggtgcaaagctcagttcctcttttgtcaaggaaaatgttgagcagaacacactgtcatccatttggtgtcactcactgaaggaaaagactgtacccatcgttctctattttaatgagcctgtcaaaggattaaatcaatcaagtgtgaagttaaaatctgatttggactttggtaaggatgttcactggagggccctttcagtgacagattctgggtattctaactgttggaccacatatcttcagattacaaatgaatattgctgcgaactgctactttcatttgtaatctgaagatatgtggtccaacagttagaatacccagaatgtagcagttcgcagcaatattccgttgaagtgagcataccctcctcagatggcattgtgtctagaagtggctctaactacaattgtcctgtgcattttacatttactattgaattgataagcgacgatgcccagggtatagatctgtttgataagccagttgcctggaattgttcagaatcattagagtctcatggaaactgcaaagctatcccttttgatccgctaaagatcactagtgccttggttgaggattcaaattggcattttgaaagactaactgaggaaatagaccttttcagagaactacctgatgataaatgcaagtttgtgaacttgacattagcccggctattgcttgcttgtgctgctataaagtcccgtgggagatctcccattgaaaggaagaaatactgtgaagaggcactggcgcacttcagtgacttgattcacttggatccatctcataaacagtactatgaggatgagcggagcttagtcctaatggacaagttaacatgtgacatggagactttcatgaagcactgttcagttcaagttcaaaattcagttccgctgaatcatgtgcaactttgcagattgtcgttaacatgtgttggatttgtggaacgcctgatgtgggttcaagtgctggacctaagccataacagtcttagatcaattgaaggtttggaggctttgcagcagcttgtgtccttgaacatcagcaacaaccatatcagtaatttcacagcacttgaaccccttacgaagataatgtttttgaaagtactggatttatcattcaacgagattggagctcactcaatcgacacaacacgttatatctgctcatctcctttctcacacaagatcgaagcatgtgaagcctttgaagaatgccagaagaaaaatatcaacgtggaggaatactgggatgccatactgttcttcaaatctctgaagttggcacagcttgatatcaaaggaaatgcagttgctagcaaggagaacttcagaactcttatcatgacgcttattccttctctaaaatcgatcaatggagaatgtgtcaattaattgatggctttcgcttgggagtgcgcatacttggatagtgtcaaagttcagtgtaaactaaattttgctagcagccattgatttgcttcatatgtactactatatttatttaagcaaatctgagacacgaacatgacgttagagttatgatttttcagcaatcaactgtcatagatcatacataccatgatacactgctatttacatcttgtatcagtgaggttgcaccctgaccgagggttatccattaatgatgctgtaattaaactttggtagtttgaatgcaatcgatgtgctgcaaaaa

SEQ ID NO: 45038 - DNA, 716 bp, Setaria italica
  Peptide Sequence Number=SeqID_111012
ggtgtgtaaaaatcagagaagacaatcgaggagcaacagtggacagaatatggttcaaagcatgatatagtagactcctaaatccacgagctaataataaataaaggagacgatgcatgactgctaatcgatcgattagctaacgtggtgacgaagggtcaaggacctggccggcgaaaagaaccacacggctatggtcctccttgatgaagaataggaaggggtgatcagcgacgaagtcgacaacaggttcaggtttgcccatggcaaaacccaaaatctctagctcggtggctgctgcagcgacggtgcctctctcgttaacgcggacagagcactgctggatgatcgagggaacggccatcggtggcagcatatcctcatcatcggcttcggccagcgccaccatctcggagaaggagtggccggcgggacggaactgcgtcagatccagaccaaggtctgcaaggagacgggagacgtccgcttgcagcgagacgtcgaattttgggatctgcaactcgccgacgaggaccttccgatcgggcacgacctttccgtgaaggagagcaaccgggttggagctgagctcgcgcaccaggtccggcaggccgtcgcggtcgtcggggaggtagatggtacatggagaagcaatgctcccgtttgtggttgatgtaggccatccgcaggaccttgaagccgggtgcagccgatcg

SEQ ID NO: 45039 - DNA, 305 bp, Setaria italica
  Peptide Sequence Number=SeqID_111013
aggccaacagccgccacctgctggaacacctcggtcaccttccccctagtcgacgggtcgacggcgaggatcatcagccagtatgtcattgaagccgttcacgtagaatggcttgtcgccgatgacgaactggctgccctggtcttgaccatgcgccactgctcgtcgcggatcatctcactgctaccttgtgtacaatgctcatcacagtgagctcgatcaaactaaaaccttgaaacatgctgagaggcgcaataacaattagagctgagagacagtaattaagtttggtcaattacccgttg

SEQ ID NO: 45040 - DNA, 292 bp, Setaria italica
  Peptide Sequence Number=SeqID_111014
gtgccatatgtttacgtattactaaatcgaggatgctatgactttttgacaattgatactgtaaaaggtaagatcttgtgctaagagactaaaaagtcatagcatcctcgatttagtgccatatgtttacgtattactaaatttgtaattatcctaccacagcatcctgggctgagagcatgataccaacttgctattagaatgatttattcttatcttgttgagtgtgtctgggagtaggctcctgcctctcctttgtactgggagcagactcttgcctctccttaataag

SEQ ID NO: 45041 - DNA, 469 bp, Setaria italica
  Peptide Sequence Number=SeqID_111015
cttctggcatcccaacaagctgcgatgtgatgctcacagggcatgccaactttagtttgcctacccactgccaaatgcatccacaactttgtttaacaacaatgcaccggatccacctctaaactctgcaacctgaaattcacctcaattctctaaccacctgcacgagctctgcaatgattaagcaacctctgcttcacggtgttgtttgcaagattctctgccctctacaagttgcatttagaactagcaaagtgcactgtatccatctctacattgctcaaaactgaattcttacagcataatgaaatttcttgcaaaactgaaatttaccttaagtattgcatgtacttcgccatatttattgcccaccaatgtcctgaaagtttgtattgtacatgaacctcatcactacatcagcaatatgaaaaattatgaagggcacatccatatcttctactacatcaat

SEQ ID NO: 45042 - DNA, 199 bp, Setaria italica
  Peptide Sequence Number=SeqID_111016
tccacttcagttgcttccatgttcatctgatccaacagctccatctcttccttgctcagcccttgcaagaagttcatcaggtcctgtttcacctcgatgagaccttctgccagcttctgaaacagtgtcacctcctccttctccagttcctcgacctcctcctcaatctctccccctttttccttcacctccttgatga

SEQ ID NO: 45043 - DNA, 250 bp, Setaria italica
  Peptide Sequence Number=SeqID_111017
cgggctggctctggcgggcatcatcttcaccgacgacctccgctcgctcactgagatcatggagaagaaggaggacaaacagaaggagcagaagcggacgtctctaccggccgggacgagaatgatgttgacgaggccggtcgagaaggtgacgccgccgccgccggcgtcaccttctcgaccggcggcgaaggggcgttcgacccgagccggtgcagcttcttggacctgttgtacgcccagtatccct

SEQ ID NO: 45044 - DNA, 408 bp, Setaria italica
  Peptide Sequence Number=SeqID_111018
cagctgcggcagcagccgacaacttcagccatctctctcactccagccaccctgcggcctgcaacgaacattgtcctgcatccacgtagtagctgagctcatggtgcagataccagcgatgacgaagagggggaatgggcgggccccgctgtcagtggtggtggcgatcatcggcgggctggctctggcgggcatcatcttcaccgacgacctccgctcgctcactgagatcatggagaagaaggaggacaaacagaaggagcagaagcggacgtctctaccggccgggacgagaatgatgttgacgaggccggtcgagaaggtgacgccgccgccgccggtcgagaaggtgacgccggcggctgcggcggcgaaggggcgtcgccgagccggtgcagcgtgacggag

SEQ ID NO: 45045 - DNA, 933 bp, Setaria italica
  misc_feature (1)..(24): n is a, c, g, or t
  Peptide Sequence Number=SeqID_111019
nnnnnnnnnnnnnnnnnnnnnnnntctcctccaacatgtaatccagaacattctggtggtttctagacctcgattcgctcctctcagcttgatcgaaccaaacaattttgtgtctaatgcgttcttatattcaatcgatatcaacacacacgtatattataaataataatacagcaggcagagaaatataaggttatgtttgtttgagattataatccaccgatattatatagattggattataggtcatgggtattatggtaaaagttcattttaaaccactttggaattatggctagcttatttcagattacttatggtcccaaagtggtcctatctttggatcataatccacctaaagcttcgtgtaaattcaccgagttatagctagaacccgcttttccatcacttcactatatatccttccttcaaccatgtttataacgaatttagcatacaggcaagcaggcgcgccgatcagttgtcgtaggtgcggcactcgtcggtctccggggttctccttgcagtacttctcgagcgggtcgttgtcctccttgagcttgtcccgggcgtggctcgccgcggcgctgagctcctccacctcgtcccacgccgccgcgcactcgcccgagccctcctcgccctcgcacgtctgctccgccttcttgatgctctccgacacctggtcggagatccccggcggcgtggccggcccgctcgacctcaccgcgaagccgcggcgcgccgcggccgggaaccagacgcgccccgcggcggccttcctcctcatcgggagcacgtcggcggcggccgcgaaggtcgccgtggtagaaaggctcgccaccgtcgacgccatctttgcagctagctagctgtgtgtctcgtaagttttttctgtgatctgttgtggctttacttgaagaactgtacaag

SEQ ID NO: 45046 - DNA, 2865 bp, Setaria italica
  Peptide Sequence Number=SeqID_111020
tttttttttactacgcatacagaacctgtattccaaacaaagcaaaaggaaccatttcattcccattgaatcagatcttttgacggagcacaacccgtttgtcagttttgctaaagcccagccgaaattacaaagaggacaagggcagagcaagaaaaggagtgctccagattaatggcatctaagtaaaaagctatcttcctttcctttctgctatgtacctaaataaacgaccttaacctacactcccactaagtctcctgtcagctcgtatagacctccctacaatgtacaaagcaccaagatcagtcatacttggaccctttgccttgttacacggccaccattgcttgcctgagcgctgaagtccagcactcttggccccccagtccagtcgtcatcgtcagtatcgtcatcatcaccaccacggccaccgccacgggctcttgtaacacttgtggcggctgtcctcctgactctcgacgtacttcttggggttgggcgcttcctctgcacagagggggtgtacataccgaagtccatggaatcttcccgcagcactgtcttgaaatcttggtacacagaagctacatcctgcaggcagctcggcagactgatgttattgttgccaatgttaaaaggaacattctgcttggagagagtttctccagtttttggtggttcctttagagaaaatgcctgacagcgggcatcagttaaactataaacaattttcaaatgtcttttcaatttgaggaggagttgcagggctattgcgtcatggcaatcctcctgaactttggccatgtccacatctgatgtactacaaggattgttattcacccttacaggaatatatccctcattatggtcataatatcctccaggctcatgcatgacaacatgactctctcctggcaatgttgccatacccgccgcatcttgaggctgatccatagaagtccaccttttcaaattggcctcaatcgctcctgctctcaagtgaataactcgatttatatcatagatcaaatagagtggttcatcagggcatgtgaatggcagggaggcaagaacttcagcacagtatacaagaaagctaactgtggagcgattccggccatcaggctcaaatttccgaactattgagtggacaaatttgtttcttgaatttcgatttgcacggataagacggtatattctagttatgccaggtttgacaaaagcaattggatttgatttcacgtttgctgcgagtttatggttgctgactgtggtctcgaagaatataaatgacatttgtaggccatcacctaagcggctttcaaaaaatgaaggatacttttcattcatattcattagtagatgatgagccaactttgagttcccctccaatgggtccatttcaagtgctataaggtgcggaacacatgtaatagggtgaactaaaccctggcgaagtacaacttcaacaatcttaagtgcactctggcgaacttggtcatttgtatccaagcacctttcaagaatagaactccaatacaattggataataccaccacatatgttggtgtctccagcaccagcagcaacaggaacttcacttccaccatttattgcagactgtacaggaggcttcccagtactctcagcagtaagttggctttcggcatctcggagatactcatagaggttttgaagtccttgaatctttaacctatgatcaactgcagaagatagtgttgcctctatgagattcatgatttctttttgtagcataaattcaggcttcgcgataagtatgtatcccaaagtctgcaaagctcgaaccttcaagttgaaatcatccctgagaagatatcttctctggagcaagttgataatctttgggaaatcaagctgattttcagatgttaacatcagttgataaccataccgaaggagcagtccaagacaaaacagcgatcgacccaacagctgactatctgtattagtgccagacagatgcttgtaaaaaacattaacaaggtattccagtaatcctggacctctaccagctgatttgcttagggaacaaaggcacttgatacatgcatgtacaactgtcaaataggaatgacgaactatcatctgcttcagatcctgctcaagttctacaaccacagtggtggcttccttatgagtggaagaacagcatcaatcacgaaaattatactttcaagcaactgggcagctgatttattgtcaatctgaatcttaagatatggttgtagtgtcacaacaaacttagaaggatcagtcactggaatgcagagggtgggatcaacaatacaaaacgcttgcaaggcaatgatataaggaagtgcatggatttccatctcattagcagctccttcttcaacctgcaatattctttctaacaaccgcttgcatatcaactcacaacgtttcctaagtgatgccaccatggacaagttaatgcctgtggcctttgttgatccaaaaaaagagggcaagagagagaaataaacaagaatatttcaggacaagtctggcaagatgatcagaacaaaactctgtgggttcatcgatcaatgctttaattgactgctgcagctaaaactgcatctagtactccatccagtcacaaataagtgatgttttgagggttgccttaagtcaaacattctaaactttgattgcatattactttttatgtgtcgagtttagaaatttgaaaatgatacgattacatttgtttcaaaatgtagtttcacagaagtataattttgttttataaatactttgtaacaaaaagtactagtcaaagtcatgttttaaagaatatgtcggtataaaaaaaaa

SEQ ID NO: 45047 - DNA, 268 bp, Setaria italica
  Peptide Sequence Number=SeqID_111021
gatgagccctctggttatcttaaggaggaaaccttctttgatggagatatatcattatctcttcttaggtcgagatccaggattgattgcccgagcttctaataaaggttcaaaggagcaggttaacggagatattgattcttcagttgattcattgagattgatgatggaggaggaagaaaggaaaaagaattgttcaggcaacgcaactccgagcataactacactcagtgggacgttttactacgctttctagtggagtggagtc

SEQ ID NO: 45048 - DNA, 469 bp, Setaria italica
  Peptide Sequence Number=SeqID_111022
ccagcttctatcttttccatgagatggcctgtaattcttgagagagcagaattaataaacagatgcaataacaactactgatacttcactgctaggaccccagttgatgttcacagctcacaatttatcagcaattttcacatgttaaaaactaaagttgcagtttgtattgctaaggttctaaccatgctgtcctgttgaatgcacattgaagttccatctagtttatactggctggaaatagtgttaaccaaatttatcaacagcagattgcgaccatgtttaatactattccaaaaaataatcaatatagtattgagtattggcggctgcagtattgccaaacatcgatatttgctttgtgatattataataaaaggagcatgtacttgactcagctatctggaccatgaggttagcactgcagtaattgtagttggtaactgatttgaactattcgtcatagaat

SEQ ID NO: 45049 - DNA, 638 bp, Setaria italica
  Peptide Sequence Number=SeqID_111023
ttttttgtttttctttttagttttcttttagtttcttagtaattagtcagattatgcattggcttcaatatcattgttcttgtctttatgctggaccaacaaattatcatgcgatctatcgttgggcccagtggctatgcattgacaagcgcaggtgaggtctgctgggacatggcacttggcacatctgtcaagtatgcaacagagttcagtttagagattttgatacagcgcagcctcaaaaacatgttttggcatcggagatcagattctatagacaccgacatgtttggttgtgacggtcgtacgtccgtgttacaccagggactaggaaggcatcttgcttgcagcacagctcagagcacggtgtcattgaccagagcgtcttcgccctccaatcgcccagcgccgttgcttgcagttgcaggctctctctgcctctgcacatccaccaatcggtacaggtctcctctgctctgcatctccaacgggaggttctcccttgtagattgtatcatggagaggtcgatctcgccgatggcggtcgcttcctcgtgcccagctgctgcgagcacttccccaaacggtccaatgaggctcgaatggccccagatcatgaaatccgacttcgagttagg

SEQ ID NO: 45050 - DNA, 954 bp, Setaria italica
  misc_feature (11)..(11): n is a, c, g, or t
  Peptide Sequence Number=SeqID_111024
taaaataaaanaaaacaaaaaaccgaaaaacaaaataaagttaaggttaagtagaacggtacgtaacgtaccgtgttacaccagggactaggaaggcatcttgcttgcagcacagctcagagcacggtgtcattgaccagagcgtcttcgccctccaatcgcccagcgccgttgcttgcagttgcaggctctctctgcctctgcacatccaccaatcggtacaggtctcctctgctctgcatctccaacgggaggttctcccttgtagattgtatcatggagaggtcgatctcgccgatggcggtcgcttcctcgtgcccagctgctgcgagcacttccccaaacggtccaatgaggctcgaatggccccagatcatgaaatccgacttcgagttagggtctcgcgccggcgagcaggttgctacaaacagctgattgtcaacagccctggatttttgcatgaggtcccacaggagctccccagtgctcatgttgaatgcagaaggataacatatcagatgcgcgcctcttgatctgtacagcatcgctagttctgggaaccgaatgtcatgacatatccctatgccaatccgtccgacatctgtgtcaactactgtaggttcctgtccacctgtgaatgtatcagactccttgagcctgatgtctcctgggatgttaatctcaaacaaatgcagttttcgatgtttggccaatatctgtccatctggtccgacgacacagcaggtgttgaacaccttcccagacgccttctctggtatcgatccgcctacaatggtgatctttctggaagcagcgacctcggacagcatcgagatcgacggtgatcctccgccgtctatgtcttcggcgtagcttggcagggtctccattgagtagggacagctccatatttccggcatgacgatgagcatggcgccggcgtccgcggcggcc

SEQ ID NO: 45051 - DNA, 609 bp, Setaria italica
  misc_feature (587)..(587): n is a, c, g, or t
  Peptide Sequence Number=SeqID_111025
ccgcctgattagagcctggtactccgaatagtgacccatctgcacctgctctcagatttaaagctacatttgtttctgccttcatatcctgtgttgatcccagaagcggttgactcctggcttgagcttgctgcaatgaaccggacagaccaccagtcgatctatggaagatttgccctgaagctagagctgatcttgcaggtgacttgagcattgaagttgggtttgcttccagcaatggaccagttctttctgcgagcctttgcttcattgaagcctcatctgaaacgtccctctgagcagtaatttttgttctatcctcatatagctttgcagataaaccacttgccgctgcagcattttgtcgtgctggtggatcagcagcaaccgtaccattctgggcacttgtgctaaaatcagtgttttcattacgctgctgttgcttctgctggcgctgttgcagctgcgggtgctgctgttgctgctgctcttgtgaatgttgttgctgctgttgcacatgcctctggagcaagagttgctgcacctcaacctgctgctgggattgtgttgctgctccgtgctttaancgactcaaggtagcagcagcag

SEQ ID NO: 45052 - DNA, 473 bp, Setaria italica
  Peptide Sequence Number=SeqID_111026
ctattaaattctcagaacctatacttcagtcatcagtatactaacttcagttattcaatggaattcccgtatataatgcttgaagtgatggtgctcactacaccaatatagttggttgcactgaatcctaattgctattttgtagtacaagtcaattctgaacacttaataatcagttcaattataaacagcaagattttcaatatatataaataaaaactcaaaagtttactaagtcacatatgatgaatcacaaaatcccatctttgcaaaactataatccatcaggttcactccaaagctcaaatcctacatttcacaggcctacattgcaactttaggctgcagcttacatatgatttaaaaaaagctacccctttattcccttagacaaattgataaaagtaaaatcttgattttttaaaacaaattgatacagagattacttggtacccagaatcaagaaaaaaaac

SEQ ID NO: 45053 - DNA, 225 bp, Setaria italica
  Peptide Sequence Number=SeqID_111027
tgcagaatatattaaagaacatgcagagatgtactcttaacaaatgttaaatgcatacatatatttggttaaaagtgaaaatgaacataaagcagtatttattatgtgaatcccttattttctaaaaagaatgcctgagagggtctctttccttggtaaggaaaagttaagacgaatcatactttttagagttatctgaattggagaaccgctaccgattcgaca

SEQ ID NO: 45054 - DNA, 674 bp, Setaria italica
  Peptide Sequence Number=SeqID_111028
acaagattcagccatgaagaagacctcggccttcgccgccctcctgctcgcgatgctggcagtccatcagctgatggccgtgccgccggtgcgggccgccgtctcgtgctccggcgtgatgaaccacctgtcgctgtgcctggagttcctgcagggcgacgcagacgagcccggcgaccggtgctgcaagggcgtcaaggccatctacgcggccgcggacaccgcggcggagaggcaggcgacgtgcaagtgcctcaagtcggcttacaaccttgtcgacgccgacctctacgccacgcagacgctgaccggcctctgtggggtccccgttgtccctacaccatctccccagacaccgactgctcagagattgagtgaagaagctttaccggccggagtccatacgagggatggtgatgatagtagtgtatggctatatgctgcagttacacgtactgcgttattggaataaataaatggatttgttcaagtaactaatattcgcctgtaatcttgtgagccattatttgtttttcctttgtgatagtcttgccattatttactcgtgtctgtaactgtaactactgtaatccatggcacgtgcaactcgattaataagcctggcatgaaaaaaaaaaaaaactaaaagagactgccaaggcacacagggagta

SEQ ID NO: 45055 - DNA, 313 bp, Setaria italica
  Peptide Sequence Number=SeqID_111029
tgtcagccggcttgcgctcagatggtctgcactcagtagcagcattggaagtgatagcttcggacatcaagaaaccgagacttggagccagcgacttcaagagttgtcctccattatcatccataaggcatattttcctaccatgggagcttacaattgaagtggcattcctggggaccaagcagctagcctgcaagtgcaaacctgattcatcatccgtggtactgcgagggagcgagcagctagcctgtaattgctgggccgattcatcatccgtggtactgtgagggagcgagcagctagcctgtaattg

SEQ ID NO: 45056 - DNA, 449 bp, Setaria italica
  Peptide Sequence Number=SeqID_111030
aaagtacttccgttccaaattataggttattttagcttttctaaattcatagatattattatacatctagatacagtgtatgtctatatgcataataatatccatgaatctagaaaagtcaaaacgacctacggagggagtaaagaaaaattgtaatctactgcatcagtgcagacagtagctttcgacagtgggtgacctaattctgctagagtgtacaaagacctggtagctttggaatgttagggtgggtctgactgacagatcatagcatcccggtcgttacaacgcctcggccagcaccaagaaaatctccaagcatcatctcctttttctcgtcctctaaagatcaaaatctccaaccatcatctcatctcctttttctcgtcttttgaaaaatcaaattgtccaaccatcatcacagaggacaaaagtcatggactactact

SEQ ID NO: 45057 - DNA, 589 bp, Setaria italica
  Peptide Sequence Number=SeqID_111031
ccaagttgatcaaatcttccttgatgccttccaggcttgcatctgctttcatcttatcagcattacttgtgcatggaagaaacagtgaacacttttaaatgaattaaacaggcatctgtaatgtggttgaaccctaaatttagagccttcaatttgacaagaccttccaaattctcacagccttcatcacatatgccacaccgacttaaattcaacaagaccaacgaagccaatcctgatataacctccaaacaagctgcagtgactgcacagccctccaggtttagatgagctagcttgtgtagacctctcagataagaaacaccaaaatcagagattttgcaggaagacagttgtagctctctcaaatttgtgagatctgcaggaggaaaatggtgtttgttatccttggagatcattgtaagtaccatatactgatctacacttcacaacagtcagttaaggagaggtgctacctgacaaatatttcatatctgaatccgtgatgcaattacagtatctcatattcagtttttccagttttttcaagcctttcaagtgcacaagcccaccatgaatctttgggcat

SEQ ID NO: 45058 - DNA, 418 bp, Setaria italica
  Peptide Sequence Number=SeqID_111032
aagaacgtacaaccccgaacaaggaactacctccagggacagggagcgcaggttctgcagcggcttcaggtggtggaggcccgagttggacactcgggaattggacacgttcagcgacaccagcgcggtcaggccggagatcagctccagggttttgtccgtgaggttgccgttttgagataggttcagcaacgtcagagctttcaggtccttgatgttcttcacgccagcgtccgtgatcagcccaccacagacctccagggactggaggttcttgaaaaatctgaagcaatttgtgccagcatcagttatgcgagctccaaagaggtcaaggtgtgtcagtccagtgagacctgcattaaccaaatgattttagctaatgccatgatatgatcaggtaatctaaagtctataacaa

SEQ ID NO: 45059 - DNA, 239 bp, Setaria italica
  Peptide Sequence Number=SeqID_111033
ttgtgcttccatgattccagtaactgctgcacttataggtttatagcacgtgcaaaaaatatcatgccaaagattacaacaccttccttgatgccttccaggcttgcatctgctttcatcttatcagcattacttgtgcatggaagaaacagtgaacactgatttataaggatagctctggttatttttcttatatgatattgatcaggttttatggaataccacattaaaatgcttta

SEQ ID NO: 45060 - DNA, 704 bp, Setaria italica
  Peptide Sequence Number=SeqID_111034
tttttaagtactaagattgcgccaattctatttacacagcggcacccacacggatagggagcacggcatatatacaattgttccttcccaatcccatcacagcattcgtggggaaagggggtacacggacgcagtagcccggcgcccgtcaggcacaccgacacgacaaaagacctatgtacagactgctcaagcttgtcagtttcaggtcgctgctgcaagagtgccggccggccggccgcatcactccgggcgcacgctgatcaggttggggagggcggccagccggagcttcttgatctcggtcggcgtcacccggcaggactccagggacagggagcgcaggttctgcagcggcttcaggtggtggaggcccgagttggacactcgggaattggacacgttcagcgacaccagcgcggtcaggccggagatcagctccagggttttgtccgtgaggttgccgttttgagataggttcagcaacgtcagagctttcaggtccttgatgttcttcacgccagcgtccgtgatcagcccaccacagacctccagggactggaggttcttaaaagatttgatcaacttggagtgcttgaacttggactcatgcaagattggtgatgagggcctatttacaacctaagaaaaaggaaacctaaaacgtaaaaagaaaaaacaaaaaaagaaaaaaactaaaaaaa

SEQ ID NO: 45061 - DNA, 1223 bp, Setaria italica
  Peptide Sequence Number=SeqID_111035
ctggtccaagcacatatgtttaacaagatattaggtgcagtgagatatatattgataacctacagtataattattaatatagccaagaaaagtgatgaaccacttccctataaaagataattgagtttgccaaaagttcagtaatccacatcatggttaccttccaaattctcacagccttcatcacatatgccacaccgacttaaattaaacaagaccaacgaagccaatcctgcgacagcatgactcttaagtctcttagtaaagttttggtatccaagtggttgactagtagctgtttatgcaacagtctaaatggatattactgtagagtcaatcagcaaatgtgtacatgtagggaagagtgaggggattagatgtattaaaaaattagggagtagtctaacagctacatgccatggttaggcttcgtaaaggaaaacaccctttgtcaaaacaaatgcctcctccagtcaaccaattacttttgaaactaactacaaaatgaattgtgtttgccacaccgcagcatattctgttaatgttttactgtatatgtagcggtaacctgttctattgtagctgaaagaagtctcaggttatctagttgtctactgatacaagcactcttattctgacccttatcgtaacatatgtaatgacaactgtgttatcggtgatgcttgcacatttcataggcgggaacacctacaaggatttctcaagactaaatacaagataattcacggaagacggaagtgacaattgatagcacactatgcctagggaaagatataaaacctgatataacctccaaacaagctgcagtgactgcacagccctccaggtttagatgagctagcttgtgtagacctctcagataagaaacaccaaaatcagagattttgcaggaagacagttgtagctctctcaaatttgtgagatctgcaggaggaaaatggtgtttgttatccttggagatcattgtaagtaccatatactgatctacacttcacaacagtcagttaaggagaggtgctacctgacaaatatttcatatctgaatccgtgatgcaattacagtatctcatattcagtttttccagttttttcaagcctttcaagtgcacaagcccaccatgaatctttgggcatcgctcaaggtctaagtttaccaaattaactaagtttgcaaaggcttttgctccttcagcagtaacagc

SEQ ID NO: 45062 - DNA, 2728 bp, Setaria italica
  misc_feature (1)..(36): n is a, c, g, or t
  Peptide Sequence Number=SeqID_111036
nnnnnnnnnnnnnnnnnnnnnnnnnnnnnnnnnnnnttttttttttttacgtaccaaccaaaggtaggagttactccgtatctagcagtgcgccaattctatttacacagcggcacccacacggatagggagcacggcatatatacaattgttccttcccaatcccatcacagcattcgtggggaaagggggtacacggacgcagtagcccggcgcccgtcaggcacaccgacacgacaaaagacctatgtacagactgctcaagcttgtcctggcaaaaatatgtacaacagttcaaaagacaaaaaaaataatatgtacaggtcggcctgccctagtcaggcaccatttgcttacagtttcaggtcgctgctgcaagagtgccggccggccggccgcatcactccgggcgcacgctgatcaggttggggagggcggccagccggagcttcttgatctcggtcggcgtcacccggcaggactccagggacagggagcgcaggttctgcagcggcttcaggtggtggaggcccgagttggacactcgggaattggacacgttcagcgacaccagcgcggtcaggccggagatcagctccagggttttgtccgtgaggttgccgttttgagataggttcagcaacgtcagagctttcaggtccttgatgttcttcacgccagcgtccgtgatcagcccaccacagacctccagggactggaggttcttgaaaaatctgaagcaatttgtgccagcatcagttatgcgagctccaaagaggtcaaggtgtgtcagtccagtgagacttgtaagagctgctaaaccagtatctgtgatttggcgattgtcaagattaagagacttcagtgaactcaagccagaaatcttcttcagaccaatgtcagtaaccaaggtaaaagagagattgatgctctgcaaattacgtagaccagagagatgacgaagtccattgctcccaacttcagtgtctgaaagctccaggctttttagctgcacgaggcctttcaggtgaaataggccctcatcaccaatcttgcatgagtccaagttcaagcactccaagttgatcaaatcttttaaatgaattaaacaggcatctgtaatgtggttgaaccctaaatttagagccttcaatttgacaagaccttccaaattctcacagccttcatcacatatgccacaccgacttaaattcaacaagaccaacgaagccaatcctgatataacctccaaacaagctgcagtgactgcacagccctccaggtttagatgagctagcttgtgtagacctctcagataagaaacaccaaaatcagagattttgcaggaagacagttgtagctctctcaaatttgtgagatctgacaaatatttcatatctgaatccgtgatgcaattacagtatctcatattcagtttttccagttttttcaagcctttcaagtgcacaagcccaccatgaatctttgggcatcgctcaaggtctaagtttaccaaattaactaagtttgcaaaggcttttgctccttcagcagtaacagccgcacatttcttaatgctcagtgatgtcaagtttgaaaagcctgataatgttttaagtccatgttctgagattcgatcacagtaatcacatgccaaactttgcatgcttgagcaatctttaagaagattcaatccactatcagtcacatctgagcaagagatgtcaacagatagcaaggactgcccttgagaagccactacttccatccaagcatcagtcactccagggtattctcccagacaaatatcctgcaaatcacaatcatggaaagccccaagcgatgcctccgtgaggtatccggactccaccagctcattgaatatctgctgactaagatccctgggcagctgggagaaatcagagtacctattcatgtcctcgcggactttggccacgcacagctccataagcgacgggcaccggcccggcgctggcccctgccctctcctgtgcacatcagcagagttgctgcggggcagcgtgtgcagcagccacttgaagctgccgctcttggagaacctggcgctgtagagatcatcctcgtggaccagctggccccttttcctcgagcaggcgctgcccatggcgacggcgtgcgcggcgtgcactgaacgcaaaccaatcaccccctgaccctcgatgggctcaaaagaagacacaacagtatggcttcaggctgatgcctgtgtgattttttacgaccttatcatccattcccccgcgtgattacgaccagtgacagacttcactttcttcgtctccatccgagaagccgctgagccgccgggccagggtttagccccggattaaggttaaaataagctctgcgcctcgaatcatcatcgcatctaaactaaaacgaacccgcgagagagaagggaagaggcgacactagggtaaaaataaaacaaaagaaagaagaatagaacggaaaggtaccgaattggcttcccaacttcagtgtctgaaagctccaggctttttagctgcacgaggcctttcaggtgaaataggccctcatcaccaatcttgcatgagtccaagttcaagcactccaagttgatcaaatctgaaagcaaagaagcgcatcagaaaaaaagcagtttatgcattaattgatacacagtgacattataattctgatgaacttctagaaggaatgaagg

SEQ ID NO: 45063 - DNA, 468 bp, Setaria italica
  Peptide Sequence Number=SeqID_111037
attcgatctatacacggccatgactgagttgaaggttaagaatatgaagccgatcacagtgagcaacgagggacgacgaccatcatgattctccaattcaggttgattcacaggttgttcaagcagggcttcatccatgtgcagtttctgctctgaactcatgaaaccaccgagatgtagtcaggggaaatctgcagcaaagaagggaaacacacagtgtcgttagaaaagtcttttcaattaagtcactagtgagtgtgattgattttacataagctaaacagacaatttctttgttgcactcaattttctcttgatcttaaattaaaattatttaggggaagctttgtggatgccatttgtggccagctataaggatcggtggcctaagaagcggggatgaattgggacttttcaaatttctagaacaaagaaagcaaacattagcctagatttctagtgttgccc

SEQ ID NO: 45064 - DNA, 521 bp, Setaria italica
  Peptide Sequence Number=SeqID_111038
tgcatggggagctggacatcgtctacgacacgctacggaggctcgaggaggccgaggggatcaagattgacctcctcctctgctgcggagatttccaggctgttaggaatacagatgatttacggtgtgttaacgtcccactaaagtatcgtaacatgaactcattttggaagtactactcagggcaagcagttgctccgtacccaaccatctttatcggtggaaatcatgaagcatccaattatctgtgggaattgtactatggaggatgggcagcacctaatatatactttttggggtttgctggtgttgttaagtttggaacatccgaattggtggactgtcaggaatacataagcaacacaattatcactcagggcactacgagaggcctccatacaatgaacagactatacggtctgtgtaccatgtaaggcattatgatgttctcaagctcatgcatgtgaaggagccactagatatattcttgtcacatgattggcctctgggcattactgagt

SEQ ID NO: 45065 - DNA, 441 bp, Setaria italica
  Peptide Sequence Number=SeqID_111039
atgacattacagcttctcgaggatgccctctggaatgttagctctgctgaatttgtctgcacgcctccgtctcttgagctcacccaacctataaatggtagctctgctgattgtacggcattcatcaaaacacaaagatacctcgtagaatcctgctgaaaaatacattggtttgtttcagaaactcgtgcagcgtaaagttgacgtgatacggctattatgtgtacccattgccatcattgatgtggtatgggaaaacaagtaatctagagtcacagcttcgtttgtgtgttttaattaggggtgctaaaggtctctctaatttagcctaataaatttaagaattgggctcaatacggaccaggcaaaatactatatgattttgtgctaaaaatagatagggctaagttacatcgtggagaatgcatgagggccatgatc

SEQ ID NO: 45066 - DNA, 395 bp, Setaria italica
  misc_feature (20)..(20): n is a, c, g, or t
  misc_feature (82)..(82): n is a, c, g, or t
  Peptide Sequence Number=SeqID_111040
aatctggctggatcgagttntcggggctctgtagtgtctgcagggaagtcacacctgatagaacaaggagcgcttgcagccnccgttttggccaaacaggatatcagtatccaaccggtcacccaccatgcatatctgggatgttgtgattccgaacctgttcgcataggtgaaggagaaaggtaagaatctgaaaactcgcaaccagttgtatgatttgcgcttaaacaactacacacccttccatgaacattttttttctaaaactgaacataagttgagactttgagacagtaagcctcttacttctttgcgaggtagtccatcatgaaagtggatggcttcccgacaacgagcggttcttgtttagttgaaccaaggacttgcgttacgta

SEQ ID NO: 45067 - DNA, 905 bp, Setaria italica
  Peptide Sequence Number=SeqID_111041
tttttttttctttcaatggagaattcagagtaatttcttggcatcttttgagatgtgcttcactgttgttacatattaacatttttctcaggattacacaataatgtgaaaaacaaaaccatcctttgtgttttcttatttgctaaaaaaatggtcgatgctgcctatgcaaaagtaaggtgggctcgcccttcagacagttgctgctttgagggtgagaaaatccgaaatttggtttgtgtagaaatctggctggatcgagttgtcggggctctgtagtgtctgcagggaagtcacacctgatagaacaaggagcgtcttgcagcctccgttttggccaaacaggatatcagtatccaaccggtcacccaccatgcatatctgggatgttgtgattccgaacttctttgcgaggtagtccatcatgaaagtggatggcttcccgacaacgagcggttcttgtttagttgaaccaagaactgcgccgaccattgagccaccacctgcccattcttgggcatcagtaagatgagtgacggcgtccctatttgttgctatgaaaaggcaacctgggttctcacggatgcatagtgtcccgtactgaactttgtagtagttaaaatagcgatcaaatcctaccacaactgctcccacatctttgtcatgctccatgtaaaaaccaggcttcagctctatcttcttgtctccatctgtgggtccgccgaggtgctgaaatccagccagctccagctccttcagaatcccttcctctccgatgacatacaccttcttgtccttgggaaaatcgatggactgcaggtacgctgcggctgcgaaggatgaagcgaagatctcttcctcgtcgacactcagccccagcgtctcaaacttcttgccgtactgct

SEQ ID NO: 45068 - DNA, 457 bp, Setaria italica
  Peptide Sequence Number=SeqID_111042
acggtcgaagagcgcatactgcagctgcaggagaagaagcagctagtgtttgaaggcaccgtgggcgactcgccggatgccatgtcgaagctgacggaggccgacctcaagtttttgttccagatctaactgctgccgggcatgcatgagtagcgtagcgtgtcctaggagcgccggcatgtcggaaccctgacctcacaccatcaaacggcagggcggcgtcgggcgtagatcgactggtagcgtagcttttggatcgcaaactgcagtgtaacgatggtagcgagccttcaccatgacagagtaccctggaccgtaggcggtggtagtagtagtatccctgatcattgcgcgtacaagtggaacgcctggagggtagccccttttaccattctggggaagaagactagaagatggcgttatttacgtttaatttaggtacctaaaaaaaaaaaaa

SEQ ID NO: 45069 - DNA, 342 bp, Setaria italica
  Peptide Sequence Number=SeqID_111043
gaaacttccagatttcatcatatatgcaattcttcttgattgctccttctctctagttgcatgaagtttgcacatagaagtgtcttagcctaagtgatcctttcagtgccatgtaagacagtaagcatatctctctttctctcttccctctctctagtttcatgaagttcgcacatagaagtgtctgacttggcgttttgtatttatgtctaggggctgcatgttagatgtcctcaggaatggaagtttagttgatgctaaaacttcctttaggagaagcacacaagctggacaggaagtaaaaaactatatattatacacaattttgaagataacaactaa

SEQ ID NO: 45070 - DNA, 1113 bp, Setaria italica
  Peptide Sequence Number=SeqID_111044
gctttgtgcacttggttgcctgacatacaactgaagaagagtgagctcctgtaatccggaaattctgttaacgtcatccatgttcagttccctaacaacaattttcaggatgcataacttttggagctgtccaatccattgaggaagtcttgaaaagatgcaaatgggcggcaacaactcgagtttttcaagagaaacgggtggagcagatactatactagagcagtctgtgtaaatgatgcttctgcatgaaacatctggagcaagagtaagagattttagcttgtcaagtttcccaatggaagaggccagagctataaagtttctctctagacggtcaggcactgctgtagaacaggagatatgaaggtcatgcaggttcgtcatctcaccaaggctctgtacattgtcttcagagttgctgctcaggtcaaaagactgcaatgcacgtagggacctcagttgccccacataatcgggcagctttatatcaccttgaaggtggaggtgcaacagtttcggaagaagaacaatatccgatggaacagtcaatactcttgcaaatatttccagtgtttccaagtatgtgagtccttgcatcttgaccggtagctttataatgctatcagttgtaatcttaatgtacctcagctgcaacaatatgttgattccacttaggtcgaatacttctcgatcaccccaaaattcaaggattaaaaactcgaagtagcttaaactccataatggtaggtagacactcaactaatccataaaaggtgagtgatcgaactggcaacggtgtgaagccttcaggcttggttgcatatttagcattgctgaagctgagagacagtcgacggacctttgcagatagctttggaatagtttcagagtagtctattaccgtggtgaaattctcttctacggacttgcgccttataacttcgaatacagtggagtgtactgtatagaacatcacgtcatctgcaagattgatatgattagtctgtacaagtcccctgctgacaagctcatcaaaatagcactctgcaatttcgttggcacttttatccttctggataaaacctttcggctagttccacttgtcttcta

SEQ ID NO: 45071 - DNA, 279 bp, Setaria italica
  Peptide Sequence Number=SeqID_111045
gagcgccagcgccggccccgccgacgcggtcaccgcgcccgccgccgccagcagcgacgcgcccgcgcccttggcgctcacggcggccgcgttcctgccgtccttggagtagccgcaccgcaccctctcgctcctcgccctcagctggggcagcccgagagcgttgggcctggcgatcgcggcgcgggcaacgacggtggtcgccacggcggcgctgatggtggccatggctgctgcgtatccggatctctcgctggccgcttgctggagaagtttggt

SEQ ID NO: 45072 - DNA, 439 bp, Setaria italica
  Peptide Sequence Number=SeqID_111046
caatgaaagggtcaaagcagaaatggaagcagcatagacacaagcggagaaagatgctataaaggaaaagcccaaaaagaagaaaagcaaaaagtgtccatgtacactgcaagagttatgaggaacaaggctcacaagcagtgcatcatgagggcttacaattttcggtaagctagctagttcaaattactattcatatacttggtgctaattaatgctatctataatataaattattctaatatcatggagagaccactagatttgcatctgtatttaccccaagcttggatctgcaattatcctcgactctctcagacataccaacatagatagttacaaggaattcctagacattgtatgaaagtaagacatcccttggcagcacttaaatacatgttgagattcaatgcacgtaatttgtattcctaactcttgt

SEQ ID NO: 45073 - DNA, 465 bp, Setaria italica
  Peptide Sequence Number=SeqID_111047
aagaccttgatttgatttattcatgttgcttttgtctgccggaaatggatcagtatcaagattgaagccatcagttgtgggaaaggatggctccgataaagtatcaaaattcatgtcgcgcaagtgaatgccaccgcccggaagaggtgaatttaagttagtcaagaagggcatctgttcagaagcctcagtgccagatccaccaaagctgctagacccactaccaatccatttttggcatgattccttatgtccttgcctccagtgtattatttgacacttaccagagcagtatctaacagacttgcatctggagcaccgagtctttgcaggggcatggcaagttgcgcattcatggaattcttgtcttaatgaaggtgcaggtctgaaatagggcatagttctcaaagaaggccctggaggcataacgtccgggcatgccattgtttccactctaaaggcttc

SEQ ID NO: 45074 - DNA, 267 bp, Setaria italica
  Peptide Sequence Number=SeqID_111048
cttcttgggtgcctttgcctgtacggcgacgcttgcagcttgtggagtgcctccgttgctggcagcagccgccgccgccgcggcggcagccgccatcgcccgccgagccttcctttgccttatgccgcatgcgttgcaaagagacttggggccacaaggaccactcctccacaagggggtcttggtggtgttgcagtcggagcacactctaacgacacccatagcctgctgctgctgcagttgctgctggctctcattcttggtgcg

SEQ ID NO: 45075 - DNA, 213 bp, Setaria italica
  Peptide Sequence Number=SeqID_111049
gtcggcgaggaggatggcgctgtcactgtcagaaaggcgcatgaagagctccttcttggatggcggcgcgggggagagctccctgtcggcgagtggcgggaggtcgcccggtaggaagcaggcccacactgcgtcggagtcggagctcgattcggcgcctgcggaggtcgatttggcgcctgcggagctcgaattgacaacggcggaggtcga

SEQ ID NO: 45076 - DNA, 439 bp, Setaria italica
  Peptide Sequence Number=SeqID_111050
tattcgccgaatttaataatgcgaggattgctatcctttgaaatgtagttaggcagagaacctccacataatttcgctgcctcctcataaggaaaaacagaggctaagaccttggctccttccgaaattagctttttggcttctctttccagttcatttttcttatcctgtatttgatcttgcggaattactcctttatactcaacgaacggtccatcaggaaaatggtagcctttcccaggctgcagatgagagaggcctacattgctcacacagatgtccaacaaatgcccagcagagtgaagccttgagttcaagctgcgcctttcggcgtcaacttccaagctaacgctttccccctctttaaatccaagcccgcatccttctccagcactctcaaatcttccatagtggaaaaccactccgtccttggcccgca

SEQ ID NO: 45077 - DNA, 442 bp, Setaria italica
  Peptide Sequence Number=SeqID_111051
tcggactctgtaacgcagtttctgtccatcaagcaaccctgtccaaattgcaatctgacttggaggcacctgaggaccgtgatttcgatctctactcggattctgtcgaggagaccactttatcaggtccgcagcagggcctggtgattacttcaacacctcaaggcatatttgtctactagctagacatgaagctgtcctttcttgcccaagacaacggatgacgtctcatcgcccacctcgacattctcccgtaccaggaaggaacacccctatttcctccacatgaagacgatggctccacagaagtcatcacctcgagctctagtagccattctccatatagagaactctatgctcttatcacagcgggtgatagggaggatggagaacaatgacaaccagagaggaatcatagccaggagcgtcacctagatgatgt

SEQ ID NO: 45078 - DNA, 824 bp, Setaria italica
  Peptide Sequence Number=SeqID_111052
cccgttgtatatattcttgtacttggcccattctgctacactcttttccatgcatgctatgcttggcaatttgaacccaccagccaggaaatgggctacccaattggccatcctctctgaggcatatatgttagtaaggctctcagagtacccaactattgccaactgaggaatccggggatggatgcattctcggtatagaggagctactgtatccggtgatcctgccactatctttctacaccaatttgctgtgaagatgtccctaagcttctgatctcctctgaatcctgttgctagaatcacaatatcactttttatgctttccttcttgtcttgcaggattattccatcattagagaagttgaatgccttggatttcttgagaataatgctgccatcgtcaaccctgtcatagaacccttctggcagcattgcaattgagcacgaggacatagcaaaggagaagctgtagtcaggtaccatcccatgcttttgtaagggaatgctccacttgaagtaagtttcaatcacttttgagatcgcccatcgcaagggagatagtgcagtagccaacatataacgtagaaatccttcaccaggtttgtgaagtagcagctgtgagatgcgatttagatagaagtaactgaggtcaactccccatatgctagacttgtggaccagccagtgctttgttctatatatgatggtgcatggctgatctgcaccattcaccttggcaacttctgcagcaatgtcaaatgctgattttccagagccaactatcgtgacatgcttccccttaacaaaatgagcaacattat

SEQ ID NO: 45079 - DNA, 455 bp, Setaria italica
  Peptide Sequence Number=SeqID_111053
cggccccggcgggggtcccccaaaggcagcagcgccgcggcaaggcgctgcggagagccacctccgagcccaacaaggggtccacgcccaggtccgccatcggcggcagagccgccgccgccgtgcacgccgtcggggacgtggagaacggcgacggcgacgagatggtcaggtgggaccgcctcttccaggacctcaagcccaactgacgctgccatgatcgtcgggaactcagtcatcagtgtttagtagtgtgctaatgattgtgcctagtatgttcaatgtgtgagtgatgttgatgtgctctactccgcgtccagtcccgtcgatattgttgcatgtacagtccacatagtctatgatcggaactggccgtcagacttctggtttggtttttttgtttacagtgaggttgctgctgtgcaataaaaaaaagatagaattggtgatctctg

SEQ ID NO: 45080 - DNA, 666 bp, Setaria italica
  misc_feature (61)..(61): n is a, c, g, or t
  Peptide Sequence Number=SeqID_111054
gtccttccgttctccgtgcaccgggagcagctcccgcacggcggcgtccgcgtggtggagntcccctgcggcctcgcggtgggctcccacgtcaccgtcgtcgcccgcccccggcccgcccggcccgagtacgaccccaagatcgccgagcgcaaggacggggaggccgccgtcatggtgtcccagttcatggtcgagctcgtcggcaccaaggctgtcgatggggaggcgccgccgaggatcctccacttcaaccccaggatccgcggggactacagccggaggcccgtcatcgagatgaacagctgctaccggatgcagtggggccagtcgcagcgctgcgaaggattcgcctcccgccccgccgaggacaccgttgatgggcaactcaagtgtgagaaatggattcgcgacgacgacaacaagtcggaggagtcaaagatgaagtggtgggtgaaacgtttgattggcaggccaaaggatgtccacatcagttggccatacccattcgcagaaggcaagctatttgttatgactctaacagctggtttggaaggttaccatgtcaatgttgatgggcggcatgttgcttcatttccataccgcaccggttactcccttgaggatgcaactgcattgtccctaaatggagacattgatattgag

SEQ ID NO: 45081 - DNA, 460 bp, Setaria italica
  Peptide Sequence Number=SeqID_111055
tgctcttgttcagtttttgcagctaatagctactttacttgttcttgtctccatttgaaatggaatagtctggctggcttaaactatgccctaaatactgtagcattcaggtctgtgctattgtagtaataagttctcccatctgcttttaattttggagaactaaccagtaaattaatcttgcattagttgattgtccaatctgccaatccatttgactttcatcctgcaatattctgaaacaaagttcttattttgacaattactacttgtgtgtgttgatgattgtggtggaatcatttgcttgattgcttcacataactgcctatggtataaacagctctttgtagatctggtacccctgatccaagtatttatttggtagggaggtatgtccgtggtgagcagtaaagctccctcttgaatagcttattgttcacattacttgaaattttggagg

SEQ ID NO: 45082 - DNA, 409 bp, Setaria italica
  Peptide Sequence Number=SeqID_111056
gaggcgagcgcacgggcgcagaggagggcgagggacggcgagggatggaagaggaggcaaggcggcgtgagaagaggagttcgcgtggtggatggataataccgcgggcgtttggcttgccagacctaaacaccgcgggggtgctgagccgaagaaaagaaactttttccttaaactgagatcgaactggaattacaattacgtactactccgtagtacagcttaaaaactctgcgattgcattaaaaaaatattcgtgactaccggcataatttaaatagttactggagatacaacgaattcttttggcaaagatatacgttttttaaatgagctcggaacttgttgttactttaaggtaatctaaactttaaactctaaattttttaattatttttcagattagatt

SEQ ID NO: 45083 - DNA, 293 bp, Setaria italica
  Peptide Sequence Number=SeqID_111057
cggtcatgtcccacggcgccgagctcgccgcgcgggccagcgccgccgtcgtgctccgcgagctcgcgtcgtcggccgacgggcacacactcgacgccgttgcgcggactcccggcatgtgcgacgcgctcgtccacctcgtacagcaccccgtctccacgccggccaccaaggccgcgctcgtcaccgcctactacctcgcctctgcctccgaccgcgcggcggctcgcctcgccgagtacggcgcggtgccggcgctcgtggagctcctcgtggacgccgacaagggcacg

SEQ ID NO: 45084 - DNA, 571 bp, Setaria italica
  Peptide Sequence Number=SeqID_111058
gtgggggcggaacggaatgaatagcagcaacagcagcagcaatccctgtggtcagggacagagcatccggcatccgggatctaggcgagcagagccgccgcgcccagcgccaccgccacggccgacgcgatcgctcccgtcgtcctccccgcggcgctctgcaaaagattgacagcgttagcacatcggtgacaaacttctgctgataaacaaagtaatgtgctagtattaatggcgtattacggcgaggagctcgtgcgtgtcaggctgaccaaacattgtggcgcagttacacacagcaaaggctggttcggtactgatcataaaactggagtggtggtgttggacaaggtactgtcttggttagatctgaaatagctacactttggccctctagcttttgtttttaactccagttcggtgaaaagtttattcccaagctgtaaaatggcagcggcagaagcagacaagcagtcgccctgcgctgtccatatgtcaactgctctagtcccaacagagacgcaccaacggctacattctgccaccgacggtgaaaagaagcacgacgcgt

SEQ ID NO: 45085 - DNA, 483 bp, Setaria italica
  Peptide Sequence Number=SeqID_111059
ggtcaagcagacaaaaacagagctgctgattgttatgctaataaaccatcatggtcacaggaaccgtatggcagctattcgccagctttaggcaccgtacggacgcctgtttctggtgtagtgacgctggggcaaacagttggttagcatgccgccactttactaacatgctaacgtgtcgcgtgatgatcagattccaataggatcatcaacatcaaggtaaacacatcaaaagaggcacatgtaagggcagtatttaccgagaaatccccacttggcatggttccagccacctgcctgtcgggccatgagtggcagagtgggttcttcagctggacacgaattcagaatcagaaaaaagagaagagaaaccaaaggaaaatttctactgcttctgttggtgttgctcctttagtgggcagcaaggtttgcacagcacagcatatagtatgtgattccctgtaccagcatggaaagctgcgg

SEQ ID NO: 45086 - DNA, 408 bp, Setaria italica
  Peptide Sequence Number=SeqID_111060
cgacggaagacgacaccgtcgctgacggacatcatactgatcaaggatctcaaggggaacacagcctaccagagagctatcccatctgctctgaccatgaggagtgcattgcccgtcccgagaggatcaagatccagaaaggcttcgtggccaaggagtctgtgaaggggcacatggttaatgttgtgaaaggcttgaagatatatgaagatgtgtttacaacatcagagatcatgaaagttgcagatttcatcaatgaaattcgtcaggctggcagaaatggagaactttcaggtcgtgccaagacattctaacgtccgtccaaagtcgtgcatgacaaaatgttgatccaagtaagttctagacttcttaagttcctgagtagattcctcaagaataatttgtact

SEQ ID NO: 45087 - DNA, 574 bp, Setaria italica
  Peptide Sequence Number=SeqID_111061
atagaaacagcaaaacctaacttacctaagattttgaaatttatgtaactagatcactagtactgatctgtcttcctatatagctgctggtcaatctaatctaggtaaattagaacttgaatctgacagacaaagtaatgtcatcaacctagtgactatgacactaaccgatttgacatgtcttaacttcagctaacttgaagtttacctctctgaatgaaagaaacacctttgaactgaatatataatttaatactagtaacatattagatcacttctgttttattggaataggtcgtgccaagacattctaacgtccgtccaaagtcgtgcatgacaaaatgttgatccaagtaagttctagacttcttaagttcctgagtagattcctcaagaattgacatagaacccacaacctcggtctgcttctatttgggtttggccgaaatcatcacagacaagtaagctgcctggtcttagaaatgactaattttctggttaactctggtcagtgtctttatctattttatcacttgaaatgtgactttatgttaaacgtctcgtgaatgagtta

SEQ ID NO: 45088 - DNA, 2172 bp, Setaria italica
  Peptide Sequence Number=SeqID_111062
aacgccatgatcgacgcgctgtgcggccacctcgcgcagatcggcggcggcggcggggccgagtacgaggccgccttcgccgcgctccaccgccgccgcgccaactggttccccgtcctccacatgcagaagttctaccccgtcgccgacgtcaccgccgagctgcgccgcgtcgcggacgcccgcgccgccgcggccgcggggtcctgctgctactccgacgaggccgcgtccacggtgatccacgagcccatggaggacctccccgccgagccggagccggagccggagcaggagcaggatcccgtacagcaggatccggcaccggcggccgaggaggccgacggcggcgccgtcgccagccccgccgcggagtaccacgagccggacgcggaggtggattcctcgggagattcgtcggagcggaaggccgcctcgacggaagacgacaccgtcgctgacggacatcatactgatcaaggatctcaaggggaacacagcctaccagagagctatcccatctgctctgaccatgaggagtgcattgcccgtcccgagaggatcaagatccagaaaggcttcgtggccaaggagtctgtgaaggggcacatggttaatgttgtgaaaggcttgaagatatatgaagatgtgtttacaacatcagagatcatgaaagttgcagatttcatcaatgaaattcgtcaggctggcagaaatggagaactttcaggtgaaaccttcatattcttcaacaagcagatcaaaggaaacaaaagggagatcattcagctaggtgtcccattatttcaacctaccaccgaggaagctaattgtcacatagaaccaatccccctcgtcctgcaggctgtcattgaccaccttgttctttggcgtttaataccagaaagcaggaaaccaaacagtgtcatcatcaatttcttcgatgaggatgaacactctcagccctacttcaagcctcctcatctggacaacccaatttccactcttctgctttctgagactacaatggcatttggcaggtcacttgtcactgacagcaacggcaactacaaggggcccctcacactttcactaaagcaagggtccctcctagtgatgcgtgggaacagcgcggacatggcgcgccacgtggtgtgcccgtcgtccaaccggcgcgtcagtatcacgttcgcgcgggtgaggccgtccacgccggtggacctgagcccgcttccgtcgcccaccaaggctatgacgccctggcagccgcagccggccgtggccgcccaggtgacggcgcccggttgcatggcgcagaaggctcccgtcggcggcgccatcatcgggtacgccacggcgccacaggccgtgctgacgccggccgcgtggggcatggccgtgcgcgcccccgtcatgatggtggcggcggcgcccgggagacccatggtgatggcctcctctggctccggcggcggcggcggcaacgtcggcaagcggatgggccgcagcggcaccggcgtgttcctgccgtggacggtcgggccgaagaggtacaacaagcacctcccgccgcgcatccagaagcgccggttctcggcgatgatgtcgcccatcgaggcgcagggctgagggcccgcccggcgtcacctcgccgtcgaaccgaaccgccgagtaggaggagacaatgagccatcgttcaattcgtaggcgttcttggagtgtttttgttttctctcgtcttcgaagcaaaaagaaggaaaacgaaacatgggtcgaaacgcgcgggcagctgagtttgaaacgggtcgtgttgcacgtccctacctgtgtatttcggtgactagcgtcgcgtcgtcgtcgactcgtcgtcttggaaagtggtgctttcgtgtggtttttggtctgcctgtaatttagccgggtttgtgggcgtctgagcgagtagcagagttcagaagccgtagagagagtatgagggtagggataggtgaagtcagaatcaggacaggggtttctttttgttttttcattttttttcaccttttcatgttccgagaagaacctgatggatgttgccatgcatgcatgtcctgctgagtttgcagtcctatataggtaaaagatgcatcttgtatttaacaaaaaaaaaaaaaaaaaaaacaaaaaaaaaaa

SEQ ID NO: 45089 - DNA, 539 bp, Setaria italica
  Peptide Sequence Number=SeqID_111063
accagagcccttacgctgcagtgtccacagtgccaaattactggggcagttcataggacagaggaggaaggagaactgaggccatgcttgcagaatccttacaaccagcactgaagaactaccgctactacagctctgtagtctgtctgtactgagtgacaggtttgaattgacctgtggaatgataaggaagggagtgagtctgagagagatcccttgtttcccgggcaatcttccttccatcaccccagaatgccccttttttccttgttgccttccagaaaccctacgtgcagtacgggtccggcagggccccttgcagctgcagcagcaggtagtagctagttggaggtttcaggaaacatcaggttgaaaaggagaggtagagagacagggagtgagggatggtgacacatgaaaaaaagcaaaaggacatgcctacaagcatgtatgtgtgtcatctgtagcaggagtatgtgatatgtgggtggcccaagaacaaactgtgatgcatgaagttgatgtatctttcttctacc

SEQ ID NO: 45090 - DNA, 416 bp, Setaria italica
  misc_feature (380)..(416): n is a, c, g, or t
  Peptide Sequence Number=SeqID_111064
ctactctctagtctctgctgcatgggttggttggttcagtacgttgttggtagcatcgggattcgggatcaagcttcaacggagtccatacttttgccatcctgttcatccggtgcattaagaaggagcgaaatcacaggacgagaaaacaatttggatagggtatttgcaaattggtgccatcatgatcatcctgcaaggggacttcactgcaagaggcaagaacttggtgccttgctggggccaagctagtcccttgcagctttggttgtaccatcattagcgagtaatcccttttccttttctgggcttggttgagctgtttgcttgagctgtgttccttgcacatgtaatctcttcttaataatctatgctggacnnnnnnnnnnnnnnnnnnnnnnnnnnnnnnnnnnnnn

SEQ ID NO: 45091 - DNA, 387 bp, Setaria italica
  Peptide Sequence Number=SeqID_111065
gaaggtttactaggtgcagtcaggtgagatggagaagcaggaaatgaataccacaaccatcttgcatcatttaaacatggcttgaatagcccaagggcaactgtgatccgcattgaagcattagtggcgattgcaacttgcctctccttctttctcctcatatttggctcatggcgacgctggtgcaagcattggtttatccagaatggtgtcctggccgcatacaccttgtccttctccttggtgacctacaccatgggttccatgcaatcgtctgcagcaaggaatgagatgttccctgtgtgggctctatctttgtttcctgtccttgggtgcacaaactccataacagcttacagtctcgatgacaacaaacagtacatgagt

SEQ ID NO: 45092 - DNA, 1232 bp, Setaria italica
  Peptide Sequence Number=SeqID_111066
tggtttttctttggtattaccttgtttttctcgttataactcaaaggcaattgaagccggagcatctattggagcaattggagctcaaagtattggagagccagggactcagatgacactgaaaacatttcactttgcaggagtagctagcatgaatgttactcttggtgttcctcgcatcaaggaaattatcaatgctgctaaaaagataagcacacctattatcaccactgagcttctgtctaggaaagatgtgctgtctgcacgcattgtgaaaggagctatggagaaagcagtgctcggtgaggtagcatcagccataaagattgtcttgaaatcaagtcagccaaacttggtggtcaaacttgatatgcaacttatagaagctctgcacatggggatatctgctgactctgtgcagctgtcaattttgaatcatcccaagatcaagttaaaatctgagcatgtccgtgtcatcgatagagccaagttgagaatatatccagctggaacggataagtccaaacttcagcttgagctgcataacctcaaagccatgcttccgaaagtgattgtgaagggcattccaactgttgaaagagttgttattgacgaaagaaaaaaagaaggaaaactagaaaaatacaacttgttggttgaaggaacaaacctcctggccgttatgggtacccctggagttgatgctaggaatacaaaaagtaatcacatcatggaaatgaacagcacacttggaattgaagctgctaggagatctattatcgatgaaattcagtacacaatgaaaagtcatggcatgaacattgatgtcagacatatgatgcttctggcagatttgatgacatacaagggtgaagttcttggcattactagatatggcattgcaaagatgaaaaccagtgtgctgatgcttgcttcatttgagaaaacctcggaacatctattcaatgcctcatacagtggccgtgaggacgagatagagggagtcagcgaatgcattatcatgggcattcccatgcaactcggtaccggtattctcaaagtcaggcagaggctcgaccatctccctgaattgaagtaccagccggacccgatattgtcgtgatccatacgcgtggatctgaagctggaactctgtacatatatagctggagcatacatgcatagcgtagggcaactgcggcggctgtaattttttaggcgaacgtctctcc

SEQ ID NO: 45093 - DNA, 535 bp, Setaria italica
  Peptide Sequence Number=SeqID_111067
aaggggtcaacgtcaaccacctaaaagtgacggtgaaaaaaaacttggtcccggttacgactacgtacaaacaaggaaaaacaacgattcccaggcatcattagcctgcagagaagtttagtccaagcacggtattgcctaggcaggtgttgcctgccatagctctgacttgtaccaattacagtgtcacatttgcaatgtttttactctctacgtcagccaaagcagccgaaaaaggtggtgttcgcttgaacgttgttgcctcatggagagacgttcgcctaaaaaattacagccgccgcagttgccctacgctatgcatgtatgctccagctatatatgtacagagttccagcttcagatccacgcgtatggatcacgacaatatcgggtccggctggtacttcaattcagggagatggtcgagcctctgcctgactttgagaataccggtaccgagttgcatgggaatgcccatgataatgcattcgctgactccctctatctcgtcctcacggccactgtatgaggcatt

SEQ ID NO: 45094 - DNA, 230 bp, Setaria italica
  Peptide Sequence Number=SeqID_111068
aggagaccagctgcacaacgtcgtcgtgatctcgtcattttccttcaatttttgtgtgttgaaattaagtcggatttgatgtgatgtaccacacctccctttcctttagcgtgtgtgtttttaatttttcaggtaattctgctttttctacgagctgtgtatcatctgatatcctgtcttctaatatatatataacattaataagtactcgggtgtgaataaaaaaaaaa

SEQ ID NO: 45095 - DNA, 462 bp, Setaria italica
  Peptide Sequence Number=SeqID_111069
aatctctagcctactatagatttactaagacaacaccatagagggtgcaataacgatccatgtgacattagttaattacgctacaatttcttcctaagcatttcattcaattactgactgcacgaactttctatactaaactacaagacaagatcttcataatgtagtgagttagtggctactgagcttccaaaaaggcaaaatcatagttaattagttattcaataaaaaatatacaaaataacgaggaaataaaatatttatgtttttagtaaacctgatttattgttctttccaacacatgaaaatgtgataaaaactaaaaagaatagtatacctttaatatcctagggcacttgaagctacaagcttgttgaaagcactatttgaaaaattgaaaccaatcttttttagctataaactaaaattggcagttatcatgtaaaatactatatggagatg

SEQ ID NO: 45096 - DNA, 475 bp, Setaria italica
  misc_feature (452)..(475): n is a, c, g, or t
  Peptide Sequence Number=SeqID_111070
cacagcattctgttcagacacagtcagctgaatacatgaaaaggagagcttcaggtgttcatgagaagtataatttgcaaccaggaaaaccaaagttaccaggaagttcaatgtttaggttagggatcaaaacaaggaacataaagaaactgcttcatagccgcgaaaggaatttgggcgagatttgaagcaaacttagtacgctatgcttgacaagaccaagaagaatgaacatgatcttgagtagtagctattttgtaagaggtgagaatttttgcaacggagacatgaagatgaagctgtcaaagactacctgtgtccttgagtagcatattcactcctgaaagaaagttgctactttccatatctgcataacgctgttcatgtgccgaacaaaaataaatatcaattgcgtcgtgcttaacatgccaccttataattatatgaattgnnnnnnnnnnnnnnnnnnnnnnnn

SEQ ID NO: 45097 - DNA, 597 bp, Setaria italica
  Peptide Sequence Number=SeqID_111071
tgaaaacactggtttgaatgaacatataccaggttgatacgatcccacaaaatgaaataattacagcccatatatgccagctattgcttggaactctcctcctcgtcctggctgccttcactgcttgtccctgcaaacccccgtctctcatcggcagatgcagtaatgactggcatccagatatcagcagtgctgctaagaagagatttcacctctggatctgaggccatggcagatgatatcatcttgtccacgttatcaagccgtgatgatagtttgtccagctctgcagctatttcgagctcgtcaagatgcttaggtgcctgctctggtaccttggtgacttctaatcctaatgcttcgatcttagcacgcaactctacttcttcctggttgctcattgactccacctgctggagaaggtcggtgaggagctggaacagcgggacgtccggcttcgacccctctgccatcgagacccgcttgtttttctgctcgtagccttcggctttctgggtagaattcgcgccctgctcctgcacttctcacctcggctcgctggcgctgccgcgtttgtccggtccgggttcggctgct

SEQ ID NO: 45098 - DNA, 362 bp, Setaria italica
  Peptide Sequence Number=SeqID_111072
aattatgtcccagtttcgagtgcattcatttttcagttgagttgtttgagtccccaaagtaagtttgtacgaagtatgcatgttgcaaacatatccacatatagagtaagtgaataagtagggctattatgtaacccttggtgccaaaagggtggtctattttcgaagaaaaaggtgttaaatcccttggcacaacttagtagcctttgcaaatcaaagtatgacagtggactagataaagttgagagcgagacagaaccatgaaatacgcctgcagccgttcctgatgcaggttttttttctctccgacagttatgaggaacctgctctgcattccttgtgcaaaaaaattagttttgagg

SEQ ID NO: 45099 - DNA, 478 bp, Setaria italica
  Peptide Sequence Number=SeqID_111073
ttgaattgcaaaatacaattgttggaattctaaagaaggtcgacttcaacacggctacatatagtgacatcattaagatgctcgatgagcactacaagatagacttatcttcgaggaaagaagctatcaagctcatggtctatgatgagctgatgaagatatcggaagcagacgaggattaatatgtagatgaaggtgctgacaagatagaacaagagcatcaagcgaaataggatgaaggccgagaagctcgcgccctgatagttgtgacaattgtaagttactggcacagtcgatatcattgtttggtaatgtcccctgtttgggaatgtaggatgccgtacacctccaagatgatggcttaaactgcagtggcagccttcgttgattagttcgtgctagcctgaaactctgaactgttatggttgggacggaattcttttgtcctctgctgtaatatatgaccgatccgtcagtc

SEQ ID NO: 45100 - DNA, 756 bp, Setaria italica
  Peptide Sequence Number=SeqID_111074
aatggtcgttgtagtacttgatctactagtaacattttggtattacttccagttttgtcttatcatgtttgtttagcatgattcttatccgagctgatgttaagaacctcacacttgctttgttgttcgaattacccgtagctcattctggaagatgaaaaaggaattgcgtccccaaatactaacaaacctaccgattgaaggaattaccaagtagtttgatgacgagagtaaagaaagagcaacgcacacatagcagaaatgcagccacaaattgtgttggaagcgatctgagggcagtcagctcaaaatgaaatctgatggaagcttgaccgaaggctacgggcaggtgtttcaccatgagatgaggagagggtgaatacgaagccgcaggtaacaaggactttctcactgatctgcttaaaagcatatttggtggcctctgtgtcaggcggaaaggtaggcactagcttgattgctacggagatggagctccacgaagttgttcaatgtgacattggaagcacctgaggccttgctagatcagaattcagaactatttagtaagccgttaattggatccaaccgagctatttgcacgggtaacctcgcaattattttacaagacacagaaattttgaattgtattgtacatgacaaaagaaatttcgattgtatcgttgtgcacagattttttttaaagggcccttgacgttgtgcacagaataattaaaaaaaaaaaaacaaaaaaaaact

SEQ ID NO: 45101 - DNA, 677 bp, Setaria italica
  misc_feature (1)..(14): n is a, c, g, or t
  Peptide Sequence Number=SeqID_111075
nnnnnnnnnnnnnntttttttttttagctagtcaattccacagttggcactgaagaacatattacatacatcgtttcagggacatggattaaccgatgacgcatatatgcaacatgcgatgatcttagtctgctcttttctcccgtctccttatcttgcaaatttttttaatcaaagattatgccatcgttttccatttctgtcgactgctcgaagaataatgctctcctccaatgggcggccaggttcggattctcactcagcctcaggcggtggcctggtgggcatcgacggccttgggaacctttatctccagggacccctcgccgtcgtcgaagtaggcctccactttcctccactccgcgtcctctggcagctccacgcgccggacgaaaccatgctcccaccaccggccggcgcgccagtcccggccgtcggccggcggcacccgccacagcccgctgatgtcgatcaccttcatcgcgtccccgctcacctccacgtcgcatttcctgccacctggtatgtcagccctgaggtagtactcggcgtcggtctcggcccagtcgacggttgtcctggcggcgctgcgccggagcgcggcgagcagcacctcgggctcgaactcccacagcgggaacgcgtcggcgggtacgaaaaacttgaccgaacgaggg

SEQ ID NO: 45102 - DNA, 298 bp, Setaria italica
  Peptide Sequence Number=SeqID_111076
ggtagctcaagatcgacgacgacatcagggcctactccgcggacgtgatctcgaggacgtgcttcgggagcagctacgtgaaagggaaggagatcttcgcgatgatcagggagctgcagaagacggtgtccaagcccaacctgctggccgagatgaccggcctgagctctctcccgacgagggccaaccgggcggcgtggaggctcaaccggcaggtgagcaggctggtactggacgtcgtgcgggagagcgggaacgacgacaggaacctcctgagcgcgatgctccgcagcgcggc

SEQ ID NO: 45103 - DNA, 352 bp, Setaria italica
  Peptide Sequence Number=SeqID_111077
aagtttaaaaatgtaaagatacctaacattacgatcaactgtacatgtaggaagattatacaacaataacacattgaatgtcccaaggctgaggtcaacatacaaaaactgatcaggtcttatgtatcatgagcccttcagccattcccggaaatatgcttgcattttatctcgacttgccgcgttgccaacattaacagagcggattacctgaggtctcagaaacatcacaaaatctctaagctcagtgaaacttgagtgctcgctataaggcacaccatagattgttacgcttccattagagcttggttttattaggtcaagctgctttccagttgccttcagagtaagt

SEQ ID NO: 45104 - DNA, 583 bp, Setaria italica
  Peptide Sequence Number=SeqID_111078
atcaacaaaagcaactgattaactgggggcaggctttcccaaactacttcaataaattcaaattcgaatcattgtgcaaacgttatgctgtttgttacttttggagtcattggtgcatcttgagctgtgccgagtgcaacggtcaattcactgatagtagtattgagttctggactaaattgggcataagaatgacacagctgaactataattatttcttccattctaggattcattacaacctaggaaaatggaaagcactgtaactagcaaaggataggaactagattggaatgtaggagaaaaacaagaaacgaaataaagtaggaaaaatataggaatggcgtgtttggataatttgtagaggtacacagagaaatttagaggttggtatgtatttgagagagaaaaaagaagagcaggttacaatttcccaagcacaattaccatcttccttacacaaaggataggaaagaaactaggcacacatcttcctcttctacttacacggacttaactgggcaatttttcatattcatgttccaatttatttgcatgttatcacttattctgagactgccaa

SEQ ID NO: 45105 - DNA, 499 bp, Setaria italica
  Peptide Sequence Number=SeqID_111079
ttaacaaagggaacgaacaacggaacctaggaccaatcgcgaacctccttcttccaggagctgcgggagctcgggagctccttcgcgagggcgcccgagtgcagctggtccccgatcccgccgccggagctgcggggcgagtacgtccaccgcctcaccaccaacggcggcttcgtgtccttcggtagggtcgtcgtgtgggtgatttgttttgtgttgacggtttagattttgcgctgcgtgggccgtgtctgatgccgacgagttgccgacccggcccatgattccctgggccacccactacgcaggcgtcctgtcgcggcacgtgagggggaagcgggccgccaagaccgcgtggatcctgctcaacttccaggcctacgtcaagtaccacatcaagtgcacccggaggcacatccagagccggatgcgggagcggttggaggccctgacggaggtgatccacgacgccaggctacgagggaacgacgacaagagg

SEQ ID NO: 45106 - DNA, 1268 bp, Setaria italica
  Peptide Sequence Number=SeqID_111080
atcacaggttcgcggaggtcgtcgagccgcccagagaaggatacgtacctgacgctgaaactgaacttctccggcctgaaccgaccaaaaagatcgcgtgaaggccattaaccaggtgtcggctgctgcaatccgtggtgctgagctcgcagctcagggacatgctggggagcctggtcccgtccggcacgatgaggctcgtctacaaccaaagggatcccttcttcgtcagcaagacggccgagaggataaacgcggtcttcccgatgcggttcagggacgacacggacctggccatcgcgacctccttcttccaggagctgcgggagctcgggagctccttcgcgagggcgcccgagtgcagctggtccccgatcccgccgccggagctgcggggcgagtacgtccaccgcctcaccaccaacggcggcttcgtgtccttcggcgtcctgtcgcggcacgtgagggggaagcgggccgccaagaccgcgtggatcctgctcaacttccaggcctacgtcaagtaccacatcaagtgcacccggaggcacatccagagccggatgcgggagcggttggaggccctgacggaggtgatccacgacgccaggctacgagggaacgacgacaagaggaaatcacaagcggtggcgaagaagaggaggaacaacaagaggcggctgatcagcttcgcgaaggccagcaagaggctgcagaagggtttcagggccgtcctggacaagatcaagcggctgcggctgcggatcagggtgagaggcctggaccggctccggcggcagtgccggtgcttcgccgtgcccaagcttccaccgcgccggaaggagcacggataccacaagctaacagagcagtgaaatactataatccagggagagcacggttgaagaatgacggtggcgcatgaaagacaactggccaaatgctgtgcttttccacccccgatcggagcacgacattcttcggatgagaaggaggcaactgacaactgctcgacggggaagtgcagcgggcgtcgaattcgatgtgttgccatacggatagtcggatacacgtaccttcagaaggtgataggtgcaagatctttcatgtctgatccataccatgttttcctctttcctttttcttttgggcatttggcagaagagcctgtaatgtagctacaaaagcatttttctctctctctgttataagattgcttaatgaaaagggctttggaattttacgtactactaaaactaaaaaaaaaa

SEQ ID NO: 45107 - DNA, 503 bp, Setaria italica
  Peptide Sequence Number=SeqID_111081
cccaaagtcagagctagatcagtacttggaagaagccccgctcccacgcatcccagagtttgacattctgaagtggtggaagcttaatgccctcaagtacccaactctctcaaggatggcccgagatgtccttgccatcccagtctccacagtaggtcgcggctctgtattctcatcagctcgaagtgaagccaggatgcttgatgactacctgagttcattgcaccctgaaaccttggaggcactgttctgcgcaaaagactggctacagaattcccctcctgctccaaaaccacccagttccacatcggcgaaaaagtaaagacgaagagggcttcgaagtagctgatcgttgcatgtccaagtagcagggatctctataaggtggtggttattaggatgtttgtggtgcttatattgtaggttgtaactcggttatgcttaacaagttgttaagctgcatgcatgatctgtctcagcttgacggtgattaaatgccctta

SEQ ID NO: 45108 - DNA, 218 bp, Setaria italica
  Peptide Sequence Number=SeqID_111082
cggttctgagattatttctccgttgctgataacttgaatgtttattgctgatctaagcatgtgcacatttgctgctatgctgtagggcagtggaattttgctaggattattcagttgtagatgtaagatgtgtgcattgttctctccttgcaagagagaaatatgttcctttgtaacttctcttaagaagtaatcaaacattcattttattgattaag

SEQ ID NO: 45109 - DNA, 214 bp, Setaria italica
  Peptide Sequence Number=SeqID_111083
gttaattccttcgccatactcagctgccgccgccgccgccgtcaccgcgtcttcgctttgcgccgccgcgagcagagaggccgcgagagagaacccaggggcctgggagagacgagagcctcgcctgggaagcgttgctgctggcgccgccgcccctgacagttgcgcgagtgcaccagcccaggccgagacgccgccgtggcaggtgcactcg

SEQ ID NO: 45110 - DNA, 479 bp, Setaria italica
  Peptide Sequence Number=SeqID_111084
acgactaggggcgctcaacacgcacattgccaacatatccgtaaaactctgctggccgtgcatgatatgagcactctatctcctccaaaagcgggcatttttctgcaaccctaaccagtgacgtatccgaaatgtataagcatgcgatgagtcgaatgctcttcaaagaattggccctgctggcaatgtaatccaagagttcactagtaacaaattgctgagcccagaatgactccatacgtccaccggagcgatctatcgccacttttgccatggcacacgatgggtacctacgttcttcaagaagaccaatttgtggcgtgtcatgtccacaaagcgccatagttcgggtgtccttgcagccgccaaccatgagcggcacacaagacctgcgctcatcaggatctcaatggccccagcttcatgaagattgaggaaagagggtctagtgggagctgagaccaatccctcacaggtgt

SEQ ID NO: 45111 - DNA, 592 bp, Setaria italica
  Peptide Sequence Number=SeqID_111085
acggacgaagcggcgaggaggagggcgtcgtcggggcagggcgcgaagggggtgtaggacatgtagcggtggaggaggtccgggtgcgcggagcaggcggaggcgacgggggcgaggcgggagtagaggaggagctccggcggtggaggcggcggcggaggggacgaggagcggaggtggttcagctgcgatacgccggcgtggatggcgtccagctgccggatcagggccagctcctcctggtcgccgccctgctggtgctgctgctggaggaggagcggcggcacggtggcggcgcggagggagaggtggtagagggataccaggttggtggccaccaccgacagcagcagcagcacgttgagcctcacgccgaggttgaggccgccaccgcacggccagcctgctcctcctcctgtggctgtgcctgtggaggcggaggtcacccccgtcttcctcatcgccggcacgatgggcgggatctggaggtagattgctaccgcagtggagtgtggattgtgaaagtgtgaacggagaggagactgctggtgaccacttgacctgtgtctgctggagtatgagtagtatacac

SEQ ID NO: 45112 - DNA, 833 bp, Setaria italica
  Peptide Sequence Number=SeqID_111086
gcggcgtccgggttcagcacgcaccaccggcggggcaggtactcgacgcccctggccgggacgggcatcgccgggcggccgccgccgcggaggtcgagggggaacttgggccggccgtcggaggtgaagaggccccagtggcgctcgaagttgcccggcgccacgctcttggcgtcctcgtccatgagcccgaacaggtacacctcgatgcgggcgttcggccggagcggcgtgcccttcctcgctgcgaggcggcggagcagccccttgtagaaccgctccgcgagcgccgccgtggcgtgcttgtcgccgtccgtcggccaccccacctcgccgatcatcaccggcaggcggccgaacccgaccctcttcagcgccgagaccagcgtgtcgaagttggcgtcgaacacgttggtgtagttgacccggccgtccaccaccggcttcgccttgccggcgccggcgtcgtcgaagaaggcgtagtcgagcgggaagtcgtcgttcccgtacaggctgaggaacgggtagatgttgaccgtcagcggcgcgccactccggttcaggagccggaccatctccgtcatgacgcccgccacgtcggcgcggaacctccccgccgagggcaccggattccccggcggcgagtcgtagacgtcggcgttcacggggaccgtcgccttgaccgcgccgccgtggccggcctcgtcgagcgcgcgctggatgttcctcagcgccggcacggtgacgcggtcgaacgagccgttgtacgcgcggaggaacggctcgttgccgacggcgacgaaccggatgttgacgccgccgtcgaaggcgta

SEQ ID NO: 45113 - DNA, 393 bp, Setaria italica
  Peptide Sequence Number=SeqID_111087
atgataatcatgaagaaaacggacctccgcagctactggatgaacattaagtgaattttctaaattccaatacatggatagtcatagtggctttccaaaatgaaaaggctccacaagttctttaattgattgatgcctcaactatcctaagggaatttggttccacactttttctacacttgtggaagattgatatctacgtttaacttcaacgaaatctctaagataatcaatagaaatattcagaataagcatttaacagaagtcaagttgagctgaacatagttgcctccaagattatgagctaagctttttggagtgatggatgttgtcggtttatacaaggaaattgttctgactaccaatcatgcacgggagaaaagtctcaagttt

SEQ ID NO: 45114 - DNA, 338 bp, Setaria italica
  Peptide Sequence Number=SeqID_111088
atatatatatatatatatatatatatatatatatatatatatatatatatatatattataataagcattaagggaaaagaatactgatctcatgctaacaagagatctagcatattattaactcgatcgtttatgcagctggaatgtgctacagtgttagtaatcccagagtgcaggcgttattgaagggtcaggactaatgatccgtatgtaaaatgagtagattattatatacaaaaacatgatcaatgtactttgatctttcaatattcaaatgtaacaccctatctgtaagtatgaaaatttatgcaagaattgttattgtttgtttaaaaaaa

SEQ ID NO: 45115 - DNA, 469 bp, Setaria italica
  Peptide Sequence Number=SeqID_111089
tgcatgcaaaggaataaaactcgagtgattgaggcagctttgaacaatttacaagttgtactgctgcataactgatgttgcctaaggtgattttaggcaatcatgtggcaattgactaatcatcactacatcaagcatagatttagggttgtagccttggccttatacatattcagtgaactaaagtgatccacacagaacaaacaatatagtaaacagaaggagatgtgcatacagcatgatttacatttgctattgaaggaaaattttagtgaattgaaccaacaattcctgacacgacactaattaccagcgaattagcagtcagtgcatcaagaatataatattagaattttaattgcagtctccagcctgcacacacatattgcccgtgttttaaccaaagctgcagtcgtcagccaacaattgtttcccatagaggtgttgcgatcgcatgagacgcgatagg

SEQ ID NO: 45116 - DNA, 739 bp, Setaria italica
  Peptide Sequence Number=SeqID_111090
agaaggacaagaataccttgaagagaggcaccaacaagaattggagaatgaaagagcagctgctactgagaggactagaattattgaagagaagctccaaagacaattggataattaacgagaatgtgttcttgtgagtatgagaatgctcacagagaggctccaaagggagtccgaaattgccacgagtgctacaaaccgaagccggtccttggaggcagacaatgccagactttatgaagaactggaaaatggaagagcagacaaccaggctctaatttcagatattgtagagaaaagtgatgagcttgcgacactcaaatatcactgtgacatgtttgagtcagacaagagagatctagaaaatcaagttgaggatctgatgaaggaactggaatatgctaagaaagaacatgcaagatatgtccgtcaggtcttggatgcagcaagggcgattcctaacaacttggaggcaatccacactgacgctcagcactgaattgaggctggcacatcggacgttgcttgagcttctgctgatgtttcagattatttcttcctctggttgcatgttagtagctttgtatagtgctgtatccttctattcaattgtagcttaggttcttggatgcccctttccaagcctgtttggttctatctggtgtatcagaataatgtaaatgcaattctgcttgaaactgatgcaaagagccaaatgcatgcttgcagttgatgtttt

SEQ ID NO: 45117 - DNA, 185 bp, Setaria italica
  Peptide Sequence Number=SeqID_111091
agcatttgcgcattgatttggatagcttctggagcattgaccatatgccaagtttagtaaatatgaatttggctaaagaagattccatttcttgggcatgttttgtccgagtaaggaattaaagtggatcctggtaagatcaaggacataagtcgtcaatagctgttacaagtttcctcttatct

SEQ ID NO: 45118 - DNA, 366 bp, Setaria italica
  misc_feature (353)..(366): n is a, c, g, or t
  Peptide Sequence Number=SeqID_111092
tctgaattgaataatagtagtggcgtccagtgctctggtcaaattaaggtcctgtttgttttagcttttgctttctgaaagctggcttttggcttctcgtcctaaaatgttagctttccgaaagctgactttccgaaagctgtggtccgtttggcaacccagcttctctgagaatgagagtggctggaagagatgtacaatatctctgttaccgtacgtgtacgtagtgattgtatttgtttcgtgtacaattatttatagactttgttgacaatataattataataaattgcatgggtcattatccatgcatttataggtacacaaagtctataaataattataattatatnnnnnnnnnnnnnn

SEQ ID NO: 45119 - DNA, 1817 bp, Setaria italica
  Peptide Sequence Number=SeqID_111093
tcaggagcaaaacgcatgctacaaggtataacaagccacaaatgttacaaactaaatgataagaaactgcactactgagactgaaggcaaaaaatatgtacagtttcaagggacaaaattcgctaatcactcagccaaaaagaattggttggggaacttctttgacaccggataagttaactaatctgaaagaatctgttctagctcaggatcctctggtctgaccaacacatcatcgtccatttccatgtcaaacatctctttctctgcaggagcatcttcgtcgtcatcagattcgccaacctcttcggcagtataattgggaactgctggctcaccaatcgctttgcctcggtcactactgctatccaagacttgatcgtttcgaggtttgaccttgccatcagtcctttcacagatacaggtagaggggttctcatgaaactcacccctccccggcctcagctctttgggctctcccataaaccctttctggaccatgtgtacttttgaggagaatgcatcccatgacatgttccctctgttcaaaaacaaaggatagagccttttggcatttggtcggattgttctcttatgcccaaaatatctccttcgcccggccaagattttagccatgttgccattgttgttagccacaaaagcatcactttcatcgcagacaatgaaatcaagtgcagccatgcgagaagaatatttagagaatggtgccagttcctctttgctggatattgtttcttttgtgtggagattggggaagagagctttaagcggtgccagagtccttggacctccatatatctctccagaagctacataaatgtggacatccatactgtagcctagtgctctcaacaacagacccacctcttcaggagttagagggcatctaccttgccttcttcctttctctgggttaggatgcaagcctttccacctcttccttatagcaccaagttctctcctctccttttctccgccaccgtaatagcaccccgaaaaggcaagcatatcaggttcaaatctcaagtgaagagcaataaaatgcttgctcctctccctcattctttgtattagcttttcacccatctcttgtattggagcagtaaatctcaatgcatgatagttgactctgcatctcagcttctgcaagtcagtttgcaacctgtttgctaatctataatcgaatttcgtcaatcgtataacatgtttcttaagaagtgcaggcagcacacggttcaagtaacaccgctcagtacattttcgaggaacacgcattctgtgaggagcccgaagtttacctcctatctctggaagctctttcacaatctttacatcctttgatagggatgagatgaaccagttggcatcaaaaatttcagaaaaattgcttgaatctttccagaaggatgcctggtccagtttgggaacaacaagtgtggcatttaaaatgcgtgcagcaacaacagcatcaattatccctgttctctgttgattcagtcctccacttgtaacaatcatcaaatagcagtctggttgtgtagtgatatttgaatcaaggaacttgctgcttgagttgctgcacccataaaatttgctagcaagctttgaaccccaaaggccgtccctgacgttcgaaccattcgttggaacacggaaaatttcgcggcgctcggactcgtccgtgccgccgccgtcggagctgttcagcaaggcatgggctgagcggcggcggcgggaggaggcgagcacggggtggtccgagaccggcggcggggagacgtagagcagcgcgacgg

SEQ ID NO: 45120 - DNA, 1091 bp, Setaria italica
  Peptide Sequence Number=SeqID_111094
tcgtcattatattttctttcctctgccattgaccttgctcctccagcaattttgttgatccttgtcatctcctggttgtattcttccagtgcttttgctcttttttgtctagctcggtctctttctggtcttttggcgtctcgccttcaccttcttctcagtctcccattcagctatggtttcgatcatcttttcatactcctccctaactcttgcaagttttgccttctcccaatcatcagccttggatcccgtgccagtcactcctgctgtgccttctccattccgtctagaatgatatgatgtagctggcctgacggctgatggcactttctgaatcgcctgttcttgctcaaacttcttgctccctttcctatctgctgctttgttggaggatcctgaacccttctttacactcagagaagtttcaagcgtctttggtgtcaccttatgatctggagctatatcttcaggctttccaggtgctggtttcagcggcttccttacagatacgttaactggtccgtcgtcatcgtcttcaacgggctctttgccactgaaccatctagagattttgctgcctcctccaggttttttcatgcttcctgctctcttgaccggagaaagggcaggtggcaccgcctcgatgggtacaggcttcttctgagctgcaagcttctcttctcgagcagcaattgcgaatgttgctgctgcaattgtggctgcgaatgcagcgtcatattccccgccactactcatctcagctcttccaagagctgcgttttcttgcggtggtattgccgaagtctgtcttccaactttatttccctttcctactccagaaaaccgaactctcagcttcttcaagtcgccgtccatggcgcgcaaagtatttgtagagaagcccaatagcagctccaaggcacaacaagcagcttcagcactaagcgaaggactcgtatttaaaaactgctcgcttgcatacagagagaggtggtggcagagagggaagacacagagcaagcaaaacagttgtcgtggaggcaggaaaatctctagatggttcaacgggctctttgccactgaaccat

SEQ ID NO: 45121 - DNA, 350 bp, Setaria italica
  Peptide Sequence Number=SeqID_111095
acaggaaagccgtgatcgcgtttgcccgccatttcgggtgtgtgctgtgccggaagagggccgatcttcttgcggagaaacaggatgtcatgcaagctgctggagttgctcttgttttaattggaccagaagtatatgcagacccaactcactcatcatacgacgctcttgaatttgcatttgggttgttctcaacctttacaccagcggctggcctcaagataatacagttgtatagggaaggatacaggcaggactgggaattgtcattcgaaagaacaccaggacgaaaggggagtggtagtcaaggggacgtacttgttgcaggtccgtggtatcgacaccatctt

SEQ ID NO: 45122 - DNA, 777 bp, Setaria italica
  Peptide Sequence Number=SeqID_111096
cgcggaagctgcagggggtggaggtgttcgacctgagcggcaaggcggtgcccatcgttgatctgtggaaggacaggaaagccgtgatcgcgtttgcccgccatttcgggtgtgtgctgtgccggaagagggccgatcttcttgcggagaaacaggatgtcatgcaagctgctggagttgctcttgttttaattggaccaggtagtgttgaacaggcaaatgcattttgtgagcaaaccaaattcaaaggagaagtatatgcagacccaactcactcatcatacgacgctcttgaatttgcatttgggttgttctcaacctttacaccagcggctggcctcaagataatacagttgtatagggaaggatacaggcaggactgggaattgtcattcgaaaagaacaccaggacgaaagggggatggtatcaagggggactacttgttgcaggtcctggtatcgacaccatcttgtacatccacaaggacaaagaagctggagatgaccctgacatgcaggatgtgttaagaacttgttgttcctagaaaattagtgtccccacacgcacaccatatcttatactgctagttatagtacaaatcaggttgtaacttgtaagtagctctcaatcttcagcgatccctggtcagtgtgcacggacgaacttctctgtccggcgcaagccaagcgacgtatatatcatggtttgtaaaatgttgtatatctgtctgtctactacacgaaccagtagcatctggtatattcattctcctttcc

SEQ ID NO: 45123 - DNA, 233 bp, Setaria italica
  Peptide Sequence Number=SeqID_111097
taatcaattcatcacagcaaccatgcagaagaaaaatcaagtatgaaaaaaaaataggtgcatgcaatcctgtcattatgcaactattcagttgacagacacaggaaaatgaaagggatgcagacaaatatatatgcaagagcacttcaaattccatatttcaggctgccagtaattgcaagttgcatgaaaatatatacaagtgttatctctgattaattttagaaagtagg

SEQ ID NO: 45124 - DNA, 291 bp, Setaria italica
  Peptide Sequence Number=SeqID_111098
cttcagcgagtgcggcagcgacgacctctccttcacgcccgccgccgccgcgggcatccaccgcctgctgctgtcgtgcgcggcggaggcgtcggaggacgccatctcgtcgctcgtggccgagctggagtcgccgtcgccgtcgctggactcgctccggcgcgcggccatggagctccggctgctggccaagcacaacccggacaaccgggtccgcatcgccgcggcgggggcgtgcggccgctcgtcaagctgctgtcgcacgcggacccgctgctgcaggagcacggc

SEQ ID NO: 45125 - DNA, 849 bp, Setaria italica
  Peptide Sequence Number=SeqID_111099
tcaggcagcagtgcatgctggttgaagcccaaggcgcttctctccagcagcaacaagtttctctacgcgtgcgaatctggacacgggtagatgggtaaccagaaaggtgagacagaacaggagccggttaatccttcaccacgtcgccagggccagcataacacaagttaccacagaggtggcggggcacataggggaaggggtggttatgatgctgggaggccaagccatggcacaaatgcggaacggcggaggggtggcagtcatcttgaataccagccagtcggatcccacagtaaagctacagacttccagcagaacccgagtgttgaagaacgaaccgaggtgcctcccgcttctggtccggctttcagggagcggggccacaacagggggccacgtccagcaggccacttcgtcaggcgaaacccagctcctgcgccagctgctgactcttaccaagatgaataatcttccaccgctcccacgactgctgagctgcaggaagtcgctctcttctgatatctcaacaatcaggtaggtgaatgtggtatttttgtgacctgtacagggatcatgtcctccaatctccatcccgccatgtctaacatgttctggggctggcaggttggacgtgctcgggctggcggcagatgctcgtcgtctacggtggtgagcagtagtagtaggatcatgtaatgataatagtctttgttccccagggccgttgggccctcgcgtgtggttgtcaattgttccgtaggacatcccctttggtgagatgcgatgttggaatgtgtactgacggagttgagttgtgtttggaactgggtttaaatgttgttagct

SEQ ID NO: 45126 - DNA, 572 bp, Setaria italica
  Peptide Sequence Number=SeqID_111100
gggatcatcatgtggtgcaacagctgttgctgtgtccacaggaacctcagcatttttcttggcattcccagtgcttatcgaaacgattggcttctcgctagaatttttctcctctgaaacaacatgccttttcctgtaaccctgcttaggctttggaacgctggtgtgatgttactgcatctgacaatcttattgttcttccacctcctaatgatcccaagcatactgtggttcatgtacagccccagactactgcactatcacatacttcagatggtggcaaagaccctgctgctcattccacctcatcctcagtcaggaacacacagatcaacatgaatcatgttgggcagaagagtatctcacagtctcatgacaccagcgttccaaagcctaagcagggttacaggaaaaggcatgttgtttcagaggagaaaaattctagcgagaagccaatcgtttcgataagcactgggaatgccaagaaaaatgctgaaggttacctagtaggaacaacaagacaaacaagactagttagacaaccaacaattagtaattagtaattaccccta

SEQ ID NO: 45127 - DNA, 3256 bp, Setaria italica
  Peptide Sequence Number=SeqID_111101
gatcagcaacctgtcattaagaagaatacagctttagaagaagtttagaaacaaacgaacgacaaagccagaaatgttgatgcacgtaatgttccagaaccagcttcttccaaggaattcaagaaacagcaaaaaagcactgatatttcatctactgctgtcattactggagcttgcacttctgaccgggtgacttctgtttctcatatctctcctgtggtgcagagactaccaaatgtgcctagcgagggtgcagttgttggaccggcacactcacagttaactgaatttagcaaagctggaaagctgggtgattcaattaatgatcgtgcacataggagaggtgattctttaagaaacagtcaccatggtccttctaaagacagactagctaataagttagcgagtcatggaaggggagaaagttccactgctgattcattaccagtagctgatctgaggaataacattcagcatggccaaccagctgagagtgcttcacagctgcaacctgtgatcttacctgatgatatgccagcttcacttgattatgagtcccagcgtgcaaaaatgaaggagttggctgcagaacgtgcaaaaaagttgaaagctgaggaggaggaacggattaagaaccaaaaggcaaaagctctcgcgaaattggaagaactgaacagacgatcatcagttcttcagaagaaatcaaatgatacaaaagtagaaactgatgatgcgcatgatgataagcaaaaggctggacctgatatgactgctaaacttgccacttcagttgctgaaccatgtgatgttactgcatctgacaatcttattgttcttccacctcctaatgatcccaagcatactgtggttcatgtacagccccagactactgcactatcacatacttcagatggtggcaaagaccctgctgctcattccacctcatcctcagtcaggaacacacagatcaacatgaatcatgttgggcagaagagtatctcacagtctcatgacaccagcgttccaaagcctaagcagggttacaggaaaaggcatgttgtttcagaggagaaaaattctagcgagaagccaatcgtttcgataagcactgggaatgccaagaaaaatgctgaggttcctgtggacacagcaacagctgttgcaccacatgatgatcccccagctcagaacaagaagggtgcccggcatttgagaaataagaaaaaggtggatgatgctccagttacttctaaacatccacctacagtgtttaatgagcagaatacaatgaaagtccctagtgagccaaagacacatactggtggtgtgatcatcagtagctctatagttcccactgaaggtactattgtaactgtgggaagtataactgtgggtggaatatcacttgcatctctaaatcagaatcgtgttaaatcaccagatggaccacataatacagaaagtagccgaccaagacctcagcaagcaaaaagatccggaaaacatcagcatggtgttcgggctgttgaaaagccacttgggaatgaaggtgtcttgtgggcaccaattaagccaccagtgcagaatgagcagtctgatggagccatgcggaatgcagcagcagctgaccccactgctgggaagacctccaatgatggggagaatgttactagaacaaagagggctgaaatggaaagatatgttcctaagcctatgtccaaagagctgcaacagcagaatctgggtcatgataaggaagcaatcgataactccagtgctgctaaattagatgctgcagccgaacccaagaaattggaggacaagaaaactagcaaggggcatgggaagtctaatccttcttggcgcagaaggaatactgatgagtcatctttggtggtaccaaattctattgagcaagcagacaactctcatgaatcaaaggaagttcagaagtccaccaatcagaatcagccagttgaacctggcaagcaagaagataagcagttaaaatccaaggcagatgctgctgctgagagcaactcagctcgagctcaaacagttcccttatctgtcaatgctgtaaaagaacatagtgcagctaacaggcaaagacgacagcatgttaaggctcaaagaaacgaagcaagtagctactcaaatgagagcaaagatagagagggcaggactgactttgtctatcaatcaacaaccccagccatggattcaaactcatccgaacacaggagcatgccaagatctgatgtgaaaagcagcgggtcagtttcacattctagaacgcactggaagcctaaatccaactcccatcctcagaacagctcagatggcaacaatgctgttgaagggcaagtgggtacccatggagctagggttgaggtgaacagcttcaaaggacctgatagttctacctgtcaagacagccgcagtagtaaacctacagaaaggaatgatggcatcgatgagaagttcacacacagtgaacaggagaatctgacacgggtagatggtaaccagaaaggtgagacagaacaggagccggttaatccttcaccacgtcgccagggccagcataacacaaggtaccacagaggtggcggggcacataggggaaggggtggttatgatgctgggaggccaagccatggcacaaatgcggaacggcggaggggtggcagtcatcttgaataccagccagtcggatcccacagtaaagctacagacttccagcagaacccgagtgttgaagaacgaaccgaggtgcctcccgcttctggtccggctttcagggagcggggccacaacagggggccacgtccagcaggccacttcgtcaggcgaaacccagctcctgcgccagctgctgactcttaccaagatgaataatcttccaccgctcccacgactgctgagctgcaggaagtcgctctcttctgatatctcaacaatcaggttggacgtgctcgggctggcggcagatgctcgtcgtctacggtggtgagcagtagtagtaggatcatgtaatgataatagtctttgttccccagggccgttgggccctcgcgtgtggttgtcaattgttccgtaggacatcccctttggtgagatgcgatgttggaatgtgtactgacggagttgagttgtgtttgggaactgggtttaaatgttgttagctcgtgatgctaatgggaacagaaagtgttcgtttttgctaaaaaaaaaaaaaaaaaaaaaaaaaaaa

SEQ ID NO: 45128 - DNA, 244 bp, Setaria italica
  Peptide Sequence Number=SeqID_111102
ccagacgcggtcaatgatccagtgagactccagttactgaactgttttttcagaccaccctctgcaatcaataaaatgattgcacaaataacctatacagatgcaaagaaaatcagaagcacccaggtgaagaacatgtcatattttcatattgagcacaacaaaatctagtaccagacctttgctccttcagtggcaagaactagtgaggtcactatagtatcttggcggacgaagcgcttgg

SEQ ID NO: 45129 - DNA, 1353 bp, Setaria italica
  misc_feature (1)..(26): n is a, c, g, or t
  Peptide Sequence Number=SeqID_111103
nnnnnnnnnnnnnnnnnnnnnnnnnngtcaagctaaatatcaactgtctgctgaaattgattccaggctagcgccctactagtttaattctatacaaatcagtagataaatgatacatagctccatgaatagacaactcttcaagagtcacagttgacccacttgacagtgcaaattccatacacttgtggatgaaaatgaggttagcgttgcgtcccgctgatggaaactttcccttctcgacaagtatgcttatcaatctttcttcttcctatcagcatatggatacttctggtaaatgaatatgcttgtcatgacaagtggtagtgccatcaggcagtagtgtgatggcggcttcccatcaaatataaattgtagcagtgcagttacaaggagggctgatactataacaaaaccctttctaacaccacccgcgtaagttgtgacaagaccaacaagaattccacccacagcattcattaagaccggtaccgtggtccacaaagtccattcgtggaaaaaaccatatttcctgatggcttctccatctggtgatcgataggtgcttgctaacaagcacaggcttccaataaaggacatctctatagtcatcatataagacgtatgctttttaacctgggatgcccactgacacagtgaagaggccaacccagacagcattgatgcgactgtaacaggaatgatcccgtagagcaagacataatcagagctaccaccctttgaacctttgctgctactctccccgacacttagaagaacagcagcactaattaagagggttaatgctaaaatttgcttggatgattgcttttgccccaaaataagatatgtgaaaaatgccgtccataaaagcttggtctggttaagaattgagaaggtcaaggaatccaaattcttgtatgatatttgcaacagactattctgcaatgcatatatggcagcaggcagtccagacgcggtcaatgatccagtgagactccagttactgaactgttttttcagaccaccctctgcaatcaataaaatgattgcacaaataacctttgctccttcagtggcaagaactagtgaggtcactatagtatcttggcggacgaagcgcttggatatgaggggctgggcgccgtactgcagggtgaggagcgtgaggtagagcgccaccttgcgccggctcggcaccgccgccgccgccggggtggacgacgagcccatccggtctccgccgcgctcgctcacttccgatcaaggcaccaaaatgcgcccgaccgccggcgatccgcccctgctctgtcctttccttaccgagcccgggtttactcgtctctcccttgg

SEQ ID NO: 45130 - DNA, 856 bp, Setaria italica
  Peptide Sequence Number=SeqID_111104
caacttgctttaaagttaacttagagtcaaccattggagacgtcatccataggccctcactccctccacccctgcatgtgttgtggattttattgatgtctacgcgacaagtaaaagagaaccatgggagtaaaactaatattttcttttgaataatctccggctaactaaacgtctttaatatttatttcttgatgtagagatgatattttgtcattgactgattatgacatgactaaaagtgtctatattgaaatatgattcaaattctactctcttcaaggacgtggaaggaccagagtcatatctttagtgaatttgtttctttattagactagtgctcctttgccagccatatatacacatgaaaaagtagacaactcatatcccatgtggttgtactctcagtaatatagtgaagatctccgcatcgcgtcgtggcctttttcgtttctatgtaaaaattcgtgtctttgttgacggtttctatgtaaaaatccgtatctttgttgacggctgttagcgcgctagtttgaactgcaagcgcacggatcagttgtagattttcctttagagtattcccccaaggtttatcaatccatgtaaacaaggtcacatgatttagactaaataagcatcgaaaaatatgattctggttgcaaaatgattgtgaaaagacatggatagataagaagcatgagcagatgtgagtaagaggtaactcatctagagcaaagcctaactatgcatatgttatagttctagctatatggcaagcaaacacatgattctcattcaaaacttctttaaaccaaccaattactttcggttccgtaacttaccttaaaaaccccta

SEQ ID NO: 45131 - DNA, 280 bp, Setaria italica
  Peptide Sequence Number=SeqID_111105
tgcggcagtggagaagcagacttctaagtctattcctaaacaatcaggacattgtaaattgcatgttaccatggcaaaaggtttttaactttgctaagttgaatttgcattttatgagttgggaccaccatttgcttctattgacatggcaatgtgataatcgcaatttagaaattagaaatatcatttgaacaatttagaatcatatgttttattagttagaactatttgaatctcaatttatgtgcagaaaggcaaatagaacctgagtattgtttgt

SEQ ID NO: 45132 - DNA, 966 bp, Setaria italica
  Peptide Sequence Number=SeqID_111106
tacttacttattctatttcatcatctccatcacccacacgataaacacgatggcctcctcttcctcctccaagcttctcctcatcacggccctctttgcactgacctcatggcaggctgttgcctttgatcctagccctctccaagacttctgtgtcgctgacctgaaatctcctgtgcgtgttaatgggtttccttgcaaggacccaatggccgtcaccccagacgacttcttcaacgcagccaggctcgaccagccgcggaacaccatgaacaagttcgggtccgtcgtcaccaacatcaacgtcacgcagttcccgggcctcaacaccctcggcatatcgtacgcgcgcatcgactacgcgcccctgggcgtcaacacgccgcacctccaccctcgcgccaccgagctcctcaccgtgctcgaggggacgctctacctcggtttcgtcacctccaacccgaacaggctcttctcgaaggtggtcaaaaaaggtgatgtgttcgtgtttcccaaggcgatgatccacttccagatgaacctggaccatgagaagcctgccgcagcgctgtcgtcccttagcagccagaaccctggggttattaccattgctagtgcggtctttggatcgaagccaccgatctcggatgatgttttggccaaggcgttccaggtggagaagaaacttattgattggctccagaatcagttctgggagaataacaactactaatgatccttgatcattggccaagtcgttgcaccgtatagtatagtacctgtgccagagttgtgtgatgcaccggtacatacacaatttactatttcaatgtaatacagcatgcgaaataactggcgtgtgggtaccaggggagccgtggtgtgtaaggttctatggtgtgcttgattgaaaaataaagtatatggaatatatttacttgtttgacgtttaaaaaaaaaaaaaaa

SEQ ID NO: 45133 - DNA, 407 bp, Setaria italica
  misc_feature (299)..(299): n is a, c, g, or t
  Peptide Sequence Number=SeqID_111107
gtcatctcttcaacaacatagacgtgcatccatataactcaaatcattaggcgatcacaagaaacagtcaagctaggggcacctgtttcttatcgccttttctcccagctctgggcaactagttcagactatctgctacaatttggtcccccacataattggtaaacaaacagagagtcacttattcacaagccagcttcgtgccaaagctggtgaggcagatggcaaacgcctggaaggctgacagaggctgccggtagtccatcgtgaacgcatcatcctctatcttgccaaaccgngagtcacgttattcacaagccagctcgtcgccacagctggctccggtggcccatggggcgttggagatgaggagacggtgatcctgcagtttggcaagatagaggatg

SEQ ID NO: 45134 - DNA, 705 bp, Setaria italica
  Peptide Sequence Number=SeqID_111108
gaacctggataatgcatatgcatagacaaaaataactaccagaaacaaagagatgaagtgttaatttagtaaattatttgaacaataaatcaatgacagaagtaccagcaatggaaacaaggcacatgacaaattctatggctctatgcaacagagacctcagcatatagtcaaaagatgaacatttaacctagcgggcatgcataataagcaaatcaggcaatcaatttggaaaaactagattctgaaatgataagaccttaccttaactttccaacatatgaagtgcttcctgggtgcagatcatcatagtcataagagatgatatattctgtatgtgctccttgtctgaaccttcgagcggccaaaagaaacttccctttatccgttagggcctgtgttaagctgaggtaaagggaaaaggttgagttctttttgtccctcctgataaagcagtgcattggtgcatcccttggtccaggctgtgcaaaagaaaaggaaaatataggcatccattaaatcaatatgcagaaagcccaagcgaagaagtaagcttttaggtagtatcatattgttatttactgaccagaacaaaacccagctatcccataggaacataaagaaattccacatttgtgccaacttctccactatgatcatactttattagcactagccaccaaagaaatatagtgctatgtagcc

SEQ ID NO: 45135 - DNA, 350 bp, Setaria italica
  Peptide Sequence Number=SeqID_111109
ctacttcgtaattgcctcctgaaacctgtgggcttatttgcttgcttgtaaagcggcgactagatcggctcctcgagggtttagcaccattatatggtgcctggctatcatagatgatgaattttgtccccaggaaatcagatctacaagcagaaggcacacgatcaaattagcattcttgcaagcctttacaacaagaagaatataagaaaactcccataaagtgccaaattataactctattagtataacagcagatgctggaacaaatgcatttcaaagtggtaggaagtctggtgtgtctcctatctccatagaggttagggctagtgtttgtaggattgagaaag

SEQ ID NO: 45136 - DNA, 1288 bp, Setaria italica
  Peptide Sequence Number=SeqID_111110
tagacaacgaagctggcttgtgaataagtgactctcggtttgtttaccaattatgtgggggaccaaattgtagcagatagtctgaactagttgcccagagctgggagaaaaggcgataagaaacaggtgcccctagcttgactgtttcttgtgatcgcctaatgatgtaagtttaagtgtttaacatcacattggatcggaataaggcattatgagtaacctcaccaagaaagggagtgccatttacaacaataagccatcgtcatctcttcaacaacatagacgtgcatccatataactcaaatcattaggcgatcacaagaaacagtcaagctaggggcacctgtttcttatcgccttttctcccagctctgggcaactagttcagactatctgctacaatttggtcccccacataattggtaaacaaaccgagagtcacttattcacaagccagcttcgtgccaaagctggtgaggcagatggcaaacgcctggaaggctgacagaggctgccggtagtccatcgtgaacgcatcatcctctatcttgccaaactgcaggatcaccgtctcctcatctccaacgccccatgggccaccggagccagctgtggcgacgagctggaagttcttcacagaggcgacggtcacccggccatggaaatttaagcaccagcattgcagatgctcgtgccatcgtggagctttgttctttagatctaaggaacacggagcgggtgttttctccttggaaggatctgatgccgtgtcctgacctacagggcactggatactgcactgcattcgtcttggtcctcttgatttcaggaagttaaacttatatgtcacctgtcctacttcgtaattgcctcctgaaacctgtgggcttatttgcttgcttgtaaagcggcgactagatcggctcctcgagggtttagcaccattatatggtgcctggctatcatagatgatgaattttgtccccaggaaatcagatcttaactttccaacatatgaagtgcttcctgggtgcagatcatcatagtcataagagatgatatattctgtatgtgctccttgtctgaaccttcgagcggccaaaagaaacttccctttatccgttagggcctgtgttaagctgaggtaaagggaaaaggttgagttctttttgtccctcctgataaagcagtgcattggtgcatcccttggtccaggctgcttgagcgacgacgggaaggtgatcctcccgccctcgagcggcggccgcacgaccgagaacgcggcgtc

SEQ ID NO: 45137 - DNA, 1810 bp, Setaria italica
  misc_feature (1788)..(1810): n is a, c, g, or t
  Peptide Sequence Number=SeqID_111111
tttctttaatttccataaatactgtctgttgcatatttactgtttgtaattttcttctctctttttcagctttaccaatatcatcattgttccccttcttgtattttatgataagagacttgaatgttgctaaaagaacagaagatatcggcttctatgctggtttcctaggtgcttcatttatgtttgctagatgcttgacttcaacagcttggggaatagcggcagaccgtattgggagaaaaccagttgttatattcggcattttctccgtggttgtgttcaatactttgtttgggcttagtgtcacctattggatggcaattgctacacgtatttttgcttggtgctttaaatggtctacttggaccaattaaggcttatgccattgaagtttgccgaccagaacatgaagctctagcattatcacttgtcagcacagcatggggaataggtctcatcattggtcctgctctaggaggctaccttgcactgcctgcagaaaattttccaaatgtcttttcacctgaatcactctttggaaggttcccgtatttcttaccatgcttatgcacgtcagtctttgctgctgctgttctcataagctgcatatggatgccggagactttgcacaagcataaaggtagtgaaaatgaaaaccagagcattgaagctttggaggctcatctgattgatccaaaagaaaaggttgaagaaagtggaagtttgaataccaagaagagcttattcaagaattggccattgatgtcatcaatagttatctattgcatcttctccttccatgacatggcttacacagaggtgttctctctatgggctgaaagtgacaagaagtatggtggactcagcttatcgtccgaggatgtaggtcaagtgcttgcagttacaggtgccagtcttcttgtatatcaactgttcctgtaccctcgtatcaataaagttcttgggcctatcaattcttctcggattgcagctatcctgtgcatacctatcctctttgcctacccctatatgacatacctgtcagaacctggattatcaatcgttctcaatgttgcatcagtgataaaaaataatcttgctgttaccatcattacgggcactttcatccttcaaaataatgctgtgcctcaggaccaaagaggagctgcaaatggattgtccatgacaggaatgtcgtttttcaaggcagttgctccagcaggagctggtattgtgttctcgtgggcacagaaacggcagcatggtttcttctttccaggtgatcagatggtgttctttcttctgaatgtgattgagttactcggacttattctcacattcaaaccctttttggctgtgccagagcaatataatagaaattaaaaactcaatttgtggaagtttaggaatattcaaatagagtcctgcacccatgaggtaaagggcataatgcccttccaccaggtggaaactgagagaggaaaatggaaaagtcacgcacccgtgaggtaaagggcataatgcccttccaccaggaggaacctgaaagaggaaaatggagatttttgcgtgtaactgtaagtgctattatgtaactgcagcattttagtggaggaaatgcataattggtaaatggcggccaatcgattgcttgcttttgattagacaggcatttgtgccgagttgctacactgtaagtagcaataacgtaaggtacagcaactccgaattattgttggaaatgaaattagtagacaattctaccctggtaaggaggttaaaaannnnnnnnnnnnnnnnnnnnnnn

SEQ ID NO: 45138 - DNA, 756 bp, Setaria italica
  Peptide Sequence Number=SeqID_111112
gggaccacgcgcggccctcgccccgtcgggcgccgtcgtcggcctcctcagaaggttactaccgacagggcggtggcgcgtacgaccgctcctaccctgatgagccgccgctaggctacacgccctcgcgctcagaccggtactgggtggaagacgacggcgggggatacaagagcttcggccggtatggtggtggaggcggcggccggagggacggccgtgaggtgaggggttcttaccgaaggtccccgttcaggggctatggaagtgacttctccagaaaccatccggagcagccccctccgccaccgccgaggaggtctccgttgaggtcagtcgctgttccgatctgctatgaccctccgggcaatagagttgacaggggggatagggacaacctcccacgggtgacaccatggcggaggagggagagcagatctgaggctgcggatgccgctggggctggacctgtgtctcttggccagaccactcgaccggcctcctcagaaaaggaggcttcagctcagcctccagctggttcagctcctcttggaactgaggatgaggcgccaaggaagaaggctcgacttggatgggggcaaggtttggccaagtatgagaagcagaaggtgcacggccctgcagatcctgctgaagctgttgctgatgggagcccagctgaggctgaacagaagactgcttttcctgtgcctgtgctgcctgcacctcctgcttctgcgcctgcacctgacgcct

SEQ ID NO: 45139 - DNA, 888 bp, Setaria italica
  Peptide Sequence Number=SeqID_111113
aatagttaactagtttttaacgctgcagaattgctgccatggagctagagaaggagattggttactagtgctcttccatggctccgggaaatacatgtttcaaaatgtttgttcactacaaaaattaagagcacagttattaatagcaaacaacgttttcactcccttcctctaattaaatacactgaaagagaaatggcatgccctttgtttcaaatatatattcttcatttgtgagtagcacccacacaactctctcaagatattagtcatttcactttaccattctgatggtttcatgcgtgttccatagtacaagtgctcatgaagctagtgtagtgtgatctaatagagatgtggatggtcatctttgcataatgtttctttcttggaccttatgcttccttgcttagttggcacagtgtaaggttgcaaatggtcctatgcatggaaacgatgatttttgaaaaaatatatagaattattagtggttcggtatcattaatacagttgaggttgtagctaaagcgcctcgaagttggcaagtacattccctcgccgtgcggttttgtaatagatcatgaggataattccgactgtgatgaagcccgtgggattgcaacaatgcatgggctacgctccctgaagatttatcacaataagctcaacaacaaagcactagctgccattcttgacaactgccctcacctggagtcccttgatctacaatggcgcttcaacattttcgtggatggtgccatgcgagccaagtatgctggcatcaagaaggtggtgcagcctgattttgaccaggtaatctcatgggctatgacccaggtgtgatggctacgagcgctgggccgagagccctccctcgtcggatcagga

SEQ ID NO: 45140 - DNA, 1215 bp, Setaria italica
  Peptide Sequence Number=SeqID_111114
atcgcgggggccggcgccaggagcgtcttcgcggtcgactacgtgccgcgctggggcctcgagtccatatgcggccgccgccccgagatggaggacgccgccatcgtgctgccgcggttcgtcgacgtcccgctctggatggtcgcgggcgacgcgccggtggacggcctcgaccgggcctccttccgccttcccgctcacttcttcggcgtctacgacggccacggtggcgtccaggttgccaattactgccgcgagagaatccactccgtactgatagaggagctcagtaaggcagaggaatcagtgtctggcgctgacttaagtggcctggagtccaagaagcagtgggagaaggcctttgtggactgcttcagccgggttgattcagaggtgggaggaaatgcaacaaccgctggcaagcctgtgggtccagacacggtggggtcaacagcggtggtcgcagttgtctgctcatcacacataattgttgcaaattgcggtgactcacgagcagtgctctgccggggcaagcagcccttggcgctgtcggtggaccataaaccaaacagggaagatgagtatgcgaggattgaggcgcagggtggcaaggtcatccagtggaacggctatcgggttctcggtgttcttgccatgtcccgatcaattggggaccgatacctgaagccatatataatcccagtccctgaggtcacaattgtcgcccgtgcaaaagaggacgagtgccttattcttgcaagtgatggcctctgggatgtaatgtccaatgaagaggtatgcgacgctgctcgcaagcggatactgctatggcacaagaagaatgcagatgcctcatcatcagcccagagaagcggtgattctccagatcaagcagctcaagcagctgccgaatacttgtcgaagctggctctccagaaggggagcaaggacaacataaccgtcgtcgtagttgacctcaagtcacataggaagttcaagagcaaaacataaaccatggattcaggaagacatggacaataacaatactagttactaggacgctagaaatgtggaggaaaagatcatgtttagtctgctgcacaggctcattggttagcatttgtccatttcgacaaccatataggctgccacgttaaagggtacaggttcatacacaagtctaatctggttggggattgggctgatcaagaaagg

SEQ ID NO: 45141 - DNA, 442 bp, Setaria italica
  Peptide Sequence Number=SeqID_111115
tatgagcagcatatatatagaccaaacttaataaggatgaactatgagaaaatgattgttgagtaaaccacaatatctggcctaactcaactgcccattttctcgaattggtctagcagggaacaagttcaagtggcaataacataatgacaagttgtatgcctatttagacatgtcctgcacatggtcaaactacaaatattgcataataaagaaacaaaccacatgcaagagatcattttccttactccctacaagagtgcaagtacagcagtagaaaaccattcaaatgctgtacatactttgcaaggctagcaatatcaacatttagagaatggcacaccagagaacaaatgtagtcacatgagaggaaaaatgattgttggagaaaacagaataagctaaaaacccaaactgcccaattttccttcagttaatctag

SEQ ID NO: 45142 - DNA, 484 bp, Setaria italica
  Peptide Sequence Number=SeqID_111116
gccatccatcaccattcccgaactgaggggcaagcttacagtgtcaagaacagtcaccaatgttggctcagtcatgtcaaagtacagagctcacgtggaacctccgccaggggtggatgtggccgtcagcccctcactcctgaccttcaactcgactgtgagaaggttaacgttcaaggtgacgttccaggccaaactgaaggtgcaagggaggtacaccttcggtagcctgacatgggaggatggcgcccacacggtgaggatccctcttgtggttcggacgatgatcagcaagttctacgtcgatgcataagctagtgtgcgtgcgtgtgtgttaccattcgaccaccaccggtgatggtgagacgaacaagatagaacctgctaattctcccgatcctaatggcattggtgattggttgggttcctgcttgactagaattcagctactgattgagatgaataaatcaataaaatgctcaga

SEQ ID NO: 45143 - DNA, 501 bp, Setaria italica
  misc_feature (325)..(325): n is a, c, g, or t
  Peptide Sequence Number=SeqID_111117
aatccaatagctctgatgtagggggagtccgggtgcttgagcaggccgtgcatctacaagagattcatccccagtccgaagaacattaccttccaaacaggaaaagaaagaagttatgatggtgaccgtgcaagatcaccaccaaggaagcgccgaagtaggagccgtgagcgtgatcatgattctgagagggaccgttcagatcgtgatcgtggcaggtacaaggatagggactatgatcgacgagctcgtgatcacagtgaccgggaccatcatcgatcaagttattcagatagggatggtgagaggcgaggccgtgaaaagngggacagggattctgacagaagtggacgttcaagcacccgcaggagcaggagcaggagtccagtccgtggcagaactgaaggtgacaaacatacgactactagcccatttgggattctggaactgaggaggtaatccgactgggaggcgcaaggtggaggtgaatctcattctcat

SEQ ID NO: 45144 - DNA, 857 bp, Setaria italica
  Peptide Sequence Number=SeqID_111118
gccggctcacgcctcccccgccgcagcagcaccgcatcgctcccgctacccctcctccgccttctgcctcctctacaagttcttcaccatgaagctcaccgtcaaccagatgcacggcctgctcaagcacccggactccccctacatcagagctattggatttctctacctgcgatatgttgctgaaccaaagacactgtgggcttggtatgaaccctacatcaaggatgatgaggaattttcccctggatcaaatggtaaaatgactacaatgggtgtttacgtgcgtgatctcctccttggtcaggtatatctcttgaacttatttgacatttctgccatataacaaaatggtattctaagctgctatcagtgtcctttagttaccaatttacatatgagggcggacatcattaaccatattattttctgaacctaagcgcaattagtcttccttgaatcactcacctgttgatttggcatactgaggggaaatttcaattgtggagttgcttttaagaggagacatcatctcttccgccagtaacatcactgtataagtactatttcgacagtcttcttccacgagtgcctctcccaattctgcggcaggtcactagccatcttgagaagctgaagcttccaacaaagcagtcaggaatgacaggggattccaatagacatgaatcaaacgatactgcccgaaggcctccttctgtaaaggcttctttgtctgtctcttttggtcagcgtgctccacaccgtgcatctacaagagattcatccccagtccgaagaacattaccttccaaacaggaaaaaagaaagaagttaatgatggtgaccgtgcaagatca

SEQ ID NO: 45145 - DNA, 876 bp, Setaria italica
  Peptide Sequence Number=SeqID_111119
ggtctcctccgcctctcgtccaggttctcctcccccaaatcctccgaatccaaagcgattcctccgagccgccgccgccccgatcgcgccgccgaggcggcgtctcccagcgcgcccgtggctccgctcgcgctccggtgggatagacaagagagttgggaatggagatccagtcgtccggccggtccatcgacgtgctgatggagaaggtgctgtccgtcaacatcctctcctcggactacttcaaggaactctacaagttcaagacctaccacgaggtcgtcgacgagatctaccaccaggtcgaccacgtcgagccctggatgaccggcaactgccgcgggccctcctccgccttctgcctcctctacaagttcttcaccatgaagctcaccgtcaaccagatgcacggcctgctcaagcacccggactccccctacatcagagctattggatttctctacctgcgatatgttgctgaaccaaagacactgtgggcttggtatgaaccctacatcaaggatgatgaggaattttcccctggatcaaatggtaaaatgactacaatgggtgtttacgtgcgtgatctcctccttggtcagtactatttcgacagtcttcttccacgagtgcctctcccaattctgcggcaggtcactagccatcttgagaagctgaagcttccaacaaagcagtcaggaatgacaggggattccaatagacatgaatcaaacgatactgcccgaaggcctccttctgtaaaggcttctttgtctgtctctttttggtcagcgtgctccacaccgtgcatctacaagagattcatccccagtccgaagaacattaccttccaaacaggaaaaagaaagaagttat

SEQ ID NO: 45146 - DNA, 2222 bp, Setaria italica
  misc_feature (2186)..(2222): n is a, c, g, or t
  Peptide Sequence Number=SeqID_111120
caaaatggtattctaagctgctatcagtgtcctttagttaccaatttacatatgagggcggacatcattaaccatattattttctgaacctaagcgcaattagtcttccttgaatcactcacctgttgatttggcatactgaggggaaatttcaattgtggagttgcttttaagaggagacatcatctcttccgccagtaacatcactgtataaggtttgtcatgatgtgatgctcaaaagttcttttcactcttttcgctagccttccctatgtttcaagtggttgaaggattcataacatctgaaatggtttgttcttattagtttgcgagataatttagtctattttttaacttattggggattatttcacatgaaatggtgtaacttttgcccatattggtcctttgtggcaaggttgctagtctttctttttctgatgcttacctgaaggtgtatgttatatgttatcaggaaataagaccgtttctcttgaaaaaaatgtgaaatggttccaacgcgttaaatatcttatagatggcagtattgtttagggaatgctactagaaacaaaaaagacttgagtaatgccaaagacctatttgatagttaactgtcaatcactttttccccttttttgctgcttgactcggcatttgttctcagtcagatgctcccgagatattgcttgcaaatctctcttaactcatctataatttaaccatggtccaatagttcaccaatttaattgccatgctagataggggaacggtgacaaaattaagatcttatggtttggtcagctgttgcctgttgctactcttgagcagatgtgtcctttctctcaatttactggtccagccgttacagatgcactaaacatcaatgtggttaactcagtttgctgaaagaaatcacaaaaaagttggcaaaattgttattttttccctgcaatcctgccgaccattttggttgtctaatcttatgtagtaattttagagctgcaggcaattgcatgcataaatgccacaagagatccttgcttattaaaattaccatcacattgacctatcattctgttttttttctaatgacaactctgatccaattgctcagtattttttttatatattactctattacaacgattttcaattgagaattattatttcttacattttgaaacaaagtgtcagtgatatttgttatttttctggcagtactatttcgacagtcttcttccacgagtgcctctcccaattctgcggcaggtcactagccatcttgagaagctgaagcttccaacaaagcagtcaggaatgacaggggattccaatagacatgaatcaaacgatactgcccgaaggcctccttctgtaaaggcttctttgtctgtctcttttggtcagcgtgctccacaccgtgcatctacaagagattcatccccagtccgaagaacattaccttccaaacaggaaaaagaaagaagttatgatggtgaccgtgcaagatcaccaccaaggaagcgccgaagtaggagccgtgagcgtgatcatgattctgagagggaccgttcagatcgtgatcgtggcaggtacaaggatagggactatgatcgacgagctcgtgatcacagtgaccgggaccatcatcgatcaagttattcagatagggatggtgagaggcgaggccgtgaaaagagggacagggattctgacagaagtggacgttcaagcacccgcaggagcaggagcaggagtccagtccgtggcagaactgaaggtgacaaacatcgctctagcccatttggtaaggcaccagaatcatccaacttggcaaagctgaaggatctatatggtgatgcaacaaacacaaagaatgattctggtgatgatcgagctcacagggattctggaactgaggaggtaatccgactgggaggcgcaaggtggaggtgaatctcattctcatgttaaggaacaccccgacactgcatctgggcccatgaattcttgttgtactaacatcaatatttgtcagaaatgacccaagagtaatgggctgtatctgtctcgcactatgggatttccaatatttacctgggaggttttttcgccattatggtgttaatcttttttctgtggaggcaatgctgcttatcagctcatgattgatgctacaaaannnnnnnnnnnnnnnnnnnnnnnnnnnnnnnnnnnnn

SEQ ID NO: 45147 - DNA, 419 bp, Setaria italica
  Peptide Sequence Number=SeqID_111121
ttttgggaacacagaaacatgacattaatacgacgacaacagcagaacggattacaagaaaggattacagaacaaggctacaacaccttacacggagaaagaaaacacacatgctcttattaggcgcatcagaaacaacaggttccgatcgctgctttcgcttctttacttctcgacaaatcgggcctcgaccgcaccacccttcacagcaccgcagatagggcatgccgcgagacggactccgcatggattgcatgcgcagaggtgctggcacggcagtaacagcatacaagcaagaccaaagttgcaaaccttgcagatgagatcgatcttggttgtctctgctgcggttctcaccacgctcgatgcttcatttccagagcctggagcatctgactggttagatgagatatgtaagt

SEQ ID NO: 45148 - DNA, 321 bp, Setaria italica
  Peptide Sequence Number=SeqID_111122
tcatgtagatacttccatcccaagccagatggtgcaaatccatcgttagctgcaccagggcctgggcctggagccatggtgcatcagtctaattttcttgtcagccaacccaatcttgttggataccaggcagcagaacgaaattctttctcagggaacgtactcggtgcccactcctcatggggcaacttaccgccgtcgctgcaaccccctcctgaaggcggctatcctccccttcctttcgtcgactggggctgaaggagcgtcacctcatgctgaacaccgattggtcaattgctcatacccctatgctccaagttt

SEQ ID NO: 45149 - DNA, 396 bp, Setaria italica
  misc_feature (337)..(396): n is a, c, g, or t
  Peptide Sequence Number=SeqID_111123
tggacttgtatcataagttaatctgaaactgggtggatgcttttacactagttgaagaatgctgcactccagcatcatgtaaaagctttggcctgatcttgacttttatcgtaagtgacgagtgtgttctgctgcaaacagtgtgccaagttcgtctggcttctagctagcgtctggtggaatgtaaatgttcctttattttggttcccctctagactgtctgatgatctcctgttgttagtgtagtttggacatctgtggaagcttcttcagctcttgtcccgttgcttaactggtttgtaatttataaaattggttcttcagtttgccaataacnnnnnnnnnnnnnnnnnnnnnnnnnnnnnnnnnnnnnnnnnnnnnnnnnnnnnnnnnnnn

SEQ ID NO: 45150 - DNA, 210 bp, Setaria italica
  Peptide Sequence Number=SeqID_111124
tgggggctggaggaggggtcgtcggggccggaggcggtgtggtgggagccggaggaggagtggtcggaggggagttggacggcggcgtctgcgggggctgcgccggtggcgcctgctgcgcggcgcaaggacgcgatcagaagcgcgaggaccagggggcggaggagtggcgccatgatgatctgcgtcactgcgtggttcttcttgagc

SEQ ID NO: 45151 - DNA, 275 bp, Setaria italica
  Peptide Sequence Number=SeqID_111125
gttctcaaaggttatatccctcgcgcggaagccatcaccaatcacggccaccgtcgcggtgtcgaatgttccaagcccatcaatccccacgctccgtgatgcggtgatcacagtagcccccctgccctccccgaccagcaaaatgttggtcttctcgtacggaatcacgacattttccttgtatgtacctgcagcgacggcgatgacgaagtgcccggcggtgttagtttcggtcgtccgtcgttcctactagtcggtctttgtctacggttcgt

SEQ ID NO: 45152 - DNA, 720 bp, Setaria italica
  Peptide Sequence Number=SeqID_111126
tttggcaggatgtaagaatatcacatgggctgtctttgttggcactgtaagatagatagaaataaacataacattctagatataggttaggtatattctgttgaactgctggaatcattttggttcacgaggattaattaatggagattgatactagcctcttgaatgtatggaagttactttattctaagttcataaaattgtcaacagctacctgtgtatgacaggaaggaaattaaagttaataaactgattctgttcactattgcaacccagcagcttctagagccacatgccctcagttcatgcgtgcagaggagctgttttctgctgttatgttccacttgataatgtagccctagttttaatgtttctgttgtccttgcagggcctttcaagatcaatggagtaccaatccgccgtgtgaaccagacctacgtcattgctacatccaccaaggttgacatctctggtgttgatgttccaagtttgatgacaagtactttgccagggagaagaagcagaaggtgaagaagactgaaggcgagcttttgagacagagaaggaggcatccaagtctctgcctgacttcaagaaggatgaccagaaggccgtcgatgctgctctgatcaaggctattgaaggctgtcccaagaagttaaaagaacctaaccttaggtagacccggttactactactacaataggggacttagtacaa

SEQ ID NO: 45153 - DNA, 573 bp, Setaria italica
  Peptide Sequence Number=SeqID_111127
ttttttttttttttgtcctaacatgatgatatatttggttcaaaaaataacacaagtttgataataagtacacgggcgtacatctctcaatataccaaacacttgctactgcatgcatctctcaatccatcacattattcacttttagtaggcttaggagttaactcaggtactactactgtaactttggcccggcccattccaaaacgcccttccttgctcatcatgcacgtccgaatgtactgtaacgacgtgcgcgagctcgacgacgtgatttacagtcccccaccgatgccaccgccacctccggcaccagcctccaccgccgaagcctccgcccgcaccgccgccgccaactccaccaccaccgcctccgcctgatcctccaccaaagccaccgcccttgcctcctccgaagccaccgccagctccggcaccacctcccgcgccgccaccaagaccaccgcctccaccagcaccgcccccaagtccaccgccagcacctcctcccgcgcaccaacgcaacaacaacctccaccgccaccgcgcccgaacacttggcgcccactcgcc

SEQ ID NO: 45154 - DNA, 677 bp, Setaria italica
  Peptide Sequence Number=SeqID_111128
gcgaagccggctgcgcgcgcgcctgcacccgagtcttcgttcggcgtcgtgcccgcgggcgagagcgcgggcgacggggacgtcgcggcggcggggctcggggtcttggggctcttcggggacgcggacggtgtcgccacgggcgggagcgtcggggcggtgctgggggccggcgtgggagcggccggaggcggggtggcggggggaggaggagtggccggaggcggtgccatgggcggagacgggggcggggtcatgggagcgggtggcgggctcatcggaggagacggtggcggggtggtgggagcaggcgggggagaggccggtggcgacggcggcggagtggtgggggctggaggaggggtcgtcggggccggaggcggtgtggtgggagccggaggaggagtggtcggcgccgggggcggcgtggtcggagccggaggagggttggtgggagcaggaggcgggttgccggccggaggcgcctggggcgccggcggcgggttgcccgctggaggtgcctgcggcggggagttggacggcggcgtctgcgggggctgcgccggtggcgcctgctgcgcggcgcaggacgcgatcagaagcgcgaggaccagggggcggaggagtggcgccatgatgatctgcgtcactgcgtggttctcttgagctgatggaac

SEQ ID NO: 45155 - DNA, 987 bp, Setaria italica
  Peptide Sequence Number=SeqID_111129
tgggtttcttagtaaaaagtttcaaaacaggggtttgaagagcatcgatatccgtctctactttcactgaaacacacattcaaaacccatgctttgcagctcagacgacgcggcggcagagcgtgatgccgtcggcgacggggagctgcacggcctcgacgcgcgtgtcggcggcgatcctggcgttgaacgccctgatggcctcccggaccttccggtctccctccgtgagcggcgcgtcgtcgggcatcgccacggatccgccccagagcgtgttgtcgtaggcgatcacgccgccgacgcgcaccaaccgcagcagctgctcgtggtagttgccgtagttccccttgtccgcgtcgacgaacgcgaagtcgaaggcgccggcgttcccctcgtcggcgaggagcgcgtccaggtggcccagcgcggggccctcgcggaagtcgaccttgtgcgcgacgccggccttctcgatgacggggcggccgaggtcgtagtactcgcggctgacgtcgatggccacgatcctgccgtcgtcggggatggcgagcgccgcggcgagcacggagccgccggtgaagacgccgacctcgatggtgttccgggcgcccatcaccttgagcagcagcgacagcagctgctcctcgtccggcggcgacagcatgaacccactgtcaaagcatcgcaacgcaaaccccaatttcaatcccaccaagatccaaattccaaagagagagaaagaggaatcgatcgtgcgcgcgggcggggccgtactaggcgtgctgctcggtgatgtgtcggagctcgcgcaggtgctcgttctcccgcgggtacaccatcgtgttgagcatgtactcgtagagggcttcgttcttgaggagcgtcttggtgctatcgttggtgtggatgttcttcacctcgccgtccgccgccatggccgtgctcctcgcgccctgcgctacctgcgtgccctgcgtgtcaggagac

SEQ ID NO: 45156 - DNA, 1127 bp, Setaria italica
  Peptide Sequence Number=SeqID_111130
gtcgggtgtcgtctcgtactaaaaaaacaaacgcgatcatggtcgcacagctgttgagagaaggacctgcagatgcagatgcgcagatcgcaatacagcaacgggaatgagaattcaatgcgctgtatgcggttgctccaattcgggacacacaaagtatagctacacacgatccgacgctctcagcttgcgaaaaaaaccagaaacgaagcgaaagggaaaaatcttattgaaagcaccgagacgaccagacgtccagacggaatggaaacgcggatcagcagcagcacaagacctcgacgatctctcagacgaggcggcggcagatggtgacgccgtcggcgatggcgagctggcagacctcgatgcgttcgtcggcggagaggcggacgttgaggtccctgatggcggcggagaacctgcggtcgaggtcggacatgggggtgtcggggcggcatcgccacggtgccccgcccacagcgtgttgtcatacacgatggtgccgccgaccttcaccaggcgcagcagctgctcgtggtacttgacgtagttgggcttgtcggcgtcgacgaacgcgaagtcgaacgcccccacgttggcctcgtcggcgaggagcttgtcgaggtggtccagcgcggggccctcgcggaagtccaccttgtgcgcgacaccggccttctcgatgaaggggcggccgatctcgtagtactcgcggtcgacgtcgatggcgatgaccttgccgtcgtcggggagggcgagggcggtggccaggaggggagtagccccgtgaacacgcccacctccagcgtgttccgcgcgcccgtcagcttgatgagcatccggagcagctgcgcctcgtcgggcgacgactgcatgaacccccaccggtgcttgtccgtcaccagccgcagcctcccgcatgcactccggctcgtgcggcagcaccgacgtgtccagcacgtacttgtacagggcctcactcttgagaagcgtcttgttgctgctgtcgccgccaccaaagcctccgcctgatcctccaccaaagccaccgcccttgcctcctccgaagccaccaccgacgcctccaacctaagaaacaaaaaaacctaaaaaaaaccgaaaaaaaa

SEQ ID NO: 45157 - DNA, 566 bp, Setaria italica
  Peptide Sequence Number=SeqID_111131
atgttggctcccagaatttgttcggtggatttgatgcacagtttcagtcagtagaaagtgactgtttgctagacaacctcaaaatggaaatgtaagaagaattaatcctcgttactggagttttaaccacagaaaaatttgtggctgaagattctttattcatagcaactgtactaatgaagtattctgtcagcaatgtcaatacaagtacatttctagtgttctatgtatgtctgctacaagcctacaatcccaatttctaaatgttccttctgagccaagctacacagagggttcagaacttcagattacaaacaaagcacttaaaatcatgttgccacaacaaaccaacaacaatatacaacactgtatcacctaaactgaaagtacaacaaacagaagccaccatctctcacttatcttccttcaaagcacagactgttcaccagcttctgcaaagacataattcgacctcacttgcaatgaaagtaaaggatattcacttgcacaatatacactaaaacaaccactgacaaagtattaagagtatattggatatcagctag

SEQ ID NO: 45158 - DNA, 384 bp, Setaria italica
  Peptide Sequence Number=SeqID_111132
aggatctggctatcgaggcattcaagactttattggtccgtaccaaggcacggattgttgaaggagatgctggtaaagttatatgccgagaagcagaccgactgaaaccagcagctgtcattcttggtacacgtggtagaggacttattcaaagtgtgctgcagggaagtgtcagtgagtattgcttcctaaactgaaagtacaacaaacagaagccaccatctctcacttatcttccttcaaagcacagactgttcaccagcttctttgcctggcacaatgataattggtgctgctttacagttgtggaagcaatactcactgacacttccctgcagcacactacagtacaaaggcaagtattattactttagtaaattgtct

SEQ ID NO: 45159 - DNA, 460 bp, Setaria italica
  Peptide Sequence Number=SeqID_111133
tggccgagtccctccgcgccgcgggccacgacgccgcggtctgcctctcgcgctgggacaagtcgtcctcccaccttgccggcgagcacgcgtacctggacgtcctcctccccgcgggctcggatcgcgccgagcgcgagcgcgtcctggtggacgtcgacttccggtccgcgttcgaggtagcgcggcccaccaaggcgtaccgcgccgtgctgcagcggctgccgtcggtgttcgtcgggcgggaggaccgcctgcgcctcctcgtggccgccgccgccgacgcagcgcgcgccagcctgaagaagcgcggcctccacctgccgccgtggcgcaagcccgagtacatgcgagccaagtggctctccccctacgatcgcgagactccccctcctccgccccccgccgctgccgcagccgcagcagccagaggcctccaccggtgagctcgccggcgacg

SEQ ID NO: 45160 - DNA, 315 bp, Setaria italica
  Peptide Sequence Number=SeqID_111134
gagcacacttatttgttccttggtgctgggaggttagtgatactgtgataggctcatagcttatcttggtggacttttttttcccttttgccgtcaaactgttgaatatatccgttgaattgaaattgttcccatcaatgagattcttcattttagagacacggaagaaaagattctgattatgtatttgactgcaggctggaactggcatagcagaactcattgctcttcagatttcaaaacagacaaaagctccgattgaagagtgccgccagaaggtttggctggtggactcaaagggcttaattgttagct

SEQ ID NO: 45161 - DNA, 511 bp, Setaria italica
  Peptide Sequence Number=SeqID_111135
agtagcaccccaagaaaacaatcaagcaagccgttgatccgagaacagtagcagttgcccaaccaccgtcagcgcggcgatcgagccatgggcggcacgccgcgcaacagcatcggccacatcctgcccggcgccggcttcttggccgtcggcctgtggcacctgttcaatcacatcaggctcttctccctgcgcccggacgcgtacgtcgcgccggtctggttccctgcgccgggcgtccgccacctcgaactcatcctcgtcatcgtcggcagcgccgtcgagttcgccatggagatgttcgtcgaccactccaccttcctcccgttcgacgccgacggctccatcccgtcggaccgcctgcacaaccacgagcacgccatcatctgcctcgcgctcctcgtctacgctggctccgcgctccacctcgaccgcgtccggcgcggtgccgcgacgcgatctccctgctcctcgtcgccgtcgtcttcgcgcaggagctgctcgtgttcca

SEQ ID NO: 45162 - DNA, 584 bp, Setaria italica
  Peptide Sequence Number=SeqID_111136
cgagtaaatcctaagaattgatcccattgtccctaactaacaggccctaaaagttgttccctttttcttttccctttttcattttctctgttagtagaatccttgtgatggccttttgtttagcttctagaattggtataggttggttatccatttcttagtaaggctagtagctgtctctgacagcgagtagaagtagtcaattttggttttgtctagactgcatagcagctgtacaagtaaaggtcggtttacaaacagaatacacatatcatatatattgcctatatgcaaacaaaggaagcaagcttgagcttcagaaacatacatgtgatagctttgtgcttcccattgttcatcctcttgctgctgcaactccaacattctcccttaatatgtccaaagcttcagactgaaattattactgttagaagtacaatgattggaacatgtagatgcatcgcaaaatgttatcagaaactaaaagggataaacattggtgaaagaactcatgttctgttttgtttgtttctctttgattgtgaaggggcatgcagcctagtggttgcagtgaccttagtagc

SEQ ID NO: 45163 - DNA, 1187 bp, Setaria italica
  misc_feature (56)..(56): n is a, c, g, or t
  Peptide Sequence Number=SeqID_111137
ttttttttttttttttctttattgcaacgagtaaataacttaatattagtatcggnggtttttacatattccacgaaaataacacagaaactgaaccacgttcccattcaacatgcatgtattgctaagctgccagcaggcacatcgacatgcacctagggttacatatattagtatcacctagaggtaggtcctgaaatctgcatcctggttggacttggacctactatactgggttcggaccagcacacaccatgtaatcccagaaacgttcaccatcgaaccataagctaatgctcaattgctcatcatatgcatcagcttcatcttccaaggtagatggaacattatcataagattattcagaatcgtacaagaagccgtccgcatcacatccgtacatgaaggggaattctgtatctggattgcctctgtcatatacacctattataggatgcctcagatcatccatcccttgcttcttgcatgcgtcgcaatggccattttcatacagctctagaggagtgcagaagtaaattttctgtctaaatatctccttcacttccgcaaagaaaagtgctgatgtccaatcagcagaaccattaaccttcatcttgacagtgaagttgaaatggtgaaaaatcttgtgataattttccacactaaaacactggtgctgaagctcatcaaattcatactgaatatcctcaaaatcatctttgtcttcaatgtatttattaaatgctaccatcacctcctccctcatccatttcttcccattttgagcaatttctttgtaggaagcttcagaacatcgcccttgctctggaactgatggagcttgttctgatgctggaactgatccagcttcttcttgttcaggtgccacctttgactctgatccaaactcataattgtctagtgaagattgctgggacattgcagccagagcatctttttggttattccaaagatattcaaaagcatcttccacactatcaaacgtatgctccttcaagtactcctcaagttcacgaagcccctttggcttgggcgacacaacttccacggggtaatcaaaggttagttttattttaatcatacagcaggctaacacaaagccactcagacctaagtaaaatcatgaccacaaggtcatcaaagtttagttttatttgtaattctaa

SEQ ID NO: 45164 - DNA, 324 bp, Setaria italica
  Peptide Sequence Number=SeqID_111138
ggggggatggaggggtacgcggcggggctcgtcggggccggggaggtggaggcgaaggtgaggctggtgatggacgccgagcagggtagggagctcagggcgcgggtggcggcgcgcagggaagaagcggaggtggggctgatgctcgggggctcgtcgcagcgggcgtttgctcagttcttgtcggatgcggagactattcgcgaatcgcgtgcacttgggcaagtgaagtgacgagtttgcaagtgctcttcttctatgaattgttttgtcttataaatcccgatttcatcattttatgtgatatgccaaccacttctcctc

SEQ ID NO: 45165 - DNA, 443 bp, Setaria italica
  Peptide Sequence Number=SeqID_111139
agcgactgtcattggtgacatgagctatgtggatccaatatatatgcagtcaagaatatttaaccaacaaaagtgatgtctatagttttggagtattgctcctggaactcattacaaggaagagcgcctcacatcctggcaatggtaacttaattgccaacttttgtgatgcttacacagataatagagtgattgagtttgttgactcagaaattgcagtagaagaaaacttccaactacttaatcgcctgtctggaatgataaagaaatgcctagaccttgatgttaatcagaggcctgggatgacagtggtagaagataaatcttcgcgacatgatgaagatagcacaggccaactaaaatgataaaaatgaattctctcgcgagtttatgtatgctacagtttctagttgtacttgtcactcaacaagaaatgaaatatt

SEQ ID NO: 45166 - DNA, 792 bp, Setaria italica
  Peptide Sequence Number=SeqID_111140
cggtttaagaaaatgaagcattttcctggaaattgttcagttttcaatggatccatggaaaatattactcatgagaagattaggaacatggtcgcagttcttaggggaataatccctggtggagaccaactggatgctcctgatgtcctggaggaagctgttagatacctgaagtttctcaaggtggaggcagagaaacttggcgtggcgggtttcaatgcttaggagtggtcagtgatataatggtcgcggtaaagctccataaaaataaaatcttaaggatccatgccgcttatatctatatggaattaatctaggtcattgtcatcattgttactggattccacttttttctggatgtggaagagaaggaaggcatcctgcttttgcaactttcagcaggcctcaaaagactgtgtttgtgggattctgatgcttgatttctggtatggtcttgcttgccctgccccccctcatggtgtggttcgatcgtgcggcgaagctttggatggtgcatcatgctgtctggcttaccctttttccaattgtgacttggaactccacctatagagtgatcaaacttgtgcttcgcttgaggttactgctgcctgcttttccaggcactcgtcttgatgctattattaaattttgtgcacacttggtttgatatattgtatatgtgcaacaagattgtagcatcgtaaactactgtacggactggtgccctttggctttgtgaattgtgtgaagaaagattctgtctcacttacaaaaaaaaaaaaaaaaacctag

SEQ ID NO: 45167 - DNA, 994 bp, Setaria italica
  Peptide Sequence Number=SeqID_111141
aaattaaatttacatctcagactctcatttagagcattgtattcagcacacaacaggggaacagactttgaccacagatgacttcatctgatggatcaaatcatgaatcctctcacttctctcgcacaacacacaaccagagaaccataaaatggcccagataactgatccctggaacttgaaagtgccaatcaagagccgaatccatccattgggagagtttagaatggaaaggattacaatgctttctgacagggcactccagcaagtcattctccgaaaaatctcacctccacaaaatgaatacaacagcaggcgggtaaaaaatgcggatggttgtcagagtaacaacgacgaggttctccagtgatgaccagggtagatgtctgaaggatgatctgcttccaagaatgtcaggaatcatcccaaaagcgctagccgcttcaagcaatggatggtgcttgtggggacaggttgcaattatttgatgtcttcacatccatccggaaagcactgcgcggcattgggcagctgtcaatcagttcttgcccttctccttcatgtctgcgtgctggaacccgttccagagctggaacgcggcgaactggctctccgccgtggcgggcgtggtcaccgcggcggccgggctgaacaggaagggtatgttgggagcgtccagtggagtagacagcctctggagctggtggtgctggtggtggtggccggagatgtgcggctgcgaattggactgaagggtccccctactgttgacacccacaagacccgaggacatggagaagttgaggttgtagtcgccggcgggacccgaggccggcgcggcgtggacgggcatgtagtggtcctgcaagaacgagaactgcgtcatctccgcgtgcggctcgccgccgccagaggcgacggtgacggcgccgctcgccaagccgaagtgctgcgccggggccatggcgatcggcgcaatgttggcgagatgggg

SEQ ID NO: 45168 - DNA, 582 bp, Setaria italica
  Peptide Sequence Number=SeqID_111142
caatgttctgcagctgctttgtaccttcgacgatatcaggaatgcaccctttggcaaggaaatgatgcaagcatatagcgaccatctgaaactaagggacgacgttgatcatgaggtgttcttcccgggtctgtatatgaaaataccgggccggttttattaccagttcgggaagccgattcctaccaaggacaagcaagacatcctgactgataagcaggctgcgaatgatctctacatgcacgtaaaatcggaggtcgagcgtatcatctcaaacttgttggagaagagggtggaggacaagtacaggagcctcatcccaagaatgttgtaccaagctgctcggggaccaacttgtgaggtcccggcgtttgatccctgaatgtttgattacgcaattgttcctatttattaactgggacatgcttgtgtttgcgtgtgtttaaatttaaaacgacagaagttgtgatattttacaaaggatccttttaaggtactcccacaaggaggccacaaccccaatcaagaaactgtaccactattagttgaagattataactcttgctccctcggtttcaaatt

SEQ ID NO: 45169 - DNA, 269 bp, Setaria italica
  Peptide Sequence Number=SeqID_111143
gaaggctttggcacagtgcagtaggtcacacactgcagccaccacctcacctccgaccagaaatgcacccgcaaatctcagcgccgtatgaactcaaaaaaacaacccagcaacgaataaaccagtcagatccaccccaaatcaggcagaatcaccaagaaacggtccgaaaaccagctcgcctgggagcagaagcagagctccgctcacaccgcaggggaagtaataggccacagatcagagaggctggagacggcaagtcagcgagg

SEQ ID NO: 45170 - DNA, 466 bp, Setaria italica
  Peptide Sequence Number=SeqID_111144
tgcgtttctgccttatggtcactatttggttaagaagttgaatctttgtggtattaaagtgccaaaagagattgggagactgaaggccctgctgcatacccaattgcacgagctaagctcatgctgaaggagatcgagaagcttacccaattgtggccagatgttatttgcattaacagaagtgcgtgattgcgaggaacttgagtttgccatcttcaactcagacaatacactcgtcatcaatgtgtgctgaggtcaaggatgggttagatggctgtttggatggtatgtcacctctggagcacattgagatccttcagctctatagctctagggtctaagcaagttacccaaatagtttgtgaagcaccctagtgaatgtggagaactttgtcggcagtctagtcatgttgacataacaatgcactgagtaagatgctgtagaaatcatcagaaaactccaaat

SEQ ID NO: 45171 - DNA, 754 bp, Setaria italica
  Peptide Sequence Number=SeqID_111145
ggaagaagaatctctggcctttgagtgcactttagttttggaatgtcttgatgctggtatacctaacagctgctttcttcctccacacattttcacctgctgtagttagccagcttctctaactggtgccttcaattataagcaagcatctattttcatttctttttagctatcttattatggataagctaagtggtggctttatggatgttgatgtttctacctggaggtatttaggcatggcatgagggaatagtaatgaattgaaagcatgctactagttatcttcctccatttactaaaaaattatgtaaatgtatgagcctgtgagtttcatacctattttagattgatgaatccccatctgatcattcatgtcgtattgttaggctcgtattagtttaattttctcttttgtcctcttccattgcctctctcccaggtcttttcagttttcagtagtccagcccctgcagcaatgcaattatatgctgcccgatttgttgtggatagcatttctagaatcctaaaggttacaagaccgttacatggattttttggatttaacaaagcttaataattccaaacgtacatgttcttcagataagcctgctatcgatgccccttgtcttccttttaggggttgctttcttctttttatgtggtacccttagctccctctgagggcttctaagtgtaagcttagagtgcacctgtctatagtacatactatcttctttaacttcactatggg

SEQ ID NO: 45172 - DNA, 501 bp, Setaria italica
  Peptide Sequence Number=SeqID_111146
tagactgcatgaaccaatttttcctcagctgcagccacctgatctgtgtgtccaaagactttaacgttcagactttgcctgtcatagtgaatgtaagtaccagtctcttgttcaactgatctcaaatgtgccaaaccatcacgcgaaaagagtaattgaacagcgcttaacgtcagatcagggtggtttatggttttgccttccatcaaaagttcaagaggccttctcaaatctgctatggtctttgttgcgtttgcagtgagtttaacccggaaactgccattctcattcttctccaaattgtaagacacgcctttttggcttctgaagctctcaagcagagaaccaactgcctggctgataacattgtaaatgcgtgtcggacaggaaacagtactatgaaaaacatgttggcactgtattatctgccaaggaagacaacaaggaagaacatttccttgaagatggtccagtgccgttgcagcctctctatgaagactt

SEQ ID NO: 45173 - DNA, 299 bp, Setaria italica
  Peptide Sequence Number=SeqID_111147
gccagcgaggccgggcggaggcagcgaggtggcgggcggagaaggacggcggcggggtctggcagggaggagagagaagagcgcgggggaggagagaggagggggggcaaaggggaattggtctgggggaccagttttagtcagttttagctacctccaagtgactaaaggattatggggatgctaaattttagcacttgaattttagctcacctgtttgggagcacttgtgactaaaatagactaaaatgggggtgctaaagtttagcacccctctcccaaacaccccttcactagga

SEQ ID NO: 45174 - DNA, 362 bp, Setaria italica
  Peptide Sequence Number=SeqID_111148
actactacctctcataatagaaaataatagcatgatggtgctgcataacatgtgttttacgctaattcataagggcaccatagccatgtacaagctgggataatgcataaggcagctgaaagtccacaacactggtttgacagatagattggttgtggtggtaaccagtatagatgctttgtaaattctagacacagaaagtcagaaatagaattttaactcatgaaacaccactacccagcccagccaacataatcactggctagtatattgtgaagattggttgtggaggtaaccagtatagatgttttgccaaattctagactcagaagtctagaatttcaactcaatgaacaccagta

SEQ ID NO: 45175 - DNA, 476 bp, Setaria italica
  Peptide Sequence Number=SeqID_111149
ttgtagttgagttcaaggctcttgttgataatgacacttggcacctcgtccctcgaccctggtgcgaatgttgtgattgggaagtggatttacaagcataaattccactccgatggctctcttgctcgtcacaaggcccgttgggttgttcgaggtttttcacagtagcatggtgttgactacgacaagaccttcagcccggtggtcaaactaggaaccattcggaccgttctgagtattgcagcctcttgtgagtggccgattcatcagctagatgtgaagaatgcctttcttcatggtcatcttgatgagacagtgtactgctagcagcctcaaggtttcgtggatccagttcatcctgatcatgtctgtctcctgcagaagtctctacgatctggagcaggttccacgtgcttggtaccagcggtttgccaacctatatacgacaattgggcttgttctcggcttccgacacc

SEQ ID NO: 45176 - DNA, 456 bp, Setaria italica
  Peptide Sequence Number=SeqID_111150
aaggctgtatgggtcgtgttcctctgttttttctggtctaaaagttagtcaccctatatgaggccagactccaggacaaaggtctgaaactcccgtgataataaactagggaattggagttgttgcatctccaaacaaatagggcctgttggataggtgcggactggagccaatcccttgggattggcgaggagaatgtactaatttccctgccaatcagaggagaactggtctaaccgcagtgtatccaaacaagctttcagcgtcagcaactgctgtacaatatcatggaactgtttgttccatcttgtcaaaggtaataagttactgtacattatggttttgtagcttgttcttgttggtttaactgtcttattagcgacaaccatcctgaacggcttagtcttttccttccagatatcttctaccaacttctttttctctattattattatt

SEQ ID NO: 45177 - DNA, 532 bp, Setaria italica
  misc_feature (453)..(532): n is a, c, g, or t
  Peptide Sequence Number=SeqID_111151
ggacaaacctgccgcggcaggtgcggggccccgcggtggtcacgtccggccgcgccgcggccgccgtgcaactcggcacctccgaccttcacctcggcagcgcctcggccgcggcccccaacctgtacagcggcgccagcgccccgctcatcctcggcgggctgggctacggcaacacgccatgaactgatgataagcacgcagcaacacactgcgggatcgagcagcacaagggtatctagtcatgttctgtcgttcgctttctttgtttcagctcatttgtcagtgcaatcagaagcagcagtagtatactgtagctcagtttcatgttactgccgatgctgccatgaactcatgaccgcaagtctttggttgttaccggaagctgaaaggattagttcaacactggcatctttgcataaaactggcactaatcagaagttacagcacaannnnnnnnnnnnnnnnnnnnnnnnnnnnnnnnnnnnnnnnnnnnnnnnnnnnnnnnnnnnnnnnnnnnnnnnnnnnnnnn

SEQ ID NO: 45178 - DNA, 853 bp, Setaria italica
  misc_feature (9)..(9): n is a, c, g, or t
  Peptide Sequence Number=SeqID_111152
ccaccgccncgtcgcagcagcagcagcaggcgctgcggctgccgcccagcaagcagccgcccctcgccaccacgctggtcgcggcggccgcggcgggtctcctgctgctgtctccggcgccggcgccgtcccgcgccgaccccgagttcaaggtgtactacgggacggcggcgagcgcggcgaactacggcgggtacggcgggaacgcgagcaagaaggacacggcggagtacgtgtacgacgtgcccgaggggtggaaggagcggctggtgtccaaggtggagaagggcaccaacggcacggacagcgagttcttcaacccgcggaagcggtcggagaaggagtacctgacgttcctgtccgggatccgcgcgctggcgccgctcaacgccgtgctcaacaacctggcgctctccgacgtcgggctgcaggaccagatcgcgaccgccgacgacgtgcgctcggcggagcgcgccgacggcgacgggcaggtgtactacgagtacgaggtggcgggggccggcgcgcacagcctcatctccgtgacgtgcgcgcggaacaagctgtacgcgcacttcgtcaccgcgcccaacgccgagtggggccgcgacgaggccgtgctccggcggctgcacgagtccttcaggaccatccagcccggcgccccgccgccggcaaccgagagctaactgcgtctccagcggtaagtgcgtgcgtctacgggagatcgaggtagcaagtaattgagcagaacaatgtaattttgcggtgtaatatataattaataatcagttttgtataggatggaattattttggacatgtatattactctgcattcttcgctaaaaaaa

SEQ ID NO: 45179 - DNA, 457 bp, Setaria italica
  Peptide Sequence Number=SeqID_111153
cggcggccttcttggcgtcctcgagccccgccttgaggcccccgttgctggggtcgagcgcgagccccttctcgtaggcggcgacggcgctggcggcgtcgccgagcccgaggtgcgcggcgccgagccgcgagtagcccttggcccagtcgggcttgagctcgaccgtcttctgcgcgtcggcgagcgcgtcggagtagcggtggagcgaggcgagcgcggcggagcggttggagtagaggacgtggttgcccggggcgagcgcgatggcgtccgagaagtgccgcgccgcctcctcgaagcggccggccgagaacgccgcattacccttcgccttcgcctcgtcggccatggcggcagcagcccgcgccgggtccgatcggatcgagctccggaggagggttctagatggcttggcggctggggagggccggaggagggcgctagcggaaaagtc

SEQ ID NO: 45180 - DNA, 717 bp, Setaria italica
  Peptide Sequence Number=SeqID_111154
ttttttttttagttctgctgcaggtcgtcgtcttccttttcttttctttcctctttgcaaataaagcaactaggacttgttcaaataaaacactcctctagtactcaacaggagaggtgggaaattaaccttgatcaaagaacacaagagagagctacttgcagcacttgggttgatccatatgatccgtcggctaaattgaactaactcacagctgcatcatggatacatgtacttgcctaataatctagctacatcctccttattagcaagctagctaacttaactcgcctctgctactacgagctgatagaggacgtacgaaagaagaagaggaaggaagaagctaagatcaaactaggaagggcagcaacaaacacatgaccggttaaattagagggacactgcagatcgatcccaaattaagacgaagctagctggggcctggcgagctagcggcgcctggtgttgctgctggcgtcgtcggcgcggaggaagtgcagcagcaccgggctcttgcaccgcgggcacttgggctgcttctcctccccggacagcatcacgtacatgaggcactgcgggcaccccaccaccaccatcggcttcgccgcctgcaccacctcctcctccgcgtccgacgacacgcacgagctcgccggcgacgacgaatctgccactcttgtccccatcgtcgacctcttgccctgctcgctgctc

SEQ ID NO: 45181 - DNA, 778 bp, Setaria italica
  Peptide Sequence Number=SeqID_111155
gcggtccggggtgctggtgctgctgctggtggttctgcggccggtggtgcggctgcggcggcgcgtggccgtggccgtgggagctcggcggccgggacgggacgttcctgctgctgatgttctcgtagtgctcgtacgggtcaaagtcgtagccggccggtgggtggccatggccgtgggagctcggcggccgggacggcacgttccggctgctgaggttgtcgtagtgctcgtacgggtcgtatccgccgccgccgccgggcgccttgggaccgccgtgcgagctcggcgggcgcgagggcaccttcctgctgatgctctcgtagtgctcgtacgggtcgtagtcgtatccgccggcgggcgccttgggagcgggcgccggcgcgtggctgccgtgcgagctcggcgggcgcgagggcaccttcctgctgaggttctcgtagtgctcgtacgggtcgaagtcgtagccgccgccgccgccgccgccgttgccgctggttggcggcttggggggaggcggtcgtcgccggcgccggcgcgggcttgttgtcgcgcaccttctcgaagaagacggtgtagccgatgttctcggcgtcccaggagccgaacttgggcacgacggcgttcccggcagcagccatggtgatgattgtgcgcgcctggagaagggttggtcagagagctgtgacggatcggagacggacgaggccgcccggccggccggccctgctgcttgttcttgctcctgctcctcctccttcccctccttgtcccttct

SEQ ID NO: 45182 - DNA, 194 bp, Setaria italica
  Peptide Sequence Number=SeqID_111156
ccgatttgaggtgatccaataacctggattttcatgggaaccaaaaacatctttgtagatttctaattgcactgcactgggctaggtgaggctgcatagcctaagtttagagcttccgtattacatatgtttgtcacaatcggaatatcaattggtggtgcgaagtttttttgtctgaatgagattttatgagt

SEQ ID NO: 45183 - DNA, 476 bp, Setaria italica
  Peptide Sequence Number=SeqID_111157
tagttttatgaagctgtcataactgattatgatgcagcaaaggatctctatgcactggtttatgacatgaatacagcacatgagacatgggagtgggttgattttaaggagatggcacctgaggatgtaagatgggaaggtgctggaaggggtagggggccccaaaagaactcatttaagaaagattatccaccttcacaaaacggtgttgggaagaagagttcggactacatagagattcttcatacagagacactcataaaggaggtggagcgggtttttactgcaggcaaccctgacccccttgagatggagagggccaagaaagtgctaaaggagcatgaacaatcattaatcgatgcaattgcaaggcttgctgaggcatctgatgttgagggtggtaagtgtagtgcatagttcctcttttctcaaccttattataaaatacaactgtgctttggtattgtaaaagtttt

SEQ ID NO: 45184 - DNA, 431 bp, Setaria italica
  Peptide Sequence Number=SeqID_111158
cgtcccctcgtaggctcgcctctccccgatccgcccagatctcgccgggatccgccgcgtctcgcctggacttcgccttcggaactcgctgctccgtccgggcgggcagccaggaggggtcgttctttcccggggggcggcggatccgtgcttttgtcggaggcggttcggcggggtcgcgtcgcgtcacgtttgtggtcctggttgtggcgccgtcggcgaggtgtgattcggaagggacttgtggtcgacggagctgagacacggcatggactacgggggggccgtggacagcagtggaaccgatgatgatcttccaccatcatatcagaacagcagaggtatgaaaggcagtggacgcatgactggtaatggaagagatactattgctgctggtccatatactagagttcaaccacagacagatatgg

SEQ ID NO: 45185 - DNA, 1813 bp, Setaria italica
  misc_feature (1743)..(1813): n is a, c, g, or t
  Peptide Sequence Number=SeqID_111159
ttttgtgcttgtaatgtttgtaacatgatgtggattgttttgtggataattaattgtgcttgaaggtacccgtggacagcagtggaaccgatgatgatcttccaccatcatatcagaacagcagaggtatgaaaggcagtggacgcatgactggtaatggaagagatactattgctgctggtccatatactagagttcaaccacagacagatatggaaacacaaatacatcaacttgagcaagaagcatattgttcagttcttcgagcattcaaggctcagtctgatgctataacatgggaaaaggaaagtctcattactgagcttaggaaggagctacgagtatctgacaaagaacatagggagttgctaaacagagttaatagtgatgatattatccgaagaataagggaatggagagagtcaacaggtgggcttcagatgaattcggttaataatgctcagcgtttgcatgaccccatgcccagtcctaccacctccgctcgcaagaggcaaaagatatctcaacccattccctctgcatctgtacctgcaccatctgctatgcattcacagcctttagctgcaccaatgcaaccatcatcctcaggagcaaagaaggcagccccacctggcacaaaagtgaaaaagaccaaaccaggccagaagatacctgttggccctgcagtcaaacctatgccaacttctactggtcctagtgggcggggaccagctatcaatagaaatacttctgctggccttcctcctgaaggaccacaattaaatccgttaattggccgtaaagtcatgactcggtggcctgatgataatagtttttatgaagctgtcataactgattatgatgcagcaaaggatctctatgcactggtttatgacatgaatacagcacatgagacatgggagtgggttgattttaaggagatggcacctgaggatgtaagatgggaaggtgaggagcctgatttaaaccttctaggtcgtggtgctcccattcatggcattaagaagtcaaccagtcgtggtggccacatgtcaggtgctggaaggggtagggggccccaaaagaactcatttaagaaagattatccaccttcacaaaacggtgttgggaagaagagttcggactacatagagattcttcatacagagacactcataaaggaggtggagcgggtttttactgcaggcaaccctgacccccttgagatggagagggccaagaaagtgctaaaggagcatgaacaatcattaatcgatgcaattgcaaggcttgctgaggcatctgatgttgagggtgatgaccatgcacgacctctagagtataaccgtgggtggaggaaccaacacggaggaagatatgcagatgacatgggaatcgatggcctcatggctggagatgcagatgccatgtaaaaccattgccaaaatgtacacaattccttgattagttttttttgcctgttgtaaaatccagacgctgatttgttcttagatttagctctagatacttctgattcgttctaacgaatgaatcggttgctaggattgccactgtaattgttgtgcttttgtagtagaattgtactcagctcatgcttgacaatgtaaatttagatttggagctatttttgttctgtagtcttttgatagaatcactgaagacattttggttccagtcaattcagatgaaggccattctcgtagacggtatgttttattaacnnnnnnnnnnnnnnnnnnnnnnnnnnnnnnnnnnnnnnnnnnnnnnnnnnnnnnnnnnnnnnnnnnnnnnn

SEQ ID NO: 45186 - DNA, 550 bp, Setaria italica
  misc_feature (501)..(550): n is a, c, g, or t
  Peptide Sequence Number=SeqID_111160
agtagaaaaggtagtgtgatttgccagatggagtacaggagaggaaatttgcagatgacacttccctgcaagcatgtataccatgccagctgcgtgacaagatggcttagcataaacaaggtatgccctgtttgcttcgctgaagttcctggcgagggaacccaagaggcaatgagttatccgtcatgtggcctccacgaagttgtctcgctccaaagctgagcccagtgccccaaaatggacgcatgatttctgcttgaagccagcgtgtcgtcccctcttttagaattgtgtattagcatcgtattatcaaatataggttataatcagatgtagttgctaccgagaggtttgctgtaggctgttgtagagctcgactgtgaactaagaccacctgctagacgaatgcacgctcgacgtgtcgatcactccgatatgtttttgttcattgcaaagagcatgtgccagtttgtgttagttgcatatgattaagaaattttnnnnnnnnnnnnnnnnnnnnnnnnnnnnnnnnnnnnnnnnnnnnnnnnnn

SEQ ID NO: 45187 - DNA, 465 bp, Setaria italica
  Peptide Sequence Number=SeqID_111161
tctctttgaataatgatgaggcccaacaaatgaatctccgaataagtggtgtgggtttgaatgttttatgcgactaatagataaggttttggtcctagcagccatagaaatggctgacacaggcctagcctcttgtctggctcctgtaaaccttgctgcatgtgacacaaagtattgagcttactgggctaggatcacattcatcagatataacagtgagtaaatgaattttgcacatgccatttgtcgtcattgaccagaggctgctctggaattctttgaaattgacacagatttgtggacttcaatttgcatgggcccattttgtttgtgaactaaaaattagtgtcgaaaagaaaaccattgatgtagaacatgttatgatgtatggctttccaatttttttgtgcaaacatacaatcatacctgcatcttgtgcaaagaagacacatgcacatctttaaa

SEQ ID NO: 45188 - DNA, 693 bp, Setaria italica
  misc_feature (278)..(278): n is a, c, g, or t
  Peptide Sequence Number=SeqID_111162
aaattgggcaccaacacagctgtactataaagttgacggagctaagatcgcgaatgtagtgatacttcataatgccaaaattcaattactatgagacaaaaagagccggatggttcaggctgaaataaaagaatacagccagtgacacaacaccgtttgaagattgaacaaatgaactgggaattttttgtatatgaatgctcagaaatgtagctgaaatttgtggtcatggttcatgaagcctctgtgaatataacagtgcatgcccagaaaaaccntgtttactgccgttgctagctcagaagcacaaatgccaaagtggaacaaggtgaaagcacaaggcagggccaggcggccctaaaacacctgagaataagagaaacctcattttgggaggccctgtacagtggtactgactcgaacaaggtagccgtgaatgaaactgtggattcatattcatacatggtcctttcagagcacagaaatggcccagaaaatgctttgggtataggcgaggtccatcataaacctctttcagcagtactagtactagctttctgtgtatgggcatgggcacaatatctgcagagataagagatactagtatagcgcctttgcccttccactcaaaacaggagtaggcagtagcagatgtggtaggccagcagctgccgcctgaaatgatggtaaacc

SEQ ID NO: 45189 - DNA, 585 bp, Setaria italica
  misc_feature (565)..(585): n is a, c, g, or t
  Peptide Sequence Number=SeqID_111163
acaaaacaaagacccaaaacaaggacaagagagaaccaaaccaaccaagaaacccccctcagctccctcctcccctccaccaccaccgccgtcgccggagatgtcgtcgcaggcgatcgaggaccggagtggatcggtggtggtggaggggaggagggagctgtgcgcgcagaagtcccgcgagttcatggtggagctgggcctccccgacggcctcctcccgctgccggcgctcgacgaggtggggtacaaccggtccacgggattcgtgtggctccgccaggccgccgggctcggccgcgccttccccgtcaccgccttccagctcaacccgcccgccgagggggacaagaaggaggagggcgacgccggtgccgccactaacaattgatctgcttccggccggcgggcgggcgctcgatctggtggcgtcgtggcgagatctggcggtacctgtgttgtgtccgaaactctgtgagctgtgtactctctcctctgtccgcggtgtacaatggcagtggatcatgcaggaataaaaaggtgtccatgggttcaggattacgtnnnnnnnnnnnnnnnnnnnnn

SEQ ID NO: 45190 - DNA, 968 bp, Setaria italica
  Peptide Sequence Number=SeqID_111164
taagtaaaataaatcgaaaaagtaaaccaaacaagcccaaacaggcaagagagaaccaaaccaaccaagaaacccccctcagctccctcctcccctccaccaccaccgccgtcgccggagatgtcgtcgcaggcgatcgaggaccaccgctccggcgcggaggtgcacgcagggcgggagctgtgcgcgcagaagtcccgcgagttcatggtggagctgggcctccccgacggcctcctcccgctgccggcgctcgacgaggtggggtacaaccggtccacgggattcgtgtggctccgccaggccgccggcgtgacccacaccttcgacaccatcgggaagcaggtgtggtacgacaaggaggtgacggcgttcgtggagcccgggcggatgagcggcctcaccggggtcaagagcaaggagctcctcatctgggtcaccatctccgagatcgtcgtcagcccctccggcaccaaggtcgtgttccgcacccccgccgggctcggccgcgccttccccgtcaccgccttccagctcaacccgcccgccgagggggaccaagaaggaggagggcgacgccggtgccgccactaacaattgatctgcttccggccggcgggcgggcgctcgatctggtggcgtcgtggcgagatctggcggtacctgtgttgtgtccgaaactctgtgagctgtgtactctctcctctgtccgcggtgtacaatggcagtggatcatgcaggaataaaaggtgtccatgggttcaggattcgtaattatgcgtggtcagcagtgctgctgtttgatcttgtactgattgtcttgcctgtttccttgtcgaactaaattgcattccttgcctgtttcgttgtacctgccatctctgaggctgggattgtcgttgtctcatggatcaggggcagggtacacgaaaagctatgaatattcagaactttgttctcaaaaaaaa

SEQ ID NO: 45191 - DNA, 598 bp, Setaria italica
  Peptide Sequence Number=SeqID_111165
gttctgcagatccaagtgcgcttctgctgtgttttgaggtaatcgatcttgctgctttcagtgtgcacatttttagtccgcacaaacctaacagtggctgatcataaagcttatctgccggtggctcgtagccagaggatgaacgttgcatcattgacatgttgacaatatctgcctcgcattgcttcatgtaatccaatgtctatgaaatcaagtacatcagttgtacacatgatagtagaaatatcacaaggaacaaaataagacagttgcaaactagtttgtgacatctgagagatatcacagtatcacaccatgtgccacaacatagcaagtgcaatcatgctctatcagcaggatcttccacttaagatgttaataattgaaaccaaattcatggaacagctgtggagatgacaaattaatcttacctgaaccatgactgtgggagtaatttcatcatcatttggaactgcacctccattttccacaatcttttgctgaaccttctccaggtaagcatcaacatcttcatcagcaatgtttttgatcaacaacaaaattaaataaatctattactggcatgacaggaacacct

SEQ ID NO: 45192 - DNA, 2242 bp, Setaria italica
  Peptide Sequence Number=SeqID_111166
acaggtagagcttcaaatcgaggacgttacattgcagtagtttttttagtgatacattagaaactaatcaaaaaagtttgcaacaacgggaagatttgtacctgagggcacctccaaggccacctcagctagcaacatgtccatgtcagaattttgtctatgtagacatgagttacacggaccaaaaaaaagtagctagtctatacggtattacaagatgcatgaaacttttagtactctattacaagtgggtccacaacaaaattgtagataatgcaatagctagtccatttgaaggactgcatattaagatagctatagatgacacggacaaggattgtagctattagtaattaactattgctggaggtttactacccacagaggtttactaccgcttgcactttgctttcgccattttcttcctcttctttttctcagccttcggtttcttggtcttgcgagcttccctcttctcttccttcactttcttcttgtttgccttccgagcagcttttctttcctcgggtcccaacttcggatcagcctcgtgccatgagtcgtcttcatctgaactggagcaagattcactatcatcttcttcaccttccgctaggttctccaatgagcacctgttttgaagctccaatgcgcatttgttctgcagatccaagtgcgcttctgctgtgttttgaggtaatcgatcttgctgcttttcagtgtgcacatttttagtccgcacaaaccctaacagtggctgatcataaagcttatctgccggtggctcgtagccagaggatgaacgttgcatcattgacatgttgacaatatctgcctcgcattgcttcatgtaatccaatgtctgaaccatgactgtgggagtaatttcatcatcatttggaactgcacctccattttccacaatcttttgctgaaccttctccaggtaagcatcaacatcttcatcagcaatgttttgatcaacaacaaaattaaataaatctattactggcatgacaggaacacctcgctttttaaaaaaatcagaaacgtgcaagcaatcttccttcaaaaagtccaatgctgaaggatgatcaagatcaacggattgtgaaacatcaataatatacaagtggccctcaaaataaagaacgttgtattcactcaaatcaccatggaccagtttgcacttttggtaaagagtccgcattattgtaattatctcaaagtaactttctcgcaacttgtcatctgacaaagcagcatccttgagacgaggagcagcccaacctcctttccctatgaattccatcaccagtacatgaagcctcaggagcaacggttttgggcatcggatatcagctgctcgcactcgcataagattcctcatttccttttcagcccaggtcttaaccattttccgaggattgtgcttgcagtaaccgtatctaaaacgataatctccttgaacatatcggtctcgatccttaaaaacaaggacagaggttttgtagactttaattgctagctcctggccatctgtctttgttgcatgatagacatttgcctctttccctgtagaaatgcagccgtttatattatcaaaaacaccacggtttaacatcttgaataaaaccatgcgtgttcttgggtcaatagcctgctccactgtagcacgatcagccttctcagtgttccttatcttcccaattgctgtgccccttatgctatccctgattgcagtggtgactgaatttgacattcccacgttcatcctaccctcccactcctccaggggggcagcacgaatgtgcgaggccagcttctgggtgcggttggagagcggctggaatgggcgggagagcacgccgccgtgagcgttaggcctgcgcgccacggccccgcatccggaggccgagaaggcgccggcgggacgggcggagccgtcggggccctcgaccgcgtcaagccaatcgagtgcatcgcccacctcggagtccgaagcatcgtccaggtcggagtcggaccactcctcagcgtcggacttcacgtgctcctcagcgtcggacttcacgtgggccatcgggatagagctcgagggcggggaggaggtgagctgcatggcctgccggcgcggggagagacgacggtgaaaggaggcccgccttgccgtgtcccgtcgccggcggtggggcggattgtggcggcggtagaagggagagggagaggggcaacgggaaac

SEQ ID NO: 45193 - DNA, 804 bp, Setaria italica
  Peptide Sequence Number=SeqID_111167
ccaccatgttgttggattctctggtgtgctgtttggcatgaaggctgtgctgggtacctggccggacagttttatgtggattccagggatggtcattcctgcaaagtatgctgtctgggcggaattgttcctcacgcgggctttgattcccaagtcttcctttcttggccatcttggggggttacttgcaggatatgtctacatctggctgaagcgcgcgttcaaaggacgagacccgttcactcttctgatttcaggtggtgccagggttgtgacctcacaagtgagatttgctcagaaactcctgaggtctgtcctgccccagggccataaaacaggtggaggcagagttggatgtcattcatcagcaagagaatgcccaccaggtttatggagatgctcaacctgcaccaattataactcacttgccacagatgtatgcgagatgtgcagcactatgcgtgaagaccgtgcctttccgcagggacagcatcatcaagcttggcgtaatggggagctttcagttgaggagatgcgccgcaggagactggacaggttggataggtgatggagatcattgctaccggctacaaaattgtgtagtgctaaccaagctcctccgtcttgaagactgacatcacctttcctccgcaacatagtttcagcattgtgatgctgaagaccgacttacgcaattagactacccatcactattcgatggagattgttagtcatattgctgcgttcttttggttgtatcagagccatggaaagtaagtaggaatgttggatggcccacttttg

SEQ ID NO: 45194 - DNA, 328 bp, Setaria italica
  Peptide Sequence Number=SeqID_111168
ggggagggcgccgtgctgcgacaggaccaaggggctcaagaaggggccctggacgccggaggaggacaagctcctcgtcgactacatccaggccaacggccacggcagctggcgcctgctccccaaactcgcagggctgaaccggtgcggcaagagctgccggctgcggtggaccaactacctccggccggacatcaagcgcgggcccttcagccccgaggagcagaagtccatcgtccagctccacgccatcgtcggcaacaagtggtccatgatcgcggcgcagctgccggggcggacggacaacgagatcaagaactactggaac

SEQ ID NO: 45195 - DNA, 351 bp, Setaria italica
  Peptide Sequence Number=SeqID_111169
aatttgtaacataggaaccatcatagtactggaagaaattaaaaattgactagtgtgatggttcctatgttacaaatacatgttcattgggtcacattagtgcaatggtttccttgcttgatgcatatcaattgcactaataaggagggataggtatttctgagcatatttatttcttgttaacttaccaaagatttatttaattttccttagcattagatatttatattaaagggagcacctatcaaacaatggttgatggccgcttggcaaggttagaaactgatttcgttccttttttatagtttgctctcaatatgaattagcaattgctttttggattagcagcaa

SEQ ID NO: 45196 - DNA, 498 bp, Setaria italica
  misc_feature (495)..(498): n is a, c, g, or t
  Peptide Sequence Number=SeqID_111170
cctgatagcaatgagtggaatacatgaacaacacacgaccatctgatctttatcagtggaatttggataatgccttggttaatctgtcacttaaaatgagctcaatgttcgtctctggtgattactgctttgcctttctgcttgattacaataagcaatccgatgctaagtcgatgtccctggtgatagttcagtggttatgtccttattttgattgagattatgtaacagttttgggcttgctctgtcgagctacattagttttatattcacatattctcaacttatttcagtatctgttatggccctgagatcaacgttgttaatacttcaaagtatgaaaatagaattgtgtcgggaagtttgggtactctgtaaaacccgcctctttgggctcatcaatgtggaggctgtatgctaattttgctgtggttcagtaagaaaggttgcatccatggtgtataagttaggatgctcagattcgcatgcaaaaannnn

SEQ ID NO: 45197 - DNA, 711 bp, Setaria italica
  Peptide Sequence Number=SeqID_111171
gctggtcgactaggccatggagctccacaaggccaagcacgagaagagcctgtagaagaggagccctcaactaatcggctgccctcgctgtccccggccagatcgacgggcttcctgattcgtgaattcatgttcggtgctgtgcgttgtccccggccagatcgacaggcttcctgattcgtgaattcatgttcggtgctgtgcgttgtcgaagcttggcgttgactgaagatcttcgtgggcgttcttaagaagggcgaggtctgtactaggggaagccggatgctaccatctccttcactgacaacgatttccttgtaatcaccagcagcaagacgaacctgcagattgcatttatccgaggagctattaagatcaaggggagcataagcgccgcgcagaagttcacccctgacatattcccctagccggcgaagctgtaggaggtcatattgtattatttggtcacggttggataataagcacacgacgacgaaggggccgaagtcggctgcagcgtgtgaagccatgaagctctgcagcttgggtccaaggagggcgatcttctctgcgtggatccatggagggcggactcctctgcctggatccgcgtcagaggtgcccagcgagcgctgcctgccccggcctccacgggaacagtagggaaatgatgtgggctccatgattctgctcgttgaggtagagattagg

SEQ ID NO: 45198 - DNA, 641 bp, Setaria italica
  Peptide Sequence Number=SeqID_111172
cttaacatcctcctgacgtgccttatggtggcggcttcaaacagaagctcagcgttgacaaggagatcttcgtgggtgaccttaagaagggcgaggtcaccaaaggggaagccggatgctaccatctccttcagtgacaacgatttccttgtaattgccagcggcaagacgaacccacagattgcgtttatccgaggagctattaagatcaaggggagcatcagcgccgcgcagaagttcacccctgacatattcccctagccagcgaagctgtaggacgtcatattgtattatttagtcacggttggataataagcacacgacgacgagggtgccgaagtcggctgcagtgcgtgaaaccatggagctcagcagcttgggtccaaggagggcgatcttctctgtgtggatccatggagggcgatcttctctgcgtggatcttctccaccaacggttaaatacggtcaataaagctgacaggaacgctcaaggttatatatcctactacagataacaaggttttatggacataatgcatctttacagtgtctatgtattatagcgtccccatcagaaggcaggaagcacttttgctgctgtaattcaactggttctgggccatttcttcattttttcccct

SEQ ID NO: 45199 - DNA, 1501 bp, Setaria italica
  misc_feature (1426)..(1501): n is a, c, g, or t
  Peptide Sequence Number=SeqID_111173
gatgtcaatcaaagagctaatgagagcaccactgcttctgctttgttgttcaggctgacaggaacgctcaaggttatatatcctactacagataacaaggttttatggacataatgcatctttacagtgtctatgtattatagcgtccccatcagaaggcaggaagcacttttgctgctgtaattcaactggttctgggccatttcttcatttccccacatatcaataattctaaccatgctcctattagcttatgcaagcaccttaaatcagggaccggcaatatactgcctacccctattttgttttttctaaacattggtgatctttggtctcttagacaacaattgccttgcctacatgagatgctactgttatgtactacattttgtgtatgtgtgatactatagtcaattgtgccttgcaaatcaacacataaagtctttcaaatctgaataattagtttcgcagccaaatttatggttacaaactatttcatagatttgcctggacctttaaaaagctacactcaaatacaaccattaaggcatactatctacactaatgcactaatccttgtcatttgagttcttcatctggtgttacttgctgcatcttgtcatttgactgagttaaattttgtatttcggaccacgatttgatgctcagataatgctgctgatgcaggatgcacacgggttttataggtcactgctgctgctgctgctgctgggttcatgttcttgtctttagtgcttctttgtttttctgctatctccggtggtaggtgatatctttactagccttgcaaaatggcaatactgctttgtgtgcccaagagcgcctgaagataaatttctattttttaatttttgtcacactagtcaatttttaatttcttccagtactatgatggttcctatgttacaaatacatgttcattgggtcacattagtgcaatggtttccttgcttgatgcatatcaattgcactaataaggagggataggtatttctgagcatatttatttcttgttaacttaccaaagatttatttaattttccttagcattagatatttatattaaagggagcacctatcaaacaatggttgatggccgcttggcaagatgttttattatgggctgggtggtttgtaaagatttctgaatcttgtttgaggaagaaggcagaagctttacctctatatggatgtgtgtttctaaatttagctgttttgttttggtatgcttattgggatggggacattattcagcctatgcatctttttcaaagtacatgttcaatctggacatatgaactattgtaatgagcattgagttgagttgtcgatgaggcaaagaatcaaattggaacaatattcgaaatattccctagacatttgaatagagcatgaattacttccnnnnnnnnnnnnnnnnnnnnnnnnnnnnnnnnnnnnnnnnnnnnnnnnnnnnnnnnnnnnnnnnnnnnnnnnnnnn

SEQ ID NO: 45200 - DNA, 500 bp, Setaria italica
  Peptide Sequence Number=SeqID_111174
taaacctcaaaacactgctttcttatcagtttacaaagtagcagaacggaagatgattccatcagtagtgtcgccttacctttgtatttcaattccataattaattcgtaacaaagcaatggaaaagaatgatctggcaagttctgacaggaattctgcctactgtagggttcaggaagatagtggcaaagaagacagagaagattacaatcaataatgtgcaaggtgatggcaagcacacatatatgctaacatggagtaggaagtttttttcctacacaggtttttttttttggaagtggcccagtgttccatttggctattgtgaaaggtagagggctactgtgagtttctgacgtgtatggaaacaccaagccttattttgagaccacaactaccccatggtaaagaaatgaaaatgccacttatgcgttactttctccagttagcttatgaactcacaagattttgactctgtccccagaaatatcaatttaaag

SEQ ID NO: 45201 - DNA, 415 bp, Setaria italica
  Peptide Sequence Number=SeqID_111175
aatcgaagacaccagagtgaagaggatgctggctgttgattttgctaatccctgatgtgagatggtggtcggcggcgactgtggcactgtcctgcaaggagagtggagtggcaaggaggaaaggaagagttgcggcggcggccagtggtgggatggaatgggtatgtacaggagaaatcaagttgggatacaagagggaagggcttagtgcaagtgctgggctgagtgggcacttgaaacagaaggctgatggcctattaattcccaatttccttcaattttcttttttcttttcctttactgtttactaaaccagttaatatgtgttgcatctgttcaggatcagcaacatatatacaaattttgatggttacacaacataaatgattacacaatggaatatcttgtatagtta

SEQ ID NO: 45202 - DNA, 313 bp, Setaria italica
  misc_feature (1)..(89): n is a, c, g, or t
  Peptide Sequence Number=SeqID_111176
nnnnnnnnnnnnnnnnnnnnnnnnnnnnnnnnnnnnnnnnnnnnnnnnnnnnnnnnnnnnnnnnnnnnnnnnnnnnnnnnnnnnnnnnnaggttttcccttcttagttggtaacttggtatgtgttgtgtgagccaatgtagtgcgaagtagtagtggagcctgacccaaaatctcaagggttcctagagctcccctgattttttgtcacatgtaatgatttcaatggagcaagttgaatctgtatagcacatgcttgctgtgttccggtcctcgtctggttcagtttgaggagataattgaagcctttttgg

SEQ ID NO: 45203 - DNA, 2133 bp, Setaria italica
  misc_feature (29)..(29): n is a, c, g, or t
  Peptide Sequence Number=SeqID_111177
tgggaattagctggacgtttgcccagacncgggagcatagcagacagtccgaccgtaaccagctgaactacggattcaaaagcagtctatctcagagaaattagcaaagtacgatgagctactgaacatgtaactttttagccaagtcttcccaagaaaatatgagttacatctataaagtttgagtggagcacgaaacaggactgctttggtcgacacatctgagctacttctggacattggctctcttgcttaaaatgccttctaaattgagatgattgatcttcgcagcaaggatgaaatcattatctggttaaaaccctctgacagagtgagtccaaacatcaatttttccctactcgctcgtcgacgaactcgtcgccgaggactaccgcgcgctcgccggctccggccccgctgaggccgtctacatctacttgctcgacctaggctctcagccgcgcccgtacggctacactgcggccgcctccggcaccgacgcctcttctcccgggtattcccgctgcctcggtcccatgtgggcaggcaaggatcggtacatttggatcgaccttggtgccggcccggtgaactatggcccggcgctgtctggtgatggtgtgctccctcgtggtgagttccaccctcttgccaccctccacggtcggcccaaggcggagaaagctctcctcgctgatctggcttctcttgtactcggtgcttacaagtctttgctagtgccgtcgctcagaattccagtgtattatgagaactcgttgcttattcggcgggttcacatctatggggaccggaaggaaccagaggggcttgatttccatgtaattgagcagtcgattcgagatggggatctaccttatagtggccagagcttgaagtttgatttgcacacggtcaggtactccgaatgcccaatttgctcatttgcaattgccaggtcgacaaactcatttacatcgaggttcctgtttgcgaattacacactgatagtgaatgagtacttggactccaagcgtttgaggcaggtgctttcagactcatcggatgagatacatcgtctggctggggttcatgacaatgatgaacatgacaaagtggtgccagtttttgtgtttgatttggattatgataaacttttgccactggataggtaccaccaggcagtggcatttggtgatatggtggttgctgtgaggacaaggagctcacaaacagtaagtgactacacctgtaatggtcgacacgtgcttacaatgactagaaaccttgagcggccaatcattggctcagttctgcagagcatgtggggtgtttcacccacgcatcagtcatggagccctgaccataacgctacagttgttgattacacttggagcactgggcatacaccatttggtcctttttcagagaccaaatcactgtcttttgtgcagaaagatgcagctcgtaggaatgttcttcttaccaccttgaacttcacaatcactagcacaattaatgttttggagtcaatggcagcacatggtggggagaacatacttcttagaaagaaaaggcatgttgaattcattcagaggtggaatctgctcacatataaattggagaaggtggtttcagccatgtcacgcttggactacgagaaggcaatgtaccttttgagatcttcagaccatgatctgtatgaaattcactcattggtgtatcaggcatcccaggagcttgaggctacactggtttgcttcaaagatccaccattcccttgggtctcagtttccatgtctggagtgtttgtttttggtttcttttatgtgtactcgaaaagggataaattatttaggagcaaaaggaaacagttttgagttctgacagcattttagttcatggatactgtctgaatgtttgagcttgataataccatagttagacagcactcaggatgttgcatcccaacacattacatggaactgtaacaggacatgggttgcatcttgtttcaagcacatgagtttaattgtatgagatatactggattttcttgagggaagtaatacttccacttgtcttgtaagttccatgtgcctgaatttgtccttgatacataccgttgatctagat

SEQ ID NO: 45204 - DNA, 260 bp, Setaria italica
  Peptide Sequence Number=SeqID_111178
aaatagggaatgtgcaaaacaagatatccactatatttcacctcaattataaaaaatacactccgtacaaccctgcataaggataagttttcttttcttaacatactatacatcctggtcataggtaattgcaaatcctacaaattaatatccagtatgaagtgacagaaactcacatgaaaaatggcaactgctttggagagcactaatttgctgtcttctgaactcttatcctttaaaactctccatctaacatcaag

SEQ ID NO: 45205 - DNA, 403 bp, Setaria italica
  Peptide Sequence Number=SeqID_111179
aaccaacagcaccaactcagcttggtcgattttgaccaagaacaatctcaagcttgacctccaactcagcttgcttcttgctcatctcctctctatacaactccaaagcctgctcaatatattgaacctccgctggaaccatgaaagcacctccgtggaacctcaggcaatgcagatggagtccttctggtggggaactgcaggggacatcgcgcgaaggtgcagtcgaggaagaggtagtcgatgcggcaggctaggaggggcatcagggcgctgaggtagtctagcgtgaggcggcagtcgccggtgtggaggacggcaccgaaggagccctcgaacaggaacatcaccgcgcctgcagacggggtcagcatcatccgaaattccggatcgaggggaagaa

SEQ ID NO: 45206 - DNA, 411 bp, Setaria italica
  Peptide Sequence Number=SeqID_111180
gaacccaaccgctctgtccagatagactctgcttcctctgcagctggtagcacaaaatgtttcacctccaaagatgccaacagtcgttctatgcaggcgaaaagcgcttggaaataccccaagccttgactatccctacttgtagcgaccaatggcagctcagcaatttcactacccatgatgcggaaaagaccggcagaaactacagtgttgctgcatcaacaaaattaattagagcagcttaattaggaataatttattgacgatgtcatttcattttcagccagaaacaatctaagacaaaaattaccgcacagttaacacagcacaatacattcctgtgtaatcttgatcccttgcactcctcccataaaccatggctggaatgaggtctcggccagttgctatctg

SEQ ID NO: 45207 - DNA, 1381 bp, Setaria italica
  Peptide Sequence Number=SeqID_111181
ttcaacttatatcaacccatcaaccaaaatataacaggtagcatgcttccagaaactgttagcatgaacagaagctaccaaaaacaacatacattcatgtttgtataaacagttagcatgaacagcagctaccaaaaacccaaaaaccaacagcaccaactcagcttggtcgattttgaccaagaacaatctcaagcttgacctccaactcagcttgcttcttgctcatctcctctctatacaactccaaagcctgctcaatatattgaacctccgctggaaccatgaaagcacctccgtggaacctcaggcaatgcctacattgtttaattattaattaatatggtgctaaatttctgctacaaacttacagatacctcaggttagaaaaatcaccatcagatcagccatgttatgttccttgaggcaaccaacatgatattctctaccgcagtgataaaaaaagacatgaatgacttactgttacaaattaccactgttgccttataaaaagcacgagacagaaataacaggataacactctgttgattaacattatgattcttgaaacaaagtatatctggagagtaatgctgccagcaaacaggatgcctacagtaatcttatatagcttaaaaattaagctgcaatgcaaacaaacttcagttctcaactaacagcaagataatgcaaataaggagcatggcattaggacatagtagcattacagagtcaggaaaaccatactaattactatttaccctgctggtcatcagaaaatcatgaatcccctaggtgtcactgtacaagatatgcaaagcacaaacaattttctaaatacttgaaaaaaacatgaataatgcactacagcaatgtaaatttagtgtgtatgtatgtgcttcaagttctacaatatccaaatagtacgggtcctgagaagtataatatccaaatagtataagttctatcaagttcatgcagatcagagagcacaactactactatgttcttacggtacggtcctgagaagtacgggttgttgttgaggctcataatcctaggagcttgaagtgctgccttacagatggagtccttcttggtggggaactgcaggggacatcgcgcgaaggtgcagtcgaggaagaggtagtcgatgcggcaggctaggaggggcatcagggcgctgaggtagtctagcgtgaggcggcagtcgccggtgtggaggacggcaccgaaggagccctcgaacaggaacatcaccgcgcctaggaagtggttggcgtcgaaggcggtgacggtgaagttcgtcttgttggtgggacgcgtagcggcggggcgcccgcctccagctcgacgaacgcgacgcggtggagctgggtga

SEQ ID NO: 45208 - DNA, 1116 bp, Setaria italica
  Peptide Sequence Number=SeqID_111182
tttttggtttttggttttggtttttttcttagttttttttatatggcaacttatatcaacccatcaaccaaaatataacaggtagcatgcttccagaaactgttagcatgaacagaagctaccaaaaacaacatacattcatgtttgcataaacagttagcatgaacagcagctaccaaaaacccaaaaaccaacagcaccaactcagcttggtcgattttgaccaagaacaatctcaagcttgacctccaactcagcttgcttcttgctcatctcctctctatacaactccaaagcctgctcaatatattgaacctccgctggaaccatgaaagcacctccgtggaacctcaggcaatgcggtacggtcctgagaagtacgggttgttgttgaggctcataatcctaggagcttgaagtgctgccttacagatggagtccttcttggtggggaactgcaggggacatcgcgcgaaggtgcagtcgaggaagaggtagtcgatgcggcaggctaggaggggcatcagggcgctgaggtagtctagcgtgaggcggcagtcgccggtgtggaggacggcaccgaaggagccctcgaacaggaacatcaccgcgcctaggaagtggttggcgtcgaaggcggtgacggtgaagtcgctgtcggggtcggggacgcgtagcggcggggcgcccgcctccagctcgacgaacgcgacgcggtggagctgggggaagatgcggagggcgatgaggatggtgaggagggaggcgtagaccaaggcatgggtgaggaagcggtggcacttcagtgatgacgtcggggtgctgaagccccaggagcgggagaggtcgacgacgcggagggaggatccggatgaggatacggtggccttgccccaaggcgcggggtggatatgcggccggcctgggttgcaccgctcgtaggtcgaccacgggaggctgccctgccccaaggaagtgggtggcggtgggagtggcggcggatctgagggagggagagggagaaggagggggcagcgggggctatgggcggcggcggcgagggcaaagggcggcgtcgggccggagggagtgaagggggcaccggcgggagacggg

SEQ ID NO: 45209 - DNA, 1938 bp, Setaria italica
  Peptide Sequence Number=SeqID_111183
gggccaagcacggggatggcaccaatttcatataaaaaaaggttacatactaatgatcaataacttatcataatgaagcaaaatacgctttacattctttggacagagacattacaacaactgcgctacattgtatccacacagacgatctacggcgacagaggcagaccaacaaaaagggaatcacatgttcatgctgtacgttgaatttgagacctccccaaatccacccccctcctaacagcctggtatcacactactatctcctataataacaaatcaaaaaagccatcagcagatacaaccgagtcacctccagtgacacttctgacccgcagtcgccatcctgttccagcccaaacgaacactaactcaacacaagcacagcggcccacgaacacgcataccaaatgccacccaataagttgcctgcaattcactcggctttgcctttgcctttgcttttgccctttggtaggtatcttacacaatcttcgggcttctccttgacaatagatcaaaatgccaataccacccttttagcagaactagcattcccgttctgggagtgggaccagcttgtgtagggttgatgtcccctgaaacacagttgttcgcccacccttgaggtattcgcgcagctcatcctggcttatctttgtgaacccaaaccgctctgtccagatagactctgcttcctctgcagctggtagcacaaaatgtttcacctccaaagatgccaacagtcgttctatgcaggcgaaaagcgcttggaaataccccaagccttgactatccctacttgtagcgaccaatggcagctcagcaatttcactacccatgatgcggaaaagaccggcagaaactacagtgttgcgcacagttaacacagcacaatacattcctgtgtaatcttgatcccttgcactcctcccataaaccatggctggaatgaggtctcggccagttgctatctgaataatgggatcgaatgtttcatgaaaaatggcaactgctttggagagcactaatttgctgtcttctgaactcttatcctttaaaactctccatctaacatcaaggtcagcatcctcatctaaacctttctcttctcgcttcttcttgataacatctaaatccatggtagggacaggttctcccccacggttaagtaagtcttgcagtttctggttaatcctcacacagtcggtggaacaataccatgctccctcaggcaatgccgtcagatcagccatgttatgttccttgaggcaaccaacatgatattctctaccgcattggtcacaaagcagcacggtccgggtactgaatttctttttgctgaaatcatggagcttgcacagtgcacaaccgccaaatccagtcgcaagtgatgtagcaacacgtatcgaccgtgtgaatatttctgccaaggggtcagctccttcaatcctcccagcagctattgcattgttgttatatgccaaacaactttccctctgttgtctattctcacaatatcggcaacaccaagttcccttcgggttagcaaacaagctaacacattctctgtgaaaagctcttggacaggtatcacaaaggagaagctggccaccatctgaacaaatgctgcacaaatcatcactttgtctgtttgtcttttgaccttttaagagtgaaattgacagctcatgcagcgaaacaccatttgacatatatatgttgtggtacggtttgcgtcgagcagctcgaccagcatgagcttcaaattgtgaaggactaaccactgtgtcgcagcaatgacagtagatcccaagttcctttatatatccttccagtaacctctttccaccaacaaagtagccgacattagtgccctctggtaaaacaccactcatagaaaaccaccttatgccaaccccttatcctttcttgtaa

SEQ ID NO: 45210 - DNA, 481 bp, Setaria italica
  Peptide Sequence Number=SeqID_111184
ctgggattgagctatcagatgaggaagtggaagatcctatgctcattgaaccacatgctataaggagtggtagtgaaacaaggcgtccttgtcatggatggctaactgagtcagaagatgaggaagaacaaactagtgagcaacatgagttgcatcttccagaatccaggaggaggctcgatttgcaaaagaaagtggcttgagtagatggatgtgaaaccccatcaacaggtaatgcttccaaactttgattttccttactttatttgtctgcaattaacttggggttttcaaatatgggtgttcaggttgtcagtagtaacacatctattcagaaaataggactaaagtgaggttgagggatgcaactaggcctaggttgaagaaaactggaacctggtggatcctgatgtgcaggcctggccagttctcattctgcaccctggttcattcagtctggtacccagttcactgtcgttag

SEQ ID NO: 45211 - DNA, 422 bp, Setaria italica
  Peptide Sequence Number=SeqID_111185
ctcctccaacgacttcgacggcgaaattcccagcattacaacttgcggcagcaaattctcttacttggacgcgtccggcaaccggctcacggggccggtgcccgagagcgtggtcaattgccgcaacctcagggttttggatttgggggcgaatgctcttgctggagtcgttccacctgtgattgggacattgcgctcactctccgtgctccggctcgcgggcaatgccgacatctccggttcaatcccagctgagcttggtgggatcgagatgcttgtcacactcgacctcgcaggccttaatctcacaggagaggttccagggtccctcagccagtgcaaattcttgcttgagctgaatctttctggcaacaaacttcaaggagcgatcccaggcacactcgacactagtgcgactgagt

SEQ ID NO: 45212 - DNA, 518 bp, Setaria italica
  Peptide Sequence Number=SeqID_111186
aggacttcctgcagcgcgccgtgccgttcctcgtccacaaccccgacctcgccctcgtccaggcccgatggaagttcgtgaatgcagatgaatgcctgatgacaaggatgcaggagatatccctggattaccatttcaccgtggagcaagaagtcggctcctccacctacgccttcttcggcttcaatggaactgccggtgtatggcgcatatcagctctgaatgaggcaggaggttggaaggataggaccactgttgaagacatggatttggcggtccgagcaagcctcaaaggatggaagtttgtattccttggcgacctcatggtgaaaaatgagctcccaagcacactcaaggcataccgatatcaacaacacagatggtcatgtggaccagcaaacctgttcaggaaaatgttgatggagattgtcagaaacaagaaagtgacactttggaagaaaattcatgtcatctacaacttcttccttgtgcgcaagatcatagcgcacattgtgacc

SEQ ID NO: 45213 - DNA, 277 bp, Setaria italica
  Peptide Sequence Number=SeqID_111187
aagtgttcttctgaaacatcttgatgatattctacagacaggctatccagatatgggaaatcatgctgttgcttcaagcagtcaagcgatttcctttgtaggcagccaacatcctgaccatacaacacaagcaggagcagttgcacagacaacaaatggtctgatggggctttgatggaacatttgcattctgtagtccagatcatactagcaacattgaacttcagaattgacatgattgccgggaatcctcctcagccagaacttgtatactaca

SEQ ID NO: 45214 - DNA, 1179 bp, Setaria italica
  Peptide Sequence Number=SeqID_111188
atatgacatcagcgaaagtgagtggctcagcaggctgttcatggaaaagaaaaatgggctttaccttatcagagaaccatcttttctgctgatatgctcaccactcttcaaaaggataacatgattaatgaattgaaacgagagctcagcgagcaagaagatattctgcagttcttcaggcgttatgaggctattttggaagagcatcgatcaaagaaattgcatgctgatgttgatggcaaccaggttactttgcctatcccgtcgttgcgaatgctaaaacaatcgtcaaatgcttatacacctgaagctttcaagatgttccagggtgagtttgaggcttacatgaattgcatgtccttcccctgtggtgtggttggcacaatctcggagtataaaattgtgcttgatgagaagccatcagagagcattgtcaaatttgatgcactagatggctcagccagttgtagctgcaagaagtttgaggctgttggaattcaatgctgtcatgtactgaaggtacttgatctcaagaatatcaaagagctcccagaacaatacattttgaaaagatggagaaaagatgcccgttctgttcaaattggggaggaacctacctatggatctggcagtgtcatgcgatctccctcagaagcccgattcaataacatgtgccggttggctagcttgattgcttcaagggctgccaaatctgaggaggcaatgtcgtacattgaaagccaatcaagtgttcttctgaaacatcttgatgatattctacagacaggctatccagatatgggaaatcatgctgttgcttcaagcagtcaagcgatttcctttgtaggcagccaacatcctgaccatacaacacaagcaggagcagttgcacagacaacaaatggtctgatggggctttgatggaacatttgcattctgtagtccagatcatactagcaacattggtaagtagttcatgttaatttactgaagaggtgatattgcacaacctaaacattaaagaattcactttgttgcagtgtgacttgaactgcaaaggattcactgttttagtccaacctcgaggttggaggcatggcagtaggcttagaattgtatagctgtatatagttttccaagttcagaattgacatgattgccgggaatcctcctcagcca

SEQ ID NO: 45215 - DNA, 281 bp, Setaria italica
  Peptide Sequence Number=SeqID_111189
ctcagatctcgccaggcccgtcccgcgcggcctcccgcttccgatccccgcgaaagcgcaggccaaacccaaaccctaacccctagtctctccatcgctgccctgccgggcctgaggagagagcaggtcggaggcggaagcggagatggccttcacggcggcgctggaggccgatctgcgcgcgctctccgccgaggcccgccgccgccaccccgctgtcaaggacgccgccgagcacgctatacttaagctccgatctctatctggcccaagtgaaatag

SEQ ID NO: 45216 - DNA, 407 bp, Setaria italica
  Peptide Sequence Number=SeqID_111190
tttcccttcccggcggataaggggccattggcgattggtcgattcccggagctcttcgtgcgtgcgcaggtggggaaccagattatgcgcacacggccggcacccatggtgtcgacacggggaccatccagccccttctggaatgaagacctgatgtttgtggtggcagagccatttgaggagttcttggtgctgtctgttgaagaccgagtttcaccaggccgtgatgaattgcttggtcgccttgttgtgccagtatccaccattgagaggcggtgggattggaaaccagtggtttccaggtggtttgggctggaccgtggcactggtggtggcaatgtttctggtagtaatgtgcacaggttcgggagccgccgcatgcatctcaggctaagtcttgatggagg

SEQ ID NO: 45217 - DNA, 609 bp, Setaria italica
  Peptide Sequence Number=SeqID_111191
gcgccgcccgccgcgccgtgctccctgctccagcctccgacggcgcccttggcttgctgcgggcgtgcgcctcgtgccgcgcgcttgctgagggcgtgcgcctcggccgcgcccctgccaccgctgcgagctggcacttggcggcgctgcagctagggttcggcccagacaagccgcctccggtcgattcgccgtctccgatcgcctcgcctcggcttgctcacctccgccgaccccctccactccatctccccgtatcattcgctgaggttgctcttctatggaaacatccaagaacaggctcccaagaactatgctgattttgaggagaaggttaagcggaccatatatgtcgagcacctttctcctcaagttacgatccaagtcatcaaagcagctcttgcccagtgtgcgaatgtcgtaaatgtggaattcattgtgaactacacaatcccctatgatatcccttatgccgcgttggtggaattggatgaccatatgcaggccaaggctgctgttgaattgatgggtgatttcccattcataattggtggaatgccaaggcccgtgaaagctacccatgcaaaggctgagatgttccgggatccg

SEQ ID NO: 45218 - DNA, 682 bp, Setaria italica
  Peptide Sequence Number=SeqID_111192
tctagtttctttgtccttagtagttcgttccttctttctaagtattacctattgtcttttaagaagcattgttattaccatttaaagcatttgaattaagttccatcctcaggaagacttgcaggatactgaaagaaatcatatcctgaacataagctggaccttctgcatcccagtcggcattctgcaccaagcattttgagaagatacctttggtcaggaatttgcagtaatcctccagcttctataatttttctttacagggccatcaaaacctctccaatgaaagaatattcttttaggcctggaagttgaagctacaatacactagagcaagacaactgttcttctgtggcagagtcagcactccaaagatctgatatcagattttgtaacaattggttattatagtactcgtattgtgccttcaacttccaggcctaaaagaatattctgctttcattggagaggtttttgatggccctgtaaagaaaattatagaagctggaggattactgcaaattcctgaccaaaggtatcttctacaaatgcttggtgcagaatgccgactgggatgcagaaggtccagcttatgttcaggatatgatttctttcagtatcctgcaagtcttcctgaggatggaacttaattcaaatgctttaaatggtaataacatgcttc

SEQ ID NO: 45219 - DNA, 1633 bp, Setaria italica
  Peptide Sequence Number=SeqID_111193
tcatggcatatatccatttctatcatctaaataagttagctttgcgtatatcatatctgtatgtcaacattcaaaaacatgtatcatgagccattcgtattgcacagattttgctaacttgaatttatcttatgcgctagcagaatattcttttaggcctggaagttgaagctacaatacactagagcaagacaactgttcttctgtggcagagtcagcactccaaagatctgatatcagattttgtaacaattggttattatagtactcgtattgtgccttgttgtatatgtgtttatcttctctaattccattgttgtctttgcttccggccggctatgatcagtacttctgccaagatcagtagtgttcttacgcgacgatggaatccaacctgctctcgccctcgctccctacctctttgtttctacgcacgtactcccgccctgctaacttttcttgtcatgatggaaccgtcgaacagatgaagacaatgatatcctcgtcggattgagatcggatggctgagattcatggcctgagaccaaaaaaggtacacgtgtaaaatggcctgagattcatgcacgtactcctagcgcaccctgccgcctccgccgttgttccccgcactccccggcgaggagaagctggcccggctccagcacgcgccgtgaaccgcgaggatcgagtcctacgccgtgtccggccgccacatcctgctctcggcggcggcgggatgtccggtcgccggcacggtggcgttcgacgcgtccgcggaggagtggcacttcgtggatcgcgagaggagcctgccgttcgtcggcgaggccgttccctacggccgcctcttcctcggcaggtccaggagcaaagactccaaagacctcaccgcctacgacatcgccgtgacgaagaagggcactgatcggacgctggccatcgtcgaggtccctcttactttcgtcatggcaggagactcgccggtgatgtccggccagttcttctcttgcttggggaatggggtcgtgtgcgccatgggttgcttgaccgaaggaacatcccgcgatgtagaaatagatgatgacgagctctacatccatttgtacagccctgtcagtgcagaggaaggggaagcagaggcacaacagggtgtaaccgtgctatccagcaaaggctctaggtatcacctcaggcttcatgagccactttgccggctggttgccccaacacttgttgctgctccatgcgttgctatctagtgcttttgtggtttttctgatctacttgggagcaacacattgggctgctttttgctatcgcgattctgtcagcatacacacaacagtacgcatgatgcacagtggtagttcgtatggtaatcagggcaccttggagtactagtactgaatactgatggaacttgcattgaggttgtgcttgcttcctgaggtgtgcaggttcctgtagtctcttgtttatgacatcttgtgtgggcaaacgattctcctactgtctgttgctcggggttctactaaaatggatatcctgtaatttctgaagctacctaaactcaaaagacatgcatcgtgttactattgccgttgttaacttgcatttatctttcgcgtcagta

SEQ ID NO: 45220 - DNA, 1940 bp, Setaria italica
  Peptide Sequence Number=SeqID_111194
ggccaagctaaaactacagtgcagtgcagcaactacccttcctcttcctcctgcccgcgggagacgagggaaacggtcggcggcggaggaggatggggcgcggggcggaggcggaggacgacgccgccggggagggcaagccgacgctgctgcagcggtggtcctcgtcggtgtgggccgtcagcgggagcggccgcctgatgtgggcgcgcaacgaggcgtggcaggcgcacgccgggatggccttcgtccaggtctcctacggcggctaccacgtcctcaccaagtccgtcctcaacgtcggcatgaaccagatcgtcttctgcgtctaccgcgacctcgtcgcgctcgcgctcctcgcccccatcgccttcctccgagagagaaacgtgcggcgcccggtgacccgtcagctcctcgcgttgtttgctctcctgggcttcacagggatctttgggaaccagctcctcttcctccttggcctcagcttcaccaacgcctcctacgccgcggctttccagccggcgataccggtgttcacgtttctcttggccgcaattgtcggtgttgaggtgatcaacatcttcacgaaagacggatttgtcaaagttcttggcacagccgtgtgcgtgtctggtgcggtccttatggccatctacagaggcccgtctttgattgggatggtaagcaccatcgcagcagatggaaatgctctggccggcacacggagtagcaatgcctattctgctcagtggttgaccacagccatgctccgatatggtgtggagacatggcatcttggggtcgtgtgccttattggaaattgcttcctgatgggtgcttatctagtcattcaggctccggtgctgataaaatatcctgcaagcttatccttgactgcttactcctattcttttgccaccttgtttatggtattgactggggcatttgctaccaatgggctccacgagtgggcactgacaacaactgaggtcatagctgtcttatatgctggaattattgcatcttgtgtgaactatgcgatcatgacttgggcaaacaaaattctaggaccctctctagttgccctgtacaatccactccaaccagcatgttctaccttgctttcaactatttttcttggaaccccaatttatgtcggaagtgttgccgggggactcttcatcattgctggtctttacctggttacttgggctcgttacaatgaagctcaaagagtcctgacagccagttatttgcgacctcttcttgtggaggacccaccaaccgccaaggcagaaggaggttccttcagtggctccattgatccctagaccccagaggggtagatgggttggcttaattgtttgttcctaggacagcagcatcaaatttatttcacacgtgttgttagtttaatacagttcttgcctagagtcgtcctcttcaagataccatgctttaagaagcatgttattaccatttaaagcatttgaattaagttccatcctcaggaagacttgcaggatactgaaagaaatcatatcctgaacataagctggaccttctgcatcccagtcggcattctgcaccaagcatttgtagaagatacctttggtcaggaatttgcagtaatcctccagcttctataattttctttacagggccatcaaaacctctccaatgaaagaatattcttttaggcctggaagttgaagctacaatacactagagcaagacaactgttcttctgtggcagagtcagcactccaaagatctgatatcagattttgtaacaattggttattatagtactcgtattgtgccttgttgtatatgtgtttatcttctctaattccattgttgtctttgcttccggccggctatgatcagtacttctgccactttggagctctaatactcaaccatgataatgggtt

SEQ ID NO: 45221 - DNA, 539 bp, Setaria italica
  Peptide Sequence Number=SeqID_111195
aatttactaacaaaagctgaaaagccatcgtttccctgagatatattatgttcaatgctgttcaggttataattttgtagttcgcatcatctgtctacttatggataagcttttcttcctgaaggatatggatatgttacagattctttgacatgactgcaacagttgaccaatttagatatagttggaattttcaccaggtttaagttttggatttaactagaagatttatgttttggaccacagcagttgaccgatttagggatagttttctttaggaaaatccctaatggtgactttattgattataaaaacagttagacagatgatcctacaaatgcgctgcaaaaaacaactagtaaacttaaaatctagctatgtcatgagctgtgccatttgcttcccttggacaattagtaaactcatctcccaatcgtctgtttttatatccgttgcttcattccattttgatcctgtttcggcttgaatattattgcatccttaattatttgccaggtcctaggtgcctaaaccgtcct

SEQ ID NO: 45222 - DNA, 427 bp, Setaria italica
  Peptide Sequence Number=SeqID_111196
aggaaggcgctcgttccgcaggctcatgccgatgacgctgggcacgtcggcgaagatggtggccatgctggccagcccgtcgacccagacgtcggggtcgaagtctctgtcgccgaagaacccgttgccgtcgtcgtcgccgcagcaccacccggcttgctcacgtggttgtccaggatcaccatcacgtccttctcccccagggtgttcaccacagccttgagcgactccatgagcgtgaggtcgaggaagccgggattgttgacctcgacgccgccggccgtctcggcgaggccgtgcgccaggagggactgccgcacggtgagcgacgacagcgatgcgttggtcgccagcgcgatggggtacgtgagccggacgcagttgaaccccagggacacgaccatcccggcgatcgcgcccacgggtt

SEQ ID NO: 45223 - DNA, 335 bp, Setaria italica
  Peptide Sequence Number=SeqID_111197
cagcagtatgcaagagatggtacggcattatcatgcttgctattaggcaagaatgtgaaaatcctctcagttcattggacgctgtcgttcctgatgatatactggagaggattttctacattcttgcctatagcaagcatgataagggcaacagcagtatgcaagagatggtacggcattatctattcaaggcagatttctttggacccacatgatgcctcaacggccatggtacttcatgtttacctctaatgaaactgctgccggttatgcttttgaccccatccttcgtaagtggtatgatttagagctgctcttgtcaatataaggaagct

SEQ ID NO: 45224 - DNA, 551 bp, Setaria italica
  Peptide Sequence Number=SeqID_111198
tgacgctggccgacagggagcggagctgggagtcggccttcatccagaagcactgggcgctgcggcagctccggcgcggcgaccagcagtcgtggcggccgcagcgcggcctgccggagaagtccgtcgccgtgctcaaggcctggatgttcgagaacttcctccgcccgtacccgaaggacaacgagaaggagatgctggcggcgaggagcggcctgagcaggagccaggtctcgaactggttcatcaacgcccgtgtgagattgtggaagccgatgatagaggagatgtacgaggatctcaagaaggcctccggatccggaggcgacgagggcgtggctgcctgaacatcagagcagcagacctgggtttccacgtccgggatggaatttctgtaaaatctcagcactgctctgggagcttttgtacgagcattgctgccaccctgttatctacatacgtataaccttcctggcgtatttataaatttgccagtatctgcaagctgcagcgtagacacttgctgccacttgctcgagttccttttaaac

SEQ ID NO: 45225 - DNA, 1112 bp, Setaria italica
  Peptide Sequence Number=SeqID_111199
gttgaaacccagctacagggtagtattactgacggatgtttggcgcatgtgccttgcgtctgcatccatggacgacacaacacaggtttgtaaacacaacgcgactgaaggtttttatcattgcttggcttgcatctccacaccagagatctagattattctcggcaggcttgcattggttgctttcgcatggctacgctgacctgactgccgcagccttgtttcggcggtgatccatgccaggcaatcctatgtacagctccgtctccacgtccatggcgtcgtcgttctgctccgggtgatcgtcttccacggtgatgactgcccgcgcaggaggagtaggctgcaggggcggctgattcttgcacttttcacgtaaatcttcattgttcttgcgcagtgtcagctccttctccttcagcttattgacctgctcttccaacagctgagtctttcttcccctgatgcagtgaaggctcttttcaagtttgacttccaaactgtgcagttcttcaattgagcattcttccaacttctcacccaaaagttttcttttgtaagcttcaagtgcttcgagtttctttgccaggccctcagcatcagcttttacttgctcaatatcttgctgtactgtcttgctgctgacattatcctttgtgtatgctctataacgttcaattgttttctgcacactgccgttggcgaattcgtagagcttgccgcgcggggagaagacgacgagcgcgacctcggcgtcgcagaggacggagagctcgaaggccttcttgagcaggccgttgcggcgcttggagaaggtgacctggcggctggtcgggttctctatccgcttcatctgcgtcttcccccgcaccatcctggactgccgccggcgagagaatcggcctcgcgccaatcgaaccgcggccggaaccccagctcgtcctccctctcccggatcggccggcggcggcaaaaatggcaagggaggcggtggtgggagagagaagaaggggggccgcgtagggtttggccgtagccgctgcccgctgcgctgcttgcctccctctctctctctctctctcctccctcccctctcgtctttcctttccgcc

SEQ ID NO: 45226 - DNA, 423 bp, Setaria italica
  Peptide Sequence Number=SeqID_111200
ctgatataagatcagctgataagtcaagcaattcttctttatttgtggggtcaaagttgacagaacggctaatcttgccaactgagaacagttcagatgcgcaagcgaccagccgggcacctatcctcaacacctatcctaaactaaacatcactatacaaaagttcaaatttcaacatggactaccgaggatggccactgtgagtttatgaccctccaatcaaagtcttactaacaggcattcctaaaactatataatgccagtttcaaagcatagcatcaagaaaacgaaatgtatccaaatgagttaaaaattagcagcacactccagtaaaacatcaaaagtgacctatgactactgagacagtgtcagctccagacaacacatttgtatctctgtctgggcagacaagaaattggtgc

SEQ ID NO: 45227 - DNA, 306 bp, Setaria italica
  Peptide Sequence Number=SeqID_111201
aaaggaagccggggaaagctggattgaggtcaagaacgaggtccacacctttgttgcaagagacacgtcgcatccagactcggcgtccatctatcagatgcttgcggagctcgttgatgtgatgcaagatgcaggcttagatgttcgtatgcaggttctatagctgccaaagataaacagatcacttgcagactctacatgtacagtagcacatagtgtatgccatagtaaactgttagcacaattcctttggttttgcagtgagaaaccaaagggctgttctggtgaggttcggatcctggggat

SEQ ID NO: 45228 - DNA, 397 bp, Setaria italica
  Peptide Sequence Number=SeqID_111202
ggtgggttggttaggtagtccttgttgcatgtaggacttgggtcatatttcaatgtattaccagtaaagattgcatttttcaggacaattgttctgttagtcaggagttgattgtttggctgtgtttctaggcagcattattcttgtgtctgtcaagaaatatacatacatttggtagatctatttggtttgatttgaaaagaactgaattttatggtgtttaaatttctaaactcatcctgattacttaagctgctccaacaaagcctttccttttcttttggactgtcaggatcttggctctgcacttagactgccatgatattactaggcttcaattggttcttcattttgctctactctcagcattatttagtctaaaaaatttatattcttt

SEQ ID NO: 45229 - DNA, 524 bp, Setaria italica
  misc_feature (455)..(524): n is a, c, g, or t
  Peptide Sequence Number=SeqID_111203
aagatcgacgagctgatttctgctgtgtcgaaactgagcacagcggattccacccctgctaatgtcacctttggccaccgtcgctcccgtggtcttacatttgttccgagggcaatcaggcagaacaagcaggcggcctcccaaccagaagcaaaatgaccagcacagtgtcgcttggtcgttttcttgcctgtaacgaagtttgctacgatgtaacttcgatacagaactgggcaaatgtcagtggccattcagaatttcagacctgcagcgcccccacaaaatcggtagactgggctccaaatttttctgttggcctgcaacggtacatctttgttatgttgcgtggtttttattgtccggtattgcagagaaatcaattgtaacgatcttggctatgttgtttgttggccatgtttaggattgcagagaaatcaaatgtttctaataaaccnnnnnnnnnnnnnnnnnnnnnnnnnnnnnnnnnnnnnnnnnnnnnnnnnnnnnnnnnnnnnnnnnnnnnn

SEQ ID NO: 45230 - DNA, 413 bp, Setaria italica
  Peptide Sequence Number=SeqID_111204
agacaagtcagtacccaatcaatctgacaagattaatatgatggatgctaccaatggtgatgacttcggccatgaattcttcctttccatggccaatgtcacgcaagcatttgacagcaatcttgacatttccaagttttccctcatatactggcccgaatcctccttgtcccagctttttgctgaagttattagttgcttctctcagctgtttgtaggagaaccgtgtaggcatcccagccactcctttaaatggatcatcctcttccatcctcttcactattattcttctgatcatgagaatgagtaggcagacgactgcaactagaacaggaacaccgatgttgtaagcagttggatttattttcttacttgatgatggtggtaacatctgcaccttgacatatgcagat

SEQ ID NO: 45231 - DNA, 537 bp, Setaria italica
  Peptide Sequence Number=SeqID_111205
taactttgttgtacggtctaaagtattttctttatttactagtattttactaattattccgtttgtcctattgtaggttacggtcttaagtctagtcttctttttggattggtccttagagatactcgtaccactatcttcactgtcattatcttcaaccttaccagctccatttctttctgctttttgctggaggtagtcgctagatcttttccttgacacttgtgatttagctgtagagcctgtgtcttccatgtttgaggcattcgtcacttccataggttgtaactttttcttctggccactactagatggcatcctttgatagatggacgaagtgcttggagatagttcctttttcaatacaacctttggaagtgacgaatgcctcaaacatggaagacacaggctctacagctaaatcacaagtgtcaaggaaaagatctagcgactacctccagcaaaaagcagaaagaaatggagctggtaaggttgaagacaatatccgttgccatgaggtacggctaagcagctctt

SEQ ID NO: 45232 - DNA, 415 bp, Setaria italica
  Peptide Sequence Number=SeqID_111206
taccctttaggtaaatttgtcttgcttccttaacattaataacgagttgcatatatagaagaacaaaaactgaggaaactttctatgtagtacagagaaataagaaattgcataatgttcaacaaatgaaaagatgatgctatggccaaaagttacctggcaccgggaccagcctcacaggtgcaagaggttgagatatgtcaagtggcaggttcatgcatttctcccagtacatgttaaaggttgtgaatgcctgcccattctcataagctcattcttgattttgtcatcatgcacaagtgaaatagggtcataaagacgattataaaccactctagtgcatgatgacaaaatcaagaatgagctttcagcccttaggaatttctgtccaaagtttcaatggtgatctacttta

SEQ ID NO: 45233 - DNA, 491 bp, Setaria italica
  Peptide Sequence Number=SeqID_111207
aacgacaaagttgcctcctatagctatataaaggtagcaagcgtcaaactaattgtaaattacagattagcttttacaaaacggaagcaagatgggggaaaaaacttgtgacggcaaagatttcttattacagatttacaatatccgttgccatgaggtacggctaagcagctcttttggatggcctagagatactcgtaccactatcttcactgtcattatcttcaaccttaccagctccatttctttctgctttttgctggaggtagtcgctagatcttttccttgacacttgtgatttagctgtagagcctgtgtcttccatgtttgaggcattcgtcacttccataggttgtaactttttcttctggccactactagatggcatcctttgatagatggacgaagtgcttggagatagttcctttttcaatacaacctttgggatgtcaaaactcctgatattattttaattgtcttccacaacctcg

SEQ ID NO: 45234 - DNA, 1876 bp, Setaria italica
  misc_feature (1)..(26): n is a, c, g, or t
  Peptide Sequence Number=SeqID_111208
nnnnnnnnnnnnnnnnnnnnnnnnnngttaacgtacaaagttgcctcctatagctatataaaggtagcaagcgtcaaactaattgtaaattacagattagcttttacaaaacggagcaagatgggggaaaaaacttgtgacggcaaagatttcttattacagatttacaatatccgttgccatgaggtacggctaagcagctcttttggatggcctagagatactcgtaccactatcttcactgtcattatcttcaaccttaccagctccatttctttctgctttttgctggaggtagtctgaatacaaaacaaaacaactgtcaggatcaggaatccgtgaatgcatgattaatgaagatgaacacgagggaacattgaatgcactatcaccgctagatcttttccttgacacttgtgatttagctgtagagcctgtgtcttccatgtttgaggcattcgtcacttccataggttgtaactttttcttctggccactactagatggcatcctttgatagatggacgaagtgcttggagatagttcctttttcaatacaacctttgggatgtcaaaactcctgatattattcatattgtcttccacaacctcgccatctagttcagcaagttttgcagctgtgtccaattgccacattgtggagatggcatcatctaagcactcccgcgccatatgaagttctactatgggcttcgggtagttaaagctcaactcaactccagcaacttctagtatagagctaggtgcatcccatgggcaatggatccattctgttggcattctagcaagttcaggaatccaagttcttatatattcaccatctggatcgtacttttgaccctgaacctctggattatcaagacggctgagctcatggccatcaggcaaactcccagatatgtactgccaacccagaatatcactttctaggtccgcatccaaaagcacgtcccaaaagtacttcatcccccaaatccatggtatttgtagaaattttacagcaaaacttgagactatcactcttatcctattatgtgtccaaccagtagcccagagttccctcatgccagcatctactaaggggtatccggtcattccctgtctccaagatttgaagcggtcctcatccgatctccagggataatgcttcaagttacccagcaatgatctttcgtgtgtgaaagggaagttaaaacacaagtaacgtgaatattcccgaaaaccaattgatcgtaagaacaattgaacactctcctcagcttcagattttccttcattttcgcacttgacttgatgcattttaacgagttgataaaccttccttacactcaactcaccgaaatggagatatggtgacaacaatgatgttgtagttcccccaaccttcataccatgttttgaatattccaggagaccgtaagacacaaattcctgaagcgtattctctgcattgcaccagccaggagaccatgccctgcttagcaaagcattgcttgattcctcatccttactagattcaagacctagatcatcaatggaacaaccacgaacattgtctatacctggcaccgggaccagcctcacaggtgcaagaggttgagatatgtcaagtggcaggttcatgcatttctcccagtacatgttaaaggttgtgaatgcctgcccattctcatcataaacttcccatggctcataaagtagatcaccattgaaactttggacagaaattccaagggctgaaagctcattcttgattttgtcatcatgcacaagtgaaatagggtcataaagacgattataaaccactctagtggcaccggtggaatgaacgctctccaaaagagctgcaagagtg

SEQ ID NO: 45235 - DNA, 1615 bp, Setaria italica
  Peptide Sequence Number=SeqID_111209
ccttatgacgctacaaatgtcattaaaatattttccaacataaaccaactttctcccccacgcaccactcactaggagctagaaattgcctagcataagccttatacatcaaattccatggacaaaaagctgaactgacgcctgagggcaatgtgaaatgacaaaaggtgctatcctctcacatttgcattttgctgggaattaggtccaaaaggtatacgtgcatgagttggatggggaacatgacgatattacaggctgttttgtgattttttttacagcatcatgattcacatgtaaaatctcaatcaaaatcttgggagcattcgacgtcgttcccttcgcgtgcctgaccaaaggaactgtaagccaagtgatcacctttcttcaccttgccactcagaatgctctgcaggtccttgtcatcatgctgcagcctgccggttacctccaggcacagaccattcttggcaagtctcttactctgtcttgctcggtcagttttgggcttcactggacctgtttcgatgaacacaggttgctctctgattgaggggttgggctgtatgcggtggctctgatccttctcttcaggtggtctcatgattgggtgctctgtctccagctcagtggctccatccttgttcataatcaccttacggcccaccaaatcaaatgtaacaaccactttccccttctggttttcagctgcttcctgagcttcctcttgctgcttctgtaggactgacttttcctttgacgagagccaactgtttccttccatttcaaaatagtcactttggtcatcataaactttagtccttgcagcagcgttcctgtcatagtcaacaagcctctttgcatatgcttcagctgcagcttctgcttctgaaagaggtagtccaacatcacttaaacctgcatatgtactaccttccttcaagaccagtgcaccacagaagctacagggtccctcgccctcttgttcacacacaatcttgccacatgataagcagttgctaacaaggttatgctgccgtgcttggcatgaacaaggtttcccctgcttgaagacaatggaaccctttgctgcttcagcgagggaaatggcctttgctgctttcttttttggacctctcttggaagcaagtcgggattctccagtttctggttgactcttggaactctgattagaagaagatgcggcatctttttgtatgcgtgtttgtttctttgtctgtgcagtcggtgcatcagctgatggcttaacataaggctgaaggttagatgattgcgagctttcagttccatttgaggaaccaatgtgacccctccttcgcaagtactcctgaataatgtcctgagcagcttcttttccaataaaattctcgaggtagctggcggcgtcggggggagacgcgagctcgcagaaggagacgaggctcgagacgaggtcagcatcgaaatccagctcgctccccttacgctcccgaagctcctgtagggcgcccttcagccactcgccggacgtgctcgccgacgtcgccatcgccgccgccgccaacacaaacgccggtacaggaagaagagggtatgactttttcgcgattcggac

SEQ ID NO: 45236 - DNA, 319 bp, Setaria italica
  Peptide Sequence Number=SeqID_111210
gagttctaataccagaagactcctgctgctgcaaaaattcaagggaaagaggatcagaatctcagttgcagagcagaataagagtctttgttggattcgtagcatgaaaacttgctctgcagttaaaatttgcacgcagcacaatgagaacaaccggtccttctgatctaatggcaaaataaaagtaggaaccacaagaattcactgacggaaaaaaagaataacaaactgaaaacgctagtgatttctttagaattcaaaagccactaattgtcctaacccctttgtcctgttcatgaatcacgaggtcatcaatcat

SEQ ID NO: 45237 - DNA, 645 bp, Setaria italica
  Peptide Sequence Number=SeqID_111211
actattgtatagcagaatgttatgggctaactactcaaattttgcatggtattcttctaccgacccaatttgtttcaggttatctaaatgttcctttgaagctggtactggtcgtgatcgaaccgatcacaaaccacagtgtggagagcctcctaactctgaacacggcctctgaccttgaatgtttgaagccaagcagctgttggcccatcaaaattgagagcaacaaagtggggtttcaaggcatcactaacactgcacacatcaaagtatagctcgcacctatccttccagaacctgggattctcaccattaaacttggggaattctagtttgggtacatgagcaaaatgaataggactctgtctagcatcgcaagaaggatcgggtggtcgaggagggagagtgtgtgacatacccgtgactggacgtggcgggggagatccaaggatcccaccgccaacatcccggtggctgttatcgatgcggtgcccgctgggccgctccaaggtcgccgcaggtgggcgtgacgccgatggtggagcaaggttgaggtcgatgggattcacccacgatggtggcggtagcggtggttgcagtagtggctgctgtggtggtggtggtgcggtctcaagtcggtgcagg

SEQ ID NO: 45238 - DNA, 407 bp, Setaria italica
  Peptide Sequence Number=SeqID_111212
ggctgcagaacctgtccaaggaggaggccgcgttgctcgcccgcatgcgccgccggacgcagttctcccgccgcggcgtccgcaacctcatcgccctctccgtcctcggcgaggttggagctgtagtttacgcaatcatcatgacaaaatcagaggatctagattggcagatgagagctattagagtgctgcctatatttcttttgcctgctttatcctcaatgatatattcgatactcgtaagcttcacaaggatgtgtaaatatctcagaactcttgtcggaacttttcatatttatccagaactatttcagatttgttattctcagtctttgaactgcaatacatttgatgacttccatttacataaagttgttaggaattgagaacagtacaccaagcctttt

SEQ ID NO: 45239 - DNA, 153 bp, Setaria italica
  Peptide Sequence Number=SeqID_111213
ttttaacagaattttcaaatgaagagggtaagaaataatcttctaagaatacagtagcatcggttctaactagtgtgaacactacaaggatactcaattttctctcgtcgtattcagatatgaacaagaacaaaattactgaagttactagtt

SEQ ID NO: 45240 - DNA, 452 bp, Setaria italica
  Peptide Sequence Number=SeqID_111214
gcggcagaggccggggccgtccggtacgtggtgagcgccgacggcaagggaaagttccggaccatcaacgacgctatcaaggccgtgccggagaataacaagaagcgggtcatcctcgacatcaggccgggcacctacaaggagaaggtgcttgtcccctacacgaagcacttcatcacgttcctgggcgacccgaagcaaccgccggtgatcatgtgggacgacacggcggcgacccgcggcaaggacggcttgcccgtcggcaccgtgggcagcgccaccgtggccgtggagtccgactacttcctcgcctccggcatcgtcttccgtaaccacgcgccgatggcggcgccgggtgccaagggcggtcaggcggtggcgctccgcgtgttcggcaccaaggcggccttctacaactgcacgatcgacggcgggcagggacaccctctacg

SEQ ID NO: 45241 - DNA, 432 bp, Setaria italica
  Peptide Sequence Number=SeqID_111215
aactataatccttacatacacacggtgaggaaaccaacgtttaggtgtaaaactgtactaccaagacggaggcagtaacaaacacagtaagaagggaaaacaacagcaatagtagtatgctaacatggcactgcaggtactgtgtgtttttaaaaaagagaagtcataaaaaaattcaaggaaatatgaaatcttgagtaatctagtcagccgatgcactatatcaagcaacgttgactgagaaaaaggagcacgaactgcccttacataaacatggtgagggggcctatacctaaagatttctttgaacttttaggaattcctgaatatcttgttcatccttgtagtcccactctcatcactcgatctctacctgcatggtttagcgtgtgcgcgatggcgtcattttcgcaccgggtcggagctgagtag

SEQ ID NO: 45242 - DNA, 505 bp, Setaria italica
  Peptide Sequence Number=SeqID_111216
gggggggggggggggggggcgagtttaacacaatacattcgttttgacaggaagttctaacactaggcaggaaaaccaaagttggtcgctctgaaactttctgcaccacaattgatgacttgagacaagctcatccaactggccgagaagctgggaagtacaatgagcatgagcttaagcttgttgttgcttcttctcaagaactttcttccagcgcttttgatcaagcatcattgtcatgttttgccaagtggcggggagggacttgatgttggaggcgagcgcggaggcgtggtggtggacgcaggcggcggcgccgagggcgaaggcgccggtccaggtggagacgagccgctgcgggtcggagtgcgggaccccggagtcgcccctgtacgcccgcgcccagtagtcgtcgaactcgcccatcctcctccgctttccctcgaaccgaaccttctccttcccctgcggcggcggctgcgaacgctccggaacgaaatagatg

SEQ ID NO: 45243 - DNA, 295 bp, Setaria italica
  Peptide Sequence Number=SeqID_111217
cttcgtcgaattcaaggggccgacagaaagtatctatcaaggcggcgtctggaaggttagggtagaattacctgatgcatatccttacaaatccccatccatcggcttcatcaacaagatttatcacccgaatgttgatgaaatgtctggttctgtctgtttggatgtcataaaccagacatggagcccaatgtttggttagatagtcccttccattccagtgtcattatgagcacttacttcctattgtagcaactataaccggaacttcctcttttcttcacattcccctttt

SEQ ID NO: 45244 - DNA, 467 bp, Setaria italica
  Peptide Sequence Number=SeqID_111218
tgtattgttctattaaacctagtactattggtagtcatggagcctaattgtttggtattttagttaaattgtttttgtaagtatttcttccacaccttctactctatccgaatccttctgatccattaaatggggaggctgcagcattgatgatgcgtgaccgtcctgcttatgaacagaaagtgaaagaatactgtgagaagtatgccaaaccagaggatgctggcataaccccagaagacaagtccagtgacgaggagcttagtgaggaggaagatgactctggggacgaagctatactcggcaatcccgatccttagtctaagttggaagctgcgctcccaacaaatcaatacaatgttcattgcagaaactgcaaattcaacaggttgactgaagaaacagcataggataacatacagggtacacttatttacatgacatccggagttttttttagtttttca

SEQ ID NO: 45245 - DNA, 366 bp, Setaria italica
  Peptide Sequence Number=SeqID_111219
ctcggtggtagtatataaaattgttaacatagaatcagatgttacaagtgcagtacatattcttttctattttctcttgatgatgtcaaaacccctatcgttactttctcatgaccatggaaaaaatttgcaataagtgccacaagtcaaataatgatagtgacttggaaaagtctaagtaatcagtgcatgcctattgtattagtggtacactgcaattcaacacaactaagacacatctatgcagctatgcggattgtggaatgtggatgctagataatggttgagtccaacgtttaatgcataaaattggttttagggtttttacatgcgaggaattcctaccttttgtgttcaacaaacatg

SEQ ID NO: 45246 - DNA, 850 bp, Setaria italica
  Peptide Sequence Number=SeqID_111220
cttcagggcaatatcggatattaaattgtagtccacattcactaaaggtgcattatgcaagtagacacagcagccctggaagaagcagaatctctcgtctatgcaatgcttccttttgtactgattaaccatattcgaatcaccagcaactttgtcgatgttactgaaaatctgcttgaggtcagcaatatcaatgtcccagtagtaatagtcagcatatgaatcaatctcttcaggaaatttgtgcctggcaaaatcagcaagataaagtatatacttaggttgcaaatgaagaggacgtttttccttgcaacagtccaatatccagtcatagtgaatgatccttccctgacgtatggctgcctgatatttgatacctttcttctccgcagctatgcagtgagtaacagagtcattcagattcatggagaaagatcccccattttccacaaccagtttatgaaaatattcgagattgtatgatgatgggatattaacaaaatagaaaatcatgtttgcaaatatcagcgtttctcccttgagacctgacacatcagtcttcattagatgtgaagggatgattgaaacactcttcttcttctcccctttttggttgttcttgagcgtttcatgttatcattctcgaggctattatcatctgccaccctttgtgttgttccattacttgaatgcacaatgtccacaaatgcttgaacatcaaggcactcatgccatggcttatcatatctcaatctctgaatacgggggaatctcaagcagtacggagcagcaaatacctcggacttgattgtacgaatatcactcgttatagacattatgactgacttta

SEQ ID NO: 45247 - DNA, 279 bp, Setaria italica
  misc_feature (243)..(279): n is a, c, g, or t
  Peptide Sequence Number=SeqID_111221
agatggctgaggaggcccgccggcgcgccgagctcgcccggctccgggagctccacacgctcaaggggaaggtggagtcggtggtgaagctcaaaggcctggacctggacgacatcaacaaccagcactacaccgtctagtagtagtagactaggggccttgatgctgaacatttgataatgatttgtcttttctttttgccataataataacaaagaaatgtttttccaaaaaacaaaaaannnnnnnnnnnnnnnnnnnnnnnnnnnnnnnnnnnnn

SEQ ID NO: 45248 - DNA, 537 bp, Setaria italica
  misc_feature (528)..(528): n is a, c, g, or t
  Peptide Sequence Number=SeqID_111222
gctgaatgcagtgatggaagacacgacaggcactatggacgtcatgacctttgatgggctagcatggaagcttgttggtgctgcagcggaggagctcgctggagaggtcacaggcaaaaagatttcagctgttcttcgttcccgccagagccacagctttgtaattgatgccgccaacaggtgctttgtggtgaagcacatcccaaatgaagatgagctgcagctcattggttcagctgatgtggcagctggaggtgaccctctcctgtcagaggaagagggctcttctgtatcctacgactccagtcctgtaaaaattgttaagaaggagaagatggtggttaaagaagagagtgaagtagaaagtggttgtgaatcgccacagggagggggttcccctgcatcctacagttccagttcaccagcgaaaaaggagaaggtggagattaaagaagtgagggacccaaaaaaggctgaggatcaccaaaggcaatgaagctgagtagacatgcagaatgaccccctttnaccataaag

SEQ ID NO: 45249 - DNA, 756 bp, Setaria italica
  misc_feature (722)..(756): n is a, c, g, or t
  Peptide Sequence Number=SeqID_111223
agccagtaccccactcgcacggccgcgcaccgccagcacggcctcctcccctcccccgtctccatccatccccgctccatccaatcctccccgtctccccaacagatcattcatcgagggctcgcttgtcggtggggaaggaaagcttctcgttctcgccgcccaacctctcctccgctgcctctctgctccaggaacttgggaaattatgtctctttgaggggaatcgagggcctttcctttacctttctgggctccatgtctaagtgggagtcagtcacatttgaggaatctcttagctttgtcaagaaagtaaaggcacgtgactatatgctatacctatcactgcttgatgtgctcaaccggaccgatcaaatccctctcgaagcttacagcgagctttcacttctcttccgacatcatgaagatctgctagcggagctgtcaaagttcaggcccctcccatgcccgaacagcatatatacccacggttcgatctggatgatcatattcctcatgccctttctgctcctgagccttgtcctagcctttcagaagccattgaagtgcttcctgctccagtagcctgttgcaagctgaaaacgctgcatcatggtactagcggccaattgtatatatatgtgaatggattgctgtcctgcaatatctgtatgatctccttgtatgctcatgcatggaaataatctaccgtattataaacnnnnnnnnnnnnnnnnnnnnnnnnnnnnnnnnnnn

SEQ ID NO: 45250 - DNA, 523 bp, Setaria italica
  Peptide Sequence Number=SeqID_111224
cattatttttcttctataaattaaagggatggagcatgtatgcccgtgtttccataacgtatcaaggattttaatatcaactttcttgaatattattggcacacacaatgggtcggccatgaccaattgcaaatttactagtgcattagaaattgtcatacgtttgcctagaatctttgctcaattgatctgtattcctaaaatgcacatccatatttattggttcattatatttcaacacttaaagaaagaaaacctctctttgaagaaagagtaaaaagcatgagcagtgtcatcgagatcaactttgaaaaagatttgggtccctaaacttgttaaatgtgtcatctaggtccaaagtgcccaaaatacccctatggttcctggtgtggcatgtcaattggagatctcgtattgacaagtcaaaatcatagggtatttttgacccttatctgcattttccaagttcatggacctggatggcactccataacaagtttatggactgcccacaaatttcacg

SEQ ID NO: 45251 - DNA, 728 bp, Setaria italica
  Peptide Sequence Number=SeqID_111225
ctttcttcgataacagatgtctattaatttatgaagtttttacatcgagatggtaaaagtatttgaaaagcattcccagccattgcatatctaggatatacatggccaaaaatggaatgtaagaacacgtactctaatgactatcaatccaaagactaactgccacccatgtccctgggtaaaaaaaactccttagctaccagcaccaactaatgagatgctactgcataaaacgcatttgcttgtcttttactttccatgcaagttaaataccaaggttgggacattttacatcttgttgtggggcaattggtgtgtatttggtcggcaagtagtagtgcatttcaaaacctttttgataaaaactgcttcatgatgtgcttataaaactactctgcttacccaaagatcgaatttcaggcccaatatagtgaaagtaacgaaaaagagaattttctaactggtgataaatgtaatggagaaaagcaccacacaataagacagatgctgcttattattgttgtttgttccttctaatacactgtgacttgggtttaagttttaaaggtgcacaagaacatttactccagctagaaaattttccaaaaaatattatgttgttttaaataggctttcttgtccattggtggaccaaatggtgcttgtgcactagaggttttgccttaattcattcatttatcaatttgatgcagctcttgtcactgaag

SEQ ID NO: 45252 - DNA, 391 bp, Setaria italica
  Peptide Sequence Number=SeqID_111226
ccatgtcgacgatgcaaggttctatctgcacaagttccctcttctctccaagagtagcttgttacaaaggttgataattgaggccagtcagaacggcactgacgaagttgtcatacaagacattcctggtggagtgaaaacctttgaaatctgcgcaaagttctgctatggcatggtggtgaccctcaatgcatacaacgttgttgctacaaggtgtgcagcagagtaccttgggatgaccgaggatgttgagaagagcaatctgatatttaagatggaggtgttcctgaattctggcatcttcagaagctggaaggattcaatcatagccctccagaccactgatcgcactgttaccttggtcagaggagctaaagttggtcggaagatg

SEQ ID NO: 45253 - DNA, 811 bp, Setaria italica
  Peptide Sequence Number=SeqID_111227
taataagctacaggctaatgcacataaatatttcaaagtggggctgaaatgctactcgtagccagagaagcaagatgcgcatgttttattgactcaatatttaaaaatagtactcgcctgccttcaaaaataaaagtacactgctggaccactgagatttcagaatgtcagttaacaaattggttgcatgggacttcatccttcagcttagataaaagtttggcgtccaggacctctcgagcatagaaaagttgtacaactcctggtgggcaactggaccacggtataatggttccaacagatatttgccagtaaggcaccctaccaacttgttgggacactgaggagcacttgataaagtctgccaagcagtatggtgatctcactttgctctactaggcaaggtaatcaatcattggaaaagcggctagcggccccactaaatataaaaattttcagaagaaataagaaaaattaacccaagcattatatttttattgtttaaacgttgcagatgcagaggtagttgttcaacatatctcaagacgtataaaaggtggcacaacaacaactaaatacatcagcgtcctgaggggctgagacaaggttttagctagtacagtactgctaagatgtcaaatttagggcatggcatttgtctcagatgatgggaattcatcattagttgcatctctatatattgcttatctaactgtgagcaaatctgcagcgcaggctaaacacaagttcaatttcatggctaagatcagttaaaatttcagaaatagctcacactaaggcaacaaaacta

SEQ ID NO: 45254 - DNA, 462 bp, Setaria italica
  Peptide Sequence Number=SeqID_111228
tttttttatgttttttggtttcaagtcgcattctgcaatcagcagcagccagcagagtgacgcggacacgcggacgctgaatgcatggaaagctaggcccacatgcaggcaggacgcgaggatgcggacgcgcgcacaaggcaggcccgcgtggtgggcgaccgcgtccgcgtaggtccacgtccacgtccacatgcgaaggcacgtcagcagcatagacaaaagaaaagggccctgtcctggtcggatatcacgctgcattctatactgaggtacagagtgacacgacaagcaccgacttcttcacagagcatactgtgcagcgaaagaagcagcggctagtttctagcgaaacagggacagcagggtacgtagtgcggctaggaaagcagtatactgtgcatgcatgcatgcgtatgcgtacgtacgttgcagttgcgcggtcacatgctatgtcgtatt

SEQ ID NO: 45255 - DNA, 320 bp, Setaria italica
  Peptide Sequence Number=SeqID_111229
gatccatcgaaaagagacaaccgtggcgaagtccgcctcgcttaggtttgcatccccaacaatggggagacattctgtagagcagggaaccctattaggagaaggccggttccctggcgaaatccacaggagcgatcggggttctcgtccggtccgctgtcgccgtcgtcggagggggaggactcgaaggaagatgactgcatggattcagaggaatcaacagtggagaagccagagcccctgcgtcgcccccaccgcgggcgacacgggcggtgccattgtagctgccgccaacccctctacccctcgagcccacctcg

SEQ ID NO: 45256 - DNA, 257 bp, Setaria italica
  misc_feature (257)..(257): n is a, c, g, or t
  Peptide Sequence Number=SeqID_111230
gtcgggaagaagggcggcggcgcggccggctgcgcgggctgatccgggaagaagggctggtggagctgcctcctggcggtggcgagggcgtcggggccgttggcgccatcgacgcagcaagtggcgagcaagatgggtagcagcagctgcaagaattgccggggagatggcattgtgatggagagagagcagtgaactgtagaagaggaagcaggagcaaaagctgcgtgtgtatggcgtggtgtgtgcgatcgacn

SEQ ID NO: 45257 - DNA, 523 bp, Setaria italica
  Peptide Sequence Number=SeqID_111231
gtggggcctctacgacctcctgcttggtgctggtgaccactacctcggcggcgtcgccaccgtgctcaccgccgtgctcaagctcatcgaccgatatgacctctacggccaggtggcataccccaagcaccacaaccagaccgacgtgccgcacatataccgactggctgccaaaacaaagggagtgttcataaatccagcccttgtagagccattcgggctcaccctgatagaggctgctgcgtatggtctgcccgtggtggcgaccaagaacggcgggccggtggacatcatcgaggcgctgcacaacgggctgctggtggacccgcacgacgcggcggcgatcaccgacgccttgctgagcctgctggccgacaaggcgcggtggctcgagtgccggcgcgccggcctccgcaacatccaccgcttctcctggccgcaccactgccgcctctacctctcccacgtcgccgccagctgcgaccacccggcgccgcaccagctgctccgcgtccccgccgcc

SEQ ID NO: 45258 - DNA, 426 bp, Setaria italica
  Peptide Sequence Number=SeqID_111232
gacagaacgaagacgacgacatacataatatgaacattgtactctgctttgtacaccatcaacagcacaaacggcaattagcatatatcatgctaaatttgaatcaaatgagccacacaaaggtaatacgtgcatacaacataacatccaagtgggcaaacattgacaggtagaagatttctgacagtgaatgcatcctgtcttgcactgatgccttcaacagacaccagcattgctaagctaaatgcattgctgtgttggtttctacagtgagtgtctttcatgctcggatgcatggccacttgaccaggcaatgttgacgtgctttggccttccaaatttcaagggtttggttctttttttttacctattctgcgaaatctgtaagcaggagtgcccttgcaaagtataaattggaggaaatat

SEQ ID NO: 45259 - DNA, 373 bp, Setaria italica
  Peptide Sequence Number=SeqID_111233
tcctcaacgccgtaaaagagagtcatgtaacagcgtctcctgaacaattggttgagttggtcactaggagaaccatcagccagacaacacaccatgtccacaaccagtagaggacaaccaattgaatgctaactttgtatctgagaaccacagcagaaagatggaaagtgaaacctaacgctagctggccacatggcatgaaatctggaatgcgacccttcgttcttacaagttacaaccaatcacacaatgtttatggcacagtgcgctggtgaagataccttcaaggcttcaagcagtggtgaatctgcaactctttgcaagagacgtggcatgcaagccagactaagcaccaaggagttcgttgcacttg

SEQ ID NO: 45260 - DNA, 225 bp, Setaria italica
  Peptide Sequence Number=SeqID_111234
ccttgaccttcaggccactctccagaagctgcatcgccttctctcccctcaccgtcacatagcacgcaatcttctcattacgcctgatgccgaacgacctcacagtgtacctcgccttggagaacaccggtgactgcccactcagctgctcgagcaccttggcggcgagagcggtgatcgcctcactcgcgccgccaaggtgctcgagcagctgagtgggcagtc

SEQ ID NO: 45261 - DNA, 651 bp, Setaria italica
  Peptide Sequence Number=SeqID_111235
tcaaggacgacgtagaagtccatgccgtagataccagtagatgggtcatacttgatgccaagatcaatgtgctcctggataccaaaccaaacaagccagtctcactgaagttcctcctcagcagctcatactccttgaccttcaagccactctccagcagctgcatcgccttctctcccctaacctgtcacatagcacgcaatcttctcattacgcctgatgccggtatctacggcatggacttctacgtcgtccttgagcgtgctgggtaccgtgttgcccgccgccgcaggtgcaagtcccgtgttggtatccagcacagggtcaccaaggaggacgccatgaagtggttccaggtcaagtacgagggtgtgatcctcaacaaggcccaagccaactaactcttaagcatcacaagaagagcttagcccctctttagagctcgagctatttaagtctatctggtggttggatttgaactagagaaaccagaatgttttgtcagttttgcctgtactgctgcagttggatcctttttctgggcgccctatactttcatcttaattctgcttgtgttttacccccatttggccaccgacagcaatagtagatgtctggcttattctagtaaacgaaaaaaaaaaaaaaaaa

SEQ ID NO: 45262 - DNA, 995 bp, Setaria italica
  Peptide Sequence Number=SeqID_111236
ctttaatttagctcagtgcacaactgagctcaggttcagtttcgattgtaaacatttactagaaacgcaattaagtcaggtctaatttagcacaaattttgtagcaaacgttggagctcaggattttccaagaacgaaacaaaacaaaacaaaacgatactcgacagaataagccagacatctactattgctgtcggtgccaatgggggtaaaacacaagcagaattaagatgaaagtatagggcgcccagaaaaggatccaactgctgcagtacaggcaaaactgacaaaacattctggtttcttctagttcaaatccaaccaccagatagacttaaatagctcgagctctaaagaggggctaagctcttcttgtgatgcttaagagttagttggcttgggccttgttgaggatcacaccctcgtacttgacctggaaccacttcatggcgtcctccttggtgaccctgtgctggataccaacacgggacttgcacctgcggcggcgggcaacacggtacccagcacgctcaaggacgacgtagaagtccatgccgtagataccggtagatgggtcatacttgatgccaagatcaatgtgctcctggataccaaacccgaagcagccagtgtcactgaagttcctcctcagcagctcgtactccttgaccttcaggccactctccagaagctgcatcgccttctctcccctcaccgtcacatagcacgcaatcttctcattacgcctgatgccgaacgacctcacagtgtacctcgccttggagaacaccggtgactgcccactcagctgctcgagcaccttggcggcgcgagtgaggcgatcaccgctctcgccgacggagatgttgagcacgagcttctggaccttgatctcccgcatcgggttagactgcttcttctccgacgccatggggaagatctgggaggcgacggcgagggaggtgagatgggttctgcagtgctgcgcggggcgg

SEQ ID NO: 45263 - DNA, 600 bp, Setaria italica
  Peptide Sequence Number=SeqID_111237
ccatgacctgttgccttgcttcattgatttggccatttcattgtgcctttggtttttgttttcgttaatgaatgcttctgttgatttttgcatttacgaaaaaataattcgtcccgtgtcctggtaatgtgacaggatgacaaggtacttgctatcctgcatcatgatactagaacatatatcttgaaattaaatcaaacatgctgaacttgacaatgtgtaaatgaataaatgaattgtgtttctacttacaccgagtcccagtgatacaaatggtttaacaaaaacgattggagtatgaatagtgggttgatcatggttcgtcattgtatttaaactgaaattttgcaagcattcatttctaatatttatttcacaaactctcttaatgtttatagttattaatacatacaatactggaaatagtataccccacttgagatttaggtttctagaatcaacttgatgctgctatagcatgtcatctgtgatctacagtaacttttgcaacagttgtaactacatcgcactgcacacttcaatcttttgcacagagagtttgttgaggataaacatgtttttaattcaaaaaaggataaa

SEQ ID NO: 45264 - DNA, 838 bp, Setaria italica
  Peptide Sequence Number=SeqID_111238
agacaatagttagcatggttgccggtcggcgacgggagcgccgacgtccgggcggtcgtcaagaccgtcggcgactttgtccacgccggcggcgtcgtcgccaaggccgggtgctggtccatgctcaagggcggcctcaccgccgcgtcttcgggcccagccgagctctacttcgagagcaacgcgacggtggacctctgggtggacagcgtctcgctgaatcccttctccaaggtcgagtgggaggcgcaccgcgccgagtccgtcgtgtcggcgcgcaagaagacggtgaggctccaggcgacggactccgccgggaagccgctggcgggcgcggcggtgtcactcgacgccgtccggacaagcttcccgctgggtgccgccatgagcagtcacatcctgaccaactccgcgtaccaggcgtggttcgcgtcccggttcgcggtggccaccttcgagaacgagatgaagtggtacagcacggagccggcgccggggcgcgaggactacaccgtgcccgacgcgatgatggcgttcgccaagtccaacggcatcgccgtgcgcgggcacaacgtgttctgggaccagcccagccagcagcccaagtgggtgcagtcgctgccgtacccgcagctactggcggcagcgtcgcgccggatccgctccgtcgtgtcgcgctacgccgggcaggtcatcggctgggacgtggtcaacgagaacctccacttcagcttctacgagggccggttcgggtgggacgcgtccacggcgttctacgccgccgcgcgcctgctcgacaccggcaacgcgctcatgtcatgaacgagttcaacacgcg

SEQ ID NO: 45265 - DNA, 433 bp, Setaria italica
  Peptide Sequence Number=SeqID_111239
agggtacacgagaggaggtagactaattaaccgacagtttcttcatagcattatatgccttggaacactgacagtcctgttaagacacacatggctgttgcagttctggatcacagcttgagcactgattacccctcaaagaacataagtgaggggagaccccttagctggaagcgtgtgtttgttcaaaccgacaatggttctgttctgggcattgaactagagccaggagaaaatgcacacactgtaaaaaagaagatgcagatagcccttaatgtatccactgaggaaagctcactgacatttggtgatcaagttttgaacaatgacctcagctatgttcggaatgactcaccattgctgctcaccagaaatcatatgcatagaagctactccacaccttgcctctcccccaatacgtgcgactgagtcg

SEQ ID NO: 45266 - DNA, 223 bp, Setaria italica
  Peptide Sequence Number=SeqID_111240
ttttgttgacaaactttgttacaggaacctgacaaaagtaaaccggagacggtccgcgagcatagaaggccggtcgttagatccgggcgagcttcttgccgcggcttggactgcaagtcgtgtcgtgcacccatggcggagcggtgcgagcagaggcgcccccaacccttgacggcgatagcgtcgatgttgcgatggatccttcgattccttggacggcggc

SEQ ID NO: 45267 - DNA, 490 bp, Setaria italica
  Peptide Sequence Number=SeqID_111241
aagaaaggaacaagaacaaaacgaaaaaacccttagacaaatcggagtaaagatgctgccccgcggcggtttgttccggtagaacacgacaccggacaccaggctgatgagcccggcgcccaacgcagcggcggcgaggccgaacccgacgtccataccgtagcgcgtctgcgcccacaccatcgccgtgagcgcgacgagctcgccggcgcagaagccgaagtaggagaggttgaagtacgtggagagcctcttggcgtccttctcgaacgcgccgccgccggagaactggtcggcgccgtacgtggtcatgttgggcatgacgcagccgctgccgagcgccaccaggtagagcgccacgaagaagatggtggccttgaagccgcgggcccgctcgcagctgccgaccatggtcagcatgttgcacggcgccgactttagctgtggtagatgagcttgtaccgacagtaatatcaagcccgcgagctcg

SEQ ID NO: 45268 - DNA, 1192 bp, Setaria italica
  Peptide Sequence Number=SeqID_111242
gggacagagagttctcgagctcgagagcgccgcgcgaggagaggcaagggagatgagcggcgaggcgccggccggcggcggcggcggcggcggtggcaccggaggggaggcgaacggagccccgccgaacgtcaccatctacatcaacaacctcaacgagaagatcaagctagaagaacttaagaagtccctcaacgccgtcttttcccagtttgggaagattcttgatgtgcttgctttcaagactttgaagcataaaggccaagcttgggttgtcttcgaagatgttgcatcagcaaccgaggctataaagaggatgcaagactttcccttctatggcaaacctatgagaattcaatatgccaagaccaagtcggatattgtagcgaaagctgatggcacctttgttcctcgagaaagaaggaagaggatcgacgaaaaacctgaaaagaagcagaagcgtgagcagcaccatgaagctactcaaattggcatcggtgtaaatgcttatcctggtgtttatggggctcctcagctcacccagctacctatagctggaggacagagggtcatgatgccagagataattgtaccaaacaacatcctcttcgtccaaaacctgccacacgagacgacccctatgatgctgcagatgctcttctgccagtaccctggcttcaaggaggttcggatggtcgaggcgaagcctgggatcgctttcgtggagtatggagacgagcaacaggccaccgctgccatgacaccgcttcaaggcttcaagattacaaaagagaaccagatggtcattacttacgcaaagaagtaacaagctccagagctgtatcgacttgatgggtgagatgttgtatttggaggtttgcacaattgttagatccccttgcgtgttaggtagactggcatcctggacaatctgttacttgtaccacttagttgcagttatgtgcacttcaggaacaaatatgaaaatggaaactgttttttttctcgctcatgtatctaacgtagcaactgctccgctgaattggggtgttttggagaagtgctccgcaacaactgctgccgatgaggtactctagttcgcgaaggaaacagtcacagagctactgtaacaaagcaactgcatttcattctatggcacagcgcgctcaatgtatctggaaattttcattgc

SEQ ID NO: 45269 - DNA, 292 bp, Setaria italica
  Peptide Sequence Number=SeqID_111243
atactacaagacacggttcaggcgtgacaaaagcaagaagtatgggcacaagaacaaggtgcagggaagcagacaggcgtaataaccccggtcttttcacgaacacttcagttcaccccatcccgacccgcgcacacctaacagcagcagaatcactcccccagtggacagaaatcacagcactcggacatgtgaaacgcaccaagaagagagaagccgcgtgaccacccagagccctgacgccaaaccaaaagggagatctctccgagcaaggtcatgcgccggtaccgcg

SEQ ID NO: 45270 - DNA, 354 bp, Setaria italica
  Peptide Sequence Number=SeqID_111244
tggcgtggcttgacggtcaggcggacgcccaggcgcttggccgttcacgcggcggcttcgggaccaagctgcatgtctgtgtagacgccctgggcctgccggtccgcctcgccctcggcccaggccaacagagcgacatgaccccagcctgcgatctgatccacggcctcgccgcccaggccctcatcgtaagcgcccggtgacgaccgccttccgtgacggggctgggatcggatagcggtcgggcacatggacgctgagggtagtgtccacgagcggggcttaatggacacgatcgtagtggacggtatgacggcggggtctcggcggcgcagattctacagtctggaagag

SEQ ID NO: 45271 - DNA, 230 bp, Setaria italica
  Peptide Sequence Number=SeqID_111245
tgcaactgcttggcatgccatcaacactaaatccatgttcactgtgtactacaaacctcggtatgttgaaatgtctgcaaaaaagccgattacatttttgagacaaatatactgatttgtcttggttatcttgcatgagattgtgacctgcaatctgttctaactaaagatagtgtaccctgtgtctgatctctaaataccaatgttaggacgagcccctcagagttcat

SEQ ID NO: 45272 - DNA, 617 bp, Setaria italica
  misc_feature (4)..(4): n is a, c, g, or t
  Peptide Sequence Number=SeqID_111246
tttnttaaattatttatttttctttaaagtttctttaagttttccctttagggttttgtttctttttctttaactttaaggtttagtttttgtttacttacgtttaaggttttcttatttaagttctaaggtagttgcacttggcagatctgtggacctctcaaagttcagtgactatgatgagctcaaagcagaactagacaaaatgtttgaatttgagggtgaattggtatctgctaacaagaactggcagattgtttataccgacaatgagggtgatatgatgcttgtgggagatgacccgtgggaagagttctgcagcatagtgcgcaagatctacatttacacgaaggaggaggtccagaagatgaactcaaaatcatctgccccaagaaaggaggaacctccagctgctggtgaagtatgtgcagccacaaatgagtagggcttgtctgcctgcagcaagcattttagataactaggttgtgtgaaggaagctgacgatgcatgaagaggaacttgcattgtgccgggtcccagccaagtaacacctcaaatctttttgtctttgttcttgtttgttcttagttcccttatttcccttatttcccttatta

SEQ ID NO: 45273 - DNA, 308 bp, Setaria italica
  Peptide Sequence Number=SeqID_111247
agacctgtcaatttacttctccgcggtttgctcttggcagaaagttgaagggccgaggttcttattgttatttttattgctgatttgcctctctcacccttttggatgtaaatatttatctacccagtccagtagtagcaagcagtagcagtacctttgtattaaccagctattcgcggctttttaatccctgtaagctagctctgtagcgtgagataaatgacaaacactggtatatgtatgtctgatcttctcgctgaatgtattatagtaagaggaggtgcctggggtcctctattaactctctt

SEQ ID NO: 45274 - DNA, 3151 bp, Setaria italica
  Peptide Sequence Number=SeqID_111248
caaaaacaatttctcccccttcgactgctgctgccgctgcctccccctttccgcctgccttcccctttccctccccacctccctccttctagggtttcccccgccgccgccgccgccgccacccgatccgaggcagatgccgcccgccatcatggcgccgccgccgacgccccaggcaccgtcgaactcaggggatccgctgtacccggagctctggcgcgcctgcgccggcccgctcgtcaccgtcccgcgccccggtgacctcgtcttctacttcccgcagggacacatcgagcaggtggaggcgtccatgaaccaggtcgccggaaaccagatgcgactctacgatctgccctccaagctgctctgccgcgtgctcaacgtcgagctcaaggcggagacggataccgacgaggtctacgcacagatcatgctgatgccagagcccgagcagaacgaggtagcggctgagaaggcgagttctgggtctgccgccacgccgaggccagcagtcaggtccttctgcaagactctcaccgcgtccgacaccagcacacacggtggcttctctgtgctgcgccgccacgctgacgagtgcctccctcccctggatatgacccagtcgcctcccacacaggagcttgtggcgaaggatctgcatggcatggagtggcgcttccgccacatctttcgtgggcaacctaggaggcatctccttcagagtggctggagtgtgtttgttagttctaaaaggcttgttgctggcgacgccttcattttcctcagaggagaaaatggtgaacttcgagttggtgttaggcgggctatgaggcagctgtcgaacataccttcttcagtcatatctagccaaagcatgcacctcggagtccttgcaactgcttggcatgccatcaacactaaatccatgttcactgtgtactacaaacctcggacgagcccctcagagttcatcataccatatgatcagtatatggagtcattaaaaaacaattattctattgggatgagatttaggatgcggtttgaaggtgaagaggcaccagagcagaggtttactggtactatagttggttgtgaaaatcttgacccactatggcctgattcaagttggagatacttgaaggtgcgttgggatgagccttcaactatcccacgtccagaaagggtctctccttggaagatagagcctgcctcatcacctcctgtcaatccccttccagtttcttctagagtcaagagacctagacaaaatgctccccagccttcacctgaatcatctgttcttacaaaagaaggtgcatctaaggttgatattggttctgctcaaacacaacatcaaaactcggtcttgcaaggtcaagagcagatgaccttgagaaacaacatgaatgaaagtaccgactctgatgccactgttcagaaacctatgatgtggtccccatcacccaatgggaaaacccacactagttttcagcagagaccctctatggataattggatgccattgggaaggcgtgaaactgatttcaaggacaaccgttctgcattcaaggatgcccgtacatcctctcaatcatttggagatacccaggggttctttatgcaaacttttgatgacaatcagcaccgtctttctttcaacaatcagtttcaagatcaaggctcagctcatcgctttgcggacccatacttctttatgcctcagcaaccttctctgactgttgaatcaagcacaaggacgcaaacagcaaacaacgagttgcgattctggagcgatcagaatacggtctatggtaacacaactgatcagcagggtttcagatatggacagaatccatcaaattggttgaatcagccattccccctggttgaacagccacgagttgtcagacctcacgcatcggttgctccatttgatttagagaagacaagagaaggcagcgggtttaagatttttgggttcaaagttgataccgcgagtgcatctcctattcagttgagctctccgatgtctgcaatgcgggagcatgtggtacaaactcaaccatcagcatcggtgaatgaattgcaacccgtgcaaactgaatgcttgcctgaggggtctgtaagcacagctggaacatcaactgagaatgagaaaagcattcagcaagctacacaaagttcaaaagatattcaaagcaagtcccagggtgcttcaacaaggagttgcacgaaggttcataagcaaggagttgcacttggcagatctgtggacctctcaaagttcagtgactatgatgagctcaaagcagaactagacaaaatgtttgaatttgagggtgaattggtatctgctaacaagaactggcagattgtttataccgacaatgagggtgatatgatgcttgtgggagatgacccgtgggaagagttctgcagcatagtgcgcaagatctacatttacacgaaggaggaggtccagaagatgaactcaaaatcatctgccccaagaaaggaggaacctccagctgctggtgaagtatgtgcagccacaaatgagtagggcttgtctgcctgcagcaagcattttagataactaggttgtgtgaaggaagctgacgatgcatgaagaggaacttgcattgtgccgggtcccagccaagtaacacctcaaatcttttgcttgtctgttgcagcccatcccatcccatcccatccgtctgggtttagtagggaagtgtagacctgtcaatttacttctccgcggtttgctcttggcagaaagttgaagggccgaggttcttattgttatttttattgctgatttgcctctctcacccttttggatgtaaatatttatctacccagtccagtagtagcaagcagtagcagtacctttgtattaaccagctattcgcggctttttaatccctgtaagctagctctgtagcgtgagataaatgacaaacactggtatatgtatgtctgatcttctcgctgaatgtattatagtaagagagttaatagaggaccccaggcacctccccttgcttcccgctgctgatatattggtctaacaaattcatgtcgcttgcaatccctgtgatggcgacggtgacctaaaggcaaggcacaccctctatttttg

SEQ ID NO: 45275 - DNA, 568 bp, Setaria italica
  Peptide Sequence Number=SeqID_111249
agattgggagcatcgtcgaagaagggtttcaagtacataagagcaatggcaagctaaaagtgatccaagattgcaagggatcagcaaattccagagggaaagaatcattattaatttctgcggaggtgtttgagatcaatgaatctctttatgtggtcgagctaaagaagtcatctggagactgctccctgtacagaaagttgtgtgagacgctctcagaggacttgggcatatgcaaaagccagcaacttttaaagcaagattctattaaacaagaaataggtagatataatagtagcttttaacaaaaagccccctgctaactaagcagtagacagaaactaacaaaaacaatatactgaatttaaaaaacagtatattggccacgcacctattacaagtgtgcgttcttatgccttttgtcatggatctagcctttagaggcttagatcacaacaaattggcaactgacatgtatggaatttctcctaatggataatatgatgtaaacgagtaaactatacatataagggtttctgagttacctggtccaaaaaaaaaaaaaaac

SEQ ID NO: 45276 - DNA, 1597 bp, Setaria italica
  misc_feature (1554)..(1597): n is a, c, g, or t
  Peptide Sequence Number=SeqID_111250
gtttcagcaagcaaaacaaaaatatacatggtccttgagtatgtaaatggaggagaattatttgacaaaatcgcattgaagggtaagctgactgagaaggaagggagaaaactattccagcagctaatcgatgccgtaggctattgccacgagaagggggtttatcatagggatctcaagccagagaatgtccttgttgatgcgaaaggaaacataaaggtatctgatttcggactaagtgcacttccacaaaatcaacggaaagatggtttgttgcataccacatgtggcagccctaactacatagcccctgaggtccttctgaacaaaggttatgatggctcgatggctgatatatggtcctgtggtgttattctatatgtaatgcttacagggaatcttccatttgacgaccaaaatgtggttgtcctttatcagaagattctgaaggggaatgctcacattccaaagtggctctcacaaggtgcccaagatatactgcgaaaaattctggatcctaacccaattacccgcatagatgtggatgggataagggcacacgattggttcaagcaaggttatactcctgctgtgccatttactgatgatgaagatatcagcatggatgaaggcagcttaaatgtgactgagcataatggcattcaagacaacatagcaatcaaccaaatcaatgctttccagctcattgggatgtcctcctgccttgatttatctggattttttgagaaagaggatgcttcggaaaggaaaatcagatttgcatcaaatcattccccagcttatttatttgagaagattgggagcatcgtcagaaaaatgggtttccaagtacataagagcaatggcaagctaaaagtgatccaagattgcaagggatcagcaaattccagagggaaagaatcattattaatttctgcggaggtgtttgagatcaatgaatctctttatgtggtcgagctaaagaagtcatctggagactgctccctgtacagaaagttgttgctccctcccttgactatcctgtatttgaaaggcttgaatttgttactggtcatttcatttttatcaaattattttattctattgtgtttgtcatcttgtttcaatgatgctagttgtgtgagacgctctcagaggacttgggcatatgcaaaagccagcaacttttaaagcaagattctattaaacaagaaataggtagatataatagtagcttttaacaaaaagccccctgctaactaagcagtagacagaaactaacaaaaacaatatactgaatttaaaaaacagtatattggccacgcacctattacaagtgtgcgttcttatgccttttgtcatggatctagcctttagaggcttagatcacaacaaattggcaactgacatgtatggaatttctcctaatggataatatgatgtaaacgagtaaactatacatataagggtttctgagttacctggtccctttgtttctcttatatattgatactggaatgtaagattctttccttctgaaaaaaaaaaaaaaannnnnnnnnnnnnnnnnnnnnnnnnnnnnnnnnnnnnnnnnnnn

SEQ ID NO: 45277 - DNA, 445 bp, Setaria italica
  Peptide Sequence Number=SeqID_111251
accagcatgatgagcagcaacccctcgcaagagtcctttcacagcactttctcggacagcatcaggatattgcatcttgaatctcctgagttccagttcaacctcactagcttcacagtcatgcaacaatctgcaatcctcaagatattcaacagctgcatcacacccccttctactaaaaaataaaccaaatagctggaagcatgtcactttcccaaagttgtgataaagtgtcgcgtattagtggaacttgggagcggcgcatattactgagttcatgctttgactaactgaacctgttttgatatgtccaaagggcttctattaccttgctcatttttatttgctctaagtctcctctttcctttcacataatagaagtcattctttggagatgctaagttctgaaagttagacattcgcagtttcctattcattttctccc

SEQ ID NO: 45278 - DNA, 505 bp, Setaria italica
  Peptide Sequence Number=SeqID_111252
tgcacgggctcgctcgcgggcatgtcccgctccaccggcgaggccgcggagggtcggcgccgcgtcgttcgccgagttcctcctccccggcgacgccgcggggctcaggtcgctcttgtccacgggcacccacaggaaatggtggttcccggattttgtcctcaaggactatctcaagctggcatgtctctcaagatgataagaactaagctgccgatcttgccacgcacacattgtgttgcttgcaaaagttgcgcaagtttttattttcgttcttttttgagagcacaagtcctgcagatgatgtttaaccgaaggagaggtcggagctgctggagggcttggtgatcagcgacgaggacgcagctgccgctgctccttgttttgggcagtaaccatggagaggactgtgaagcacttgaaaagaggcatggaggtggagaggacccatggacgtccagtccaagctggaggtccaagttcgagcccactcggagtccaggac

SEQ ID NO: 45279 - DNA, 312 bp, Setaria italica
  Peptide Sequence Number=SeqID_111253
tggtacgagtaatgtggagattacgtttgatacatggtttcataggggtacttagctgatactttaggagttattttgcctgtatataatcaagtgttttcgggagcttgagtagctagatgagggttaggttttcggcactgtaaatccttttggccatgtacaagtttacagtggataatagatgtacattgtgctgcagcattagtttctgctagatgagcgtcagtatgtggaggatgctatgtaatatacttgttgctcttctaaatgggggcggatttactttgccgtagcaaaactaaaaaaaaa

SEQ ID NO: 45280 - DNA, 855 bp, Setaria italica
  Peptide Sequence Number=SeqID_111254
tccgtggtgggcatcggcgaagcagaagccccccgacgcgctcctctgcttcgacctcctctccgagctctcctccgccatcgacgaggcctccaaggagaccatacaactttggcaaaggaaatgcgaggatgctctccaatccttgcttgtccttggggcccggcgccctgttcggcgcttggcatcatcagcgatgggcagaataatcgagaaaggcgatgcgatatccgtatactcaagggcgagtaccttgcaggggtggttggtagatacgaaaagagcggagcccatggcatgtgcaggtgcagcacaatgtctgggagaaatttaccgtttatttgggcgcaagattacagcagggctgatcgagacatcaagcattgtagccaaacttatgaagtatcatgaggacttcgtgagacaagatgctcttctcttgcttgaaaatgcattggaaggctctggtggtggtggtggtgctgcagcttaccaggatgcttttcgtatcatcatgcgaggaggtgtaagtgatagatcgttcattgtcagagtagtggcagcacgatgcatgaaggcatttgctaatattggtgggcctgggttggggatggctgaatttgatacttcaatgtcttactgtgtcaagggtttggaagatagtgtatcttcagttagagattcatttgctgaagcacttggtgcattacttgctctttcagtgaacccagatgcccaggtgaagaaaggagggaaaaagcaaactgcttctgcaaaaaaaatttgaagatggtgtgcagaagcatttgattgtgccatttgtcaaagcaaatggggctaatgcaaaaaaactcc

SEQ ID NO: 45281 - DNA, 422 bp, Setaria italica
  Peptide Sequence Number=SeqID_111255
gtccgcgcacgccgcttcaggtgaccgagacggctcaggcgccggcgctgagcgtgccctccacctgctcgacgaaatgcggagcctcctcgggcgccgccccgacaccgcctgcttcaccacggccgccgcggcgctctcttcggcgtcccaacctggcgccgcgctcgccgtactcaacgccatggccgcggacggcgttgcacccgacgccgccgcgtgcacggtgctcgtcggggtgtacgcctgccacctccggtggttcgacgcagcatacgaagttttgcggtggatggcagcgaacggcatggccccagacgtggtcacctactcgacgctgatctctgggctgtgcagcgccggccgggtggctgaggcgctgggcgtgcttgacttgatgctggaggaaggttgccaaccat

SEQ ID NO: 45282 - DNA, 679 bp, Setaria italica
  Peptide Sequence Number=SeqID_111256
tgttaagacactaatttgacccatagaagaacagatcagacaactgtcgttgctgtatatttccttttctattacttcatcaagaactgctttgacgcagttgaacaggttatattgaaaattctgcacctctacatatttgtgaagaaattgcacatatctgactgtcctgaattagtatttttcaacagcatggaacacaggattcccaaactactgatatccatggtgcatgaaaataaaatctatcagaagttcctctttccaccattactcatacagtttgaggccaatcatttccttcagatgctgtggtgtgctactttccaaggaaatcatatgtcgctcaggattgtcactgaggaacaacccaagattagaatccctgaacctgcattatagtaacaatttggtgcaaacggcagtcttcaactatgtgcacttggctgcattggaattgccatatctcaactcccttcatgaacttgcaaagaatcccaaactttccactgtaacacatgaattgtactaccaggcccaaggaagtggggaagatcaagactggaggtctcaatctctatcccagactgggttggcttgatactgacgacatttctctcctcagtttgtccttctgcaaacacctctttgccctcccttctggttccggcacttaaaa

SEQ ID NO: 45283 - DNA, 280 bp, Setaria italica
  Peptide Sequence Number=SeqID_111257
gcggggacaaccggggagaagagagatcggagggatcgagatgcgagttgggagcggggagaggcgcgggaggaggagggagtggagtggagagccggagcggagggatcggccatggtggtggccttggaggtgggtttggcggtgggaaaggtggcggtcttggtggtggatttggaggtgggaaaggtggcgggcttggtggaggcggtggccttgtaggtggcgccggtggtggttttggaggtggtgcaggcggaggcggcggacttggcggtgg

SEQ ID NO: 45284 - DNA, 513 bp, Setaria italica
  Peptide Sequence Number=SeqID_111258
ggtaatctggcagagagtactgcataatccattcagaacttctcatcgagtagtaggcatatgtgtcttcaagaacagcattttgcattaatgttttgacttcagaacgacatatgccatgcataacatccagaaagcccgaatccatcgtacttccatcacgttcttgtcggatcagagtaagaagagcagttcttgcttcatcactgaagtaggaaaagactggaccaaagaaagaagtagcagcagtgtcgctaagtgatggtagtttgtactgctccacatagcagcggtccaaatagctaaagaagccaattacacatctaaccatgatggcgtagtttgaccacattttcacaagctctctaaaaaagtagtcattttgcttgtgcatgagatgcggcagaatcattgcacggacacaatctgcaagcgttgtcttgaaaccattgtacatttcatgacagtaatgttgtttctgcacagccatcctgtaagaacaatcatagtagt

SEQ ID NO: 45285 - DNA, 1321 bp, Setaria italica
  misc_feature (1)..(75): n is a, c, g, or t
  Peptide Sequence Number=SeqID_111259
nnnnnnnnnnnnnnnnnnnnnnnnnnnnnnnnnnnnnnnnnnnnnnnnnnnnnnnnnnnnnnnnnnnnnnnnnnnaggtcttcagagtagaacagtaacttcaggatgcaataccaactgcacagctgtcccagaccaaatgcatttggggggtcaactgcaccagagatcacagcaatcagtaatcaaaggcgagaaagcagtatcaactcaattcatcgaaaaggcaaactagacaagccttctcaaccaaggagatgaaaacaggcacacaaaagcgcgcacaccagttccctgctagcatcccaattctcaagcatttgcaacaatcactcacgtagtacagaagttcagaaaaaacgagcatcctcatcgcaagaatcaaccatcatgtacatttccaatggtgttgattttgcagaatgacgcggatgataaggtgagggagccgtaactcttagttgagctcagagccctagatcctgggaaccacgaatagcatctgtataatcacaactgaatctcaccatccagatcagcggccaaatctgctagtaccaaatcaacaagctccacactgggagctgggtagctttgagctataccaaaatcaagctgcaccaatagttgtacttcatgcaggccatgttctaaaactctactgtatgtaagctgggtcatggtagatgttaggagaagttgcctttctactccactcaattgaacgaattgctgtctgagccaccaagtgtcaaactactgcatctgccaagcagttcctcctcaacagtcttgtatgtttgaagcaaaagctgaccaccaatttgtttctcacttgcataactgtcgtaagtttccatcaatggagcattaacagcctgcaaacaaagatctatgctttcatcccttgaaatgttcagatagtaagccagtctattggtttccttttccatgctttcctgaaccttagaaaggtaatctggcagagagtactgcataatccattcagaacttctcatcgagtagtaggcatatgtgtcttcaagaacagcattttgcattaatgttttgacttcagaacgacatatgccatgcataacatccagaaagcccgaatccatcgtacttccatcacgttcttgtcggatctgccatcaattatttgctatgtacagaaggaatgcacttggaatgaaacaaaagacaactatctaacaattaccagagtaagaagagcagttcttgcttcatcactgaagtaggaaaagacctagcgaatggcaaaggacataaaacaagttgcgaggcacagaatgtgggt

SEQ ID NO: 45286 - DNA, 471 bp, Setaria italica
  Peptide Sequence Number=SeqID_111260
ctgtggagattactcccttagcaggtccatcctgagctctcagcctcccttcataggacaaaaaatccaggactttagctttgcgcatgtctctacagtagatgagagctatgccgtcagctggtccattttggagaggggtacagactgtatacaacagataaccagaactgccttctgtgacagtgaagacttccctgtctgctagattaagagagcgatacattcgcccattcgctccattatacagtgtgagcatgagatcctttgcatctaaagatgtgtgtatcactacctcaataaactgcagaaaaagtaacaaatgtaagtttgcaaattgtgcagaagagaatacaagagctttggagctagtgaaaatggcaaggatcccttttgcatactaggagtttctgaaactttggagcattcgttatcattcgacaagagaatataggagcgaataatacaaaa

SEQ ID NO: 45287 - DNA, 692 bp, Setaria italica
  Peptide Sequence Number=SeqID_111261
atcaagaagtgtcccgcttgttgtcagatatattccaatggcacttatactggatttatctataagaatatcatcaaatttgtgagaaacatgattgaccatggacatgcagactttgcggcaatcaataatgggagttggactgacatggatctttacaataaaataaatgatctttttgccggtttcatgagcctggcatattcagtttcgaaagctaccgccaaggatagggatttgctgcgcaagggagtacaacgtctcccatattaataattgcataaagtcctgggagatgtgtgaagaggaaggctacttcagaactgaaactcactccatgtgtgctagacctgaagtatacttgcactggtggcaattgttggaacttagaagcggactctgttaattcctccattaatagttgcaatgtattaatagcatagacatatgccctatgctttgtttgaactatagggagaatgtagtactctgtacttatgtgttctatatgaaactctagcgtttatttgacactggttagggagaacgtggtactcctatgtgctttctatgaactctgcgaggaagtatttaactctcataatgctttgtgagatgagctatagggaaggaagagtgtactataatgctccattgatctttatgaaatgtgtggctgtttgtttaaaaaa

SEQ ID NO: 45288 - DNA, 616 bp, Setaria italica
  Peptide Sequence Number=SeqID_111262
tttatgtggggctgcatatattaatgctagttcaggctgtgattggcaggggttcagttatttgataaattcacatgccatgtgccaaaagtacacatgggctcaagcggtacttaatcatccaatacttcttgatcctgctctgaggattcagtcttatatagctctgtatgagtgggcagactcactgccctttggtgtcctaaagaaattctgcaatgatctttattgcctgatgcctcaatattatggagataatttatggaatcttatcaagaagtgtcccgcttgttgtcagatatattccaatggcacttatactggatttatctataagaatatcatcaaatttgtgagaaacatgattgaccatggacatgcagactttgcggcaatcaataatgggagttggactgacatggatctttacaataaaataaatgatctttttgccggtttcatgagcctggcatattcagtttcgaaagctaccgccaaggatagggatttgctgcgcaagggagtacaacgtctcccatattaataattgcatgtaagaaactatcaattatttctcatatatgctagttgtctatattctacatctagggtatct

SEQ ID NO: 45289 - DNA, 359 bp, Setaria italica
  Peptide Sequence Number=SeqID_111263
acttaaaattggagaagtgaatgtaaattgcctgtccgtccataatagcttagtgtgaattgcatgattctgtagaaaatgcaacgcagctaaatgtttaccagataccctataaaattaaagaagcacatccatatgctttgcttgtgaaagggacaggtgccccagtccatgcaaaccggatgctgcatctccggctcctttgacacaacatggagcattaaaagtaggcgtagtagcactagagcaccgatcaccatgagcattgagccgcagtcagagtccactcatgtaaaggtagcgcgcatagaagaattggtcagcgagagagagagagttgacatgtaatcgtcaactga

SEQ ID NO: 45290 - DNA, 357 bp, Setaria italica
  Peptide Sequence Number=SeqID_111264
ttcgtcccggccccggcgaagcaatggtgctccttttctctcctccgttcctcgccgcgcgcttcacgccgtcgcaggcggcggcgccgcgccggcgcacccgggcccgcgccttctccccttccgctgatgcgcgggccccgtgcttcaggaggccctacacgtccgtcctgattgtccccacgggcgtcggcgcggccgtcgggggcttcgccggcgacgccctcccggtggctagaaccctcgccgccgtatccgactgcgtcatatcacaccccaacgtgctgaacgctgcgatgttgtactggccaatgcccaatacgctttacgtggagggatacgcccttgataggttcg

SEQ ID NO: 45291 - DNA, 549 bp, Setaria italica
  Peptide Sequence Number=SeqID_111265
cgaaacagaagtcctaaaacacttccaaagcttgaaccatcataaacaacggaaactgctcttgatcgttcttgcaagggaatgaacctagcaattaaatctgcagcagatgatggtgagagaccttctccaatacctaccagaatccttgacaacacaagtcctggcagaaaccctgctacaaaaggaataatagaaatggccaatgaccatgccacaataccggccacaagcactttccttccgccaaacaattttgccagccatcctcctggtagttgactcaatgcaaaacccaagaagaatgaggactgaactaagccagcagttgatgagtcccaaccatactgatgtgccattggaatgattgcaacactcaagttaaccttgtccatgttacagatggcgaaggcgagggaggtggcgccgatgagcttgtagcgctcgggcaacccctcccaccacgacggccgcctcgcagccccgcccgcctcctccttgtcctcctcctgccccctccccgcctccccaccctcccagctcctccac

SEQ ID NO: 45292 - DNA, 702 bp, Setaria italica
  Peptide Sequence Number=SeqID_111266
ctaacatatataatgtactgattagtggtttatgcaagaaacggatgcttcctgcagccaagaaccttctcgcagagatgctcgagcaaaatgtgcaacctgataaatttgtgtataccactttgattgatggtttcattaggagtgagaatctcagtgatgcgagaaaaatatttgaattcatggaagaaaaaggtgtctgccctgatgttgttggttacaatgctatggttaagggatattgtaagtttggaatgatgaatgaggcaattatgtgcatgagcagcatgagaaaggttgggtgtatcccagatgagtttacatatactacacttattgatggctatgctaaacaaggtaacataagtgcagctcttaggttcttatgtgatatgatgaagcggagatgcaacccaaatgttgttacgtactcgtcactaataagtggatactgcaagataaatgacatggacagtgcagaagatttgtttgaaaagatgcagtctgaaggtctgtctgctaatgttatacactatacaattataattggtagtctgtttaaaaaagatgaagtgatcaaagctgctgcatactttgaaagcatgctgctgaatcattgctctcctaatgaagtcacgttgtctatttattcttagtttaattgggtcttcttacgttaatttagtttattttgttttcttt

SEQ ID NO: 45293 - DNA, 335 bp, Setaria italica
  Peptide Sequence Number=SeqID_111267
atgaagaaaactcgactactctcagtgaacaagtttcacaagaaatgtttgaaggaatcatccgtgaagtggttgaggaaactggagttcctgctgcttccctgatcctgtcttcattggagtttcttgtcgagaaatgaatgttagaccaactgcattcttttttacaaaatgtgacattgattccaggggcgtcaatgaactttattctaaagctcaggatggctatgaatccactaaaactatatgcagtctcagtggaagagctgcgaggaatgggccagcgaatgcctggctgccacaatggtggttttcctcatcaattcataaagagc

SEQ ID NO: 45294 - DNA, 487 bp, Setaria italica
  Peptide Sequence Number=SeqID_111268
tattgtattccttgttacgttgccaacacatgtcaaatccactggaaatggtgcgattgttgaaacatctgatcaaaagattattgtattgcaaaggagccacaatgtgggggagtttccaggatactacgttttccctggaggacactcggagccacaagaaattggcatcgtgggtcatcaaactgatgaagaaaactcgactactctcagtgaacaagtttcacaagaaatgtttgaaggaatcatccgtgaagtggttgaggaaactggagttcctgctgcttccctggggcgtcaatgaactttatctaaagctcaggatggctatgaatccactaaactatatgcagtctcagtggaagagctgcgaggaatgggccagcgaatgcctggctgccacaatggtggttttgctctttatgaattgatgaggaatgatgccaagagtttgtgtaggtgctgagtaaacagtctttcttttgca

SEQ ID NO: 45295 - DNA, 543 bp, Setaria italica
  Peptide Sequence Number=SeqID_111269
taagatatatttcgaatagatagaaatagtaaatttgaattgagacacatattctatgacagattttaacttaccctctattttcgtgcctttagtaggcttagtatttccagcaattgcaatggcttccttatttctttatgtgcagaaaaataagattgtctagaaacgacggggcccaattttcttaatgtatttccaggatcataatacagatatttttttgtgtaagtaatataatatgatagggtatgtagctctttctacacacaaatgaaaaacgtctatggatgcagatataggctacgagcataaatgcatgcatatgcgtagccgagtatagcgagttttttttaagtggatccacgaattctttttgaatagaaagtcaatgtatctaaccaattatttcacaggagtactagctactgaaggttatttcagaatcaaaaaaagtaagtcaaaatcatttagcttattctctcaattttcaattgaccgctactggatttagtatatctaatatgaattggcgatcagaac

SEQ ID NO: 45296 - DNA, 290 bp, Setaria italica
  Peptide Sequence Number=SeqID_111270
aataagaatagattagtagatggtgtaaccaaagatatacaaaatagttgcgacaagcagaagaatggccataattatgcatttaataatcataacaatgaagcaatgcattggaagaaaacgaataacttctaaacaaaatttgaacagaactgaaacaaaatgactctgaaacattagagataaaattttagcataaagtttaatccaatgtatcaaaaccccattattgcattccttaccaaattattagtggaagcaactaaagatatgttaacttacatctctag

SEQ ID NO: 45297 - DNA, 486 bp, Setaria italica
  Peptide Sequence Number=SeqID_111271
ctgacgacatcgacgtgcattgtctggctagtttgatcaaggcctggttcagagaacttcctgtgaggttggttgacagcctctcacctgagcaagtccttcactgcaacacagaggaacaatgcattgagctcgtggagcttcttccgccaacccaagctgcacttcttcattgggtcgtagagctcatggctgacgttgttgaagaagaggagtccaataagatgaatgcaagaaatgttgccatggtttttgcacccaacatgacacagatgtctgatcctctgactgctctgatgcatgctgttcaagtcatgaacttgctcaagaccttgatcctcaaaacacttcgagaacgtgatgatgatgatgatgcaggagcctattcttcattttcatcttcatcatctttaatctgaagaactcgatgaggagggtcatgaccaacaagatgatgaaaatgacagtggcagtgagaactgtaac

SEQ ID NO: 45298 - DNA, 531 bp, Setaria italica
  Peptide Sequence Number=SeqID_111272
tgggcgatccacatggtgcatggaagagcaagagtatatggacagtgatggaaatggtgtcggtcgagtcaagcgggatggaggcgagtcgagtaggcgccctgggagccgggagcgaaagacttggaggcgtcggaagcttgatggaggccggacacctgtcgacatcgatgagtcacgtcgggtgcgacatgcaagagggtttgaccattttggcctcaaaaccgaaggtgagtcacgcctgcagggtgtgcaaagagggtttgaccggtatagcttcaaaactgggggacgagtccggtgtggctggatggcgtcgagttggaggatgcgtggcaccatcgcgaagcttgcgtcgaggcgaagctaagtcgtgaaggcgtcgggtccgtccgatgtacgagaaaaagttggacgattttaccctaggggtatttgagttgtgtgcttcatgtaagggcattctgatcatttccggatgcatatatatatgtggagatggctgttggggtagccacctctttgggctag

SEQ ID NO: 45299 - DNA, 523 bp, Setaria italica
  Peptide Sequence Number=SeqID_111273
ttttattttttgtgtttggcttttgtgcctgtgtgtgtgcacgacgtgactaggccagtaaagcaaaagcttgacagggtcacattcagccaaccaaatcaacttgattgatcgataaggtcggccaaccaccaaactattactttcctgtgcgtctaagctaacttgtgcacatttttctttgcttttgacaattaggcctgcttgacaggatcacacgaacaaaccgatcaaatcccttttctttccttttgttaagctataatctgtttttatttcaggagcaattgagtttgttcctgatggatttgtcttccaggagcaatagagtttgttcctcatggatttgtcttccagccagaagtccctttgcgtcgttctcgctggaagctatagtcggatatgtaatctcctttctctaaacgctttctctaaacgtgcgatacataactatgtaatttcattgctcgctggtaatgaaattcgggcgaggcccgtagtggacaaaaaaaagcaataattg

SEQ ID NO: 45300 - DNA, 613 bp, Setaria italica
  Peptide Sequence Number=SeqID_111274
ctaacgaaagaaagatggaactagatgctttttaaaagaaaacgctttgccttacctgtaactctattattttttatcctagcctaggctactacacaaagacaaagtcccggtgcacccccgggcagccccattcacgaaggctttcactatttccaaacacgctgtggaagttggtgtaggaatagttgagctccctacccccgattgagggggttcgttgggctcaggcggtacgggtatgaaatcccgcccttctttgatttgaggtaagagcggagcagcggggacggagttatgaacctggccctgtgaattagattcacaattggtcacggatcgctcttccgacgcagggctttcccccacgcccattcccagagtcgcactgtgggctcccttaaatgtggactgtactagcaaagccaaccattgcgcgagtgccccagcgagctccgaaaagagctccgcgattctattaaacggactccagaaatgtagctgttgctccccgtcctcctgctgcgatgacggcgggggggactaggaccataaggcaagtctcaattactttctttcctttgttttagttatcctatatcatatgactgaa

SEQ ID NO: 45301 - DNA, 327 bp, Setaria italica
  misc_feature (323)..(323): n is a, c, g, or t
  Peptide Sequence Number=SeqID_111275
ggcctcagttctccttcctcctctgtcctatgaactgccccagtaatttggcactgtggacactgcagcgtaagggctctggtgcatgtagccgtacattgccgcctctggctccggctctgggccgcagtcgaggttcacgccaaacagccggagcttcctcgacggcgctgtaggcgtgccgctgctcttggcgtccgcctcacctgcgtgtgccatgtcgctgtggtaggcgtaggggctggctgggctggtggggtacgacgatcctgacgtgctgtagcacatcgggctccacggctgctgctcgccggggttcagcnccgg

SEQ ID NO: 45302 - DNA, 474 bp, Setaria italica
  Peptide Sequence Number=SeqID_111276
gtcctgagtctttaggagtttctgtgctactgcactggacatccgataccctggatgtagttgactgtgattttgagagtaaagttgatagtgcagaaccattattggaactagttggaagaataatgcaagaagatccatcactcagaaaatgattaagcagtttattgtcttcaataacatttcggacaaatatctttttgactaattgttccccttcacctttcttcttctccttcaatctagagcttcgtggttccatagccccaccggatggatccctcaagcacatcgacagtgcaagttcatagagcaattgatagtgcgaaaccatgggaggacgattgattgaagctctccggacagctgcctcttttgcagctctcaaccattcaggagtagctatatttgatgcttccccattagttgaatccgtgactgaaaccgctgtgtattaggtattcctagggtaaa

SEQ ID NO: 45303 - DNA, 657 bp, Setaria italica
  Peptide Sequence Number=SeqID_111277
atgctgcaaatcggttagtgcaccctttggggctatgccagctaaacatggcattcagttgaggtcctcaactgaaaacgttcaccacaaccacctggataaaactaataaaagtattgctgaatggctatcatgaaggttcctctccgttaccatggacaacttggtgaacaagcttgtcagataacctctttgttgcctggaaatgcctcatatgcaaaataggctcacacccaacctcagcaaccgattttccaagaggagtcttaacattaaatcttcttgcttcatatagagataatttgttatctctatcaggaagttgatggcaaatcttaagtagcgaccctagtgtattcatcttcatgtaggggcatgaggcacaacctccatgaatggagcaaccttcactagaactcacaccaggaacaacagtaagattgtctaaatcactagctactgaagaaccaagatgatgggaaccattggtagatgtcttagaaactgcatctgatgaaactgggaacacaatctctacttcaatgttcgcaatctcctgagaagaactatacaaatcaaataattcccggacagcagcaacaattgaagtgatcatgcctgattctgttcctaacacaaactgaagatgttcatcta

SEQ ID NO: 45304 - DNA, 444 bp, Setaria italica
  Peptide Sequence Number=SeqID_111278
gaggatacagttctggctcgaacagctaaacaatgagctgcctcattttgagatcttgagattttgatcacttgcacctcatcttgtaatctcagttcctgaaactgagagatccatgggcgaagttgccaaggtgactgtaaaggagccttgagaagatatctgaccgccaagaggcagtcagaaccaagaccgccagcattgacctgtaaaatagaaaagattttacccgccagaagaagggctgcaagttcagccatcaccacagactccactctggctaatccaagcacctgcaggcgacaagagaggatagtggatctgagatcgaccactaatcccagtactgcagttctggaggcacttcctggtccatctggatctagagctgcatctgcatatgccaaaaacaatggctgccaagcttggctggaatgtaaatcc

SEQ ID NO: 45305 - DNA, 958 bp, Setaria italica
  Peptide Sequence Number=SeqID_111279
tagcttcgttgattgtttcaaggatccaggtccacatggcagtggaaggtattctattgagatgtttcctgaaatcaacgagagggactttagaaagggtgcccaggtatagttattttctgtactagtttgttaggatatagaatacttgctgctaccaaattcattcatttagttgtacatcatttgtcaaaagatttacatgtcataaagctgacatgtttagaatttgtttgactaccgaaatctaatcttaaatgctttcttgtgtaaattgcggttcttgttgtagtggtttgcagttacacggagacacgctttaatgattctggcggacagcctgtactacaaaagttcaagctatattgcaagccagcagaggggcgcaactgtattgcagatgagcattatttgccaaccctgttcaatatggtagaccctggtggaatctctaattggtcaattacacatgtggattggtctgagggaaaatggcatccaaggtcatatagcgctgcagatgttacctatgaactcttaaagaacataacgtctgtcagtgagaatttccacattacaagtgatgataagaaagttgcgactgtggccccatgtatgtggaacggaacaaaaagaccgtgctacctttttgctagaaagttttacccagaaactctgaacaacctattgaagctattctccagttacacatcagcttgagttctacatgattttttgtctttggcctaggagattcacctaggatttctttccttttttctctctctgtttcatgtaaattgtgaaattgatacttagcggcttaacacagagtcacagatccagggccagagacatcttgtaattctgagtcccttggtagggctgaggtgctctttgtttagtattgacactgccctccctgtaattcgtggtgccctctgtatgtttctgttag

SEQ ID NO: 45306 - DNA, 278 bp, Setaria italica
  Peptide Sequence Number=SeqID_111280
atttttttgtttctttataattgagccatctttgctttatattacagctgtgttccgctgcattcgtttgattatgtgtataattacctgatgggaacgaatgttagcttcgttgattggtaagaacactggaacttatattcaatttgaaaaatatcatatgagaactttttttaacttttgtttttatcttttgaagatgttcatatatccactcactttgatttttgtctgcctttgttttcaatttttaagttcaaggatccaggtccacatgg

SEQ ID NO: 45307 - DNA, 450 bp, Setaria italica
  Peptide Sequence Number=SeqID_111281
ttaaggttaagttaattttacttaacctttaaggttaatttttactttttacctttttttacttacttacttacttacctaggattcctctcgtttacaatgtaaattgtgaaattgatacttagcggcttaacacagagtcacagatccagggccagagacatcttgtaattctgagtcccttggtagggctgaggtgctctttgtttagtattgacactgccctccctgtaattcgtggtgccctctgtatgtttctgttagcccttcacttcacctttcacctcctctctcatattcttagattcctagctaccatttcctgagtaacaggggttttgtcagcacgaactgttattatatgattaattcttttgtagacaccaagtgattatgaaatgagttacactaaatagaaactaaactttaattatagtttaataccaaaaa

SEQ ID NO: 45308 - DNA, 1699 bp, Setaria italica
  Peptide Sequence Number=SeqID_111282
cctgaaacttagaacacaataaattactatgagcttccaagccgtcacagttgttgccatggtaatctgtgtctttgggcccacgatccttgttaagaagtatgggcctcccaatttacataaacatggaaactgaattaccggtgtttgattgggacaaaagagctttagacgatctgaagatggagaggagatgaagtttcacaagcgtatagtggggtggcaaggatatgactgtcatgatgcctcagcgtcatcgggctgcagccaagaagcccatgtggataatcgtgctcttgtctatggtttgtctcgtgttgattggggcttatgtcttcccaccccggcgctactctaagtgctacctctttgcttcaagtgtatgtacaccttctttcaaggattggctccctaatggggctcgggagcggactgatgaggagattgtttcatctgtggttaatagggacctcctttcaatgcctatgcctgtgtcaaaaaatccaaagattgcctttatgttcttgacacctggttcattgcccttcgagaaattgtgggagaagtttttacagggacatgagggaaggtactccatctatgtgcacgcatcacgtgaaaaacctgtacattctagctctctgtttgttggccgtgaaattcgcagtgaaaaggtagtatggggaaggatttcaatggttgatgcagagaagaggctattagcaaatgcattggaagatgttgataatcaatttttcatcttgctttctgacagctgtgttccactacatacatttgattacatatataattatctgatgggaaccaatgtcagcttcattgattgtttcctagatcctggcccgcatggaactggaaggtattccacggaaatgcttcctgaaatagaacagagggacttcaggaagggtgcccagtggtttgctataacacgaaggcatgctttactgattctggcagacaacctttactacaataagttcaagctatattgcaagccagcagagggacgcaactgtattgctgatgagcattatttgccaaccctcttcaatatggtggatcctggtggaatctctaattggtcaattacacatgtggattggtctgagggaaaatggcatccaaggtcatatagcgctgcagatgtcacctatgatctcttaaagaatataacggctattgatgagaacttccatgtaacaagtgatgacaagaaagttgcgattcagaagccatgtatgtggaatggatcaaagagaccatgttatcttttcgctaggaagttcaatcctgaagcacttaacaacctactgaagctattcaccagttatacatctgtttaagtccaacctaattcattgccttgggcatatggtctgattgaagcctcaagttccacaaggtttttccatgtttatgtaaattgggaggcccatacttcttaacaaggatctgggcccaaagacacagattaccatggcaacaactgtgacggcttggaagctcatagtaatttattgtgttctaagtttcagggaagggccacagcaattgtttatagaatgacactgccctcatagtaatttattgtgttctatgtacgtttctattagttttccccctccctcattcgttcctgtctcttggagaagagatttttgtcatactgtcatta

SEQ ID NO: 45309 - DNA, 1155 bp, Setaria italica
  Peptide Sequence Number=SeqID_111283
ttcttagtttttttttttttttttttttgttattccaataactggcaattaacaatataatgaatatcacctacaaattttattcacggttgcattagtgttacattcctatcctacaaataaatacatatgcatgttgtcaaagacagagagggcattcatctaccaaagaaaatctacattaatttgatctgatttcacaatttacacattcaatgtatggtgcttctggattatagcagataatcataatagaaaaagaaaatattatcagggagtataaggggcaagctgtcaatataactatagaaatgcctcacattttctctttctaaatttgcagggtcaatgacatcattgtaatttgtaagcacccaaaggtctcttgagcgaattcttttgaggcttcctcggcagaaagggcaagattctgatcttttataccagtccctatagcattttatgcacattgcatgactgcaattaggcaggaccatcttggtgcatgtctccatgcaaatcccgcattcatcctccctttccacatccttgccggaaagcttcttccaatcatccatccgcctcctactcactatgtctttgcatcggcccttccctttcaggtctctctcgatcaaactactctcaagctgctgcagaataggatagatgattgcatagaattccctaaggcttgcccgcctttcatatgttgacactgagctatctccatcagcatataccttgcatataagaatgtgaaagagtcctaagtaactgggaagagcataacagcacccacaatccagccactggatgaggtacaggaagaatggagccagggagctgaacgacagcctcatctgcacgcatgctccaccatagttcctctgaatggcatcggccatggcgttggcgtggtggatgtcggtctccagggccttgagggggcctctcagcgggagctgccgccccagctcgccccgcttcgtcgccatgggacggaccctccaagaactcgatttcttggaccccgggggcagtcgctagcccccaacgccaactaggctgcgtcgggccgtcggcttccttccttctcccccgggtagagagagaaagcgtgcagctttcccttgtgcggagggatagagaggg

SEQ ID NO: 45310 - DNA, 643 bp, Setaria italica
  Peptide Sequence Number=SeqID_111284
gttgatcatcatctcctctctctattctgagcctctgcaattcttgcaggtctgtgcaaccacttgtaatccacgatcccctatcacatcccttgcctgttccccccccatagaaaaaggaacatcaatacaacacattaaaaatagcatattaattttgcaacttttaaatcaggaaagcaaaaagtatgtacaacaataatctgaaatacctctaaaacttccagattggggcagcgctgaactatctgacagtgatcctctgtgttaaggagtgtaaattgaagatccaacttcttaagagccgcagaatatggaaaaagtatctgcatctcatttgctcccatgtagtgcaaacccaagcggtgcagcgaagggggggaagtagtaattctcataatttctattcgccacctgctgacccggctcttcaaaggcaccgccagcaaactcttgtagtgtttgtgctgtgcggaacaaaccggttaggtcaggcatgagacattcgctaatcttcagagttttcagcatctggcaattgcgcacaaggagggtaagatattctggggatgccctgagatctgtacaagaaaagaaaattacaagtagtactaccaagaaacaagaaattagtttagtaaga

SEQ ID NO: 45311 - DNA, 625 bp, Setaria italica
  Peptide Sequence Number=SeqID_111285
gatacatggaaggtactcattccaagctcttatgtcagtctaatcgaggaggtacttgacaacaccagggatgtgtaccctgtagaaatagtcgtcccaatcgatcgacttgggatcgaaccaaagtcatatcccctgctcttgtcctgctgattgttcaccatcaccgccctcagcctctccgtgttcgtgtcatcgaagcaccctttgaataaggcgtatggcgcgtagagctctgcaatatgcatgacgtatctgtacttgcggctgagctcgtggtagcgccgcgagaaggcgccgcacccggcaatgttcagcaggcgaaggatctcgaggggaagcctgaacttgacggccatgtacgcgcggaaccccgggagggtgcggaagaagcgcatcctgctcagcctcacgggctcgccgttcttcccggagcgtggtggattatggaggaagtacaggtggccagactccgcgaggacggcgtagggtgccgggttgcgcagcgatgacgtcaggtggaagatacgctgcgcctgctcctcggagtgtgcagccatggcaaccatcatagcgttcactaccatgtccccctggaaccacgtccattatcaagtcgaggttg

SEQ ID NO: 45312 - DNA, 703 bp, Setaria italica
  Peptide Sequence Number=SeqID_111286
atctgtcttcctcaatactctgccactcttcaacgtctcgactactagacaatagggaacccaaagtctttgctgctaagggaataccacagcatttctcagcaatggaatttcctacttttaacaattggggatccttgtgttcctcacctttgaatgcatgtcgaacaaatatttgcatgcacatatccagtggtagctttgccacatcatatggttccatcgtcttcaccactgatgcaacatctgaacgccgtgtggtgactataatcacacttcccctcccactgctagacagtatgcttcgcaactcttcccagtcactagccttatcattccacatatcatctagtacaaggaaatatctcttttcccgcaaaagctcacataatattctctgtagcacgtccaggtttaattgtttgtggctttcaccagtagatgattgtattatgtcatccaagatcttgttaagatcaaatacatcagagacacatgcccataatttcatttcaaacttgttagtaatctgcacatcgttgtaaatcagtttggccaatgcagttttgcctatgcctcctaaaccaacaataggaaggacagacaaaggacctgcagagtctgcagctgttagaatctttgcaactatctcacttttagctccatctcttccaataatgttgggctcactgatgaagcaatt

SEQ ID NO: 45313 - DNA, 505 bp, Setaria italica
  Peptide Sequence Number=SeqID_111287
caggaaaaatggtaaggaaaggctcagaagtgtcagcaagtaaaagctatcccttgagatcctcgcatagtagcggcagagttcttcgctctgctttgaccaaggataataaggcatgtagtgatcctcaaaatgatagtgctgcagcccaatcagctgtgaaaaaaagaaaaatggcagcccgtcggttagccccaacaacagtgtcaggatgcttcgctctgcgtcaaaaaataagaatgatgcatgtagcgagcctttaaatgacaagaccactgctaagccagctgcaaagaaaagaaaaaatgccagtcccttgcaggtgggaagtcccagcaacaccgtcagggtgcttcgctctgcgttaaaaattaggacgaggcatgtagcgagcgtacaactaacaggaccgctggtgatccagctgcaaataaaagaaaaaatgtcagtccctcaaagctgggaagtcccggtagcagtaccagggttcttcgatctgcctcaa

SEQ ID NO: 45314 - DNA, 492 bp, Setaria italica
  Peptide Sequence Number=SeqID_111288
atattttggtacagaactggaaaatagtgtggtatcctcggcatcaattacaaagtgaagctagcagaatttgggtctaaggttgatgaaaaaggagtggatgaggctctgacctttcttagagtcaccagggacaacaacttcaatgaggtaatttcataatagtttgacgagtcggtgaacgagacacaataagtgattgattgtgtttctggttgctgctgttacttcatccagtctgatagttttcctgtgattttattctgtgctttccagctcaaaacaatttcaaaggagatcatcaaggaatggaaagacttccaataccctattcaaaacaatgtacaagatctcctggatcacgtatatccatgattctgctactgctgatgaattaagaggtacaaaacctcttatctctcgcgtttgtgaacaaagctaaaaaggagctaccgaacctgcaaaaacgagagagataacagatacagaaag

SEQ ID NO: 45315 - DNA, 442 bp, Setaria italica
  Peptide Sequence Number=SeqID_111289
cgttgtgcatgccgtatcacaaagattattatgggcagcaccttttatgctatatttatttaaggttgacaatgctgctcagtcttaatgcatacgtgtgtagggctgacaaatgcatactagcatatgcttatcctatatttttttggttgatgtcaagcagttttatgatatctggagcagcactgatgtgagtgttgaaggaatcctatgcgtgctgtgagtctaggtgcagagtctttagttagcagatttttagctaacagttaaggagaataataggcaattaggaggttaatacctgtagtaattgggagaatatctggtccttagtagtagcctacggctgtatataagtagtaaagaaaatgagaaaagtagcaagcaactgcagcaccaaaaccactgtgtgttcgtgtgtctttgggtgtggttgtctagt

SEQ ID NO: 45316 - DNA, 506 bp, Setaria italica
  Peptide Sequence Number=SeqID_111290
atgggcacccgccgcgggtggcgcgaggtcgggccgtacccgccggggctcaaggccgacacggcgtgcgccgtctacgtcggcggcggcgagaaggtggtggtcacgggcgccctcgacgggaagggtgttcgacgtcaagaccaagcagtggatcgtggtgggccggcggccggagttcgccggcttcgtcttctccgtcacgtcctccccgcgggtagcgggacccgtcatccatgcgcgcgtgccggtcccggccgctccgtccgcgtgctcgtcctccgtcctcaacccccgcgcactcgtcgaggtgccgcagactccagttccagcagttcgatttgggaggattttggagggactcagggctgctgcagagatgagatgtgggcccgttctgtcatcggaggaggggcaagtttggtactcaaatcaaacggcagtgaccctatagaacgtgggaccatctagtcagtgggagagatttaacagctattgacggaaat

SEQ ID NO: 45317 - DNA, 421 bp, Setaria italica
  misc_feature (396)..(396): n is a, c, g, or t
  Peptide Sequence Number=SeqID_111291
aaataaccaaagaaccaaaagaaagaagaaagggaaaaaatacaaaggactaactagactaagtaacgtaataatccctgcaccgtgtccgccattgctggatctgagatctgcgcatctgtccgcgactagtatgcccgtgccatcgaaggagctgaagaaggaaggagacccgatcgacgccagatcttggagccatgggtgtagaaaagcaaaaaaagattcctcctttgttgctggtggtgatgagagattagtgtggtggtgtttttgtccgaggtgaaggacacagactattttcttgctgttcttgtcctagagccatgcttagctagccgagtaataacagctactgtacatactactactgctattgtactgtaagatccaaggtcncctcttgtgatccactcccatctcg

SEQ ID NO: 45318 - DNA, 488 bp, Setaria italica
  Peptide Sequence Number=SeqID_111292
tgaacactgaaggcttggtgcaagggatatccttcctggaagtttagtctttcacagggacagggtcatcagcctcatttattctgccaatggcccctaggacgggcgattgcaggtctgatcagtctagtcccagcctgatgctgggatgcctgaaatgtcgcaccaaccaggagggaaggtgtacttcgccgggtaagcatcatggacctggtcgtcattggtcgagcactggtcgttgggctgcacgtctccctgctcagcccttcctcgacgcgctgcttcggcatctcctcctcagggtctgcttcggcgttgttgaatggctggttctcatcctcgggcaactcctcggaccatttcgttctgttgttggtagcagcagatttagcatcattgtcacctctgtaaccagagtcagatggttcttggttgcagttgtaactggtagcttcttggttgcagttgtaactggtagcttcttggtt

SEQ ID NO: 45319 - DNA, 950 bp, Setaria italica
  Peptide Sequence Number=SeqID_111293
aagaacgactagacttacggacaatactacctacctacaaggggtactagcttcggcgttgttgaatggctggttctcatcctcgggcaactcctcggaccatttcgttctgttgttggtagcagcagatttagcatcattgtcacctctgtaaccagagtcagatggttcttggttgcagttgtaactggtagcttcttggttgcagttgtaactggtagcttcttggttgtagtcccacccagcaggtccaccttggtcttcgtcgtacttggtttcgtctgaataagaataagactcaggtggtggaagtgggcatccttggtaagaaccattatctgcacagtatcgcaggagcctatcccagtgccgatccttggtgatgatgtgtgggtttccaacgatgacgagcaacgattttgcacgagtgattgcaacgttgaaccttttatagttgctcaagaatcccaggttgaagaatttgtcaaactcgttatgctttacagttgacctgactgtagagatgattattacttccctctcttggccctggaattgttcgacacttccaactttcaagtctggcatttcaaatgcctctagggctttctttatcttggcaacttgctgacggtatggagtgattactcctatatcagcttcactaacagtaccaccctttgtaaggtttctgatgatacttactactttactgacttcaattctattgaaccatgatggattggtgccttccctctcatcacatccttggattccaacaaaaagaacagggaaggacttgttaggaaggccaatgcaatcgtaagcaggtgatgcctcatcttctttacaggcgatcagttcacccccatagaaaagctctgatggtagctctaagattgcaggatggcaccgataattcctcaccagttttgttacatagttaggat

SEQ ID NO: 45320 - DNA, 413 bp, Setaria italica
  Peptide Sequence Number=SeqID_111294
ggagtatttacttgacctgcagtttgtagtgaaaactcgaaaaactattcttaactaggggacaatctggtgctgatacatctccaggtgctatcattcaaactcgcaacacggtccgttggatttagtttaaacggactagattataaggaaacttaaaagggcacacatttgaacatttttaaaatagccaccttacaaagagataatattggtgtgttgggattctctgcaaagaatcccaacacaccaatattatacaaaatctgattatctgagccctccaaatctcatctctctctctctctctctcttgagtgcataatataatataaatattcgtctggctaccatccacattctagaagccccactttatctattaattaaccttttgatgtatatagatttag

SEQ ID NO: 45321 - DNA, 498 bp, Setaria italica
  Peptide Sequence Number=SeqID_111295
gtttataagggcttacagttggtcatatttcaatttgttgatgactagactcttggacacaattaagctaacattatcaactgtgacaataactaaatcaatcactactttgaatgcacacattgtgagtttatttcttcttttttttaaaaaaaacacacataagggtaagacatagctataaagaacatcagatcatactaggctgctagctgcatgacaacttcattcccattctgtaatgattgtaataagataaattggtaaacacgaagaaagagccacagttttctgttagtgcaaaggtaccagaaatgtttagaaccttagcacaatgtcctaaaaaaacctcattctactacttgagtcaaagtgtagcactacagactgtaaaatgtttaactcactaagtttgtatatcagaagccctactaaggtcaagaccagtatgctagcaatgtaatctgaattttgaagaacagaaactaaaacagtaag

SEQ ID NO: 45322 - DNA, 378 bp, Setaria italica
  Peptide Sequence Number=SeqID_111296
cgctgggccaaaaagacatggacaagtgaccttgatgtttgtgatggcaccaactccttgaaaaccttatattcctttaggacacctgcatggcctccaaataatacaccttcttcaataacatcaaggcaggcttgatactgcggcatgtttgttgaaattttcttcacttgctgtcttgtcgtacttaatagagcacgagcttcagacggtgaaccaagcttatctgttctgccgagagattttgtccaagttctacgacaactagcaatctccagagcccaatggcgtgacatctttatcaattcatcacccgagcaaagggcatcaataagaccacgttccttcccttcctttgctgtaatgaactttgattgc

SEQ ID NO: 45323 - DNA, 700 bp, Setaria italica
  Peptide Sequence Number=SeqID_111297
tcgtgaagcagctctcgtcggtggtcaagtggccgcggggcgccgcctccccgcacggggcggccaagcagcctgcccactcccagtacgccgatgtgcatgtgggtgtggcgctgcagtttgagagcggctactttgtcgagacgcttgttgaaggtgacaagcttggtgtcacgccgcacaccatcagggtgtcccctgttgagggtggggagctccttgcggtagactcagcacatagcaacattgtgcgaataactccgccgctgtctgagtatagcaggggaagactagttgctggttcattccaggggcattctggtcacatagatggtaaaccaagtgatgcccgattcaagcgccccacaggcgttgcggttgatgatatgggaaatgtctatgttgctgacactgcaaacttggcaattcgaaagattggggaatcaggagtgaccaccattgctggtggcaaatcaaatatcccaggctatagggatggccccagtgaagatgcaaagttctctactgattttgatgtggtgtatgtgaagaaaatgtgctctcttctggttattgaccgtggaaatgcagcccttaggaaaattgctcttccgcaagaagattgcacttatcaggattcctccctcctatcttcagatatcattctctttcacttttctattaattgtgcagtgtatgt

SEQ ID NO: 45324 - DNA, 484 bp, Setaria italica
  Peptide Sequence Number=SeqID_111298
tccgaattgtgatttgtgattagtagtttcatgatgattatatctggcaaatgtatcaatattgatggctagtcattcatttgttgatgtacttgatctagtatttgcaaaatttagttccatacttaatcatttgtactgtacacagatatcatattggtcatcggtgctgttgtggctggatatatcttttctggtttccaacatgggtttggattttcaagctccgagaaggtagaggcacctgaaaacgagcaacacgagagcagcactcttgggaagccacctctggttgtggagagcctgaaagaggaaccaggagctggatggccatccttggggacgcttatttctgatctcttgaaacttgctatcgaaggagtggggaagttacttctcagcattgtcccgaagaggaaaacagacctcactccactcaaagacaggctcgtgatgcccgaggacagagaggagacctcgacag

SEQ ID NO: 45325 - DNA, 1467 bp, Setaria italica
  misc_feature (1409)..(1467): n is a, c, g, or t
  Peptide Sequence Number=SeqID_111299
tagggtaaaattagttacttaattagtttagtcttgtacactgcaaacttggcaattcgaaagattggggaatcaggagtgaccaccattgctggtggcaaatcaaatatcccaggctatagggatggccccagtgaagatgcaaagttctctactgattttgatgtggtgtatgtgaagaaaatgtgctctcttctggttattgactgtggaaatgcagcccttaggaaaattgctcttccgcaagaagattgcacttatcaggattcctccctcctatcttcagatatcatattggtcatcggtgctgttgtggctggatatatcttttctggtttccaacatgggtttggattttcaagctccgagaaggtagaggcacctgaaaacgagcaacacgagagcagcactcttgggaagccacctctggttgtggagagcctgaaagaggaaccaggagctggatggccatccttggggacgcttatttctgatctcttgaaacttgctatcgaaggagtggggaagttacttctcagcattgtcccgaagaggaaaacagacctcactccactcaaagacaggctcgtgatgcccgaggacagagaggagacctcgacagcgcagaagctcagcagcacgccaatgaggcccgagacgctccacgcacctaacgctgtgaccgagacggccccaaaggcccagaagagcatcaagccatccaaattcagggactccaccctgtcaagcaagcacaggtcctccaagaggcaggagtacgccgacttctacggcacctccgagcccgccgcggcgagcgccaagctcccaaaggaccggctccgccaccgccacagggagaagagcggggaggtcccctacgggaccgctcaccccgagccgaggcccgccgaggcgaagccggcggattacagcgacccgaagtatgatcactacgtcaggagcaagtacgctgccgagagtgggtacaggtactgaagctagcctcctcgccgtcccgctggcgaaacagcgtgacgaaatcttacgccggcatctacctggcaatgttgtagtgtgaacctccacaattgcaaagtggaagtgctgcttatggtgggtgcccatgagaatgcggcaaagtagtgatcctagttaggtgggtgggaagtgggaacctatgccgactggcatccagtttcgggatgcccaggtgtgatcttggcagagagcgacatgtagcctagcgttagttttgatcggcagttagatgtatccatccatcatccatggttgtggtcgcctgtgacctgcggcgcgtgtcggtgcctgactggaggcgacaactcgtgactgccaggtaaataaccccttgccgaatcagtgatccacaggtgctgttgctgctnnnnnnnnnnnnnnnnnnnnnnnnnnnnnnnnnnnnnnnnnnnnnnnnnnnnnnnnnnn

SEQ ID NO: 45326 - DNA, 939 bp, Setaria italica
  Peptide Sequence Number=SeqID_111300
ggtaacagcaaaacacacctcaggtctctctccatatatattgctattatttttagctccaatacaagaaactcaaccaaaacgaagaacaaaaatacagccagcgaccatgttatagccacagcatatatgctaaaaactgaaactcacactacatgcaattatatcgtcctagctatacttccagctagatgctaatctcacgatttcacttttattacttccctcgtgatcttctcgctcctatcttctccactcttctctctctcatacgcgaacgaatcacatgactcgaacagtgacacgggttacactgggaacaaggacaagaatccaaaaaaacactacatctcggaaggtagacgacggtaacacgcactaacagtcaaaggcactagctaagctctgcaaaaggcccacggtgctggttaatcgtgccttgtagacagatcggtagatcatcagctccggacaagcccgcaggacagcgtcatgagcaacatggcggcgtccgtgacctcgtcctgctgcaccggcaagcccggcgatgaccggaagctgcaggaggcagcggaagatgggggagcgggactcctgctccagctgatgagaccaatgtcgtcgacaaggtccctgctgctcagaccgctggcgtcgacaacctcgccggtgggcgggacggcggcggccttgtgagcggcggcaggaggagcggcgacgggggcgtgatcctggaccaccttgcaccgtttcttgaacggcagcgaccggtccacgtctattctcttctccttcttcaccttcgggtgatgtactgatgcggccatggcgtccctgggcgtggccgtggctgccttggcgccgtcggcgggcgctggcccggagccgccggcggaggccatcatcgcccgccgcgccttccgctgcctgataccacat

SEQ ID NO: 45327 - DNA, 2528 bp, Setaria italica
  Peptide Sequence Number=SeqID_111301
ttttgcgaccaaaattccgatcatcactgaacaatacaagtataacggcaatgcaacccacgtgcgttttaccggacagaaggaatgaaatgttgggtccagacccacatgtattgtttcactatcttttcagactcttctgaagttccagaactgtaatcacatttcatgtcactggtgcggaagctacaatgcggaggggaggttccatggaagttcaggatgagtctgggcatatgctacaacatatcaggtaaagggggaaaaaaaggctctatagctttggtttcggctgcggaaaaatctttctcatctcacgaatgctatatttggctctgaataaacgctgcaattcctctgtaaggaacattagctgatgtcaaagaaaaaacattctttctttgatctgttacagaaaaccatatagtcaccctcatgcaaagccgtgtgcattggcattgtccggcagatgtagaacaggtgtgattccctcgtctcccccaattttgatactcagttggtggcgcagctggcaggagatttctccagcacagactggtcgcgtttccattggaggtggtaaccagatgtctgctttggggtcgacgctgtcttgaacggtggtgacttccatggctgcagaggcctcccagtctgttgaacagatgccagaaatcctggaggtgcatccgctttgcgcattacagtgagtactctggcgagaaacgatgtcccactaaaagatacagctttctcaatacattccctgtcagcaaaagtaacatatgcagcccctttagggtggccagtaatggcatctgtcaaaatgttaaccttaagcacagtgccgcacttcatgaaatgcattgacaatgcttcctttgttgctgcaaaatgtacatttgtcacgaaaatagttctggagtcagcatcgtcttccgaattagcatggggccctaatgatagggctgcttgctttccattgtttatctgtgcctgcttgttacgaagcttgaggacatcttgttccatttgcttgagctttagcttcacatccaaaatttcttctttcacaagtttattcctgcaactgttaccgtcctcatgtacagaagatgggatctttgaatacgcagggctgctaacttgctcaccatgcgatacttcggtttctgaatttctcggtacagttagcagaggcaatttttttgaagctgacgcaagcccttttgatggtctgaatgtattacatatgggctcagaaacagcaagaggtgaacccttcatgtcagatgtgaactcgttcaaactttgtgattgaatgtttttaattggcaatgacaaactggacttctggctgataacatctctatcttgaagattattgcgccccacatcaccatgaaacacatttccttcaccaaaacttagcctaccaataagcctgcttctatttgccttccccgcattgctagatcgtccctttgctattgtgttgacatctgtaaagcaattggtgaattttctggaacctgctttatcaaatgcatcatgttgtgcatttgaggtgacatggtatcttggttcatgctcagccaccattaacttggccaccttatgtactccattttgaacaggtatgtcatgagtttgtccaactaaaccacgatcttctacaacgggcttccctagcctatcccagacattgcgacgtcgtttcaaggacactggcactctctcatcatcgattccgacactctcaggtaaccatcttgtggaagcatttcttccaaggtgctctccatggagttcatcttgcgttaatatttctgtagtcctttcagagaagcttctgctgcgtgctacattttgaccattcttgtgatgctgattctcccgaatgaactggttgcagcccaatttttcaggagagattataacagtggagttgatacaccgctgaggcacattttgtcctatagttgaatcaagcttatgaagaccatggtatgtttctggtactgtgaccttggagtttacaacatgagcatcaccatgatgggctttcgcaacaagatgttttttcttgtcattcaagttctcactctcattgtccatcccatgttgaaaattacaattatcagctgatgccaaagcctgtttgcccagataactccaaagccatgcaacaaattttgcactgtcatcgccaagaaaggcctccaagtcatcacgtgcttgatattgattttttccattacagactaaaattacaatgtactcctcgagggtgtcgtcggtgtagctgccgaggaagcgggggagcacgtcggcgacggcagcgcggagggcggcggcggcctgcgagcgccgatccatgcggaacgatcggtcctcgacggtgaagagccggcggcagcggcgcagcaggagctgctgctgctcggcgtcgagctccgtggcctcccgccccatcgccggttgggggagcaatggggccgcgagaatcttccagcggctactgcttc

SEQ ID NO: 45328 - DNA, 548 bp, Setaria italica
  misc_feature (538)..(538): n is a, c, g, or t
  misc_feature (543)..(543): n is a, c, g, or t
  Peptide Sequence Number=SeqID_111302
gatctgataggactaacggaccgacagatgagataagacaagttagcacgtgcttaaccgagtttactatatgaagacagtggaggagggttctgactatctcgttgaccactcaattgtcatgtacttaatgaatccaaagatggagtttgtcaagttttacggcaagaactatgatacagattcccttgctgacggtatcattaaagaaattaaagagcacaagtagttgaagtgccactcggcaatggcaccctagttttctgaatctctcccaagaattttgcccaaagtcaacaaagaccaaatgatgcttaagatatctggtcactagaggtttaggatatttgaatctcgaggcagtttattgcagcagattccggtgcacgctttgccgcacagattcggaaatctgcaaatctgttattttgttatagtgaacatctgctttggcgactagcaacgttaattgcggaacgtcatatacttaattctgaattagaaagcacttgctatcgattcaaaaaaaaaaaaaaanaaaangagac

SEQ ID NO: 45329 - DNA, 743 bp, Setaria italica
  Peptide Sequence Number=SeqID_111303
cgaggggtgggtaccgaaacgggcccccggccggcggcggcggcgccggcgacgggcgggggatggagggagtgatgggcaatagggaaaatactaggagcaaggggacgccggaaaatccgtccgcggagggccggtgtcgtggctcagttttctactgctgctcgtgactggaggagggataatcgtgtactacgaccaagaaaagaagcgtcacattgaaggtagattactatgaactgaagaatagaacaactgctgtgaagcctggacagtcagtaggcactgcagccattggcggtccattcaagcttctgaatcatgatgggaagcctgtcaccgagaaggatttcctggggaaatggactcttctttattttggattcacacactgtcctgatatttgtcctgatgagctccagaaaatggccgcagcgattgacaaaatcaaggaaaaggcaaaattggatatcgtgccagttttcattacagttgatcctgaaagagatactgttgagcaggttcgggactatgttaaagagttccatccagatctgataggactaacgggaccgacagatgagataagacaagttgcacgtgcttaccgagtttactatatgaagacagtggaggagggttctgactatctcgttgaaccaactacaaattagtacaatagtaacttaaatagaaataccaaaagaataaggaaagtttaagtaacaaaagttttaaacgaa

SEQ ID NO: 45330 - DNA, 573 bp, Setaria italica
  misc_feature (515)..(573): n is a, c, g, or t
  Peptide Sequence Number=SeqID_111304
ggcggccacggggtggttgcgcgccgcgaggttggcgatggtcgggcggcggcgcatcaccagcggccttgacgatgacggcgcctcacctgccggcgaggacgacggcggcggcggcgcgcgcaggaggcggtggcgccgcgccaccgcgtccagcgcctcgtccatggccatctgctcctgcctgcagtcgtcgctgcagaacgcggcgtcccccttgtacatgaagacgtcgcggttgcaggcgatgctctccttgcagaggaagcacgacccgaggtagtggagactggccgtgcagccgtcgccaccgccgccgccgcccggcttcacccggaagaacctcgacgcgacctgcacgtaccgctcctcctccatcgtctccggcaccggcatcaccgccgccgtcgtggcgaccgtggccttgaatcttgatgtgatgacttgctcgtcgttacactgccctctccaccatgcccagaagcgtgctgctcttcccgatagtagaataagtnnnnnnnnnnnnnnnnnnnnnnnnnnnnnnnnnnnnnnnnnnnnnnnnnnnnnnnnnnn

SEQ ID NO: 45331 - DNA, 722 bp, Setaria italica
  Peptide Sequence Number=SeqID_111305
tctttttttagttttttttttttgtaacattgtgtgcacacggcagcaatcttgttctagtatcaatattttaatttgtacatcagtacatgtagataggtcatcacgaagagtgatgtccatagcttggttattccctcctgctctcgtggatctctacctactgtgttgaactgctcattagattctctcctctacacaagatatcatacagaggaagtcactcatccatgtatgaactcagtgttgcaggatccccagagaagaacaattacacatgcctacaaggctaatcatcaacctgtactaatcctgcttgttgactgcaactcatcgacgatccgccgcagaaaacaacaatcacctactgatcctgcgacgaacaccacggcctgatcgatgcgtgcggcggctgggctgcacgtacggccatcaattgctgactgacactagcagtagcagctacctagctggcggccacggggtggttgcgcgccgcgaggttggcgatggtcgggcggcggcgcatcaccagcggccttgacgatgacggcgcctcacctgccggcgaggacgacggcggcaccggcatcaccgccgccgtcgtggcgaccgtggccttgaatcttgatgtgatgacttgctcgtcgttacactgccctctccaccatgcccagaagcgtgctgctcttcccgatgtgatgtgagcagaaggacaacca

SEQ ID NO: 45332 - DNA, 459 bp, Setaria italica
  Peptide Sequence Number=SeqID_111306
gcagaacgcgcgtccccctgcagcaggaccaccgtgccatccgcacgcatgcaggtcaaccgtcaacaccatggttgtgttgatggaatggaagggagatgttgggcaagatgatgctattgctatgcatgcgcgtacttgtacatgaagacgtcgcggttgcaggcgatgctctccttgcagaggaagcacgacccgaggtagtggagactggccgtgcagccgtcgccaccgccgccgccgcccggcttcacccggaagaacctcgacgcgacctgcacgtaccgctcctcctccatcgtctccggcaccggcatcaccgccgccgtcgtggcgaccgtggccttgaatcttgatgtgatgacttgctcgtcgttacactgccctctccaccatgcccagaagcgtgctgctcttcccgatgtgatgtgagcagaggcacctcttgttggtttggta

SEQ ID NO: 45333 - DNA, 249 bp, Setaria italica
  Peptide Sequence Number=SeqID_111307
ccatcggaatgaaatgcaaggtggtagcacctatgtccactgtaaggccggaaggggacgaagcaccactatagttttgtgctttttggtaggacaaactgatccgcttaggctttagatgccttgtttctgtgcattaatataaaacttactatatgtattacatgcagataaagtacaggaatatgactcctgaaacagctttggatcatgcacgatctgtgaggcccagagtgcttttagcgccag

SEQ ID NO: 45334 - DNA, 469 bp, Setaria italica
  Peptide Sequence Number=SeqID_111308
ccgtgatgggctggaggtggaggcgagtggcggcggcgaggtggtcgcggttgtgcggttgaaggccaagtgcgcgctcgtcggcgccggcgcgaggttcctgttgtaccccacgttgctctacaacgtcgtccgcaacaggttcgagcccgagtccccctggtgggatagcgtcgaccagtatgttttgctaggtgctgttctgttccctagcgatgttccacgcctgaagcaacttggagttagaggagttgtcacactgaatgaaccctatgaaactctggttccaactttttataccaggtgaagaaatctacaagtacaaatctgaaaaaacctggtgatgtaacttttcaagggagaagtgaagctgcgatggagagaggggcaagaaacgggcaaatgaaagtgtaggcgctgttgagctgtgctgctgttctcaaccaaaatgccgaaaaggtatagtgtt

SEQ ID NO: 45335 - DNA, 375 bp, Setaria italica
  Peptide Sequence Number=SeqID_111309
aaggagatgagctaatacctagacctgtttctgacattcgtacactaatagatgctattggctatgttattgcatggccccattcacatgtgaagaaagctacaagtacaaatctaaaacaacttggtgatataacttttcaagggagaagtgaagccgcgatggagaggggcaagaacgggcaatgaagcatagagtttagttgttattgaaaaatttagaaataattgtatgatattgttattttgtttgtgtttcattatcaaagcaattgtcttgttgacagtactttaattaatgtacttgttggttcttgaatgaattactcaatttcttttggtgaagtaaagaattgattgccaatgcaaaaaaaaa

SEQ ID NO: 45336 - DNA, 1409 bp, Setaria italica
  Peptide Sequence Number=SeqID_111310
gctccgtgatgggctggaggtggaggacgacgagcgggaggaggaggcgaggggcggcggcgaggtggtcgcggttgtgcggttgaaggccaagcgcgcgctcgtcggcgccggcgcgaggttcctgttctaccccacgctgctctacaacgtcgtccgcaaccggttcgagcccgagttccgctggtgggatagcgtcgaccagtatgttttgctaggtgctgttccgttccctagcgatgttccacgcctgaagcaacttggagttagaggagttgtcacactgaatgaaccctatgaaactctggttcgaacatccctataccagtctcacggtatcaatcatcttgaaattcccacaagggactacctgttcgccccctcgcttgagcatatttgtcgagcagtggattttatccatcggaatgaaatgcaaggtggtagcacctatgtccactgtaaggccggaaggggacgaagcaccactatagttttgtgctttttgataaagtacaggaatatgactcctgaaacagctttggatcatgcacgatctgtgaggcccagagtgcttttagcgccagctcaatgggaggctgttaaaacgtttagcacactcaatgccagatgccttgcgattcagagctcgaacccaacctgctcagcactttcttatgaggaatccagcgaacagtctagcatgctgaccagcaggtgcctttccatacggagcacagatgaagatttctcagtaacatctgatgaagaatcctgtgaagcatctgtcgcagacccggaagtttatggctacgccaccaccgagtttgacagcgagcattttgttttacctcggtgtcgaagtttgctgcccaggccagcaagccccaccgggtgcaatgacttggtcttcgtaactgaagcagatctcgagggctacgagaccttcaccggtgccggcaagggtgatgttgaagtggaagtagtggtccgccagaagccgatcatgaggaagctctcctgcttccttggatccttgaagcttacaagcaactgcgaaccaccaccgagtcgtttgactgaggttcgggcctgctaggtagattttctacaatggtttctgcgatccctttttgcacgttgtacatcggcagagtgtaattagcggcatgagtttgcaaagcctgcggcgggagagaactgtatgttgagggagctttgttcttcgggagagaactgtttttgttatgcggcgaacgagatatttgagtgcttgccttattgtaggttgtaatgtacctagtgttttcctggaataaaaaggtttgcatggatggtatgcaatctgacctcagctattttctactgcatctatgctagtggttactcagtctccagactttccccaccca

SEQ ID NO: 45337 - DNA, 883 bp, Setaria italica
  Peptide Sequence Number=SeqID_111311
cgaggagcgcgggaggacaccgcgaagcgcgtcggctcctagggtttgccggtcgggttggggctccgatccgtgcgggcgggcgggcgggcatgaggattcgggagctccgtgatgggctggaggtggaggacgacgagcgggaggaggaggcgaggggcggcggcgaggtggtcgcggttgtgcggttgaaggccaagcgcgcgctcgtcggcgccggcgcgaggttcctgttctaccccacgctgctctacaacgtcgtccgcaaccggttcgagcccgagttccgctggtgggatagcgtcgaccagtatgttttgctaggtgctgttctgttccctagtgatgttccacgcctgaagcaacttggagttagaggagttgtcacactgaatgaaccctatgaaactctggttccaacatccctataccagggaatgaaatgcaaggtggtagcacctatgtccactataaggccggaaggggacgacgcaccactatagttttgtgctttttgataaagtacatgaatatgactcctgaaacagctttggatcatgcatgggaggaatcctgtggatgatgtcccagtagagctctttgaagctaagtctgcaagagatggcgcatggtgaagaaagctacaagtacaaatctgaaaaaacctggtgatgtaacttttcaagggagaagtgaagctgcgatggagagaggggcaagaacgggcaatgaagtgtaggcgctgttgagctgtgctgctgttctcaaccaatgccggaaaggtgaagttgctactggtgttcttgtgcccaggtgaagaaagctacaagttcaaatttcaaaattttaaacaatctggtgatctaacttttcaatgtaaaaa

SEQ ID NO: 45338 - DNA, 437 bp, Setaria italica
  misc_feature (380)..(437): n is a, c, g, or t
  Peptide Sequence Number=SeqID_111312
tgccggcggggaaccagcggtacgcgaggtcggtggcggggcgcaagagctcctccccgaagctgagcagggacaggggcgcgtgatcgcgcgacggtgtcggcaccgacggtcgatgcatgcgtgttggcctgcgcatctctgttccctgacgaaattgcattgtgaagtgtatatagttagtgtcagcaatgcgtaagattaatttgttcgttgattcattttcttggttatcctgctctggaatggataaccaagaacagattgtactcaagctgcttttttaggaaagagggcctccttttttcctttacctttacggcatggtgtgccaactcttgcttccagagaataaaaggaagatgagattattgtaaggnnnnnnnnnnnnnnnnnnnnnnnnnnnnnnnnnnnnnnnnnnnnnnnnnnnnnnnnnn

SEQ ID NO: 45339 - DNA, 254 bp, Setaria italica
  Peptide Sequence Number=SeqID_111313
acatggaatggaattgtggaaacctcctcaagaggtgatttatagtgttgctacaattcaataaaaataacagctacaatcgaacacagcatcttacatacagattattgagaggctacatattttacaaatacagatcactacagcttaaatctaacctactattctctgacggtacctcgagccttggtgcaggcgacgtaggaagtgaggcatatattcggactacaagtcgtactccggtcccatattcg

SEQ ID NO: 45340 - DNA, 890 bp, Setaria italica
  Peptide Sequence Number=SeqID_111314
ttagttaacaaaagggacccccttccccttgttcaggggcggagacagaaacaggcaatcagcctgcgggctaatcaagtgtcaattcaagatccagtcatttgaacctctgacacctgtacaatgtctagagaatttgcattgtccttttggcttggaaccagggctgcagcccaggccctggctctgccagtgcccttgttgaaacgataacaatgtgtattgtcagataagattattgacgtattaatactaattttcgaaataaggttggatgataattggttttgttttcagtgggtttttatggccagggtgtcttattatgaggttcgtgcactttgctgcagcttggtgggtgactcattttcaatagaaatctaccagttttcttccaagaacaattttactctctggctactaggtagattaaataatgtggtcttagaagatcaggaggataggtttgagtggatctggaataaaaatgggaattttttagtgaaatctgtttatgagcatttggccaagtatgataggggagaaaaatctgaaacagaattggaaagctaaggttctgcagaaaataagatttttgtgtggttgcatatggctattttgactaaagataatatgttgaaaagaaaatggcagggagacccatcgtgtaatttctgtgatcaagaggaaactgcggatcatctttcttggttgtgctgtgatgagtggcatgtgctattattgcttcctgttttggggctaatactaaacccaacagctaccaacagttttgtagctggattgaaacagttttgacaggagtgcggcatatgtttactaggggtacggttggcatcaatttgctgggcaacatggaaagtgagaaataa

SEQ ID NO: 45341 - DNA, 483 bp, Setaria italica
  Peptide Sequence Number=SeqID_111315
ttgcatatctaacttgtacaggctgaagagtgaagaaaggcagtttattggtcgaaattgcagtgcataggaaacttagtgtagctgaaatagatttgacttagcaccactaccaggagatacatatatgtatgtcgacgggccagtggtggctagctactaggttagattttttgggttgtgatgaagagaaactttttaattggaacaagaatgctaatacattaatacactatgcttgtagaccaaatggtgaatatgggtaatatacagagcaaacgaatcagaggagccccaaaaacaaattctgtagcactatgaggaccaaatcgcagattaatgcagctatatccttaacatacgaaaggcataaaacaaacaatataaacaagaacataacccataaaagaatgctcaccatccacttctgagttctgaccctctgataaatgaaatagatatttgctgcactagagatggcca

SEQ ID NO: 45342 - DNA, 1721 bp, Setaria italica
  misc_feature (42)..(42): n is a, c, g, or t
  Peptide Sequence Number=SeqID_111316
ctctatcatgcgatcatgacattattttgttctgttggaccnctttcttgttcatcattttacattgaattcgtttcattcttcatttgtattgctgaaacgtgaaatgacaattactctcaacatttggttatgggttctacttgtcccttttattcaaaatcttatcatgtcatttcacatttgacaaaaggtttatctgatcattgagattggtcctttgcaggtggtgatcttttgtttctcaaagaatcgttgtgatagatcggcagatagcatgtttggcgctgatctcaccagtagttcggagaaaagtgaaatccgtgtcttctgtgacaaggtgttttcacgccttaaaggatctgataggaaccttccacaggttgtgggaatacaaagccttctacgaagaggaattggagtgcaccatgctgggcttctccctattgtgaaggaagtagttgagatgctattctgtcgtggtgtgatcaaggtactgttttccactgaaacatttgcaatgggtgttaatgcaccagcaagaacggttgtatttgattccttaagaaagtttgatggaaaagaacaccgaaaattgcttccaggggagtatattcaaatggctggacgagctggtaggagaggacttgataacattggtacagtgatcattatgtgtcgtgatgaaattcctgaagaaagtgatttgaaaaatttgattgttggaaaaccaactcgattggaatctcaatttcgattaacatacactatgatactacatcttctacgtgtggaggagctgaaggtcgaggacatgctcaagagaagttttgcagaattccatgcacaaaagaatttgccagagaaggaaaagctacttctacaaatgcttcgtcaacctacaaagacaatagattgcataaaaggagagccttcaattgaagaatactatgagatggcattagaagctgaggcacatagggaatctataacagaagcaattatgcagttgcccagtactcaacagttccttatgcctgggagattggtggtcgttaaatctgaatctgatgatgatcacttacttggtgttatactgaaatgtccatctcaaacactaaataaatacattgtccttgtattgactggtgattgcacttcatctgcattatcccctgtgttgtccaataaaactgaaaaggaacctggggatttccaacaaggacactttattatcccgaaaggaaaacgcggcatggaggatgagtatttctcatctggcagctcacgaaaaggttcagttgttatcaaaatccccctaccatacaagggggatgcatctggaatgggctttgaagtaagagcaatagagaaaaaagagatcatgagtatatgcacctgcaaaataaagattgatcaagtcaaactccttgaggattgtagcaaagctgcttactccaaaactgtccaactgcttataaaagagcaaccagatggaactaagtatcctcctgctttagatgcaataaaagatctaaaattgagggacatgcattttgttgaaagatacattgcatatcacagactactgcaaaaaatgtctgaaaacaagtgccatggttgtataaaactaaaggagcatatatcattgatgagggagcaaaagatgtacaaggatcagctgaatgaattgaaattccagatgtcagatgctgagacac

SEQ ID NO: 45343 - DNA, 491 bp, Setaria italica
  Peptide Sequence Number=SeqID_111317
tcctagtatcctagtctattattgtcgtccgctgagtatgacaagcagacaccaatctgatccaggtgagagtcactggacagcggtgaaaaacattcttaagtacttgagaaggactaaagatatgttcctcgtctatggaggtcaggaggagctcgttgtaacaggttacaccgatgctagtttccaaaccgacagagatgattcaaagtcacaatcaggatttgtgttcacgctaaatggtggtgctgttagttggaagagttccaagcaggagacggtggccgattctacgacagaagccgagtacatcgcggcttcggaagccgcgaaggaaggtgtttggataagaaatttcctcattgagcttggtgtgttcccgaatgcgtccagcccattgaatctctactgtgataataatggggcaattgcgcaagcaaaggagccaaaggaaccaccagaagaacaaacacgtaatgcggcgatttcat

SEQ ID NO: 45344 - DNA, 406 bp, Setaria italica
  Peptide Sequence Number=SeqID_111318
aaaaaagcgctatacactggttactttgaaatgattggaatgtttgctctgaacatcagagttagctgaatcggagagcttaccctccaatagaagaaaccaattgctaaatggattttcccctgtgcactattttattttctgtttgttgtttgttttcgggagtggagggttactttaagccagactgactgtcctaggtgggccatattttgttgagttgggctttaactgcataatgcattagggatttaattttttagttcggatcacatcggatatttgaataccgattagaagaactaaacgtgaactaattataaaactaattggataagctgtggctaattcgcgagacaaatctattaagcctaattaatccatgattagcacatatttactgtag

SEQ ID NO: 45345 - DNA, 383 bp, Setaria italica
  Peptide Sequence Number=SeqID_111319
gtaaacttgaaatggttgaatttgtaatcaaatgtactctccaataattataaatttataaccctaaataatataatataagataaattaatgatcaaaatataatttgggagatcgtgcaacgtgcttataaaaataaacggagggagtaactagaaatataatcacatactgtagacagcaaagaactattgtgttattgtgtgtcgtgatcgtcggtcctgcagcgacttttccttgataataatggactaaagtgacctccaagcatatggacgtcacatcgttcgaagcaaataatgtttgtttccctattcccgtgaaaattaattactataccttttatgaacattttataacagagaattcaccttccatgcgcg

SEQ ID NO: 45346 - DNA, 495 bp, Setaria italica
  Peptide Sequence Number=SeqID_111320
ccatgccttggtacataccgtttatacttcatatctaaaaatagctcgatttagaaggtaacgcttgtaaagtacaatataaattgtttatactacctccattcgtttatatatgacgctggcttgctcaaaattaaactgatcaacgtcatatataaatgaattaaggaatatataagtagctaggtttattcaagcctttgcatgagttttccacccaaccaccgccatatagtgcaatatcatgatagcaaggacctccttcgcgcaaagatcaaccgatacatatcatgcagtgccttctttcttcatgtgggctgccaccttgagaacagccgggatgtgggtgttgaacatatacattctccagttgatgcaattgggatcaaagttgaacacggatccatcaccatgctctttccctgtcgtcccccgcagcattctcaggttcgtgtcatcaaagcatcccttgaagaagacgtatggggcataaag

SEQ ID NO: 45347 - DNA, 702 bp, Setaria italica
  Peptide Sequence Number=SeqID_111321
gtcttccaggattcgcccttctggaacattcatcctgtttattgcagcaatgttgtgatcagaaatgtgactgtactagctccacatgactctcccaacacggatggaattgatccagattccagcagcaacgtctgcattgaggattgctacatttccacgggtgacgatgcagttgccatcaagagcggctgggatgagtatggaatcgcctatggccgccccagctccgacatcaccgttcggcggatcacaggctcctcccttttgctggttttgcggtcggaagcgagacatccggtggcgtgcagaacgtccttgcagaacacctgaatttcttcagctcagggttcgggatccacatcaagaccaacaccggcaggggaggcttcattcggaacatcactgtctccgacgtgaccctggacaacgtccggtacggcctgcggatcaccggcgatgttggtgaccaccctgacgacagctacaaccggagcgctctaccggtcgtcgataccctaacgataaagaatgtccaggggcagaacatcagggaggctgggctgatcaagggcatcactaactcggccttctcccggatctgcctgtcgaacgtcaagctcagcggtggcacgcctgtccggccgtggaaatgtgaggctgtcactggcggcgcgctcgacgtgcaaccatccccgtgca

SEQ ID NO: 45348 - DNA, 269 bp, Setaria italica
  Peptide Sequence Number=SeqID_111322
gccgtccccgccgccgccgccgccgccccctgcagagagagagattcatgaggggctcaagaatgaatccaggcgaccgtagaacgcggagcacgatgacaatagtaattgtgatgggtttgtgctgcttcttttacatattaggtgcttggcagaaaagtgggacaggaaggggtgatagtatagccttgagggtcaaccaagaaaccgactgtacaatcttgccaaatttgcactttgagacccatcatagcctaagtggtgccaat

SEQ ID NO: 45349 - DNA, 405 bp, Setaria italica
  Peptide Sequence Number=SeqID_111323
ggggtcttgactttgctcttaggaaatgtgtggaggtattccctgccatcatgcataatactttacctcagtttcttttaaattccaaggattagccatgcagttcatgctccccatgttcttgggatagcatcatcaacatctacatgatgcctgaattaatgtgccttccactttacatgctatttggagctatgcacatgttactgagctgggactcttttattttaatttttatttaaacagccggctcatgagaaaattggagttgttgatgctcaatggattgttcatcaagcagttccttcacttgggaaccagggcaagtcagataatggaagagcaccatgggaaaggtaagagcacgctgcagaaaagaatggggaatagtttcaaacaaggttg

SEQ ID NO: 45350 - DNA, 287 bp, Setaria italica
  Peptide Sequence Number=SeqID_111324
gacaaactaactagtcctcctctagtcgacccacccccgtcgcaagactcgcatcgcccgcgtcaagcgcgccgccgccgccgcctcaccgtccgcctccgccgcgccgtcgcgccgtgggccgcctccccagcttgaagccttggcgccgtcttccttgccgccgcccgacgcgggcagccgtcctggtcctcttcggtcagcccctgccgaccttctgcggcggagagaggagcggagatccagccgcttcccggcggatttcttggtctgattgctgcagtgcg

SEQ ID NO: 45351 - DNA, 398 bp, Setaria italica
  Peptide Sequence Number=SeqID_111325
ggtagcaggataggacagggaccatgatgctgatgtaaaaacccagtcaagcttctcaagcaaagcatcatcctgcatgctactccaagtgaattgcctgccctcaaaaggtacaagtgcttcagcagtgccaataccatcctgtcaacaagtttgcttgtcacgaaaggataacacacatcatggcaaagcctggcattttaggacgtagcagtgtgccaagatcaaatgagagcatgcgaataatattctcagcagttgtcggtgttatgctagggtacttgtttggcatttccttccctacagttaatataacaaagcttcactttccttccagcattatatcctatattgaagatagaaactctggcattacaacccaaacattattgaaccat

SEQ ID NO: 45352 - DNA, 690 bp, Setaria italica
  Peptide Sequence Number=SeqID_111326
acaaagtaactgaggagaggccgggctggtgtacagatccccatctgccaccatgtgcagcattcgttgaaattatggcaactgtgttctcaagggatgcatggcgctgtgtatggcatatgattcagaatgacttggtccatggatggggtctcgattttgctcttaggaaatgtgtggagccagcccatgaaaaaattggagttgttgattcccagtggattgttcatcaagttataccatcacttggtaaccagggcaaggcagagaatggaaaagcgccgtgggaaggggtaagagcacgctgtcgaaaagaatggggaatatttcaaacaaggttggcagatgctgagaaagcttattacttggaccacgggatcacacccccaaatttgacaggagcgtagctgagcgcgcctcaggagtcatgacaaggtttctgttctgggaacctggcacctgcatctccggtatgcacatccaagctcagctccatggagatgcaattccatggccagatttgtacaggcagcctcaaatcctcttccctttgctcttacttattcttagccctgttctcttggtttcagtcgtagtgaaactagctcgtatgtaggtaaccgatttagcacggatcttgaattctttatgtccatactagtgctcctttaccccaaaaaaaaaaaaaaa

SEQ ID NO: 45353 - DNA, 555 bp, Setaria italica
  misc_feature (36)..(36): n is a, c, g, or t
  misc_feature (75)..(75): n is a, c, g, or t
  Peptide Sequence Number=SeqID_111327
agatccccatctgccaccatgtgcagcgtaggggtncaataatttgtgtttgataatttccatctgtcaaaatcngttttcacatctaatttgatatgcagattcgttgaaattatggcaactgtgttctcaagggatgcatggcgctgtgtatggcatatgattcagaatgacttggtccatggatggggtctcgactttgctcttaggaaatgtgtggagccagcccatgagaaaattggagttgttgatgctcaatggattgttcatcaagcagttccttcacttggtaaccagggcaagtcattctgaatcatatgccacacacagcgccatgcatttctggagaacactgtcgccataatttcaacaaatgctgcacatggtgggagatgtggatcagtgcaccagcctggtctctcctcagttactttgtgaacttcttggtcaccacgacgcttagtcatttgccatgttagtcctctatcaggttgcaaccaggctgagagattccaacccatgctttctaacaagctcaatgtacttctctgctaa

SEQ ID NO: 45354 - DNA, 384 bp, Setaria italica
  Peptide Sequence Number=SeqID_111328
ccctctgaatatcatggagcgcacgcaccacaatgtcggtgttccccggccccggcctgtcggggtaatcgaaatggcacgcattgggcaggcagtcatggttgaacagcgacgcctgcgagtacaccgcgtaggcgcgcgccttgaggagctcgagcgacatcccggggcggtacggctccatgatggcgaagctgttgccccggtccttggcgaggagcgccgccgtgaggtccggcgagaagccctgaggaagcatctgcggcggcgccagcgccgtcaccgcggcgtggaggcccgctgcatcctgcgctcccgggggtgggggcggcaccgaggagagggagaggattgtgtgaatggagggatctggaagggaatagg

SEQ ID NO: 45355 - DNA, 462 bp, Setaria italica
  Peptide Sequence Number=SeqID_111329
caatcattcttatgaccagtgcgccaatgcagtgcctgatgtttctccggaccggaacctgctttcttgcagctactacatattttatcgcctttccaggtaccacaccagtggcatacaggagctcctggaaatagtggcttgtcagagccgtcgtgctttggaggttcagttgagtagaaggcattagtccgtggtaactggcaccggaaaaccttgacacttctacatggattcccatgcttgtgactccactgttcatgctgatctcggagcaagcaagccatcgatgggcacatgaacacgaacagcgttcggtggaacgctgcggcattgtcctcgattggagcataaatctggaggacgaactgcagaggctcgccacagaagccacagcagctggatttccccgatggcaagttcacggggtccaaccacgccgggatgccaccggccttgctg

SEQ ID NO: 45356 - DNA, 710 bp, Setaria italica
  Peptide Sequence Number=SeqID_111330
cagcgatagctggttccgcggccgcgagctcgattcggatcgaggctagggtttaggcttccgttgcgaatcgagaagggggaagggaggaggaggagcggcggcgcggcggcgatggcggcggaggaggacatggcggtgaaggagccgctggatctgatacggctcagcctcgacgagcgcatctacgtcaagctccgctccgagcgcgagctccgcggcaagctccatgcatatgatcagcatctcaatatgatacttggagatgttgaagagacagtgaccactgtagaaattgatgatgaaacttatgaggaaatcgttcgcacgagcaaacgcactatccccttcctttttgtccgaggagatggtgtaatactggtttccccacccttgcggacggtgtgaaagttggggccggtgcattccttctgcaatccttacgaaagctggttgggaaagttttatctggagaagcaggcagcaggtttctgagacgctgcacatgtttagacaggatcattgtactccaacaatgtctgtgtatttgaatctgacttcccagtttggtcaacttaatcttattcagtgatcggctcgggctgggtgcagtaccgcggacgacatcaattgatcaatcgttccagcaaattgtggattgactggttggtggtgttctggtcctcttcataagcacttgttttctaaaa

SEQ ID NO: 45357 - DNA, 333 bp, Setaria italica
  Peptide Sequence Number=SeqID_111331
ggcgaaggggaggcggagccagtggcggcgcgcggggtcgaaggcgtggaggcatccgccgccttcggggcgcgggtggcggaggaggaggaggcgcagggtggggagcagcgcgaggaactgcggggagagggtgtcgtggaagaggcgcgagacggggcggcagacgacggcgtcgcggagctggaggcgaagcaggacgttgtggagggcgtccggcggcaggtggtggatcggcggcgggggctgcgagtcggcggcggggtcggagccggagccggcggccatggcggacggggtgggttaggtggggaacagatgagtctgagaccg

SEQ ID NO: 45358 - DNA, 1259 bp, Setaria italica
  Peptide Sequence Number=SeqID_111332
cgactcagtgtgagtagtattgcggcgcgcgagcacgccacacccacctcggcggcggcggcggcgtttgtgcctgcgaggagagaaaccgaagagagggggactcggaggagagcgaggatgcctcggccggagtttcaggcgccgccggatgtattctacaatgaatcggaggcccgcaagtacaccacctcctcccgtatcatcgaaatccagtcgaggatttcggagagggcgctggagctgctctctctccccaacgatggcgtccccaagctgcttctcgatataggatgcggttctggacttagtggcgagacattgacggagcatggccaccactggattggctatgacatttcaaagtcgatgcttgatgttgccttggagcgtgaaacagaaggtgacctactacttgcagatatgggtcagggattgggcttgcgaccaggagttattgatggtgcaattagtatctcagcagttcagtggttatgcaatgctgacaagtcctctcatgatccaagattgcggttaaaggctttctttggttcgttatatagatgcctggctaggggagcaagagctgttctacaattttatgctgataacgtgaagcagagtgaaatgattgtgacttttgccatgcgtgctggttttgctggtggagtggttgttgactggcctcatagttcaaaagcaaagaagtcctaccttgtcctcacttgtggcccaccttcgattaatacgttgcttccaaagggtaaaggtgaaaatggtgagatgtgcagtgacgacgaggatgatgggagcagtgatgaagatggtgacaaaacagtgggcatatatgagaggaataggtcgaagaagaggcagaagacgaaaaagaacgggaaaggtaaggattggctcttgaagaaaaaggagcagatgagaagaagaggacacgatgtgcccgcggacacgaagtacacagggcggaagcggaaaacctacttctaactttgtggaacgccgatgccctgccatgctcgttgtgctgggtgtttatttgtagttttgtactggtagttcattagcagcagcaaaaaagaaaggttctgtaagagcgagctgagataggtgcggagtcgctgtagtgctatcccgaagttgtaccgacttgcagttttgacaatgttgtgataaactatgccaatttttgtggaacatctgttgagatgaatatagctggttgttttgtttgcgtagaaaaaaaa

SEQ ID NO: 45359 - DNA, 441 bp, Setaria italica
  Peptide Sequence Number=SeqID_111333
gcaatagaataaaaactaaggcaattacaaaatgggccaactcacctgacaacctaaagcttcacctggaaagaaaacatagaaaggaaactgataacatgccacaccttaacacagctcaccagataggactttagctttgacttcaatatatgacactcattagtctgaaattgctacatgtgccactattgaagcatgaacatatttttctttttcttacagaaactctgctttttagacacatgatgagtgcgtagttgtcctgcaattggctgacaagttggcacttagcatgtaatgaacaatcaagatggctaggaacgagtaggccatggacagtacaatggcataaaggcaccacctaggggaccaggcagcaaccatttaaagccatggatttatctacaaaggcacaacttttgcaagcctaaattcaaa

SEQ ID NO: 45360 - DNA, 1399 bp, Setaria italica
  Peptide Sequence Number=SeqID_111334
gtcccttctcgctcgctcgctatctctcctcctctccaggctaacacaactctgcagcctcatcaccgcaatgccaagggcaccttagccgtgttcctctccggcgtcgtgattgctggcgataaggtagcgaggcttgcagatagaggttcagtgcagagctcggttagcttgggggcggcggacatggcgcccaaggcagggaaggccaagcccaagcccaagggcgacaagaagaagaaggaggagaaagtgttgcccatcgtgctggacgtcaccgttgagacgccggactacacgcagctcacgctcaagggtatatcaacggataggatcctcgacatccggaagctcctggccgtccacgtggacacttgccacctcaccagctactccctgtcccacgaggtacgcggggcccagctcaaggacacggtggaggtcgcctccctcaagccttgccacctcagcatcgtcgaagaggactacacggaggagctcgccgtcgcgcatgtgcgccggctggtcgacatcgtcgcctgcaccaccgcattcggggcgaagaagccagagcagaagcccgcttctcccgatgctgccgcggccgcggccgaggccgccaagcccgggtcgcccggtaagacggcgcccggcggcggaggaggcggggaggagcccatgtacccgccgccgaagctggggcagttttacgacttcttcaccttctcgcacctcacgccgcctctgcattatattaggaggtcgacgcgcccattcgttgatgacaagagagaggacgactttttccaaatcgatgtaagagtttgtaacgggaaaccagtgacgattgtggcatcccaagcagggttctaccccgcaggaaaacgtgcactcatcagccgctcccttgttggactactgcagcagacaagccgtgcatttgatggagcttacaaggctctgatgaaggcatttgtcgagcacaacaagtttggaaatcttccttatggattccgatcaaatacctgggtggttccccctgttgtagcagattcaccatcagtgttcccacctcttccaactgaagatgaaacttggggtggcaatggtggtggtcaaggaagggatggaaagcacgaccatagaccatgggtgaaagaatttgccatccttgctgcaatgccttgcaaaacaactgaggataggcaagtcagagacagaaaggctttcctactccacagtttatttgtagatgttgcagtcctcaaagctgttgcatctattcagcaactgatttccaaccataggagttcccatgaaacagaaaatggcaccacagggccagtcttgtacacagagcaagtcggtgatatgaaaataatgatcacaaaggacaaag

SEQ ID NO: 45361 - DNA, 455 bp, Setaria italica
  Peptide Sequence Number=SeqID_111335
ttagtttgattttttaaagcaaatacaccaatgtcacaaaatttacgccataattaaaaccacatctatcaaataattacagaaagacaaaagaaaagctatgactaccacgaaatttgtgccttctcatagacaaactccctgtttttcatgattctgagttctaaagagtgtctatgtttcaacaaagaagtgtcctagggagagtaacaaaaatgtaactatactactataaaagtcacgactagtctactatggtactggtaatatttgaaattatttcttttttgcttagatgatacatctagcctagcaacctatcctctagatgaacagtcactaggtcaggacctgtggatacaacaaaaataacataaattatttgataaattaattggcttcaaggtgtcgaagtctgtatgatagaatggcggattatacagaatttactaaat

SEQ ID NO: 45362 - DNA, 369 bp, Setaria italica
  Peptide Sequence Number=SeqID_111336
gttccgcttccaatctacatacctgttcaaagaggcgatcgtatgaagacctgtagttccgatggttggataacaattgccttctttattttgaagcttctttggacgttctcacacctctgcagcagctcgtttctagcatctatgagacagttaagaaactcattaacctgttcgatggtgaggcagcgcgcctcgctcgcccgcgcgaggtcgtcgtagcgcgcgttgatccggcgctgcagcgcgccggccaccgaggcgagcgggaactgcggccgccggggcagcagcgcctcctcctccgccttcccctccctacacgccgccttcgcggagggcgccgcagcggcagtgtccccgttcccc

SEQ ID NO: 45363 - DNA, 1074 bp, Setaria italica
  misc_feature (1)..(70): n is a, c, g, or t
  Peptide Sequence Number=SeqID_111337
nnnnnnnnnnnnnnnnnnnnnnnnnnnnnnnnnnnnnnnnnnnnnnnnnnnnnnnnnnnnnnnnnnnnnnatattggaagtgcacttattactgacgagcgcgacacagctctttaatctgcccagatttcaggccaggaccaagtgacaggcgcccaacatcatgacagccagctgcattacaccaaagggttcgatacagcagctctaatgggagagcaagctcggttttaaagtttatactgctaatgatgttgagacgctatcgatgtttcagtgtgccatcgtcagtcaccccatgctggcctcgggacctcgcgtcctacttggctactttgggttggatgagattgacctcatcttcccattaggctgccagaaggcggtatcctctttctccttagccagcagctcctcaaacgatatctcaggggcctccatctccatagcgctgagctccatgatcattttgtatggcaatgacttctgaagcctttcttggatgtaattgtagatggcggcatctttctttaggttatcgcgttccgcttccaatctacatacctgttcaaagaggcgatcgtatgaagacctgtagttccgatggttggataacattgccttctttattttgaagcttctttggacgttctcacacctctgcagcagctcgtttctagcatctatgagacagttaagaaactcattaaccaggtctcctgtaatcggagcacaacaaaactcagcataaatatctctgatccgtcgtttcatggcacagcttaacatcgagagggggaaaggtggctcttctgacatctgcttcttcatcgcctttcttcccttcttcccactcttgctaccaagtggaattgatggttcgcccgattcacgattccggcggcggcgctgaataataagcgccgtaacgaaagcaaggagaaagtgatcagaggatttttccatggcttcaggttgtgatgggagattaggggcaaaattctcgatgttgagaatttgtcgggcaggctagagctaggtttatcttgtagtcgattgtaagctatttgttgg

SEQ ID NO: 45364 - DNA, 239 bp, Setaria italica
  Peptide Sequence Number=SeqID_111338
ttttcggtcagataattgggcgcagatattatcctatcagatggtacaagtggttcacagtctgtttttgtttcactttcttctcaaccaagagaggactacattcaaacaaggcaacgtttttatttacactgtgacaacaactgcgtatcactgagaagatgctgctacccaaacaagactacctgactcgtctatcaatgtaagtatgtggtcagtgtatttcccttcctcttgcg

SEQ ID NO: 45365 - DNA, 356 bp, Setaria italica
  Peptide Sequence Number=SeqID_111339
ggataaccaaggtgccgaattaggttatttgacatctcaaaaataaaggaagaatgacactgagacaagtctcacccataatttataaacaaatcccacccaacccaatgcaccaacatcaccagacagcttgagaagtgtgaatgttgtagcagctataagaaacaccattgaaattgccacccaaaaatggggaagtgtctcccaaatagcttcatcgctcatgctttcttcatctccaggcattaaagctctacacattcaccaggagtacgtggtgcggccgtcgaccctgagcgcgaggaggagcgtgaagcagaagagcgcggcgtgcgcggccgccgcctgcgccgtct

SEQ ID NO: 45366 - DNA, 1986 bp, Setaria italica
  Peptide Sequence Number=SeqID_111340
tttttctacagtctgtttttgtttcactttcttctcaaccaagagaggactacattcaaacaaggcaacgtttttatttacactgtgacaacaactgcgtatcactgagaagatgctgctacccaaacaagactacctgactcgtctatcaatcgcaagaggaagggaaatacactgaccacatacttacattagataactggatggaaccaacaaaatgctcatcagccacctttccatgcttttggttagagacatgatatacttgtatttcccccatatatgcttactgtaaaccttttctgatgttgtgcaaacctcaatcagcttaaagttgtgatcgagcccaactgcacggcatgacagaacccacatgtacacgtttgtaatgttaagctgagttagtgagctttaaacatcatatacaggcatgcgctcttcaattggcacacggcagatcggacacttcttgcacttatcagaacaagacttgcataaagttctgtgtcggcagggaagtaggaccatgcatatctctccctcatagcaaatcctacaaagaaccttctcattttgaagcctttcatattcctgtttggtacactttgtaatttcagattgctctcccaatgccgcctgtagcctccaaacctcttctgcaagatcctttttaggcattttcctaaccacctcaggtggatagccacaaaatgtattgtacccagtagattcagcataaaacaatcgggcttgctcttccttgctcccttcgtcaatagaccaccaaccaagaagccttgaaccatgatgaagaaaagcaaaacaatctcgaacttttgatgaggctgtaaggtaattaggactaactggtccattacgcaatagtagaacaaccttctccgccaatcttgctagagagaaaaggacaccagcaccttgcagaataaatagtggcgagaaaaccgcaaatattgggatgtagcgagcactaggtggtgtgccctccaaccgcatacagagaaaaacttggaaaacaaccagaggtattttcattacatgacctccgatatcagggagaccacaaagcccctcttgttcgtgatcttctagtgatgggagaacaagaccactttcccaatcacggtatctaattgctgctgatgacgagctagcttccccattagtgggaggcttatgaatcatgggattaaaccatctggtacaaacaagaaatgcaaaacactccgcaatcccataatttataaacaaatcccaccaacccaatgcaccaacatcaccagacagcttgagaagtgtgaatgttgtagcagctataagaaacaccattgaaattgccacccaaaaatggggaagtgtctcccaaatagcttcatcgctcatgctttcttcatctccaggcattaaagctctacacattctaaaattatcgataaggataattgcttcgaaggccagcagaggaaggaacacaatcttcagattaacagatggatgattcctaactcttaagctttcaaggtatatgcaaagaagtagctcaaacgcaattagcagaggtgctgcgacaatcgaatgacagggtgcccaatgacggccatgaggcaaagaaggggctggcattgaaaaccttccgcgcgcaacgatcccatgaaagagccatagtggaatgaatattatccaccaggagtacgtggtgcggccgtcgaccctgagcgcgaggaggagcgtgaagcagaagagcgcggcgtgcgcggccgccgcctgcgccgtcttccccacccccgcccacgtttgcccccgccgccgctgcatctcctcctcctccctaggctcccgacgggaaggccgaatcttccccctcctcctcctcctccgccgccgccgccgcttccttgggcttgacgctggtggagatgggtcggagactcggaggaatgggtgatgaaagcgaggaacagagggggg

SEQ ID NO: 45367 - DNA, 686 bp, Setaria italica
  Peptide Sequence Number=SeqID_111341
ccacactaatcgatgcccaattatccctccattcggtttataccacacataatacttgtagcaaatttgctattcccttgacaaactttggcataacaacattcagactcgaaatttgcagacaattggatttatttttgtaccaaaaacacggaaaagaagagggtcatacctcctcttcttcttgccgtcaggatcatcgccgccatccgcacccgcaacctcctcatcctcccctgcggacgccccatccgcgctcctctctccagtggtcttggggctcccgtcgtcctcgccgtccccgacgaagacgccgttcaagaactcatcaaccccgtccacccctgcctcgttctcgtagtcctccatgagaaacttctccacctcccctaacccctcccggaggccctccccaggagccaacagctcccgcgacgcccccgccaccgcctccggtgccggcagcggagcgaatacggcggcggggtcgccggagaaggaggcgaggacggcgtcgacctcctcgaggggaaggtcgtattcccctcctcccctgaaccccgccgcagccatggcgacgttggcccggcgaggcggctacggccgagacgtggcagctgagtgctgggctcgttggcgagcacgcatttcttctcttctccgttcaggaaaaaaaaacacacgca

SEQ ID NO: 45368 - DNA, 152 bp, Setaria italica
  Peptide Sequence Number=SeqID_111342
ctcttgccaaatcgagggaaatagtgtgtctactttctcgaattgttgtatatgagtaatgagatatatataactgaaattaacattataatccaatgctatatacttactgctgccgttctagcagtaagtatatagcaagagatatatat

SEQ ID NO: 45369 - DNA, 359 bp, Setaria italica
  Peptide Sequence Number=SeqID_111343
ccctcgatgcgattgataagctcggcagcctctaggtgaggtgtggggtgttgtctgacgagcatcagcattgtactcgccgttagagagattttctacggagatattgatcagccatggtgccgcatgtccttcctttgccgtagttatttctttcactgtatcccactaagaactctttgtaagagcagcaggatcccttatggatcacttggaggcatagaactcccatcctgtttctaaggttgtaccacgctttgtactgtacccagaacccagaacaccgttcggttgtcgttgacaagtaagaatagaatagacaagttgtttgttgttgtcttttcctaaaaaaaaaaaaa

SEQ ID NO: 45370 - DNA, 357 bp, Setaria italica
  Peptide Sequence Number=SeqID_111344
attgtgttgattgtttggcgttgtcccatgtatcatggttaactgattttgttagtgctcaagtgccattatggtccgtttttgccccctcctttttaatttgcttttacctgattcagggtttgggattctgtaagtgttgctttattcacaatatcaatatgaatgctctttcttgcttcactctctgcagttgtttgtgcacggtgagaagttcaatcagcccatatttcactgcaacaacatatctggattcgtggaaccagttgttccggagaaccagaacagggccctgtactcaactcacaccttcaagatcttattcaaggaaggcggctgtggtacttttgttcctct

SEQ ID NO: 45371 - DNA, 1304 bp, Setaria italica
  Peptide Sequence Number=SeqID_111345
cgcgcacgcgtccaggctgacaggatccatccaacgaagcaatccaaaaccggagaagcgaaacagcgcgacgcaaccgaccctactgctagatacgcgaagcatcgacgcgttccttcccgaattcccgatctcagtcaccactgattcgcgggtcggagtcttcgtcgtcgctcggcgatcaatcgagcggcgcggcagagggaggaggaatcgaagcggcgagaggggaggggaggagaggagggagagaagatggcggagaacccgcagctgttcgggaacgggatgccggtgccgttctacggcgagatgttcgtcctcgcccgcgacggcgtcgagtttcacgtcgacaagatcccatcagctcctggcggtcaagtgaaaacaaaaggcacaatttacctgtctaatataaggatggtgtttgttcccaacaagcctgttggtaacttctttgcttttgatatgcccctgttgtttgtgcacggtgagaagttcaatcagcccatatttcactgcaacaacatatctggattcgtggaaccagttgttccggagaaccagaacagggccctgtactcaactcacaccttcaagatcttattcaaggaaggcggctgtggtacttttgttcctctcttcctgaacctgattgcatctgtgcggcgctacaaccagtttgaagcccagtctgctgccaacatggcaccacgtgtggacccactgcaagctgcgcagactcctgttgatgaaatgatgcgtcgtgcgtatgttgacccgaatgatcctaccaagattttccttcagcaacctgccccagagtcccagctgaggaggagaaactaccacggcccagctgacaacgcctagtagcatttggctggatttgcctaaaccctgatgctcaattccattaactattgtgtgcatttgagcatttcacctatccaggtccagcgttccaactgactttccgttcgggtgtgccgtttcttgtgactttatatcgtacataatgttgtgagtcgtctcaataagtggtgtacataaagcagtggcctgtttgaaatattattactggaggatattggacgaacgctacctcgcatattgcagaagcaacaaatattgccggtgtctaatgtttctgtgcaaatatctttatccggggctagttggaatcgtaatgttggtatttcctgaagttgagatcacggtttgatcaactcttgtaaatgaagcgcaaggctcattagtgtcgtggttctggtcgctgcatgatacaaaaaaaaaaaaaaaaa

SEQ ID NO: 45372 - DNA, 755 bp, Setaria italica
  Peptide Sequence Number=SeqID_111346
agtagactacaacttagattgtcagaagctacgtcaattcattcaccatgtcagtattgttctacatgcacagtcatcagagaacaatggcggagcagtagcatctcctgccaattgacttccagaccagttgtcacccacccacaaccttccttgtaccgctccaccacatccaagattgtatctgcttcagctttcaccccgccaaatgtgaatatcgacccaccaagcacagctgaagaatggtatcctctggtgcagttcatgggttcaaccatcacccatgaaggcatccttggctcgtacacctcgacggtagctaccattgctttagccccagtatcataaccaccaattgagaatatcttctcgttaagcactgcaagtgtatgacagccccttcctgcactcatcattgggagcattttccagttaggctcccgaggatcaagcctctctgcagagctcaggtactgaacaccgttgaagccaccaactgcataaattgcaccattaagtgctacaccagctagagcaaagcgcttttccagcataggttgattctttatccactttccatgagtaggatcaaatatctcaacgtcagagaaacattgacttccatctccaccaccgaatgcatagattctcccattaacactaacaccagcaaggctccccttctcatgagtcaatgaaggcacgtgatccagtcatcacggcttcggtcataacagtcaactgtatcaaaccag

SEQ ID NO: 45373 - DNA, 604 bp, Setaria italica
  Peptide Sequence Number=SeqID_111347
aaggagagagctcatcttgcccctggacttcaaactaggtaaactagaagggtaaacacacccttctgactccgtgcttgacaggtctgaagatgccgactaagatggcttcttcccccatacttatttgcactgaggcgcttgtgacaatgcacgcagtctgcagcctggagcttcccctcaacatagataggtgagaactctttccacaccttcgacttgaatctgccaggaatcactgagtttatgtcatcaagtgtctctgaaataatctgatttactggatcacctggtgtaaccggttcattctcattcaccaaaacacatgggaagtaggaatccttcagccgccgccgcaccacatcctccttgcctgggcagatcttctgatgccgccacagatggctggtcccattggaatccttgcagctcattcggctgcggcagtacaggcactctgcgaactgaaccttcccattcaggaagattggcttgtactcctcccacaccttggacctcttcttgtgcttgaacctgaacgtactgtgactgtgcaccccgccgaatgccccttccactctcatgctggcatcctcctcctcct

SEQ ID NO: 45374 - DNA, 247 bp, Setaria italica
  Peptide Sequence Number=SeqID_111348
gtggtgatctgttgacgaggaggccgcagcgtcgaagctcgtcacggcgagcagcatcttccttgccgggacggcgaccgagcctgttcgcctcaccaggaagccaccgcagccaaggcggcggccgcagccgtggaacgcgacggtgagcacggcgagccacaggaggacgacggtggcgacggcgctaggtcgtctcatggtgacgacgaccgtgcatgcttttggcggacgagaggattcatgg

SEQ ID NO: 45375 - DNA, 187 bp, Setaria italica
  misc_feature (9)..(9): n is a, c, g, or t
  Peptide Sequence Number=SeqID_111349
ttttttttntttttttttagtagatcatagagatagcacaaggctccatgtgtcaacaatggcgttcttttcatactgaatgataggaccatacgcatgatcagagatttcgctacatcgatcaaccagcaacggacgaccagtacaggcagccaatacattcataacaaggcacactgatataggc

SEQ ID NO: 45376 - DNA, 763 bp, Setaria italica
  Peptide Sequence Number=SeqID_111350
gatctgtttgtttgatttttccttttgatgattgtcagcttccttgtctatatatgtgctctgaggcacatttgaagtgttaagctgatctgtttgttgtttttccctatgatgatcatcaattttcccttccttgtctgtacattggcccacaggcaagaatgaacatgtggttttaagctgatcagattgttggccttcctcttcgaaatcagtgaaaggataatcttcttgtgaacattggctttgacgcaaggaagaagaatggtcattctcctttgtatgtgtactcagcttatcacatggtagtgtctttgaaacatgtttagggcacagcacattacgtttatcaacatcccagcggcaatcaattatctgaactgcacatggaatgtgaaaactctttctgcaatgtttataataacaaccaagggctgctcccgggagtccacatcttgcacatctcagtcttgaagcacgcctaatttctgactccaagttctcaacaatgttagactcaaagtcccagcatacttcaggagcccacatcaggcatttcttatggacgtagatggcctttgataagttgccctcttcaatgaacacaagtcttccctttagataacataccatcggaccatgaatctcctcatccgttctaaacgaatggcagaaaatgcattcatcttcaaataagttgattggagtttgcagtctcttcaattcagtagtacctccaatgtcttcggacaagacatgtttt

SEQ ID NO: 45377 - DNA, 468 bp, Setaria italica
  Peptide Sequence Number=SeqID_111351
cgcatggaggccgcgaagcagaggcatgcggaggagatggagaggcagcggatcaagttcctcaaggatctggagctcaagcgtatgcaggcttttgtggacatgcagctgcagcttgcaagggcaaagcacgccaggaagggtgacgcttcatcggagatgctaatgtctctagcggcactgccgttcctcagcagcccttcttacctctgaattgaagaaagagttagattgttaggagccaagctaacgagatgatatcgtccttcgatgaagatccactaggttcattggtagcagtttggtatatagacggcctgaagttggtagtgcgaaacagagcaagcttgctaatagcgcgataccctgttctcgccaatccatcccgaagtgtggacgacagatctaattcctttcccttgccttttatagttttgatgagtcgctgaacggagtcatgtaaactaa

SEQ ID NO: 45378 - DNA, 818 bp, Setaria italica
  Peptide Sequence Number=SeqID_111352
tcgtcgaccgacaaatacgaccaaccgaccgacttacccaatggacgctccccctcaccaattaccaccgcggctccaatctcccctcggcgaacctcatccacaaggcggccgcggcagccgccgccgctgccacggagtctgaatcagaagacggctacaacaacgactacgacgatgatgacggctatcagcagtcgccgtcgcgctctgtatcttcacgctccggtggtggtgccactgccgccgctcctgctgtcggcagcaagaggaagatgagcagcgggagtggtgggttcggggagctagcgagggcaattgagacatttgcggatatgtacgagcgcatggaggccgcgaagcagaggcatgcggaggagatggagaggcagcggatcaagttcctcaaggatctggagctcaagcgtatgcaggcttttgtggacatgcagctgcagcttgcaagggcaaagcacgccaggaagggtgacgcttcatcggagatgctaatgtctctagcggcactgccgttcctcagcagcccttcttacctctgaattgaagaaagagttagatgttagtaaaggaagatttcactgcttaaattaggattcagtcagttggttgctgcgatagacttgtagtggattgtttgtatgtttgctaagtccatgccattgtttgatacaaaccatggaggtactgcaggtcgtttaaacatgccttgcaatacactatgcttagtttttcttagatgagatggaaatttactggtttaggacatgtaagcaatgtaatttaggaattcaattctacta

SEQ ID NO: 45379 - DNA, 267 bp, Setaria italica
  Peptide Sequence Number=SeqID_111353
catgaccaaattgtgacgagaaagtattagcataaaatcacaaacttatcaatccacggcacctgatgaggcaattagcatcagcaaaatcataaaaccctataccattgcatagaatggtgctatttctgtataaatcaaaggccttatccaaagattaatatgtggcccatgagcatgctgacaatgagtacggacaatgttttcagtttgaactttgaagcattagccagcacaaaccaacatatatctcgccgcccaacaaac

SEQ ID NO: 45380 - DNA, 475 bp, Setaria italica
  misc_feature (23)..(23): n is a, c, g, or t
  misc_feature (33)..(33): n is a, c, g, or t
  misc_feature (471)..(471): n is a, c, g, or t
  Peptide Sequence Number=SeqID_111354
aggaacaacactaatccgggtgnggcagcagcngaaagacccaaatctgctcctatcacttcaatctcatcgccttcccatcaaggcgcacattattatatcgtttcagtgccgcaagagcttcgcttctcctggtgaatatcacctcagcagaaccagttgggtgtctattattgtcatagtgaacagcacagtgcttcaaatgacccatttctgaaaaaagctcctgaagcaatattgttgatagacaaacatcaggcttcagaaatgctgaacatggatgggactgtcagatatcatagtacgaagatgaggatccagctacctttatatcttccctggtcaccccatagtgcaagtttgaaatgtacaactttgtaccagattctatcccagaaagcccagctgccaccatgctatcctccaaacagatcatgcctccacacaaaatccttttgcttttattgaatnactg

SEQ ID NO: 45381 - DNA, 569 bp, Setaria italica
  Peptide Sequence Number=SeqID_111355
tcttatttatttgttctattagttgtaactaggcacagtgcttcaaatgacccatttctgaaaaaagctcctttatatcttccctggtcaccccatagtgcaagtttgaaatgtacaactttgtaccagattctatcccagaaagcccagctgccaccatgctatcctcaaacagatcatgcctccacacaaaatcctttgctttattgaatgacttggcaatagcaaacgatgaggatcgagtattaacaccaagtggccttcgtgaaggcaccccaagtccccttccacggaaggtgccagtaccacgcccacgccatgatccacgggccaatctttgaccatcacctctgcctcgaccccctccttgtcccctgcctcttccccttcccctcccatttctgctcttaatcaaatcatcgagtggaacgtccaaagatgttgccattcaaacaaaaattttaaggcccaaagttaagaacaaaaccctgggggtgacaggacactggggatctggacgggccggtggtgatttcgttagccggcgagggaggccgagggatcgttcg

SEQ ID NO: 45382 - DNA, 247 bp, Setaria italica
  Peptide Sequence Number=SeqID_111356
gccatcgtccagaatcgccaccgagccaagcaaacctccgcttccccagctgccttcccacccagccaagcaaagcaagctcccaaccaagctgctgctgccgagccaggccctcaaatcaaaacccaggcagaggcaggaatcgccgccggcgggagcaaaaaagcatcatcccaggatcggatccccggatccgcggcccgtccatggcggatcaggacgcggcggaggcggcgtggcccccttt

SEQ ID NO: 45383 - DNA, 325 bp, Setaria italica
  Peptide Sequence Number=SeqID_111357
gtgccagaacttgaaacagaattgccattttctttctttctaacttttggcttctttgaagcaactgaatctggcgttagttcattacgaagatgctctctgcgtgagttgatgtcatccagaggaaatacaggttccttccgtgctttgttcatattagacgtaagatactcaaaatgcatctcactttgattttgatattctgggccttcatgtggaccttgcaaagacggcgggggcgcaggggccttgaccttgaaggcgtcggggttgtgcttgagcacctccatccagagccaggagcactggctggggtcgacgtcga

SEQ ID NO: 45384 - DNA, 248 bp, Setaria italica
  Peptide Sequence Number=SeqID_111358
gctttgtactgaacgtgaaatccatagcttatcaggaacttgatgtgctgattttgtcaagttgttagactcttacaagaataggcacatgcaggcttcaggttcctgcctttggtatcatttgctgtcgtcagggaaggagcagtggcagtagtgtaggaaattaaagattctagtagtcagatgccattgttgttgttgacatgaattctcgtagcctttcctttatggtgaagaaaaatactgaa

SEQ ID NO: 45385 - DNA, 295 bp, Setaria italica
  Peptide Sequence Number=SeqID_111359
tcgggcccaatccttttaaaaattacttggacttgatctcacgaacatcaatacgtgtactctgtcctgcagatgatggtactggttgaacgcttggtgctggttgcactgaataggtaggtgtagaggacggcatttctcaggcaagtgattccatataaatacagctgagccacaaagagaatcccacaaaatgcccagtagaaactttaatttccaatttgaaatctgatactacactgccaaacttgaaatgtctctttgctttcttctgcgcgcgcgcgcgcggcgacgg

SEQ ID NO: 45386 - DNA, 362 bp, Setaria italica
  Peptide Sequence Number=SeqID_111360
aacgcggacgcggcgagtcggccgccgcggccgaacgcgaggtcgccgatctccgggtacccccgcgccgccgccggtgacgcggccatgcaccgttggaggagcaggcccgtgtagcagcacaccgccgcgacgacgagcaggagcgccaggctcagccacccgccctccgacagcgcgtacgggatggacaacagcccgacgccggagagggcgttgaggccattgaagcaggttcgcacgaagctcgcgccgccggcgtcgggctccgagccgaagcactgcgcctcgtggtcgtcgtccgccgcctcggcctccttgcgcgcctcataggcgtggaggaggggatgctccaggccggg

SEQ ID NO: 45387 - DNA, 390 bp, Setaria italica
  Peptide Sequence Number=SeqID_111361
aagataacaggggaaatgagccaggtgaagttcaagtgcaacttgctatcactacttcaaaatttcctcaatgcattttacttatctcattttcaaatgaaagtgcacacaagtaaaatgtacaaaagtaaatattgtgataaacccctcgacatgaaattctgaccaaatattcccaaacatatctgatgaaaatcattttgccagatgagcccaagtaccattattctgcccatatgcaacctatgtataaccatatagattttccactcctatcctataactaagcatcgtttcacacagttccttttggtacaacttcttgattcaatgaaatcaagaaacagtttgagccaaaaactttctgtaatcctggatcattggtggctc

SEQ ID NO: 45388 - DNA, 450 bp, Setaria italica
  Peptide Sequence Number=SeqID_111362
gtttaagacaagttgaattattatttttgtttgcataatgtagtaccaacatcatgctcaaatctagttcctttatatgccaactctcaggtgttatataactctctttaaccgctatagacatattctactgttgctttattgtttgcagcttgatgcgaagtttctgctgtagtgactaccacgggtggcccacatagcctacataaggacctcagctagcctaatagctcctctgctcctttcactgcatgcaacagcagctgccatgactgctcttctttcttccccaactcaattcactgtttcacaccaccgactagcaaaacgggtcgcccacgcctgcctcatcagtccagtacccttggatttttgtgctcttctcagacccagacccctctccaagctctctccaattcggtggacgtatcagcaagtatcgcgaaaaga

SEQ ID NO: 45389 - DNA, 2313 bp, Setaria italica
  Peptide Sequence Number=SeqID_111363
ttttttttgacaacaaaaagaaggaatttgctctgaaattacacgaggatgtagtagacaaggaaagacatgatagtataatcatccaactgcagaaaatgcagcgttcccgcagcattaattttgcagcttcttatggctaaaccactagaatgaacagcattcatggtgcaacacgaggaacaaggaagaacatgcggaaataaaacagggacgaagagaactgcaaacaataattttggaactatgatattgaaattataacctaaatgatgaaacaaagccctatgatgttgtacaactgacgcgacacgaccatatttaacacaatcaacctgcactttgcccccctccgaccttcacaaagcagcacgctattcaactgctgcttacaaattagcagacagatgaatcaaccacttccctccacagggtctgctttcacatttgtgtcgccttcttcgaccttagctgtggctgtggatccattttcagctgaggcgctctcagctttcaggggtttcccactgttctcggcctcctccaactggacagccttagcaaatgcatctgacatatcagccacaagagcttgagccttggtatccgctggcttctgaggaatggtgatgccaggttgctgttgacgtctgttctcctgcagggctttctcccgctgctcatagaagtcgaaatcctccaagattgtcgtctcagcctcatggttcttgaagatggttaacatctggaggccctgttccagcttcacctcctgtgtgtccctgctatttgtcacaggtttattatcattattctcaagaatgatgtgccgcagaaggttatttgggacatctttaattatgtgccacttcacagggaactggccactccacttgtcctgctgccagtaatcaacacttctgtcgaaatcgacaggtccaatcatctcagccacaccacaaaactgaccactgccgttaaccgagaaaaacaagaaaatagggcaatggtcttctttctctttggctgcacggtaagcagaatccagctttctattcccgctagctgtgctggcccaaacactatacttaatgctcctatgtacatggtcctcagtgtaggactttattacaaagaatttggcatctttgtactcggtgataaaatcagggcgattgtacagttcgctatcaatcaatggaacagttttctcacttttctcatctgctgaggagttctctgtgtcttgtatctttggttttgtagcacgtggcccacggttttgctcattcataaactccagagagccattgtgactaccaaatggcctttgttgattggcactcaagtcaaaagcaccaaatctgcgaccagaattccaacttggagcagtgcctccaagtttgccaccttgctggcgtgccttataggatccaggaccatatggcgatccgtgatgcattccagaagccagtggcatattcccttgaccaaataatccaggtgtgttatttggctgcgttggcgctctgtcaaacgaactgaatggttggtgataccctggtgtgggtgaatacagaaggccatcaggaaggaagtactctggctgaagcatatggtctccttgagacatccctgtcactgagtttgaatatcccatgctaggagaagccggtggttggtagtatgaacttgagaagggaaagtgcacaggcaagtattgttggccatctccaacagttgaaacaggagaataagccccatacatcatttgggggttgtttgcatatccaggagatagcatgtcattgtagataccaggtgatacagagtggagaccctccatgttcacataatggggatattcctcccattgccctgaaggattcatgtatcctccaggatagagtgcctgtggctgcggtgcatacacattgtgctggtagagaaacggctgctctccaccttttccgacagagctagctttttccggtgctccttttggcgattttaaggagctggcaccacgagcattgcctgcagccatattctccgtaccagaaataacctgctccttagagcttgcgctcttggaggggttattctccagtacagcttccgactgcagcgagatcatgctatctgcggagccctgggcctgctgctgcggcgcggtggccatggcggagatccgggcgggggctacggcgcgcgtcgggattggagtcctctcctcccagcgagggtttaagcatcaaaaattgggggaaagggggaaaaaaagtttttcccctttttattggacgcgaggag

SEQ ID NO: 45390 - DNA, 531 bp, Setaria italica
  Peptide Sequence Number=SeqID_111364
aggaaggacaacggacaaggaaagttacgggcactcccacgcccccgggctcgcggcggcggcggccgccggcgccacgagagacgagtaccacctgacgcccaagggcggcgatctgcggagccaggtgatgctgctgaacggcagggcgctggccaccggcgccgacgggagcatccccaggctggagccggtgaaggtgggcgcggcggagcccatcgccgtggcgccctactccattgtgttcgctcggattccacatttcaatgccccggcatgtagatcataataatgggtgtttgggggtgattcgtgattggtgatgatggatggacagcgaagctttccatctggacgatgaagtgagatgcaaggcaattgccaaaaggaaagggattcttgcaatgtaaaaggttgaaaaaattatgatgatgaacaatggaaagggcaaaagctatcttccagcgtctctagtttttttaaagcatttcaattcattgtttggatgaagcagaattgtgcaagggcgtg

SEQ ID NO: 45391 - DNA, 424 bp, Setaria italica
  Peptide Sequence Number=SeqID_111365
atcttatcagaaatcaaattacttgcttatggattataaaatattaaaatcaagaaatggtctttagatctgagatagtctatctggaaaccattttctactccctactggtgatcatttaattggcggatgattctttctatgaacaagtccattgtgagtaagctgagctcaaattgattggtacaaacctgggcttaatggaagtcaaactatctgtgcaaaaaagctagcctaccaggatactgtatctagtcctactgattactcaagatgagcttaacactattgtggaaaatttgctgtgggtcttgtggatgcaggatactgtactaatactgcttctaccagctactgaggaattcatacatccagcatgcatcatcgcatttacacattcttgcttgatgtatgaattcctcag

SEQ ID NO: 45392 - DNA, 585 bp, Setaria italica
  Peptide Sequence Number=SeqID_111366
cggcgcccgcacgttgtcgcgggggaggtcggtgaggtcgccggcgggaggcggaggatatacgtcgtcggcgccggcctcgacgtcgccgtgggcacggtgtccgccgccgctgccgccggtgcccccggcgtcgaggaggaggtggtggagtgggaggtcgtcaagggccccgccgagttcgccggcctcgcgccctgcaacgcgcaggtcctctacgcatgatgaggcgtgcccgccgggaccccgcctgtgcgggtggaacgtctctgtcgccgggcgacggactactacgacttggcccggagctactacggcttggcccaaaccggcgcacccacggaaccaccaagcccgtcgccggcgaagcgtcgtgctggtccacgtgccagcggaacgtgacggcctccatcgtctcgccggcatgagcgagtggctcgctgctggaaacccacaccccagttggattttcggaagaagaaaaaaaataagaaaacctgtatattactactattgtatttctggaggaacaagagaagaggaaaaacgaagaacgcgatgcgatgtcctcgcaacaagagagag

SEQ ID NO: 45393 - DNA, 452 bp, Setaria italica
  Peptide Sequence Number=SeqID_111367
caataacttcctgaaaggtttgagatctgtgaagcacaagcctaactactgtatattaagatgttctgcaatccacacccacatgtgacacattcctgaagtcaggttttacttactctaatattttcaagtcaatcattctattacagtaaaaggaaaatgcgtaccacctagttatcacacatttctcttgtgtagccatatcctggtttgtacattgataaatcctggtgtccttttaatgttggcactgttgaaaccaacttaactatttcagtacccgtctaaaagaagaagagagacataattatttcagttactacttgaatggggccaatgtctgaacttctgttgcttcatgctaacatctgtatctttccataggaaaaaaaaagaattcctggttcaggctaaaatatgtgggcatccagtgcagatctaccttcaactag

SEQ ID NO: 45394 - DNA, 379 bp, Setaria italica
  Peptide Sequence Number=SeqID_111368
gaagtcgctggagaaggacatccgcggtgccatgaagggcgccggctggtgctggtggtgctccgggttgtacatgttaacacatgcggccatgcaccatgtcgccacgcacgcgggctctgctatctggttgctccgcctctccccagcccagagctagctccggtgagcgctctgatcttgtgcgcgagtcaagctgcgtggagatcaagagaggagctagctagtacactacactctggcctgtgagtgagcgagtgagtggaggctgtggagcaagctcagtcagctcgtggagtcctaactggccagttggtgtacttgtgattagtgaggagagcgatggctgctttgaggaaggggaagagctctcgtggag

SEQ ID NO: 45395 - DNA, 481 bp, Setaria italica
  Peptide Sequence Number=SeqID_111369
gctcactaccggtactaggcagcacgacaagaagttcactcgggacactgatgtagtcagcctgagacttgctgagcttggtgagcctggcaccaagcttgcccaagtggagagcagcaaccttctcatcaaggtgcttggggagcacgtacaccttcttctcatacttgccagagctcttctccttccacagctcaagctgagcaatgacctgtattaagcaccaagacttagtatgatgggtaagcaatgacttggcaatgacctgtatgatttcaaccgctaatgtatcagctaacatgggcaagacaagatgggtattggctgacaaatttacctggttagtgaatgagcaggacatgacaaagctggggtggccagtagcgcacccaaggttcatcagacgaccctcagcgaggacaatgatgccagtcttggtctcagggaacacccagcggtcagtctggggcttgatggtgat

SEQ ID NO: 45396 - DNA, 1570 bp, Setaria italica
  Peptide Sequence Number=SeqID_111370
cggtcacatcccttcgcctctctctccgctccccgattcgaattcatggccaaaggcggcgaaggcggcgcggcggcgccccctcgggacccgctggtctaccttccccagtggcgccgcctgtacgaccgcctgctcaagatgctgcgcgaggagcacgcgcttgccgaggagctctccgtcgaacgcgcgcacctcatcgccgagctcgagttccagcgcaacggccgccgcgagcgcgaggagatcttcaggacccgcatcgagcagatctggagggatgaggagcgcaggaagagggtcgagaaggccgagagagcggtgcttattgggggaaaggatctggagagtcgctgctaccagaagctcgcagaactcgcagatagcgacactgaggatttgagaagttttatttctactttgactgccgaaaattccgaactaaaggcaaaagtgaaggaggctgaaagtcaggcacagcttaatgaaaacaatgtggatcaccagcacagtggaaaagatctgagggtagagttaaggaaactaaagcaagcttacaagaccctgagctcagagaaggacaggcaaatttcagcattgactgcagaaaaggattttgtgtggaaccaatttaaaacaatggagcaggaatacattgtgaccattaagaacaagaacatagaggcaaagcaagctaatgaagcagcacagaagcttcagcacaatgtagatgaactgcaagaagcagcccaagagaaggatgatgaaatcgccagactgcaagcagaagtgactaatgccaaagagaagatgttgattcttgaggatgagctccaacaaatgcactccttggtcaaagctagagatgctgaagctggtaaaaataaagatgatcaacctgagactagtcgaaagtcaaagaaggatattaaggggacaaacagaaaatctaagtctgaaggccctctttcaaaggaaaaatcaagaacttcccaggtcacaccagacaggagagatgtgaagacttccagaactcgtgcctctgagtctagtcaaaagcgtaagcgcggctcttccatatcatgtggttcccggcgatgctccacaaggccgctgcaagttaaagctgctgtgtcacccatgctcctcccgcccagtttcacggttccaaagctgaagaccccaacccctccctaacctgatttttgacgaccttgtctgatgtgctgacttttgcaattgtcgacacacccggctctgacagtatttaggtgaggctaagcttatcagtgctcgcgggactggctccgtccctgctgcgacattgtatggacgataaactgtgttgtaacatagttctcgtctccttgttagagtgcttggaacatatgtgttggtgcggtgccaacagagggtttccatgtatcatgtatgttgtttatgtaagcttatcacttgctgtccgtataccggctttaacctgaagctgcaatgaatggatgattggcatagcttaacgtagttccgattcatcttgtggttgtgcttgcaattgaaattgtctattcat

SEQ ID NO: 45397 - DNA, 562 bp, Setaria italica
  Peptide Sequence Number=SeqID_111371
gtcagtcacagccgctggcagctggctaggattagcacggtgagaaacccaccagagagatggctgcactggatggtgtcgaggcttttcagtaaaggggacgcaaaggtctgcatgattccatccaggagttcagtcggctgtaaattagttattcaaggtgtgcagagattccaaagttgtgttcccaaggagtgctttccacaaaagaagctgggccaagatggacatcaccacaggggcaatgaacacaccctcctcccaagcttacggagctggtggtgggtgaatacaacctgcagaaaggtgtcaagggagagatttaggaactcgagaaagagctgacatgcataaccgcagccctccgcaaggtgtctaaggtgccggcagaccagcttgatgagcagatcaagatactgggccggtgatgcgagggaactatcctatgacatcgaggatgctgtcgacaccttcatgttgcgcggcaaggggcatgagcataccaagtcattcagcttcaaggagctcattgctaagaccaccaattgtacaagaggcagac

SEQ ID NO: 45398 - DNA, 271 bp, Setaria italica
  Peptide Sequence Number=SeqID_111372
agagtttgtctaaagtacatatctttgattagcttaattttcttataggtctgctttgaaggatggaccacaactgtgtccttattgcactcagcctttctctgttcagggcaacaaatttgttagagaatctgctagattttcatctggaaggggtgctactgctacaaatggacaggtgttcaatgagttattcaaccgcggaatgagagggacggccccttctggaacaattgtaggatctgcggagatatcattcaacatccttgac

SEQ ID NO: 45399 - DNA, 703 bp, Setaria italica
  Peptide Sequence Number=SeqID_111373
tattctggctctgggtgcatttttcttctttgcaggacaagacatactccagggcgattgtccgaactgtggaaaaagcttccagatactgaagtctgctttgaaggatggaccacaactgtgtccttattgcactcagcctttctctgttcagggcaacaaatttgttagagaatctgctagattttcatctggaaggggttctactgctacaaatggacaggtgttcaatgagttattcaaccgcggaatgagagggacggccccttctggaacaattgtggacatcgaggctgaagtcaaggatgttgaatgatatctccgcagatcctacacagcatcatcgcttatcagtattggctcttcggcctttcagttgaatgccagttttgccgcaggctatactgagtccctacctgcagcctcattcatatacgtttgaagcaaagattgggtccccgatgtcaaaactaagaagcagctgaaactgggtgggcatcttttggcaaatgtatatagattgacaatggatatagtagcaggatagcgtgacaatggtatgcttagtgttttgtgtgtatacatgataaactgtaacgggagtgcgatagctagtaacagatgagttgtcgtgtcggtgaacttgctgtagattgcttttttggcaagagtattacagcgccagacttggaattataggctc

SEQ ID NO: 45400 - DNA, 455 bp, Setaria italica
  Peptide Sequence Number=SeqID_111374
tatggaggtgctccatcttgataggactagggggaaggagtgattgaccacggaggagcttgaggcggcagggctcatctctgctccctcatgctgtgcttcattgcgtgctggtggtatcagggacttgggaggtgacgcgctggggatgacatcgggagactagggcatgtgaagggatgctttatgggctgtcacttggatttggctttatagcttgtttgttggctgcatgttgtggttgtgggctgtcaatgctcctattttgatttttgctgtccagtatatgcatatatgtgaatagtatggctgtcgcctcaaccgccttaccgcattacgtttattgcggtgataggaaggtggcaagttgctgcaaattgtattaagaacattgagcattcgggctaaacatgaaagagtgtgacctagtgttctcatttattatactagaatgg

SEQ ID NO: 45401 - DNA, 1142 bp, Setaria italica
  Peptide Sequence Number=SeqID_111375
ttttttttttttttttttgttctacacatatacagatttacaatatgtggaattcaaaactgaaataaactctatcagagatgtttcagtctctctagctttaaaatttcaggtttctcaagcttttcattccaatcaagccaacacccaaaccagcgcggcaaagccgcgctaagatttctagttacatggtaaatgcttgaacggaattcgcttgctccagacatggttacacgatccacacagtacgacgaagctgaatgaattatttcactcatgagctgagactggcgttccaacctttctagatggttgatacagccccaaaatactacaccagaagcaagaagcttttagctgtcgcgtaaatggtttattcgtagactgatacaaacagggatgggaagaactagcagaaaatgcccgaaacctcttcactcaggtgggtctctgtgaagccgcgagctcttccatccgttgtcgcattttgtactgcagcatggccggagcacagtccaaaggagtttccccttgtccatttttgctttgaacatttgctccatggtccatgagaataagggcaatctcagtctgattaaataatgcagccaaatgtagcaaagtaaatccttgtttgtcgcaatagttagaatccactccctggctaagaagtttctttacacccttaacatccccgcttttaattgcctctctcagtccctccccagtgacttcatagtcagaaagacccttatcattgctatcgttgctcatcaagccaatatttaagaatgggcttgagttgctgctagaagtagctgaagccttctgttggctgctagcaggcttcttgggttttgggttcgactgtgtggttgacgagggaacggtgctgatattctttacaggtgcaggttctggtttcggtgcttcgcatatacacaaaggcatcccacatttgcactcaataacgggtgtcatgctctgcactgtcaaattcttcataggcgacgaagcatcctccttacccaaacttagccctgaaaaagaatcagctgctccagaaatgctcccagctgacccggcattaccagctcgtccttggcttgaggattttttgttgaagcaattgtagcagactt

SEQ ID NO: 45402 - DNA, 356 bp, Setaria italica
  Peptide Sequence Number=SeqID_111376
ttttgaaaagtactcattttattctctagaatgaaaattggagtaaaatctttatccgaaaacgacactgcatttgaagattggcgtcaaggcaagtagtgcagtagcagcatccacggacaaccacaagataggggcacagctgtgctcagccccatgaatgataccacgtgttactcaacggattccagtgtcaccgtcctattatactacacactgaagtacagaactttgaatggtgataacttccactcgccactcactccaaaataagttcaagtatgtcggaccagaagagcaggagaagatacatactcacttgaacagagcacactagacactagctacgaaattcg

SEQ ID NO: 45403 - DNA, 361 bp, Setaria italica
  Peptide Sequence Number=SeqID_111377
ctgcttctaacaccagttgtgattacattcctgacaccgatgaagaagataatgatgattgtgttgttgatgatcaaaaaggttgtgagcttgttggtgtgacatttgaagatagagacaccttcatgagagctattaggcagtatgctattctgaatgagattgaaattgcagccccttacaatgaagcaaagaggtttacaggatattataaaagcagtaagtgcaagtggagaatacatgcatcacaattgtaggatgaaaggacatggatgattaagaagatgcctaacaagcactattgcaagagcacaagtaaagtacagaacaattgcatggctaattagagtttttagggttt

SEQ ID NO: 45404 - DNA, 420 bp, Setaria italica
  Peptide Sequence Number=SeqID_111378
cgcgcgcgtttatcgtcgccgagcctgatggcaagcgtgtcgcgttcgtcaatcttgatgcctgcatggcgtcgcagcttgtgaccataaaggcacttgagaggttaaaagcaaggtatggtggtctttacaacgagaacaatgtggctatcagcggaatccacactcatgctgggccaggaggttatttgcagtatgtggtttatattgtcacatctcttggttttgttcgccaatcctttgatgtaatcgtcaacggcattgagcaaagcattgtcgaagctcacaataatctccgtcctgggaaaatatatgtgaacaaaggtgacctccttgatgctggtgtaaaccgcagccctagcgcatacctaaacaacccagctgatgaaagaagcaaatatcagtacaatgttgataaag

SEQ ID NO: 45405 - DNA, 554 bp, Setaria italica
  Peptide Sequence Number=SeqID_111379
taaacaaagaactaaaagaaaccctaagaaccgtagtagaattacaagtgaacaaggagatgcgattgtttttgaatccgaactggacaggatatatctgggcacgccatcaaaattgccattattgatcacgagaagaaaagaacatttgttgtgaggaaaggaggccttcctgatgctggtcgtaatactgatcttttatttgtatacttatcactaaaatcattcaagaatgaagttcatgaggtttcatatattatttgttacagttgtttggaatccttgggacaaaaggcaaaagctatgccagattttggggatgatgaatataaacgcatggtttgtgtggaggcagctactataggccggttactctaaagcctggcgaggaatggaccggaaagttggaactttctgctgtaccatctagttattacagtggtcagctagaccctgaccgtgtgattcaaattacgagtgtcccagaggattcgatcagctagtccttactaattctgcgcaggtagagcattatatcgtgtacaagggacact

SEQ ID NO: 45406 - DNA, 632 bp, Setaria italica
  Peptide Sequence Number=SeqID_111380
taaggggaacgaactaagtaaccggaaaattaccccaaattaaagacccaatactagcctgcctctccacttctctccctccaggctccagttccactgcgccgcccggcgtgctcgccgctgctcgcctcgcgggagggacatgtcggcctccgcgtcgtcgccagccgccgaggagaagcaggaggcggcgcccgtgacgcactgcaagggcgtcaacgacctcgacaaggtcgtcctccgcgaggtcctatctcattgctttcaggtgtacctgtatggtgggcatgtaacatcatggaaagatgagcatggagatgagttactttttgttagcaataaggtgcatgtatttttttgccttataatctttcagcagtatatcagttatagtgagcactttcttgggattcaattcaattgattgaactaaattgaagcttcatatttgccatgactgtaaattttgatgcttgatttcatccagtctatagtctgttctttgcctgaaattcttgctcttcagctgctctgtccatccaacctcagtatggtatcttccccatgatgattttaggatcgtcgtatccaaaccgttgtttcttacctctttattagttcaattctagggg

SEQ ID NO: 45407 - DNA, 357 bp, Setaria italica
  Peptide Sequence Number=SeqID_111381
ctccacttctctccctccaggctccagttccactgcgccgcccggcgtgctcgccgctgctcgcctcgcgggagggacatgtcggcctccgcgtcgtcgccagccgccgaggagaagcaggaggcggcgcccgtgacgcactgcaagggcgtcaacgacctcgacaaggtcgtcctccgcgaggtccggggaagctccgtcgaggtactatgctatacccatccccttctccggctgctaagtgttccggcggccagatcccgccgcagatccgtggcgctttgccatggctctgtacgttacggagaaggttggacgcagttgctgctccagtcgcgtagtcgctactccgctgag

SEQ ID NO: 45408 - DNA, 1763 bp, Setaria italica
  misc_feature (1699)..(1763): n is a, c, g, or t
  Peptide Sequence Number=SeqID_111382
caccaggagcagagcacatcatcggagcgtaccagcaaagcgtctgcgtatccatggctgagctgagctgaaggcctgaagcaaagcaataagcaagaacacgtacacgcgctgccagagcaccagaagtttgcagcagatcgcgagcaagaaaaaggcatcaggagattgattatttacggaccccccaccccaccccaccccagacgcagagaggcgagggggcgctgtccggaaattccccaattaagcccatctgcctgcctctccacttctctccctccaggctccagttccactgcgccgcccggcgtgctcgccgctgctcgcctcgcgggagggacatgtcggcctccgcgtcgtcgccagccgccgaggagaagcaggaggcggcgcccgtgacgcactgcaagggcgtcaacgacctcgacaaggtcgtcctccgcgaggtccggggaagctccgtcgaggtgtacctgtatggtgggcatgtaacatcatggaaagatgagcatggagatgagttactttttgttagcaataaggctattttcaagcctccaaaagctatacgtggaggaataccaatctgctttcctcagttttccaactttggaaatttggaacaacatggattcgcaaggaatagattctggaccattgatactgatccgccaccatttccagtgccaaccaccaatacagcttatgttgatttgatccttaaacctaccgaggaggatttgaagatctggcctcatagttttgaataccgtctgagggttgcacttagtcctggtggtgatttgatgctaacttcacgtataagaaacactaatgcagatggaaagtcattctctttcacctttgcataccacacttacttcaagatttctgatatcagtgaggtgcgagtagaaggtctggaaactctggattacctagacaacctacaagatcgagcccgtttcactgaacaaggagatgcgattgtttttgaatccgaactggacaggatatatctgggcacgccatcaaaaattgccattattgatcacgagaagaaaagaacatttgttgtgaggaaaggaggccttcctgatgctgttgtttggaatccttgggacaaaaaggcaaaagctatgccagattttggggatgatgaatataaacgcatggtttgtgtggaggcagctactatagaaaagccggttactctaaagcctggcgaggaatggaccggaaagttggaactttctgctgtaccatctagttattacagtggtcagctagaccctgaccgtgtgattcaggattcgagtgtcccagaggattcgatcagctagtccttactaattctgcgcaggtagagcattatatcgtgtacaagggacactcgcagcaaggattgtcaacatgtttcatccattctattcaaatctttgttgttttatattcgggtacatatccgaatcgatggatatgaattggtttccttttttggatctatgtaacataaaggacaagtcaatgttcatacccatggcttgtaaaataaagaaaaaagattctctagaaatctttaataaaccaactgaagaactagccctattacgttggtaggtaattacctaattcttgcccttcagccaactttttggaaatttttggttatccattgtgtttagatgcgagttcnnnnnnnnnnnnnnnnnnnnnnnnnnnnnnnnnnnnnnnnnnnnnnnnnnnnnnnnnnnnnnnnn

SEQ ID NO: 45409 - DNA, 348 bp, Setaria italica
  Peptide Sequence Number=SeqID_111383
tttttctggcaacgagcatctattttgcgagccacagaaatgctcggtaaaaattaaagtgcctaatcctccaccacatatatatactcgtaaaagaatctgaattcaccgccctgtataattgttcatatttacagccgcctcctattcacactaatcatctttctaccttcaacgggttctggcctttccatttggtttaggagaatgcctcctgattctagcccaggtctgtttggtaaaactccatctgattctaattctttataggaactgattctctaagagaagtgattctgtggctaaaagtgattctctttggttctatagcataaactcttaaaattt

SEQ ID NO: 45410 - DNA, 776 bp, Setaria italica
  Peptide Sequence Number=SeqID_111384
actagaccaataaattaccaatgggctaataagcttattattactctactgaggacttgatcacatgaacatgtccattagcttgctgctgcgccttcttgctgcctttgtttctcgaatggggaacagcagctttgttgcatctggatcgtgaaccttcattgctaaccgtagatgcttgtgtatctgctctctcagtttttggttattagtgagtggttaggcgtgcttgctgataattgctgaggaattcctttgtttgaggaacaaggttcttctgagaagcaggtaatgatgaattgtcacatggcgtaaactgtgacgccattaatccatttccatgtgacaagtttaaagttgtgtggctgctcaaatgctccatacatgattcgcgatacagctgaccaagctccaatcgaagacggtagttaccctgtgaatgatacatttttgttgcgagaggaactggcgcatctgtggaatctataggctgtactttactggcacgtccattgtccaactcgaaagtagtggcaccgttcttgctttcaggttgaaattttgctttcacttttatgtgtactttttgatctatcagatgtcaaggcagcaaaacttttgaagacccacaacatttagagtaaattaatgaaggaagtttaagaagagtattccacatggagaatacaaatagcagtaagaaaggattaacagtaaactaaacatagaataaacaggctgcctcataaacaataggatacttccattacttatca

SEQ ID NO: 45411 - DNA, 1987 bp, Setaria italica
  misc_feature (1)..(28): n is a, c, g, or t
  Peptide Sequence Number=SeqID_111385
nnnnnnnnnnnnnnnnnnnnnnnnnnnnagttgagaagatgagagctatattaaaattgttcatctgtttcacaatcttccgcagcaagtgaggcaggtagaagagaaggcctttgaggccatatttacagctaaataggtagattccatcatcagtgctagaactagatttggttagcttcttataccaagagtcgacgaaccaaaatgatcccaaatccgggccgtccaattcaaaaccatcctgataagaaccaatttttgaaaaaggaacaaagaaaagactcttcaccggtgatactaccactagaccaataaattaccaatgggctaataagcttattattactctactgaggacttgatcacatgaacatgtccattagcttgctgctgcgccttcttgctgcctttgtttctcgaatggggaacagcagctttgttgcatctggatcgtgaaccttcattgctaaccgtagatgcttgtgtatctgctctctcagttttggttattagtgagtggttaggcgtgcttgctgataattgctgaggaattcctgagcatgattcagatgtgcttgcaataagctttgtttgaggaacaaggttcttctgagaagcaggtaatgatgaattgtcacatggcgtaaactgtgacgccattaatccatttccatgtgacaagtttaaagttgtgtggctgctcaaatgctccatacatgattcgcgatacagctgaccaagctccaatcgaagacggtagttaccctgtgaatgatacatttttgttgcgagaggaactggcgcatctgtggaatctataggctgtactttactggcacgtccattgtccaactcgaaagtagtggcaccgttcttgctttcaggttgaaattttgctttcacttttatgtgtactttttgatttccattacttatcactttatttttctgcccttctttcggggctttgtaggactttcatgatcaacacccattgaatcatttgtatttaccttccctgaactacattgctctgtatgaactgcatattggctagccttgactggcttcttgcaagtactacagcagaccaggtccaaaggatcagccataggttttgatccaaatatatgcatatcattttcatctagtaaatttggttcgtgtgcatcaaacagttgcttttgcaggacctgtgccgcagtcatctcatgcatcacatcatctggtgctgtgtgattttctgtcattacaagcttcagcacagaagccattttaaaatgccccggcatgcaaaccattttgaaatgcaacctggagcaaccgaattcctgaagcacgcgcttccctcgaaaaaatctcaaaaaaaaatctggacaaaatcaaactcgaaaatccaaaagaaatcaaaacccccctttcaccatcctcttccccgagtcgtcctcttttcccaattaaaatgagaaaaatcaaaacactatctaatcagaggtaacaatgccatgaaaattgataaaattatattattctcaagtcaaaacaacagttgggaaattggatgaacatccaaagtagagccttgggccttctggttcctgctgcatagctatgcaactgactttaaacaaacattaactgggtaagcaaaaaaaaagtgctatgaaccagcatggaatgtagaagatagagctatgcgggcaaggtttcattatgaagaaactgggtgtaaacaatttcttttttcttcaaaaactcaggaaagctgttttcattaagaagagaggagaatgatacaaaggatggggtcaaattttagaatcagaactcccattatccactgtttataggatcaccaaaacatttggactagcaccattgaaaacacaatcattcaggtccttccaaaaagtacccaagcttctatcaaggagttaagaccgttgtgcaacttggtaaggatgaaggattctaatcctcttca

SEQ ID NO: 45412 - DNA, 317 bp, Setaria italica
  Peptide Sequence Number=SeqID_111386
cacaagcaccatactcatcgtcctcgccatgctcaaaggttcctctagctagctgcgatcgatctgcaggtccatcgatgatcacgagtactgaagttgatgactgacgatgccacgatggaacgggtatgcaggggagctgggcaagtacccgaacacgacgatcgggttcgtgcacgtggacgacgtggtgctgtgccacgtcctggccatggaggacgccagggcctccgggcggctcatctgctcctgcgacgtcgcgcactggtcggagatcctctcctcgctcagggagaggtacccgcagtaccccaccc

SEQ ID NO: 45413 - DNA, 702 bp, Setaria italica
  Peptide Sequence Number=SeqID_111387
tcgttccttgtgctcctgcgtccgctactgccacgccgccacgctcaacgagtcgcactggtccgacgccgactactgcaagtcctacaacctgtggtacgcgtacgccaagacggtggcggagaaggaggcgtggcggctggcgaaggagcacggcctcgacctggtggtggtgaacccgtcgttcgtcatcggcccggcgctggggcccaggcccacaagcaccatactcatcgtcctcgccatgctcaaaggggagctgggcaagtacccgaacacgacgatcgggttcgtgcacgtggacgacgtggtgctgtgccacgtcctggccatggaggacgccagggcctccgggcggctcatctgctcctgcgacgtcgcgcactggtcggagatcctctcctcgctcagggagaggtacccgcagtaccccatccccacggagtgcagcgcccagaagggggacgacaggccgcacaggatggacaccaccaagatcagggcgctgggattcccgccattcctctccgtgcagcagatgttcgacgactgcatcaagagcttccaggacaaggggcctcctcccgtagtccaaagacatatccctccattaatcgcatcacttgcatgaagaatgaagaaactcttactgcagcctcgtcaaattaattcatggctctgtgtccccaaatactaagcatt

SEQ ID NO: 45414 - DNA, 889 bp, Setaria italica
  Peptide Sequence Number=SeqID_111388
ttttttttgaagtgaagtattttttttcactcttcttttcatccagggggaaaaatcacattgaacagtaaatgagaaattattgcaagtccaaacatggtaactggtagccgcaattaacaatctaggcagtaggtagttgctttacattgctacagtaattggtgtaagtataaattgctgctgcgtcaacatgaaagggaaggaaattgccgaccagccttgacaattcaaaacatgtccaaggttggtaacacatcaaaatttactgaggctggctccttcactaatgctatcatgccgaacgttgacgagaacgcacttattatggttcagtaaaacttaactctgtttcttgctgggaggcagtccatccaggttcataagcttctagaaacccaagctttgctttgtttgggaggtcatgtggatggacaaacggaaccccttgtggccacccaatttcagttctgatattctcacaagggctatccaacgaccgaatgtggctttcacattctttgatattgcaaaatctcagcttgatgcctttcttgtctgcaatgtttttagtaaggttagggtagttggtcttttgtttctttgttactttcctatttctttttcttcattcgcagagttaaatgttgctgaatcctgttctgcatgtggtgatggttcgtcatccttgggaaaaagttgatcaacagaatgacctgtctgcatgaaatcattaactgatatgggtacctgaaactgagcatcaacaccatggccagcagctctcatctctgagccactcaaccttgcaactgatctaggcatgagcttgaagatcaaagaacatcgcccgaacatacatccctgtaagtttccaacctccgtcttg

SEQ ID NO: 45415 - DNA, 503 bp, Setaria italica
  Peptide Sequence Number=SeqID_111389
ccgcctgttgatcctggtcagaaaatatgagcaactgaccatcatcttgagaagcaatgctatgctgctgtacttcaaatgacggccttgaatggcagcatgcagaaagaacagaagatgatacctcctggcttctcaagggtatgttgtcgagtatgtcagtaaatgcacagcttcttaaattcaacgagaaactgattgcatccaaaatatctcttgaaactttaccgagcaccgcaaatatgtcaggtaggcccgaaggaggcaattccatggcaccactgcgatctgttacagtaaccccaggtctgtaatcatacgtttccagccacatttgaggatccacatagtaaccagaggtcttgcaccattcgcgagcatcatccgagtggacagcctcgctaggattgtacccacgctgatggaagaagaggcgagcggagtccaggccggaccttaacagggcactttcagatggaggcagctgaatgacggctgctgaa

SEQ ID NO: 45416 - DNA, 1872 bp, Setaria italica
  Peptide Sequence Number=SeqID_111390
aaaataaaaccaaaaaataaaaataaaactaaacttaagaaaactttaaccgaagacaaccgacaaataagtagtagaagttaagagacagataactcgtcagaagtgaagtatttttttcactctttttttcatccagggggaaaaatcacattgaacagtaaatgagaaattattgcaagtccaaacatggtaactggtagccgcaattaacaatctaggcagtaggtagttgctttacattgctacagtaattggtgtaagtataaattgctgctgcgtcaacatgaaagggaaggaaattgccgaccagccttgacaattcaaaacatgtccaaggttggtaacacatcaaaatttactgaggctggctcctctgtttcttgctgggaggcagtccatccaggttcataagcttctagaaacccaagctttgctttgtttgggaggtcatgtggatggacaaacggaaccccttgtggccacccaatttcagttctgatattctcacaagggctatccaacgaccgaatgtggctttcacattctttgatattgcaaaatctcagcttgatgcctttcttgtctgcaatgtcctgaacacgctccttgagcaccctctgcgcctctaggcgaagtcttttagaaggagggagtggctttgttcttgtacttccattctttttcttcatcgcagagttaaatgttgctgaatcctgttctgcatgtggtgatggttcgtcatccttgggaaaaagttgatcaacagaatgacctgtctgcatgaaatcattaactgatatgggtacctgaaactgagcatcaacaccatggccagcagctctcatctctgagccactcaaccttgcaactgatctaggcatgagcttgaagatcaaagaacatcgcccgaacatacatccctgtaagtttccaacctccgtcttgtatacagctggatttacatagccagcagtttcctgataaagtgcgaggccaggatacacaacaacatcgtttggaccaagatccccatcaagaagaatccagtgtccatgcatgtcttttacatatagacctgacctatctgacttgactagggtaagcaaagtcttatccgcctgttgatcctggtcagaaaatatgagcaactgaccatcatcttgagaagcaatgctatgctgctgtacttcaaatgacggccttgaatggcagcatgcagaaagaacagaagatgatacctcctggcttctcaaggatattttggatgcaatcagtttctcgttgaatttaagaagctgtgcatttactgacatactcgacaacatacccttgagaagctgtgcatttatgtcaggtaggcccgaaggaggcaattccatggcaccactgcgatctgttacagtaaccccaggtctgtaatcatacgtttccagccacatttgaggatccacatagtaaccagaggtcttgcaccattcgcgagcatcatccgagtggacagcctcgctaggattgtacccacgctgatggaagaagaggcgagcggagtccaggccggaccttaacagggcactttcagatggaggcagctgaatgacggctgctgaatactgagccaaggactgcatcagggttgatacacatatcttgtagttctctgtagggaggccctcgcaggctgcaagatcaacgaggcgcacgcggccgagagatgcaagaatgcttcctgctgcgtcctccataggattgatgattgctgaatgttgagctcagtactgagcaggggaactgtgccatgggggttcaactggtgcgtgctcgtcgctggcgacgggcccggcgaagggcgtcgccgctcgccagtcgtcg

SEQ ID NO: 45417 - DNA, 508 bp, Setaria italica
  Peptide Sequence Number=SeqID_111391
gcggcaagtaggaactgcttggcccctccctgattcgtgtccatgtctcagtccgacgaggtgttggcctccactttcttcagcctggtcgtccttgcttgcatcaagcttgacaacactggcagctcgtgtgctgctgtgattggtgtccgccttcttggtgtcaccctgctcagcttctgtgttgccgacctcaaggcctcgactgggcaaccagctcatcgcagctctccaagtccctggagctgctgtccactctggtctctgcgctgcacttgttgaaggcacagtccaatggatctaatctgagcggtggcgcagcacacagccacggagccacccacctgtcaccatgcatgctactagtgttgctcagctatttgctggatggacaaagtaacagcagccatcagtgatcgggatgcgtagtatagcaatagcagccatcagagatcaaagttcaaagcttatccatcagttatccaagtacctattggtttactaaatt

SEQ ID NO: 45418 - DNA, 257 bp, Setaria italica
  Peptide Sequence Number=SeqID_111392
aagatgcggaagccgagggcgtgggtgaggctgcgccatggccggaggcagatgtctattcccccgccggtgaagcgtccgcgtcgccatgcctcggccgcctgtgtcgtgctgtcgaagtggatgaggtacggttccggttggtgaagagtgacactgacctcaccgggacgcaggcggagctccctgctaatgagccccgcgatgtcgcgggctccggcacctgacggtaggtgaagcgcccaagggcgagggcg

SEQ ID NO: 45419 - DNA, 521 bp, Setaria italica
  Peptide Sequence Number=SeqID_111393
cttgaagaaggaacaataggggacctactaatagaaggaagaacgtttggaagagatcatcgatatcgacgtcggtgatgacctggatgtcgaggaggcatgccgtttcatgaagataggcctgctatgcacacaggacgcgatggcgcgtcgtcccaacatgaccaatgtcgtccggatgctcacaggggagaagagaatcaacgtagacaagatcactaggcccgccatgatcaccgactttgcggatctcaaggtcagcaacaaggggcaaagatcaagcgagacacgctctcccgcgacgactgcacccacaacgttcaccactacagaaccattctcatcgtcagaaacgcccacgcagtcatccatgtgaaaattctgaacgtcagaagcgtcctttttttctctccctcagtttgtatattgtgtgaattgtgatagaagggtcaggttacatgcaattttgatgagtttcttgtttgatttgtatgaaggaaaaaaaaaaaaaactaagagaa

SEQ ID NO: 45420 - DNA, 399 bp, Setaria italica
  Peptide Sequence Number=SeqID_111394
gatcaattcctccttgagaggacatggggactctacgaggaaggacgcttggaggagatcatcgataccgacatcggtgatgacctagacgtcgaggaggcatgccggttcatgaagattggcctgctatgcgcacaggacgcgatggctcgtcgtccaacatgaccaaagtggtccagatgctcacaggggagaagagaattcccgtaggcaagatctttaggcctaccatgttcaccgacgttgtagatctgtcaaaaagtttatcatgatatccttatactacatatactactaatttatactacgtggtatgttatatactacatatactactaatttatactacgtggtatgttaagatgttagtagtatacaattaatcttaaccgttggatg

SEQ ID NO: 45421 - DNA, 1830 bp, Setaria italica
  misc_feature (1775)..(1830): n is a, c, g, or t
  Peptide Sequence Number=SeqID_111395
cgcatcattcccaactctaaagtatctcaatttagctgtggggttctgcgccttgcctttcaggccggagcaattccaaaccttcggaggctcaaactagaattcaatgtacacagtggagagcagtacagtgatatgatttccggcattgagcacttgttaaacctccaagaaatcgctgtacgaattgggtcagctcccggtgcagaggattccgataggacagccgtggaatctgtattccggaacaccactagcaagcattcaaggcatctgagcatcagcatacgaatggctgactccgttgacgaagtgattccccaattttctgatccggcagcaagttcgtctcgtttagatgacctactgcataagccttctactgtggctgatgtgaccagtcaatcgaatgagatagagctggctgaggttgaggtagtgtccgttcacatgacaacaagtgatccaaacatacaaacagaccagccaatagcaacaagcacatttcctcgccaaacacctccagaagcatctgtgtccgtcgctcataacttgctggtggtggcgggaaagtcaccaaccatgaaaccctccaagagctgcggccagattgccagcagtatcaaacgagaaacggcttgctgctttatgtttgggaagaaagcgaaacaagctgttgaacacgatgatgatgtacatagcgtgaaagtcttttcttacagtgagttgagaaaggctacacaagatttcagtggagcaaataagatcggcgagggtggttttggttccgtcttcaggggagtgcttaaagatgagacagtagttgcagtgaaagttctatctgctacttcaaggcaaggcatccgggagtttttgactgaacttacagcaatatctgacattaagcatgaaaacctcgtcactcttgtcggttgctgcgcggaaggctttcacagaatccttatttacaattaccttgagaacaacagccttgcacagacattgctaggaaccagatatagtaacattcggttcaactggtgtgctcgtgtcaacattgctgtgggtgttgcccgtggacttgcatttctccatgaggaaatccgacctcccattatccaccgggacataaaggcaagcaacattcttctcgacaaggatctcaccccaaaaatttctgatttggggttagcgaagctcctgccacccaatgcaacttatgtgagcatccaagttgcaggaacattagggtacttggctcctgaatatgcaatccgaggtcaagtgacaaagaagtccgacatctatagttatggagttcttcttttagaaattgttagtggcagatgcaacaccaatacaagattaccttccgaagatcaatttcttcttgagaggacatggggcctctatgaggaagaacgtttggaagagatcatcgatatcgacgtcggtgatgacctggatgtcgaggaggcatgccgtttcatgaagataggcctgctatgcgcacaggacgcgatggctcgtcgtcccaacatgaccaatgtggtccagatgctcacaggggagaagagaatcaacgtaggcaagatcactaggcctgccatgatcaccgacgttgtagatctgtcaaaaagttttcatgatatccttatactaagtactaaaaaaagtttatcatgatatccttatactacatatactactaatttatactacgtggtatgttatatactacatatactactaatttatactacgtggtatagttnnnnnnnnnnnnnnnnnnnnnnnnnnnnnnnnnnnnnnnnnnnnnnnnnnnnnnnn

SEQ ID NO: 45422 - DNA, 1007 bp, Setaria italica
  Peptide Sequence Number=SeqID_111396
tatttggagtgaagatagcaggcactgttgtgccaaaatgattcctggggatggctattttgaaggctcccatgatcagtgtctcatggcaggacctttcatccatgactcttctcaaattcctaagggcaacggtgacacaagcattgagctgcagaaattcaaagttccctccttttccacggaagcactctccagtccaaccaatttttcctctgaagatgtaggaggaactaatctccttcagcatcaactaggaattgatttggaacaagaggctcccccaggagaaactgcaagctgggatccttctgtctgcactatccaagatcaaagcatcaaccatcagtttggaggatattcagaaaacatgttggtggaaccagagatccaacaatatgatgctgcactgtatccaaatggtgcttaagcaattccagacaatggattgatgttcactggtgattcatctgtgcatttagggtatcatgctactcaacctcatctggcaaatgatatatgccattcactgccacagaattatgggctgtttcccggtgaggatgaaagagaagttatgattggagctggaagcctaggagatctttttcaggaggtagatgacagacagtttgatagcgtactggaatgcagaagagggaagggtgagtttagtaagggcaaaggaaaagctaattttgcaactgagagagagaggcgggaacagctaaatgtgaagtacaggactttgaggatgctcttcccaaatcctaccaagaatgacagggcttctatagtaggcgatgccattgagtatatagatgagcttaatcgaacagtgaaggaactaaagatccttgtggaacagaagaggcatggcaataatagggagaagaggataaagttggatcatcaggcagctgctgatggtgagagctcatcagtgaagccaatcagggatgatcaagacaatcagctcattggagccataaggagctcgtgggttc

SEQ ID NO: 45423 - DNA, 454 bp, Setaria italica
  Peptide Sequence Number=SeqID_111397
ggcatccgtcccagcccatggctcgtgcagttctgcggcggcgaccgcaaggagcccggctgggtgtacggctggcgcccctagtcggccggccgccggtcgctgtcgagcgaagcatatgtccaccgtccggtccgtgtccatgtccatgctaagtggttgatcggggcacatcgggccgccctaatttaagtgatctataggagctaattgttcgtgcatatgggtgttccctgttcgatccggtgtccgtcattgtgcttggaaacaagataaggtgaaagttgttcgtttcggtcgtttagtgccgtcgtgttgccatggccggatatattgtatacatgcatcttgtaactaacacctccgggacgtttgctggtgttgtctagctagtggtgtatgcaatgcattttgtcgatcgtgacgggagctagactagaaacaaaaaaaaaaa

SEQ ID NO: 45424 - DNA, 423 bp, Setaria italica
  Peptide Sequence Number=SeqID_111398
aaaaagagactgttttccattgatatcatttccattaatggccatgtttgcaggtgtttttgatgaacctttccgctccctttatctgtgagtttttccgtgatgcccaagagaaagctcttccgtaagtactggaaactgcatgcataattatgttatgtgacctttatgtgagagcagtatataaaaggttcagtttggggtgcaaagctttatttcaactctcttgcatgttaggtttttccaatattttggtgtgctatataaaatttatgattttcttgctgtttccaaacataggtacgtggactacatctttggaaatgaaactgaggcaaggacctttgctaaagttcgtggttgggaggtaaaagtttcatcttgtgttgtaattttcacctggttagaagttgtaataaattg

SEQ ID NO: 45425 - DNA, 336 bp, Setaria italica
  Peptide Sequence Number=SeqID_111399
ggcttctggcaagcaaaagaggattgccgtcatcactcagggtgctgatccagtggttgttgctgaggatggaaaggtgaaaacattccctgtgatcctattgcccaaggagaagcttgttgacaccaacggtgcaggtgacgcgttcgttggaggtttcctctctcagggtacgtgcagccagggcgctggatgatcacgttggcggcgtagcatccagcgccctggctgcacgtaccctgagaagcctgacttcaactagagcgagggaccgttataggcacttattcttaaccgccgctgagtggtttggtatgttcgacctgtattcttccg

SEQ ID NO: 45426 - DNA, 739 bp, Setaria italica
  Peptide Sequence Number=SeqID_111400
tgaggtacctttttttgcccttttgtattgcatgctacagctaggcatcttccagctctgtccatacgagtgttctgtgctatgacatacacgaaatatgtaaattttagaaaggtgtaggattcttgttccatgtttctttttgccagaaacatgtcttaatgctataaaacatttaatctttgtagttaggcaaaattctatcctagtatcatctgtttgtgccaaggaattcaaaatgttttgcttttccatttcacaagattttgactgccagtactttcttcttcaagaatatcagttatttccttctgtaaccaggtcactgattgcaaatctgtcggcggcaaactgttacaaatctgagcatctaaagagaccagagaactgggcactagttgagaaggcaaaatacatctacattgctggttttttccttacggtgtcacccgattcgattcagctagttgctgagcatgctgcagcaaataacaaggtgttcctgatgaacctttctgctcccttcatctgtgagtttttccgtgatgcccaagagaaggttctcccgtaagtgttatcttctataccacaacgttcaatgttttgaatttcatctgagattgcataatgaaacccaagcaaaaatatgtaaagcaatgttcattcttgtgaaggcattttcttatgtttggcccatgctaatcttcctgtcttaattaaccttctgtcctgacatgga

SEQ ID NO: 45427 - DNA, 630 bp, Setaria italica
  Peptide Sequence Number=SeqID_111401
tcttttgttcctaaagttccgttggtattgggtagtacttgtagtaattatttgtaggtagatttgtctttgaagatctcccaacttcctttggcttctggcaagcaaaagaggattgccgtcatcactcagggtgctgatccagtggttgttgctgaggatggaaaggtgaaaacattccctgtgatacctaattagacccaaaggaagaaagcttgttgacaccaacggtgcaggtgacgcgttcgttggaggtttcctctctcagttggttcagggcaagagcatcgaagactccgtgaaggctggttgctacgccgccaacgtgatcatccagcgccctggctgcacgtaccctgagaagcctgacttcaactagagcgagggaccgttataggcacttattcttaaccgccgctgagtggtttggtatgttcgacctgtattcttccgaggctttttcttcctatccggccaatatttttgccgtgatatttgttgcacaactataaacgtcgacgttgtcgttgtataaggcaggatctgccagcttcgtgtctcctgtgttgcttcgctgatgcttgcaatgctatgagaatgggtgtcaagaacgaaaaaaaaaaaaaaaaa

SEQ ID NO: 45428 - DNA, 1306 bp, Setaria italica
  Peptide Sequence Number=SeqID_111402
tctccaccggatttctcgcgccgccgccgccgcgctcggctcagtccgaggaggggaaatggcgagcggaagctacgagggcatcctgctggggatagggaaccccctcctcgacatctccgccgtcgtcgacgaggccttcctcgccaagtatgatgtcaagccaggcaatgccattcttgcggaggacaagcatttgccgatgtatgatgaattggctagcaagggcaacgttgaatatatcgctggaggagccacccagaactctatcagggttgcccaatggatgcttcaaattcccggtgcgacaagttacataggttgcattggaaaggacaagtttggtgaggagatgaagaaaaaatgcacaaagctgctggtattaatgcccattatcatgaggatgagaatgctctgacgggcacatgtgcggtctgtgttgttggtggcgaaaggtcactcattgcaaacttgtccgcagcaaactgctacaagtctgaacatctgaagaaaccagagaattgggcacttgttaagaaggcaaaatatatttatattgctggctttttccttactgtgtcaccggattctattcaacttgttgctgagcatgctgctgcaactaacaaggtgtttttgatgaacctttccgctccctttatctgtgagtttttccgtgatgcccaagagaaagctcttccgtacgtggactacatctttggaaatgaaactgaggcaaggacctttgctaaagttcgtggttgggagactgagaatgtggaggagattgctctgaagatctcacaattgcccaaggcttcagggacacacaagaggattactgtgatcactcaaggccgtgatccagtagttgtggctgatgatggaaaggtgaaaactttccccgtgatccttttgcctaaggagaagcttgtggatactaatggtgcaggtgatgcctttgttggaggctttctatctcaattggttcaagagaagagcatcgatgagtgtgtcagagctgcttgctacgccgcgaatgttgtcatccagcgttcaggctgcacttaccctgaaaagcccgacttcaattagagcgatccctagcatattgaagacatgtaaggccacagtttttgtgacatttcctctgtataactctgctcctcagcagatctggccaacattatctatatcaatctctaatttgcggcacatctgtacttatccttgtggcgcgtccttggtcgaatggagaatatggaacgacaaaagtaatcgacggaaacaaaaaaaaaaaaaaaaa

SEQ ID NO: 45429 - DNA, 1198 bp, Setaria italica
  Peptide Sequence Number=SeqID_111403
cctcgcccacacgaacccgagccctcgcccgcccatcagaaagcctcagatctcagcctccggcgccgccgcttcgttcgtgtggaggaaatggcggtgagcgagggcgtgctcctggggatggggcaacccccctcctcgacatctccgccgtcgtcgacgacgccttcctctcaaagtatgatatcaagctgaacaatgccattctggccgaggagaagcacttgcctatgtatgatgagttggccagcaagagcaatgttgaatacattgctggaggagccacccagaactctatcagggttgcccaatggatgcttcaaactcctggtgcaacgagttacatgggatgcatcggaaaggacaagtttggtgaggagatgaagaagaatgctcaagctgcaggagttactgctcactactacgaggatgagacagctcctaccggcacatgtgctgtatgtgttgttggcggtgaaaggtcactgattgcaaatctgtcggcggcaaactgttacaaatctgagcatctaaagagaccagagaactgggcactagttgagaaggcaaaatacatctacattgctggttttttccttacggtgtcacccgattcgattcagctagttgctgagcatgctgcagcaaataacaaggtgttcctgatgaacctttctgctcccttcatctgtgagtttttccgttgatgcccaagagaaggttctcccgtatgttgactacatcttcggaaatgaaactgaggcaaagatctttgccaaagtccgtggatgggagactgagaatattgaggagattgctttgaagatctcccaacttcctttggcttctggcaagcaaaagaggattgccgtcatcactcagggtgctgatccagtggttgttgctgaggatggaaaggtgaaacattccctgtgatcctattgcccaaggagaagcttgttgacaccaacggtgcaggtgacgcgttcgttggaggtttcctctctcagttggttcagggcaagagcatcgaagactccgtgaaggctggttgctacgccgccaacgtgatcatccagcgccctggctgcacgtaccctgagaagcctgacttcaactagagcgagggaccgttataggcacttattcttaaccgccgctgagtggttggtatgttcgacctgtattcttccgaggc

SEQ ID NO: 45430 - DNA, 1560 bp, Setaria italica
  misc_feature (13)..(13): n is a, c, g, or t
  Peptide Sequence Number=SeqID_111404
tttttttttttanatttaatacttctaattaatatctaaacatttaatgtgacatggactaaactttagtcctggaactttagttagctcgatttacaaacactaaatcacattgcaaccatcgatgcagtgaccactaaatctaaatcacacaaggctgcctctcgtacctcctgacaaatctcgctctatattgctgctgcatgtaaactggtcgtgcaaaaactaatgcgtgatccatccatccatggatcgatgtaaaagaaaacaaaaaagaacatgaacaaatgcagacgcaacaaacgcaaacggctctgtgtcgtctaccacggcttgaggtcgttctcgagcccggcgtcccagtccagcaccttctccccgggctccaggaacacgcccttgccgtgcggcagcttgcgcgccagcccgttgagtatctggtcgaaggcgtccccgggcctggcgggctggtggaagagcagcgcctgcttcacggacgcgccggcgagcagccgctgcttccggaggatgtcctccagcgggatggaggtgaggatgttgtcgagccgcggcacgtcgcgctccgccacgaacacgctgatctcctcccaggggatggcgtccgcgaacggcagcacgatgtcgtcggcgatgatcaccgggatgcagccgaacaccaccgcctccaccagccgggggctccatggcgcccaacccagcgggcacaggcagaagatggcgcgctgcatgtcctcgtagtacgtcgacgggtgctccgtcgagatgtcgaacagcgggttgtccttgaagttctcccacaccgacgcgcgcgcgcccctggcgtagtagccgccctcggggtcgttgcccatgtcgtagaagaggccgcggaagtagacgaagatggagcgcggcgtgccggggttgatcaggtgcgcctgcatcttgtgcgggttggcgtagggcgggatggtgatggacccgtcctgcaggcacacgtggttccgctgcccgaacgtctgcaccagcgtcgcgcgccggagcagcggcaggatgcccctctccatcgccctctcctcctggtagtggaagcatgcgccgaagtcgtggggcgtgaggaagaagtggtcggcgccctcggtcctgttccagtagggccacgtcgtggcgacgtacttgatggcgctgcgcatgatccgcggcgcccggaacgggagggggaacccctgcggcgtgaggtcgcaggtggtgtacgcgggggtgtagaaccagtcggcctcctcggggtccagcgtacgcaccgcgctgttcagcaagaactggtgcatgaagatctcggcggcgaacatgtggtgcaggcaccggctgtccttggccagcagcatcaggttgtacttgcgaggcatctcgtacacgaacaccttcagcttccccaccgggttgtcgtcaagcacgccgccggcggcccctgagatccttgcgcgctcgtgctgctgccgctgcggcggcgccgccgcggcgacgcaggagacgacgagcagaaccgcggcggccgccgcc

SEQ ID NO: 45431 - DNA, 429 bp, Setaria italica
  Peptide Sequence Number=SeqID_111405
ctctttgcctccacaggaggaagaacagcttgccgtctcttcagttcaccctcatgggccctaagcttcatgtcaatactgccaaggttgattccggcaaccgtccggtgaccggcatccggctgttcttggaaggcaagaagaacgaccggctgggggtccacctgcagcacctgtcggtgacgccgggcacgatcacggtggccggcgaggcggcgtcggccgaggacgcgatcgtggacgagcgcgactacatcgagcccgtgatgtcgccgctgctctcgcacgtctgcacggcgccggtgcagtacaacggcgcgcggatcgacgactgcgcggcgatcgtgaccagggcgtggctggaggtgcgggacacctgctgcctcaagaaggtgctcttcctgcggctgggcttctccggcgtcgcgg

SEQ ID NO: 45432 - DNA, 774 bp, Setaria italica
  Peptide Sequence Number=SeqID_111406
tttgcagtcctacaaggagtttgcagacaacttcatttgcacgcttatcccagagtcctcctcaccacacatcacgtacacccctggggccatgctctacaagcctggaggcagcaacatgcagcatgtcacctccatctccttccttctcctgacatatgccaagtacctctccaaatcatctcacactgtcaactgtggagacatttcaattggccctgtaactcttcagcggcaagccaaaaggcaggttgattatctgttaggagataacccaatgaaaatgtcatacatgatcgggtacggtgaccgatacccccagcggatccatcaccgagcatcttcattgccctcgatcaaggaccatccgcagcccattgcgtgcaaagaaggcacgccttatttcaattcgtctggctcgaaccctaacccgttgatcggagcggtagttggagggccaggtgaggatgatgcttatgaggatgaccgtgcagatttcaggaaatctgaacccactacctatatcaatgctccattagtaggagtgctggcattcctcgttggcaaccctaaccctggtcatttcagacattaaggttcagatgtcagtacctttggcatgtagatatataagggtggacgaagttacaaacaggtgcaagtgaagcaagaaagtaggattgtgacagtgtgtttagatgcaattattacatatttataggagtggagtttatgcgataagaagagtttgtcttgcatgttcctttgcttttg

SEQ ID NO: 45433 - DNA, 266 bp, Setaria italica
  Peptide Sequence Number=SeqID_111407
tgctggaagacaaggtcgctgctgtgctcggctgcatgctggcattgctgaatcggggaaggaacgaggtgctctcagggcgggcaggtgttgcaagtgccttccagggatctgaagacaacacctcagataggatcccgccgcttgccttgttccgtggagacatgaagcggtgctgtgagagtatgcaggttgcgcttgccagctaccttgtaccgagtgagcccagggggttggatatatggaggaaactacagagattgaag

SEQ ID NO: 45434 - DNA, 688 bp, Setaria italica
  Peptide Sequence Number=SeqID_111408
aaagttgtcaactggtgatactggaagcttgtctttctcagtggttaagaagattcagatcatatcaacaaaattgtcacagcaccattcattctcagctctccagtcgcaatattgtcagcatggatacagcggtgaacaagaacttaataatttgattatcaatgatctttaccatcacattcgtggagaacttgaaggtcgtcagattagctctggtccttttcaggagctgcttagtttccttcttgagtttaaactttttgaacacgatcccttggagcaactacagaacacttgcccagtggcaaatgccaactttttgttcaacgttgaacacatacatgacgagcttggggttgatctttggattagttcggaccgtaagagctctaaagaagtagctgaagaaatgctggatattatgcataaatcaaatctgatgaaatgttatgctgatgcaaagctttctacattgaaatccttcttgacatttttatctgtctacacaggagcgagctccaacaaaaacttggacttgcctgatggagggatttcaacagcaaccacacaatcggcagttaagtgtgcatgcaaatcattccagtcaaccgtagattcactacttcctcaagttgatacaaatgaggttttgtttcccctcttatctgggcaagtggaattgttg

SEQ ID NO: 45435 - DNA, 520 bp, Setaria italica
  Peptide Sequence Number=SeqID_111409
tactagaccaaatagaatgttgaagtttaatgcaccgccgcctcaggagctgcagctctttccagggacatcctcatcaccagagcatgaatgttcaggcatcagaagcgcagcaaccaactcttcaagcctgacagattctttgccagggcagctttgcttaagccttacacaatcatctcaagaagaaagcagcagcggtgtgttgggcagaagaaaagaacggtgaaatgcttagcagattgctgatgctggaatcagtatttggtggtagtgattgccctgtaaatactgagaatcccctcccttcactgattcagaactaatgttataggtgccctgtactgaactgtgactctgtagcgcttgttctacaaactcagtctgcctttagttctgatgctgatcaaactgattcaggaatgttatagttactctgtactgaactgtggccagcgcttgttctgcaaattcccagccatatttggcgggccagcttcattattattgttgtcttcgt

SEQ ID NO: 45436 - DNA, 335 bp, Setaria italica
  Peptide Sequence Number=SeqID_111410
actgcggaggctggcggggatcacatcctggagatctcgacaagcaactcggggaacgacccgggccgcgagaggtgggagaattctccttgttttctcccaaatcctgttgaattatgcttctgtcctgttgaattatgccttccggcgtgctcctgacgtcgttccgctcgttgtttctgaaaattcaggagggagacgacgccatcgagccgggcgcaaggcgaggtcagcgatctggagtcggatctggcggaccagaagaacgcccggtcgtcgccggcgacaacgtcggctccccagctgatcacgccaccggcagacgagatcaggga

SEQ ID NO: 45437 - DNA, 1262 bp, Setaria italica
  Peptide Sequence Number=SeqID_111411
accttccggcgtgctcctgacgtcgttccgctcgttgtttcagagaatccaaagcgcaagcggcagccgcaggcagcgccgcgcaggcgtgagagggaggaaaaaaagaggaggaagcggccaagggggggaaggcgagggaaggccagggcggcggcgtgcgtggtcagatggggaagtacatgaggaagtgcaggggggccgcgggcgaggaggtcgccggcgtcgaggtcacgcaggtcgtcggcgtccggacgaggtcgcggaccgccgccgcgccggcggtggccggcggggtcgcgaaggtcgccccgaggaggaagaaggcggtgacgccaccgaacgtggcggcgggggagcctggcgctgatggggacggcggaagctgctacatcaagctgcggagccggacgttgttcatggcgccgcctcaacagcagccttcggcgccgagggctccggtgccggcggaggctgttgctgccggccagggtgcggcgctcgtggccgggctctcccgttgctccagcacggcgtcgtcggtggacgtcgggtgccaggacaggagccttgcctgccgctccgacactgcggaggctggcggggatcacatcctggagatctcgacaagcaactcggggaacgacccgggccgcgagaggagggagacgacgccatcgagccgggcgcaaggcgaggtcagcgatctggagtcggatctggcggaccagaagaacgcccggtcgtcgccggcgacaacgtcggctccccagctgatcacgccaccggcagacgagatcagggagttcttcgcggcggccgagaaggcgcaggccgaacgcttcgctgccaagtacaacttcgacgtcgtccgcggcgtgcccctcgacggcggccggttcgagtggaccccggtggtcagcatctgaagcgagcgtgcagctagtacaaagggatcggaagctagaaagagagaagaaaaggatgccccaaaaaaataacggaaaaaaggagaaaccaaagaagaagaagaagaagcatcatagcctaaccaccattcaactgtttttcgttcatgccttgcttttccctggagtaacatgtagaatcgcagtagtattaatttactgtttattcagagaggttatcttgacccctatagatcatcatccgcttactgtaattgctctcctgtatttcggatggaatttaatttactgtacagcagctagctgccttcttgcaaaaaaaataaaaaaaaa

SEQ ID NO: 45438 - DNA, 191 bp, Setaria italica
  Peptide Sequence Number=SeqID_111412
tgaaagaatggatcaaacaggacaatgaagtcaccatctcagatgacgaaatggccttggtcatctccgtgcgaaggtgaaactgggctactgctgctcaacagtgatagatgatgaggagaggatcgcgctgcaaatgatcgaggagctgttgagcagcagtagcccagtttcatctccgtgcgaaggtg

SEQ ID NO: 45439 - DNA, 304 bp, Setaria italica
  Peptide Sequence Number=SeqID_111413
ttgttttttttaacgttagaaacttgtctgctacacaattgcaaacttatagttctgtaagttggatttagtaatagatacatatctatattactggagtgccctgaactgcttgtgtaccaaccggcctagcgaaactctgatctgagatggtgacttcattgtcctgtttgatccattcttttcagatgacgaaatggccttggtcatctccgtgcgaaggtgaaactgggctactgctgctcaacagctcctcgatcatttgcagcgcgatcctctcctcatcatctatcactagtgcgac

SEQ ID NO: 45440 - DNA, 814 bp, Setaria italica
  Peptide Sequence Number=SeqID_111414
cggcagaggaggcagcgagggcgtatgacgaggctgctgtgctgatgagtggccgcaacgccaagaccaacttccccgtccaaaggagtagcacaggcgagcctgctccagctgtgggaagggacgctcgcagcaacattggtggtggctcctccactgccaacctgtcccagattctcagtgccaagctccgcaagtgctgcaaggcgccgtcgccggtccctgacctgcctccgccttgaccctgagaagtcccacattggcgtctggcagaagcgtgcaggagcccgcgcagactccaactgggtcatgaccgttgagctcaacaaagaggcagcatccactggtgcagcatcacagtccacgtcagcaacaactgcttcaccagcaacagtgatagatgatgaggagaggatcgcgctgcaaatgatcgaggagctgttgagcagcagtagcccagtttcaccttcgcacggagatgaccaaggccatttcgtcatattttgttgcaatttacaaatactgtatcttctttatgtatcctggacgaattgatttcagatgccatgcactgagaattcatcttagactgtttgcccccattgggtctcagcacatgcttggaattttcaggaaaagtatgaattccagagataaccaagttacccttaggtaaactaatctttagatgaattgcaaaggcagtcccaggtaaacatgcaatagcatcatatttggcttgaagaaagattcagactttcagagcaacttttttagtcaaggatgagacctagaactcaattttcttcttcct

SEQ ID NO: 45441 - DNA, 672 bp, Setaria italica
  misc_feature (1)..(6): n is a, c, g, or t
  Peptide Sequence Number=SeqID_111415
nnnnnnaattgattttaattctggttgcatattcatttgaggataaagaaactagatgcccacataaaattgttgaaagtgtagcacagaaaaatcaactgtaccatttgcattttacttacattttgttgcaatttacaaatactgtatcttctttatgtatcctggacgaattgatttcagatgccatgcactgagaattcatcttagactgtttgcccccattgggtctcagcacatgcttggaattttcaggaaaagtatgaattccagagataaccaagttacccttaggtaaactaatctttagatgaattgcaaaggcagtcccaggtaaacatgcaatagcatcatatttggcttgaagaaagattcagactttcagagcaacttttttagtcaaggatgagacctagaactcaattttctcttcctctcacaaccaagagaaacaccagccgtgtatcttgaatttgcaagttcccggggtactggggctcctgcagtcttcagaaccggaacaagctctttgaaaatcctcctatcctcctcattcacaaacacaatagccataccctcctcgcccatccgagatgcccttccaacttggtgaatatattcatcaatggaatttggtgtgtaaaacaatatgacttgaacgtactaacttta

SEQ ID NO: 45442 - DNA, 492 bp, Setaria italica
  Peptide Sequence Number=SeqID_111416
acttaagcttaggtaaaaccttgcccattacgatggcaacacactttcagcgtcgtgatcttctcgaaggcgtcgtcatggaagcctagcaccatgtttagtatctctcaaccggcagcagtgtccaattactgtctttgagaagtcggagctgctgcgtccgggtcggcgagctccgcaacgatgactcgaagatgtgattggtcattggtgggtggctggcaatgaggaccttggtggaccttggacgatgttgtggtcctcattgtgaagtcggagctgctgtcttccgtggcaagctcagcaacgatggcacgtgatgggcgcggtctcatttagatagttgtagtagtaggcggcttgatggtagttgtagttgtagtcttaggtgtgctctgtaagtggttatgataaggcttgtggttgtaaggtttttggatccggtttccctcacaaacggattaactctcttcttattaatatacaccatat

SEQ ID NO: 45443 - DNA, 364 bp, Setaria italica
  Peptide Sequence Number=SeqID_111417
tgttctgtctcgtcttatgaggtcgtgaagcacatcttgcacagaaaacatgcagagctatgatgaacttttgaggtggtcatacgtagcgtagggctgcactccagctgaagctttgacaagcattttttgttcaccacctacacacgaactagatcgcactgtgtgctctgttaaagaatcaagagtttgttttgcgttttgcgacttccttctcgggaagaagaggtaggaacgctgctgttctaataaagggggcagaatgcccaaaatgtttgtaagttatgtctccgcctgtatatttagttactactgtttctttcatctctgtgctgaatctgtaaacctatttgattcaatcagt

SEQ ID NO: 45444 - DNA, 933 bp, Setaria italica
  Peptide Sequence Number=SeqID_111418
gccgacccacggcgggggcgggggcgggggcgggtccgccaccgcgtcgccgcgggccgcgccctaccaccatgggcccggggcgggctccgggtcctcggctcccatcgtgacgccgctggctccaacctccacctcctcgaaagtgggcatacaagttgcgataaagcctgaattccgcattacccctcctcctcaattgccaccacagatggtcgaaattcctcgcagcaccttcaactttgattttgagtatgagagaaggattcttgctgaggcagagaaggagaaccccaactggagtaagtttgtggtagaaagacaggccccaccaccgcctgtgccacagcaggctagaccagcatcctcagggtcaggggatccagttgtggacaagtatgtctccatggggcttgggcgtgaagctgtctcatttgccgtgttgaattatggagataatcctgcaaaggtgaaggagtttgtgaaatcgtacaacatcctccacgagatgggcttcacatcgccaaacgtccccgagctgctggcgatccacgacaacgaccctgacaaagtcatccagcgcctcctctcctcgccgtcctgatcccagagcaagacgcgctcccggacagttgcgtatgtataccacatccgtgtacagccctgccctacgctggcaaccatcttatgcatgtcaaatgtttatggagatacgcgtggttctactccaatctacgtgttagctgccgctagttttgtgaaccgagtaacatggtttgtatgttgtatcccgttacccgtttggtgtttttctctttttgcaccgcttgtttcaccaccgagtctctttcgcagcgtacatgtagtgcaacaggatgtttgctgaccgatgatcctggttgataaacggcatgaactttgctcaaaaaaaaa

SEQ ID NO: 45445 - DNA, 1241 bp, Setaria italica
  misc_feature (1204)..(1241): n is a, c, g, or t
  Peptide Sequence Number=SeqID_111419
caccgctccgccgccaggcgttcgagagctacctcaccaagagcggcatcatgtcgtcgtcccgacgagcacgctcgtctcgccgccgaggtcggcgccgtccggcggctcgttcttggccggctacccgttcgggtcccccaagtccccggccgccctgtacagcctcccgtccaccccgacccgaccgtccacggtgacggtcaccaccccctccggcgccaccgtcatgaccgtggagcgcctcaacctcgggctcatcggggaccaggagctggtgatggagagggtggagtccgggagagcccttcgcgagaaagtcttcgagcggcttagcaaagaagccaccgtgcccaacgacgccgccgcctccgccaacgcagagggcgcggccccagccgccgccccggacgtcggctgggtctccgacctcatcaactgaagagtgtccagtcatggtaagtgggggaagcggaggcagcgctgcacagctggagaagaaaattcagaagaagaaaaaaccccaaaaaaaagttattttttcttcttattgccaaggttctcctgatccttgtacatatgttcttccttcctatgtgaatattcttggatggtggttggagggaggggaggcagagaagaagggccgggttgatttgttttggggcttctgatggtggcatgtcagtgaagggagagagacaagttgccaacaaaacatggtagaggtggatggagaagatatggcgaacgaccatgtatatgggttgtgtagatgtacatagtgccggtgttcgtgtgtgtgtctgcgtgtgtgtggaggtggagcatggcatggcggcgatccaagactgaagaaagaaggtgaccaggatcctgatccacgccgccggctgcacggccgcctccggtgacctcgctgaccggcaggccggtggagcttctaatttctaccactacgagcgattccagaacgtcctaagttgatgcttattgtttcttattccgccgttgattctgttattgttgccttttaagatcgacgagttatttactgctctgtatttcacccaatgtattttccttaattgatcgatctactgcttagtacgaagcatgtacttactaccttgtaccatgtactatttttgctgataaggaattaaaccccggccttaataagttgatatcaaaaaaaaaaaannnnnnnnnnnnnnnnnnnnnnnnnnnnnnnnnnnnnn

SEQ ID NO: 45446 - DNA, 381 bp, Setaria italica
  misc_feature (364)..(364): n is a, c, g, or t
  Peptide Sequence Number=SeqID_111420
ggcggagagcgtcgctgggtgcgcacggctgagcccgctgcagcggctggccaaaggcctcggcgcgtactcgtggcactacggccgcggcatggcggcgccggcgaccaagggttgaaaaatccgagtcgtcggccgtgttgctttgcccggttcttgtccataaaagacgcgattttttctctttttatttcttttcttctttttgcatatgcgaaaccatgtacaagtgcattttgccgccaagactgttcttggcgttggtttctctctctttgtggagcttgactatactgtcgtgtcctatctgcagaagagatcatacaatgatgccggaatatttgttaaaaaaaaaaaaaaaaanaaaaaaaaaaaaacaaa

SEQ ID NO: 45447 - DNA, 430 bp, Setaria italica
  Peptide Sequence Number=SeqID_111421
gtgcatacttcagtggttcttttgtggacacttatggcgtaagatttgtctttggtgttacggcacttttgcctctgatgacgtctactgttgcagttcttgtaaatgaagaacgcttacctttgggcgaacgttctgtctcactttcagtttcaggttcagaattgattgagagctctaagcagcgtatcatgcagatttggaattcaataaagcaaccgagcatattcctacccaccttgttcatattcctttggcaagcaacgccacaatcggactctgctatgtttttcttatcacaaacaagcttggattttctccagaatttctaggacgtgtcacgcttgttacatctgttgcatccttattgggtattggattgtacaattcgtttttgaaggaagttccattgaggaaaatctttcttgtg

SEQ ID NO: 45448 - DNA, 560 bp, Setaria italica
  Peptide Sequence Number=SeqID_111422
tccttaaaatttacttacttaaaattaattaaactactaattctaggttaacttgttggttctaagaaattcaacactttattttacctaactaagaatactactttgcctatacagagataaacttttgcctgacagtaataattcacctaaatgagaacattacttctgcataattaggaaaatgagaaacaatcagcattaaccagggatagcacaaatctattgaaaaattcagagagtgaagcatgaggggggcaatcgacatctaacagtcaacatcttgtaggctagattggcacacaaagatacacgagaaaagaagcaaagactaaaatgagcacacaaatttaatgcaaaaaatgacatttcagagatagaattccttgtccttattttttagtgagttttgccataaaactttaattatgtgatattgtgatgaggtagtccagaacttaattaaagttttatggcaaaactcactagaatatgaaaaattgctaaaaaattggaaccacatgctgaaccacaatggataaattgcttgttgatctagt

SEQ ID NO: 45449 - DNA, 404 bp, Setaria italica
  Peptide Sequence Number=SeqID_111423
cgagtcatgattgcctccatgttgtacacacaacaaaaagattggaactacaaactacaaagactgcgcatgaatcaaatcgaggtttagttgcaacttcactgctgccgatgatgatctgatgaacttttagaccaccaaacacatggctgtgagaaaaaaggaaaagcattttcattatggatcaaaaattgaaacttacagggaacataccagaaaacaatggtaggagccttacagctgaagagcatgttatagtgcttatccactcaggacaacttgcaggcagaaaagaaaggcacatcaggttctaaaacactattttatgggacagaagcatgattagtgaaaaaatagtaagatcagttagtagcaagtgtaaaacatcaccaaggcagattacc

SEQ ID NO: 45450 - DNA, 1416 bp, Setaria italica
  Peptide Sequence Number=SeqID_111424
aggatctcacaaacaaatcttcgacaaactgtaagaaaattagaacatataggtaaaacattttcacccatctaaattataaacattcacaaagtttcaaactaccagcattcgagtcatgattgcctccattgttgtacacaccaaacaaaagattggaactacaactacaaagctgcgcatgaatcaaatcgaggtttagttgcaacttcactgctgccgatgatgatctgatgaacttttagaccaccaaacacatggagctgaagagcatgttatagtgcttatccactcaggacaacttgcaggcagaaaagaaaggcacatcaggttctaaaacactattttatgggacagaagcatgattagtgaaaaaatagtaagatcagttagtagcaagtgtaaaacatcaccaaggcagattacatctagtaacaaatgttgctaattctatatgacctaatgaagtaaacaatcaggtaacaagcagttcaagaaattcaacactttactttgcctaacttcaaataatactttgcctaaaattactactaaaataataaacacaatcaggtaactgtggtctaagaaattcaacactttattttacctaactaagaatactactttgcctatacagagataaacttttgcctgacagtaataattcacctaaatgagaacattacttctgcataattaggaaaatgagaaacaatcagcattaaccagggatagcacaaatctattgaaaaattcagagagtgaagcatgaggggggcaatcgacatctaacagtcaacatcttgtaggctagattggcacacaaagatacacgagaaaagaagcaaagactaaaatgagcacacaaatttaatgcaaaaaatgacatttcagagatagaattccttgtccttattttttaacaaaagaatagcctacagaaattatgtgatattgtgatgaggtagtccagaacttaattaaagttttatggcaaaactcactagaatatgaaaaattgctaaaaaattggaaccacatgctgaaccacaatggataaattgcttgttgatctagtataagttgcctacataaaaattttcgatgcatctttgtgtttctgcagggaagagcagcaaaacaacaaaatattaaagatgaagacatgtagattcatatgggctgcaacagcaacagaagaagatgacatgagtaattcatcactaagagaatataggaaacaatatcattcgccgtcttttactctatacggacacaggttatacttgaaaaattatcaatactagataagatcagtaccagattgtcagtactggtcaattacctatactaatatcagtacttgatgagttgttgaacaaaaaggaaatttctttaaatgatatcaaaagc

SEQ ID NO: 45451 - DNA, 452 bp, Setaria italica
  Peptide Sequence Number=SeqID_111425
aaaaaaaaaggaaaagaaactccagactcacagggcaaatggtaagccagtcacaaactcacaagatttgccaagcatgtcaatcactaactcttttattccacgttattgctattgtttgttgtcacccaacgtccagtatgtcttcacaacaaggaggagcttctcgcggacgagtggaccatcttcgtgatccacgatctggctattccatctcattccgtccgcgatgctctttatcttcactaacaggtccacatcatctctgatgatgaccgtgccctccggcctcaggatcctgtccatttccagcagaacgttctccatttcacacctagcaaagcagaggaattgtcagtcttactgaggtgccctggtatttacctgcaacagttacaatcgacagctcctagattaagagttcatgtgggactgaatcacaatgcagctgg

SEQ ID NO: 45452 - DNA, 335 bp, Setaria italica
  Peptide Sequence Number=SeqID_111426
gggacggaggcaccgcagccgctcccgctccgacgccgggcagtgccgctcccggtacaccagccggtcccgcgggtaccgcagcgaccgctccacgtcctcgcacggggtgtactccgagtacttgacggggcacgcggggtacctccgcggcgccgccgaggacgaggacgaggacgaggagccggacgaggcggcggcggcggcgaccgcctcgtccgcggccgccgcgtggtgcgcggagaagtcgaggggccgggattgggtgcgggagcgggcggacgaggtcttcttcctcggggcggcggtggtggtgcaggcgacggcggtggcga

SEQ ID NO: 45453 - DNA, 1286 bp, Setaria italica
  Peptide Sequence Number=SeqID_111427
tttttttgacccacaacagtaacttgtatttaccacttggcacaatttgacaattcaagtaaaaactttgccgtggggggccaggtgtttcacccttccttcattaaccccccttttacaccttaagagacaattttcctatctgagaaattaccgtccgaaaagaacagcatagaagaacgttaaaaaaaatactagctcaaaggagctagaaatggcgacccaatcacgaaaaatgtgcttatatcaacatacagaagtttacttgacactcctgctactggccttggtcttgggcagtccagtacctcttctcgaccaggaggatcttctccctgacgagcgggccgtcctcgtggtcgacgatctggctgtcccaccttatcccgtccgctacgctcttgaccttcaccagcatgtccacgtcgtccctgatgatcaccgtgccctcgggcctcaggatcctgtccatctccagcagaattctgtccatctcacacctgttgttgtacagggtgaacaccgaatccgcgtggatgaggtcgtaggtcctcgggtaggtagacatgccctcgcaccagtcctggtagcttccgatgagcccccgctcgtagatggccccgagcgtggtcgtgttccccagcgtcgggaccatgttcatgacccagagcgggtcgcccgccgccgccagcgccgcggcgaagccgccgaggcgcgcgttcatgtccagcacgttgcggtaccggcccttctgctcgaactgcctgatcaccaacttgtagtgccgcaccctcttccgccacagctccgtgtcctgcgcgaacgacttggccgtgacgcccctgacgccgccgcgggacacccggggcggcacggcggtcagccgctgcggccacttcttcaccgcgccgcccgcgacgtcgctcgcgccggagacctccgggagcggcgttacgcaggcctccatcttgtcataccatgccgcgtcggggttcttgttgcgggagcagaagggcgccttgcagttggcgtggttgtagggcttctgccagacggcgatgtcgccggcctccttgaccttggtccagcagagggtcctggcgacggcctcgatggcctgctgctcggcgttgaggtcctccttggtccgctcccaccccttccagtacttcttccagttgatcggcgggccggacaggatccagtaccctcccggccgcagcacgcggtcaacctccatcaggtacagcccatcgtagagttgccaggggatgaggcagcgggag

SEQ ID NO: 45454 - DNA, 2228 bp, Setaria italica
  Peptide Sequence Number=SeqID_111428
ttttttttttctcatgtcaaaaatctgtgctgggtttccctttctcatagcttaacaagtagatttatatctccatttttgtgaaacctaattaccccccccaaaaagaaataccccaaaaaagaaaaaaaaaaaggaaagaaactccagactcacagggcaaatggtaagccagtcacaaactcacaagatttgccaagcatgtcaatcactaactctttttattccacgttattgctattgtttgttgtcactcgtccgcgagaagctcctccttgttgtgaagacatactggacgttgggtgacaacaaacaatagcaataacgtggaataaaagagttagtgattgacatgcttggcaaatcttgtgagtttgtgactggcttaccatttgccctgtgagtctggagtttcttcacaacaaggaggagcttctcgcggacgagtggaccatcttcgtgatccacgatctggctattccatctcattccgtccgcgatgctctttatcttcactaacaggtccacatcatctctgatgatgaccgtgccctccggcctcaggatcctgtccatttccagcagaacgttctccatttcacacctcccatggtacagcgtgaacactgaatcggcatgaatgaggtcgtaggtccggggataagtggacatgccctcacaccagtcctggtagctcccaatgaggccacgctcgtatattacccccagggttgttgagttgcccacagtagggaccatgttcatgacccacacggggtcattcaccaatgccgcagcgaagccgccaaacttcgcattcatatcgagcaaattgcggtaccggcccttctgcgctaattgagggatcacggacttgtagtgtccaattctcttcttccataactcggtatcttccacaaacatctcttcagtgaccccctcaaggctgccactggcaatcctgggcggtactgccgtgagcctctccggccatttcttcaacttgccaccggcaacctcttttaagtcactaacctctgggagtggagttatacaagcctccatcttgtcgtaccaggcagcatctggattttggctagagcaaaagggtggggacttgataaccttgcggatggccttgcagtgaatgtggttagtaggcttctgccagatagcaatgtcgccttcctccttgaccttcttccagcaaaggcttgcggcaactttctcaatagcttgctgctcttgattcaggtcatctttagacctggcccaccccttatagtgcttcttccagttaattggtggtccggacaagatccaataccctccaggccgcagaacacgatcaatctctatcaagtacagaccatcgtagagctgccatgggatgaggcagcgggagcaatgcgccatgtcaaaggaacgggccggataggttagccgattggaggcgagcaccccaatcatggctggcacaccacgctccagtgcaaactgcacctgcgcctcgtgtgagtctcgcggggcgaaggacatggccaggatgttgcgtgacagcaagtaggctccccagctcgccaccccgcagccggtgtcgagggcggtgcggatggatccgtcgtggagcgggatgatcttcccgatgtcgtcgatgtaagcgccggcgccgcgcgggaacatggtgcctcccccggggaagcggaacttgtcgccgtcgacgcggatccagttctgcaccgccttctcgacggtgagctccttgtgcggcacgttggcgaaccaggcgacgtcgcggctggcgggccacgggaacgggttgcggtagcccctgggcgccgggacgaggcagcggaggcgctcggcgtcggaggaggggcagtggcgctcccggtagacgaggcggtcgcgggagaagcgcagggagcgctccacgtcctcgcagggggtgtactcggagtacttgacggggcacgcgtcgtaggcgcgctggcgcggcgcggcatcctcctccatcccctccgcggtgtggtgcgcggcgaagtcgagcggccccgcgggagtggaggaggaggaggaggcggttcttttggggggaatagttcacaaaatggagatataatctacttgttaagctatgagaaagggaaacccagcacagattttgacatgaggaaaaaaaaggacaaattgtgccaagtgggtaaatagaaagtataatattttgt

SEQ ID NO: 45455 - DNA, 267 bp, Setaria italica
  Peptide Sequence Number=SeqID_111429
cttcttgcgagccgcaggtggcgttgaggtgcgacctgaaccagtcgagctgggtgctgatcggcacgctcgccggcggcatcatgacgcctccctgcagcaggacggcccggtcgagcgccgtggcgccggccaccgcgaagttgacgccgctggcgaagtcagcgcccttgtccatgtacgggttcaccagcgacaggttcagcgccattgcgaagtagtcgatgatgaggaagccgtcggagcaccggccggtgggcttctggg

SEQ ID NO: 45456 - DNA, 759 bp, Setaria italica
  Peptide Sequence Number=SeqID_111430
gattattggacacagctgaaatagaagacactaccacaactcgcctaagggcaaggcctttgatgaagacagctggtcagatgaggagtactgcaggaagaatgaggactggtataacctttccaaaactctggcagaacgtgaggcctttgcttatgcaggaaaacggggctggatattgtaaccatttgcccgtcattggtacttggacccttgatgcagtctacaataaatgcaagcagtaaaatcctccttaattatttaaaaggagatcgtgacactgttgaaaataaactcagaaatattgtggatgttcgtgatgttgctgatgctcttcttctagcatacgaaaaaccagaggcatctggaagatacatctgcagttcacatccaataaaagtttctgacatgataaacatattgaagaacttatatccaacttacccttatcccaaaaattttatggaagtggaagagaacacggtgaacaattctgagaaacttcagaagctaggatggaccttcaggcctatagaggaaaccctccgtgacagcgtcgaatcctacaaagcatttggcctcctgaattgaggatccaatttgggctgttttgtctgctgttacctccaaactcttgctaaataatgatgtttagggacagtgaaaaagcagctccaacagtccaatccctctctgattcatgtaaacagtgaaacagaacctgttgtttgtaacggattgaataaggaatcacgaggg

SEQ ID NO: 45457 - DNA, 1334 bp, Setaria italica
  Peptide Sequence Number=SeqID_111431
ggctcagactctgaacctggccgttcaacacaggaacagggagcaaccaaaccaagagcaatggaggcggcggggaagagcgtgtgcgtgaccggcgcgggcggcttcatcgcgtcgtggctcgtcaagctcctcctctcccggggccactacgcggtgcgcggaaccgtgcgcgaccctggtgctagcaagaatgctcatctcaaggcgctggaaggtgctggggaaaggttgaagcttctcaaagctgatttgttggactacaacagcgttgcatcagcagttgccggttgtgagggtgtcttccatgtagctagccctgtcccctctggtcgatcctccaaccctgaggtggaggtcataggtcctgctgtaacaggcactaccaatgtgttaaaggcttgctatgaggcgaaagtaaggcgagttgtggtggtgtcatcagttgcagctgtgctcagtaatcctaactggcctaagggcaagcccttcgatgaaaactgctggtcagatgaggagtactgcaggaagaatgaggactggtattacctttccaaaactcgagcagaacgtgaggcttttgcttatgcagcaaaaacggggctggatgttgtaactatctgcccgtcattggtatttggaccattaatgcagcctacagtaaattcgagcagtaaactcctctttaattattttaaaggagatcgtgagactgttgaaaatagactcagaaatattgtggatgttcgggatgttgctgatgctctttttatggcatacgaaaaaccagaggcatctggacgatacatctgcaattcacctccgataaaagtttctgatatgataaacatattgaagaatttatacccaacttaccgttatcccaaaaactttgaggaagtggaagagagctcagtatacagttttgagaaacttcagaagctaggatggaccttcaggcctgtagaggaaaccctccgtgacagcgtcgaatcctacaaagcatttggctttctgaactgagcatccaactcgctctgaattgagcttccaactggattggttagtctgctgttaccaccgaactcctgcaaatcaatctaaacaatggaaaagcagctccaacaccccgatccctctctgattcatgtaagctgtgaaacaggacgtgttggccgtaacggattgaataaaggaatcacgagggaacaagaggttcagcactgtattttttcagcctgtttcatatctggatgttctggaccaagttcgtaggcgtggtgttgatgactttatggtttgggacgcgttattactttctaataaaaaaaaaa

SEQ ID NO: 45458 - DNA, 1093 bp, Setaria italica
  Peptide Sequence Number=SeqID_111432
aagtttttaagactatcatcctctactgattgtaactagcgtgcagaagcagtatcaaagagcatcgagactaccattatccaatggaagggttcaacattacacaactcaaagtaatcctcacaaagactcaaccagagctcgggattcttgccttcaaatttagggaaatttcatttaggcaaacgtcctgtcctagatcccctggattccccattactagcagatttccaacgattattcagactaggcaaaggaggaacgggcaatttaggtgtgtgtgtggagtggggggggggcgtaacgcacccttgacgagggatgaactatggtcgtaacagacccgtagccatcctcctggtggaacttgtcgtcgcggtgcccattgggcctgttggcttcgctcgtagcagatgggcgcttggcagccgagggagtagtctccagaagaggaggcagacgattcagcaccatgcgctcccagtgcttggagagcttgcgcacttcgagccgaatatcatcaaccatgccctgcatctccggtcgccagtcttcgagggatgcggcagcgcgctccagcgcgtcgacctgcacgtcttgcaacaccttgaggtccgcgaagttgctctcctacttggcatcggactcggagaagcgcgaatcccacttgtcagttgattcagtgtagcgcgtctcccacttcgcctccagatcgtcgaaacgcttggtgagcatgtcgtgggttcatggcaccgtggcggcgttggaatctggtgaagtggttgtggggaggaagcggatccagatcggtagattcccacaaatcgctcgagcgtggatcggaatcacgggctaccccaattcgcacgatgcgtacaaactcaggaacacccaaccagatccgtttgcccataacaatcaatggaattacgaaccaaaacgaactgaattcacctaaggattgactaatctgatatcaattattaacgggatagcgaggacagaagaggaaatcggaaggaagacgaagaaggaagcaggataggatgagatcagaggaaacttggagtttaaggaatagtttaaaagtttg

SEQ ID NO: 45459 - DNA, 252 bp, Setaria italica
  Peptide Sequence Number=SeqID_111433
ccgtgccgcagtcggccgtggcgcaggagaagcggcccgtggcggagtccacggcgcagcccgtgcgcgcccagaacgtgcccgaccagctccccgacgacggcgcgtccaggcgggacgtcgccgacggcgccaggtagaagccggagcgcgccagcggcggcgagctcgcaccgtggagcgctcccacccacaccgggtgctggcaggcgttggtgaaggtgaacgacgacgcgccgtcagcgcccagcg

SEQ ID NO: 45460 - DNA, 341 bp, Setaria italica
  Peptide Sequence Number=SeqID_111434
agaccaaagccaacttttggagcagaacccaaagctcatgcaaatgcttcaggatcgcataggccagttgtgaaggtgatctctgatgctgggtctattgccaggtgctctgttttttgttacggctgtagcttagtagctagatgagtgttgagtactggtgccttgctaggcacggaaatgtatgcccatgtacattattcatctgtaattctgtgtaacatgtgaatatttgtaacatcagtgcatgtcgtaatttgtcgtttgaaacttgcatgtggtgttcagatcacttcatgcgcaatgggtcgaaaaattgatgctctgctagtcatttagtt

SEQ ID NO: 45461 - DNA, 403 bp, Setaria italica
  misc_feature (350)..(350): n is a, c, g, or t
  misc_feature (379)..(379): n is a, c, g, or t
  Peptide Sequence Number=SeqID_111435
ctcgtcttcgccttctcctgcaacctcttccagctcgtcctcttcgagatcctccccgtcctctccaagcacgcgcgcttcctcaactggcacctcgacctcttctgcctcatcctcctcctcgtcttcgtcctcccctactaccactgctacctgctgctccgcaactcaggggtgagaagagagcgggcgtggcttgtcgcggcgctcttcctactggtattcctctacggattctggcgcatggggattcacttccccatgccttcacctgagaaaggcttttttacaatgccacagctggtcagtaggattggtgttataggagtgtctgtcatggctgttctttntggttttggtgccgtcaatctgccatacngttatctgtcgctgttcatcaggg

SEQ ID NO: 45462 - DNA, 462 bp, Setaria italica
  misc_feature (25)..(25): n is a, c, g, or t
  Peptide Sequence Number=SeqID_111436
taagtaatacagtatggattcttgntaaatcaatcacaggtgtcattgcttcattttatttgaagcctctgcgccatgggacaggcctgtgttgctttgtatgatgattgatggtcaacgtttggatttgtgcagcacctgctagtaggatgatgtgctgtatgtggaatggatatagcgaagtacacttgacgccttttgtggttttgtctaaaaaatgctggagctccactttgaatcctaaagttgagttgtttcaagatttcctttattttgggtgtcttcagatcaaataaaggagggagaaaatagttgagctacagtgctggaagatgcacagccgtataaaggaaaatacagagtattacaaaatctggggacaacagccactgtctgccaaccgagttcaggtgaatctacaagaaatgtggtgcgggtacttgatctatccatcgcaggcag

SEQ ID NO: 45463 - DNA, 296 bp, Setaria italica
  Peptide Sequence Number=SeqID_111437
tatcaaaggaaaaaaatgtgaatgctccagcagccagactatgaattcaaatctatagctcagatttaagattcctgcagcaccaccacaatgtatcacaatggtacagggtaaaaatcacattgtacatcaccaataccaaggaaattatgttaaacaaaagaatcttttagcagagtaacatgtaataagacagtcttctagaaaatgttaataaatgcacagtttgccaccacatgttcttgcacagcatttctccaaaccattctcattgtaggtatcatgcagcaggaaaa

SEQ ID NO: 45464 - DNA, 543 bp, Setaria italica
  Peptide Sequence Number=SeqID_111438
gcctttaataaattacagagcttggcacggttgtgactaatcttatatcttattgtatttaagtcttggtattcgtattgttagttaattatgattaagctggatcgatgtagtaatagaggtacctatgacatgatgcaatcttcactgcttgtgctgcaccaaccaactctctaccaaagacttgatctgatctgggacagtgacttgatcatgctagcttgcttgttctcagccatgcaagcgatttcctctcgccttcagatgacgagactgccttcccggctgcagcatgccatgtgggtgcgagaccgggctgctcctgcccagcagctcctcgatcatctgcagtgcgatcctctcctcgtcgtcgtccatcatcaccgacgacgccggcggcgagccagcagtcgtcaccgttgatgtggacgtggaggtgggcgtggtcgtcgcgccgtcgctgggcgggggctcatcgccggaggacgcggcgtccttgttgagctgcacggtcatgacccagctggagtcggcgcgggcgcc

SEQ ID NO: 45465 - DNA, 182 bp, Setaria italica
  misc_feature (143)..(182): n is a, c, g, or t
  Peptide Sequence Number=SeqID_111439
tgatgacaaagtgtgtaatctcctctctcatttctgcctgcctgtggtccctgtcttgttaccgaatcagattgcttgtatatttgccgtcgagtcctaggctggttcgatgaagtgcacgatagggatggattcttcgcccnnnnnnnnnnnnnnnnnnnnnnnnnnnnnnnnnnnnnnnn

SEQ ID NO: 45466 - DNA, 449 bp, Setaria italica
  Peptide Sequence Number=SeqID_111440
tgatctctcatgtcaagatttcagctgtaacttgaaaatgtatccggaggcaaaaatatttgatctgaagcttggttcctacaggctgttatctccatatggcctgcttgctgagagcgcagatgttgttgactcttttgttggtatcttctcctacaaaccatttgatgagcaactggactggagtttgacagctaaagcttctccttgttatataacttatttaaaagattcgattgatcaaatcgttggcttcttcaagagtagccctaccattagccagaacctggcactagaaactgctgctgctgtacagatgacactagatgaagttaaacggaccgctcaacagcaaatgactcgggtgctaaaagatcagtccaggttttcactgaacatggatattgctgctcctaaaattactgtttccgtacctaagtttccgtact

SEQ ID NO: 45467 - DNA, 792 bp, Setaria italica
  Peptide Sequence Number=SeqID_111441
gcttcctcaactctttcctcactgatttgctggataagaggccaaatagctagcaaggggaagagcaatcgaggaagaaaggcaaagaatgcacctaagaagagcaaaataacatccatattttgcccagagtgtcaaggtactggaattcatgtcaagggggatgaactggagaagccaagtatttctttatctgaggtttgtagcacattattactccttgtcagctacttatttctcttctctttcaggataattcatttcacttttctgtacattatatgtggtgtgcctgaaaatgggtggatgttggcacttgtagatgtttcgctttaagctgaaagccattgaagctcacaaagcatggctgaagagtccggaggtgcttgagaactgttccactgggcttcatttcccctcagagcatctggagaactctgaggtagcaacaaaggcacgctattcctgttcattttcttaccaggcataggttagaattcactgacagcacttccttatattgcaggagaaggtgatgccactgaagtcgattcctttctatgccgctgacggttaggagacactaggggaagctccgccatcatcagtcgtgagatagagcttgctggagtcactgtaaattcgttagagcagctgtacataagcttgcttgacaatactgtgaaaagtggtgttaaacgctgacaccgtagtttgcttccgcattgcctgtaatgtaatcgtgtcataactcagttaacctttcttaccgaaaaccaaaaaaaaaaaaaa

SEQ ID NO: 45468 - DNA, 221 bp, Setaria italica
  Peptide Sequence Number=SeqID_111442
aggtacctcacacaatcttcaagttggcctcttatccagcaaatcagtgaggaaagagttgaggaagcagaagcgcatagcagctgagaaagtgtgtgatatctgtgggagaccaatgcttcctggaaaggatgttgctaccttgctgaactgcaatacaggaaacctagcttgcagctgagacacgcaacaggagataggcaaggcacacaggggatagg

SEQ ID NO: 45469 - DNA, 380 bp, Setaria italica
  Peptide Sequence Number=SeqID_111443
ccgttgctgaattatacggaagttgcagagtcttgagagccatatatatctgtttcccaatgagtgtgaccagctagctctgtcttggtggtggtggccggctcctctttccccacgggcgccggtgaaggtcgtggttccgcaaaggcggcggcagcagatcggggaggaagacgaggacggtggaggcttgacgggggcgaaatcacagggagcaagcagggtgggagacagcggcgcggggtgccgggggcagagcagaggaaggagggaggcgaatggataggagcagaggctggagtcactgtaaattcgttagagcagctgtacataagcttgcttgacaatactgtgaaaagtggtgttaaacgctgacaccg

SEQ ID NO: 45470 - DNA, 1446 bp, Setaria italica
  misc_feature (1)..(12): n is a, c, g, or t
  Peptide Sequence Number=SeqID_111444
nnnnnnnnnnnngctacttcaagttgtgcacttccggttctcatacccagattaaaaggtaaacatgtagagccacagaacttccggttctcatacaaaaactaaacatggagcaaacaccacaatgcccaacaagcaaataagagcacagcacgaccacacgtagggccaacaagggcgcgcggtcccctttcctaatgtacactgtacacagaagtagcagaagcttcaagattaaaaggaaacctatgaccatgacatagtctgatcgcttattgctccgcatatctagttagtagcattatcacacttcaaaagtgcgaaggtagattctacttctcattgcaggacaggtgatcaaaggcatccttaatcgctgcaatggccgccaggtacttgctcctgcgctccaggtacatcccctcccgtgccaaccgctgggtggtgtcattcatctgcagcagcgtctgctgctccaagtgatcatcaataaataatcgcgcgatgaggaatgagaaagaggcagcagagtgcatcctgcagagttgctcggccttaaggtctcccctcagtttcaggttcagtttgtctgaaagcatggccacattctcaaggtgctgctccacctgctgcatgaggctccccaggtcatcctggggctctaagctgggctgttcgttcagcacctggatccttgcaacaacatagggctttgtcctgacgatctccatgaccctgaagcggtcttttcctacgcaggtgaggaagaaccggtcatcgatgagcctctcgcactcgatgacatggacgatgcaaccaacatctgccatcctgccgttcttgccgcagtagatgaccccaaacttgaggccttgctgaagaagggtgtgcatcatgatgcggtacctgaactcgaactcctgcagctgaagggtcgcacccgggaagacaactgatgggtacataacaattgggatttcagtgatctggtctttggggttctgaacaacctcgtccatgcagccgtgcagatcggctttgcatttcaggactgacgtggttctcttctggtgcttcttcacggtcacggcagcccttgtgtcaagtcttggtggaagctttggctggtaacaaggcgaggatggactgaagctgtagctgcttggccttgctgaattatacggaagttgcagagtcttgagagccatatatatctgtttcccaatgagtgtgaccagctagctctgtcttggtggtggtggaaaccggaagagaaatatttattcagtgacatttggccgtaacagggtaaacgtctgcactacagttgtctggaagaccaggacggtggaggcttgacgggggcgaaatcacagggagcaagcagggtgggagacagcggcgcggggtgccgggggcagagcagaggaaggagggaggcgaatg

SEQ ID NO: 45471 - DNA, 229 bp, Setaria italica
  Peptide Sequence Number=SeqID_111445
gacgaagagcaagatcgatgtgcgcagcaggctctcgtcatggaacccccacgacttgacgaacacatagatggctatggcgatctgagacgccgcgaccaagaggtgccttctccagttctcgttgtcctcgatgctgtatgccgtgatgccgtcctgcccgccgaggtgcagcagcaggacgggcgcccagagtatgtcgaggtgcgcggtgccggcggcgacctcg

SEQ ID NO: 45472 - DNA, 409 bp, Setaria italica
  Peptide Sequence Number=SeqID_111446
aagagctatagaccggtcaatcgggttggtctgtgtctcaatgctttgcgtgaagtttctgcattctgcatatcctttacatcctggctatctccattgctgttcatcgtatttggaaaaacttgcctatgttgcgcgcttcgtgccaatcgatataaaccatctctaatgcacattttggtttggacatccagctgactaacggcatcttgcagttgtcgaaagctgctttcttcaactgagttatcagaggatatagatgagacaaatgagccgtccagtaccattgaagtgcccattgtaatttgaggatcccccaaagttcttttccctaaccctctgttttcagttccatagttctcacaaggatatgaagctcttcttgttaatgtttgagtatgtctgttcg

SEQ ID NO: 45473 - DNA, 490 bp, Setaria italica
  misc_feature (134)..(134): n is a, c, g, or t
  Peptide Sequence Number=SeqID_111447
aatttttgctccatcagtaggtacagggcccgtcgttgatcttttagctggctcagctgctggtgggactgcagttttgtgtacatacccattagacttggctaggaccaagctggcataccaggtttcaaatntgggccaatctggcaatgctttgggaaattctggtcgacaacaaacatataacggtataaaagatgtcttcaagactgtttacaaggaaggaggtgcacgatctttatatcgtggagtaggtatgtcttatcctctcggtctcatttccttgctatgattagaagtaacagtgtttgttgcttcgttagtgtgtgggcaacaagctatcatataaaatcttttccgcacttccatgtctgttaatgctgcacgcttgcacgtctttgtttacgttgtaacaagatgctatgtgtcaaggtaatttggtgccaaataggctttcttcagttctatttttggtgtcaatgaaaggggc

SEQ ID NO: 45474 - DNA, 391 bp, Setaria italica
  Peptide Sequence Number=SeqID_111448
tttctttcattgaactaaaatggttgaattctaatgttatgatccttaatggttcacagtatggttgctgatgtccaccgtaccttgctatatggaggcatatttttgtacccagctgaccagaagagcccaaatggaaaactccggtatatcaaggctgacaacctttctcttactatatctagaactgtagttcaaatgcttataactatcgttataatcgttaataaaaaatgcttataaatatacaaatcctgaacttggttctatgtggaataacagtgttctgtatgaagtcttcccaatgtcattcctgatggaacaagctggaggtcaggctttcacaggcaaacaacgggtgtgtctcagatcttttttctcagatcccaaa

SEQ ID NO: 45475 - DNA, 529 bp, Setaria italica
  misc_feature (65)..(65): n is a, c, g, or t
  misc_feature (416)..(416): n is a, c, g, or t
  Peptide Sequence Number=SeqID_111449
cctatgttgcgcgcttcgtgccaatcgatataaaccatctctaatgcacattttggtttggacanccagctgaagcagacacgcaaaataattttaatactgactaacggcatcttgcagttgtcgaaagctgctttcttcaactgagttatcagaggatatagatgagacaaatgagccgtccagtaccattgaagtgcccattgtactggacggctcatttgtctcatctatatcctctgataactcagttgaagaaagcagctttcgacaactgcaagatgccgttagtcagctggatgtccaaaccaaaatgtgcattagagatggtttatatcgattggcacgaagcgcgcaacataggcaagtttttccaaatcgatgaacagcaatggagatagccaggatgtaaaggntatgcagaatgcagaaacttcacgcaagtttgctgatcctcagagcattgagacacagaccaacccgattgaccggtctatagctcttctactgtccatcaatcgccggacca

SEQ ID NO: 45476 - DNA, 403 bp, Setaria italica
  Peptide Sequence Number=SeqID_111450
ttgaacgagttggcgtcgccggcccaccggaagagccccgactggaggaagtcggtgacggcagggtaggacgagtagtaaggcgcggtggagacgacgctcatgggcgcgccggcgccggcggcggctggcggcgagagcgcgtagagcgcggccatgaagagctgcgtggagccggtgccgacgaggacgtggtagccgtcgacggcggcgttgccgacgaggcggtggaggcggcgcacctcgtggtcgaagccgggctccaggaaccagcacacgttgccgacgtcggagaagtagctcatggtctgccaccccgggatgacgatctccgccgccgaacccgtcccgcgccagaactcctcgaacatggtcgggtcaccgtggtcgaggttgatcacgg

SEQ ID NO: 45477 - DNA, 1884 bp, Setaria italica
  Peptide Sequence Number=SeqID_111451
ggagctagccgcaggcccatgggctagggggtccccggctcgccctcctgcgatcgcgagcggaggggcggctcgcgggatccgcccgtcttctcctcgcgctctaggaagaacccggggacgactctttgatcgatcggagagtttcgcctgcttgtggatcggttcctgctgatgcgagagtactgtgtattttttttggctccttgggagtgtacagttttgctccttgggatgtgaaagctgtcccgggtggggatccaggtcgcgctagattttaaccccgcttttgcctttcacttttcgctcacttagtcacttaagagggtaaagattgggttcggcgggcgattaacgcccgatcactgtgcaggattctattccaccttatcttctgatctccatttccgtgctgtttaatgcaagtggtggggaggcaaagtagagattgtgttgccggttttggggaaatattcttgggacattccgccctgtacagagatataccctgctccgagtttagtttcatgttcatagtggtggtggtggggagcgcacgtattactcatcctgattatcccgggcagttggggagatgggttcctcgcaggagtccaccttctcgtcggcctcgggggctgcgcaagtgaatgcttccactctggacttgctcccagtctatgccaaggagcttactgctggcggcgctgctggtgcatttgcaaagactgcggtggcgccactggagagggtcaagatcttattacagacaagaactgaaggtttccagtcccttgggatcctccagtccttgaggaagctgtggcagtatgagggagtccgaggcttctacaaagggaacggtgcaagtgtgcttcggattgttccttacgcggcattgcattacatgacatacgagcagtataggtgctggatattgaacaattttgctccatcagtaggtacagggcccgtcgttgatcttttagctggctcagctgctggtgggactgcagttttgtgtacatacccattagacttggctaggaccaagctggcataccaggtttcaaatgtgggccaatctggcaatgctttgggaaattctggtcgacaacaaacatataacggtataaaagatgtcttcaagactgtttacaaggaaggaggtgcacgatctttatatcgtggagtaggcccaactctgattggtattcttccatacgctggcttaaaattttacatatatgaagatctgaaatctcgagttccagaagattacaagaaatctgttatactgaagctctcttgtggagctttagctggtctatttgggcaaaccctcacttatccgttggatgttgtccggaggcaaatgcaggttcaaagcaagctgcctcaaaattcaagtgatgggttccgtataagaggaactttccagggtctcttgctcatcattaggtgccaagggtggagacagctctttgctggcttgagccttaactatgtcaaggttgttccttccgtagcaatcggtttcacaacatatgacatgatgaagacattgctaggagttcctccccgagagagagtccatgcatcatcaggtgctaacaaatgaagcaatgtttgcctccttatgttagggccaatgaaattgagaaactctagtctgtggcattgtggttcttgttaagaatcctatccttgtgttgaacaggatgcaaattattgtatataggtcaattggatctgtgcctgtaactttctgttgagttgctcataaaatcaattatgctacttgtgatctgtaaccgtaaatataatggctacatgagattgctgtacattaactatacaagattagtaccatgattggagatt

SEQ ID NO: 45478 - DNA, 1917 bp, Setaria italica
  Peptide Sequence Number=SeqID_111452
gcgtcaccgcacagacgcacacgcatcctccgttgctttgctcacttgttgcgttgttgtaaccatccaccgctcccgagtcccgagccccaacaatttgccagttcattccgcgccgcgataatcggcaccggaccctggcctctactccggcagatcagacgccgcaccaggcaccgcacacgcatcctccgttgctggtcagttgtaattgtaaccatccgcctctcccaagtcccaacaaattgccaatcctcaccgcgagaaacggcgccgctcaaagatgtcgtgacgcgcgcgcaccgtccgtcccgcccgcccgtccgtccccgtcgcgccacaggacaaggcatcccaaccgccgcccatctcctatcgtcatcaggcatctgccgatcatccctggggccttaactcctcccagctagcctcaccgtccccaaccagagtccaaaactcgtagacgcgcgggcagcgcgaaggcgggcggtgatccggcctgatcaaccgagagcgggcgaggggggaaccggccggcggggcagcaggagagcggagaagatggaccacgcggcggaggcgcagcggacggacctgatgacgatcacgcggcacgtgctcaacgagcagagccgccacccggagtcccgcggcgacttcaccatcctcctctcccacatcgtcctcggctgcaagttcgtcgcatcggcggtcaacaaggcagggctcgccaagctcatcggcctcgccggggagacaaacgtccagggtgaggagcagaagaagcttgatgtgctctccaacgaagtctttgtcaaggcgctcgtcagcagcggccgcacctgcgttcttgtatctgaagagaacgaggaggccatattcgtcgacccggcactccgtggaaagtactgcgtttgtttcgatccactggatggttcctccaatattgactgtggtgtctccatcggaacaatctttgggatttacatgatcaaagataaagacaatgtgactttggatgatgtgatacaacctggaacaaacatgcttgctgctggctactgcatgtatgggagttcctgcacgcttgtgttgagcactgggaatggagtcaacggtttcactcttgatccttcccttggggagttcatactgactcatccgaatatcaagatacccaagaaagggaagatctattctgtcaatgaagggaatgccaaaaactgggatgcgccgacagcaaagtatgtggagaaatgcaagtttccccaggatggttcgtcgcctaaatcattgagatatattggaagtatggttgctgatgtccaccgtaccttgctatatggaggcatatttttgtacccagctgaccagaagagcccaaatggaaaactccgtgttctgtatgaagtcttcccaatgtcattcctgatggaacaagctggaggtcaggctttcacaggcaaacaacgggcccttgaacttgctcctactaagcttcatgagagatccccaatattcctggggagctacgatgatgttgaggagatcaaagcattgtacgcttcagagtcaagcaccgtttgattgtcctcctgacttcctgagtgtatcattctccggagggggacactgtaactgtattgatcagatatttatgttctgatcttgccttcctggcctcaatgtaaaatattcacactatacagacacagtacaactcaataagctatcaaggcttatgtttcatactcattttacttgctatcgtgattccttaataaaatttggattcaaaacatatgaagacatgttttgaaacgaacgtggcaggagatctaccgattgtactaaaaagatgaaggcatgttacttgtgagattttacttggttgctggttctggatgtttaaaaaaa

SEQ ID NO: 45479 - DNA, 2047 bp, Setaria italica
  Peptide Sequence Number=SeqID_111453
tttttttttttttggttagaacctcaaaaataattaaatcctctgacaaaaaaactatgtcttgagattacacgaaatgctgagtcagaacaccgctagctagggtcacagcagcagtcttcacaatagggtacaagcatgccgaagccaatgtgatcgggactgactagacactactgggtagtacacaataagcttgtttgacagatcattgccaagaaacatcatgtgaacgcccaccatacctctgcaacaatattacactatgaacaatcacagacgttggaagctcccacatcatgcggttttaacccggtcatgtcaagaaacttcagtagttgtcccgggattgtgcatccttgggccctccctgccctcttgggggaatatatcgccgatgaagctggcatcatgccttggtttgcagcagggccctggtgttgttttttactagcaggggattttaatgatgaggcatcgtccacagctacagctgcatggtccggcgattgatggaacagtagaagagctatagaccggtcaatcgggttggtctgtgtctcaatgctctgaggatcagcaaacctgccaaacagaagcatcaaagtggaaaggctacacataggcaaagccattttcatgcctcccttgcattgtaagtactgtaactgatgatcaacttcagaaattgtgccacaccatgaatggatgactaactgcctcttgtatttttttttgttgataaagcaggcaactatatatacaatataatcagttagttggtctattcgccactcctattctcataaaaacaactacatatgacggcctagatatcatggcgtcataaataattcatgttaacagttactggacaggttaatccgtgaatcagatcaaattaagagctatattttaacctccttaattgaccagcatctcaaggactactatatcaggaatttttcttacggtacagcagcatttcagaatgacattttggagacaacagactatgtgaaagtcgttgcattaggagcattcagacaaaactgtttaatttgtaaattaaacaataaggaaaatgcaattcaattgacaattacagttttcaaatccatgtactgattcatgtttgagcaagtatagataacatcttttgttaggaacaacatacttgcgtgaagtttctgcattctgcatatcctttacatcctggctatctccattgctgttcatcgtatttggaaaaacttgcctatgttgcgcgcttcgtgccaatcgatataaaccatctctaatgcacattttggtttggacatccagctgactaacggcatcttgcagttgtcgaaagctgctttcttcaactgagttatcagaggatatagatgagacaaatgagccgtccagtaccattgaagtgcccattgtaatttgaggatcccccaaagttcttttccctaaccctctgttttcagttccatagttctcacaaggatatgaagctcttcttgttaatgtttgagtatgtctgttcgccacattatcacttgtgggctgtcttggttgtatgttcactagttttcttctgcgtcttttgaattcctttgtgcaaaagaaccaccagaggagctgaacttttctggataggactcaagaaagtaatgttgcttggtgaactggaatctaagtggtgcctttgcttcagtaaattctgagaggagctcagctgagaagttgaagctatagaaaatttcttgtcttcgatatcttgaatggcattttcagatgaatactgatttccaaccatatcaatgtttccatttccattgcatatatggtcagtgggcaacaactccatcacatcctcttggtagatctgatcaccatatccattcacattcttttgctcactgaacatgtaggtatcatcgaattgattgtcacatagtgcagctgaaggatcaaccgagggtagtgatttatcttctgcacattggaatgctgagagatcatccaggataccataatcaagtaataagat

SEQ ID NO: 45480 - DNA, 1085 bp, Setaria italica
  Peptide Sequence Number=SeqID_111454
aaatccgtttcgttcgttctgggggaaaaaattatataatactactactggaagcgagagaaaaaaaaggaggaattttccggaagcatctggagagagcggcggcccgacgagcggagcaagctagcgagcaaccaagacttcgccgcttcctcgaattccggcgcgtgcccgagctccgccagccgctgccgccatgtcgctgatcgcgggggaggacttccagcacatcctgcgtctgctcaacaccaacgtggatggcaagcagaagatcatgttcgcgctcacctccatcaagggtgtcggccgccgcttctccaacatcgtctgcaagaaggccgacattgacatgaacaagcgggctggtgagctgtccccagatgagcttgagcgcctcatgaccgtggttgccaacccccgccagttcaaggtccctgactggttcctcaacaggaagaaggactacaaggatggtaggttctcccaggtagtttccaacgcccttgacatgaagctcagggatgaccttgagaggctgaaaaagatcaggaaccaccgtgggctgcgtcactactggggcctgcgtgtccgtggacagcacaccaagaccaccggaaggcgtggaaagactgtcggtgtgtcgaagaagagataaaccccatgtcgtggcacgccttccggtggtcttggtgtgctgtccacggacacgcaggccccagtagtgacgcagcccacggtggttcctggataacacaaggggttttttgttacaagacagtcatcatataatgagaactgcaacagaacttaggtatataaatcataggtgagcatattccgtgcaaaaaatagctggaggtttagaacacaaatgaataggcttttcatcagaattacacgactagctacaaccaaaggaattatctcagcaactttaaagtagaaaaaaatgcagctagtatctctgacaatgccgtgatgatgaatctgtgtgaatgcaaagcaacatacacaaaagatgtttcacgagacacacctgatctttttcagcctctcaaggtcatccctgagcttcatgtcaaggg

SEQ ID NO: 45481 - DNA, 2349 bp, Setaria italica
  Peptide Sequence Number=SeqID_111455
cctagctagcggtgttcacaatagggtacaagcatgccgaagccaatgtgatcgggactgactagacactactgggtagtacacaataagcttgtttgacagatcattgccaagaaacatcatgtgaacgcccaccatacctctgcaacaatattacactatgaacaatcacagacgttggaagctcccacatcatgcggttttaacccggtcatgtcaagaaacttcagtagttgtcccgggattgtgcatccttgggccctccctgccctcttgggggaatatatcgccgatgaagctggcatcatgccttggtttgcagcagggccctggtgttgttttttactagcaggggattttaatgatgaggcatcgtccacagctacagctgcatggtccggcgattgatggaacagtagaagagctatagaccggtcaatcgggttggtctgtgtctcaatgctctgaggatcagcaaacttgcgtgaagtttctgcattctgcatatcctttacatcctggctatctccattgctgttcatcgtatttggaaaaacttgcctatgttgcgcgcttcgtgccaatcgatataaaccatctctaatgcacattttggtttggacatccagctgactaacggcatcttgcagttgtcgaaagctgctttcttcaactgagttatcagaggatatagatgagacaaatgagccgtccagtaccattgaagtgcccattgtaatttgaggatcccccaaagttcttttccctaaccctctgttttcagttccatagttctcacaaggatatgaagctcttcttgttaatgtttgagtatgtctgttcgccacattatcacttgtgggctgtcttggttgtatgttcacagttttcttctgcgcttttgaattcctttgtgcaaaagaaccaccagaggagctgaacttttctggataggactcagaagtaatgttgcttggtgaactggaatctaagtggtgcctttgcttcagtaaattctgagaggagctcagctgagaagttgaagctatagaaaatttcttgtcttcgatatcttgaatggcattttcagatgaatactgatttccaacctgcaacatatcaatgtttccatttccattgcatatatggtcagtgggcaacaactccatcacatcctcttggtagatctgatcaccatatccattcacattcttttgctcactgaacatgtaggtatcatcgaattgattgtcacatagtgcagctgaaggatcaaccgagggtagtgatttatcttctgcacattggaatgctgagagatcatccaggataccataatcagaataagatgagccaaacccttgctgcaaagcaacatcagaagagtaaacggcatctgaagaagaaggaatccaagataggccatctgtgttctccagctgctgctgaccatatgtcgaatcagacctcctgaataatgtgtcgacgtcctcaaaattgtcaatgccaggccaatcgatgtagtttaaatcattatctccataagcgaggctatcctgtggagcactgtggttattgagaattgatgaaccattgctcagtgcaaactgacaggagttccagttatctgttggacatctggtttcaacaattgtattttcctctcttgaagtaaaggcatttgagccatctttgcagtcaccattactgtttatattcccattggcacattggatgtgctctgaattacatttctgtgaatctgagtcatttgtcccagagatgacaccctggtggattttctcactggcagctgcatgcttcaacttcttactactagtgacatcaggagcctcaattctactttcatgttcgcttctattactctgggcaaactcatcagtgaatttaccttcaaactcgcccaccctccaatctggcatccctacaaattctatccgggtccgaaactgtaccaatccacaggatttgatatcatattcaactcaggatccccagttcttgatcaacagctgccggaatccagagctgtagatcagagcctcggacggacgaaacgggcgctccgcttcacccaaggaagaagcaagcaaggagagggaagaagaggagcgggtggatcttaacagtggcttcgcgtcgccgccgccgtcgccgccgccgccgttgcagagaagtcttggttgctcgctagcttgctccgctcgtcgggccgcgctctctccagatgcttccggaaaattcctcctttttttctctctcgcttccagtagtagtattatataattttttcccccagaacgaacgaaacggatttccactctctca

SEQ ID NO: 45482 - DNA, 2244 bp, Setaria italica
  Peptide Sequence Number=SeqID_111456
tctgtatttttctattattttcccggaaggaaatttacatacaacattttataaatcatatctgaaaaaggtaacaactcagggaaaataatgaaaaatacagcccacagcagccctaggcagccaacaacatatggacaatgagttagatgtatgttacacataaacaacgcggctcggtgcgcataaacaagtccaaagatgaaagcttctatgtggctagggacctcctagcataccccggaggtcattgccccgcatatagcatcatgctctacctataatttttgctctaaacagcctatcgccgtgatttataacccttactgcttcaggcagaaaatcccctcgtgtcagaacatcttcaccatgcaggtcaaaatcagacggcggattaaaaaaatccactgctctatatccaaacttactcaggttttccctgtttccttccaaatggccgcaccggtgttccaatgcctttgttatcatgtatcggaacaattctcaacgggtgcgcttcagtattgaaaacccactcgtcgaaggatatgaccgatggtggggagaaaagcaggtagaggtacttgagggtctctgccaggaagaagctctgcatcatgttgtccttttcaccagtgttcacatctctcagtcccacataaccagattctatgcgggagttcttttcaaatgcctggaaaatgttccacccccaatcttggtatgttttattccccgttaagcgccataggtacataagtgattcaacagtctctggtctcaggatgttccatgatgtgcccacactcatatcctgtccagaatggaaaaaatagttctctccagccaacttcgtgggagtggtttggtagaaattatagcaggtcctagcaagctcttttgcaaggttcataatttcctcagatttttctggactttcataaccagaggctcctaatgccagcataccaggagcaaagcaagcgagttcatccatcttgtcagataatgagccaccattcttttcacaaatgtagtagtaattagatggtgtagttttcttggttaaacttactagaccttccattgatgtctcccacatttgtctgtaatgttttacatgctcagttttatttccctggatccagaccttgagcaagtattcgtagaagctatctcccatagcaccaaatgtgatagttgagtatgaagcagtcccagaatgcggatttatgtaaataggaagcaaaccatcactaggatatatcttttgaagctgtctgacgacattctctgccttttgctggtacttgggatctctggtcctctgtgacagagctataaattcaagttgctcagtaccagagtctgcaaggatactatcaccgttggtccatccaggattatgagctcgtccatgagctaggtttattctattataggggatgccggatgttgtatcccaagcaggtaacagtcgatctgtaatatctttagccttatcgagaaatactttatcaccagacagatcgtatgcactaaggagacctccaacaacccttatggtcgtttcaaaaacacttgcatcataatccttgtcaaagtctaatgactccgccacccagtctctagctttctgaaattcatctttcaggcccattatatacagtgtatcaagtgagtcgacaagggttgctccgagaccaccaaagctattgataccattctttgattgtggctgaagctcgtccattccccaggcatactttacgtaggaattccaagcatggagcattgcctctttaactttttccctcctttcattattgacaggatcaatttctacgagatcctttctggaatttttgttactgattgggttttcgtccagatgaactccagcctttcttagctggtcatgcaaccgatttatatcatcttctaatcgagaaatctcagcctcatactcgctgacgagcgactggcggtcccagaaggcgaaggtggccgcgacgaagacgaagaagaggagcgcgaggcgcttgggccgcttgaggtagtaggcggggttcaggtaccgccacgcccccgacgacgaggaagacgaccggcgggccatgggggccgcctccggcgactagatcaccgggatccaagctcgtcgccgcccccggcgaggtccacggcgattcgcgcgtgcgctcgggcgtccgtccccgcgtcgaatgtgtctgtgtgtctctg

SEQ ID NO: 45483 - DNA, 445 bp, Setaria italica
  Peptide Sequence Number=SeqID_111457
ggggatattatctgaggctgatctctctcctggagtggaggatcagcacttgtgggcaccacctcatttgggggaattcacaactagatgaattatcaacatttctttgtgtgatatgttgattttgcaccatggaaggaaatttggaaaacatgggctccacgtctgcagattttttgtttgtctggcctccctgaaaatgcagaacatttggcctgtagaagtgtcgatcacccacagtgtttttaaggcgtcgcctaggcttcacctaggcaacaaggcggtggtggctcgccttgcctaaaggtgtcgccttagcctgcctaggcgtcgcctaggcgataaggcggtggtggctcacctcgcctcgccttaacgctttaaaaaccatgatcacccggaatgatgtccactgtcatcaggaggaggaaaatgtctggcattt

SEQ ID NO: 45484 - DNA, 283 bp, Setaria italica
  Peptide Sequence Number=SeqID_111458
ctagtcgagcccgcgtctcccgtcgagctccaagttcccaaggcgattggggcccgccgccgcctcatcagcatgcggatgacacgagtcttgcggagcctgcccccgggagggcgatgaggttagtccccttcacttgttccgcacttccgcataggcgaagcgaagcctccatcttatagcctataggtgctatcggccataatacaactggtggtacgggcatgaatggctaattcgtcggcaccttgctcccttgtgaatatcgaccaacagtggcggg

SEQ ID NO: 45485 - DNA, 316 bp, Setaria italica
  Peptide Sequence Number=SeqID_111459
ttgtcacgcgcttgttctcattgttctccaggatgatgtgccgaacgaggttgtttgggacatccttaacagtgtgccatttcacagggaactggccactccatctgtcattctgccagtaatcaacactcttgtcaaagtcaacaggtccaatcatctcagctacaccgcagaactgaccactgccattaaccgagaaaaacaagaaaataggacaataatcttctctttcttttgcctcacgataagcagcatttagctttctgttcccgctggcagtgcttgcccagacattatactttatgcttttgtgaat

SEQ ID NO: 45486 - DNA, 378 bp, Setaria italica
  Peptide Sequence Number=SeqID_111460
caggtcgcaataaagatgtgcagcattcaggcaatcaataaaatgaagacaagatggtgtagatctatatatctagctacgcatggaaattgaaattgacgaaatgaaccgcgcgcaaggtttcaacgtaccacagatgaaattaactttaatttcttcaaccatcatcagagaaattaaagttgggcggaagaatcacgaatcatcagaggaagagagatggacctatctaaaacatgcagatcggctgccgacccaagatttcgattcaattctggccaaggcaagcgatctacagagagaaagccggcctgtggaagaaattgaagatgcgtctatgttttccaaggactttcttgaaccatcaacaaggcgctt

SEQ ID NO: 45487 - DNA, 439 bp, Setaria italica
  Peptide Sequence Number=SeqID_111461
cggttcaaccggggcaccgcgttctcgatgacggagagggaccgtctcggcctccgcggcctgctcccgcccaacgtcgtctcctcacagcagcagatcgacagattcatgcttgatctgaaacggctgcagaaatatgtgagagatggaccgtctgatacatatccattagcaaaatggcgcatcctcaacagattgcatgacagaaatgaaacaatgtactacaaggtcctaatagataacattgaggagcatgcgcctattgtctacacaccaacctttggacttgtttgccaaaactacagtggtttgtttcgacggcctaggggaatgtatttagtcagaagatcgtggggagatgatgtccatggtgtacaattggccagctgatcaggttgacatgatagtggtgactgatggaagcagggattttgggcct

SEQ ID NO: 45488 - DNA, 2623 bp, Setaria italica
  Peptide Sequence Number=SeqID_111462
gaataattcgcgcaaaagcatcgtcgagagctacggctccactccccccgtccgctggtacccaggaccacttgacaccaccggccagagcctccccgggaagcagccgccggcgtagggatggcgtccatctcgcggaatctccggcgatccctcgcccccgaccgcctgcgccgcctccacctcctcctctcccagcacccgcgggaatacgtgacggcggagtgccaccgccccgtcgtcctccacaagcgcgggcccgacatcctccacgacccctggttcaaccggggcaccgcgttctcgatgacggagagggaccgtctcggcctccgcggcctgctcccgcccaacgtcgtcttctcacaggtaaacctatggttttgttacttgatctgtgttcaaatgtacacacagcatattgacgttcgagaaaaaatggagtggggttccagccacgctacagctgacatttgaagtagaaaaatgttcagctcattggagatgcgtcaggaaacggagcccataatataggcctaacctctggtagtactaaattcagttgaaactgagatcaatacctttgacctaccacgtggcagatgcacgaaaacaatcaaggctgcttgctttataactagcatacctacacttctgaagtaacatacagagtgcagcctaaagtaaattgtacatgatcatgaacatatgcgaaatagcaaacagagctctctagtctgtcttgtatattattgttggatagacgggactccacatgttcgtcttgacatattcaacggtttcttcctcactgagtcgtgcaagctcacgtgcatccatgtcacggtatccctcagctagatcctctgctaccgcctccctcacaactgctgccgctacctccttagtgatgtcacgtattctggagattggaggataaattatcccttggagaacctcctcttcttccatgtatgaagccaaacgttctgctgcagcctgcagcattccatcagagataacccgagcaccggatagaagggttcctagccctattcctggaaagaggtacatgttattcccttgattggagtggccaatcttcccatcaccaagatccacatcatggaatgggcttccactagcaaagatggctttttcacccagaattgaaaaggcttctccaggtgtacactcagcattcttagttgggtttgacattgcaaaaattgccggtctcgaagaggatgaatcttttagtgcctctagaacctccttcgagaacaaaccaccaactgcagataatccaagtatgacatcaggcttcacctttttaaccacttcaactaagcttgccccctcacttaggccctggtgaccaagctcactctttctcctagcaaaaggtcgtgcatctggatcaatgtctgcacggtcttctgttattagaccatgggcatcaactatccagaattggctcctcgcactctcaaaagcaacctcattgtttcccaacattcttgccatggttctgcttgcagcattcaccactccaataccagcactgccagcaccagcaacaacaatcctttgctttgggaaatctatcattggccttccttgtgcccgtacagctcctaaaaggccagctattgcaacaccagcagttccctgaacatcatcattgaacatgcgataagtctttctgtaacgctgcaacagcctaaaggcccatttactttggaaatcctcaaactgtacaataacattaggccagcgagtaaaaacagcttccatgaattcatcaataactgagacatattcatctccctcaagacggtgctcttgtagcccaagataaagaggatccttaaggagcttctcattgttcgttccgacatcaatcataacaggaagaaccctgaggaattccagcagcagcaacatataaatccaatttcaaaacggctgcagaaatatgtgagagatggaccgtctgatacatatccattagcaaaaatggcgcatcctcaacagattgcatgacagaaatgaaacaatgtactacaaggtcctaatagataacattgaggagcatgcgcctattgtctacacaccaaccgttggacttgtttgccaaaactacagtggtttgtttcgacggcctaggggaatgtattttagttcagaagatcgtggggagatgatgtccatggtgtacaattggccagctgatcaggttgacatgatagtggtgactgatggaagcaggattttgggcctcggtgatctgggggtgcatggtattggcattgctattggaaaattggatttatatgttgctgctgctggaataaatcctcaaagggttcttcctgttatgattgatgtcggaacgaacaatgagaagctccttaaggatcctctttatcttgggctacaagagcaccgtcttgagggagatgaatatgtctcagttattgatgaattcatggaagctgtttttactcgctggcctaatgttattgtacagtttgaggatttccaaagtaaatgggcctttaggctgttgcagcgttacagaaagactttattcgtctatgttcaatgatgatgttatttg

SEQ ID NO: 45489 - DNA, 469 bp, Setaria italica
  Peptide Sequence Number=SeqID_111463
attctagacaaacatttacataaataaaagagagaatttgtgatgtggcagtatggcatgtaggtttgatggttagccaacaactatccagttttgaaccatggaatggctttttctgtgcgtattaacatacaatagacttccggggtagctcctgatggaattcagtagcctcgtcggattccatgagtaaaatacacatctttccaaccataggagttcattgtataatatctaccgtgctgtctaattttcttaagtatcactactagagattaggatgcatcagtatcataatattttatactattcttgtctaataatatagaacagtgcctagatctgtaatctgttgtgacttcttgatctgtgtcgttaggaaaatatgtccagtttttagtggttgggaaaattacactgcatgaattgtccttttaaggttgagtgactggccaccagacttgaaaat

SEQ ID NO: 45490 - DNA, 261 bp, Setaria italica
  Peptide Sequence Number=SeqID_111464
ctgtgatcttcgtctgttacgtgttgccaattttgttctctgaaccagttgacgctgtttttcccctgtttctttcgcacaattgttcatcatgcttctgtaccattttgccatgctcttaccttgttgacccagtgcagcatccaagcatttgcaaagatgttaaatgtttggctctctctctgtttccgtagacacttggaaatttcactctattttctgtaacttttggagtgaagtggaagcaacgaaaatttcaag

SEQ ID NO: 45491 - DNA, 496 bp, Setaria italica
  Peptide Sequence Number=SeqID_111465
ccaccagcagagcctgaagaaagccgagtcgcccccagcgcccgacgcggccccgatccgcagcgacaaggacctgatcgccagcgaggggaccgccgcgcccgcgccctgcccgccctcgtgataaggagaccatccatccggtcgctgtagtggggggttggcctccgcctgtcgtccatgacaacgaggtgttgtgttgctaggattgattggtgcaatgtttgggtttgtgcattctttggggtgtgatgtgatgtaaagagaaaactgggttggtttggtttgttcattcttgcatcctctgtctgctggctgctgctgccgtgcctgctgctcctccctacctccctgatctgtaatttttgtttgtgcattttgggcgaaggttgtaggaaaagatcgtcaaatgtaattcagattggttggggacaatttgtctgtttgggtgggtttttttttgtatctgatcgatcattcaaaaaatgcatgttcc

SEQ ID NO: 45492 - DNA, 473 bp, Setaria italica
  Peptide Sequence Number=SeqID_111466
tacgctggctctaacggcgggggcgggggctcgtacgcgggctccgacgccggctcatacgcggggtcaggtggcccgcactggggccctggtgctggctcgtacgcgggctcccatgccggctcgtacgcaggctccaacggcggaggagcgggctcgtatgccggttccgaggctggctcgtacgctgggtccggcggtggcccgtacgggggcgccggtgctggctcctacgctgggtctcgagccggctcctacgtgggcaatgggcacggcaagtgagccgtgagcgagctcagatcccgtgccgatacagtgatgcttgcttgttcataagtgtttgcagcctgattatttgtgtccacaagtaaatcaattatgagtgtaacccataaataagtaacggtgaataagtgctagtgtatgagtatggctcccgatgtaaacattaatatataatatatgaaatgaat

SEQ ID NO: 45493 - DNA, 470 bp, Setaria italica
  Peptide Sequence Number=SeqID_111467
aataaatatcaacaagctgggagcactgccagtgaagtcagaggctgtccaaaatggcaatgtcaaactaagctcatctgaagtccctaacaccgatgttcacccagcagtctacagcagtttgactgagacaatggcttcttctactggttctgccccagtatcgaagccatcacctccaccagttatgccacctgcagcctctacacctccaaaggctccttcatcaactcctcaagcacctgcaccaccttcaaaacctgctccagttcttcatgcagaatcctcaccgctaccttctccaaaaactgcgcctccaccaaaaaatgcacctccgccaaacactgcacctccgccaagcgctgcacctccaccaaaagctgcacctccaccgccactgccaaaatctaactggcccagctggcccaccacctccagcaatgcctagttcgtcaaaaacacgtccaccg

SEQ ID NO: 45494 - DNA, 2247 bp, Setaria italica
  Peptide Sequence Number=SeqID_111468
tcggttcgttctagtttttttttttttaccatagcatccttttgattaatatcaatggagtacatcgtaaattcatcaagcttgccaaaccaacaagttcacatagcaatggcaaaaacccaaacagtttcttccctgattagacttcatttattccaaccaactatccctgtgcataggaaacgcaaaatgctatactcaaaagtgttctccggggcagcgacattctcatgccacaacgcaaacccccaaaaagaaatgagctcaatgaggctttgcaagttgatcctactaatccagcctaacactggcagcatcaaaaaagggtaaacggaaaatcagatcattctgtgttggttgcgtgctcttggtttccaggtcctcctttagaccgtcacgagattatacaaaatggagacaccactttcggggtggccgagttgagttattccacagcttcacaagaattgtctgccttgttggtcatcatcctaaacttcacagcagcattgaggttgggttctcgatgtagcccttgaatgctttcagaaattccgcaccaattgcaccatcaataaccctgtggtcacagctcagcgttgctgacatgaacgaaccgaactcatactgaccatcagcggaaccgggtatcaccctcttctcagcagaaccaatggccaaaattgcagactgaggaggatttatgatggcgcagaattgcttaattccaaagggacctcccaagtttgataccgtgaaggtgccaccctcataatctgctggttttaaggtgttatcccttgctttttgagccaactgcttcacctcctcggcaattgtaccaagtcccttcttgtctgcgtccctaattactggaacaaacaatccatgttctgtctgtacagcgacattgatattcacattgtggtattggcgaataaagtcgttcatccatgagctgttacattgagggacctttcgtagagccaaagctgcagccttgatgacaagatcattgatagatattttctttccaccagaggcatcctgcagcggattcagttcacctcgcaacttgacaagtttgtcaacacgtgcatcaactgtcaagtagtaatgtggaatggtttgtttagatgctagcaggcggtttgcagtaacctttcttatctgtgcatttggaatatcaacataacctaagcctggagctgcaaaagcctcactctgtccacccttggccaagtagtcttcaatgtctgccttcaaaatacgcccatcaggacctgtacctttcacacttgacagtgggacattgttatcttcagcgagtttccgggcaagagggctggcaaatatgcgatctccagattgagaagcttcctcattcttcggggccttgggctcaggagtcttagtaggcgctttctcctcaacctttggctgtgaaggttcaggttgagcctttgattcagcaggagctacaggttcagctgaagatgatggcttatagtccttaaacttctcaatgtcagcctcttcttccacagttatagcaattatctcgccaactttaatctccttggcaccatctccttgaatgatcttagcaagatagccctcttccatgcactccatctccacagtggctttatcagtttccacctcgcagagaacctcaccaggggagaccttgtctccttccttcttaagccacttggcaatgtttccctcagtcattgttggcgaaagtgatggcattccgatttcttgatggggtgggcagatctgcactacttgagaatggccgtgctgaagccacctgtccacatgagaatggaccattgacaccactaacagcacttgggataaggctgttggatgctcttgtccaagtgtagcttctgcttactcccagtgcaaatgtctcgagctcttttgcaggctggctatgcttggaaaatctggcgcctccggttctttttccaacgccattttccttgacaaaggagccgggactgctagagaaataccgaacaagaccagaacgctcgcaacctacagcattttgcaaactccgcagcttgcgggagtgacggagaagctgtgcggcggacatggcgacctgaggcaatgggcgcgtgggtgggtctagggttcgggctccttttggatgggatgcggcggcggccgcggaggagagtcggggggaaggagggagggaggaggaggggggaggggagggaggag

SEQ ID NO: 45495 - DNA, 802 bp, Setaria italica
  Peptide Sequence Number=SeqID_111469
tcacaaagtactgtctacagggactcccagtgccacagaggcgttaaaaattcgagctccatcaatatgaagcttgaggtcatgattcttggcaatttcaccgaccttatcaatgtattctacagataaacattttccaccacaattcccatgtgtgttctccaagcagatgagcctggtcgtcgggtaatgcagatccggatgcctgatggccgcgacgatcttgtcaatatccatggtgccatcggggttgttcctgacggtcttggggtgcacgccgccgatggtggagatgcccccgttctcgtagacgtggatatgggagtcgtcgccgaggatgacctcgctgcccctgacgtcgcagtgcacgaggacggagatgaggttgcccatggtgcccgagggcacgaacagcgcggcctccttgcccatgagcgcggccatctcctcctggaactgctgcgcggtcgggtccacgcccacgacgtcgtcgtcgacgacggccgcggccatggcggcccgcatggcatcggagggcttggtgaccgtgtccgaccggaggtccaccaccttgctcgccatcttggtgctgctcctactgcaaactccactgcaggggagcaacaacggcagagtctcgcgatgaaatatcgtcgcggaagctcaagaattggatgctgcacttggggtgggtgggtgtatcgtgtctttcagatacggttgctttatcctaaaaaattgccaaatctatcgcactttgggaagcaccattgtgtggggggtttgcatgcagatacttctt

SEQ ID NO: 45496 - DNA, 491 bp, Setaria italica
  Peptide Sequence Number=SeqID_111470
aataaatgcatcttttgtgagtgccaagggtctggcctgcacaggtggaccttaccattgtggtcgtgttggtgcaccagggagatttcaaggctgcaatcgagtacttctagcctctagcgtcaacatgccattgcaattggagaactttgtaacctggagctctgcagccaaaatcagaacacacattgatgaagaaaaagaataaataataaagaaaccaatgtctccagcaggtcggctgcagaaggacaacaaaatgctgtaatttgcgtcacattatgacaaacagaaatgtagcatgcatggtagcagaaaatagctttcactaggttatcgctacctcaccgatatagctgaagtaaaatataagggttcggtaattttcactccagctcctcttctaatgtttcacacgacctcccccaaccatgagtctaaagtctaaactctaatgagctaacttagacattacagaagtcgtgaatcat

SEQ ID NO: 45497 - DNA, 775 bp, Setaria italica
  Peptide Sequence Number=SeqID_111471
ttttttttttttttgattcaaaacttcatcatattcctctccgaataatgtgaacatgcactcaacagagatcatgcatttcaacagtaaccaggtgatacaacatcagttgagattgaggacatattgatctcaaggaaaatttgagcttatacaaaaaaaatgtatatgaaacaaaactgagactgcaaaactgatgtcctagaaactttgacgcaaaccaataatagtacatgaccatacaaatgagttggcccatcagcacacctaacatgggcatttttcaagaacagatcatacgaggtttatttttaggtcgccttctctttccactattctgcatttttggttgactggtcaccagtgcatacattttgacagcaaatagttcctttgggagctccttctggtcctgaacactgaggatatataatccacactttttaaatagctccctaaagtatggatcggatctagtgacactgttatccaccttgtctaacacaaatccatttcttgcaatgttctctttcagaacaaaaaatccatcaggtttcagcccaaccttggcacgattaaaaaatgaaatgaaatcatcatcaggaagttgccctatgcaccactgaatccatatcacatcatatcttccttcctcgggagtaaagtcctgaagtggcacacagtaaaagttggcagccttgtgtgagtcttctccttggtccatacatccagtaagattttcccgtgcagcttcaagaaaatgagatactggctc

SEQ ID NO: 45498 - DNA, 511 bp, Setaria italica
  Peptide Sequence Number=SeqID_111472
cctagccccctcctcctccgcccccgcccttctccccgcggcttccagcggctggggacgaagccgccgccatggcgaccctcctcaggcgcgtctcgctgcggcgcgccatcgccgccgcctcctactcttcttctcaccctgagagctataagcaagggatctgtggctccacgtttcattgccgagagttctcatctaaagcgaaaaagaagtcaaagtcaagtggaactgactctggtgaggagaatatgtcgaagaaggacttggctttacaccaggctatcgatcaaataacatcagcatttgggaagggggcaataatgtggcttggccgttcacaaggccatagagatgtacctgtaatatctactgggtcttttgctttggatatggctcttggaactggtgggtttccaaaggggcgtgtcatagaggtttatggtccagaggcttcaggcaagacaactcttgctctacatgtcattgcagaagcaacaaaagaatgggg

SEQ ID NO: 45499 - DNA, 1401 bp, Setaria italica
  Peptide Sequence Number=SeqID_111473
tctgatgcccccagcccgcgccgcgggaaaacccccctccccccctccccaaatggcgcattccaacggcgaggccaccgccgccggcgacggagaggtcgccccggtgccgcgccccctcgcgccgccgcgtaaggtggcgctgatcacgggcatcacggggcaggacgggagctacctcacggagctgctcctctccaaggggtacgaggtgcacggcctcatccgccgctcctccaacttcaacacccagcggctggaccacatctaccacgacccgcacgccgtgccctcgtccccgcgccccgcgatgcgcctccactacgccgacctctccgactcctcctccctccgccgcgcgctcgacgccatctcccccgacgaggtctacaacctcgccgcccagtcccacgtcgccgtctccttcgagatccccgactacaccgccgacgtcaccgccacgggcgcgctccgcctcctcgaggccgtccgcctcgcccgcaagcccatccgctactaccaggccggctcctcggagatgttcggctccacgccgccgccgcagagcgaggacacgccgtttcacccccgctccccctacgccgccgccaaggtcgccgcgcactggtacaccgtcaactaccgcgaggcctacgggctcttcgcctgcaacggcgtgctcttcaaccacgagtccccacgccgcggggagaacttcgtcacgcgcaagatcacgcgcgccgtcggccgcatcaaggtcggcctgcagaccaaggtcttcctcggcaacctcaccgccgccagggactggggattcgccggggactacgtcgaggcaatgtggctcatgctgcagcaggatcagcccggtgattacgtcgtcgccaccgaggagtcccacaccgtggaggagttcttgcaggctgcctttgggtatgccgggctcaactggaaggaccatgtggtcattgacaagaagtacttccgcccggcggaagttgacagcctcaagggggactcgaccaaggcgaggagggagctcaaatggaagcccaaggtcgggttccagcagctcgttgagatgatggttgatcatgacattgagctcgccaacaaggagaaggtcctggtggacgctgggtaccgtgatcccaagcagcagccatagaaacagcacaaatggcttcttgctctgttggagcttgaatttggggattgttgccctgtagctcatacattgtggctctcaaagtagaggttgactgaagttactattgctatgtttcttggatcagaaataaggatgcttgcagtttgatcctacagtatcttcatttacattttcttttgactatgctacgcgattaatcaaatgaatgaatgaatccacacaaatttaaa

SEQ ID NO: 45500 - DNA, 584 bp, Setaria italica
  Peptide Sequence Number=SeqID_111474
taaggtaacgtaactaagctggagtacttgaatgatgaggaagaggaggaagatactgacgatgacgatgaggattcggaggatgatgatgtgcgagaagagacggaggaagaattccttgaacgatatgcgctggcggctgcgggtgagtcgatcgaggttgtcgaggaaggagatctggatgaggaaacccaagacattgaattgggttctctggatgaagtggacgtgcaacaagtgatcctctgtctggtgcagaaccagcccgctttgcaggcccaaacgttgccgggcagcctagtcgagcggatcgcagaggcatttcctgaatatgaacatttggcccaaattcatcgacaagcttaagaggacaggaaacatgtgcagattttttctagtgtttatacgtatcttttccgttaacatttattttttttggcgtcttgagtgctgttcctctgcgagggtgacattttgctcttatatttcatctgtggaattgtggatggaaaaatgtttaagcacttaatttgtagccaggagctaaggcgtgtttttttggcaaaaggaaaaaaaaaaaaaaa

SEQ ID NO: 45501 - DNA, 491 bp, Setaria italica
  misc_feature (486)..(486): n is a, c, g, or t
  misc_feature (489)..(489): n is a, c, g, or t
  Peptide Sequence Number=SeqID_111475
aaacaaagtaaaagaactaaaataaagaaccgaaccaaattaacctaaataccaagtaaaaatagttagacaataccaataatcacagtcggacatattccgctgatggcctgaacccatatgattctctgatgaatcagaattgctaaatcccacatgatttgcactgatacttccccatcgataaacaaagcgaaggtagctcccaaacaataagaagaatgacacaaaggtccactcaaacatcagcagcaatcctgtccatggcataacctgccgtggaatgatagcaaaagcaaaggccagagagaaaccagcagacacaaagcagactagcactgcgattgccccaaataaagaggaagctttgaatgtgtgtaattagataaccataaactaagaacaaagaacaaagtaagtaacaaaagaaacaaaaccaaaataaacaaaagaaaaccgaaaacaaaataaacaaaataaataaanaanaa

SEQ ID NO: 45502 - DNA, 415 bp, Setaria italica
  Peptide Sequence Number=SeqID_111476
cgtatgaatttaggattccatcatttatgttccttcagaaagctgccatcacagtatagctaacacggtggagtaaccaacaacatttaacaacaaatagcagcgaatgctctatagccgagatttaccgtgtgcgccaaccgtgcagtagacacaacatttgggaacatatttaccactagttgacagcgtgacgtcagtgctacaaaaaaggggccctgggcaggcaaccatgtgttaaaaaggaaccatcattctttctgtttgtgtacaaacctacaatacaacagggatcaatggtgtaggtacaaaatttacgtggctttaaaaacaagagcttctagttcttgacccatttctgtctttctgacccttgttgaaggctgagatagcaagatgctctgcagcatatgtc

SEQ ID NO: 45503 - DNA, 678 bp, Setaria italica
  Peptide Sequence Number=SeqID_111477
agactagcactgcgattagcccaaaataaagaggaagctttgaatgtgtcccatttgataactgcagcagtgtcaaagcaaccatcagaccgacatcatataagcaatatgcttcagtaagaatatcataaaaggatgtgaaagaaccaggtttaaaattttcaaatagagcaagatatcctcgtggcccagttttgcgcaggatggacgcttaatcaatagtcgaaatattcgaatcaaggtccgaagcaggcatttggaatcatgaaagaaacctctttagatttcataattgttccaaaaggtgacagaatgatataataagcaacattcagcagtaatcaaatttcaagttgaaatgcggatttgttgctgaagagcagagggctaaccctttggttagaaatactgaatgaagatgctgaaccaaccactgaataagatggaagtgactcttcagacttgtatttgtggcgagctcttctagcaaacgcacatagagatcttaaaacttatcaactccttgtttgtctgaaaacatgattggtaataaccaaataacagcaagcaaaatgggagaatgaacaatatttttacaactagctggtcatgagggttccttccccacagttcctgggagagattcttcaagtgtttgcctaatatcctgccatattt

SEQ ID NO: 45504 - DNA, 544 bp, Setaria italica
  Peptide Sequence Number=SeqID_111478
ggctcggaaccgaacgtgagcatgatcatcacggactactggatgccggagatgactggctacgacctgctcaagaaggtcaaggaatcgtcggagctcaagcagatcccggtggtgatcatgtcctccgagaacgtgccaacacggatcagcaggtgcttggaagaaggtgctgaggacttcctgctcaagcctgtcaggccgtcggacatctcccgcataaccacccggatgctactgcactgagctctgcttggatcagtggccaccgcagtcaatcgcattgttattagtagtgttttgcagtaatagaactcgagtaaatttagaatagctattagtttgcacgatgtgtaatgcagttggggaatgctcctgctccttaattaaatagctttgggttatctttgtgtgtcattctcggaaactagtagcagcaattagctgtaggattccagtagcgagtttcttctttccctaagatttgagatgtgtaaccagtgcatgaattctttttgtttaaagtaggattacggtgcctgat

SEQ ID NO: 45505 - DNA, 866 bp, Setaria italica
  Peptide Sequence Number=SeqID_111479
tttttttttttttttttgttgcaattcgatgctttttctataatttcaggagccgattgtatttgcatgtatttttgaactgaatgtcaacgctacacaaccgcgacatgaaactcctattctttacacaggttcgctgtacacatgtttaaccctatcgcaaccgacggctttgtacatccaacatctacggtcagctgaacaaatagaaccaaggtataaaagggaaagggggttacacgtccggatttaagatctagacagtagacacaggtatctggtatctatagcgatttctttccataagcgaactcccaagcttctatactgatctccacacaaggctgattgatgagttgacggtacatatcatgtgcctggaggcctcagcaaaatcaagttggccaaatcttcattcatctttacaggaaggggcggcatctgcctcattatttcaggaacatcatttacctctttcagaactgtaagtatattgtcccttgtttggcctaaaagagagaggttatcttgtacctgcatgtttgaaatatttgaatggatttgatttaagatctgcgcattgtgctctaaaagctgtccagttgggcctccaatagctttgtatgaaacatcatcatcatcgatagggagaacaggaactgtatatgatggagcattaggtcgtgatactatgtgtgctggaccttttgatgaagagtcaccaactctttccttcttttctttgcttttcttagataattcctccttccttttcttgctacactcttttttagccatccatctgcagcgaagggccacatctcgcactgtcttgtccggcagagtcatcgcaatttttgcgtagc

SEQ ID NO: 45506 - DNA, 328 bp, Setaria italica
  Peptide Sequence Number=SeqID_111480
cgggcgacttgcggatcttgtcagatagctcggcgtcgaaggcgtcgaggtcctcgatggcgacgttgacatggtcgcggttgtgtactaggctctcacggtaggggaagtcgccggtggggccggtgaaaccgcggaggaactctttgaacttgcggagagcggagtggcgggtgaggtcggcggctggatcgccgccggggccgccgcgggggaactgcgcctggtcgctgtagaacacggcgccctcgtcccaaccagacatggctgctgcggcggcggcggattagagagggatgcgggtgcggtgggcatggactgggaggat

SEQ ID NO: 45507 - DNA, 943 bp, Setaria italica
  Peptide Sequence Number=SeqID_111481
ttattccctttcttccttgtcttggtccttcttctttctttccccccttgtccttgtcctaccaatcatatctcggcttccatataacgatcgatcatcgtcaaggtcgtcggttggcggcgcacgcagaggccgaccaaccggacatcgaccgactggccggcatggcgaagcagtcgtgctgccacaagaagaagctgaggagagggctgtggtcgcccgaggaggacgagaagctcatgaaccacattgccaagtacggccacggctgctggagctccgtccctaagctcgcaggacttgagaggtgtggcaagagctgcaggctgaggtggataaactacctgaggccagacctcaagaggggcaccttctcgcaggaggaggaggacctcatcatacacctccattccttgctgggaaacaagtggtctcagattgcggcgcagctgcccggccggacggacaacgaggtcaagaacttctggaactcgtacatcaagaagaggctcagggagcgcggcatcgaccccgccacccaccagccgctagccgagcccgccgccgccccctgccgcgcggtgttcggggacgtcgtcgacctcatcccgccaacgacgacgccgcttcaggcgccactcgcggcggactcaatgccgctggacggcgtgaagctcccgctggactggcccgtcgccggcaccgccgcgccgcccccgtcgtcgctgtcgaggtcgtcatgctaccaccagctgcaaggggcctgcttcgacatggacgcgctgcagcagcactgcgccgcagccgccgtcccggcggcgccggtcgtcccgtcggcgtccagttccagcacgctcacctcgatggcagaagccgaacactgcaacgctagcgtcgccggcgccgacgggctcccgtggctggagctcgggccgaacgccgt

SEQ ID NO: 45508 - DNA, 544 bp, Setaria italica
  Peptide Sequence Number=SeqID_111482
ggtttcacaacttcacttgctaataagcagaagcaaagtaatactagccgactgaacgcaagatcagagctgttaccaacttaccattgagttctgggaacgagcgtttcctcgagccggtggcgccagacaccgatcctccctcgccttcgatggccatgaagtacgactccctcgcgactgcttggaccgcgccgatctgcaagaacacacggcagaagcagaaccgagtggatgagagacggggaaaggaaaagagcctggttcgatccctggtcgaagacgggagtgagcagagggcgtgacgcgtcgcgcttaccccggcggccttgacgaagctctcggcgatgcggttgaggagcgggtggccgaggtccagcatccagctcttcccctccaggccgccgcgaacctcgtccgcgaacgcccgcgcctgcgtctccatgctgccgctcatcttcctgagttcctcctctctgccgctctccctcttggcttgctgcgctgctgaagtgcacaggtgaatgcagatggcagtgcacgc

SEQ ID NO: 45509 - DNA, 491 bp, Setaria italica
  Peptide Sequence Number=SeqID_111483
actacgtaatctcgtatactgtagttccatctggtgaggccaatagacctcggaatgagcaattcccatccttgtcacgataagcataggccgcaattggagttcggcagttaccatcaagaactgccaagaattctctttcacatgcaacagctaatctggtatcttcatggttcaatgaggacagatactccatctacaaaaaaaagggcaaataatgggggctctcatcttctttggctacaagattgttaaaaagccatgaaccgattcaaatatttaggacgctctatgtagctgcgtatgactttcatgtacattgcagaataaaacagaaatgtgcactcagatattagaaatattctatctagaagtattgtaaatcgttgtttctcaaagattaaatacttttggaaaacccaaaacatgcagcatggtcaggataaagcagcgataaataagattgagattgccctaggaacataaaaatg

SEQ ID NO: 45510 - DNA, 1677 bp, Setaria italica
  misc_feature (1)..(45): n is a, c, g, or t
  Peptide Sequence Number=SeqID_111484
nnnnnnnnnnnnnnnnnnnnnnnnnnnnnnnnnnnnnnnnnnnnnttttttttggtgatgggctcaatcacgatactactcaatttcaataaactatctgcaaaattacatcagattacaatgttacaacatagctgcgcagatacctctgacaatactcggggattacgaaaccatggacgttcaggttctaacccagagtgctaaaagaacaggcgatacatatttggatggggttgctcaacatctggtacaaggctctagcagaactaggaggaagaagaaaacaaaaacaaacctcccaacactctacttgggccgtctgtttctaaccaaaagagtggcaatggaaagtgcacgccgtagtctgttcttttcattgcaagctatcaaagaagccagggccagcctttgccttcagctcatgaccagcatctttgcccatagcaaccatgtcatcaaaagagtacggtccacttcttgttgtctcgtatactgtagttccatctggtgaggccaatagacctcggaatgagcaattcccatccttgtcacgataagcataggccgcaattggagttcggcagttaccatcaagaactgccaagaattctctttcacatgcaacagctaatctggtatcttcatggttcaatgaggacagatactccatcattttgtcatcactgcttcggcaagctattccaatagcaccttgggcaactgctggaagcatttcatccactgataataaagatgttgcattttccgtcatgtttagccgctttagtccagccagtgccaacaacgtagcatggacatctcctcccttgagtttctttaaccgtgtctgaacatttcctctgaagttaactactttcagtgatggatatctatatagaatctgagattgtctccgcagggaagcacttccaataatactaccagcaggaagctctgcaagcgaatttgcagtcaagcttatgaatgcatctctgacatcctctcgtgggaggttacagggcaatattgttccatcgggaagatatgttgggacatctttcattgagtgaactgcaatgtcaatcgttccattcaagagtgcttcgtctatctccttggtgaataaaccctttcctccaatatctgcaaggggtttgtccaagacaatgtccccagtggtctttatgatgatgatctcaatagccccctcctcagccaactcagagtgtgcagctttcagtttgtctcgagtttcatgggcttgtgcaagagcaagaggacttccgcgcgtcccaatccggatgagggagaccttggcctgcgcgccggcctcgacggcgacggcggcgcgcacgacggggcacgcccgccggcgcgggctacaaaaaaagggcaaataatgggggctctcatcttctttggctacaagattgttaaaaagccatgaaccgattcaaatatttaggacgctctatgtagctgcgtatgactttcatgtacattgcagaataaaacagaaatgtgcactcagatattagaaatattctatctagaagtattgtaaatcgttgtttctcaaagattaaatacttttggaaaacccaaaacatgcagcatggtcaggataaagcagcgataaataagattgagattgccctaggaacataaaaattg

SEQ ID NO: 45511 - DNA, 518 bp, Setaria italica
  Peptide Sequence Number=SeqID_111485
cccggatgcgttttcgagataaaagcaccctaccaaccgggattaaagctcacttctctaccagtgaataatgaacaagatgatgcaactctagttgctggaggcagaggacgtggacgcggcaggaatatgtgtgcttagtctgtttgtaattaaaaattaacttacctatatgtttacacacagggtggatctagcattgaggtgggcagggctcaagcccccttaccgtatctccgatatggaagccccccctttaactcccccacgattttggaggaataaggaggaataagaagaaaagggaagggagaaaaataaggagcaagaaggagcccctcctaaatttaggggctgcatcggccactgtttacacatgtggcactaatattgttcgacaacatctttcagccatctaatattgtcgataagctacattgtatgtaagtaaatttaggaattattcatgtgttgtaaaaaaccaattacaagaaagaaacaataattactatgtttgg

SEQ ID NO: 45512 - DNA, 1457 bp, Setaria italica
  Peptide Sequence Number=SeqID_111486
agctagtctccggccgggatggcgtccatgaagctcggctccaagcctgacgccttcaagaggcaaggccaggcatgttccctttgctttcaaagagtgccttccttgcacgatcgatagaagagaattcagaccaagaagaatgtgtcataaaactaaatgacattcctgggggtgccaagtcatttgagctagtcgcaaggttctgttatggtgtgaaaatagagctttctcctgcaaatgttgtctacctacgatgtgcctctgagcatctagaaatgactgaagaggtagctgaggacaacctgatttcgcagtcagaaatcttcctcaaccaggtggtcctccgcaactggaaagattccttgacagcattggaaacatgtgatgacttactccctcatgctgaagaccttcagattgtgaagagatgcatcgagtcgttagcatccaaagctactactgatccaaacctctttggatggccgataagggaacatggcatcatgcaaagtcctggtggcagtgtactgtggaatgggatcagcacaggagcaaggcccagaaacttcaatgcagactggtggtatgacgatgcttcatcattgagcttccccatgtacaagaggttaatttccacaatggagtcccgaggcatccgccctgagataattgctggttctttgacatactatgccaagaagtatctcccaggactcaataggcgtcatagcatgggcacagtgcctcttactgctactctatctgaggttgaacagaaaaatttacttgaggaaattgataggctattgcccgttcacaagggtatagcatcaacaaaagttctgcttgggctccttcgcacagccatgattctgaaagccagccccacatgtatctccaacttagagaaacgaattggcatgcaactggaccaggccactctggaggatctactgctgccaaatttctcctacacgatggaaactctgtacaatgttgagtgtgtgcacaggattcttgatcatttcttggcaatggaccaggctaatggcggtgactccccatgcttggatgatgtgatggcatccccgtccttgacaccaatcacaagtgtagccaagctgattgacggctatcttgcagagattgcaccagatatcaatttgaagcttcctaaattccaggctttggcatctgctgtccctgagtatgctcggccattggatgatggactctatcgtgccattgatatatacttgaaggcacactcctggctatcagaagctgaaagggagcagctctgccgcctgttggactgccagaagctctccctggaagcatgcacccacgcggcccagaacgagaggctgccgctgcgcgtggtggtacaagtcctcttcttcgagcagctccatctacgaacctcgatcgccgggtgccttctggtctccgac

SEQ ID NO: 45513 - DNA, 901 bp, Setaria italica
  Peptide Sequence Number=SeqID_111487
taacgaacaaagaaataagtaagaacaagaacgaactggctatcagaagctgaaagggagcagctctgccgcctgttggactgccagaagctctccctggaagcatgcacccacgcggcccagaacgagaggctgccgctgcgcgtggtggtacaagtcctcttcttcgagcagctccatctacgaacctcgatcgccgggtgccttctggtctccgacaacctcgaggggtccagacccctgcggagtggcattgcaacctccggcgaggctgggggctgggccactgcagtccgggagaaccaggttctgaaggtgggcatggacaacatgcgaatgcggctggccgagctggagaaggagtgctcaagcatgcggcaggagattgagaagctgggtgggcgcagcagcaagggtggtggtggtgggtgggcctcccgagtcgtgccgcggcggctcggcctgaaggtgaggtcgcagatgtgcagcgcccaggagggctccgtcagcgagcagcagaggagcatgagtgccaagctcgacaagctacaggccaaggtgacgaagcagaagaagcagctggccgcggatgcctgaagtgaagttctggagactccagctccatggcctgaccttgtaattttagcccggtgttaatcacttttgcctcttttgttgcctgtagtagctgctaggctaaacgtctgaagtgcagtggttgaatccgtgggtgagaatccgaagtgctcccgtgttttgactgaagtagcagctgtgatcagtagctgtaactgtaacgacttcgtctgcttacttggcaaccgtgatctgtgacatgtctgctgttagtgctacatgtttattcgcagagcaatttggtacctaaaaaaaaaaaaaaaaa

SEQ ID NO: 45514 - DNA, 414 bp, Setaria italica
  Peptide Sequence Number=SeqID_111488
tatcaaaagaagatataccatctattgatgccgccttcttttctgaagagccttcagataagaaggcggcatcaaaagaagatataccatctattgacctgaaagggagctttgatctcactgaagcacttcgtctccagttagaacttcaaaagcggcttcatgaacagcttgagattcaaagaagtttgcagctaagaattgaggaacaagggaagtgccttcagatgatgcttgagcagcagtgcataccaggggcagaaaaggcgactgatgcttcaacctcagcagaaggatcaaagatatcgtctgaggttccggaatcttctactgcgaaggagttccagaaaccagtcaaaatggactaaccaagcaaacagaatcaggtgatacccgatgaagttgcaagcaggt

SEQ ID NO: 45515 - DNA, 979 bp, Setaria italica
  misc_feature (942)..(979): n is a, c, g, or t
  Peptide Sequence Number=SeqID_111489
agcgctttgtagatgctgtcaatcaacttggtggcagtgaaaaagcaactcctaagggtgtgttgaagctgatgaaggcagacaatttgaccatttatcatgtaaaaagtcaccttcagaagtacagaacagctcgatatagaccagaattatctgaaggctcttcagaaaagaaggcggcatcaaaagaagatataccatctattgacctgaaagggagctttgatctcactgaagcacttcgtctccagttagaacttcaaaagcggcttcatgaacagcttgagattcaaagaagtttgcagctaagaattgaggaacaagggaagtgccttcagatgatgcttgagcagcagtgcataccaggggcagaaaaggcgactgatgcttcaacctcagcagaaggatcaaagatatcgtctgaggttccggaatcttctactgcgaaggaagttccagaaaccagtcaaaatggactaaccaagcaaacagaatcaggtgatacccgatgaagttgcaagcaggttcctccccagcgttgccatgaaatgggtttgatgatctgactggttgttttcaagcttaagtcgtttttgtcctttggagggaacagatatgaactttgcaaagcctggccaagtgcgtgtaactagcgttagttgtacagtgcccaccatcacggtaccgatgaatccccgtgttatgtggatgatgtagggttcagaggatagcgcgagcacaattgtcaggggtttgacattcttgctttttctcctttgttagggatccagtcatccagtagcatctggtagccatttgattatgggctaatccaagtatttacaataatcttcagcacctcctctcttgtttagaacatggcatggtaccaaaaatatgatcaaggatttattaccgttgtacggtaggtaaaaaaaaaannnnnnnnnnnnnnnnnnnnnnnnnnnnnnnnnnnnnn

SEQ ID NO: 45516 - DNA, 311 bp, Setaria italica
  Peptide Sequence Number=SeqID_111490
taaattaggaataattggacctctttgattatgacacaaataaggcactgaacataataagttcgaaaagctagtgttagacatgaaggaaataatagtagcctatacataacacacactaacgcttcctcgcctcccatgctctcctcggccagtttaatctaccatttgatgtctttaaagtcataaagacatcacgattctcccttttacaaggaagttgtgtggcataaaagtgttcatcactatcctctttagccccatcctgaatgaccaagtccatcaattgagtgatctcatctctaacaggg

SEQ ID NO: 45517 - DNA, 627 bp, Setaria italica
  Peptide Sequence Number=SeqID_111491
tgtaccgaagactcgtggtcgaccgcggcgtcgtgcccgtggcgctcgccgtcgagagcagcatgttccacggcacgacggcgagcgggtggaagggcgtcgaccccttctactacctggccaaccccaggatgtgctacacggtggagttcctcgacagggtggacacggcggcggtggcggaggggaaggcggccagcaccgacgtggccaacgccgtgcagcggcgcatcgcggcggcgctcgggtacgagtgcaccatgctcacgaggaaggacaagtacctcatgctcgtcggcaacgacggcgtcgtcgcggcgccgccacggcggacgcgcgccgacgatatgcgtgtgcccgttcgtgctcccactggctgcacataaccgtgtccgattaatgaaaatcgtgccacactacacgtacagtactcaaaagagaaaaaaaattcaggggaaaatagaaaaaatagggactatattattccttttaagaacggtttttgtattttgtaagatgcttgatgccttgacctctcttttttccccactttttgtgaatatacgatgtaatgtagaggttggtgtgtataaaattaagggaatgtacttaagaaatgagagaata

SEQ ID NO: 45518 - DNA, 720 bp, Setaria italica
  Peptide Sequence Number=SeqID_111492
ttcttgtaatccatatatgcttgtgtatttgagtttttcttgtcttgttatttttagtttcaaatctaagcaattttctattctctacaagaccttaacaaaatgctactgtttatggacattgtatatcatgcttttaagattaaatgtcttgcctttgtgccgtgcaaccctggaattcatggttgtatgatttgaaaaacgccctgccctatcctaagcacactaagactggtgtggcaatcccacctgcagtgccaccctgccctagttgctaaaatttcgttgactagtcactgtggatgacaaaatgattacacggtttggaatgtcatacgtgccttggtgtacttgggttacggccagtttttggaactgtatgaccctaaggccttgggataagtggcagaagtaagtgaaacccaccaatttctgcaagacttcaactactgccattaattatacgctatgtttgatggcattgttaactaacatatatttattcccttgacacgaaatgttctgtacttttctaattttccatatattgcttgtgtatttgagtttgttctggtggtgtttctttgttcaaatctaagcaacttctcttctctacaaaaccttaccagaatgctactgtctatagatattgggtatcgtcttttaagataagtttttttggcttctgacacataacactggaatttagtcttatggttt

SEQ ID NO: 45519 - DNA, 366 bp, Setaria italica
  Peptide Sequence Number=SeqID_111493
gtgtttattttaactttgtcagtccagtggcaggaaaagagatggtcaaatagtatacaaaacttgtggtccaggggggaaagggtttcagaaaaaataagttaaaagataaatatgagtaagacccatagatcatcaaagcttactgtaaagtggatacccatgctcttgcagcgctaggagtttctgcacaaagaaagtattcctttttctgtggagttccaatatctagaacactagtcaatgaaagcaacaaatccaatctagaaaaaaaggagaagagagtaaacgtgatagcacaaagatattccataaggatacagaaacagcatccatcatatttcgccagcccatgaaagttcatag

SEQ ID NO: 45520 - DNA, 603 bp, Setaria italica
  Peptide Sequence Number=SeqID_111494
ttttttatttttttgtttttgtttgtatggaagcacttgagaacaagacagtcattcttgtgacacatcaggttgagttcctttccaaggttgacaagattctggtcatggaaaatggggaaataactcaggaaggcacctatcgaggagcttctgcagtctggcacagcatttgaacagcttgtaaatgctcatagggactcgaaaacaccactagactcccaggatcatggcaaaggggcgaaagaaccaggcccctttcagtgccaaataccgatgataccacggaacagtgagacggagatctccaccggtaacctacagtcagtccaactgacagaagaggagaagagggaactaggcgaagctggactgaaaccatacaaggactatgtttcagtgtccaagggctggtttctccttgtcctgataatacttgtgcaatgtgcgttcgttgtcctgcaatgcttggcaacttattggcttgcaattgcagttcaaaaccaccagtttagtgtcgcagttgttgttggtgtctatgcagtgatggcaactgcaagctgcctctttgcctatattaggagtcttcttgctgctcacttt

SEQ ID NO: 45521 - DNA, 290 bp, Setaria italica
  Peptide Sequence Number=SeqID_111495
agggaggggtttctagtacttcagggaggctcatttgctgtttccttcctgttacaaacgttacagccaggctatgtatgttacctgctacctgcttccggagttgtttgttaatcgacttcaggtagtgtttggttggctcaaatgtaatgtaatctgattactgaaggtaacgaatcctattatatatgtttggttgcgatggtttgcaatcaattgacactgtaatcgaatctcttacctaaataatatctatacaagcttgttacccctacaaaaaaaaaaaaaaa

SEQ ID NO: 45522 - DNA, 466 bp, Setaria italica
  Peptide Sequence Number=SeqID_111496
attttatgctcgttcttctgttttgtaccctgtgttgattcagacttcatgactattagaaatcactattactcccttatttggctgtctataaatttcatatttggcagaagtgatcctcagtttcagtaattctctatttcagaaattacatgaattgactctgtttaggatgtgcttctcacacccttcagtattttgtttgatatctgttgttcagtaatttcctaatgtagatatccaccaatccatgagtttgaagcgcacagtatagaatcagaatttgttcagtaaaagcttatagcgtagagagagataaaactattgcagagagagagagactatgaagtgaattctttgttggagaggggtgggggatttcgttcgtttcttttgttctattccgttttgttcatcccgttgctaaatgtgcgagtaatgcgccagtgaagatcaggttggtgat

SEQ ID NO: 45523 - DNA, 1047 bp, Setaria italica
  Peptide Sequence Number=SeqID_111497
gcttagctatgagacaagaaaggtcaatgctgtcaatagtcaaaatgaaacagctatggatttggctgacaaagttccttatggtgagtctaaaacggaaataatagagtggctgacagaggctggtgcaaagaatgcaagaaatgtggggaaaattgatgaggcatcagaactaaggagaactgtgagtgatatcaagcacaatgttcaggcgcagcttagtgagaacgctaagaccaataaacgagtgacggggattcgcaaagagttgcagaaactacacagagaagctattcagaacaccatcaattcagttaccatggtagcaaccctgattgcctccattgcgtttgttgccatattcaatctgccaggtcaatacttccaggatgtaaatgatgggggagacatcggtgaggcccatatagccaaactcactggtttccgtgtcttctgtcttctgaatgccaccgcccttttcatttccctcgcggtggtcgtcgtgcagatcaccttggtcgcctgggaaactggcgcccagaagcaagttatcaagattgtaaataagctcatgtggaccgcgtgccttagcacaggggcggctttcatctcactagcctatgttgtagttggcccacaacatgcctggatggccttcaccatatcagccatcggaggtccgatcatgatcggaaccctcctgttcctagcctatctgttgttgcgtccacgattcaagtttggcgatgacagacagcgtcgcatcaagagggctagtggcagcaagtccttctcctggtcactccatgaggggctttcagatctggaagccttctctgatcatgacaagaaaatctatgccctgtagggagtaacagtaactgcaattgttgtagctgcatgtaacattaagaagaggcaattgtgagaatacagatggtccatgtatatatttgttgtagctgttttaggtctgtggtcaggcaccaaaattagacctttctcccaagagacatggcttgtgtacttggggacttatgctgatgt

SEQ ID NO: 45524 - DNA, 429 bp, Setaria italica
  Peptide Sequence Number=SeqID_111498
aacaaaccacaacctcttgaacaaaacacaaaaatctcaaaggtacggtatggaagaactcactaatgctactacacagatgctccaaagaaagttcagtgtttcaagttcaaatgcattctctcgactcgagcatagatttcctcgcatgaaagagacggtatccattattgtaggcttttagtgtagtctaaagctctggattgaatatggattaggatcatgcagggcctattattaccagtttacagacaaccacgatgctcgacaccaatcatcaactgaaaagtgtttaagagacatatgaaatatcttatgcaatccgcaaaacccttgaggtcaacaaattaaattcaaaactagtcccagagaatgcatgctaaagtactgtcctgacaaaagacacatgctatataatagctcactacc

SEQ ID NO: 45525 - DNA, 662 bp, Setaria italica
  Peptide Sequence Number=SeqID_111499
tcaaagtccagtcattctttcagaaaagtaggaagaagaaggatcaaggtgaaaatgatcaagcattggagatggagcaagcaaaatgccggaaacgtgttaagactttagttaggaggcggaagatgactgaagcgcagaagctggttcagcaggagttggaattggaggaatggggcactgaagcccaagtgaagttgggaagtcgtctgattgaattactactggattcagcatttgttcaaccaccagctgatcaaacaccagatagctctccagatattcgccctgcatttaggcatgtactgcgacagcctataatagaaaatgggaggctaaagaagaaacattgggtgatagaatgtgaccatcttgtgcatgaagggtttgaaagcactgctagacatgttgatataccctaccttcctatgctggtacctccaaaaaaatggaagggttatgataaaggtggccacctttttcttccctcatacattatgcgtacacatggtgtaaaggaccaaaaggatgccattaagagtgttcctaggaaacagctaacaaaaagtatttgaggcgttagatatcctcgggagtactaaatggagggtcaatcgaagaagttacaattagaattagtttagtttagaagaacttaatta

SEQ ID NO: 45526 - DNA, 419 bp, Setaria italica
  Peptide Sequence Number=SeqID_111500
tgtttgctcgcacgctgtgtgtgtgttcgaggaaatgcttcagtgaatgcgctggttatctcagctcttgcagatgctcacgcagcggccgcatgcctagcggagcagagcggcgcagctgcaggtgtgacggcagcatttgcgactccagcaagcgatcgcggcggcggcatttggtaactgtcagctgtttccaaagttgcaaatgccatcatgggggctgagtatgcatcttaatgtgtcatgataataataatcattaacccgccataagtattgcttgcactaaactaagtagaggaaatatgtttctatttgtgtatagttacttcagatcaacatcttactttttgatacacatttttccaggttgaacggagagatctataacgatgatgaagagttgaaacctaagttcg

SEQ ID NO: 45527 - DNA, 404 bp, Setaria italica
  Peptide Sequence Number=SeqID_111501
catacattatgcttttcttccagtaatagttcccttttcccagtagcaatattaaacttaagcagcttaagtttggtatgggttctgttaagaacctgaaccgcaagagctttgttatgcatccaattgactctagcaaggtattcctcctcactaccattggacttattttgctcaccacaaaggacatccatccaagttatttctcctccatgtgaaggaacaactccaaggcgcactttagcattagcttttccagcaaaggggtatggatggtcctcttgagcagttggatcaacataatctttgccctgatgcataattctatacagtgggagttcagatgaatctacttcagtaaaagcaaggttctcactatctggagaccaccaaaacccccatct

SEQ ID NO: 45528 - DNA, 595 bp, Setaria italica
  misc_feature (563)..(595): n is a, c, g, or t
  Peptide Sequence Number=SeqID_111502
ccaccaccctcaagcgcaagcgcggcgtcttccagaaagacctgcagcacatgatgtacggatttggggacgatccaaatccacttcccgaaaccgttgcacttgtggaggacattgttgtggaatatgtcactgatctggtgcacaaggcacagaagtgttgcatcaaagagggggaagctcttgacagaggattttctttaccttatacgcaaggatatgcggaaactgcaccgagctactgaactactctccatgaatgaagagctcaagcaagcaaggaaagcttttgacgttgatgaagagacgcttgccacaaatgccgtatgatatcttcgcagaagcctcagaaaccatcatacgatctgcattagttttccatccagttgtttctgctgaaaggaatcaataatgttggttttgagggctttccttgtactgacaagaatattgcatcattcctgttgccaatacttaacacttgatacgtactgacaacagttcacctgtgcgttcccatgtttaaacttcagaaagcacttctgataaggtattatcgcttnnnnnnnnnnnnnnnnnnnnnnnnnnnnnnnnn

SEQ ID NO: 45529 - DNA, 1669 bp, Setaria italica
  Peptide Sequence Number=SeqID_111503
atgatgtacccccctggggtcaacaaatttttggtctgccagaagctcccttcaaaccttagcgatatgggagttgaaaattgccaaatgttgcaatcattctgtgcaagtgaacatctaggtttcgatctagagatccaacaaggagaggggtttcttgaaggcatgctgatgtatggatggcttctgaagttggttcgcataggtggttctgttgaagactccatagcatcgtggacactaaccaagttgttgtattcatccaataagaagttacaagtttctgcaaccgacttttgggacagtattctttccctagacgaggatgataaactgctggtcaaccttggatattttccaagctactctgttctaaaatgtgcgatgcttagctatgggtatctatttgagactcttggcactaaagcttcaatctctgaaagtgctgctgctgcagatagctctgatgttggtccgcctcataacatcattgcatgggtaagagttgtatctgcttgctgcaaaatcagaaaagtgcgtcccatcttctcagcttctgaggcagaagaactccttgttattgtcatttccctctttttggaccgtgggcttgaagggctgctggttgttttgggagactgcctgaattcacttgtattatacttcaacacaagtgagtgggaaagtagctgtgtgatggtggctgaatcaatcgcacagagggtcactatggaccttaattgtttaaggataatcgactgcattactgggaccaataagcgcagcaaattcctaaggagtcagctggcacttcagctgctgaagattaactttggccttaaggtgggaaatgttgaaaagatgttgaagcttgttacatccatcaacgtgaaggagaaagaatgtgattttttcaggctttatgtgtatctagtattgatggacaacctacttttctccagtggcgcattcagagataagactatgatcgttgatacctggcgtaattatctgcgcaactgttccacacagatcgcatgcacaaactggggattctatgctccaaaggtccgaaacaaggcttcgtatcttctgcaaggtgcagtatttaagaaatctggtggcgtttctgctcggtgattgaggggcacagtatctaaagcacaagtagcagcaccctgttccggtgccattcggtgggcaacggccagacggtttatggcaccagatattagatagttgactagtcacccaggtttttgtatatggaagatagactgggtccgttttatcgccagctgatgggcataccatgatcagatgcactgctagactgctagtttgcaggctcaacattatgtatgctcagcttgcagtgtgggttagctttgactatgagactatggtgtggcttatgtaccatggcatggcagcagcaaaaatagaggtagccggcccgcaatcagcgccgagctgatcatcatctgacacctcacctgatgatgatgatgatgatgcacctcacctgctggtagctggctggctggatctcctctctgacaccttagcatattagcgtggcatgttactgcccagattccatgcattgttttcggagttgcctgctggggagcacatggcctggatgtgtctctatggcctatgctac

SEQ ID NO: 45530 - DNA, 493 bp, Setaria italica
  Peptide Sequence Number=SeqID_111504
tgacgaggaggaaggacgcgagcgcgatggagaggtagaggaagcagaagaaggggtccgggctcgtctcctgcccgccgcggcggcgcgggtacggcatgtaccggatggtgtgcacgaacacgacggacaccgccgcgggcagccacgcgatgaggaggatcagcgactcggcgtcgtcgccgccgtagaaggcgaggtacagctgcgtgtacacggcgccgctgaggccgacgaaccccttcaggatcccgagcaccacgccgcggctctccgggaagttcttgacgcaggtgacgagcgcccccgtgttggcgaacgactgcgagttggcgccgatgaagaagtagaggcagacgagccacacgggcgggcgcgccgtgcggccggacacggcgaggtagaccatgaggtagccggagaggttcatggtggcgcccatggcgagcacgacccagggcgggtgacctcgttgatgagccccgagaagacg

SEQ ID NO: 45531 - DNA, 501 bp, Setaria italica
  Peptide Sequence Number=SeqID_111505
gggggctgatctttgtgggggctatgcacctgtggcatgtgctgtacgggcctgtaatgtgcccaagctggagatataaatcatcagaaggtttttcaatttcaataaaatactactttgaggcactaaaagtctgaaactagtatactttactgagaacaaaaacaaacttatattagatcaccaatagcaagcaagcaaagacacgcaaatgaatgcttaaaccagtaaggaaataattgcatttctcaaaaatcatcaaatttgtataactgcaggctgtctcctgagtcctgagagcactaaatttgaggatattatgtcaaatgatagtatgtctgctagatgttcttcttggttggccgctaaagaacttgcttgtgttttaactgtgaatgactccaaataaatgtttaccatactctcacaggaaccaccagcttaattactgtcaagattctcacaaactcggcttcaagaaaatagaccaatggacactaa

SEQ ID NO: 45532 - DNA, 392 bp, Setaria italica
  Peptide Sequence Number=SeqID_111506
cttctctcgtgaacacgtcacctccatccttgagccaggacggcacgttgctcctgtaccctgtggccagtattattgcgtcgaactgctcctccttgccgtccacgaacctgaccccgctccgggtcacctccttcactgctcccactaccttaattttgccggttttgatgtggcctagcgtcccgacgtccagcaccggggtcctgccggtgaggttcttcagctccatgggccccgtcttgggccgcctcagcccgagcttgcccgtgtcgcccagcgtcagccgcgccgccgcgaggaggatccggtcgactacctggacggagaacagcttgagcagcgccatggcgatgccgaacgtggagaggccaagcatctcccggggtagc

SEQ ID NO: 45533 - DNA, 664 bp, Setaria italica
  Peptide Sequence Number=SeqID_111507
agtgactagtgagagtgaggatgtgtggagcctggccttctctcctgtgccactgctagtagctaccagtccacaccaagatctatctgctggaatcgatatctgaataacttatatagcctctcatcccgatcaagcgcagatccctgatcccgagctgcccaacgtcatggtgaaggatgaccctttggataacgaaaaccctagatctcacactgctaacaacatccatgtcgataacaagagggaagaaatgtccatcatggtctcatcagtcaatgatcagtacaaaacggcggcgctcgacttccagaaagacaaaactactaccgatcgaccccgactgcaaggacaagctagtgttcgcgtggccactcccacatagcctatgaaccggtgctatcccgtttgagcttttcatttcacggaacctctcctctctggcattttctggttcctcatgccagaattagtattcttgaccttgtaaggcctcttcttgaccttgtaaggccctccctctacgtctggcacctcctagcacctccttctcgcttctttcttgctgcccatgaaaccagtctcaccattgctgtgttagccgggctctcgcaaccacctatctcctgctcccttctatccctcctgagctagcttatccatg

SEQ ID NO: 45534 - DNA, 1022 bp, Setaria italica
  Peptide Sequence Number=SeqID_111508
ctttacgattccttccgtctctctcccgtctcccactgtcccactttccttcgccgcagcaatcagcagctccgccgcggcagagggcgatctggaagtttgaggaagcttccacagatactggaagacgccgccgatgggctcgaggtcgcccggcgtctccttcaagctcgtcctactcggcgacggacgagttgggaaaacatctcttgtgctgcggtatgtgaataatatcttctcagacaagcaggaagcaacagttcaagcctcttatttgacaaagcgccttgttgttgaaggtgtgcctattacgctctctatatgggacacagctgggcaagagaagtttcatgcgctaggtcctatatactatcgtgatgcagatgctgctctattagtgtatgacatcacagatagtgatacttttgttcgtgtcacgaaatgggtgaaagagctcaagcaaatggcaagtaaagatattgttatggccattgcagcaaataaaagtgatttggtcagattgaagaacatagaaactcaagaagcagtaagctatgctgaaagtattggggcaagtctctttgttacatctgccaaagcagggactggaattgatgatgtcttcagtgatatagccaaacgattattagagaagagaaaaaacagcgctgatggcttgtcaccacctcagccaaagaagggaattctgatcgtcgatgacgagcctgagaaagaacctccaccgaagtgttgctcatagtgatatttcagtgaaaatctcgcaggtataacattacaaaaacattaatgctatttgtaaagggacaacatcatacatcaattcagcgctggattatttgagtattcggggcaggtattggggttgagcttttaggtcgtgtaaatactattaaccgtcaattgctgtcaatgtaacatttcagtcacaaataataaacttacacttctacaaacatatggttttcacggattcctgaatgtggaggagaaaaatatttgtt

SEQ ID NO: 45535 - DNA, 763 bp, Setaria italica
  Peptide Sequence Number=SeqID_111509
ttaagttaacccctttaatttacgggcgggcgataaaggaagctggatgtgtgaagagatttattccggctgaatttggacttgatccaacaaaggttcaaatttgtgacatggattatggcttctatgaaaagaagattgaaatccgccatttgatcgagagtgaaggcattcctcatacatacatatgctgcaacttctttatgcggtatttgcttccttcactggtgcagccaggcctagctgctcctcctagagatgaagttaagatatttggtgaaggaaacactaaaggcgtgtttgttcaagagggtgatgttgctcaatttacaatatgtaccatagaggatcccaggacactaaacaagacgttgtatctgagacctccaggaaatgtgtgctcaatgaatgagttggctgacctctgggaaacaaaaatcaataaatccctgaaaaggatatgtataacagaagagcaactcctaaaagaaatccttgatgcgccatttcccttgaagatggatttgatttttatctattcagcatttgttaagggtgaccacacatattttgaaattgaccctctgattgaaggaactcaactgtatccccatataaattatacaacagtgagcaagtacttagatacactagtttagaacattgacctatttacatctttcttgtaattcataaatgatgccctttcaagtggaatattgaaagaagtgaagagtgatgaatatcaaaaaaaaaaaaaaaa

SEQ ID NO: 45536 - DNA, 278 bp, Setaria italica
  Peptide Sequence Number=SeqID_111510
gggtccggcgcccgcgcccgtcgccgccgccgccgggtcgccagcgccacctgccctgctgctcctcggcgacctcctctcgccgatgacgccgtcgatgatcacatgcgcaatgtgcacacccgccggctggaactccctggccagcgactgggacaaaccccgaagggcaaacttgccgcagcttagatcggagtagccggcgaagccggtgacggacgccgaggagcccgtgaagatgatggtgcccctgccccgctccaccatccccgggatga

SEQ ID NO: 45537 - DNA, 1405 bp, Setaria italica
  Peptide Sequence Number=SeqID_111511
tttttttttttactgtctcgccgaaaccaacattatcagaatctgccaaaattcaacttacaattttgtatccattgttctatataaatgggggtgcaaaaggcacatgaaaattaggaagctcacggtgactactcgccggcggtgacatgctgtgaaaggtcatctctctgcttgactgcattgtcatctgcgacgttgctgaactgctgcttgtagccatggtcatgattgcctgaaaccagcatctctttgcttggaacgccttccatgtcgatgatgatgttggtgatcaagcagcagacgaagatgatccttggaagccggtgcttgtcaggcctccacagctctccctggataacccgccaccttcccttgagcgtcgccaatgcagtctgcaccaccttcgtggccgccatgtgccgcttgttgaattccaccttggctgcaggaagaccctgtccttggtatggggtcatcagccaggaaagtagagggtagcttgagtctccaacgatgtattccctgaccgctgaacctccagggagctccatttgcccatctagcctgacacctttctcgcacagcctgtacaagcctgaagtgcgcaggatgcacgagtcatccatgctcccaggccagccactgacaatgtctctaaacctcatgtcagtgtcgacaacggcctgcagcaccatgctgtttttatctcaatgtccagccagaccttgctgttgggctgagctgaggaacacatgaggatgtgtgtggtgtcaatggcaccgcagcagtttgggaggccataaatcttctcaaatcttgccttgatggttgccatctcatcagggctaggccacttcaggtgacagatggcacgctcctccatggattcgatgaaccgccatgtgatgtttgagatagccgagtgattcatgccaaaccatactcctatgttctgcagtgactcccctgttgtcagcctcatcagagccaccgcgacctggtcctccacatctaggatcgtcttgtcactaaacctgaagtttctgaaaccatatgtcttcgttgtcagatccttcttaacaagcgagcagatatagtcgaaggtctttcttgacatcttgaggacagactctatggtctggtattctcttggaaaagaggaatggcctgcaaccctgcgatagaagacgccccaccaatcgctgccatccggcaacggcggcagcggcaaccttggagccggcgccggcgcaggcttctccggccgcttcctcttcttggcaccccgcacaggagccatggatgccgaggagatcaaggcacaacgaggactcgaagactggaggtgctgagatgttgtgcccccgaaaaataaagtgtttttcaggacgggtttcttcgg

SEQ ID NO: 45538 - DNA, 865 bp, Setaria italica
  misc_feature (67)..(67): n is a, c, g, or t
  Peptide Sequence Number=SeqID_111512
gtattttacctttcttgttattgtgatgcagattaattggtattttgaatttgtgtgagttgatagngtaaaaaatgtaaatactattgctaggcacatacctcatcaagactgcatggcagctgttgcttcaggagtacaaccacacaattagtggtcagagtaaagtgcacccagggccttgaactttttttttcggattctcatataggtccatgacctctcaaagtgagaatccaggtcacttgaactttttaaatggttcatcccaggtaagaatccaggtcataattggacctagagtgaaccacttgaaaacttcaaggactcagatgctcactttcatagtttatggacctaggtgagaatccggggaagtttaaggatccatggtgccttttactcttagtggtcaatggtcttattattctattaaatcatttcccctaagttagcttaagataatgctagtacattactcatgagtaatgagaagggaccactgggaactagctgggagttgtagctttaactattagttaataaatttgtcaacatggtccatgttttccaaacttgaaactcagtcttaggttgttaatattcactgtttctactgaatttggtaatgaaatgacaatgttgtaaacctttttcatggaaaaaaaaccatactctcaatctaaagacaaactgaagaccttcaagaaaggttgtaagctgattctttgtataattctcctcgagatctgaaagttcctatccattttatgatcatgttctatttggcttttgttttgaagtctgactctcccttggcattaactagcttatagcttgtcttggaaaacttggaaaacttggc

SEQ ID NO: 45539 - DNA, 154 bp, Setaria italica
  Peptide Sequence Number=SeqID_111513
gtgggtatttgccataggctggagagccatttggatatcactacaagtaccattataaggagaattgttgctaaccgtgaagcttaacaggtaactaacgtgatcctccccccttatattacgcttcggggttactggcttattggggtctttc

SEQ ID NO: 45540 - DNA, 583 bp, Setaria italica
  Peptide Sequence Number=SeqID_111514
aggaataggtgtgttaaatagattgtatgacaatggaaatgaaatatttagataaagtgagatatctagtaattaggcgtaaaggatggcgtgttacatagatgagtgtttgacaagtagtaaaagtgagatatcccttttcgtgtaacttcagccgcgccttgctacggagtccttgagcgctgcacgaggaagagtcgccgccggtggcgccggtggtacggtacttgcaacggagtccctgagcgctgcacgaggaagggtcgccggtggtgcggtacttgcaactgagtcccgggtcgcctgtggccccggtggtacgataatgatgggaggcacaggcccctcggaacacacgtagggcagctccgggggtacgatggccaagcacacaatgggtagcaaagccagtctaaccgcatcgatgttgacgttcgcgaactggttgaaccagccatcgatgaggtggcagagacagatcgaatccggagaggcgagagtcgccctcaaggtcgcgcagcagctggccggcgggccggcgaggggcgtcccggtggagaggaaaggggtgcagctgaagaga

SEQ ID NO: 45541 - DNA, 807 bp, Setaria italica
  Peptide Sequence Number=SeqID_111515
cctgtgatcaaagattcaaaagcttgaatacttgatcacagggtttattcggttgaacatgctagatgatgcaaaaacggtgtttgaggaaatgatttccttggggattaagccaaactctgctattttggaggcaaatcttgagattgttactagaaaagaggaggtcaacacagtaatagactttttaaaacgtgtgagggatggcaattgggagttgaacaaagctacagttgaaaggttaacgagaatatgcctagatggaggtgaaatagatgaaatggagcagctgcttgccgtaatacaaaagggaacacattcgagttatgaaacacaactgcaccatggaattatcaggttctatgctaaggcagatcgattggcagatatggaagatgcgatttgctggatgttggacaacggtgtgatgtttatgtgcccagaggatgttgatgtcataatctgttcttattttcgtcacaaggaatttgatagattggatttgttcttaaatcgcattcaaagtttcttcaagccgaacaggtctacgtatgatatattggttgctggatatcgaaagtttgatttacatgaaaggcttcattcgaccataaatgatatgaggcaagctgggtttgcatgagctcacggaaaaccttaagtgcatcatggcagcaaaatgaaatcctgggttacatgttctcttcacacagtccaactcaatgttctttgaccagttctatgtctgacacgggaaggatctcagattcagataaattatcatgcccaactattgagaaacatgtg

SEQ ID NO: 45542 - DNA, 327 bp, Setaria italica
  Peptide Sequence Number=SeqID_111516
tcttgcttaagatgggagaagcggccgactgttgggagctgatcgttgcggtgtggttagagatgctttgttacatagcgtgcaactgtggcgccgcattccacgccaagcatctaacgacaggtggcgagtttgtcactcatgtcaagatgctcctgtttatgctaggggtgccttttctgagggatgtgaaggagccgctgttttcaaaagctggggatatctattcataatttgattatttaagactctgttttgcagcaggctccatgtatttggattgtaatgatgtggaacattcaaccttgctgtgacagaaacaagcta

SEQ ID NO: 45543 - DNA, 273 bp, Setaria italica
  Peptide Sequence Number=SeqID_111517
cttaattccaacagctagtactcgtgttctggaaaacaaaagtgggggaagcaacaagaaacagacttggagcggcacaccagtaatacggaccggggtgacctggggcgtggagatttttggccgctacctgcatcgccgtcccaatcaagatcattatttcttttctcctcccttgtccctgcccaaatcgcagggctgcgttcttgccaatcgcctctggctttgccccaagattcgccgcccagcgccctcgcgtgggcgctgaggagg

SEQ ID NO: 45544 - DNA, 449 bp, Setaria italica
  misc_feature (409)..(409): n is a, c, g, or t
  misc_feature (424)..(424): n is a, c, g, or t
  Peptide Sequence Number=SeqID_111518
ggggaaagttgttgaaaatagtttttcataaccctgattgcgtagttccggtgtaagttccattggctactctatggttgctcttctgcagcttcagacccagtgtcgtttttagacattcaaagaaatggtttaataactcggatgactgatgcatgattggtctaggtagaggaattcgcctttctagatgtgctgtgagcttgtcttttcaaatagttgctaaatagccaaaccatagtacattggtgtacttagcatgcctaatgattcaagaatgtgaacttgtcatatacattttgctgccacctctttcagtcaacgaacagcagctcagtagcatcacaagaaccaaatgttaggtaataacattgcaattgtgttgtgccggtaaataatatctggggtntttctctgcaaaatntatatagatgggtaggatgtgcact

SEQ ID NO: 45545 - DNA, 341 bp, Setaria italica
  Peptide Sequence Number=SeqID_111519
cgaggagataagagttgaaaagtaatacatgcacatatcaactcagtggagttttagattacaatgaacaaaggccagttaattcaaaattcatgctcgaaaacaaaaatgtcaacaatagaggtatacataaaaagaaacttgaacacaggcatatatagaggctgaaacacaacatatgatggagctaaagttgtcaaaccaaattcatatgcatatagcatagaggggtaatagagttcaggatttctgatagacagcagaccaaatgcaaatctaagtaaaaataaataaaaaatgacagataaatcaaatcatatagtttgtgaataagcaactcg

SEQ ID NO: 45546 - DNA, 608 bp, Setaria italica
  Peptide Sequence Number=SeqID_111520
gaacaaggtgttatgtcactcccaatcttatagatcctatgcatacgtagttgctgacgctttgtttatgatgcctggatgatgattgattgcatagcctgtgtttctagccataccttgataattgattatcttgttttcctgacttgggaactgttgacgcaaaatcctggcggtggtggaccctgcatcagcacatgaggacctgggagatctgcttaactccagtgcaaaatccaaatcggcgcgcatggtgtgcgcgagcatgccagtcagtttgaccattcaactgacaaggagatgatagtcgttgtgaagttcgaggcaaccggccgattaggccgatataatcctagcacagtagccataatggtgcaacaaaataaatcatgacaaatatatctgctgtgaagcccattccagtaccttgatgaatgtgagtgattcatcgacaatccaaccgatttaatataaatttacaatatcagccagacggtcgatagaaaacaggatgctgttgagttgttgccttgccatagctagagccacaagccgatgagatctaaactaatgtcaccaccaatatctttaggtgaaaccacagcgat

SEQ ID NO: 45547 - DNA, 469 bp, Setaria italica
  Peptide Sequence Number=SeqID_111521
taaatttaagtaaattaagatcatctttctgtaccatcggctcttctggttggaatattatattgatttgaattaactccaacacgccgatgtcgatgaacttgatacaactgctgaagatgctttttattgaataaaaatgtgagccttataaccgtgtcccaccgagcgtgctaaaatgtgttgacgcaaaatcctgaaggtggtggaccctgcatcatcacatgaggacctatcacatgaggacctgggagatctgcttaactccagtgcagaatccaaatcggcgcgcatggtgtgcgcgggcgtgccagtcagtttgaccattcaactgacaaggtggagataattctctcgaagttcgatggagtcggccgatcgggccgatttgatataatgtacaataaccatcagccatacggccgataggaaacgcgatgctgttgagttgttgctccatcatagccag

SEQ ID NO: 45548 - DNA, 468 bp, Setaria italica
  Peptide Sequence Number=SeqID_111522
gcgacatccagagctcttgatgcctcggtgatcatcagcacagggagggtgtgaggagagaggacgatggggaggcctccgtgctgcgacaaggcgaacgtgaagaagggtccgtggacgccggaggaggacgccatgttgctggcctacacctccacccatggtacccgaaactggaccaacgtgccccagagagcagggctgaagaggtgcttcaggagctgcaggctgaggtacaccaactacctgcgccccaacctcaagcacgagaacttcacccgggaggaggaggacatcatcgtcaccctccacgccatgctcggaaacaggtggtctgtgatcgcgaaccagctgccggggcgcacgaacaaccacgtgaagaactactggaacacgaagctgagaagaagttgcggcagcgcgggatctgtcccgtcacccaccgccccatccgccgacctcattcgc

SEQ ID NO: 45549 - DNA, 414 bp, Setaria italica
  Peptide Sequence Number=SeqID_111523
caggtattggccatttaggcttgtgctctcatagttatattccccctgctcaaaatcagacacaatccaaaaccaacaaggagtggcaattcaaaatccacatctcactgaaaaatggtggaaaggtcagggttacatttgtccatttccattcaaagacatggactagtcattcctgacctttttctgccctgctagaggctattgccgttagccgctaaacaaaacttctcacatatccttgttgagagctatgtatgagggattatgcgtgtagttgctgccgatgtgtggtggggattctcaccagtggcggacctaggattttaccacagggtatgccgaaaaaaatcttatgcaatttgataaaaccatttataatttggtaaaactatattctaatttggtaaacca

SEQ ID NO: 45550 - DNA, 413 bp, Setaria italica
  Peptide Sequence Number=SeqID_111524
gtcggtacgtcttgccgccgcggtgccgacggcggcgtcgcctccttcctcgcgcgggcgcttgccgaggacggtctgctggtggtagtgggaggacgaggaggacgtggacggcgcggaggaggagacgaagacggccggggtggtgcccgaacccgtggcggcgaggatggagggctcggcctggcggagcagccactcgatggtctggccgtcggacttgagccccagctcgcgtgtgagctggaagacgcgggcggcgcagatgatgggcatgcggatgcggcggccccggccatcgaccttgctgtcgccgtccgcaaggccccctccaaggaccgccacagcaaggtcgatggagggggccttgcggacggcgagggcgttgccgttgccgtccccgctccaacggc

SEQ ID NO: 45551 - DNA, 528 bp, Setaria italica
  Peptide Sequence Number=SeqID_111525
ttggctccgccgcgtcggcgtcgtcggcgccgcggacgcgcttgccgaggatgaagggcgcggtggtggtctgggaggaggaggagcggagggaggatggcgaggaggtggagaaggaggccggggtggtgccggtgcccgtggcggcgatgatggatggctcggcctggcggagcagccactcgatggtctggccgtcggacttgtggccgagctcgcgtgtgagctggaagacgcgggcggcgcagatgatgggcatgcggatgcggcggccccggccatcgaccttgctgtggcggtccttggagggggccttgcggacggcgagggcgttgccgttgccgttgccgttggaggcggggacgagctgcttgtcggcggcggcgcccccttgggctggcctggtggtcatcccctacctccctccctaatttggagaggcctgggctgtgggctgtggctgctggctggggggtcactgccagtggtggggctggctggctgactgactgactagctggcttggtg

SEQ ID NO: 45552 - DNA, 372 bp, Setaria italica
  Peptide Sequence Number=SeqID_111526
gggtgctataaatgtcagtagaaacaaaacttgctgagcaaacactgttagagaaaaagggaaagctagtgctgtcaaattccatctagattaaatgctataacaagagcctatccgcagaagaacaactcacttaaggataatcttcagccatttgctatacagaagaagcgactaacaaacacgtgcagtaaggtccttgacagaataatagataaccataacttaaacttgggctatgagcagtcagagattactagttctattgcagaaagaagaattgggaatgcccgcaccattgacagctgctaatgagcgtgagttgcagttataccatctgcctagagtatagaaaaagattggaacatttta

SEQ ID NO: 45553 - DNA, 428 bp, Setaria italica
  Peptide Sequence Number=SeqID_111527
gtggttgcacacgtacaggcgcccgccgccgcccgagctctggccggggacgcggccgccgacgaggcggtagtgcatgccggtgagcgcgccgacggggaagcagacgcggtacgggaggaaggagaaggcgacggtgcggaaggtgacgagcgcgacggcgaaggggaggaaggtgtacatggcgagcgcggccggcggcgtcggcgcgaaggcgaggcggccgtcgtggaagacgaggggcctcgggtacctgtcccggggcagcggtcgccatccccgcgcgtcggcctcgcttacagcgaaagtttccttgcaatagtaagaagagaaaaggtagtgcaccctaccgctgctcgccgccccgacgagcccccacggcgccgtttccggcgtccttcttccccgccgcctccagctcggcgccg

SEQ ID NO: 45554 - DNA, 683 bp, Setaria italica
  Peptide Sequence Number=SeqID_111528
ggccgctagactagtcgtggcgcccgccgcagccgcagtgtactgatacaactgagggtactgagccatgctgtacccagctgcagccaggctcgccggactgtattggaagtaggggtagagtccggaggagtttgccgccgccattgttagccctgccgcagttgcgcctccgccgaagacagcgtactgctgttgggctccctgcagcccaccgtaggcttggtagtagctcagcggatagccatagtctgagaagtatggggaatacctgaaattaacattgccaataagaaagaacatgttcatagtcaaattaaacatcgttcttaatgatggtcaaatactgctaataatgtgtaccatatactactaccgaactacccaatagcagtttgcatgtaactgaaacacgcacatgacgacgaggaaacgagggcagttgctgctgcatgggtcatgcaaagtccccttgaccgaagtccccttgaccggacacgcagatcaaagcaggaccgcaaggaagcgtgcatgtaagagcaaaggagctaggcagctttttccaaagctgattttgccccacatggcagttaccgtacccgaggcagtgtatggccggaacttgcacttgctgtgtcccagccagcacatgcatgcatgctaagtcacatgatgagtcgtgc

SEQ ID NO: 45555 - DNA, 2724 bp, Setaria italica
  Peptide Sequence Number=SeqID_111529
gccatattattgtcatcagcatgtagatgagttcatgcatgtaaatgtgctcaagtgatagatatccatggtacagtagcctctcagaaggaagctaaatatatttcccagtagctgtagctattacataaatcgctgacaaatagtaatgataatatgtctgccataaggggttccagtaattgttcatctgatgatggatcggatcagcagcttggttgggcctaaccatggctggcttggcgaagactgaagaggacagatcaatgcgatgatgatagatgcatgatgatacggaatggaagggaaccaaaactacttaacgaccaaaatggagaggaactaagatgagagtgctcctaattagttagtacatgaagaggtgtgtataatatgactatagcacaaatgattgaccattgcttcagtaaacctttcgtgtgcatctccacaaacttctgtggacctacacacggctcatgaaaaatgccatcttgagggatgacaggattagtcgagtaacgctgcacatgaaaaaccagcagcgactctcagacttgattcgcccctgcactcttccataagagtccaaggaacaatacattagcaaaactcgatctacctacgaagtaataatgtatgtgaattacatgcctaatacctaaagagatcgatgctaactggtgacctatatatgcatgtatgaacctaataagtagctaaataccctttcactctagtagaccaatataacagatgagagctagacacattgggaaaggacagccacagcagctgattcagaccaacttacagcacaaataaaggagaagacgattgacccttgagccggagtgctctgatggcgtcatggaaaaatggacttgcgcaatctgccatggtcccttcttggttagtcagccgaattcactcaaccccagagtgagcattggcgtcaagttagtcaagtctcagcggtgtgcatggacagcatggatatatgatgtgcagtgcaccacactgtattcaattcacttgaagttgaagctaagacttgtgtatgcattgactgattgactactgagtactgactcatgtatcagaggaactgaagaagataggtgcatgcatgtggttgaaaagacttgaggtatatagagggaggggtagccatggttgttctaggccaagctgggcttctgatctggtgccgcagcgaggtgagaaggaataagcctggtgaactggtactgtgccgccggggccggcagagttggagctgtcatagacattgtcatgcctgcttggccagtagaatttggagtaaacgccaccgcgccagcgtactgctggaggccgccggcaaccgtggtcatcagggtggccgctgctgtcgtggcgcccgccgcagccgcagtgtactgatacaactgagggtactgagccatgctgtacccagctgcagccaggctcgccggactgtattggaagtaggggtagagtccggaggagtttgccgccgccattgttagccctgccgcagttgcgcctccgccgaagacagcgtactgctgttgggctccctgcagcccaccgtaggcttggtagtagctcagcggatagccatagtctgagaagtatggggaatacccggcataaacattgtaagcagcagtaggaatcccttgctggatgccatgatcggccggcaccaagctcatcaagctggcaccacccgcaccagctgtctgaatggacttcattgcccgcatgctgcctcccccgtaagcatgagcatatggttgcagatacggtggcaccggtgcagtcttggacttgttgaccccgagataggcaaggttgcagttggccctccttccatcgattaccgggtacggatcgatgcaagctctcagcgctgcctccgggtcatggaacgttacaaatccgtatcccttggatctaccggtgttcttgtcagtgatgacgacggcttcaaggatatcgccgaactgctcgaagtaggcccgcatgccctccttgtgcgtctcccaggcaaggcccccacgaacaccttggtgaaggtcgtgtccccgaactgccccgcgccaccaccgctcccggacatggcctgagacatctgttacaatatcctcggccctcgctggctactatgtgtggaattgtaaatctagctataatcaagcagctacgaactgcctctcctccttcctcctcgagcgctagagctgatcccctcttccttcgcatccttgatccgtcttgctgtagtaaccaaccgactactaactttgtgtttggagggccaaataagaaagaacatgttcatagtcaaattaaacatcgttcttaatgatggtcaaatactgctaataatgtgtaccatatactactaccgaactacccaatagcagtttgcatgtaactgaaacacgcacatgacgacgaggaaacgagggcagttgctgctgcatgggtcatgcaaagtccccttgaccgaagtccccttgaccggacacgcagatcaaagcaggaccgcaaggaagcgtgcatgtaagagcaaaggagctaggcagctttttccaaagctgattttgccccacatggcagttaccgtacccgaggcagtgtatggccggaacttgcacttgctgtgtcccagccagcacatgcatgcatgctaagtcacatgatgagtcgtgc

SEQ ID NO: 45556 - DNA, 1926 bp, Setaria italica
  Peptide Sequence Number=SeqID_111530
acgggcacaagcccatcagctgctggactgttcctcatcttgtttcttcctccactcgtgttccttgctttcactcctctcccctgctgatccgggatttcgtaactttcaagtgtttttaaccagaaaaagaagcaattgcacaagtgtttattatcagcggctggatcggaacacaattacacatgatgctactaatcctcaattgctcattgcgctccggctgctgccggttccgacatggtcggcgacggctggcgcttgacgagcttggtgaaggaggtgccctcgacctggaagtcgtcgtagcggcggaagagctcggcgacgagcatgcatgccgtgtcgaccaccacctccttggcggcgcactgcttgttcccggccgctggctgcgaggtctccggcccgttggaccagaagaggtgctgcagcagggcctggccctcgtcgccgaggaacctctccggcacgaactcctccggccggtcgaacacctccgggtcccgcatcgccagcggctggtacccgcacagcacctcgcccttggccacctggaaggcggcgccgtgggagcggagcacgaagtccttgcgcgcccgcccgaactgcagcggcaccggcggctgcatccggagcatctcgtataccgtcgaccgcaccagcggcatctcccgggcggccttgaacccgaacacggtgtcgccgccgccggtggctgctttcagcatcgccgcccgcacctcctcccgcagccgcggccggagccccgtcgggtcggcggcctcgccgatcttggcgacgaggaacggcaggaacaccgagaagccgccgaaggcgttgaagccgagcacgaagaggaggttgttgatggcgtccttcttgccgatgccgtgctcctccgccgcgtacgccaccgccgcggcgccgtgctcctccacgaagcggtagagccggtagtagcccggccagatgaggaaggacggcagcgggaaggagtggatcagcagctcctccagcggctggatgatgccgatcttctgcgtggggaggatctgcagcgccagccagacgtccaggatggtgaacccgaacttgtcgacgacccagtccaccgacgggtcggcgccgacgagcgccttgcacaggaaccggaagatgcattgctgcaggggcacgatgtagttggcggagggcttctcgtcgctggccttggcggcgaggtcggcctcgatggagtcgagcatggcgtcgacgccggcgcggaacgcggaggcccaggtggtggcgctgcggtggaggatggccatggcgaacttcttgacgcgctcgtgctcgggctcctcggtgtcgaggtaaacgccgacgcgggtgccgccggtgaacccggccccggggttgtagggcccgatgaggatgtcgcgcttgtcgacgagggtgttgtcgaagagcgcggtgaaggcggcggcgtccacgacggcgaccacgcgcgggtcgatgcccacgaagaaggggaacgtcggcgggatgttggtgcggaacaccgtgctccggttcgccgccgcgcgccgccggaagaactcgtcctggctctggaaccagaagtagtccaggcggtcacggagcgcgccgatcaccggcgggccgtagctgcccggtatcggccgcggcgggggcgtcgcagccgaggcgctcgccgccggcgataaggtcggcagcatggctaacgacgacgtctagctattttatctccggtgtgtggtagtggtgagcggagctgcgtgcgcgtgtggctcgatcatcgttaagtactggcagccgcggcagctggagtgagaagtgcaaggcttgctctagctgccagcgcacggaacgcgacaatggcggtgggacacaggccggcttcacacgagcacagaaacaagg

SEQ ID NO: 45557 - DNA, 417 bp, Setaria italica
  Peptide Sequence Number=SeqID_111531
tgagttgttttttggacggagggagaatagtcttttgttgactctatatatagaactcttatcatttctgaaaagtgaaattaaacaaacaagtagggttcgtgatgatgaagataactctgcccgtttgaagaagtgaagaatttttttcactctaagcaatggccatacaaatgctatgcgcccagcagcaagtaacatataagcacagagaatttttacaattgttggaaaaactgagagccgtccatttagaggaaaaaatcatacaatgcaaagataggaggtatcagagaaataccaagagttaccaaataggaatcaagtaaaagaataatgtggtaccattacccaatttaatttgatttttaactatctttctcagatgaacggcaagcaaaatttagagacaaaagt

SEQ ID NO: 45558 - DNA, 1113 bp, Setaria italica
  Peptide Sequence Number=SeqID_111532
ggatggtggacgaggcgtgggagcgggcggtggaggcggcgctccacgccggcggcgaggggagctcgtcgccagcgcggagcctgacgctggatggcgccgtgaagtgcatgcacggccggctcccggcggcggagatactggagcggcaccagagcctggagcacctctcgatcgccggcatcggggtcacgtcgctcgaggggttcccgcggctgcggaacctcacgcggctcacgctctccgacaaccgcatcgccggtggcctcgaccacctcgtcgccgcggggctctcctcgctgcgggacctcgacctcagcaacaaccgcatccaggacgtcgacgacctcgcgccgctcgccgacctccgcctcgtctcgctcgacctctacgagtgccccgtcacaagggtcaaggactacagatccagggtgttcgggatgatccggacgctcaagtacctcgacaagatggacgccgacgagaacgagcgccccgagtcggacgacgatgacgatgatggcgaaggggagggggatggcgacggggacggggacggcgacggcgacgaagatgaagacgatgaggaggacgaggacgaccccgggagcggcgaggttgccaacgggggtgtctctcactcgcgcggtggcgtggcgtcgcatccggtggaggtgaatggggtgatcgatgtagacgaggaagagagcgatgctgacgaggtcgtcccgaacgggggagtcgagcaccaccatggggcgaacgggtttcgggtcgcggtggcaggagaagccccagaagaggaggatgaggacgtggaggatgatgatgaagatgatgatgaggactttgaggaggaggaggatttgggggaggagatcgatgaagatggtgatgatgaggatgctgttgtggaggttcatgatgtaccgagtagtgatgaggaggaagatggtgttgaggaggatgaggatgaagaggatgatgaagaggaggttgaggatgaaggcgaggaggctgagccacagagcagtgggagggttgccatgatgacaggggaggatggaggagaagagatagatggacatgagcatggaggaaggggatgatgag

SEQ ID NO: 45559 - DNA, 1087 bp, Setaria italica
  misc_feature (1055)..(1087): n is a, c, g, or t
  Peptide Sequence Number=SeqID_111533
gcggcgtcggcgcggacatcgctctgggactcgcggaaggattaggggccgtggagaccgacttgctcgcggagttcgtcggtgtttccgaggacgaggatgaggaagggtgggttgccgtcagcttcaacacgagtgaggagatgaggagcttcagggcgttcgagattgatgttgtggagggtgctggcgaggtttttcttccaccggaggctaaggaaagtactgatgaggtggtgcccttggattttgagggtgcatttggtgccttcataggaaagatgtggagggaatcgagggagctggtgaatttggacaccacagcgctggttgctatggtttcagggatcagcaacggcggggtggggaagctgatggctgcaccagaggcagtgaccagggcaaggttcaagtgcaactacaagttcgtcatggatcaggcacaatccgaactgcagttcccaatactcgtagagttggggaaagtagtcgaggggaagcaatgtatcatatgcgaaactgtcaactcggagttcaaagaaattgtttcaatgtgtggtggggctgaggagaaaatcagagcaagatacttactgaaacaactcactattgtcccagacagtccttcagcacgaatgatggatcttccaaccacaaggaagcgcgcgatgaagaacaaagttgttttcggtacaggtgaccattggcgcgctcccactttcactgctaacatggggttcgtaagggctgtttcacaatctggtatgcctttgctaaccatcgagcacagacctcgggcgttgattggtctgtgagactgtgacagacgggttggcaaaaactagggtatgggtgtttcagatccaagagctgcaattctgcccctcctgaacatgaatctatctgaagttgtagttccctaattttagttatgctattcttggaactgtggtgcacagttgcagtgatgtctactccaatcctgcttgctttgtacataactgtatatggttctgatccactgaagtttattggagtagaaaaaaaaaaaaaannnnnnnnnnnnnnnnnnnnnnnnnnnnnnnnn

SEQ ID NO: 45560 - DNA, 405 bp, Setaria italica
  Peptide Sequence Number=SeqID_111534
ccccggcgggcggcggggtgttcggcaaggacgcgccgatgagggagttcaagaagctgtacgggctgatcaagatcaggagccggagggagggcgccggcgtcgcgccactggaaggcgacgcgcacgggccgccgacgccgggcaaccacgacagggagcgctgatcacttcctgctgctagatggtggtagaattgtagtggccactggccagccaaaaaaagccattttgttttgttttctttctgttgcaatttacgctagttattagtgactgggaagaaatacagtcggaggaagataaaactggaggactgagtgatgtacatgcgaggcagtcttgtcatgtgtggtttcaattcttgctagcagtcagacaatttcctgctacatcagggccaag

SEQ ID NO: 45561 - DNA, 408 bp, Setaria italica
  Peptide Sequence Number=SeqID_111535
aagaacgggacggaagcggaggagaaattctggagatctaaaccccggcacgcacccaggggagccgggaactacaagtttcgagtgacatttgtggagttggaggccagagcttggcggcggcgacggcgaagatgagcagcagagacggggctaacagcgggagggctgcctcagataaaatgaggaagctcagagagttgctgcacacgagtgacaaccgcatatgtgctgactgcagtgcacctgatcccaaatgggcgtcggcaaatattggagtattcatatgcctaaaatgctctggtgttcacagaagccttgggacacatgtttcgaaggttctgtcagtcactctagatcaatggactgatgatgaaattaactcaatgatagaagtcgggtggaaac

SEQ ID NO: 45562 - DNA, 392 bp, Setaria italica
  Peptide Sequence Number=SeqID_111536
tttatttttctttcgtcctattgtatttccttcaaatgtagcaagctcatcttcatttaagttgtgtaaagtttgaagggtgttaacatgtccatcagacttcaggtttcttgttaatgagtgacccttactcccaatgccacgtgaaatcctgtgagtggctttaccagtagttgtgtcagcctccttactttcttccaatgtaattccatccacaccagtcctcctagttgttgaagatgtataacaggctccatttggaccaccatatgaaacagtcgagctctgaaacataaatgtctgaggctgtgaatgtgatgtgctagccctgctgaactccctcccaaattgtcccatgaccttaggtctttttattatcttctacttcttca

SEQ ID NO: 45563 - DNA, 1219 bp, Setaria italica
  Peptide Sequence Number=SeqID_111537
tgtgcatttccattgccaagcatgttcattctgggatcccagccaggcaaattgtccctggcattcttcgccatgattcctcaaatgtagcaagctcatctgaatggagaaggaagaatgacatcggattcagcttgacagaaaaataataaggtaagccggataaaaaaaactaaccttcatttaagttgtgtaaagtttgaagggtgttaacatgtccatcagacttcaggtttcttgttaatgagtgacccttactcccaatgccacgtgaaatcctgtgagtggctttaccagtagttgtgtcagcctccttactttcttccaatgtaattccatccacaccagtcctcctagttgttgaagatgtataacaggctccatttggaccaccatatgaaacagtcgagctctgaaacataaatgtctgaggctgtgaatgtgatgtgctagccctgctgaactccctcccaaattgtccatgcttaggtcttttattatcttctacttcttcatcaggctcttccacatacgcccctttgctttcccttggatgcttcctgaaattaacttcttcttatcatcttccttatcatcacgtgcatcatcctcatcatctgaagacagctccttgataatcggccctttaggcctgcttggctcaggggcctgctgaatgaaaccactggcgttgctcatgccttgattgagatttgtctggcttccaaacatgcctccattgagaacgctatggggcccaaacatacttggtccaagcaagctaggttgcatcatgctagcaaaggggtccatgaagctaggttgcatcatgccgctgaaaggggttgggaagccacgttgcatcacgctaccaaaggggtttgtgaagaaagggtcatcaaaggggtttgcgccaccgaagaaactggatggaaggctccctggtcgtccaaagccaccaaaaccagcgaaagggtccacaaaaccgaataagccatgcctcccacctcttcccccttgcatcttctgttacagcaccttacctgaaacccccgagggttgggcgcgcggcgcgcggcacgcgaagggagggatcaatcgatcggacgctagctctcgagccctgggaatggcggacgtgaggggagagcaccgattgggctagggcgagccggcgagggcgaggcgacgcgacggggcaggggaaaatgggttcctc

SEQ ID NO: 45564 - DNA, 834 bp, Setaria italica
  Peptide Sequence Number=SeqID_111538
gtttttttttttttttttagtttaaatatacgactcacagctccatactttttttacgaactacatcaccaaggtatgcaactttacatgcgagtcacgttcatggagacgtaacaggcattccttttcttcggatttcaccaaaattagtagagtttccgaagaaatccgccccatcccaaaagattttagttgtacctcagatagcaggcaccagatttctaaggtacaattactgagaactgggacaaaagtgttaaaacaaaggctttagttatctggcttaaagctcttgactacaggactgttacaagttacagtagtcttcccaagagaactccggttacgccatttgctttctgcaaaacagtggaagtcacccgtatgtagcactgtgatcctccatatactagaggaattcacgtgcagcgtgcgcgatccatggaagaaccattccgagagttccttgaggaattggtgcccaggaattgatcaggagcagggagtgcaggcatttgattggcatctcggaagtcagggtgtgcatttccattgccaagcatgttcattctgggatcccagccaggcaaattgtccctggcatttcttcgccatgattcctcaaatgtagcaagctcatcttcatttaagttgtgtaaagtttgaagggtgttaacatgtccatcagacttcaggtttcttgttaatgagtgacccttactcccaatgccacgtgaaatcctgtgagtggctttaccagtagttgttagtactacaagacctaccttaactttacttaccaaatagtaaattaccaagtagtaccgttacctt

SEQ ID NO: 45565 - DNA, 295 bp, Setaria italica
  Peptide Sequence Number=SeqID_111539
aaggcagaggaggcggcgccggcggcggaggagaatggaggcgatgcggcggcggaagggaagcgcatagttgtcgaggcctgcactcagtgcagacactttaagatccgagctcagaaggtgaaggaggacttggaaagttctgttcctggggtttcggtcactatcaatcctcagaagccacgtcgtggttgcctcgagatacgcgaagaaggtggtgaagtgttcttatcactgctgaacatgccaccgccccttcacaccaatgaagaagctcgatatggatgaggttatc

SEQ ID NO: 45566 - DNA, 474 bp, Setaria italica
  misc_feature (438)..(474): n is a, c, g, or t
  Peptide Sequence Number=SeqID_111540
ttttttgcttttagttaaacttttcctgttttcccattgaggagttgcttcaaacggtctatgataaaatcgagcccaatgtgcctaatgttgagctatcaactgaacggaagaagcaaagaatgcagtgaaaccaaacaagaaaaggggtcagatcaaagaaaaggagacttgattgaattgaaggaggcttgtcattccgtcataatgaacgagctagcgggaagatgattagggcgtatcacgacgttttaatttttggtagacatgatgttgaaacttaagttactgattttgttttatcgcactaaaaccttttattgtcctctttgtctaagttgaagtgttaagttgctttatttagggtcatgtggtcgattccgtgaactcttgtggtatcatggtattggaaatgagaaattaaattggaaaaccctnnnnnnnnnnnnnnnnnnnnnnnnnnnnnnnnnnnnn

SEQ ID NO: 45567 - DNA, 369 bp, Setaria italica
  misc_feature (346)..(346): n is a, c, g, or t
  Peptide Sequence Number=SeqID_111541
ctctccattaacacgtgaggaaactacattactcagcttaatctaaaacaggatctttagcatctaaaacatgaacaccactcagaaaaggattagaatcacaaccagcagccacagcttgtgacgatccggccattagagtcgtggacgaggccgggatgatgggtgccgtaggtgtactggctcggagtagatcccgccttccttcaggtctccacctcgtttgtccagtgacggcgatggtggtgcggcggcagccttcgggcgactccagcactgccgtgatcgggaggcgtgtaagggggtgtgcgtagggtttagcgcgttggcgttaggcccccccttnttatagcgctgggtcgctcgggg

SEQ ID NO: 45568 - DNA, 145 bp, Setaria italica
  misc_feature (138)..(138): n is a, c, g, or t
  Peptide Sequence Number=SeqID_111542
aatccggctcaagtacgcctaacagaaatggcgctccacaatggcaccaagactcttgtagtcttgtggatagtggacacccagcaacacaggccatcactgttaatgtgccgatctccttttgtcgggccacccccncgttgtc

SEQ ID NO: 45569 - DNA, 422 bp, Setaria italica
  Peptide Sequence Number=SeqID_111543
ggctagtagggtgagtgtgaagagagatggagtgagtcagtgagcttgtggggtaaaggcgtaaagcaaaagttagcttacagcatactatggaactgtattttaaacaggctatggctgatgtataaaggagaaatagtttattaacatagctcacgaaaaatctggctattttaaacaggtactgtgcaaattaagacatgcggaacggatatgttaaattaatagccgaaaaatggtgacactagtgctatgtcagcattgggagatgataagaaacattattcctaaaacagaaatatatagaaatttgttatgctgagaagttcaaggagcagctgtgaaaatataaggaaatttactatcaactcaagactcaaataaaccatgcggctacattttatacgctctgcaaaacttgc

SEQ ID NO: 45570 - DNA, 182 bp, Setaria italica
  Peptide Sequence Number=SeqID_111544
tcactttgggactctaaaagtgagcaggatcatgcagatcgacgcagatggggaaaatggaatgaacaagtattcacagagatccaacaccagcttttttgttaacaaacagaacattcaaggaggaaccacggttttgaagaatggaactgacaggttagcagtggcagatagttcaagtt

SEQ ID NO: 45571 - DNA, 714 bp, Setaria italica
  Peptide Sequence Number=SeqID_111545
cacagttggtcctgccggcccagcaagctgtatttgagaaaccagaggtgaaaaagcatcgacacttgaagcttttatatgtgaagggacatgttgatggccggttgatgtccaaaatgctggttgatggtggtgttactatcgacattttgccatatgctacttaccgcaaacttggcaagactccaaaggatttgattaagacaacatggtcctgaaataccttgaggggaagagatcagaagccaaaggggtcttgaacaatgaattgatgattggtagcaaaaccttgcttactatctttttcatcattgatggcaagggttcatacaatcttcttctgggttaagattggattcatgtaaattgatgtattccgtccacaatacatcagctgcttattcaatgggatggagatatggtggaaatcgtgctggctgatggaaccgctatcatcgctgcagctgatgttcctttctaggagtctcacaaagtgcgcttcttgtctggaaaaggctgggacgaagacgaattcatggatgctgcaagtttctgttccagatgggtcaagcagatgatgaggaagcataggtaaaaaatgtgtctatcagctgacttattaagttgtaatattcataggcaataagtcagagtcgacagcatgtaaaagccgatgagcagctcatcgccttatagatagccaatatctgttga

SEQ ID NO: 45572 - DNA, 325 bp, Setaria italica
  Peptide Sequence Number=SeqID_111546
tcaatggcaccggtcccgtcccgtcccggcatcggctggtcgcccagaatgtccgccatggtgcggtatcgcagtggctcgccatcgtggtgcgtgtcgacgcggtccttgtcatgagagagtggagtggcgaaactcaccgagcagggctcattgtgagccggtgttgacgaagcagtgcttggaggagtactcgtcggagtctgtggaggactcgttggcgccagtgaagagctcgccgtagtggggactggggtaggcaccctcagcgaagaagagctgccactcccccaatccctcgaagtggacatagtcgttgtacatc

SEQ ID NO: 45573 - DNA, 406 bp, Setaria italica
  Peptide Sequence Number=SeqID_111547
caggtccccggggacgctgccggtgagttggttgtcggagagcaccaggaaagtgagctccggcagtcggccgaggtcggcggggagatcgccggagagcatgttgccggacaggtcgatcatgcgcacgctcgagagcttggcgagtgcgcgcgggacgcggccggagaggcggttgttcatgaggttgaggtactggagctcgccgagttccccgagctccggcggtatggcgcccaccagcgagttgttgcccaggttcagcttctggagccccgtgagcctcccgagctccggcgggatcgcgcccgtgagctggttgccggcgagcgcgagcacctgcaggctcgccaggccggcgagaccccgcggtatcggcccggacaaagcgttctgctgaaggttc

SEQ ID NO: 45574 - DNA, 490 bp, Setaria italica
  Peptide Sequence Number=SeqID_111548
tttagacaatttgcatcaccagccctactagtcaagaaggatgggaattggagattctgtgtggattacaggcacctcaatgccatcacaacaaagaataaatacccacttctagtggtggatgaattgttagatgaacttcatggagcccaatggttcaccaagttagatatgagatctggttatcaccaagtcagactcaaaccagaagatgaacacaaaacaaccttcaagacccaccatggccattgggagttcaaagtgatgtcatttggtctaacaaatgcacctgcaacatttcaagtagcaatgaataccatatttgagcctcttttaagaaaatgtgtgctgatatttatggatgacatcttggtatacaacaagaccttgaaggagcacaagcaacatctccaagctgtatttgacatcctgcaggctaacaaactatttcttaaaatctctaaatgttcatttgctcagaaacagctag

SEQ ID NO: 45575 - DNA, 1129 bp, Setaria italica
  Peptide Sequence Number=SeqID_111549
cattttcacttgaacattggtattcattcgtactagtatcatgtagttgcaacggcaaaacagagtatctcgtctggttcttagtgcactatcccccttttccaagctgtcaaaattccccggtaaaataaacttcatgaagatccaaatgccacaaaatttcgaacaaagttcaaattgtctggctcctttcagatcggtcgttcttcctggcatttcgagcatgcacatgtgaatccgtaatctgcaagctgcgcctgcctctcctcatatgaaagatcttcatcgatgtaggagatggtaatctcttcacccttgctaataggcttgagagcaagtatcactgcatgaccatccttgtcctcatctcttttaaatgctctagcatttggacagcatgagtggttcatgcagctctgtaaagggaagaatgccgtcccttcacaaggaactgaatagtcttcacctaaagcatctaggaatagtcctgttaccttctccacttcctccttctcactctctggaagatcatcaatgtgtatgaaatagtcttcaaccggcgatgcaacaactaaatcaagattgttcagctcaaacatgccaattatatggccatagacatcaagcgaaaacaagggtgcacactcaggatcaaaaattgcatccttgagaagctgcagtgactcaaacgccagatccctcatttgctgtctgaatgaatcttcttcactggaatcaatgtcttcaggcaaagcaacacactcccaccatctcttcttgaatcccattgaaagtggtttccaggcttccatgaggagcgaaaagcttgattcatgagatgcaggctgccttttaagtttcttatacctcaacaaggtgaaagtgatagccttggcagcgaccaagaaaatatcattggttccattagcatgctgtacaaatttctgaagggcagatctccgtagtggttcagtcttggatccagtgcacagcaaagagtggtaggaatcccaatcagaatccgcacatgattggctgcagtagagttcctccctcacatccaccaggacaagcaacaactgatggcaaacggaactgatcagtgaaaggcaagttgtattagttaatt

SEQ ID NO: 45576 - DNA, 714 bp, Setaria italica
  Peptide Sequence Number=SeqID_111550
tacaagtagaacaatagtaggtttacttgaagagtagaagtttctgcattgcctttcatctacaaccaaatcatcagcaagctccatgacaattagtgatcttccatgtaaactatgactttgcttcttgaccacaccactgccttctggagcagtaggatctctacatagaataattgtggaaaagtgattgcgcaccctctcatcataacatacatgttcaacaagggtgcttttaccaactctcggtggaccagttatgggtaacacttgcaatctttctgtgcctggaggctctggctgcaacaagaaactgatgatcttctccagctctgtctggcggccaaacatgcagttctccagaaacaagtgcttgctataaggctcgcggcttatgggaggatatgatttcaagaagatgatgaactctgccatatcgctgattatgctatgcaagcttcctagcatcttctgaacctccttcgccccatcaccttgaaatgcaacgatcatcctcctggtagagaagcgcaggccctttgctggattgaatttggacaggggaaaggggtggtcgctaacctgaacattggaactctcctgctgcagcatccggtatgtgaaattatcaagcaggtagcagcctttgttcatggcttctctcagcatctggagctgatggagcatggcctggttggtgatgtgccgccctca

SEQ ID NO: 45577 - DNA, 941 bp, Setaria italica
  Peptide Sequence Number=SeqID_111551
gacaaatagaggatgaatttgtacacttcgaaagagcgtctcctttcagtaagattcagttacaggaaactcagaacttgacacagctacaaaggtaaaaaatacaaactttgaaaagaaaaatcatgctttggctaatatgttgaaagcaaacgagccaatatcgtggggaaattttacaggtatacaatataaactaatgactaactgctcctttcgaaactgtactcgattacattttctgtacaacaaaacaatcatacgatccctaatggtatatctctggttgcagaaaattcccctgaggaacagacacctagacgtccttgtgaaggttccgcggtgtcgtgttcatgggtcatacaaaaaactagctttaattggtgattttaggttccagcccctttgttgtgcttacttgtcggtaacagctcttcagcaccgattctaatgttagtgtttgatgagcgccgctttgatttgccatctagcatttcaacctcaagaataaaggttccacagacaggacgatggtcggaaaatttagactcccctcggaagtaggataactgagaaataccatctccatgccatagtattctatcacaccaggctggggttctcctctttttctttgatgtagcagcctctccagcataagaatcagagttgcaagagtacttgtatgtgggagcaaaatatatcttctcctcactccaccccttgaacgctcttcctgatgcacgctggatattgagctgatcctttttcaaaaagggcatcccagttattttcagtcagaagtttcttggtatcttcatagctcaaggaaatacggtagttcagatcccctaaccatatcgcccgatcatgatcaagaattttctcagggattcttcgcccagctcttctacaaatccttcgaaattgtgtgagcctca

SEQ ID NO: 45578 - DNA, 418 bp, Setaria italica
  Peptide Sequence Number=SeqID_111552
agtagggtagggtgtggggtgggtgggtactgggtgagcccagctaccacaaacgaaggcaagtgcacggtaccctgaccaacctgctagaccaccgtagcaggacactagcgcagcagcaccccgtgtcgtgaccacgccggccgccgaatctatcccggaaacggcaaccccaaccccaagcggggatgcccagggaaaccctgtcatctcccccgcggatgacacagatttttgagggccggcccggccgggtgcgccgaataattgcggggcgtgaccgtgatgtggaggggggttaaggcggggggaccatgtggccggcgccgccgatctaggccgggggtcgccgtcgccgccgtgctgggctgtctctgcctctctgggtcaggccgcatgacatgatatagcatcacat

SEQ ID NO: 45579 - DNA, 323 bp, Setaria italica
  misc_feature (310)..(323): n is a, c, g, or t
  Peptide Sequence Number=SeqID_111553
cagttgaggcacaagcctgagaccaaatcactcccatttcattcaggcttcaactgatgccatgttgtcatgcgtgctgtcgtgtttgtgtacataaaatcgggaaacaaactctgcatctgaactgatgctatgttgtattctacaattgtgcgagattggtagcattgtctttagagtgatgtacatcatttgcgttgctgttacctaccactgtgtatgttccttccagattgcttggtgtatgaaactttgagatccatgtttccaaatgtcatgatgcagttgtagtcgttcttctctaaaaaannnnnnnnnnnnnn

SEQ ID NO: 45580 - DNA, 443 bp, Setaria italica
  misc_feature (385)..(385): n is a, c, g, or t
  Peptide Sequence Number=SeqID_111554
tcaaagttctacacaaaagaaaacataatacctaccaaggaagcacgtgggaactaaacaataaacacttcattcaatcactctaccagaaataggttccacatgcacattagaaccaacaaatttgtatcaatttttccactactcagttcaaaagaagcaagcgattgaataataaatcaacaacatttgacgtaatttactttaaaatttgcatttctttagagagagaggaggggggggttgcagggacaacctgctcatcttcttcatcacagtaaccaagcaaagaaaccaggttacggtgatgcagcctggacagcaattctatctctgtgaagaattcctttgaaccctgaagagattcttgctgtgctcgttttanggctgctactgttccatcagccaacacacctctgtatactttcccataccctccttgg

SEQ ID NO: 45581 - DNA, 2679 bp, Setaria italica
  misc_feature (1)..(31): n is a, c, g, or t
  Peptide Sequence Number=SeqID_111555
nnnnnnnnnnnnnnnnnnnnnnnnnnnnnnntatccctgtgtgtccttggtctaggtctcttataggtattatttagataagagaattcgattacagccgcaaccaaacataggattcgttaccttcaataatcagattaagttacatttgagccaaccaaacaccaccttagatcatgattgtacttgtcccaaaagcccagcaaaataattaccccaagagaaaaccaagcagaagaatagtgtaatacgggcttgtcatcccttcggtccataaggccacccaccgggagacaaatggaacctactacagcccacacaagtcaaatggaagcttgaccagttaagcaagaaatcttaggctaaccttcattacatactagtacgaggacaaaaataactataaaccacgaacgaattttctaaacccgacgcaaatgcacctggtgacactgcacagcactatgatgcctggtcataacacaactagacatccatatgccatctttactatctacaataataacacaacttatgtatgcatacgatgcccggtcagcgtgggttgatgctgggcaccacgccactgagcaggttgctaccggaaacctccatggacgaaatgtagtgatcattcgaagaagccatccgcgtcgccgatgatgttgtgggtgtgccagtggtgttgctgctgctagagcccatcgccagggcaccggactctgacgatgctatattctctgtccccggcgtcatctgccatatcacctccagctcccgaaccacctccaccatagatggcctcgcgtccgtctcgtcctggcaacaccgcagtgccaacgcggcaaacctctccacgcattccgcggggtatgagcccatccggttatccaccaccgagaatatcatccctgactgattggctgccaacacctctctgactatatttcttccatgggaaattggctgcatcccagtcagtagttccaagaacacaacacccaggctgtacacatcgcttttgtctgtaagcttatgagtgaggaagtactcagggtcaagatagcccggggtaccctttacgacagtggagacatggccaggggcactcccctctgtttctggcaacggagcgagccgtgagagaccaaaatcagcaacctttgcaacaaacttcgagtccagtagaatattgctagctttgatgtcacgatgatatattggggggtctgcttcagtatgcaaatacaggataccacgtgatgatcccagcgcaatccgtagcctcatggggaaatctagaggcactttagctttagctgaaagatgatcacgtagattaccattgggcataaactcatataccagcatctgctcatcttcttcatcacagtaaccaagcaaagaaaccaggttacggtgatgcagcctggacagcaattctatctctgtgaagaattcctttgaaccctgaagagattcttgctgtgctcgttttatggctgctactgttccatcagccaacacacctctgtatactttcccataccctccttggccaattagtgctgaatcatcaaagtcatttgtacaatgtgacaattcttcaaaagtgaagtcttttacaccagcaattttcattgaaattctttttgcagagcgtttctttgaagaagaatgtcttgaacgtcttcgcaatatgataattgtaattagggatgaaagaatggcggctgcagcaaatgccgccatgactaccccaacaatggcacctgtactcagaatggaccttctaccctgtggtaatatgttgctataccaccctgggttgaagttgagaagctcatagggtccaaatatgtcagagtctggaatctgccaacctgtgaacatacctctgagcctagacacctcacttgcattgaaaatgagtgttctatttggaaatagtttcagggacatcttaagccttgggccttcttcccaaataaaagtagaaacttctaattggaacgataacaatgaaagcccagatgataagtactgctgaaatagagcctcatagggaacaaaatccgaaagcccaggactcttaagccggtaatccacataaactggaatggcacaaaagcacggtataggtgacattagcactctttcgtaaggcatgtcagtagaacatggtccacaaagtgtactgttatttgaggaacctccatctgcaacaactgtctttgattgacaatacttagaaatattctgttggttttgaactgtgcatacagggtttccatgcaacaggatggtaacattgtcagggggcgaaagaggcgttgatagattggtgagagcattgttctggaaatccagtataagacttctatttccactgagatcaatattttgccagatattagaaggaacagagccatccaagttgttgttgtccagtgacaatctttgaagattaggaaggccagaaaaacttccaggtatggaaccgttaaggtgattatgggaaagatcaattgtagttatattgctcgcaaattggctggatggtatgggacccctcaactgattccagctaagatccaagtaaccaagttggggtattccactgagatcaggaacaggtccttccaagctgcagttcctcaaactcaacttcagaagtgt

SEQ ID NO: 45582 - DNA, 670 bp, Setaria italica
  Peptide Sequence Number=SeqID_111556
taggtgtccgatctaataatatttctacttcagaaccttcagaaacttcattaactgggtttccattaactaggagacctctaacaacagcagtggcagagagagagtcatatcccagaaattcagtatcagggatgctcttgactatctcagtctcatttcctacagaaagtttgaccacattatgagcagcctgagattgtttccttttggttttccatttcaatatcaaatcccttcatatcaacagtgacacctcgttcaccagctatttcagctgtaatctctactggaaaaccatatgtgtcgtacaaaaggaaaacatcttttccagatagagaaggtttatttccattattaccagcacttagtaaggcctcatctagaagttcatctaataacttttcaccccttcccaaggtctggacaaatcgtagctcttccctttgaagttctccaataatagatttccttcgtgattcgacatctggatctatctgagtgctaaggctgatcactacctcagctagtgcaggtaaaaatgcaccttcaggatttccatgaccatcacctcttatacctatcaatctacccgtccgaactactcttcttattagccttcgaacaacataccctctcccaatattcgagggaagaaccccatctggtg

SEQ ID NO: 45583 - DNA, 1685 bp, Setaria italica
  Peptide Sequence Number=SeqID_111557
gtagagcgaggaggaggactacgacgcggaacacggcttcggcgacgagccaatcccaatcgccaagccggtctcggacttcgacgtggtcatcgatgctctccccccgggctcggtctccgacgtccaccagattgcccggcggatggtggacgccggcttcggccgcgagtgtgccgaggcatacgcgaccgcacgccgtggtttcatcgacgagagcgtcgctcgcctcggcattcgctcccgaacaaccgaggaggtccattccttaccatgggaggagctcgagttcgacattgctcgctggattccggccttcaagatggtgtttcggatcctaatccccagcgagcgccgcctctgcgaccgtgtcttcgacggcctcgccccgtatggcgaccttgcgtttgttgccgccgtgcgcacccaggggcttcagcttatttcattcggagatgcagttgctgctgccagccgcgcgccagaacggctcttccgtgttattgacatgtatgaagcagtccgagacctccttcctgacctcgaccctgtcttctcagatccctactctgcagctcttcgtgctgaggtctcagctgtatgtagcacccttggctcctcaatcaaaggtatattcatggagctggaaaatcttatccgtcgtgaccctgcccgtgttgccgtgcctggtggtggcatacacccaatcactcggtatgtcatgaactatctccgtgccgcatgtggttcacggcaaacactggaagaggtgatggaaggtgacttgggtgctgtcggtgcagccgctattgccgtcgatcctgatcgccctacttcgtcgctagctgtgcacatagcttggatcatggatgtgcttcacaagaatttggagaccaaatcgaagatatatagagatccaccacttgcttccatattcttgatgaataatgggaagtacattattcacaaggtgaatgacagtgagcttgggattttgcttggtgatgagtggatgaagcagatgatgagcagggtgcgccggtggagtatggaataccagcgtggggcttgggcaaaggtcatgtcagtgctgcagactggaggttctggcgttggcagtatcactgcaaaggccatgcttcagaaaatgcagatgtttaacagctacttggaggagatttgtgcggtgcagtcggattgggtgatcgcagatgagcagttgcgagcagatgttaaatctgcaatagtagactctgtgatgcctgcatatagaggcttaattgggagtttgagatcatctcctgaagctgcacgggacttgttcatcaagtacaccccagaggatgttcaggcacgcatccaacacctctttgaaggagtggccaagtgattagttaattatgtcatgttgtgctgctatacctttgattttgttgtcataactattaagctcgatgatctcgtgccatagggctgggatttgtcttagatgaggaaatattgccttgtccagctgtgtaaatttgtaggcgtttctggtgtatcaactggtaatggctatctaattgctatattaatagttgctcgggcttaatttctcctttagctttgagaaatctggtgtgctgtgtgtatttcaaattacttgcttatcttagtatttcataatttgtcaagtaaaaaaa

SEQ ID NO: 45584 - DNA, 485 bp, Setaria italica
  Peptide Sequence Number=SeqID_111558
gcctgctcgaccagctccggcgccttctcatcctgtccccgctgctgctcatcgtcgccgtgcagctctgggtggcgaccggcggcgacggcggagggggcggcatcatgtgcgccctctcggagatggtagcgggggaccacaggcggcagtacgggtacgggtacggcgtcggcggcgcggccggcgccggatcgtcgccgtggggcgtggcgctggcgttggtgctcgtgctcttcctggtctcgttccattcgtcgttccaggagaggtggtttcctctgcttggccggtgaaaataagattgctagagtatttgtgaaggagatccggctgctatggtagtacaagatcagcttacatttttatctctacgctgttatggtagcatgagataattagtttacatctttatttttagaattgtaagacttaagctaccatgtactctgtactacttacagcaatattaccacatttaagcg

SEQ ID NO: 45585 - DNA, 1190 bp, Setaria italica
  Peptide Sequence Number=SeqID_111559
cttttgatatctttgtttaaacctgcccctgttcatgatgttgcaacaatggatccttcaaaatctctgcaatctccaacaaccaaagcatatcttaatcctggccaacaaagtctgagttctatcaaaggatcttgatccatttggtgtttcatctgaatcgcactgtgttgccccttataagttggctgatccagaaggtgaatatgctagtgcttgtagaacatcaacaatccaccttgacaatgagtcttctaaatgggatgacttggatgatgctgcgaccaaggaaggaacagaatctgtcaacgacgaccatcaacataccaatccaccacgtgaagaacagcatgacacagtggctgttaggcagaagttacaagaactgtttgttttgcgacagcaggaggcccaatcctccaatggcactgttgattctgcttcagataaatcaatgcctcaagaagcacagtatggtgctgctctcccaacagacccacctgattccacctcaaaggctgatgcatctattgaagacctgacatcattggggaaatatcatggaaatgctgagctgctccacatcatcaatgaattatccaagagaacccgagcaatggagaaaaagctggttgagtcggataaagaaaaactgtttctgagggaatcagtaaaggacgcagaaagaaaagttcagcaactggaatacaagtttgaaaaactacaattaaactataactctttagcgccactccttggtggaccatatgataatgtggaaggaccatcaatatttatactgggtggctacagggggagtacttgcttatcatcactggatgccttttgccccagaacagacagactagtgccattatgtccaatgagctcagcccgtgcatatgcagctgctgctgcactgaacaataatatctatatttttggcggtggggatggcagtacatggtatcactcagtggaatactacagcaggggagagaaccaatggatgacatgcccacgcttgaaacacaagaaaggaagccttgctggaactacgctgaatgataaaatatttgcaattggtgggggagatggatctgtggtttttcagaagtggagatgtttgatccagcacttgggagatggatagacagtctgttcttattgtcggtcttcaattcgtattt

SEQ ID NO: 45586 - DNA, 539 bp, Setaria italica
  Peptide Sequence Number=SeqID_111560
gtagcaacagggtttagtgcagcaagcttttctgaaccactttcagtatctttgctcttatcatctgaatgcaaacaatgttaaacaggtgtgtgattcgagaatccacttggaagctcaaataagctttagtagtttcatgaacaaaggcaaggagaataaccgcatcataaaccaaatataaattgtgaagttgaaagtcagatattctctaaagaaacaaatcattacttagacactctgaaacaacaattgttatgtacaagtacagcaaaggatataccatctgcaatggggtatagtggaatagccactggaacctcatcagattcattacatagtataccaagtggacagaaaaatatcagagatagtctataataacagcagcagcatttacgtaccttcttcagtggaagagccagatgtggataaagacaggacaagcagttaaggaacaaatattaatactttgtttctttggtaaagatgcaataaaggaaaaaaaggaatgatatttctcccgagcttgctgtatt

SEQ ID NO: 45587 - DNA, 526 bp, Setaria italica
  Peptide Sequence Number=SeqID_111561
aggtcttcgctgggtggtggattttgctggtagcgcattgtgacagcaacagtgtacctgcacccgggaggcacgaaaccaaatttcggccaaatgaagtgccgcgctagagtattggataggatcctgaaggcgacatgtccaagtgtgttattgtttaggtgcagcaagcatgacgagcggtacaacttgtttggatctgccatgtggattttgagttcggtgggctgcacgctgacgagatctctaacctggctatatttgcaacatggatcgcatgagctttgtcctgcttcattacgataaaaaatttgaagtatatctgctgcattaggtcttttatttaggtcactgtccacacattttagggctatagcaatcaattgcttcaattgatgggtagaaacttcaacgagtgatgcatccttcagtgttttttgaaatattttcttccattttttcaaccacagtccccggagaattcctctagctgtgcttgggtagtatcgactgtattcccataccg

SEQ ID NO: 45588 - DNA, 615 bp, Setaria italica
  Peptide Sequence Number=SeqID_111562
tgagtaaacaggagttaatttttcctcgtgaacctgacggcccttatctttagctttcgcaaagaaatcatcgtggtcattaattaaatgccttgaaataacgttctttatttcctgatacaactcgctctggtgctctccagtgtaaaaaccaggtcttcgctgggtatggtggattttgctggtagcgcattgtgacagcaacagtgtacctgcacccgggaggcacgaaaccaaatttcggccaaatgaagtgccgcgctagagtattggataggatcctgaaggcgacatgtccaagtgtgttattgtttaggtgcagcaagcatgacgagcggtacaacttgtttggatctgccatgtggattttgagttcggtgggctgcacgctgacgagatctctaacctgcattcaacaggacgcaataaagtcactattgtatttgtatttagttacgtagaatgttcttttttattggacatagggtatctcttgatcgcatttacaaatgaaataaaggtaaaatttaatggacgacctaaaatatgttggagttcagttttgtttaactcctataaatgtgccgttttccaatgcaacgtgatggtatgttg

SEQ ID NO: 45589 - DNA, 688 bp, Setaria italica
  Peptide Sequence Number=SeqID_111563
gctatggaaagaaaaaggtaaactacaagctacgagattggctttttgtccagacagcgctattggggtgaacctttccctgttgtctaccatgatgataccaatgagatggtgcctctttcagaaaatgagctgcctctaactcttcctgaattggatgactttactcccactggtactggggagccacctttgaccaaagcaacggattgggttaaaaccattgatccgttatccaagaagccttcaagaagagaaacaagcaccatgccacaatgggctggatcctgctggtactatttgagattcatggatccaaaaaattctagtattttggttgacaaggctaaagaaagatattggggtccagttgacatctatgttggtggtgctgaacattctgtattgcacttgctttatgcgagattttggcacaaggttctgtatgatatgggtgtagtctccaccaaagagcccttcaagtgcctgataaatcaaggattaatactaggagaagttgagtatactgcatatagagacaatgaaggaagattggtttctgcagactcagactcaagtttgattgactgctaccaagaaaaagtacctgcagataaggttacaaaagttggagatcattatgtgctgaaggacgatacaaaccattcgtctaaatgctacgtagacc

SEQ ID NO: 45590 - DNA, 312 bp, Setaria italica
  Peptide Sequence Number=SeqID_111564
tttgcaaaattattttatattttaatcattataatagagccaattatatgggtgttgaatccaaaattttgtaccaactgttgatatgaacccaacccataattgatcttacattatgcaatttggttgggttggtttacgctcggatcagagttaagagttggaaaagagccattactggagagtatttatgaacacgaggaccattgcttttgcagtttgtgcaactgggttgatagcagaaacactgtacggttgtcatataatgccatcatgtagctggcatgtatctatcaaacaaaatagcaaagt

SEQ ID NO: 45591 - DNA, 390 bp, Setaria italica
  Peptide Sequence Number=SeqID_111565
ctaacaagtttgctctttccgggacttcaagttataatcgtcgcacattagcaataatatgtttggtgttgctgataaattgatagtttaactgcacattggtttcctgaattttcacttgttacatgtacccctatgtctatttgcaggttgacattgctgctggaggttggcattcaactgcactgactaacgagggagaggtgtatgcttgggggagaggagaacatgggaggcttggatttggagatgataagagtagtcacatggtgcccctaaaggttgagcttctagctggagaggatattgttcaggtaatacaccttgactgttcctgggatgttaatttagtctgctgccctcttcaattttctctccaagttgagaaac

SEQ ID NO: 45592 - DNA, 533 bp, Setaria italica
  Peptide Sequence Number=SeqID_111566
cgttcgccctgtttctccctcccctcgccttcctccgatccaggccccgtctgtcgtcttcgcccgcccccaaagctccaacctttccctcgtttttgcttggcgtctacggcctggtccgtccaggaaaacaacggattttgttttcgttgcgttgtttgctgctgtgctgttgccgcggtttttgtccgctcctcggagttcagttcgttccttctccatttcttgaagcgccccctcagtgggctgcgttattcgctttggattccgcagcttggtttggaagcctcggttcttggtttgggaaggatccccctttcaaggagaggaatttggtgtgggttgatggtatcctgagaggagtccgcgatgcaatgatgggttcttgaagccgaggtgaatctttgaccagcccaatctcccgaattttgagctgacgtcgctcggttcttgatccgccgggcgccatgggcctctgctacggcaagtcgggcgggggtccaggagcctgcggcggaggaaagaaaccccaa

SEQ ID NO: 45593 - DNA, 269 bp, Setaria italica
  Peptide Sequence Number=SeqID_111567
agctgctgcacccgcggtcggcgagggcgaaggcgtcgtcggggccgatcacgcgccgggacggcccgtcccgcgtccacccgccgatgagcaactcgtgcccgatcatcggcctccgcccctccggccagaaatcccccaccgactggcgcaagctcctggacgcgccgcccagcaccgtcggcggcgcggggctggaccagcagtacgcgaacgtgatcgtgtccgcggaggagctgctccggatggaggccgaggggcggcaggag

SEQ ID NO: 45594 - DNA, 522 bp, Setaria italica
  misc_feature (480)..(522): n is a, c, g, or t
  Peptide Sequence Number=SeqID_111568
atgcaacagggaaactatcgttgcctacctttgggctggcaccttacaaattccgtgcctccatttgggcatctgatggaacccaagagcgggaccgcgtcacctcactgatgcaagaggctgacggttggctccgcagaatacaagttgaccatccagatttccggttcttcgccacccatttcagcacgacgtggagatgactcatgactgtaaatggttgttagtataatgactattcgccgtctgaactgaactggcctcagcacatcttacctgtggcgcatagagaccaagtgcccttttgaaacggggtttgtacgagttaaaagcctgcatgctaatctccaataagttgtatgttgtaggtatcttttgtggggaggtaaaggtggatggttgaaaagggagaattggagacgtgtagaactgaaagaaacaaaaaggaaaaaataaagattttcattagagttggaaacnnnnnnnnnnnnnnnnnnnnnnnnnnnnnnnnnnnnnnnnnnn

SEQ ID NO: 45595 - DNA, 292 bp, Setaria italica
  Peptide Sequence Number=SeqID_111569
gatgataggtactacctggacaacacaactttgtggcaacattaatagaaggacgtgatcaaaagaaacgacctactgagttcggaatgaaccaagtcctccagccatttgatagtgggaagttcaatttcacaaaagttaggccagaggaagtgatcttcagattctgtgaagctgataaagactctgcccagtattttaatgatgctcctgatactgtttcatcttcatctagtgccattttgattaatgtgagtccaattggttactgccatgttcttttcgacccccc

SEQ ID NO: 45596 - DNA, 372 bp, Setaria italica
  Peptide Sequence Number=SeqID_111570
gagggggccgagccgctgaacacccatccctggtccccgagctccgacggccacgagatgaactaccacggcatcttccacgtcggcggcgagggctcctccgacgggacgtccccgtcgctccccttctcgtggcagtagctcctctctcggtggccagtagtgtgacctcgagttctcgcgttgtgtagttgttcagctgtagcgatcatcagttccccctgttctttccgtgtttattctctgctccccccgttctatttctccagtcatttgttcgttccttcgttttgccttcatggttcaacctggggaaaactcgcataaaatcagtgctaaattttctggaatcgtttcgatgaataaaaaaaa

SEQ ID NO: 45597 - DNA, 1099 bp, Setaria italica
  Peptide Sequence Number=SeqID_111571
aagggaaatagtacatcgaaggtacaactgaataaagcccacacttatggaagttttgacaaatgcaaaagcctccgcttattctgctcaatcataccaatactaataggtttgagcactttactataattatgacatgcttgcattatgattcatgtgtcacatgcatgacatattcattaggcttagatattaaagacttccggtgattatttttggatgatcttgttcgctgagcattcatggataaagctcgataatggacctgataccaagaagtgttatgattttgtagtccttaaatccagcttcaaagaaaatcttcttccactcttgctcatctcgttcaactccattgagggcgatcattaggagatcaaacaaaagctgtgtctctgtatgcttctcttcagacggtccccatccgagtaccatatctattattattacttttcctccagcatctcgagaagggatggcttccttgcatctcttcagcagcttgatgcactcgtcatcgccccaatcgtgcaaaatccacttgtggtagtcagcattcgccggtggtacgctctcgaacatgtcccccgcgatgaactgcacgttgctatcagatggagcctgtgcaacaacgtgaggaagatccagcacgctgcacttcaggtgcgggaacgccgcggcgatggcggctgcggcactcccatacggtccaccgccgacgtccacaagcgagtctatcccctgaaagacctcgccgcactccttgaggacaatgggcatgaggaagcgggtgtccgcggcgatagcgtcgtggagggagatgttgaaggcagcctcctggtcagccacgtcccagacggtttctccgtgcgcgatgccgaacgccgacaggtccggctgctcctcctgccggaccaacgcggtcacgacagtggcgagcggcgacacgagcagaggaccgaggagcatggtcaggagaggtgtcaagctcgtcgagcctcccgtcgctggagggaggagggcgggaggccggtgtcagcgtggtagagagcttcgcacccatctgatgatgatgagtggagcgagggtgagtggatgg

SEQ ID NO: 45598 - DNA, 413 bp, Setaria italica
  Peptide Sequence Number=SeqID_111572
cggcatcacgccaccacttcactccccctcaccagagctcagtgcctgcctcactcacctcaccatggctgaggcctgaggcagagctcgaataaatagaccggacccctggtgctactctactgccccgttccccttccccctctggaacttgggggttccctgcctcttcttcgtcgtctactcgtcttggcttcctccactgccctgccttcctgagctggcttcttgttcgcaggagccatgccgaaggagtacccagcctcccccaaagcccagcagctgcaggaatccaagaagcagcgcctgacatacatcctcgtggtgagcgcactctgcatcgccttctatgtcctcggtgcatggcagaacaccacgcttcctaagccagtaggcaactctgcggcgatccg

SEQ ID NO: 45599 - DNA, 611 bp, Setaria italica
  misc_feature (584)..(584): n is a, c, g, or t
  Peptide Sequence Number=SeqID_111573
tccagagaaagaaggacttcagtttgtttaagatgtattagaagtgacatggtgatgggaggtcaatttttcttgaggaaagtgtatgggattcatctagtgctagaacatatgaaccttttagcttatggactgttgataatgatgccggtacatttcttgtgagaagtggatataggaaacctcccaagaggcttgctctgaagcttgctggtccacctacatcaaggagttcagataacatcgttgttgatgctgaaattaaaacattttcagccgtttcctttgatgattatggaggaatgatggtgccgttatttggaatgtcctttgacgatgttggccttagataccatgggggttctcatcatctaaatgcaactgtgaacttgtcatttgtggctagatcctataatgataagtatagttcatgggagcccttcattgaaccaacggatggatttctcaggtaccaatatgacatgaatacaccaggttctcctggccaactccgtattacctcaactcgagatctgaatgtgaatgtatcagtttccaatacaaacatgttatcacaagcttangctagctggaacaatattagccttggt

SEQ ID NO: 45600 - DNA, 489 bp, Setaria italica
  Peptide Sequence Number=SeqID_111574
cagatctcgagttgaggtaatacggagttggccaggagaacctggtgtattcatgtcatattggtacctgaatgtgaatgtatcagtttccaatacaaacatgttatcacaagcttatgctagctggaacaatattagccttggtgatgaattatacaagaaggaaacattttcttccactgaacaaccagttcttgatgttcatcgaagaagaagttattatgttgtcccacaaaacaaacttgggcaagatatatacataagaacaactgagaatagcagctcacttgtaactctgttgccatctggggatgataggtccataaaagttcctgcttcaaagaatctattggattctcatttaaatggaaaatctgttaaatcatatcggttgatggtaactgccattctcgcggatgctgaggtcaaggttgatgaaggattagcaactggtgaatatatgactgcagtgcggctctttacagaaaa

SEQ ID NO: 45601 - DNA, 1871 bp, Setaria italica
  Peptide Sequence Number=SeqID_111575
gagcagcaaaagagcacaggcaaaaccacgcatacacactgccgtggcaatggccgccgacacggacaccaccgccccgctcctgacgagccacaagccgcccaaggcgcccaccatcgatgacaccatcgagaattacatgggcaccaccggcgtgatgcagctgttcaaggccatcctgctggcattcgcctgggccttcgacgcgcagcaggtgttcatctccgtgttcacggacgccgaaccgcagtggcactgcaccggagcctcgccgtcctgctcgccggcggcgcccccggcctcgccgtgctggctcccgccgggcgcgtgggcgtgggaccgccccgccgactcgacgatggtctcggagtgggcgctcaagtgcgccggcccggcgctcgtgtcgctcccggcgtcgtccttcttcgccggctgcctggccggcgggttcctgctcaccacgctcgcggactcgctcctggggcgccggaagatgctgctcacgtccctcgtgtccatgtccgtcgccggcgtgctcaccgcgttcgcgccgaacgtgtgggcgtacgccgcgctgcggttcgtgtccgggttcggccggtccatggtgggcacgtgcacgctggtcctgtccacggagctcgtcggcaagcggtggcgcgacacggtgagcgtggccggcttcttcttcttcaccgtcgggttcctgtcgctcccggcgctcggcttcgcgttccgtgaggcgtcgtggcggaacatgtacctgtggacgtccgtgccgtcgctctgctactccgtcctgctctacttcctcgcccaggagtcgccgcggtggctgctggtgcgcgggcgtaagcaggacgccatggacacgctgcagcagatcgcgacgctcaacggcaacagcatcacgtccagcttctccatgctgcacgcgtgcaccatgcgcgcggacggcggggacgccggcggcggcgccggtggcgcgttcggcacgatgcgggcgttctgggagcggccgtgggcgctccggaggctggcggcgatcatgacgaccagtttcggcgtcggcatggtctactacggcatgccgctcaacgtcggcagcctgggaaccaacctgtacctgagcgtcacgtacaacgcgatggccgagctgccgtcggccgtcctgtcgctggcattcatcggcaaggtcaaccggcggaccacggtgatcgcgctcaccgcggcggcgggcgccttcagcctcatgtgcgtcgccatcccggagggctcggcggcgcggatggcgtccgagctgctctccttcttcgcgaccatcacggcgttcaacctcatcctgatctactccatcgagctgttcccgacgtccgtgcgcaactcggcggtggggctggtgcggcaggcgctggtgctcggcggcgtggcggcgcccgtgctcgtggcgctcggccgggagcggagcttctattccttcggcgtgttcgggctctgcatcgggtgcttcgggctcttcgccgcctgcctaccggagacgaagggccggagcatgtcggacaccatggaggaggaagagcacaagcaggaggccgccgccgccgccgccgcagtcacgtcttgcaccggcggcgcaaccgacattgccacgaaggataacagcgacgtcgtgtagtgtgacgacgctcgtgttcgtttcacgacgaggcaataattgttgctctgatgacgatatttcggcggcgcggatagctagatctgctcggcaggtcaagcaccaagctgtcacccctgcccccgtccaatcgtgtaaagcttgccgccaagttgcttgcatataaattctgtttacaaaatctcgtcaagtccgc

SEQ ID NO: 45602 - DNA, 931 bp, Setaria italica
  Peptide Sequence Number=SeqID_111576
gggggatccagcaaaggcatcaatgtcagtaagaaaaatatcgtaattggagtagtcttccacatcagcgcaagtgcggtccaatttccactttgttgcaaactagaccaaaggattttattcacagcactagggacaatccatgctaatgctacacaggcaccaagttagttgaactctaaatcggtaaccgttgctatagccactccaaatgatacaactgccagtgtcatagccttctgagtggaaaccttcttctggaaaagcatgaattctgctacaacaattgttggggttacagcaatcttagccatttgatagaaacctacactattatgtttcaagctcacgttagctagcccggtggagagggacattacagcacccaaagcaaatatagatgagaaaggagtggatttcaaaggcggggcaaccggtaacaaggagaatgtcttaagagtggccattagaagaaatgcaaccgcataatgaattaatgaaagcgcaattgggaacttaaatccaacactccccatcaccattttgtttgccatgatgatcccaacggcaacagcgaaattgaatgtcaacgcaacacttggtccacagaatcgctgctgctggcgcttcgcgatttctgaactatgcatttcattgtacaaggagctccgcaactcctctagtgcccggcctgtctcgccggcgtcgctgtccttgcgcttgatgaacctcctcccgccgccggcgagcactgcctcccacacgcccatggccgtaaccgccatcacctccgacgcgtcggcgcgccaccaccgcagcttcatcatcccgcccgcccgccggccggcctttcccctccaccgcctcccggtcgcggtagagagaaaaaggggccggggatcttgcaaccagaacgaccaaagaaacggaa

SEQ ID NO: 45603 - DNA, 472 bp, Setaria italica
  Peptide Sequence Number=SeqID_111577
gccgggatcggggtgggaattcaattgtgttccttggttgttgacggagtcgccgccggggccagattcagttcccgcccggacgacggtagatgacggtggggttggtggcctgcgcctgcgcctgcgcgcgatgagttgttggactcgctctcgcgccagccgagctcttcttgctttgtttttttccctcctttcgctggagacgatggtgggcgggcacatggggcgagcgcccacgtgcgcgctcgctcacttgctcgtgatcgatcacttccgaatttctttcccctcttcaggacctcatcctcttcccaacgcgaatgtacgtgggagatctaagaactcgggcgcagtgattagcagcacgccgtgcgcactaacaatgatagtgccagcgcgaggggcttagctgaagttaagttttcttagttttttgccgggtagtttcaggccattcattggttgaaag

SEQ ID NO: 45604 - DNA, 263 bp, Setaria italica
  Peptide Sequence Number=SeqID_111578
ggctcagcggccgcgtgttgaacacgaacggcccgtcggcccagctccgccaggtccggaacgtctgcagcggcacttccaggtcgtgcggggccacggcccacgggtacagctgcacggtgtagccccacgccacggagacggaccagacgtagcccggcccgcgctggtagcagaagctctgctgcagcgcccgcgccgggtcgagccgcgacgcgcccaccagcggccggaccgcctccagcgcagtcttgccccgcggg

SEQ ID NO: 45605 - DNA, 461 bp, Setaria italica
  Peptide Sequence Number=SeqID_111579
aaacatcagctaattctcaggtcgccattaagtccgccatctttacactggcgctcacaaagccaccatccaagaagatctctatcaatgtgatgcagggatccggtaattgcaagagctccgacacaacaaaatactgcatgcaaatgtatgtgttcaggttacctgaaccatttgcccagcatgagactcccctcctggcatagctccaaatccaccatccaagttcttacagctaacaacgaaatctacagcctttgcacatcaattttatgcagacggtgtagtaatgataaggtacatagggcaatatacgagaaccaagtgtctgtccacttcaccccagaatcccagatatcaccagaaaattatccatcctcatcttacagtccagcgacagctaacatgatgtagctaatgaaaaggaactggatttcaagttcagtcagcttaacaaacta

SEQ ID NO: 45606 - DNA, 1217 bp, Setaria italica
  Peptide Sequence Number=SeqID_111580
gccgctgtgtaattggtacaagttcagtccaaatatattgttgacgctcaaaaaagttgatgtgatataccaacatgtgttcctgactccatgtaaaactgatcctacacctcagctactttgcttccaatgctaactacagtggtagagaagcatccacgttaaataacacaacatctgtgaagcaaatcaacgtaatgttctattttctcaagaaaatccgattgacaacatccaatggcaacgcataggcaggatccataggcttcaccccagggtactccatcaatgaaagccctgcaactccaaagtatgtgtgatagatatctactgcattgtctggtctatctgaaatgccaccattctctttgtcctgacagtttagtatgaattttgtaagcttttccttgtcaatccaatgcactctatcaatcattatcaagcttgataacacccaccaagagtaacaaacatcagctaatttctcaggtcgcccattaagtccgccatctttacactggcgctcacaaagccaccatccaagaagatctctatcaatgtgatgcagggatccggtaattgcaagagctccgacacaacaaaatatttgcccagcatgagactcccctcctggcatagctccaaatccaccatccaagttcttacagctaacaacgaaatctacagccttttgcacatcaattttatgcagacggtgtagtaatgataaggtacatagggcaatatacgagaacctagtgtccacttcaccccagatatcaccagaaaatgatccatcctcattttgcagtccagcgacatagtcagcaaccttgtccacatcaaggacatcgagccgatcgaagaggcagaggacctgcacggcgctgagcgtgtagaggacatgcggatcgtgcccgacgttccctccaaatccaccagattcggggtggtagcaggacatgatccagtcgacgacctcggcggcgtcgacggcgtggagcttgtggaggaggtccagcgtggtgaggccccagtaggcgccgttgaggcggatgtgctccatcaccagcgactcaaacgaatccttcttcttctccacggtgacgatgtagcggacgtgctggtccacggcgagctccgccttccccgccatggccgtgtcgctcggctcgtgctcctgcttcttcttcccctgaacgagagaggttctgaac

SEQ ID NO: 45607 - DNA, 308 bp, Setaria italica
  Peptide Sequence Number=SeqID_111581
gcgagagggaagggagggagggagaaacagagggcaaaacccaaaccctaacaatcatttccaggcccccgccccgcgtctccagaacgttccagaaccttcgaggaaccttccacaggagcaggcgcgagcgcgggtgtttggatcgggggaggcaacgctggcggcgcgcggcggcggcaggtgatggcggatccgcctggcggtgggggatctagggtttgcgtctgcggggggagacaggtcgaggcggcggcggcggccgggcgtggggctcgggagaagagagcgaggggagggagggagga

SEQ ID NO: 45608 - DNA, 506 bp, Setaria italica
  Peptide Sequence Number=SeqID_111582
atgcttcctgtcgctagaaataaaaggtgtgttttgtaattacctccttgttgcaagaaggtggctgtttccccagctgaagttgcaacttgcccttatgccagcggtgcccaaaatatgccaggcccaccaaaccagcagcagcagcagcagcagccgcaacaataggccagaagttgttgctttcctttgcattcttgtacagagataaaatcttcttcttccaccatgcatcccgtgggcctgaaccatcaggtttgttctgttcaccagatgaaacgacctttgatgaaccggttttggggttcacaatatgcagagttgactcctcagttttcttctcatttctactctccgtagctgattggcctaaatccttttcagcctcaattgagctgtaaataggtgatgagaacccaaccgactcttccccgaccaaactcattgccccttgtctaattgtctttttgttccttatttctttattttctttaaacttttccttt

SEQ ID NO: 45609 - DNA, 1042 bp, Setaria italica
  Peptide Sequence Number=SeqID_111583
gtggttgcccttttctttcggttctatttctatcgaacctccagtggtttccttccgcaccggcatgcaaccacactaaactcataatatttacatatccaaaaggggttttggaatttacacagccatcaaacatcctcgagccttcttgaaacattttgctccagatttgccctcatgctcttcattttgggccccatgtctcgagcaatatggatggatccagatgtcgatgatgggtttaccagactgatcacattccgcttgctcgggcatgcccatggataccgggacttgggtgattgccagcaacaaggatgtccttgatacggtttaacggtccaactgcatcattgattttctggaatgaaaacaagagtgtgctttcattagcactcagcagcctccttgttgcagaaggtggctgttccccagctgaagttgcaacttgcccttatgccagcggtgcccaaaatatgccaggcccaccaaaccagcagcagcagcagcagcagccgcaacaataggccagaagttgttgctttcctttgcattcttgtacagagataaaatcttcttcttccaccatgcatcccgtgggcctgaaccatcaggtttgttctgttcaccagatgaaacgacctttgatgaaccggttttggggttcacaatatgcagagttgactcctcagttttcttctcatttctactctccgtagctgattggcctaaatccttttcagcctcaattgagctgtaaataggtgatgagaacccaaccgaccaaactcatgccctgcaatgctttgccatcatcaaactccatatcacccaaggaaacatttttccctttgtccaaggatggaatactgggtaggtcaccctccaatttatgcttgcaagtttctttggtttttctcttcatcaccctcgttagaaactgcatcttggctgcagagctccttagtagacggtacctttagaataagtaactaagaacgaacctaaataagaaaggaaaggaactaactaacaaaactaa

SEQ ID NO: 45610 - DNA, 2427 bp, Setaria italica
  misc_feature (2412)..(2427): n is a, c, g, or t
  Peptide Sequence Number=SeqID_111584
gtgaagcccgcccctgggggaagggatgctgaccgtgctgcgtgtgcacctcccgtcggagatcccgatcgttggatgtgagatcacgccgtacgtgctcgtgcggcgccccgacggcggcatcttgaccgacgacgtgtctgaggcctctcccgttgatgggtacttcatgcgctacaagtggtaccgcatacaaagtgatcgaagagccgctgtctgcagcttacacccaacagaacaagcaacgcttcagtgtatagggtgtctgaaatcaaaaattcctgttgctaagagctaccattgttctgctaagtgcttctctgatgcctggcaacaccacagggttctgcacgaacgtgctattagtgctttaaatgaaaatggaacagaagaggaggagttatttggcaaatttggcagtggcagttcgagttcagggattattagtgctgcgttgtctggttcaacaccaaatctttcgcagagttcaggtgttaataatggacctacacctgtgtatccaacaggcactgaaaagagttccggtgaaacttggttcgaagtgggacgctcacgaacatatacagcaactgctgatgatattgggcatgtattaagatttgaatgtgtagttgtggatttggaaacaagggggactgtgcgagctcctacttcggtcatgacatcccgtgtgatcccagcaccaacccccactccacgtcgcttgatccctgtgaatgctgctgatgcaatggggcattttgatttagataaccgaaccacttcgtttgggacatttactgtcctgtcctacaatattctcgctgatacatacgcaacaagtgatacatacagctattgtccaacttgggcactttcatgggcttacagaagacaaaatttactgcgtgaaattattggttaccatgctgatattatctgtcttcaggaggtacaaaataatcactttgaagtaattttttgcaccagagcttgataaacatggatatcaagcactttttaaaaaaaggacaacggaggtgtacgcaggaagtcctcaagcaattgatggttgtgctacttttttccgaagggacagattttctcatgtcaaaaaatatgaggttgagtttaataaggctgcgcagtctttaactgatgctattattcctgctgcccaaaagaagttggctctaactcgtttggttaaggataatattgcgttaattgctgttttagaagctaaatttggtaacaatgggactgaaaatcctagtaaaagacagcttctttgtgttgcgaatacacatataaatatccatcatgacctgaaagatgtgaagctatggcagatacacaccctactgaaaggattggagaaaatagctgtcagtgcggatattcctatgttggtctgtggagattttaattcaatccctggaagtacatcacatgggcttcttgctatgggcaaagttgatcaattgcatccagatctgggggtagatcctcttggaattttgcgcccaccaagcaaactgacacaccagcttcctctggtcagtgcatactcatcttttgcgaggatggctagtgttggttatgatttggatcaccagcgaaggagggatggaccccacgacaaatgagccattgttcacaaattgcacgagggatttcactggtaccatcgattacatattttacacagctgattcattgacagtggagtcgttactggaactgttggacgaggatagcttgagaaaagacacagctcttccttcccctgaatggtcatcggatcatatcgcactcctagcagaattccggtgcaagccgagagttagacgataattttaggaggagctgtaggggagggattctcaacaatcagaagaatgccttcgtggaagtcaagaatgagaaagcctaagggaaagaggcttgtgattttcctcacccttttacattttgccctgatgttttctagtggctcaagttggaaagcgacttcctatagatgatatatctttgcaaagagaaataatttaatagatttggatgtcatttttagttttccagcctcactttctcacccctcaccttcagtgagtccaatgtccacatttttgtttcttaccttggaatttagttcttacaaactggaaatgatcccttccattgtgtatgcctccttttcttgtgacatgtaaattctgttgtatggggggttagcgcttgttttgtagacgtagttgttatttgaagatgcttagtcgaaaaaacagcgctgttggggttatcatggaggacatggaacagcacctggtgaggctgttgtaagaattttgagcttcacactggggaggctatattgaatgaaaactgtgaaatttgatgtcaaaaaannnnnnnnnnnnnnnn

SEQ ID NO: 45611 - DNA, 2570 bp, Setaria italica
  Peptide Sequence Number=SeqID_111585
aagagagagaaaacagatagcgcgaagagcgagagggaagggagggagggagaaacagagggcaaaacccaaaccctaacaatcatttccaggccccgccccgcgtctccagaacgttccagaaccttcgaggaaccttccacaggcgagccctcgctcccccgcccggatctccccatttccctccggccagtgcggcgggatcctgacgctggcgctgtctggtggggtttcgtgcaggagcaggcgcgagcgcgggtgtttggatcgggggaggcaacgctggcggcgcgcggcggcggcaggtgatggcggatccgcctggcggtgggggatctagggtttgcgtctgcggggggaggacaggtcgaggcggcggcggcggcggggctggggctcgggagaagagagcaggggagggagggaggatgctgagcgtggttcgggtgcacctgccgtcggagatcccgatcgtgggctgtgagataacgccctatgtgctgctgcggcggcctgacggcgcagtctccaccgacgacgtgcccgaaaccgcgcccaacgatggccagtatatgcgatacagatggtatcgcatacagagcgatcggaaagttcccatctgcagtgtacatccaatggagcaagcaacaattcagtgcctaggctgtctcaagtcaaaaatacctgttgctaagagctaccactgttcagctaaatgcttctctgatgcatggcagcaccacaaggttttgcatgagcgagcaagtagtgctttaaatgaaaatggagctgaagaagaggagttatttggcagatttggcagtggtggttctggggttttaagtactgctgggtctggttcattgtcaaattttggacagagccctggtgttaataatgggcctgtgcctttatatgcctcaggcactgataagaactctggagaaacttggtttgaagttggacgctcgcggacatatacaccgacggctgatgatattgggcatgcactaaaatttgagtgtgtagctgtggatgcagagaaaaggtctccaatgggacctccgacttcaattatgacatctcgtgtaatccccgcaccaacccccaccccacgtcgccttatccaagtgaatggggatgttttaggtcacttggatttagacagccaaacttcgtcatcagggacattcactgtactgtcctacaatattcttgctgatgcatatgctacaagcgatgcatatagctactgcccaacatgggcactttcctggacttacagaagacaaaatttgttgcgtgaaattattggttaccatgctgatatcatttgtcttcaggaggtacaattaaaccacttcgaagatttttttgtcacctgagcttgacaaacatggatatcaggcgctttacaagaaaaggacaacagaggtgtattctggaaatcctatggccattgatgggtgtgctacttttttccgaagagacaaattttcacatgttaaaaaatatgaggttgagttcaataaggctgcacagtctttaacagatgcaattattcccgctgctcagaaaagggtggctttaagtcgattgattaaagacaacattgcactaattgcggttttagaagccaaatttggtaaccatggagctgaaaatcctggtaaaaggcagctcctttgtgtggcaaatacacatataaatgtccatcaagacctaaaagatgtgaagctttgggaggttcataccctcctaaaaggattggagaagatagctgtcagtgcagacattcctatgttggtctgtggagatttcaattcaacccctgggagttctccacatgggcttcttgcagtgggtaaagttgatcagctgcatccagatctggccatagacccccttggaattttacgccctccaagcaagttgaatcatcagcttcctctggtcagtgcatattcttcttttgcaagaatggtaggtgttggctacgatttagagcaccagcggagaaggatggacccagcaacgaatgaaccgctcttcacaaattgcacgagagattttactgggactgtcgattatatattttacacagcggattcattgacggtggagtcgttattggaacttctagatgaggaaagcttgagaaaagacacggctctcccttcacctgagtggtcatcagatcacatagcgcttttggccgagttccggtgcaagcctagaatcagacggtgatgtgctaggtcttgtacaaaaggttaacgtcagcatcgttggtgccttggtggtggaacactcttccatggcggaacttgaggcttggcggaacgcgggccctcggtgaagcaagcagccttaggaaacggcctcgggaagaggaggcttgtaacgttgattttaccttacatttcgtcagctcatgatatttgagctgcccctgtgtaccattactttctatagaagaaaatacttgagagaaatatttaacagcaacagcttgtaagcctcttcctttccctttcttcaactttgatctccttacaaaaaaaaaaaaa

SEQ ID NO: 45612 - DNA, 554 bp, Setaria italica
  Peptide Sequence Number=SeqID_111586
ggactctgaattatgttagcaattacaatgatgagatgtgatgctaaattgctaattccccatcagcatgtaagttactcatctgaatctctcatgcttttactgcttcaattcatagatgtcagtgtatcactagctactcgtgcaacttgcagctttgataccgtcgagtaatgcaggccagtttttctttcgccttctgcttctatgatctatgctttcttcttcatgttattatcctttttttccagatgtgattgctaaatgagccagcttctattgttcggaaaaaaaataagctagcttcttaactgtaaatatggagctagctagtcgagttcgcgcatatgcattgaagaccactcatggattgcttctataacttttagctttcaatttttttcattgcgccccttgaaaaggttagccccgtatacaaatacaagtgagacttatagcttcctcaagatttcttgcaaaccttgtattttgtcctacttgtcttaattgcccaggctcataaaatatataggacatgactatttctagccccg

SEQ ID NO: 45613 - DNA, 495 bp, Setaria italica
  Peptide Sequence Number=SeqID_111587
ggggttgtaattgaccttttgatcgggcttctccttggactgatactcatactcttgctcattgagtgattagcactcatgctctggctcctgattatcaatgtcagatgaaacaccgcttgcagaagcagtaagcacaaagaatgattgatgtgtgaagaagtataggaaacctagatttgcttcgattgccagttagaacaggcatggtagctgcattcctttcagtttttgattcattaacgccattattatggatctccccattttgcagggggagttgtcttcttgtgccggactccttggcattccactcatttgttgagttgatgtggcttccttcaaaacagcaactgcagcaagattttccgcagaaacttgagatgatgccttggacttccgcccacgacggtgtcgcttgcttctagcatcctcagagctgctatcactctcactttcagcttcactgccactctctaacatccttttgacttg

SEQ ID NO: 45614 - DNA, 1068 bp, Setaria italica
  Peptide Sequence Number=SeqID_111588
atccagaacaagataaatttatgattctcatttgattccaccgacgaatagaaaccgtgcaacatgttctacaaaaacatatgctaggcacagattatttgtctgaagacaactgaaccgcatccaagatcatcatcccaaacaacatatgcaacactctacagccataacaccaccaggggctcctcaagtatcaaaacggcttctctaccgactaccagtagcaacttaattttaacataaagtgccgatggatcgatcaacagccaatgccaaaaggtagtaaaaacatttcactgccccctacttcccagcagaatctggggagccatctccgtaggaaaccaggcctttcttgcctccaggacttgggcttgcagacaccgaacgggactgggatggagacggggaccgagacttctcatcacttgcacgcttaggagacggggaatctggtggggaccgatcatgtgctggtggtggagaccttgatcgtgacccggacaggcggctcctggagactgaccgtgcacgctcaccgcgtgaccttggtttcccggcagggggcgaacgactccgtacagggcttctgctgtagccacctccccttcgtcgctctctgtggacagggctgcgtgaggtgcttcggctcctcctcctgtaccttggtgatgatggtctgcctctgggtgggcttctatatcgtcgaggaggtgacctatggcgggaaccccggtaacccatgtatctgtcacggtcacttcttccaccatagcgatgcgagcgatcagcagaaggtgagcgatattgtcttgcaaatgagtaccgctgagtaaaaccacgtcccctccttatgcgttttggagacccatcaggagagccagtcctggatgggctcctcccattgtttggtggtggtgatattgccctgcgaggtggactgggacttctgctagtgttcctgcgagatcgaccacctcttacagggcttctgctcacacttcttctaggtattctcacagggctcctgctcaggcttctacgtatattccttcggggacttctcat

SEQ ID NO: 45615 - DNA, 2103 bp, Setaria italica
  Peptide Sequence Number=SeqID_111589
aaaaaggaaaaactaaaaacaaaaaataaaaaataaaaacgtaaacgaaaggaaaggtaagaacctaattatatcgtcgaggaggtgacctatggcgggaaccccggtaacccatgtatctgtcacggtcacttcttccaccatagcgatgcgagcgatcagcagaaggtgagcgatattgtcttgcaaatgagtaccgctgagtaaaaccacgtcccctccttatgcgttttggagacccatcaggagagccagtcctggatgggctcctcccattgtttggtggtggtgatattgccctgcgaggtggactgggacttctgctagtgttcctgcgagatcgaccacctcttacagggcttctgctcacacttcttctaggtattctcacagggctcctgctcaggcttctacgtatattccttcggggacttctcatcgggcttctcctggcaggcctatgtgggctccttgaaaacctaacagggctccggctaacacttcgcaatggagatcttgaagaggtccgggtaatgcttcttctcttctccacaggtgggcttgggctgacacttttacgtatatgagtcctctccgggctcctgcttggagttcttcgttgcatggacctagctgagctcctgctaatgcttcttctttgagctttaacaggactcctgcttatgcggggagtcgggcttctgcttgcctctctgggtgagctcttgctggggcttcttctagcagggctcctgctgatgctccgctgtctagctggactcctggttttacttcttttgggagcacggacaggacttctactgcgactatggtgaacagggctcctgctagctgatctcttcggggttgtaattgaccttttgatcgggcttctccttggactgatactcatactcttgctcattgagtgattagcactcatgctctggctcctagatttgcttcgattgccagttagaacaggcatggtagctgcattcctttcagtttttgattcattaacgccattattatggatctccccattttgcaggggggagttgtcttcttgtgccggactccttggcattccactcatttgttgagttgatgtggcttccttcaaaacagcaactgcagcaagattttccgcagaaacttgagatgatgccttggacttccgcccacgacggtgtcgcttgcttctagcatcctcagagctgctatcactctcactttcagcttcactgccactctctaacatcctttttgacttgtgttttgatttcctatcacgcttcctccgccttctctcacgcctatggtcgcgctttcttcttgaacgcttgtgtttatttttctttgtgtgtctctttctgcgccttcgtctgtcatcacttgagctgctgacatcagatgagtcactggagtaagtatcagaatcgctctcagaatccgatgattcagtctctgactcagaagagctatctgattccgaataagaatatctcctcttcttccttttcctttttgaagactttttacgacgtcccttgtgttgtccttcatcactttcctcatcggaagatatatccttcaacaactttgatttggcagccctcttttgatcatgtttgcggtcagtgagctccccacaatctactatcctaactggaacaacgggagtcgaatcaggtgcatccacatcaacttgttcgatcctcttcaacacatcatttccaatgacaagcttgccaaaaacagtgtgttttctgtcaagatgagaattaggctggaaagtaatacagaactgggagccagtatctgccgttgtcaacagaccacgatcatcatggcgtaggacacaagcttcatctgcaaatttcccactatatatgctttctccaccagacccacttcgttttgctaagtcacctccttgtgccatgatacccttgatgacacggtggaaggttgatcccttgtaacataatggcttcttagtctttcccagctcacctgtgcataaagctctgaatttctcagacgtcaggggcgcaacgtaagcaaacaactcaaagatcattctttcactatcctgtt

SEQ ID NO: 45616 - DNA, 183 bp, Setaria italica
  Peptide Sequence Number=SeqID_111590
tttaagtggtggtgggcaggctatttttacctcgatttggtcaattcgaagcatgcaatcgttgtattactatgttagtaaggcgcagtaaagtttcgaccccaattcaggcttctgctgttcagtgtcttgatacagtcgggaaaaaataaaacaatttcattggccccaattcatcgcaag

SEQ ID NO: 45617 - DNA, 310 bp, Setaria italica
  misc_feature (54)..(54): n is a, c, g, or t
  misc_feature (303)..(303): n is a, c, g, or t
  Peptide Sequence Number=SeqID_111591
ccatgccacctccgtgttcaggaactcccagttcctccgcagccgctccgcggngaccgtcatcagcgtcggcatcttcgccgccgccgtcttcacctgcgcctccgtccacccgagctcgtccctgaagaacgccgccttccaggcgagccgctccggcgtcgcgctgaacgccgcgatgatcgcgtccttgaacgcccgcgtcctgcgcagcacgccgaacccgtcggcgcgggccaggacggcgtcgacctcgtcggggctcgcggtgagcagcttggagcagtaggagatggcgaaccngccgacg

SEQ ID NO: 45618 - DNA, 909 bp, Setaria italica
  misc_feature (787)..(787): n is a, c, g, or t
  Peptide Sequence Number=SeqID_111592
tgtggcaccgcagacgacaaatcagccaaggttgcggcaagcctcagccacatggctcagtgggagagcgcccgcctcgaagctgaggcacggctggctcgagagtctaagatgcgaacagcagcgccgacaccaaccacactccatgggcagcaaacgaatgtacctgcctccactgcttctccatgccttgacgtgttgcatgcatggcagggtgcaaagatagacctggagtcacctacctccacactgacgtttacagggagcaatagtggcatgctgccaacccccaggaccaacagactagaggtatcagaaagcaactctgtgatgtgggagaggagtgatgaactggagggtgaagaaagcgattggcagttctacagcaggcaccaagtgctgggactggaaggcaaggagagggaagaggacttcattggctgtgaagagccgtggttctcaggaatggctggggttggagctggcttcacaggcatgctgcttgatggatccaatgagcatgacgcatcagaatgctggggtgagtccagcaatggccaaactgagcacagcaaccaagcatcagatgaggaggacaagaattattggaatggtgtcctcggcatggtgaactcagagctgccaccccagtcacccccatccccattggtctagaatatacggcttctgaccgaaatctattgggtcatcagaagtcaaaagggaaacagaaagagcgctacaaataaatgctacaactgctgcaacagtatgaattgttttttcnccatgcatgtgaaagtgaaataattagctattgtgtggatctagtaaataaattgtattaatttatgtcagtttcttttttgttggcctagggctagaaataactgtatgatagccaccagg

SEQ ID NO: 45619 - DNA, 976 bp, Setaria italica
  Peptide Sequence Number=SeqID_111593
attgagcactgccgtgcgacaagagatttgagtagttgtggccgctatgtgcatcatgtgcttacctcgtgtggccatgccgcattatgtgctgagtgcagccaaagatgtgatgtctgcccaatttgcagaagtccaataacggacaatggaaacagggttcggtttcgtctttacgacaagtgcattgaagcaggccttatttctaagcagcttgatgaaaggtttcaggaaaaggaagcctatggcaatcctgttaacacagatgtccagcggctgcattcattgtttgacgttgcgctccagaacaatcttacatccttgatttgccactatatcacagatgtttgtttggatgacaatgctgtgtcaagtgatccgcttctggcttttcttttggatgaggtggtcatcaaggactggtgcaagagggctgtaaatgcgctcatttctaagattggcatgatttatagatctggcctagaaatgatggaatctaaattatcccaactgcaaaagtttgcagcacagttggcaggaatttacagtgtacttgaagttatgatcgcatctttcacagaggcagtttcagctcatgttaatgacctgcatcaactcattgagaacacattgaaggcaaagcagcattcggaggccatgatctggtgcatcaggcatagatttcttcaggacatctactcacgatacgctgattatacatcatggagctctgatgtgattcaaagaaaggcatctgcagaagcaagaaaatggcctgatatttttgataaagggtcaggtgacagcgaagccaatcagggtacactgttcattgagcaggctctacaaaaccttgggattgaacaaagttataggagtgaggaggaagaagcagcaatcacacgtttgcagaatgaacaatcatcatctatgttctgttccacaattacagctgatcattttagtctcaacagat

SEQ ID NO: 45620 - DNA, 817 bp, Setaria italica
  misc_feature (767)..(817): n is a, c, g, or t
  Peptide Sequence Number=SeqID_111594
cgtccgatgacgacgaggacgaggggagatgacgacgagctcgccggcggcgagggctccggggaggcgaggcggcggcggatgctggccagggaggaggccaagctggagaaggagatcgtgcggatggtcctctccggggaggccgaggagaagctcaagcccaactcgggtcagtccgtggccgtcggcgaccaccacctctgcgtcggcttccacgacgagcccggcggggagtaccgcgtctgggagtggcacggccacgtcatgctcttcgacgacgaggatgggtactccgcagagtacatctacggcaaccacttcgagccgctcgccgccgccacggccagggccaagaagaaggagaaggagaagagggaaaaggacctgagcatggggcttcgggatttggttgtgtgcaccgacgacggtgtcaatggcaatcgatccaaggaaaacggcagcagtggaggacctagggtagtgcgcaggaatgttgtcaattcccctgccgcgcctgcaaggtaatgcctttctggcgcgaccttgcgacaatccaagtggcttggtaaaagcaatgcatcaatcccagtgacagaagcaaataaagatttgttgatctttttgtcgctgatctgtttaagccgtttcttgtgttcagatgagaaatcatctatactttgcttctgttatgatacatacagtttactactgggttacatatatgctgtttgttgaatcaaatgtggttccttttatcttgctgnnnnnnnnnnnnnnnnnnnnnnnnnnnnnnnnnnnnnnnnnnnnnnnnnnn

SEQ ID NO: 45621 - DNA, 388 bp, Setaria italica
  Peptide Sequence Number=SeqID_111595
ccaggtttttcatcagtatttattgattgtttagtaggagcatacaaagcacgtgcatagagaactgggaacggaaatctgttcatccagatagggatctgcactgcagaggatgagcagggtacaacactacagcaagctactctatttcacatggtggaatggaggacctggccaggacggcctcagaagggcggcggcggcccgccggggccggggtggccgaggaacggcgcgcagcagtcctggagcaggcagcagcagcagagaacgtagaagcaagatcccagaaagcctccgaagtcaggtccccagaaaccaggtccaccgggcggcggccccagcccgcagggcctcctccagggtcggccccccacccagggtccct

SEQ ID NO: 45622 - DNA, 533 bp, Setaria italica
  Peptide Sequence Number=SeqID_111596
cgctgcactgggacaaggtccgggcgtgctccgaccgcgacatggtctgggatcggctcaagtccaactcattccagttggacgaggacatgatcgaagtgcttttcacgaacaatgcggcaaatgcacctgctagggacacaccaaagaaggctggagtaccacaatgtaggcctgaagagaaggtccttgaccccaagaaggcacagaacattgccatcctgctgcgcgcgttgaatgtgacgctggaggaggtctccgatgcactgctagatggcaatgctgaatgtctcggggctgatctgttggaaaccttagtaaagatggctcctactaaagaggaagaactgaaacttcgaaactttactggggacttatcaaagctgggttcagcagaacgttttctcaaggcagtgcttgatatacctttttccttcaaaagagttgatgctatgctctatcgagcaaattttgacagacgaaattaaattacctcaaggaaattcttttacaatagaggccgcttgtgatag

SEQ ID NO: 45623 - DNA, 344 bp, Setaria italica
  Peptide Sequence Number=SeqID_111597
catcgatatcacctgcaacatctatctgtgagttatttactactgattttccgtaatctctcttagattatatatctattgaggcaaattattcgtctggatccatttttctataagttataacatgaattgcttggatcattgatctaaaaatactgatattgacttcactaactttaatatgcactccagttaaacaattatttgctgtgtaccaaatcagcttcttgtgttgataatacttgaccttgggcagtgtttaaggatggtctgttgacaaaatcatattttgaaatttggacgccaatggtttgtgacactcttgacttactatttttcttttt

SEQ ID NO: 45624 - DNA, 747 bp, Setaria italica
  Peptide Sequence Number=SeqID_111598
agggggcaaagggctctgaagacttgcagggcaacactactgggaatcacacacatataggaagtcagacatgttccgatgatgaaattgttgtccacacggctctgatgaaataagagcaaccaaactgaaataaattggatatgcacaaacataattgaagcaggaccaaatcagacatcactgaggcaggcaacgagctactctacagtgtaaagcaaaaggcttcaatatactagatttttttaatggattttctacaacagtgagcgacaaaatcttgacttgtatcgatggccaattacaaatgggttacatttacctgtgttaaagaagcagaggagtactgtgtttcaactttaaaatcaagttgtgaaaaattctaatactctgattttcatttaccagttgcacaactagagaccaaaccacaggtaacaggtcgcatttctctgacacgtgaaccagtagatgcaataacactagttcaccttttgttaactttgatgtacaatcataactgggttacaagaaagaggtggcatcatttgctggaacaatgaggtataatactattgtaatgtactaaattgaaaaactgactagaaaatcattgtgcaatagaatgatgagcctatggaagcaagtcaagttcactaaagcaaaacaccaagggttttatgtgtaactaatcatgcaatatgttttctatgtacacttaatattcagaactcatgccaatgtagt

SEQ ID NO: 45625 - DNA, 883 bp, Setaria italica
  Peptide Sequence Number=SeqID_111599
tacttgtcttgatgaaattaaatttttgttcgacaaattgaaccttgtcttgataagagaacttcattcgcacaatactctatctcaccaagcaaatgaacgattaggactgttcagggcttgtatttacttcaaccaaatacaatcctgggaatatattcaagagagtaattcgtaccagaagaaagtagcatcatatataaagtaaatatatcctgtacaggaaatccatttcaaagttgaagacttccaggagttactaggcgtactcctacaggttttgcattaagttatcctatgatttataaattttgcaacatgtgcttatacaaacaagaataaaagggtagttcagagtctttttatgcaaaattgttaaactaggacaatttactcacagattggcacttcattgaacatttgtggcaagtgagcctatgactgagagtacatgtccagcaaactctacaacccgggaaaatgtttggattcatgcagacatcaacaatcgaatttctgtatgaggaggttataacaacccaaacatcttagctcttaaattaaaaagcagcagcagcaacaccttatattagcagtatataaaagctgcagcaagaagaaaaaaaaaggaggtttaaactcgcacgtgcttttgcccccaagcgtttcgacatgtttaaatattgatatccgatcatcgcatgcagatgtaacggatagaataaggatggcacgtaaaccaaccatatacaagccttgtggctccatttaacacttacccagtgtgatagtctcttggcaggtacacgtccctcacaggaccgaacctttcaaagggaactcggagctcctcaggcctgcatctcagtgggatgttgcggac

SEQ ID NO: 45626 - DNA, 359 bp, Setaria italica
  Peptide Sequence Number=SeqID_111600
taaaatgattcgcttcaagttcttcaagcgtttgaaaagtcatgaaagtgcttgaaaccaacttctcttcattatatcttcccatggaagacacggttaaaccctcttgtcttgatgaaattaattttgtcgacaaattgaaccttgtcttgataagagaacttcattcgcacaatactccagtgtgatagtctcttggcaggtacacgtccctcacaggaccgaacctttcaaagggaactcggagctcctcaggcctgcatctcagtgggatgttgcggaccaggaggctgacagaaccttggtcaccgccacgcccaccacggccgccgccgcctcctcctcctccaccaccaccg

SEQ ID NO: 45627 - DNA, 528 bp, Setaria italica
  Peptide Sequence Number=SeqID_111601
cacatagtatggcatggtaaacaaagaatatagcacatattgatcatgatagcatgtgccccacaagttaccaccacagtttcatagtatcagtggatcctctacaattatccatgaagcacagctaacaacttacaaacatgttcatcaaacggtagcaagcctctcaaaaagcggttaggagcccaggctcatcttagacccaaattttcttgtgtgcatcttcataaaatgattcgcttcaagttcttcaagcgtttgaaaagtcatgaaagtgcttgaaaccaacttctcttcattatatcttcccatggaagacacggttaaaccctcttgtcttgatgaaattaattttgtcgacaaattgaaccttgtcttgataagagaacttcattcgcacaatactctatctcaccaagcaaatgaacgattaggactgttcagggcttgtatttacttcaaccaaatacaatcccagtgtgatagtctcttggctggtacacgtccctcgaaagtagcatcatataa

SEQ ID NO: 45628 - DNA, 484 bp, Setaria italica
  misc_feature (307)..(307): n is a, c, g, or t
  Peptide Sequence Number=SeqID_111602
gcctcagaagcatcataagcatcaacaaactccacgaatccaaacccccttggctccaaaacatgttcatcaaacggtagcaagcctctcaaaaagcggttaggagcccaggctcatcttagacccaaattttcttgtgtgcatcttcataaaatgattcgcttcaagttcttcaagcgtttgaaaagtcatgaaagtgcttgaaaccaacttctcttcattatatcttcccatggaagacacggttaaaccctcttgtcttgatgaaattaattttgtcgacaaattgaaccttgtcttgataagngaacttcattcgcacaatactcagaagaaagtagcatcatatataaaagtaaatactatcctgtacaggaaatccatttcaaagttgaagacttccaggagttactaggcgtactcagattggcacttcattgaacatttgtggcaagtgagcctatgactgagagtacatgtccag

SEQ ID NO: 45629 - DNA, 737 bp, Setaria italica
  Peptide Sequence Number=SeqID_111603
atgaccgggatctagcacggccacggggcgcggagagcgtgaacgtgagtatgaacgagaacgagaccgtccacggcgagaaggtcgacgcccttcatgatcagaataccctcttggccccattcgtctgcgcatgtcctcaggccttttccgtgtatccgcagcaagaacaacagtgatctcacgcccagaaaacatctggcggttcatgtggtattgcgcctcagaagcatcataagcatcaacaaactccacgaatccaaacccccttggctccctaaatgatggaaaaaaagctttgatgagtaaaattcacatagtatggcatggtaaacaaagaatatagcacatattgatcatgatagcatgtgccccacaagttaccaccacagtttcatagtatcagtggatcctctacaattatccatgaagcacagctaacaacttacaaacatgttcatcaaacggtagcaagcctctcaaaaagcggttaggagcccaggctcatcttagacccaaattttcttgtgtgcatcttcataaaatgattcgcttcaagttcttcaagcgtttgaaaagtcatgaaagtgcttgaaaccaacttctcttcattatatacttcccaataggaaagaacaacggttaaaccctacttagtacttagaatagaaaattaaattttagtacgaacaaaattagaaaccttagttacttagtaattaaagaagtaaacttta

SEQ ID NO: 45630 - DNA, 625 bp, Setaria italica
  Peptide Sequence Number=SeqID_111604
aaaaacccgtttaacaaacaaattaaagaaccgactaactaggacaaggacgaacgaccgaacctggaaccgtgaccctggaggcgacaccgatgggcggggcgacctgcggcgaccgccgcggggctcctcgtcctcctctgctgctgcgactggagacttcctcctctcatcatgaccattgtctgcaccacgacgatcattcctatcctcaggtgtatatgatctccgcttcttatcgccatcatgttctttaggctgctttgatgtccttctgtgctcttccttagcccgtgctggggaagcagagtaatcatcacgccttctgggggctggagagtatgaccgggatctagcacggccacgggggcgcggagagcgtgaacgtgagtatgaacgagaacgagaccgtcctgcaccagacatagcaacttgtcagcagaggaaatcatggtgttcaaaacgacatccaagatcatatcaattctcaacaacacattttgctgcaagcaggtgcagtcttcaaagatggaaataaaatcttgaacatgatagaacagcattgcatgattcatcaagcatgatatttaatggattacgaccaaacttaatagtcttcctgaac

SEQ ID NO: 45631 - DNA, 1332 bp, Setaria italica
  misc_feature (1)..(74): n is a, c, g, or t
  Peptide Sequence Number=SeqID_111605
nnnnnnnnnnnnnnnnnnnnnnnnnnnnnnnnnnnnnnnnnnnnnnnnnnnnnnnnnnnnnnnnnnnnnnnnnntttttttttttttttagttacaaatgaattcaaatgccaaatcaacttcaaacaccaaatagctagggtcatcacaactcaagtccctcaacaacaaaagtaccaacaccagtactacttggtaaccgtctcttgccaataccccgcctttcaaaccttccatccttcttgccgctcgtcgtacctttcaatcttctccccgtcaaaacataacaagcttctaccagctaaccttcaaccaacatcacacagatgaagcgacacactttcgaccgccacttcctatcggcggcacatcaaacccgtttcacattagccgctactggcaggcgacgccgacctggaccgtgaccctggaggcgacaccgatgggcggggcgacctgcggcgaccgccgcggggctcctcgtcctcctctgctgctgcgactggagacttcctcctctcatcatgaccattgtctgcaccacgacgatcattcctatcctcaggtgtatatgatctccgcttcttatcgccatcatgttctttaggctgctttgatgtccttctgtgctcttccttagcccgtgctggggaagcagagtaatcatcacgccttctgggggctggagagtatgaccgggatctagcacggccacgggggcgcggagagcgtgaacgtgagtatgaacgagaacgagaccgtccacggcgagaaggtcgacgcccttcatgatcagaataccctcttggccccattcgtctgcgcatgtcctcaggccttttccgtgtatccgcagcaagaacaacagtgatctcacgcccagaaaacatctggcggttcatgtggtattgcgcctcagaagcatcataagcatcaacaaactccacgaatccaaacccccttggctccccagtgtgatagtctcttggcaggtacacgtccctcacaggaccgaacctttcaaagggaactcggagctcctcaggcctgcatctcagtgggatgttgcggaccaggaggctgacagaaccttggtcaccgccacgcccaccacggccgccgccgcctcctcctcctccaccaccaccgccaccgccaccgccgtaccctctccttggcggcgggcttcttcccctgccaccatgtcctctcctaggagggctatggtacgcggggctgtacctccccattgctgctggtaccgctggagagccggtcgacgccgccgccgccgccgcagccggtggagatgcgggagggaggggattaggg

SEQ ID NO: 45632 - DNA, 227 bp, Setaria italica
  Peptide Sequence Number=SeqID_111606
gtaactaaacagacccatatgccaagtcagcctgcaactcatcgatagtgatatcttccttgtcctgactgacaatatcatcttctgcattagcctcactggtttcctctgtgccatgcagtacttcattgaaattccgcatttcactttcatggttagcatcatcagtgacaacttcctcaatgtggtcttctgtcggtgaggcctgcagcccctggatgatcgaa

SEQ ID NO: 45633 - DNA, 512 bp, Setaria italica
  Peptide Sequence Number=SeqID_111607
tactaagttacatgtggtttgtaattcatttgcacctcatgaactgtttgttaagtagctcgaggcctgatgggtactggcctatcagcctatgttgtatagattgcaagttgtaatataggtggctatgtgctgatcaagaattagagcagtgcttcagttgcgactagttactagttgcctactgtccttacaggatacctgtggctatacgtggctgttgtgcctaaattccatcttggtgataactgaagggtacatattgcctactgtccttgtttacagtcgagttaagttcagggtcttgcatttttttctggcctaatttctatatcggttgtcctttgtaggcaatttattatactaaatgaacaagtaatttattcattttgtgtagcattttctgatttttcagcattttcccatactgttggtatttgattcagccataagattctttaatttattcaagattggcatcacgatatattacttacggtgttcgtcttaaa

SEQ ID NO: 45634 - DNA, 638 bp, Setaria italica
  misc_feature (151)..(151): n is a, c, g, or t
  Peptide Sequence Number=SeqID_111608
tcgggagccatggagctcacccccttccagccggcggccggtgctctcgtcgaggctattgctgcccctactgctggccgtcgggcaccactatcctttatcctaggatttgggttgggatcctattccgttgatggctgcggatttaccntaaacccacagcaccatccgctgcctcctagctcgcaggtgattcctcttctaggtcaaatagcccatagcttttctactactctaatcctgtttagcctctcccctattagcactgcataggtattgcaaagctctgccaattcgattacaagcttaagttatttaaatgtgtgaggcgtggtgaggttagaaatttgatgcatgtggcagaacaaggtcgacatatacttgcagatcacttttttattcctctatactctaataggtagacttttgctctaatttgtgcttgctctatactaataagagggttgataaactaacagagtagggtgcactagtttagtaagtatggaacctaagcaaactgattagcttctagcgcgtccggcaaagaattatttgccatgcctcagtttaggatttgatacttgaggtgtgctcaagtgctttatcccctatttcttgtgatttcagttgatggt

SEQ ID NO: 45635 - DNA, 425 bp, Setaria italica
  Peptide Sequence Number=SeqID_111609
acgtactacgaactacttattgctgcccctactgctggccgtcgggcaccactatcctttatcctaggatttgggttgggatctattccgttgatggctgcggatttaccataaacccacagcaccatccgctgcctcctagctcgcaggttgccaaattagagcaggagagggagaacctaaaaatgatgttcaggttatatggtagtcaccccagccattaggaggaaggaaatactatgtaccctgagtaatattttgcatttttccctcaatttcgtgcgtattatcagtgaaaacattggttgtagccgctgttgtccaactgggcatttcgtgtaaaccagagggcaaaatgaattctaggccatcaacgtcttcgttcagatttgcatgggcaaggagcacttttgcttaggatggga

SEQ ID NO: 45636 - DNA, 2309 bp, Setaria italica
  Peptide Sequence Number=SeqID_111610
tctctctcagatcgggcggggggggaatggtggcgggtggagagcgtctccgtctcaccgatgcccgtggcgactggcgacggcggcggcatgtggtgcggcaggcatcagccgcgcggcgcggagggggcggaggatccactgcaacggcaactcctcccaagcggtcagtggcgagccgtgcgtcgtcccctaaccctacctctcactacggcgcggatctccctcggcggtgccaccgcagccgagacggtcttcgcgctaccaatctcagctaggtttggggatatcctccagccatgatgtcgaagagagcagcggcagaggcagcaaccggatgctcagcccccgtgggagccatggagctcacccccttccagccggcggccggtgctctcgtcgaggctattgctgcccctactgctggccgtcgggcaccactatcctttatcctaggatttgggttgggatctattccgttgatggctgcggatttaccataaacccacagcaccatccgctgcctcctagctcgcaggatacctgtggctatacgtggctgttgtgcctaaattccatcttggtgataactgaagggtacatattgcctactgtccttgtttacagtcgagttaagttcagggtcttgcatttttttctggcctaatttctatatcggttgtcctttgtaggcaatttattatactaaatgaacaagtaatttattcattttgtgtagcattttctgatttttcagcattttcccatactgttggtatttgattcagccataagattctttaatttattcaagattggcatcacgatatattacttacggtgttcgtctaaagttcagaacatagtagtgttttttcacaaactagcagtaaccatggaggacgtcagtgtgcttctttattaacaaaagctagcaggtaacttgctggaagtgctttgttcacaaatagatgttataactatggatttattagcagtaaccatggatttattagcatttctgtgtgcatgatttaaacagttttgtgttccaatttactaaaagcattttaacaaatttaataggcatttaaatgctatccagatagcattttaaatcttcacatcaagcatttttgtgttgttccatttgaaaggggaaagttttgagtgaatacacaagatgtattttgaatattgttggatatacattctttatgattttcatgtttcactttgctcaccatctttctgtgtggttaattttcctatagcctttgaacacactgcatgtctatgagtcctcacccctgctcgtgcaactcatgtgtaggttatgctaaataaataaaaaaatagtttagcatttttttagttctggtatagtaagagaatgaatttttcacatcctgattttttatttcagttttataattgataccattaacttgctttatctctagcctaccaatctagcactcttcagtaattttatagcatcacaatgagatcgttcttttttgtatgctctgttagttttctcctagtttttctcttcaagttgctactgaattaggcaacacaatacacataatatggttgtaaattagcaataatacacatacgttatgcatccattaaatgtggttacatccaggaccgtgactatccagtaggcattttttactttttcatcaggcaataatatgggtacatccaggcaatgcaatataattcattaggcaataatagaatgtgtgtaggtcaccaaaacaatgtaaaaatttatttttcttatttttacatcacaggttgccaaattagagcaggagagggagaacctaaaaatgatgttcaggttatatggtagtcaccccagccattaggaggaaggaaatactatgtaccctgagtaatattttgcatttttccctcaatttcgtgcgtattatcagtgaaaacattggttgtagccgctgttgtccaactgggcatttcgtgtaaaccagagggcaaaatgaattctaggccatcaacgtcttcgttcagatttgcatgggcaaggagcacttttgcttaggatgggagttgaatgattttttcttatatttatgaacgatagtgcaacatggatcctaattttctgcatcaggttgaatttgtacaagagggtatgtgtgatccataattgtgccattattttacaatttctttacttcattttgttcatcagctaacatgggacgtcagtaccttggtccaatataaactgcttctggcggagaaccttgcgtgggcctgctgggaag

SEQ ID NO: 45637 - DNA, 215 bp, Setaria italica
  Peptide Sequence Number=SeqID_111611
ccacgctcacgaccctcatcgacaagtacatcggcagctagctccatcacaacgagcatgccgtcaactgggattcatgaccatcgacttaaatacatacgtgcccgtgctcccgcacatacgccatcatgtatctctcgttgcatacggatgatgcgatgcgttaattcaggcagcagactgctgcctgaattaacgcatcgcatcatccgtat

SEQ ID NO: 45638 - DNA, 240 bp, Setaria italica
  Peptide Sequence Number=SeqID_111612
cttctccgcgctcgccctcggcgctgcagtcgtctgcgcgcacggcgcattccgcgtcccggaggacctcttcctcgacgagcccgaccaggccgccggcagcggcaacccgctgctgtccttcatcgccaacgccaccggaggagtaggaggacgcgtctgatgatcgccacaactgctaaattaaaggtcatgtggcccagcctcgaattgtatgtgattcattcatattcttttgcc

SEQ ID NO: 45639 - DNA, 310 bp, Setaria italica
  Peptide Sequence Number=SeqID_111613
atcaaccgtagagcttattttcgtcaacctttgtgtccatgttacaaaaaaaatcagtgtggcgttttgcaagaagctcacagaataattcaagttctacgcgagacatttgctccaaggctttcatccgtgataagatacaaaatttaacaaacgcatctgcagcaccacacagcagcacagagtactttacagcattttcagtctttgacccactgcaggacggccctggaaggtggatcctggatgcaccaatctcccagagcagctgtgatgaaaacacagatcagctcttgacgagcctccagcg

SEQ ID NO: 45640 - DNA, 469 bp, Setaria italica
  Peptide Sequence Number=SeqID_111614
ggactacctcgtcgccgcctgcggcctcaccccagcccaagccgcaaggcgtctcagcaggcattcgatgaggcagccaacgatcaaggaaaccaatcgaggagttctcctatccccgcctcaactccgcatccaagaacgccgtggacgaagtgctggtggcggacgacgcgaactgggatgggatggtgattgcgtgcgagacgccggtgctggtggagttctgggcgccgtggtgcgggccgtgccggatgatcgcgccggtgatcgacgagctggccaaggactacgccggcaagatcaagtgctgcaaggtgaacaccgacgtacaacccctaaggtggcctccacctacggcatccgcagcatccccaccgtcctcatcttcaagggcggcgacaagaaggagagcgtcatcggcgccgtcccgtaagtacctacgtcttcttacgttaccctttcttatttt

SEQ ID NO: 45641 - DNA, 371 bp, Setaria italica
  Peptide Sequence Number=SeqID_111615
cgattcctcgcctctcttcacgactgctgcgctgttctgttaatctgaacccagaacctgtgtatttctgtaccgagctcttgtttttcttgcaacaaatggccataacttaaatctccacgatagaaaagcaaacaagagctcggtacagaaatacacaggttctgggttcagattaacagaacagcgcagcagtcgtgaagagaggcgaggaatcgacagagatactaggcgtgggcacacaagacatcagagaggaagacgctcgttcttttcttcgggctggcatgtctcggcgtgcggggccgtcgcagcttaagcctgctcttgaacggatggccctgatgatcacctggtggtagatagcagcc

SEQ ID NO: 45642 - DNA, 1323 bp, Setaria italica
  Peptide Sequence Number=SeqID_111616
agggagcacgcctggagccaccattggatcttctgggtcggccccttcatcggcgctgccctggctgctatctaccaccaggtgatcatcagggccatcccgttcaagagctcggtacagaaatacacaggttctgggttcagattaacagaacagcgcagcagtcgtgaagagaggcgaggaatcgacagagatactaggcgtgggcacacaagacatcagagaggaagacgctcgttcttttcttcgggctggcatgtctcggcgtgcggggccgtcgcagcttaagacctgctcttgaacgggatggccctgatgatcacctggtggtagatagcagccagggcagcgccgatgaaggggccgacccagaagatccactgcaaacaatgataggaacaggaacaaggttataccaactcttcggcatcgataggcgattaaatgtacgttagcaaaggaccagaatgatatcatatcccaaacacagcctagattaatacatgccaactacatggattgagacaagcctttgtgataagattaacacagagcctcagaggccagagcaatgtagttataggtcatgcctgtcaatggcatgccacactctgtctgcatcattttagtagtttggtgagtgaatgattaccggtagtttggtcacaaaaaatatttcacataggtgaggtgagaataaatacagaacctagttagaattagaacagactttccagaacatgccactatatttgttgcacaatggaaagacggtggttgcatgtctgatattttggatggagacatttcagtgcgagtaggtaacaaaaccactggaaatggaaagtgggtgagaagaggactgaagagggggttccactcacatggtggctccaggcgtgctccctgttgtagatgatggcagcgccaagactcctagctgggttgatgccagtgccagtaatggggatggtggcaaggtggaccaggaacaccgcgaaccaattggtagtgggcgaaggataggaacatgggagtccctggcgttcctcttggcgtcagtggccgagaacacggtgtagaccaggacgaaggtgccaacaatctcagcaccaagccctgatcccttggtgtagccggggcgacgacgttggcaccaccgccattgcccatgtaaagtccctgctggaagcccttcaccactccagctccacagatggcacccaggcattgcatgattatgtagaagatggccctagtcagggacagcttcctggccaagaacagcccgaaagtcacaggccgggttgatgtcgccctccg

SEQ ID NO: 45643 - DNA, 1231 bp, Setaria italica
  Peptide Sequence Number=SeqID_111617
ttgtaacgcaatagggttggccaatggccacatcgcaggagggatacatgaactttctatcgtctcatcataacttaaatttgcacataacactagcggcggcgtattacacaattgggtactgaaattacaagtccggggttcagatcaacagatggagtgcagtacagcaaacttgaagagaaatggaacaactccacagcaacacagtaacaaggattggaggcgaccacacacccccatccgaagcagcttgcctgtttggactggcatctcacagcacaggacacagcagcagcagcagcttaagacctgctcttgaacgggatcgccctgatgaccacctggtggtagatggcagccagggcagcgccgatgaaggggccgacccagaagatccactgcaaaggcaggaatgaatgattatggtcagcgctctgaattatttcacgctaatgaaaggcttagcatgcgagggtggataatgcagggtcgttgtcctggtaggtagtggttgcttgctgcaataaagcaggcctctcagtttttttcccttcggacaagggaaggtttccagaattaaacaaagaacaaatgtctatgagcttatcctgtagtgcttggaacctttcgaaatcaactactgaatgatttctagtagtggtagcagttggctactccatctaaacataattttacccggagttactccccaattttacatcagctagctatcagagtgaacttctctgtttattagtttttcagagcagacatcgcaattagatttcatcagctaatcaaggagacttcagaatttgtatgaattaactcagttcatactcttcatcttcttatacttctaggtgaaagttagctaaaccaagttgcaccagttctcagtcagtgaactcacgtggtcatcccaggcttggcgcctgttgtagatgacggcggcgccaaggctcctcgccgggttgatgccggtgccggtgatggggatggtggccaggtggaccaggaacacggcgaacccaattggcagcggggcaaggatcgggacgtgggagtccctggcgttcctcttggcgtcggtggcggagaagacggtgtagacgaggatgaaggtgccgacgatctcagcgccgaggccgtcgcccttggtgtagccagccgcgaccatgttggcgccgccgccgttgcccatgtacaagaccctagactaaggaaa

SEQ ID NO: 45644 - DNA, 697 bp, Setaria italica
  Peptide Sequence Number=SeqID_111618
gctatctaccaccaggtgatcatcagggccataacttaaatctccacgatagaaaagcaaacaagagctcggtacagaaatacacaggttctgggttcagattaacagaacagcgcagcagtcgtgaagagaggcgaggaatcgacagagatactaggcgtgggcacacaagacatcagagaggaagacgctcgttcttttcttcgggctggcatgtctcggcgtgcggggccgtcgcagcttaagacctgctcttgaacgggatggccctgatgatcacctggtggtagatagcagccagggcagcgccgatgaaggggccgacccagaagatccaatggtggctccaggcgtgctccctgttgtagatgatggcagcgccaagactcctagctgggttgatgccagtgccagtaatggggatggtggcaaggtggaccaggaacaccgcgaacccaattggtagtggggcaaggataggaacatgggagtccctggcgttcctcttggcgtcagtggccgagaacacggtgtagaccaggacgaaggtgccaacaatctcagcaccaagccctgatcccttggtgtaggccgggggcgacgacgttggcaccaccgccattgcccatgtaaagtccctgctggaagcccttcaccactccatcttctacataatcatgcaatgcctgggtgccat

SEQ ID NO: 45645 - DNA, 712 bp, Setaria italica
  Peptide Sequence Number=SeqID_111619
ccgccccccgcctcgccgtctcgctcgctcccgcttcgccgccgcagccgccgccgattcccccgccgccaaaatgccgttcaagaggttcgtggagatcgggcgggtggccctggtgaactacggcaaggactacggccgcctcgtcgtcatcgtcgacgttgtcgaccagaacagggcacttgtggatgcccccgacatggttcgttgccagatgaacttcaagcggctttctctgaccgacatcaagattgacattaaacgtgttccaaagaagactacattgattaaggcaatggaggaagctgatgtgaaaaacaagtgggagaagagctcatggggcaagaagctgattgtccagaagaggagagcatcgctcaacgactttgacaggttcaaggtcatgttggcgaagatcaagaggggtggtgctatcaggcaggagcttgctaagcttaaaaaggaggttgctgctgcttaggttcctttggtggttttgattttgatcggctatgcttcgatatctggaaaagaatcatgtaatgtgcgaattacttagacggtttatcagagcttgtcaaaatgttaatttgaaacatggcttgtttagagattttgcccagattgctattcaaaatctgagatagtttgttacatgcagatatctcttatctaatgtttcattctccttgttgcttgaccaaaaaaaaaa

SEQ ID NO: 45646 - DNA, 952 bp, Setaria italica
  Peptide Sequence Number=SeqID_111620
ggggttcagatcaacagatggagtgcagtacagcaaacttgaagagaaatggaacaactccacagcaaaacaaatcctatcctcctccgttccacctagtcactcaccactgcccattctatccgtgtgtgctgctgcgcgaggtgagacaacaatggccctggagacgtgcttcagagcgtgggcgctgcacgccgcccctgccggcggcaaggacaggctcctcgccggcggcagcagcactagcttcgcgccgtccaagcgagccgccgccgccgcgccgctgtcggtcggccgcgtcgccacgccgcggccgcggcacgtctgccagtccaagaacgccgtggacgaagtgctggtggcggacgacgcgaactgggatgggatggtgattgcgtgcgagacgccggtgctggtggagttctgggcgccgtggtgcgggccgtgccggatgatcgcgccggtgatcgacgagctggccaaggactacgccggcaagatcaagtgctgcaaggtgaacaccgacgacaaccccaaggtggcctccacctacggcatccgcagcatccccaccgtcctcatcttcaagggcggcgacaagaaggagagcgtcatcggcgccgtcccgaagaccacgctcacgaccctcatcgacaagtacatcggcagctagctccatcacaacgagcatgccgtcaactgggattcatgaccatcgacttaaatacatacgtgcccgtgctcccgcacatacgccatcatgtatctctcgttgcatacggatgatgcgatgcgttaattcaggcagcagtctgctgctgctctcggttatactatgtccaatccaagtccatcaattagtttcagtgcatgattttcactacataccaattaattcatgtgtgtatattactattattactaccatgcaccactagtttgcaatcccact

SEQ ID NO: 45647 - DNA, 1286 bp, Setaria italica
  Peptide Sequence Number=SeqID_111621
acatgaactttctatcgtctcatcataacttaaatttgcacataacactagcggcggcgtattacacaattgggtactgaaattacaagtccggggttcagatcaacagatggagtgcagtacagcaaacttgaagagaaatggaacaactccacagcaacacagtaacaaggattggaggcgaccacacacccccatccgaagcagcttgcctgtttggactggcatctcacagcacaggacacagcagcagcagcagcttaagacctgctcttgaacgggatccgccctgatgaccacctggtggtagatggcagccagggcagcgccgatgaaggggccgacccagaagatccagtggtcatcccaggcttggcgcctgttgtagatgacggcggcgccaagggctcctcggccgggttgatgccggtgccggtgatggggatggtggccaggtggaccaggaacacggcgaacccaattggcagcggggcaaggatcgggacgtgggagtcccgtggcgttcctcttggcgtcggtggcggagaagacggtgtagacgaggatgaaggtgccgacgatctcagcgccgaggccgtcgcccttggtgtagccagccgcgaccatgttggcgccgccgccgttgcccatgtacagcccctgctggaagcccttgacgacgccggcgccgcagatggcgcccaggcactgcatgatcatgtagaagacggccctggtcaacgacagtttcctcgccaggaacagcccgaaggtcaccgccgggttgatgtgcccgccggagatgccggcggtgcagtagacgagggcgaagatcatgccgccgaaggaccaggcgatgccctggatgccgacggtggcgcacttggactgggacttgctgacgcccatgacggtgaggatgctgatgtagaggaagaggaaggtggcgacgaactcggcgatgccggcgcggtagaaggaccaggacttgagctccccgggctcgaacagcggcgccggagggggcgtccttgtagtccttgtcatcgctgccctgcgccgccgtgccgatgggctggcgctccgagtacttgttggcgcccaggcgaacgtcctcctccttgccctccatgcttgcctgcaaccggagactagctagctagaagcagctgcctgagcaaaagctgagatggtctggtgctttctgcggactgcagcgggagtgaagagtcttatagcgggcggcaatggtggcgaggaggtggttctggaaggagtgggagcat

SEQ ID NO: 45648 - DNA, 545 bp, Setaria italica
  Peptide Sequence Number=SeqID_111622
cgcctaattccaccggacaagccatggcggggagaggcggaggcggcggcggcggcaagggcgcggcggggaggatggtgtcgctgcaggagttcgtgtcctcaatggctccgctcatcgatctcgagaaggcggcggagatatcagcggagtcggagacaagcgccaagagcctggagaggcggggctgcgtcatcgccaacctcaagtgcaccgatgctcagacgggactgatggggaagacgctcctggagttccagcccaacaaaggagatgtgctcccgtcgcacaagtttggaacgcatgatgtagttgccctgaagccaaataaggcagatgctggatctgcttctcttgggcaaggtgtagtctatcgcttaaaggattcttccatcactgttgcttttgatgatattcctgaagatggtttaaacagccctctacgtcttgagaagcttgcaaatgaggtcacttatcgcaggatgaaggatgcactaattcaacttagcaaggctgtccaaacaggaccttgtgcaaatcttgtt

SEQ ID NO: 45649 - DNA, 1627 bp, Setaria italica
  misc_feature (7)..(7): n is a, c, g, or t
  Peptide Sequence Number=SeqID_111623
tttctcncaaccgtaggcagtggcaatgtttcgtaataggttgaacgcaatatagtagaatggaggaattgtggtgattatgaatggtgtaaagccacagccatctgctggccagaaggcgccttttctacaacggtggcaccagaaaggaacgctgtacagctactctgaattttttggtacaaactaatgttatctgaggaactcctcgagctaacgaagttgctgagttcatggactaacttggtaacatgctcatgcttcaagctgtctgcatttcggttcagtagattgagccacgacatggcagacgtgttctgtatcttgccctcctggtggaacctgctgacacaggagattgccgccatcgtttctccttgtaccagtttcaggcaaaatctttccattatgactggtgcaggcggggcacggttgtggtggcacaggtagcgccatagatcatccagcagttgttccttcccattcctgtaagcgtcgagtaccatgcgcaggtgccttcgctcatcaaaatggtaccctttcgataacatctcacgaaacgcatactcaaaatcatcccacctttgtgatgcagcgcaggcctccatgaaagtattgaaagtaaacttgtcagcagttgcggtttggctcgaatccgctttgctccttatcctgccgtttagaatatcctggagtagatccttcgcgtcttcaagcattccatgttccagaaacaacttcagcatgatgttacaagtcacggtattaggtgaacagtagctgcacatctcgttgaatatgtatttagcattttccatgctgccattgtctatgcaagtttgaatgagtcctgtgtaggtaacaaccagcggtttgttggcaaccttgcatatcttctcaacctggagaagtgcttctttgcaccgccctccactgcaaaggcaccgtgcaaggtcataatacagactagcggaaccaacgattccacgactttccatatccttcacagccattactgcttcatcgatctttccttctctccaaagtgcatttacaagaactttatagttcagagcaccgggtatcaatgatttctccaacttattgaagaactcatacaccaaattgtactttccacagacaagcattacctccataacaagaccatatgttgtatttgttgggcgaatattcttctctttcaactgttgcagtacccaaaatgccccttcccattgcttttgttgcacgcaagcatttaaaaccgcattgtatacaatgaggtctggttccaagcgaggatcccaattctgaagagggcccaatttgaacttcttcctaggaggagaacgcatgcaatcaatcacatcaaatagctcattgacaagaccagcttgcccaagagtaacagcgatacaatgataagctgccatatcaggatacgatgacaattggttctgcatggtgtaaaatacattcaatgcctcgattggtctctttgcctttcctagaacatcaagaactgttgtgtaaatatacctgctcttgtaggacttgaacctttcacgtgactcaagccattgaacaacttgcaaaacgcgtttccaatttccgtatcgacccaaca

SEQ ID NO: 45650 - DNA, 905 bp, Setaria italica
  misc_feature (865)..(905): n is a, c, g, or t
  Peptide Sequence Number=SeqID_111624
ctgaaaacacagagccgaacatggagcacgcgacccctccggccgccgccgccggcggcgtcacggccaccgtcgatctctcccctgcagccaccgaccttggtggggcgcaccacctgccctgcggcatcaagcagaacggcggcgcccccgtctccgactacttcaagcccaggagcacaggtgtggaggtggagggggtgagggtggaggaggccttcttccgcgggaggaagctgcagggcgctacccttgcactcccggatggctaccgaggttatgtattggagaagaagagtggaggaaaggataaacagaattcagatggtgaagtgagtaattttgtagcccgtgcggaattccagaacataacctactggaatcatgataccacgccatcagcagaggattccctcccaaggtgctttcattggctaactgttgctaatgcgatgcacaaaccagtgacttctgaagagctggctaacatgtcagcaatgcagaaccaggacaactagattcattgtatggtgattatgattttcccatatgatgtaaccgtggcactgggggaaaaagtctctactcaatgtaatctcgactcggggaaccaacctgacaagctatctacctgtctaacaagcagcatactatttcagcgtatccactaggtaacgtttagggttaaggccttaagggtgctctgcttcaggagatccaccttcagtagcacgataatgcttgggtagtgtagactgggagctggaagcatggaactattgtgttcatttctgcagtacagaccattgatgtatcaatcatctgcaatgttgtgaaagtgcgacagtgttgcgttagaaacccnnnnnnnnnnnnnnnnnnnnnnnnnnnnnnnnnnnnnnnnn

SEQ ID NO: 45651 - DNA, 425 bp, Setaria italica
  Peptide Sequence Number=SeqID_111625
ccgtcaagacaagggcaaagaggaggatctagaagacgacgggccagaatcgtaggagcatgatcgtacatgttccacagcttgcaggaagaacatccactacctcttcgatgcgttcgatgacatcatgcaagccttacaagctctggatcaaaaggcagaagataatgattgccgtcaggaggacaagttcaagttcaagttcttgcagaggaacgtgaggaagctcttcgggatgtgcagcaacatgacgaagaacaaagcaaaggaacaacaaccattccgtgtgcaagtagtccgggtagcgtcattagtgcgtttacaagcgtcttttcctgtactccatatggttaccacgaggaggtcgtagatttggagaggggggggggggagagttggtcgctcgtatgagtttttggatctag

SEQ ID NO: 45652 - DNA, 729 bp, Setaria italica
  misc_feature (718)..(718): n is a, c, g, or t
  Peptide Sequence Number=SeqID_111626
ggaggagatgacacagaaggggtgcccgcctgatgcccagacttacaatgcactgattaagttgctaacaaataggcatatgccagacgatgctgcaaggatatacaagaagatgatcaagaagggacttgagcccacgatccatacttacaacatgatgatgaagtcatatttccttggtggtaggaacttcgcaatgggttgtgcggtgtgggaggagatgcaccggaagggtatatgtcctgatgtgaactcttacacggtgttcattaatgggcatatccggcatggcagaccagaggaggcctgtaaatatatcgaggagatgatcaacaaagggatgaaggctccgcagatagactataataagtttgctgcagatttcgccaaggctgggaaaccagacatattgtacgagttggctcagaaagtagaatttgcagggaaagttgatgtgtctaatgtgttccatcagtgggcagagagaatgaagagccgggtcaagagaactgcccctaatcagactggtaacagaatgttctaaggtttgattatttagaagagccgctaccttttttttcggtgtccatgtatagtaatgtgccattgaagagtacgtgcattgatattgttggaacaaaaatattgagtcagtttatgttgtagttctgtttttcgtcaggttcaactgtaatgcacagtaaatcttcatcaaagnttactcttcag

SEQ ID NO: 45653 - DNA, 314 bp, Setaria italica
  Peptide Sequence Number=SeqID_111627
acgcgggccgaaccaccaccaggtccaccggtcaccccacctcctcctggcggccgcggcggctgggacggcgaggaagccggcatgagcgtgttcggcggcgacagctgggcgcgtgatgcgcagcagaggaagcgccgcctggacgacctcatgctacctgcctcggcgtcctcatctccctcgacgcccgattcgttcaggaggctccccaacggcaagctcgcttgcctcgtctgccccaaccaccctgtcctcgattctcccctcatgctctccatccataataaaggtgcacggcacattgcagcaag

SEQ ID NO: 45654 - DNA, 264 bp, Setaria italica
  misc_feature (235)..(264): n is a, c, g, or t
  Peptide Sequence Number=SeqID_111628
ctgcccgacgtgccgacaaacttcttccggcgactgccctgcaaggtcgattgcctgctttgatcggggatgggatgaagttgttagtccgtcacgtgatattctgttgtcgttagcatcttcagatccaatggttgtacgtcaatgcactttgtaaacgctgtgctacacaagtcaacagtcaacacaactctacaaagatttccactttttaagaaaaaaaaaaaaaaaaaannnnnnnnnnnnnnnnnnnnnnnnnnnnnn

SEQ ID NO: 45655 - DNA, 436 bp, Setaria italica
  Peptide Sequence Number=SeqID_111629
gtaagcctgaccatggcccaaataccctgcagcagggccagcaggccgccactgctgtggcgtcattgctccacgaggttgagacgcagcaccttgtccatgctggtagtagccagctccacgaccaccttgtgggaattgttgatggtaggaggcaccacggccacgaaaacctcttccaggacctctcccaccaccaccaggctcagcagcctgggagccctctccaaacccaggcattcttggtctccacgatcccatgccgggggcagcgaaacagtgagctgacaaacttgatgaacccacccgcgatggagaagaaggtcgcaacaagaggaagtagagcactagctagcaggacccctccctccccctgttcttcctttcagcggatcggggagaagaagagagagagagagagagagagagagagaga

SEQ ID NO: 45656 - DNA, 262 bp, Setaria italica
  Peptide Sequence Number=SeqID_111630
gggggttcgtttaaaccaaagcaggatggcaattctacaacttatacagaatcgacagtccttgtttcctgcttctctccatctataataactttggacttcagcaaatgagaattttgccttgagtttaaggaatttctcctaccattggtggctgattctttcattcctaggtatgtatacactgacatcccagcaagggcaatgacagctccgcagaggctggtgaatccagggtcagagttaaataccagataaccag

SEQ ID NO: 45657 - DNA, 618 bp, Setaria italica
  Peptide Sequence Number=SeqID_111631
gtgcatgtgcatgtgtgatgtaaattgttaatgatcattcatgttttcagaatgagatgaatgaacgtgagttatctgcactgaaagctgtcattaagtgcattgaggagcacaaactcgaggagcaataccctgtggatccacttcagaaaagggttttgcagctagagaaagcaaaggcagacaagaggagggctgttgaagcagcaaagccacagtccaagaggcctcgtgcaaatggatcagcctttgcaccccgtgctaccggctttgctgacaagagcttttattccttgtccccagagaggcttccctcctacccttacgagaggcagtttgtgtatggtgcggaggcccatcatcctccaatgatgagctcagcaccttacacgatccaacctgcccacacaccttattatggtaatggttacccagttcagtaccaggtaccgtatatccactaatggagagagccaggtgcaggtgctctttcctaactatgtagctttaacctgctgcccttcgttgtagttgtatcagttactcgctagtttgcctaagactagaaataagttaggaaccaactacaacaagacaacaacaaactagaagtaggaa

SEQ ID NO: 45658 - DNA, 2306 bp, Setaria italica
  Peptide Sequence Number=SeqID_111632
tcctcctcattcggccgcccaccgacggacgcgacgccagggcggaagcgcggcgactagggttcggccctgcccgccgccggccgcccccacccgcctccgtgcgcctctcggagggcgcgaatcgggccgcctcctccggcagcaggacgtccgcccacgccgagccggcctgcctgcctcctcccacaccctgctccgccaacaccgacgccagcccgccttatcctgccgacgtgcgccatcgtcgacgtcgacccgtctgctgctatccgtatcccgtccccacgacgcaaccctcttgtcccaagccgaggaatttccaccatgtctgatttggagtctgtggctgcccttatggagtcgacaagctctaagatacagcagcttcaacaggcttttgctgagcttgagaggcagagtgctgtctccatgaacctcaagtggaagcaacttgaggatcactttcgtggccttgagcagtcgctcaagaaaaagtttgacgaactgaaagagcaggagaaagagttccaggagaccgtcgcgaaatcagagcagatgctggagcagcgggaggcagctgttgtagctaaggaactgacttctttggagaggttgcaggagaaaagggatgctgcattagctatgatctttagcaagtccaagctgtccttacctgttcctgccataaacccaatggacaaggctctggataatcttggtgtcaagtggcctaaactggcttctgaagagagtgtgcgcctgcaagttgactgtgctgcagtgaagcctcgttctgagttagtctcgctctgtgaggaaatgaatgtgaaggggcttcataagtttatatcggacaacaggaagaacttggcaatcatccgtgaggaaattcccagtgcactgcagaaagcatcacatccttatggcctggtgttggattccctggaagacttttatgctggagataatcttgtattggatggcaagaaggatggagaccttctgggtgttagaaggacgtgcctgatgttgatggagtcacttggacagctgcaaactgatgatataactcgtttctctttggaggggcacatgcttacaactgatatcaaagagagagcgaaaaagattgcatttgagtggaagtccaagctggatagtcttgacattgatgctagtaatgggaactgtcttgaagctcacgcatttctccaactcctggcaacctttggtatttctgctgaatataatgacgatgacctgtgcaaactgctgccatacgtcagtcgtcgtcgtcagacacctgaactttgtcgattgcttgggttatcacagaaaatgccaggtgtgattggagttctggtggaaagtggaaaacctattgatgcaattaatttggcttatgcgtttgagcttactgaacagtttgaaccagtgcaactgctgaaagcatacctgagggatgttaagaaagtgccacatgccaagaatgccaaaatttctcctggtgcacagaatgagatgaatgaacgtgagttatctgcactgaaagctgtcattaagtgcattgaggagcacaaactcgaggagcaataccctgtggatccacttcagaaaagggttttgcagctagagaaagcaaaggcagacaagaggagggctgttgaagcagcaaagccacagtccaagaggcctcgtgcaaatggatcagcctttgcaccccgtgctaccggctttgctgacaagagcttttatcctgcaaccccagagaggcttccctcctacccttacgagaggcagtttgtgtatggtgcggaggcccatcatcctccaatgatgagctcagcaccttacacgatccaacctgcccacacaccttattatggtaatggttacccagttcagtaccaggtaccgtatatccactaatggagagagccaggtgcaggtgctctttcctaactatgtagctttaacctgctgcccttcgttgtagttgtatcagttactcgctagtttgcctagctgaatagttggaccactcagtgtgtgctgtgagtggctattgtgaaaatctgttaattttatgccctaatgacatatgacataatttactcctaatatttagctatgatgaatctccctgtgtactttatacggcctgtgaaatacctgacactgaagtgttcaaaaaaatcaaaaacaaaaacaaaaaacaaaaacaaaaacgaaaaaacgtaaaaacgaaaaacgtaaaaacgaaaaacgaaaaacgaaaacgaaaacgaaaacgaaaacgaaaa

SEQ ID NO: 45659 - DNA, 589 bp, Setaria italica
  Peptide Sequence Number=SeqID_111633
tgacattgctactccagttccacggtgggctctgtaggctttgtcggtgccaatggtgatttacctgcgtgaactcccaggagttaagttgcttgccggttggtagtgcaaaggggtcaacattgtatgcacaggcatatgtatgttagctgcagcactccattcccgtcttcagggccgtaccccaactttgccacagcaaactgcagaccatggcccgtggtaggagctgagtggtcgcttgttttcttggtgtcctggaggccctcatcttccctgccgtgctgctcgtgttactggtcagcctcaacgggcaacggctgctcctcgcaacaaagcattcccgacggggtaggggtgctggtacttgtggttttgcatcgagttgagctgcattagtacagtagcttctgggtaagtccgtgagtacgctacaatctgcagtggctgtgcagaggagcagcggcctcctctggtctacttcccgtaattcctactattattttggttctttctttcctttctttaaccttttagttttccgttttacgtttttacctttttgtttttttgtttttttgttttttta

SEQ ID NO: 45660 - DNA, 463 bp, Setaria italica
  Peptide Sequence Number=SeqID_111634
tctaatttttattcttgtttggacttgggatggggagtgcagatcggaggagaactgacggattttatcattgtgcttcgtgaccgtaaagctgttaaggcattcagcagtcgcattcatctttctcttggggcaggattgagtgctgcagcagggccaataggcagagcctttgaggcagatgttcgggccagcgaaaaaggttccggaatatgctactcctacagctgcagcaaaggtaataatctgaacattggttttatattttgccaccattttaggtccaattctgaattatgttgtcaagtaggatatgttttattagtaaaaagaagggaaaaaaaaggactcacctctgtattttttgtaaggtaataatgtactatccatagttaacattgagacatccatgcagcaacaaaacttccttacctctgattggtacaatgtagcaagttcgtga

SEQ ID NO: 45661 - DNA, 469 bp, Setaria italica
  Peptide Sequence Number=SeqID_111635
cggttgtgttgtgcatctgggattagtttcagttggatcctttggtttcttggcgtatacagatagcattgccagctcatggctcaattccaatgctttgtgtcaaaaacggaatataacttgaatttttttttttgtaaaagaataacttgaattttaggtaacgacagtttggacatcagatattgctgtgcttaaaatgtctaaaatgattgcttgcgaacttcacacaagatagctagagtatataacaaacaaatgacagtatgagcttctaaatgtgatgataagatctcagggatgtgttgcaatttcccccctccttgcacctcatgtttggcaatttacgtgcaatcacttgcttgcaggtggtcccttttttctactatagcctctagatgattccatgggaactccagatgaaatgatggcatactcttccctgtcaaaaattgataccagccaagaa

SEQ ID NO: 45662 - DNA, 571 bp, Setaria italica
  misc_feature (209)..(209): n is a, c, g, or t
  Peptide Sequence Number=SeqID_111636
gtcgcatacagaaaggaaatggaaatgattttgctcccactgaaatcatcgctctttgtagattcaactagtttaatatatatgcgtcttcgcttgatttcagacataaaagagacagtccagcaaggacgatcagaaatccaaagcctgctcaggcatctttgctcttgagcaatgaataccttttccattcccttgaccaaaaagtntccgcctgcatcgaacaggcagtcactttccttgagattatgcagcaagcacaaatttgatttcaccataaccggaaggcggccaatatatatccaatgagtttcattcataaagtcccttttttgaacaaaatcatcattccctgttttagacttgtcacttttctccaaagaataaacctttatagtcacttctactttaattctggaagcatatgtcatattctggaggcgagcatgtctcggtttaaaatcaatatcaacttcatctttgccagaccaaaatacaggcttttcaagcttcactctcccaaatttgatgatggcatgcttccacccaccagatcctttctttgaaggat

SEQ ID NO: 45663 - DNA, 677 bp, Setaria italica
  Peptide Sequence Number=SeqID_111637
tactcgcatggtttctgttgtggtgcactatgtctgtgatttgcagttttaccaatttgccattagccgattacagatgcattaagccttgggtagttgggttattgcgtgcttgggaagaattggcatggtttctgacattatgcgcttcatttctcgtccctgcaagcttgttttatagaatcccattatattcttggtgaatggtgatatgctaatattacttgccttaggtgatggtgcttgtttgtagcttgagtctttcagcagataccacctgacttgtttgtcctataccttggtgcaatattttgaatatgttaccaccaaggtgaatgatttgtgcgtgcctcaggttcactaatgagtatgtgctggacaaatgagtgtttagtgcccgtgcttttgtctgtgtgattcacaagcggtagcgcttctaaatctgtgttattctgtttatgtcaaaagtaagatcagtggctgatcatctttttctcaagaaaagttgtgcttgtagtttggtcattcgtgtgcattgaagtgcatatagtttgtattcaccatttggattttatggtatgacttttgtaccatgaattttgttcggtagtagaaagcaaagattggtacagtgcacagttggatgtggaatcatcgaaaaccactagtgcgactga

SEQ ID NO: 45664 - DNA, 463 bp, Setaria italica
  Peptide Sequence Number=SeqID_111638
aataatctatttgcaaatgtttgtggatgagaatttcttttgttctataatacatctcgttgggtgtaattgaatttcatgatgggctttagcatgaattcctaaatgggcaaatacgacacgtcatagagtttggagaatagaaagttatttggtgtttttttggatacataaagttgaactaattgtggtttgatttgccataatggacaacccaagcagaggtcatgttttacttaacaaaaaatacgtgacatggttactgggtagaacctctttgccaccttaaggctgcggtaatagtttacttgtgatttgaggatctggaggattatggttaggattgaagattgaatttcaattgtacttttatatctatttgtggaggattaacgtttacatttttatatttctgttgtaacactggttgtggaaacatttagcttattgtgacttaaaaatt

SEQ ID NO: 45665 - DNA, 349 bp, Setaria italica
  Peptide Sequence Number=SeqID_111639
agagtgcaagagcgccaagaccttgaagaatgcaggggaaggctggtgtctttctgcgtctccatgctgcgggatcacttccaagtgtgtgcattgatcggaagggaccttgtgaggtcgctccatgagctggcgctcgtgccggagtttcagccactttggagagaccatattctgcaccgtatcggtgacgtctgccggatcagcacacctggttggtgcatggctatggccatcacgccggagatggagacacagctcttgttcatgatgaacaatgtgaagtggggggatcagaagaggtaccagctctggtttgcgatgaagcacctgatggtgcccggagggg

SEQ ID NO: 45666 - DNA, 297 bp, Setaria italica
  Peptide Sequence Number=SeqID_111640
gcagcggcggcgtgctcgtgatctcccgcaccaggcgcgctcggctccggtcacccgtcgttccacgcaaccatgtcgaagaggaagaccagggagcccaaggaggagaatgtcacccttggccccactgtccgtgaaggagagtttgtctttggtgttgctcacatctttgcatccttcaatgacaccttcattgtaagtgttgtgtgtttacctgtgcatggatctttcagttgcttccaaatttaattccatgttgctctaatatgcagcatgtcactgatttgtctgggaggg

SEQ ID NO: 45667 - DNA, 341 bp, Setaria italica
  Peptide Sequence Number=SeqID_111641
agaggaagaccagggagcccaaggaggagaatgtcacccttggccccactgtccgtgaaggagagtttgtctttggtgttgctcacatctttgcatccttcaatgacaccttcattcatgtcactgatttgtctgggagggaaactctggttcggatcactggtggcatgaaggtcaaggctgatcgtgatgaatcatcaccttacgctgctatgcttgcagctcaagatgttgcacagcgttgcaaggagcttggaatcactgcgctgcacattaagcttcgtgccactggaggcaacaagaccaaaactcctggacctggtgctcagtctgagcaccag

SEQ ID NO: 45668 - DNA, 470 bp, Setaria italica
  Peptide Sequence Number=SeqID_111642
cagcggcggcgtgctcgtgatctcccgcaccaggcgcgctcggctccggtcacccgtcgttccacgcaaccatgtcgaagaggaagaccagggagcccaaggaggagaatgtcacccttggccccactgtccgtgaaggagagtttgtctttggtgttgctcacatctttgcatccttcaatgacaccttcattcatgtcactgatttgtctgggagggaaactctggttcggatcactggtggcatgaaggtcaaggctgatcgtgatgaatcatcaccttacgctgctatgcttgcagctcaagatgttgcacagcgttgcaaggagcttggaatcactgcgctgcacattaagcttcgtgccactggaggcaacaagaccaaaactcctggacctggtgctcagtctgctctcacttctctggtcttctttgttctttcgttttcttttggtttcttatttgttaaa

SEQ ID NO: 45669 - DNA, 489 bp, Setaria italica
  Peptide Sequence Number=SeqID_111643
agaaaactctggttcgcggatcactggtggcatgaaggtcaaggctgatcgtgatgaatcatcaccttacgctgctatgcttgcagctcaagatgttgcacagcgttgcaaggagcttggaatcactgcgctgcacattaagcttcgtgccactggaggcaacaagaccaaaactcctggacctggtgctcagtctgctctcagggctcttgctcgttctggcatgaaaatcgggcgcattgaggatgttaccccggtgcccactgacagcactcgcagaaagggtggtaggaggggaaggaggctgtaggcgtcttctcccggctatttgccatctcttggcgcaggccatcaagaaactggtcctctgtgggtagaactgccgtatgtatgcttgtcgagaggagctttaattttgctctatgttgaggatcatttaccgttagtctgagtctatgatgttgcatggataatattttggttgaggaa

SEQ ID NO: 45670 - DNA, 914 bp, Setaria italica
  Peptide Sequence Number=SeqID_111644
tggcggcggcgtaggcagcggcggcgtgctcgtgatctcccgcaccaggcgcgctcggctccggtcacccgtcgttccacgcaaccatgtcgaagaggaagaccagggagcccaaggaggagaatgtcacccttggccccactgtccgtgaaggagagtttgtctttggtgttgctcacatctttgcatccttcaatgacaccttcattcatgtcactgatttgtctgggagggaaactctggttcggatcactggtggcatgaaggtcaaggctgatcgtgatgaatcatcaccttacgctgctatgcttgcagctcaagatgttgcacagcgttgcaaggagcttggaaagatgttgcacagcgttgcaaggagcttggaatcactgcgctgcacattaagcttcgtgccactggaggcaacaagaccaaaactcctggacctggtgctcagtctgctctcagggctcttgctcgttctggcatgaaaatcgggcgcattgaggatgttaccccggtgcccactgacagcactcgcagaaagggtggtaggaggggaaggaggctgtaggcgtcttctcccggctatttgccatctcttggcgcaggccatcaagaaactggtcctctgtgggtagaactgccgtatgtatgcttgtcgagaggagctttaattttgctctatgttgaggatcatttaccgttagtctgagtctatgatgttgcatggataatattttggttgaggaattgacttgtcatatttatgctaagacgacgtgcgttttcactctatggaaccgtgtgttagactgttagtaatgtacttgtgcagtggcatgccctgctttgcgtgattttgcttggtgctgatcagaaactgctttctgaatgcgagtacaatcttctttttt

SEQ ID NO: 45671 - DNA, 245 bp, Setaria italica
  Peptide Sequence Number=SeqID_111645
ccagccgccccctcttctcctcaacacggcccaaccgcctcctcctcgcccgcttcttccccgccgcgccggcgccggcgccggccggagcggagggggctccggacgtccgcggccgcggcagcgtcggccgtcgaggtgggcggcgtcaagatcgcgcgcgacgatgttgtgaaggaggatgacccaacaaacaacgtgccagacactatcttttcgaagattggtctgcagctgcacaggag

SEQ ID NO: 45672 - DNA, 416 bp, Setaria italica
  Peptide Sequence Number=SeqID_111646
cgcgcacggccacgtggtgcgcgatgttggcgccggccgagtcgccggacacgaacacgcggccgaagtccaccgagtcggcgagccacggatcggcgccggcgccggcggaggacgcggcggcctgggcgcggagccaggagaagaggctctcggcttcgtcgagcgccgcggggaggcggtagtcggcggagagcacgacggcgggcagctcggcggcgaggcggaggcaggcgtttggaagtccagcatggcgaagctgccgatgcagaagccgccgccgtggaagtagacgagcacggggagcttcttggcgccggcggcggacggcacgtacacgcggaggctgaggacgtcgtaggtctcgtcatagacgacgtccttccatcggactgcggctggggctcggcgcaggg

SEQ ID NO: 45673 - DNA, 314 bp, Setaria italica
  misc_feature (226)..(226): n is a, c, g, or t
  Peptide Sequence Number=SeqID_111647
ttagtcttggatgtgctcttaaattctgaaacaacttcattgcaaaagtttcatgtgttgactttccaagcatgctgtttaacaagacatgcttcatccaatagtgaaactatgcctattggtttcttttcaagaagatccaatatatcttggttatcaacaaattcaatgtagctccaattgatttcttctgtttttatattcctcctgctccatcttgaaaacntgcttattaaaatgctgttggagctttttcattagcaaaattgatgcacaactgctcaaagctgttatatttgaaacactcaaaaacc

SEQ ID NO: 45674 - DNA, 299 bp, Setaria italica
  misc_feature (264)..(264): n is a, c, g, or t
  Peptide Sequence Number=SeqID_111648
ctccggaatcccagcaagcctcatctgtactgactaggctagccacaagagcgtgctgactcacgcgggagcggccatgacacgccgccgccggggcaagcgcgggcgcacgagcccagacccgccggcgaagcgccgccgcggaggcccgccggagacagatgccgatggctatccggagcccgctccggctcagcagccgttttaacggtagatggtcgcagggctgccgcccggctgcggcgtgctggagctcaagggtcncggctggaggcgtacggccccatctcgcgggcccg

SEQ ID NO: 45675 - DNA, 449 bp, Setaria italica
  Peptide Sequence Number=SeqID_111649
atctttcgcgcgccagaacgtgacgaccagcggcgcggccgtggtcacggcctccggcctcctgcagctcaccaacgagacgaacgaggtgttcgggcacggcttctactcggcgccgctgcgcttcaaggacgcctccacgggcgcgccgctctccttctccaccaccttcgtgttcgccatcgtgccgcggtacccggacgcgcacggccacgggatcgccttcgcgctcgcgccgtcgccggccgtggcgggagccgtggcggggaagaacctcggcctgttcaacacgtcggataacacggggcaggggaggagcgggatcgtcgccgtcgagctcgacacggcgcgggacgatgagttcagggacatcgacaagaaccacgtcggcatcgacgtcaacagcttggagtccgtgaactcaacgccggcggcgtacgtcgatgtcg

SEQ ID NO: 45676 - DNA, 355 bp, Setaria italica
  Peptide Sequence Number=SeqID_111650
gcttctttgtttctcaccgtgtcttcttcctcgccacgccgggagagggaccgctggcgacgacgggaggggagagcctagcgagcaggttggctgccttatcggcggagagtaatggtgcgaacttgaggatggggccccctcggcctctgatcagggcactgcctacacgaagcggatgcaggcctcaacgcaggcatcgaagatgaactagagcgccacgagaggaggtcgagggcctcgccgcagaacgaatggtgcccgccaaattgagcgtgtggaagaggcagaacggagacgggacgacggctcgccgggcgcttgcgcttgcaaggagtaatttggggattttttt

SEQ ID NO: 45677 - DNA, 477 bp, Setaria italica
  Peptide Sequence Number=SeqID_111651
accaactagccactgtcttacttgttggtgtttctgtcgggatttgatgcttgtgcttgcgtgatccggtgatggaaatttcagaagcctaggctgtttcccctcttttatatattaaaaaagggagctgctagcgcctggacgtccgatccgggcgctggtgttggacggtggggtgtccgtatgattggaactgtattgactgttggatagaaataaaacttcccaccacaacattcacgtcgcatgcaacatgaccttttcctccagctttttcatcgccatggtcatctgccacatgagttcaaggtgtgtcgtttcctccataactcccaccaaaacatgcttaggagcaaaatcagctgaaacatgtgagtgtctcctccaaagaatcgagttcccactactgaagatcaagcatatgtctctcgtccccaacatattgttgacccaaaaaaaaaacccctcaaaaccccc

SEQ ID NO: 45678 - DNA, 538 bp, Setaria italica
  Peptide Sequence Number=SeqID_111652
ggtcagttattgtttagagttaacaccaacaaggagtaattaaaaatcactaggtgctaacctgcctagccttgcatacatgtggagtggtaggacagggaaaacagggaggaggtgaaacattcactggctttcgaaacactacaagtcaacataatttggctagaggcatgcatgttgggtaattgcaatcaaccagaggtgcatagacaaagtactttacatgaaacatgacactttcaagatggatcaacgtcatctagaaagaagttcaatgatacatgcacgtaagaaatctagtactgcaatgaagaattatagctaaagaaagtgcatgcagtgccagtcattttaatgaatgtcactatgaaatgcatttgttaaggtacataatattggaatcaaatcttgtttcaatcaacaggaatcaataccgcaagctaaaaagaatatcgatcacagtgatgaaaaggcaaacaaacagttataagacctgtaaatatctgtgaagaccaaaaggacaggactaccagaactt

SEQ ID NO: 45679 - DNA, 1169 bp, Setaria italica
  Peptide Sequence Number=SeqID_111653
ggaggaggaggccgtgcgggcccgcctccgccgccgcgcccgcgcctcccgccagtccgcgcacaacgtcctcggcctcgccgccgctcttgagattgttgcagttggatatgctatcatgactaccagatcgcccgacctcagctatcatgactaccagatcgcccgaccttatctgcccatgtttctgattcctgctctagctgctttaatctactcatccattacaagcctcaccaaaatgcttgataatagagaccaacatactcttgaaaagcttcgaactgaaaggcaagctaagattgatgaattgaaggagagaacaaattactacactacccagcaacttatacagagatacgatcttgaccctgcagcaaaggctgctgcagctactgttttggcatcgaagttgggtgctgattctggattgagagtctttttgggagatgaatcaagtagggatgcagcactgggtaaattaatgataataatcttggacaacctactggacttaggcaaaggaaatcagctcacttaagcaatggcactggacagaccaattcctctgagccatttgatggctcaaacgtgtatgatggtaatgaagaaggtagccccggcactccaaatcagaggactgttgagcacttcagaggtccagctggtaatgatggggggtggcttgcacgagtggctgctctccttgtaggggaggatccaacgcagtgctatgctctaatatgtggcaactgccatatgcataatggtcttgcaaggaaagaggactttgcgttcgtcacatactactgtcctcactgcaatgccctcaacggatcccggcaacacgaggaccatgaattggtacctagttctgggaaggagagtcctagttctgaatccgacataatcattgcccaagctggtgcaagccttgcaagctcaggtgttgcaagtcctgttgcaggcagcctaccaaccgttgaagaactctctgtcgaagattctggggagaaggcaagcaatgaccaacctgccagttgagctcttcatttcctgtaaattttacgtatttgtgaagtatttgcatcggatttgtgttgggggatccaaatttttgtacctaccatgtggcatatagagtaccatgcttcgtgcatgatttggtg

SEQ ID NO: 45680 - DNA, 1431 bp, Setaria italica
  Peptide Sequence Number=SeqID_111654
atggtgaggatgagcgtgtcctccagcccggggtcgtactcgctgctggggttcagcttcacgagctcctccgccgtcgaccccagcagctccttggacagcggcgcgcccctcgccgccggcttgaacccgccgtcccggatccgcttcagcgtgtacgcctggcacgcgttgagcgccgtgatgtacgagtcccgcagcatcagctgctgctgcaggtacgggtcgctctccagcaggtccctgtgcccggccacctgcaggagcaggttctgcgtctccgcgtagttcgcccgcagctgctcgccgaacggccgcaggtcgccggggaccaggagcttgtcgtagagctcggcgatgccggggtcgcccttggcgaacaccatctccaggaggtcgatggtgacgcggaagaagggccactcgtcgtacatttcccggagcgtggcgagaccgccggggctccctgctgcgtgccggaatgcggcgccgaagcccagccacacggggaggtggaaccgcgtctgcgtccacgcgaaaatccacgggatggcacgcagggactcgatgccgccgccgggcttccgcttcgacggccggctgccgatgttcatccgcccgtactccgactccggcgtcgccgcgcggaagtactccacgaagcgcggctcccggaacacgatggaccggtactcctccgtcgacaccgccgccatgtcgtcgagcaggcgccgccactcgagcttcggggacaccggcgggttcatgccgtgctccagcgtcgccgccgtgaaccgctgcagcgtccggaagcagaggttctcctcgccgaaggacttctcgatgacctcgccctggacggtcacgcggagcgagccgttgacggtgttgggcggctgcgacaggatggccaggtggctcggcccgccgccgcggcccacggtgcccccgcgaccgtggaagatggtcagcttcacgccgtgccgctccgccacgcccacgatctcctcctgggccttgtacagctgccacgccgcggacagccggccggcgtccttgccggagtccgagtacccgatcatgacctcctgcttgccgcggatccgctgcttgtaccagtcgttggagaacaggagctccatggtggcggggccctgctgaaggtcggcgagcttctcgaacagcggcacgaccctcaggggcctcttgatgccgcactcccgctgcagcagctcgacggcgagcacgtccgacggcgcggtggccatggagatgatgtacgcgccgaagctgtcggcggggagctcggcgatgacccggaacgtgccgagcacgtcggcgacctcgtcggactgcggcaggtcgggtccgaagagcgggcgcttgccgcggagctcggagacgagccattcctggcgctgctcctcgggc

SEQ ID NO: 45681 - DNA, 488 bp, Setaria italica
  Peptide Sequence Number=SeqID_111655
gggcaaatccttttaacagcatctagagtctggtcccaacaaaggtgcacattgtgagaacctgtctgttggcgcagagggtgtcagagttgacaacaaattagtaaagataatggcagaacataacattattaattattgatcaaatgttcttcaacaagagcaattgtgttgacatgaattgcaacaaaatcaacttcctatgaactgatagactcttgtctcagaagctactagttaggagctaagtaaagaattacttccataactaaaactgacattatctatgattttattggtaaggaatttttactcgtacaaaagacagtttccaaatatgttcaatactcctatcatctatctttacatttcaagagtacaagaataggaaatttaagaaatggtgttttccgtctttctacatgttcatcaaagtattaaaaaacaatctgtccttgtgctgtaatctgtagtgagctgtggatcca

SEQ ID NO: 45682 - DNA, 1068 bp, Setaria italica
  misc_feature (1)..(57): n is a, c, g, or t
  Peptide Sequence Number=SeqID_111656
nnnnnnnnnnnnnnnnnnnnnnnnnnnnnnnnnnnnnnnnnnnnnnnnnnnnnnnnnaccttaaggaacagagatgccttatgatcctcgttgccattgccattgtgggtacagcgccactggcactgtgcaccggatgcagtgtatcggcaacaatcactagcaatgtttaaaaactgcatcgaattaaacagacacataaaatcctgcaaaactaatgctacatctcatcagccggagtagaggagttgccatcagtgatgtaggatctaagttcctgcacaaactcatcgacgtacctctcgtggagctccttatcggctacaatctcttgcatcttcatcgcatttgccacaaagaccttcttggtatcttcctctaccatgacagcccggaccgcgctcgcgatgccatggcggtcaaaagatccatcatcatcgttcctctccacctgcaaccctaccttcctccgctccatgagccgcgcattcggcccttggtcggcgaagatcggtagcatgatcagagggtgcccgtacagaagcccttcgatgagcgagttccggccacagtgcgtcaagaacgcgcccacggcgccgtgcgccagtatggcgatctgagggacccaccccatggtcaccagcccatggccgtgtgtgcgctctaggaagccggcagggaggacgtcggcgtcggagacgcctctgggtttcctcagagcccagaggaagcgcgtcccggcgagctccagcccgtgcgccagctcgtgcacgagctccacgcgcagcggcacctcgctccccagcgcgacgtacacgacggacttgtccggctgcacgtccagccaccgcacggcggcgtcgtccctgtgtgcgtcggtggcgcggccaccgtcgggcgacggcggcaggaggccgagcgggacgagcggtttgccgaggagcgccgccgccagcgggaacgcgtcgagctcccactccgggcagctccggatggccgcgatcgtgcaccgctcgagcgtcagggaggtgcgccgggcgatgctcaggcccgacgcggcaaggacgg

SEQ ID NO: 45683 - DNA, 1840 bp, Setaria italica
  Peptide Sequence Number=SeqID_111657
tttcaacattaatttcttttccagaagtaacacatagtgcaccactaatcactgctttgatactgatgaaaaggtaaaaacgaaaaaaatagataaagaggggaatggatttcacgttctaaacgacttggtcctttgtcccttcagggtcatctatcgattgttcgattgatcttttcagcgaactggtaccaaatgcaacctccccagcaagcatcttaatttgctcaataagtagatccatttgatctgatgccgtgaaacctgcctgcactgaatctggtgcggaaccagtaattgaagaatgctccccactggcagatcttaattgattgatctcatccaatgagtccggcaaagcagatgttagggggtcttttgtggtgccttcattttggacaggcatcgaactatcttgtgaagtgcttaacttatcttgctcactagaagaattgtgccgctgatgactatctgtcaaggcaggaatattgttttttgtggaaacgagtattaatttggtcaagcgttgtatcctgctcattagagctgctttcgcttcctcttcctcctccagacgatactgcatctttacctggccctcctccagctgctgacgtaaactcataatttcttcctggctagcaccaccaatcattcctctccttagctgatccagttcttgctttagagaggatatttctctctgatacttcttgatcaaagacttctcatcaattatccggttgcgagaagcgtaaatttcgacacgttttgctctgcttgcaaatttcaatgtattatgtgtttcttccatgttgcttgatgctggggtaattgtacaaattagtgagacatgaccatggccacttaatgatgactgtagcaaacgggtcaacttagaatcacgatagggtatatgtgtagccctcccttcgctgagcttgccaatgacggttccaagagttaaaagactcttgttaatatatgcaccttcccttcttcttaaccctgtagtctctgtcttagagctctcagaaccagctagatcaatcaaattgagctgcgaatacatgaccccatcatactcatcaccacgggcactgctttcaatcatcaatgtgaaaatagtatgacttcggctactaaataagttgaagttgttagagccaacatgccgatgttcttcaccagctgcaataaaagaaagagcatgtcctggagataaaactacttcttcttttattccttctacataggttccctgtgcatcctcccgcacacgcaaattttggccagtaggatcaagtaaatcatttatcacctcattatagatttcaagatacgacacacggagcaaaaattcccttccaggactatcttggatcatgctgaagacatccttaatggcaagtggaattattccaggacaattctggtcaccatgcattgtgtgggtcttcccactacttgtgacaccataagcaaaaacggtcccatttatgccctccatagcacctttcacaacagggcgagctgcaacatcatagacagcttcggtggttgtcgaaggcccaaaaactctatcgtaagcataagccgtcgccgggttgtactcgcaccgcacaagccgatccccatccgggtaccacgagatctcatcgccgcgctggaactcccgctcgctgagcggccggaagcggatggtgacagagatgctgtcgccggatcgggaggtgtcctcgatgacgagctcgtccgcgctggggaacggcactggcgcgagcgcgggcgccggctccggcgccggtgccacggacgagcggcggcggccgggggtggt

SEQ ID NO: 45684 - DNA, 1854 bp, Setaria italica
  misc_feature (1)..(59): n is a, c, g, or t
  Peptide Sequence Number=SeqID_111658
nnnnnnnnnnnnnnnnnnnnnnnnnnnnnnnnnnnnnnnnnnnnnnnnnnnnnnnnnnnttttttttgacatcaggttgctgactgcttttcttcagggggggaaaacaaaaaatcaaaatgtgttacaatgtcgagtcgcatatctatacatatttgcacagcgagaagtcatcatttgtaactcctcggtacaacaaagaacgaaagatgagcctatagggtaatcgaaagaatggcgatacaacacagaaggaacataaaaggcaccttctttgctacaaggaaaaaaagagaaacatataccctgaggattttacaagagaatgcgagcttcagaaccacctgaagctagcaagagattcatgtgaaggtgattatcctgtcggcgattctagtgcggcacagagggcactctgaacaggcaagcgagcagggcttgcacaagcaaaagtgccggcaaggaagcaatactgcagctgttgcagattcgaagcatactttgcagacgtgtgagttcccatctttgtcacttaaggggtctaagtccttttccttcatctcctgaattttagccttcagacgaacaagaagcggttcaaactccggacttctatgttcttctgtggtcaacttcacagtatcatctgaaatttgtttctcaactagagcaaaattcttgtcaactttgttttcctttgtgccattagttatatcagctaggttgactgatcgatcatcaacattcaaatcggatatgcctaaagcccctctcttcaacttagcaacgaggacccacatgcctgctagatcattttccaaagatagttcctttttctttgcctcgtcaaactttttcttgtactcctcttcgagaagctccttctctgccaaagcagcttccagagcagcctccctctgtcttctagcctgtagctccatcttcatgtcctctaaatctaggctccatgtcccaacctcatccctgcccctactagttgtacgaccctttctagcatgaacccttgaatgtgccatctcttgagcaactaataactcctttgcctgctttgcatttagtacggataactttgtaacttcttcagctaaattcttaagttcaacagcagctgaagatgccaattcctttgcatatgcagcttcctcacttaatttatggttttgactgatcaagtcatgatgctcctcagtaattttcaggtgctcatatttcagcttttcaatctcagcttccttggactgaagtttagatttcaaatcaatagtctcctgctgtgtgtaattagtctcctgctcagggggtatatcagcttttattgagagctgttgctcaaggcgaagaactttttcttgtaactcattgatttccacattcttctgatgtagctgctcttgaaggacacgattatcagctgattttaactctaactcaaaagctttctcactgcattgagctgtcagttttgaaatagtctgctgcatatccaccatggaagcattagcaactgatgcttcgccgctttccatgatttgttgttccagggctcgcatgtgccttcttttttgctggatttcacgttctaaattctcgatttggtcctttgtcccttcagggtcatctatcgattgttcgattgatcttttcagcgaactggtaccaaatgcaacctccccagcaagcatcttaatttgctcaataagtagatccatttgatctgatgccgtgaacctgcctgcactgaattaatttagttcttccttgtcttctagggggttattaggcacatgcgagccctggaacaacaaatcatggaaagcggcgaagcatcagttg

SEQ ID NO: 45685 - DNA, 451 bp, Setaria italica
  Peptide Sequence Number=SeqID_111659
gagatacactcctacactctgaaggaagaaggcacttggggttccgtcaagagactcgatatcatgctggatgtgtcgatggcgatggagtatctacatcatgagcaccacgaggtagtcctgcactgtgacttgaagcctaccaacgtgctatttgatgatgacatgacggcacatgtagctgactttggaatagcaaagtttctattgggtgatgacaactcaatgatcaccgcaaccatgcctggaacactagggtacatagcaccagagtatggatctctaggaaaggcatcacgcaagagtgacgtgttcagctacgggatcatgctccttgaagttttcactggaaagagacccacggatccgatgtttgatggagaactgagcatcaggcagtgggttcatcaggcatttccatctgaacttgcatctgttctggatgaccagg

SEQ ID NO: 45686 - DNA, 1242 bp, Setaria italica
  Peptide Sequence Number=SeqID_111660
acccctctcgcttccctcgctctccagtctccccccgagcccgtctccggcgagctagggtttccgcctccgccccgccgctccactcccgctcgtcaaccccgccctccctggatctccagccatgtacggcggagacgaggtctcggcaatcgtcatagacgtaggctcctacagctgcaaggcgggctacgccggcgacgacacccccaaggccgtcttcccgtcggttgttggttcaattgaacaaacgggagacaccgatgactccaagccagagaaagaagctgactctgcatcagattctaagaatggagctaagcctatggatgtggacaaagccaagacaaaacgcaaactttatgttggtcaagagttggagtttaggagggatcatatggaggtgatttcacctatgaaagatggaacagtaactgattgggatattgttgataatatatggaatcatgctttcaggcggaggttgttgattaatcctgaggagcatcccatgctcatagccgaaccatctacaaacaatgcacagcaaagagagaaagcggcagaacttatgtttgagaactacaaagtgccagcactgttcctagcgaaaaatgctgtgctcacatcttttgcctctgggcgagctacatctttggtggttgacagtggtggtgggtctactgtggtttcagctgtgcacgacggttttgttttgcaaaagtcggtgtcgacttctccagttggcggtgaatttttaactgactgtatgatgaaagccttggagagcaagggtgtcgttattaggcccaggtattcatttaagaagaaggaagtcggtcctggagaatataagattgtagatcttgatcttccaaacacaacagagagttacaggttgtactgcatgagggctattgctagtgacatcaaggagtctgtttgcagagttccagatactgcttttgatgaagtggcgtatgcaaatgttcctactacttcatatgagcttcctgatggacaaactattgaagttggtgctgatagattcaaggttcctgatattctatttaatccatctctatcccagactattcctggggttgatggatttgcagatttaatgtcagtccgtggccttccacgaatggtcattgatagcgtaaataggtgtgacgtcgatatacgcaaggagttatttagcaacatcttgctttctggtggctcatcatcaattctgct

SEQ ID NO: 45687 - DNA, 1128 bp, Setaria italica
  misc_feature (1071)..(1128): n is a, c, g, or t
  Peptide Sequence Number=SeqID_111661
tttttcttttttaagggttttttgtgaagacgaagggtagtacgttaattaacgtaggatgatttctatttaagaagaaggaagtcggtcctggagaatataagattgtagatcttgatcttccaaacacaacagagagttacaggttgtactgcatgagggctattgctagtgacatcaaggagtctgtttgcagagttccagatactgcttttgatgaagtggcgtatgcaaatgttcctactacttcatatgagcttcctgatggacaaactattgaagttggtgctgatagattcaaggttcctgatattctatttaatccatctctatcccagactattcctggggttgatggatttgcagatttaatgtcagtccgtggccttccacgaatggtcattgatagcgtaaataggtgtgacgtcgatatacgcaaggagttatttagcaacatcttgctttctggtggctcatcatcaattctgcagttaaaggagcgcctagagaaagaagtactagaggagtctcctcaagctgctcgtgttaaggttatggcaagtggaaattcagtggagaggcgattcagtgtttggattggagggagcattcttgcatctcttgggtcgttccagcaaatgtggttctccaaagcagagtatgaagagcatggagtttcctacattcaaaggaagtgcccgtgaagcagtggaacatgtacgccaataatatgcttcacaagggttgtatgtccaaagggtgcgtgtgtacaacaattagatgccttgccatgttggcttatgaagactctggtcgagctatatttatcttagtcacggcaagttagtttaggttatgtaagggtgtaagagcagggtcagctaatacttgccattgatgttagatactagttcatgtgctgaatctttttgtcccatctgtacaatgggacgggataatactcttattttgtaccggagctaacttttcgccggcggattaaagtctaagatgatgtgttttaaccagggtcggctgtccccgtctcaaaaaaaatggtatctcttaccnnnnnnnnnnnnnnnnnnnnnnnnnnnnnnnnnnnnnnnnnnnnnnnnnnnnnnnnnn

SEQ ID NO: 45688 - DNA, 217 bp, Setaria italica
  misc_feature (204)..(204): n is a, c, g, or t
  Peptide Sequence Number=SeqID_111662
caattgcccaacgcttcgctttctcaccccgcacgatcgccgtcaacgccgccgcctcgatggctgctgcgccggaggagcgcctcgacgtcctcaacgccgccggggagaagaccggcgtctccaagccaaggtcggaggtgcacagggacggcgattaccaccgagctgtgcacgtgtggatctacagcgagagcaccggtnaactgctgctgca

SEQ ID NO: 45689 - DNA, 473 bp, Setaria italica
  misc_feature (2)..(2): n is a, c, g, or t
  Peptide Sequence Number=SeqID_111663
anaaagtacaaaggtggtgccagggtactgtgttgacattaaggggcactctgaagtctgaacacgcagaggcaacacgcttgcaacaaagtttcacgacgaagatacgtgtaaggtagactgctgaactttagttttgcttgatgcttgtatagatgatacaacacaatgctattgttttgccaaaatccacagaaaagtattcttcagatgcggttactgtaaatctgtagctgcagcacttctcatagagtaatttgctgtgacgtgctgcacaatgtagtccaagattttcaaggaaggagggtttaaagcatctctgcacatgacctggaagggattctgattgacattgcagcaaggctactgccaacatgcatgtgattgcagatgcaattacacgatgatcagaagtgggtgccagatttggagcttgacacaacttgggaggacaggtggccagggccacacgg

SEQ ID NO: 45690 - DNA, 410 bp, Setaria italica
  Peptide Sequence Number=SeqID_111664
gctaacccgccgccggggtacccgccggccggctaccccccgccggcgcagggctacccgcagcagggctacccgcagcagggctacccgccgccgtacgcgcagcagcctccccggcagcagcagagcagcgggccttccttcatggagggatgcttggctgccctctgctgctgctgcctcctggacgcctgcttctgagagaggaccgacggcggattcaagatgacagcaagtgggacaacctcatggaaggaccggaacccaactgggcagtagcgttcttgtgcttcgttatcgtctcttttcgttatgaactccctgcaatgagactgctagtagtactctgtcggtgttgattggatgatggttatggctggtgtgtattcgtaaaaaaaaaaaaaaaaaaa

SEQ ID NO: 45691 - DNA, 1415 bp, Setaria italica
  misc_feature (1347)..(1415): n is a, c, g, or t
  Peptide Sequence Number=SeqID_111665
ggggaaggacggctacccgccgccggggtacccgccggccggctaccccccgccggcgcagggctacccgcagcagggctacccgcagcagggctacccgccgccgtacgcgcagcagcctccccggcagcagcagagcagcgggccttccttcatggagggatggtacgttcctgattccctcctcctcgtgtcccttccacttttgtgctgcgcatgctcgtgtgctgctacttgatactagattggatgtctctggaatttccttgcccgattaggtcaaaagtttagggctagtttagagggttggcgacttcgttcagattacgggtcagatctgccagcgccggcgcggccggtgatggcggtggccgccatgctcgtgcgtgcgcacgttcgccgcggtgtgtggggccgtgacttgacgcgtgaaccaccctacccttggaaaaggtagccgcctgcctcgtgtccttggtgacgtgtcggtcgctgcacgcaaacgcgcacacgtattccatggggccgaggcttgtcttctccctcgtgctgcctggaccgtccgatctgagacgtgcggtggggcttccgagtctccgcaggtccattcttgctgcacttccacagagaagtaggggtagttgtcagtgtgaaagccctgggattttcagattccttcggggtgaggtcgcttgggatgggataatatttctctcattttttttaaaaaaaacatagtatatttctttccgttgacgcgctaataccaacgagatatgatagatgctctagcactagcgttgtacttacaatatcacaattggaaaccggaatatgtcaatggatggctgggcatttttttttcgaaaacattggctgggcattttgaacaagcatattacagctatgggttaaagctatggaccatggtgactttacatttcagtaacgcatattctagaaccggaatatgcttgctttcgtttgatcttatctgatgttgattttcctcgtgcctgaacagcttggctcctcgatgcagggatgcttggctgccctctgctgctgctgcctcctggacgcctgcttctgagagaggaccgacggcggattcaagatgacagcaagtgggacaacctcatggaaggaccggaacccaactgggcagtagcgttcttgtgcttcgttatcgtctcttttcgtttatgaactccctgcaatgagactgctagtagtactctgtcggtgttgattggatgatggttatggctggtgtgtattccgtgggttgccgtgtttctggtggaattcaacctgaggtgctgtttggataaaaaaaaaaaactnnnnnnnnnnnnnnnnnnnnnnnnnnnnnnnnnnnnnnnnnnnnnnnnnnnnnnnnnnnnnnnnnnnnn

SEQ ID NO: 45692 - DNA, 309 bp, Setaria italica
  misc_feature (276)..(309): n is a, c, g, or t
  Peptide Sequence Number=SeqID_111666
atctccggcgattctccgccgcgcgccgccgtccattgcactgcatgtataccgtaaatatacaccatgcattactattacttttttcgttgaattttggttgctgcttgctagcttcatatatcatgtgttgtgattcagatcaccatgcgtggagctagctagcagctaccagctctgtatacccatgaattgagtatacgcgtgcgtacgtgtatacgtataggcgtacgtacgtagggttgagatgatgattgagcacatgcatatcatcgnnnnnnnnnnnnnnnnnnnnnnnnnnnnnnnnnn

SEQ ID NO: 45693 - DNA, 398 bp, Setaria italica
  Peptide Sequence Number=SeqID_111667
aatagatccgacgcttgagaaactcgacagagttctaatgagcagtgaatgagaatctgaattccgcttgaccaatcttagaaaatcccaagatacatgtttgacaacaaccctctgatgttgtgtacagagatagaaaagatcaaaacacaaaaaaatttagttttgaaactccctggattaaccatgctgactttatgccaaaaatccagcaaatttgggaaaaagaagtgatagcaaagaatgcagtcgaaacgtgatatatcataatcaatagagtcaaaaggttcctcaaaggctggggtttaaatatcaaagggcagattaaaagataaaacattctacaaggagaactgcctgccttggaaaagttggaggaagatggaatgcttccgaat

SEQ ID NO: 45694 - DNA, 566 bp, Setaria italica
  Peptide Sequence Number=SeqID_111668
ttgttcttaactttgttaaatttagttttatttagttttagtattggttcaataagagtccttttcctatttgtggtgcccatgctggatctgtagcataaaatattattgttaaacaagaatattatggttgatctgtatagactttttactttaagagggaggtttgttgctgaggagtgaaaactgagaagtaaatttgtttgggagcatagagttcgaaacttagcttgatgttatatgtactgtcggtattccctgtggttaattaccttgatgttttgggtaccctatgaaggctcaaaccaaaaaagagcattgtaggtgatttttttgcatgggtttaaggcatttttcagtatcaagtgttaacttgaaatataacagtagcacatcatgaagctgtgactttcatgcaagttgcattagcatgtcttgaagttagcacaagctttccagcgagtgattgtcttgggtcactttttttgtgagttgtgtcattatacttgtcgatactctgtctgaaggaaataatggaggtaatactaactccgctttatctttcc

SEQ ID NO: 45695 - DNA, 518 bp, Setaria italica
  Peptide Sequence Number=SeqID_111669
caattaagcaaaggtgaaaaaaaaccctcataacaaatagtatcttccaagtgcacatggatttcatttcaccactaaccccttgagcatgaccagagtgcacgagcttttccttcaacttcagagtcagctccttgttctcatgagagagcttctcattcttcacactcagctggtgattctcgcgagagagtaactgattcatgccccgcacattttccttctcgcatctcaactccttgtccttgttggatagctcctcctgcagcctttcaacctcttgtttctcatgggtggtcttcaccttctcctgaactaaagctttcacggcgtcatgcatttttgcgtactgcttgaggacacctgcctgcacggtcatgtcacactcgaggctggaaagcagactggcgatgtcttggtccagccctgatgcttgctcggacgccattgaccaaccagccgtccaaccaaggaagggaagctaagctgctggagaaggattggagggggcagtgaag

SEQ ID NO: 45696 - DNA, 1260 bp, Setaria italica
  misc_feature (1)..(62): n is a, c, g, or t
  Peptide Sequence Number=SeqID_111670
nnnnnnnnnnnnnnnnnnnnnnnnnnnnnnnnnnnnnnnnnnnnnnnnnnnnnnnnnnnnnnaagtttctaatcagaccatagggtcatagggagtcttctgcattatagccagacagaatcgtgtcttcttggggcatgatttgaggtcctatgtaacaagccaattcagccacaatatcctggcacacttaaatcttcataatacagaatagtatccataactagcgcatcccgttacagctaacagaacgacgtacaactccagctattgctcttctccggcacaaacaccagcactgccagctaaaccgaagacgggttgttctttcgcttcttgcggctctgctccttcactttcttgcccagatactcgacacactccaagacagttgctttccttccctctttgtagttccaaagctcaggaacgacacttctcccacttcggttgtagtcatccatctccttcagtgcttctgtcacagcttcatatatctctttaccacatgctttcagtttcttcagcgtttcatcctcgtcgttcagaacctcctcactgggtccatcttctgtaatcatcttgtatggatgccaaaatggatcttcaatcttcttctgccatactgagcagtttttaactgcctcatctctagcaatgatgcagttagggtgcttactatgggcagcgtcgaggaaagcttggtcatttatctggcccatcatttttatcctgatatgctgtctatgatggtcgatgttgccaaaaacttctaccagctttttccggatttcagagagctctctcctcctctcgcaatcctcagcaatgatacggtttgacaggacttgatcaaacaactcttcttttggctcattgttaccttcgatacgcccttgtgctttccaattaagcaaaggtgaaaaaaaaccctcataacaaatagtatcttccaagtgcacatggatttcatttcaccactaaccccttgagcatgaccagagtgcacgagcttttccttcaacttcagagtcagctccttgttctcatgagagagcttctcattcttcacactcagctggtgattctcgcgagagagtaactgattcatgccccgcacattttccttctcgcatctcaactccttgtccttgttggatagctcctcctgcagcctttcaacctcttgtttctcatgggtggtcttcaccttctcgcgtctattcttccttctttccgtttgtttccttttgttttgtt

SEQ ID NO: 45697 - DNA, 293 bp, Setaria italica
  Peptide Sequence Number=SeqID_111671
gtcccttttggttaaaaacacacactccatctgcccatagactttccatcgttggatgaacttgagttttccagttccagttgtcatacttccatcctgcacataccagttagacctattgttgcatctttgcccctctactaatatttaactatcacatcactgcatggctgccattgcttattttcgcaatactgctttgatgtatgtctggtattttgttaacctagatgtgttcacacataccatcatatttttttggtcttttgaagcctcacccagaggtttccagg

SEQ ID NO: 45698 - DNA, 508 bp, Setaria italica
  Peptide Sequence Number=SeqID_111672
aaggggtaacgtaagtaagtaagggttagggggtttagacatgcaagtgcatgcatgcaggctcaccaccttttagggcacaactgcttggggttcaaaacaaggccctcctttattgatcatgtttagactacatctgagtatgtgacataaaagtatttgtgggagcaggtgggttcactaagataattctcaaggtgtgtgctaatatgtaattatgtacaaagcatatatattgggaattaacctttgcttttaataattctgaactttgacactggaatatggacagaaaaaaaaaacagttcataaacaaaccaaagaaataaatattggattttcatgtttctatctgtgctgttgttgtcactgtgtagaattgtagatggataatttcctcagcgtttctagttgctagcatcttctgtggttataccactctggataatctccttaatgaaattgcctcaactgagataaaaacagtttggcagataatatacatgga

SEQ ID NO: 45699 - DNA, 312 bp, Setaria italica
  misc_feature (276)..(276): n is a, c, g, or t
  Peptide Sequence Number=SeqID_111673
cgacgccttcgcacgctgacggacatgatgcatgcggatgcgacgcgtactcgtcctgcactcctgcctgccggcgcaagatcgcaggacttgcttcgttcgaggcacatacacatctagattgcaccactttttttctcccgttctcgtcctgctgtgtaaattactctaagataaaagaaatctatgcgcgagtgagacgtgatcgccagaaagtttccacaagtactgttttgaaatggtacatgcagtgattactagagaaaaaaaaaaaanaaaaaaaaaactaaaaagaagaactagaccaaagga

SEQ ID NO: 45700 - DNA, 639 bp, Setaria italica
  Peptide Sequence Number=SeqID_111674
taactaaaagtaaatggcgtgagcagatcatctatctgctgtggttttttgagaggggagaggagaagaggccgagaggggggagaaaccgggggaaagcaggagagaaacagggagtgctcgatcgtaccagtcgagaggccggcatcggatccatctcgccgccgcgccgtcaggtgccgccgccgccgcgccggtggattggattcgacgacggcagggtcccttgccctcgcgatccaatccaatccagtcgagtccttgaggggagtgatcccattccctcccccatcctccccccaccatccattccacatgccgccgccgccggcggcggccccgccgcaggggaacctcaccaccaccgatgccctcacctacctcaagtccgtcaaggagaagttccaggacaagcgccagaagtacgacgagttcctcgaggtcatgcgcgatttcaagagcaacaagatcgacaccgccggcgtcatcgtccgcgtcaagaccctgttccacggctaccccgacctaatcctcggcttcaacgccttcctccccaagggatatgagatcaagcacgaggacctcgagaagaagcccgtcgattttgccaaggccatcagctttgtcaacacgattaag

SEQ ID NO: 45701 - DNA, 317 bp, Setaria italica
  Peptide Sequence Number=SeqID_111675
ttgaccttgaccaggttgacgaaatacatcttgtcgaagacgtcggacgtgcggacgtcgagcggcgtcgtcctgctgacgcccttggccgggcaggtctgcttcagctgggcggcgaaggcggcgtccatggtggagtcctgccgcgggaagaggcggttctcgaaggaggtgcagtggctgaggccgatggtgtgcgcgccggagagcgccaccaggtcggtggcgtcgaggccgaggttgcccttgcgcagcacctccagcatcgcgccgacgttggcatcagggctcgggagccccttgttgacttcatcatg

SEQ ID NO: 45702 - DNA, 691 bp, Setaria italica
  Peptide Sequence Number=SeqID_111676
aaaggtgcgcgccaccgccgccgcgcgcgccgtcatggggctcctctccgaggggctcgggctcggggccgccgcgctggaggaggcgtcctgcctcgaggggaaggtcatggcgtgccactactacccgcactgccccgagccggagcgcaccatgggcatcgtcccgcacacggaccccggcgtgctcaccgtgctcgcgcaggatgagatcggcggcctgcaggtgaagcaccaggaccaggacggcaacgcatgctgggtggacgtcaagcccgtgcccggagcgctcgtcatcaacgtcggcgacctcttgcagataatgtctaatgacaagtacccgagcgtcgagcaccgggtgaccatgaacacgcacaaggaacccagggtttcaatcgccgtcttcttcagtcctgggaagagaggggactcgaatttgtacggaccattgccagggctggtttcttcggagaacccacccaagtacaagaatttcaccatggagaagttctacgggaccttcttctcacgggaccttgcgagcaaagctctaattgatcacttcaagatgtaatgtagccgaaaaattcagacctgtgtagtgtagatgggtacgtggttgctggtaaggaaattgttctgcttcatagtagcagtcataaactcataatagatttatagatttgtcctc

SEQ ID NO: 45703 - DNA, 1040 bp, Setaria italica
  misc_feature (968)..(1040): n is a, c, g, or t
  Peptide Sequence Number=SeqID_111677
tttgccaggtccgagatggaagaagggcaaggacggcaaggactttgcagctctcgcagcggccaatcccatgtcgaggatagttgctgagctccaggcttcactgagggactcacaagccgtggcgatattatcagtgaatggcggggatgcgattcttgcggtaggaccacaccaagccgcacttctgaaccgcgccgcctttggccaggctgtgggaaatgcaggagaggagaggcaatggttccagctaggccccgaggaggtgttcttcctttgccatgccctcaggtgcatcgcagtcgatacggagaacaagaagcagatgggtgaaggggacctgtgggatctcttgaactccatctcagagccattcccggagatgtacaaggcgtatgagcaccttagattcaagaattgggttgtgaggtcaggaaagcagtacggtgcagattttgtagcttaccgtcatcatccggcacttgtacactcggagtttgcagtaactgtagttccagaaggcaaagcatttggcaccagatgtggccccttgcaggtgtggtctaatctactctccaaacttcgggcttctggcagtgtggccaagacattacttgttctcaccatcagcaccgagaacaagtgtgggtcctcagattgtttggaaaagatgattgttcatgagaggactatcacgagatggataccgcagaagtgccgcgagcaacaagacaaaccgtgcagagaagaagcaagcagggaagaacaagacgatacaagagagggtgtagtatttagctattggggtgtaatattaagctttacaattctttctagcttacttgtctacaagctcaaattttgactgaagagcttaatatttatgtatactcatgttggcaaacgtgaatttttctgtcttattgaatcctatgattttactatgtgatcctcgttgaagtttactnnnnnnnnnnnnnnnnnnnnnnnnnnnnnnnnnnnnnnnnnnnnnnnnnnnnnnnnnnnnnnnnnnnnnnnnn

SEQ ID NO: 45704 - DNA, 434 bp, Setaria italica
  Peptide Sequence Number=SeqID_111678
agttgcagagtgagttcccatggggggcaccttggagtacctgtcggggctgctgggaggcagcggaggccatggccacggcaagatgaagaggaggaagcagctgcagacggtggagctcaaggtcaggatggactgcgagggatgcgagctcaaagtcaggagcgccctctcctccatgaaaggggtcgagtcggtggagataaaccggaagcagcagaaggtgacggtggtcgggttcgtggaggcgagcaaggtgctgaagaaagcgcagtcgacggggaagaaggcggagatctggccctacgtgccttacagcctcgtgagccagccctacgttgccggcacctacgacaagcgcgccccgccgggctacgtccgcagcgccgagcccggctaacgtaggaccgaccggacggaccaagacaagacaa

SEQ ID NO: 45705 - DNA, 1038 bp, Setaria italica
  Peptide Sequence Number=SeqID_111679
actactactactactctgtgtgtgtgtgtgtgtgtgcgctctgcagttcttgacttgattcttgagatcgagcttcttgctggtagtggtgtgtgccttgctcttgcagagttgcagagtgagttcccatggggggcaccttggagtacctgtcggggctgctgggaggcagcggaggccatggccacggcaagatgaagaggaggaagcagctgcagacggtggagctcaaggtcaggatggactgcgagggatgcgagctcaaagtcaggagcgccccctcttccttgaaagcccaaccatagtgttgttactaagaaattgacagatccatcatcattacacagtagcaccactacaggctgctgatgaactgaacatgagattgtcactgcctgatggccttttccaggggtcgagtcggtggagataaaccggaagcagcagaaggtgacggtggtcgggttcgtggaggcgagcaaggtgctgaagaaagcgcagtcgacggggaagaaggcggagatctggccctacgtgccttacagcctcgtgagccagccctacgttgccggcacctacgacaagcgcgccccgccgggctacgtccgcagcgccgagcccggctacgtggccgccggcggccagcagcagcacgtcggccgcccgcacgaccacctcaccgacatgttcaacgacgagaacccaaactcctgctcggtcatgtgaggaccaagagaggtggtgttgatgttgcagcctctatcttgagacataagtgaggtgaatgttcatggtttgccttggtctgtcgagtgtcgacgatggtttgttcgatgacgtgttcctagttcctgctcagtgttagacgtttgtgccgaggctttagctagtaccgtgtgtcgtttgcttgtagcttttcccctgcttacaatccatcttatgatatgaattagcaggagctagaatttgccgctaagagcttgaaacgtataacttaaactaaaaaagagaactagaccaaggacacacagggatagg

SEQ ID NO: 45706 - DNA, 949 bp, Setaria italica
  Peptide Sequence Number=SeqID_111680
gggacgacacagtctggagctaccggggaacctgtggtggtggtcaccgggatgtcgaggtgctccagcacggcgtcgtcggtggacgtcgttgtggcggcggctagggagaggagcgatggcgcagcggaggtacaggcacgcgaggaccccgacgtcgagagctccgtcagcgactcggccgggtgcgggcgcgagaggagggaggcgacgccgtcgagccggccgccagtagatctcagcgacgaggagtcgagtcaagcggcggacgaccaaaaacaccaccgtcggatgtctttgaacgctgtgacggccgcggtggcttgcagggcaaggatgccggcagaggaggagatggaggacttcttcgcgtccgcggagaaggccgaggcggaacgcttcgcggccaagtacaacttcgacgtcgcccgcggcctcccgctcgactccggcggccggttcgagtggaccacggtggccgccagcggctgaatgacgacgtacaaggcggccggaaaaagcgtaaagcgggtcggcagccgaaagcgtcggcggcggcgcagaaagcgagggccctgcggcgtgcagtggggcgaaagagatcggacgccacaagctccaaagaggaaacagtacagaaaaccagcagagcagagagacaccagtaaaaagacgagcattttcgctttggcagtagtagctcctattctctccattcgccatccggcttgaattgtttgtggtgttcaaaattcttcgtagttcctgcctgtaggatctggatttgtgtagcccgttgcgacactgcgagtggcgtaattgtaactcctgttttctgtttccggttggtgtcatcgggacagacggcattcaatgtacagtaccacagcagctgtcagcagacgctgcagctgctgcgacagttaaccaccgtcacattgtttaaaaa

SEQ ID NO: 45707 - DNA, 325 bp, Setaria italica
  Peptide Sequence Number=SeqID_111681
gggaaagattggaggaagattgaccttgagctggagcatcgtgctgtaaataggtatgatgtccgtggaactgtcacttgattatgcatagcatttctagaattctagtgcttgccgtatgcaatgctgagtactgatatataagttagaaagctgcaacctcactggaaatcttttttttaatggaagcacttgcctatgacatcttttacctgtggtatttgacatggtgactttgctaaaactgaccattagcgatgttgtgatgaaagcactttcctatgacatatcttttacttgtggtatttgactagtgcgactgagt

SEQ ID NO: 45708 - DNA, 734 bp, Setaria italica
  Peptide Sequence Number=SeqID_111682
aggaatctgatgctcgtagtgacgagtctcggatggtggcatcagatagtgctgacgggaaacatatactgcctcctcatgttaacagttcattctgttttaaaattgaggatagaaaagggcgtatgcacagattcagttgtgtttcagaaagcttagatgagcttgtgtctgctgtagcgtgcagaataggaacggataatgacaagtcgaacattaagcttttgtataacgatgatgaaggcgatagagttatcctgacaacggacagtgacctgactgcagcaattgaacacgccaaatcagcagggtggaaggttctgagactgcatatggacgaccctgaggaggccaggacggaattcaccgcgtcgcctgcgtatctctcggccgcgcatagaggacggccggctcctctccggttcggcatcgtggctggcgcggctgccgtcgccgccggcgtcgtggtaatcgtctacctgaagcggtctcagctctgactccagactttaaggtgctctaacttccacgctgtacagaatatgtacacttatccacgacaaggtgaatacacagcgggctgtatacgtacttggagatacacaagtaacacacaacagaataaagggtggttatctttttccttcttccacccgtgtcaagcaagtacagtagaaaaacaaaaaggaaatttgagggtgcaaataggaatggtgttttaaattaatttaccc

SEQ ID NO: 45709 - DNA, 498 bp, Setaria italica
  Peptide Sequence Number=SeqID_111683
aggaatgtcggacaggactgtggtcacctggaacgtgctgctggatgcgctcgtcagagtcgacgacttggacgctgcctggaaagtgtttgttgaaatgccgcagcgcaatgtggtttcttggaacaccataatcactgggtttgcaaggcaggggtgggcgcaggaagcagtggacttgtttgtcgagatgactgtggtttatggtatggcggcagatgaggccacaatggttgggtttatatcagcggtccgggacattggtctgcttggacttgggaggagtgcgcatgggtatgttattcggcgagagttatcactcgatggtgctcttggtgttgcgctgatcaacatgtacacaaggtgcgggagcatggatgctgcacacagttgcttctcaagcgtcagcaacaagaacgtggagcattggacgtctgtgatcactggtttgcagcacatggcctcccagagatggcactatcgttgttcaatgccagt

SEQ ID NO: 45710 - DNA, 426 bp, Setaria italica
  misc_feature (1)..(73): n is a, c, g, or t
  Peptide Sequence Number=SeqID_111684
nnnnnnnnnnnnnnnnnnnnnnnnnnnnnnnnnnnnnnnnnnnnnnnnnnnnnnnnnnnnnnnnnnnnnnnnnaaactttttattttctttgtgttccactacagcaggcatcaacgaagcacaagcttgaaggcaagacaacatgtcttcggtggcaagatctatttcacgacttgtcaaggagtcccctaagacactatcgagtttgtcgtacgcttcttcccttctgctctttgtgtgcagaagctccctggtatctgtgatgaagaaaaggtccagcacattcccatcaggcgtggtagagaccttcaccctccgaatcgtgaactctagctcacacaagactagtgtcacatcatgcaatactactagtaatttccctaattacgtagagcaagaagagctgtggcggcgcgggggttcgc

SEQ ID NO: 45711 - DNA, 1856 bp, Setaria italica
  misc_feature (1842)..(1856): n is a, c, g, or t
  Peptide Sequence Number=SeqID_111685
cccttctccatgttgcttgctccttctagaatcttcggagcgcgagcacggcgcgacgcacccgaaccaaaccccaccggccaccgcctcccggtcgcggcttcccaatcggtgctgtacctgtaccctcccggcctaaaccctagccgtccttcacggcgccggcgaccgccgccatgagccgcttcgacggccgcgccgcggacccgggctcctaccgcgaccgccgcagcgagggggcgttcggggcggatcaagggcgtttgcggcgccgagtaaagcggatgcttctgcggcggagctggatgggctgccacggttcgagaagaacttctacgtggagtcgcccgccgtggccggcatgacagaggacgaggtggaggcgtaccgccgccgccgggagatcaccgtcgagggccgcgatgtgcccaagcccgtgcgcgagttccgtgatgttggcttcccagaatatgtgttgcaagaaatcacgaaagctggctttgtggaacctactcctatccaatctcaaggttggccaatggcacttaggggtcgtgaccttattggcattgcagagacaggatcagggaaaactcttgcttaccttttacctgccattgttcatgtgaatgctcagcctattcttgctcctggtgatggtccaatcgtcttggtgttagctcctacacgtgaacttgctgttcagatacagcaagaggcaaccaaatttggtgcatcatcaaagataaaaagtacttgcatctatggtggtgtgccaaaaggtccacaagttcgtgatcttcaaaaaggtgtcgaaattgttatagccacaccaggacgactaattgatatgatagaatcacatcatacaaacttgcgaagggtcacatatcttgttttagatgaagctgatcggatgctagacatgggctttgaacctcaaattaagaaaattgtttctcagattcgtccagatcgccaaacactttactggagtgctacctggccaaaggaagttgagcagctagcaaggaatttcctttttgacccatacaaggtcactattggttctgaagaattgaaggctaatcacgccatcgtgcagcatgtggagatattatctgagagtcagaagtataacaagctggttaatctattggaggatataatggacggcagccgaattttaatatttatggacacaaagaagggatgcgatcagattactagacagcttcgaatggatggttggcctgctttgtctatccatggtgacaagagccaagcagaacgcgattgggtcctttctgaatttaagtcaggcaaaagtcctattatgacagccactgatgtcgctgctcgaggcttagatgtcaaggatgtaaagtatgtcattaactatgactttccggggtcacttgaagattatgttcatcgtattggtcggactggcagagccggtgcaaaaggaacagcttacacctttttcactgcagctaatgccagatttgccaaggaacttattaatattctggaagaagctggacaaaaagttagctctgaattagctgctatgggacgtggtgcaccacccccttcttcaggttaccgtgatagatatagggggtatggtggtggccgatcatggagttgacattcaaatacttagttgaagctaagagtaattctttacttatgtttgtggatggctatgttgtcctggctccttgaacgttttgattaatattcagtaaagatggattcatagactcttggatactgacttgtctcaatacttgaaatttggcaacaatatgatgaatttaatgaaaattaaatgcnnnnnnnnnnnnnnn

SEQ ID NO: 45712 - DNA, 2289 bp, Setaria italica
  misc_feature (2274)..(2274): n is a, c, g, or t
  Peptide Sequence Number=SeqID_111686
gccgcagctcggttcccagccgcgcccccgtctgcctctccccgatacggatcgacctctccctcacccgaatcggctttcacgctccgtggatcgaggtcctgcgagctcctcaagcgcggggctctcgacgccgcggcccaaatcgggcctctccctgacggagacggcaagagggaggggagtcaaggagagcggaccatgctggatgcttgagaatggcggcgcacaaagccatgccgcagagcgccgcggaggccgcgatacgctccatcggcctcggcttcgacgtcgtcagtgacatccggatcaagtactgcaagcggcgcggctcgcccgacccgtggctcatcgagctcgaccatggggaggttcaggatatcgttcttcccggcggcgttaccgtcgccggcgtcaccaagtcgattaagtgtgacaagggggagcggatgaggttccgctccgatgtcctgtcgttccagcagatgtcagagcaattcaaccaggagctatctttgtctggcaaaatcccatctggcttgttcaatactatgtttgaatttactggcagctggcagaaagacgctgctaataccaagtcacttgcatttgatgggtggtttgtcacactatacagcgtagcactctcaaaagggcaaattgaactccgggatcatgttaaacaggctgttccatcaacctgggaacctgctgccttggcaaggttcatcaaaaattttggcactcatatagttgttggtgtaaagatgggagggaaagatgtaatttatttgaaacaacagcattcatcaagcttgcaagctgctgatgttcaaaaacgattgaaggagatgtcagacacgagatttcttgatgcaaatgggcaatctgacatgagtttcaaggacacgtatgggaataataagagtgataccagagagcaacaactgagatttgtacagtctagtccactgaattcttactcgtcaaatgaggatctggtgatgatgcctaagcgaagaggtgggaaggataaagaatttatatctcatagcgagtggcttaatactgttcaagcagagcccgatgttatctcaatgtcttttataccaatcacgtcactattgaatggagttcctggaagtggatttttgaaccatgcaattaatctgtatcttcgacataaacccccaatcgaggaattgcatcagtttttggagttccagcttccaaggcagtgggcacctgtttacggtgatcttgctttaggtcctcagaggaaaaggcaaagcagtacatctttaccagtaaatataattggtccaaagctttatgtttgtaccaacatggttgatgcgggtaaaagaccagttactggactccggttgtttcttgaaggaaggaagagcaacaaattagctatacatctccagcatctctgctctcttccccagattattcagcttgaagacgacccttacaatcaccaaactcaagaatatgaccgcaaatactacgaaccaattggaccatggaagcgtttctctcatgtctgtacagcaccagtggagtccgatgatttgtccattgtcacgggggcacagttagaagtggtcaaccgtggcttcaataaaatactgttccttcgcctgcatttctccaaagcctgcaatgttgctctcgtcaagcactcggagtgggacaattctcccaacctggctcagaaatcaggccttatctcaacactaattagcacacatttctcctcagtggcccaaaagcccccaccgcgtcccgcagatgtgaacatcaactcagcagttttccctggtggcccgcctgttcctgtgcagaccccaaagctgctcaagtttgttgatccaacagagatgatgcgtgggccgcaggactcaccaggctattgggtggtttcaggtgcaaagctgaaccttgagagaggtaagatatcattgcgggtgaaatactcgttgctgacagctatgatgcctgatgatgagtttacacttgaggatgatgaatgctagcacctgggacaaaaggaaacctgtgtagctaacattgaggatacagatgaaggatctaagatttccatagcatttgtgcattcgcttgaagtttcagcagtatacactgtggtttttaaacatcaaagcataaatgagttctctgtcctgaatggagtgagaaaatttgctgtaccatttctttgtagcgtggcatatagttgtcagtgttagatggtcgatcaaattnttgtatatatgagat

SEQ ID NO: 45713 - DNA, 450 bp, Setaria italica
  Peptide Sequence Number=SeqID_111687
tgaacttagaagcatgcaaatggaaatgcaaatgcctacacttatatctatgtttcataccatactttttgtaattttatcaggttgcattctatcagagaatagctcagttcataaaagaagcttctaaatttgccttgaacactggaggggatattccagattctgaatgagctgcttcctctgattatatccttcatagttgaaatgtagacacaattctttatcatagctattttcttaactgaacaggtcgtcccacgagtcatgagtattgcttggaagatactcatggaatctctgtggacactcatgtgcatcgtatttcattccgtctcggaaacgttttccgagaaggaatgaaacaggaaaataccaaaccggaacaaacaagaatatcaggacagaaaagtacatttggatttgagcagattgtgtactccactacgg

SEQ ID NO: 45714 - DNA, 358 bp, Setaria italica
  Peptide Sequence Number=SeqID_111688
ccaccaccatcatcaagaactttgattcgtcagctgcttgatcacaaattaaaacccaattccttgcacgtctcgtacatagatagatggatcaccatagcgcgatgcagggcggtggcggcgccggcgccggagctgccgcgcaggagtggttctacgccggcggcggccagcatcagccggagcaggccgtcgtcgtcgacggggcgttcctcatggagctgctggaggacgcgcctctggcggaccaggcggcgccggaggacgtggaccggctgagccgcgtcatccggtccctggaggccgagatcggcggcggcgggccgccgccctcggcgccggcagacggccgaagcac

SEQ ID NO: 45715 - DNA, 370 bp, Setaria italica
  Peptide Sequence Number=SeqID_111689
tttcaatgcaactaaaggtctaaagcaccaactactggatggcaaaaattaacacaaaccatcctaaagaagaaaaacatccagattaaatcagattttgatcatttgttctttggttgccagtttagtccaagggaccttttggtcattcaacagtactcgaagcagcaaagtaattgttcatcccaacaaaatggtcttcatagagctcaccaactcctggatgctggtacatgtggttacagagaaatgatgtatctttggtaaggtgactccaaataaataatgattgaagagatccgtgttggctgacatgaatctcttgaagttaaaagctcctaggaaattcctatcgtgtcatttaacctgg

SEQ ID NO: 45716 - DNA, 474 bp, Setaria italica
  Peptide Sequence Number=SeqID_111690
agtggaagcccctctccagaaagcacaggtcaaatggtgccctcacatgtttttcagaatggagcttcactgttccaaggccttgtagagcgtgctcggaaaactgttcgtggttcggcagatgatatcggctggctccaaagggatcaaagcttacctacaactgaggatgggacagccagattcttggagattttggactctgtgagaaaaaatgagcacaagctacctgattcagttgtttacttgttggttccagtaaccacggaccgctttactttgtcaagacaaaggcatacttctccaagatgggtctagcttgtcatattgccaaaattcatagtgagtcttcagtaagtaaaaatgcacgagagataaaggaatacatagaagaaatatactggggatcaaggaaacgagtgctacttcttggtcatagtaaggcggtgtagattcggctgcagccctctcccc

SEQ ID NO: 45717 - DNA, 1679 bp, Setaria italica
  Peptide Sequence Number=SeqID_111691
gaaaaactagaacaagaagggaagcgcggcgttgggggacaagagccgagacgcggctgccggaagactgaagactccctccgatccatccatcctagcgtcctggcggcatccaccattccgatttctcttctctggacaaccatatcaaacatgagggaatcgccttcaacacaaggggaaccatctacatctgctatggttgatcatagttgctcagctgacagggttgaagattcacaattgttcctctctgtaccctctttaaatcaagctgcatcttatcttgcccagacagcttcatttctcacacagtgcctccctgtacctggttatgtgggtctacctgaggagggccaggagttagtagcactgccacctgcatcggtagtagacaggctttctgctcagacttcttccgcagagtctgctggcaccaactcatcccttggtcagacaggttgcagtggaagcccctctccagaaagcacaggtcaaatggtgccctcacatgtttttcagaatggagcttcactgttccaaggccttgtagagcgtgctcggaaaactgttcgtggttcggcagatgatatcggctggctccaaagggatcaaagcttacctacaactgaggatgggacagccagattcttggagattttggactctgtgagaaaatagagcacaagctacctgattcagttgtttacttgttggttccaggttagtcagttaccaaattgtgagctgctatgttaccgttccaacatgctaatgtttctataggtttgtttagtaaccacggaccgctttactttgtcaagacaaaggcatacttctccaagatgggtctagcttgtcatattgccaaaattcatagtgagtcttcagtaagtaaaaatgcacgagagataaaggaatacatagaagaaatatactggggatcaaggaaacgagtgctacttcttggtcatagtaagggcggtgtagattcggctgcagccctctccctctactggccacagctgaaagacaaagtcgctggtttggtattagctcaaagcccatatggaggaagcccagttgcttcagatatcctgcgagaggggcagcttggtgactatgtcaggttgcgtaaaatcatggaggtcttggtatccaaagtcctcaagggtgatgtgcaggctctagaagatttgacctatgaaaggaggaaagaattcctgcgacagcatccattgcctcaggaggttccaattgtatcattccacacagcggcaagcatcactcctagcgtgctcaccgcactttctcacgttgcgcacttggagctcccgattgctgccgatggcaattccaccaggataccggttgtaatgccactttcagctgcaatggcagcatgctctcaacttctggtggcaaggtatggcgagaaaagtgatggtcttgtgacaaggaaggatgctgaagttcctggatcagtggtggtcaggccagagcggaagctagaccatgcttggatggtgtattcctcgctgaaagaagagcctggggatcaggcggacacgtcgcaggtatgcgaagccctgctgactcttcttgtagaggttgcacagaaaaggaggcatgaggtggccatgaaagatgagtgaaactacttgttagtgttaccgtag

SEQ ID NO: 45718 - DNA, 871 bp, Setaria italica
  Peptide Sequence Number=SeqID_111692
tagttacaataggtggctacttggcaagccggccaaagactagagctgagtggagaaaattgaatgaaaatatcagtgctgagttagagatgaatccagagcttgggatgataagaaccgtccttcagacaagttacgatggtttaccctatgaactcaagtcatgtttcttatacctgtccatttttcctgaggactacatcattagccagaggcgtttggtgtatcgatggacagcagaagggtactcacacgagaggcgtggcaagtctgccaatgaaatggctgaaaattacttcacagaactcaaatacagaagcatgattttaccatttcaacaatcagttcgcagtagaaaatcaattgactcttgcaaagtccatgatctcatccgtgagattgccatctcaaagtcaatggaggaaaaccttgtttttagactggaggaaggatgtggcttgagtacccatggcgcaattcgtcatcttgcaataagcagcaactggaaaggagatcagagtgagttagagagaatagttgatctgtcacgattacgatcactaaccgtgtttggagaattcagaccattttacatttctgacaagatgaggcttctacgagtgctcgacttagaaggcatatggctaaaataccatcagcttgatcatatttggaagcttcttcacctaaaatacctttctctacgaggatgttttcgtattgatctactgctagattcattgggcaacctgagacagctccaagtgctagacgtcagaggtacacgggtatgggctctgcccaaaaccatcatcaagcttcggaagctacagtacatctacgctggtcggagaacagattatgtaacaga

SEQ ID NO: 45719 - DNA, 219 bp, Setaria italica
  Peptide Sequence Number=SeqID_111693
cctggaatgtttctttcaggcagccagtgtttagcaagcatggtgattgcattaactgaacaaccctccaccaagttgctgaagcccaacttcatctagcataatcttttggacaatgaaagtggccaccttagcaagagcaccgagtacctacgtgctactagccttggtgttctcggtgctcttgctaaggtggccaccaaggctagtacctacgtg

SEQ ID NO: 45720 - DNA, 833 bp, Setaria italica
  Peptide Sequence Number=SeqID_111694
ttatgattcagaaggcacacatgacaacatgcccacatgcaaggatgcttaagtatttgtggaacgtttgtcaggtttctttcagtgggaacatttcttatgttcaattcaatcttgctattttggtaattataggagctgttactcgaacagcgataaattcatggccaaggtccatttgttgttttttatcaaatactaattctgcaaatgagaaagaagcttctttgtcttgtgatacatgcaggtggatgatactgaagttgtcaattccctgctaaagagtgacatcattcatctatgcttgcgaatcatggagacaggcagcgagctgtcaaaaacagtggctactttcattgtacaaaagatcattatagatgaagctgggttacagcacatctgtggcacccctgaacgtttttttgggatagccagtgttttagcaagcatggtggctgaacagcctcagccctccaccaggttgctgaagcacattatccgctgctacctcaggctgacggatgatcccagggctcgtactgcgctgcaaactaatcttcctgagactctgagagatgggacattcgacaactgccttggggatgacgctgttgcaaggctctacctccaacaactgctggataatctggctgagcctgcgggtgaagcacctcctcccgttccaggtcctgcggcagctggtgtaacccatctaggctcagctcctgtggcgggtggtgcgccacatcctggcccaggccctgttgcgggtgcaagccccagaggatcctctcaggcaggaccgagtcgcgctcatcaaggcccagctcccg

SEQ ID NO: 45721 - DNA, 1007 bp, Setaria italica
  Peptide Sequence Number=SeqID_111695
ttgctacagctgtataaacaccttcacccactggtgctgcatttcctaattgtagaagaaatttaggattgttgaatctgttttctcacaagacaatgtcaatagtcgaagttcctagtcctaaagatccagaaattgtcgaatctcttctccttgatcttttagatccagaaaataaggcgtatgccctttctgtgttacctaagagaagggagatgttcaatgatttggctttaaagctatggtactcttttggcacaatagctgcactggtacaggaaattgtgtctgtctaccctgcactttcacccccaacattatcggcaagtgcagctaccagagtctgcaatgcacttgcacttcttcagactgttgcagcacaccctgagaccaggaccccttttctagaagccggaattccgttctacttgttcccatttttgaacactaccagtgaggcaaaatctttcgagcacttgcgtgttaccagccttggtgttctcggtgctcttgctaaggtagatgatactgaagttgtcaaattcctgctgaaaagtgaagtcattcctctgtgcttgcgaatcatggagacaggctgcgagctttcaaaaacagtggccactttcattgtccacaagattatgctagatgaagttgggttacatcacatctgtgccaccccagaatatttctttcaggcagccagtgttttagcaaacatggtgattgcattaactgaacagccctccaccaggttgctgaagcatgttatctgctgctacctcaggctgacggatgatcctagggcctgtactgcgctacgaactcaccttcctgaggctctgagaaacggaacattcgacagctgccttagggacgaccctgctgcaaggcattttctccaacaactgctggataatctggctggtcatgctggcggagcacctcatccaagcgcaggtcctgtggcaggtggaggacgccatggaggaccctctcaggcagga

SEQ ID NO: 45722 - DNA, 1414 bp, Setaria italica
  Peptide Sequence Number=SeqID_111696
tttttagtttttaaactttttaaacttttgttgtaagaaaaaataggtaaaattctctagttttttcatgcacggcatctattgctgcagctgtgaaaaccacatcaaccatggtgccgcatttaggattgttgaattctcactcgaaaatgtcaatagtcgaggttcctagtcctaaagactcggaaattgttgaatctcttctccttgatctgttagatccagaaaataaagcgtatgccctttccatgttacccaagaaaagggggatgtggtactcttttggcacaatagcagcactgctgcgggaaattgtgtcagtctatcctgcactttcatccccaacattatcagcaagtgcagctaccagagcatgcaatgcacttggacttcttcagactgttgcagcacaccctgagaccaggacctcctttttagaagctggaattcccttgtacttgttcccattcttgaacactacaagcgtggcgaaatctttcgagtacctacgtgctactagccttggtgttctcggtgctcttgctaaggtggccactttcattgtccaaaagattatgctagatgaagttgggctacagcacatctgtgcgaccctggaatgtttctttcaggcagccagtgttttagcaagcatggtgattgcattaactgaacaaccctccaccaagttgctgaagctcattatcggctcgtacctcaggctgacagataagcccagggcctttactgcgctgcgaactcaccttcgtgaggctctgagaggcggaacattcgataactgccttatggatgaccctgctgcaaggcattttcttgaccaactgttgggtaatctggctggtcctgccagcggaacccaggtcgtgcggcaggcacaaaccatggaggaccctctcagacagacccaagtcgcatgagttgatgtaaaccaatttggtcgctgcaatccagaattggatactacaatgcaattatctttccgcaaattgcagctagtggaagaccctggcgcagctctcgaataaagcgttatgctgcagtttattaccttttcaacaagaactgctgatcgagccagtccagtgtgccgttgtgataataagcgttgcagacgttgcagtgcctgttttagtattgctttatgcattcttgatattcttgacctaaataagcaaaatcggtgttttaaatattaatagcggtctataggatttagtggcatggtagtcttctccagagtagctatagcactgttatagcaacattgttgtgtgtgtgcgtgtgtgttgtaactctactattaatgcaatgataaacaacctagcttcgtgttgtcgttgtttcgtaagtaaaaaaaaaacttaactttgttacttaaaaaaaaaaaaaaaaa

SEQ ID NO: 45723 - DNA, 512 bp, Setaria italica
  Peptide Sequence Number=SeqID_111697
ttttttataccttatcttagaccacattacaacagaatgaattctacgctgcaagatacccagattacaaagcgaggttacttgtgtgctgacccaatcttgtgtattagagaattaagaaataaatttagaagttaagtgaaggaggacgaaactcgtagacgtgttacgcaaaagggcgccaaaatttcgtcggtatctgccctcctagaaaagaaaaatgctggaacctgctacaaatctcgcatctagcccaaataacctccccgtccatcgacccaggtagcacctgcaattaggacaaagataattgcatcgttgtagccaattctggatggcagtgaccagactggtttacatcaacgcttgcgacttggtcctgcctgagagggtcctccatggcgtcctccacctgccacaggacctgcgcttggatgaggtgctccgccagcatgaccagccagattatccagcagttgttggaggaaatgccttagggacgaccctgctgc

SEQ ID NO: 45724 - DNA, 636 bp, Setaria italica
  Peptide Sequence Number=SeqID_111698
catgtaaccatgcgcagcaatttgatactttgatactaccagagaggccacgccgttgctaccgtacgcagcgtgtcatcctgggatcgcctttcacctgcatcatgacacgcgatgagccccgctagcccatcggcacaacctgtgccctgagcagctacaacaaacatgagccaaaatataccttatcttagaccacattacaacagaatgaattctacgctgcaagatacccagattacaaagcgaggttacttgtgtgctgacccaatcttgtgtattagagattagaataatttgagttagtgaaggaggacgaaactcgtagacgtgttacgcaaaagggcgccaaaatttcgtcggtatctgccctcctagaaaagaaaaatgctggaacctgctacaaatctcgcatctagcccaaataacctccccgtccatcgacccaggtagcacctgaaaaggaccgaaccaagaatgaatgcataaagcagtactaatgcagacactgcaacgtctggcctgcataacgcagactggccatccaaacgggaataagctgcagcataacgcttcattcgagagccaagcagggtcttccactacctgcaattaggacaaagataattgcatcgt

SEQ ID NO: 45725 - DNA, 481 bp, Setaria italica
  Peptide Sequence Number=SeqID_111699
actctgacccgtatacgactcctagtatgttgaatacatcttgctcgtccttgctgttgcacgtgaattcgcattaaatcttaatcaggacatcaataactgaagtgttcatgaaagataattgttacgcatcagaaccccacttacatggttgagccgattttccagaatacgattccaaacatgattgaaacagcaaaagtgtttatgaaccgaacgacgttgtgttccgagtttttccagtatgcacaactttgcttccacagacaagccacgcattgtgtcgtgaagttttgccagtaaccctgaggaaaatgtagatcctctgtgtttggttctggttgttccaactcatcaattagaagcctattctccctgcagaaatcaccaggaattccattagattcactttcaccgttttttttgtgtcagttaagataataaagtgatttgcagctttatggctgtactactgtgtgta

SEQ ID NO: 45726 - DNA, 266 bp, Setaria italica
  Peptide Sequence Number=SeqID_111700
tagtaactggactactttaagggccaattcacagcagagaggatcttggccgcggtgttgctcgccatttcctgttcgggtcgagcacgttggccgttttgatgccttctttgtccattcgggagactacgaggaggcacaattcagggtgattggctggatacactgcgaagcaatggctgcggtatttgtctacccttcgctttctgtcacctggactgctggtacttccgccagttgggaagcactaggcttgcaccaagaag

SEQ ID NO: 45727 - DNA, 477 bp, Setaria italica
  Peptide Sequence Number=SeqID_111701
aggggacggggtgacgaggaacggggcggatagggacgcggatggcagggtacgcaaacccacgagacctacgcggctaccaaacagcagcagcaactactactagtcccttcttctcccatggcccatgcctctcgccaccactagcagctgcggtcgcagtaacaaactgcgcgttcgtggcgtcaccgccgcgccccgccctcgtttcctgcagcttcttctagtggagtggtttatttaccgctaccgaaggccgggggggggtgcgggcgcggcggcctcgtggctgcttctcgttgctttgaccctgtcgattaggggggcgccccttccgttcgtttggtctccttttcttttaggtgcgacgaggcacggagtagctcgtttgccacggctctcgctcttgcaaaaaatgttttgactgttctttaggaagcggttttttttactctaacttatcttgttaaaaaatgg

SEQ ID NO: 45728 - DNA, 514 bp, Setaria italica
  Peptide Sequence Number=SeqID_111702
atgtggttatgtttcctggcttaagcttttttagtaaataaacttatacggcttctagaatagaagacctacaaagtagattcagtagttgaattacccatgttctcaagtggcccaaaattataaacactacatgagaaagaagctccgtcttacattaataaacagacatattaaatgaggtttataaatattagaagtttcatctgttgtgtaaactgtacagatatattatgaataaaatattggaagcttcatctgttgctaacttctggattcaacttagttcaaaatttattatactcacacatcaacgaaaccaaataacagatttagatttaggagtatagctaaagcacatcaaattccttagcataataatgtataaatcatatcatttgctcttcggagaaggaatagtaaacagagaaaaactttatagcattcagcatagtaacatttcactatgaaaacaatgtaggtagtgcatatactacaatcttacttcaatgtt

SEQ ID NO: 45729 - DNA, 946 bp, Setaria italica
  misc_feature (923)..(946): n is a, c, g, or t
  Peptide Sequence Number=SeqID_111703
agaactacaagtattcccgaatcccgtcgcctctgctgccccccggccccccgcgatcgacacctccgcccgatccgctcgtcgcaaccgccggaggagaaggcgcgaagcgggaggcaggccaggccggacggcggttcgacccgcgggctcgatccgatatgaatcccgagtacgactacctcttcaagcttcttcttattggtgattctggtgttggcaagtcatgcctcctcctgagattcgcggatgactcatacctggacagttatatcagcacaattggagtcgactttaaaatccgcacagttgagcaggatgggaagaccatcaagcttcagatttgggatactgctgggcaagaacgttttaggacaattacgagcagctactaccgaggagcccatggcattatcattgtgtatgatgtcacagaccaagaaagctttaacaatgtaaagcagtggctgaatgaaattgatcgctatgcaagcgacaatgtaaacaaactccttgttgggaacaagtgtgacttgacggcgaacaaagttgtgtcatatgaagcaggcaaggctcttgctgatgagatgggcatcccgttcatggagaccagtgcgaagaatgctactaatgtggagcaggctttcatggctatggctgcatccattaagaccaggatggctagccaacctgcggcagctaatgccaggccgccgacagtgcagattcgtggccagcccgttaaccagaagacgtcctgctgctcttcttagattattaatttctttcagttcatgtaaactttgatgcactgtcactactgtttgcttgcgatgcgtttgtattatttctctgttaattgcctaaatagcatttttcatataattcaaatgatcaattatgttgactgagcaaaaaaaaannnnnnnnnnnnnnnnnnnnnnnn

SEQ ID NO: 45730 - DNA, 838 bp, Setaria italica
  Peptide Sequence Number=SeqID_111704
tctaaattggtactagtctgagcactggtccatggaaaggggcgatcgtgttgctcgagtatttaaaatgatggatggagttgctcttacaagcaatacaagcatacaactagctccatgttgttgaagttgctgcttcccttaaaaaatgagaccttctctagaaagctgtggattgcatgtttggcgttcctgtgcagatactgcaggaggaattgatggtcaaactttcattttagagatcattccagtgtccaaaacaatgtggcattttgtttctgttgcggtgcagttgggctaatttgggtgaaataatttcacactgatatggacgaattgcagaattcttgtgaaattcatgtgcattgggggtgtgaactactggtatctccccctgccatggcttgtctgttgcaagttcacaggattacttgatttgagggtattgattttattcttggttaaactgttgactctctggaatcctttggttgagccatgataaataagaatatctgctgaagccatttacccatctgccattctgaatatatgctaaggatttgcacaggtgcttaaaaaattgatgtatgctaaatttgttggttgcctcattgcccgattgttacggataactgagatagctccttcctgattccaaccattacagcatgaaagtcagtccctccatgtaaacagaaagtgccactctgtttattacctttccttggaaagaggatttgtcatctgaaagtctccaccattttgttcatactaccccagtacctgaatgtatccaccacagttatcaactttgaacagattctgcattttttta

SEQ ID NO: 45731 - DNA, 478 bp, Setaria italica
  misc_feature (429)..(478): n is a, c, g, or t
  Peptide Sequence Number=SeqID_111705
agagcttgtgacaacttgttcaggcacaagtcactgctacctctaaattggtactagtctgagcacttggtccatggaaaggggcatcgtgttgctcgagtatttaaaatgatggatggagttgctcttacaagcaatacaagcatacaactagctccatgttgttgaagttgctgcttcccttaaaaaatgagaccttctctagaaagctgtggattgcatgtttggcgttcctgtgcagataagaaaggtaagccaaatgaatagctaatgttttttttctactgaactgaatttccgctgctacatgagacagactatatcatgttctctcttttttcttttgcgaagccagttggaattgtcttgtgtaaaagctagataaatcataaaaagacaaaaatggtgaatactgttttgactaaagtnnnnnnnnnnnnnnnnnnnnnnnnnnnnnnnnnnnnnnnnnnnnnnnnnn

SEQ ID NO: 45732 - DNA, 1059 bp, Setaria italica
  Peptide Sequence Number=SeqID_111706
cgcgctgggctaccctgagtccgacctggtgcgggggctgccggggcagccgccggtggcgttccggcagttcgccgggtacgtggacgtggacgagcgcgccgggaggagcctcttctactacctcgccgaggccgacggcgccgccgccgcgtccaagcctctcaccctctggctcaacggaggtcctggatgttcttcagttggaggtggggctttcacagagctaggcccattttatccaagaggggatggtagaggccttagaataaatgacaagtcatggaacaaatgtcaaaccttctttttgttggaatctcctgctggtgtcggaatggtcctactcaaacacatcatcagactacaaaacaggagatgcacgcaccgctagtgacatgcacatattcctgctgaaatggtatgagaagtttccagagtacaaatcaagagatcttttccttactggagagagttatgcagggcattacataccgcaactgaccaatgtacttatcagtcataacaaggaatcaaagggtttcaaattcaatatcaaaggagttgctattggaaacccactcctcaagcttgacagggatatcgcctcaatctatgagtacttctggtctcatggcatgatctccgatgaggttggcttggcaatcacaaatgcctgtgattttgaggactacaccttcagcagccctcacaacgagagccaatcgtgcaatgacgccattgcagaggcaaacaaagtggttggggattatgtcaataactatgatgttctgctagatgtctgctacccatcaattgtgatgcaggagctgcggctgcgaaaatatgtaactaaaatcagcatgggcgttgatatctgcatgtcctatgagagattcttctattttaacctaccagaagttcagcaggcactccatgccaacagaacgagattgccatacaaatggagtatgtgcagcgcggtgctgaactacagcgatactgacggcaacatcaacattctgccgttgctgcagaggatcattgagcactaactattac

SEQ ID NO: 45733 - DNA, 464 bp, Setaria italica
  Peptide Sequence Number=SeqID_111707
gggcgctgctgctggtgggggtcgggcaatccaccttcccgactgctggggtcggctgggcgcctggggtggaaaccattctgaaacgctgcgcaggtgggctgggcgttggcagtggggctttcctcttcctctcggctgccagagccttcatgcagtcctcttgggagatgaccagattgaccaactcattgtacgtatccacccttatcgggtttaacctttctctgagctccaagctcagccctctgcggaatctgtcccgcttcttctcgtcggtgtccgcgtgatatctagcataactacacagatcgttgaaggcttgagcgtagtgtaacacatctcggtttccttggtgaagagccaggaattcattgagcttgcactccaggagaccatccggaatgtggtgcgctctgaacgcagtcttgaactcgttccagctgatgacgtggtctgctagc

SEQ ID NO: 45734 - DNA, 462 bp, Setaria italica
  Peptide Sequence Number=SeqID_111708
gtacagacatcatctatcggtagatgcaccgtgtgccgagtgccgaccaccgttcaccttcatgcgcgtatattaggacagggtagcgacttggccggaggccgtgtcgtccgtcgttgtagctagctagcagctgtagtttctaggccggcgatggagtacagggaggcagcggcagctgccgtggtggagctgaccgaggacgaagggtggtgcgacgtggccacgacggcggggaggagggagccgccgccgctcacccacgacgacaaccgcggattcctccgcatgctccgcgacaagaaggagaggctgggcgtggaggcggcgaaggtggaggtgcgtttcgagaggctgaccgtggaggcggacgtccgcgtcggccgccgcgccgtgccgacgctgctcaactgcgccgtcaacgccgcccaggaattggcgacatctgttacaataatagta

SEQ ID NO: 45735 - DNA, 358 bp, Setaria italica
  Peptide Sequence Number=SeqID_111709
ggggacgggggggaagggggcgggtcggagagcttgcggccgtggacggaggcggagagcgcggcgacgaaaccgaggaagtggcggccgtggagcgaggcgtggaagcgggcgatgtcgtcgggggaggcgatccgcttggtgggggtctggaaggcgtggggcggcgcggccgggggcacggggaggggctgcgggactggggagaggacgatggaggcggtgttggtgggcgcgttgatggccgagaggcggatcgggcggtacgccggcggcggggagtcggagggatagatagatagataggtttatgaggtagtcggtcgcgacgcggcgatggctcgccggagcgggtggg

SEQ ID NO: 45736 - DNA, 1576 bp, Setaria italica
  misc_feature (1526)..(1576): n is a, c, g, or t
  Peptide Sequence Number=SeqID_111710
acctccgcgccgccgtggcgcggaggtcacgccggcgagcttcgcctggccgagcatgcggatccacggcgccgacctccgcaagaagctgtgccgcggccggcggcgcggcggcgggcgcgggctcttcgtgttccctctggcttcccgcatgacgggcgccaggtacccgtacctgtggatgagcgcggcgcaggagcaggggtggcacgtggctctggacgcctgcgcgctcggcaccaaggacctcgacacgctcgggctctccctcatccgcccggacttcatcgtctgcaacttcttcaaggtgttcggcgagaacccctccggcttcgcggggctcttcgtcaagaggtccaccggcctcgccgcgctcgagcgctccgtcatcgcgcgcagcatcggcatcgtcagcatcgtgcccgcccgacgctggtcgctccacgacggctactccaccgagctcgagcactcgcgcagcttccccaagctcgccgacccgccgccgccgctggacgacgccgacgtcgagaccaccagctccttctccggcccgctcagctccaccgccatcacccgcagcatgaccctgcagcccgacgacgccgcggagatcagcgaggagaacggcttcctctaccaggaggagccgggagcacagaacggcggcggccatggagcagagcagccggcgaaggaggaggaagagagtgccatgatagaggtggagtgccgggggctggaccacgcggacgcgctggggctgatcgccatcggcaaccggctgcggtgcatcagcaactggctggtggtagcgctgcagaagctgcggcacccgcacgccgagggcggcggccaccagctagtgaggctgtacggcccgcgggtcaagttcgaccggggcccgtcgctggccttaaacgtgttcgactggaagggcgagcgggtggcgccaccgctggtgcagaagctcgccgaccgccacggcatctccctcacctgcggattcctgcgcaacatctggttctccgacaagtacgacgccgacagggccgccgtcctcgagcacatcggcgacgacggcggcgcggtcccggtcacgccagggaagaggaggaaggacgccgccggcgacgcggggatcctcgtggtgaacgcgtcgctggggttcctgagcaacttcgaggacgcctacaggctgtgggcgttcgtggccaagttcttggacgccgacttcgtggagaaggagaggtggaggtacaccgcgctcaaccagaggacggtcgaggtgtagtagcgcagattgcagccgcagcttcagctcagcttggcgcattggtacagtttcagttcactgtaaagcagcattcttttgggatcagctcggcagtgtcagtgtgtgtgccgtgctcttccttccagccattctttcagtgtaaactgtaagatgtatagtgtagagtttgctttcctaataaaaatatctagaatatgggttacaaaaaaaaaaaaaagctaaaaaaacnnnnnnnnnnnnnnnnnnnnnnnnnnnnnnnnnnnnnnnnnnnnnnnnnnn

SEQ ID NO: 45737 - DNA, 1478 bp, Setaria italica
  Peptide Sequence Number=SeqID_111711
tcccttccctcggtatgcaactatacagctctgaactgtgacagtaaatctgtaatcaccaatgctgaagtagcgttgcagcagcaattcctatatctgacagaatgtcctagaccgggtgtttcgtgaatctttgtttgcaaatcttaaatacactgagcataagcaatgccaaaatcagagatccaatggagatcttcaggtgagaaatgcaggcaaggcatacataccctcctatataagccctcctcacccatctctgtcctgtatcaagttgccaatcatcttgccaagaggcacggtgcccttggccatgatctcgagcctggacgtgttggaggcgttcccgaacagcgtgagcccgaacatcaggagctccggcaggaacagcctggacgacaggaagccgtgccagtagtgcggctcgaggtcgaagaaggcgtcgaagaagcggcgcgtcccctcgaggtcgagcttgagcaggatgtccatgccgaagcagaagaactccctctgccgccgcctgttggccggccacagctgcttccacacctcggcggagagcgcgtccccggtgagtcccgccgcgccgccgccggtgtcgaggaaccgcacaatggcgtccgccacgattggcgcggtcgccagcgtgcgcgccaccatgtaccccgtggacgggtgcaccatcccggccgtgccgccgatgccgacgaccctctgcggcagcacgggcagcggcccgcccatggggatgacgcaccgctcgtcctcctcgacgctccggacgcgtatccccaggtgcctgagccgcgcagccatgcgctcctggatgtcgtccatggcgaggcccgggcgcgcgacgagggacgtctcctcgaggaagatccttgtgggcgagaagggcatggcgtagaggaacgtggggatgcggcggttgcgctctttgatctccgacccctccgggaggtgcgagtcgcgccagtccatgaagagcatcttgtcgatgtcgaacgggtggccgtcgacctcggcgaggatgccgtaggcgacctggtagccggggttatatggtttgtcgtactgcacgaggcagcgggagaaccccgtggcgtcgagcacgacggtggccgggacggcgacgccgtcgtcgcagatgaggagggaggaggcgtcgtggtggacggccttggcgaccttggcctggtggaagacgacgccgttggcgacgcagcggtccatcatggcggacttgagcttccggcgcgcgacgcgggcgtaggggcggtcgagcgacttggggctggcgccgtcgccgatgaagacggacgccgacggccagacggtgtcgaggcagtgggagaggcccatggcctcgaactcgtccacccacacgccgtagttgttgggccacacgagcgccggggacgggtcgatggcgcacacggagagtccggcctccgccacgcgctgcgccacgg

SEQ ID NO: 45738 - DNA, 533 bp, Setaria italica
  Peptide Sequence Number=SeqID_111712
caaaagatttaattcttacctccttcactgtttttgcagtaattagaactgggtctgtttgctctaatgtatttggacttgaattggcttaatttctctgtaatacattggcagctctctgaaattatatcagtggtttctaactgtttcaaattgtggtttctagcttctatcatcgcaatgcagactaaaagcagttgatgtgcagtgtgaagtttcttcttgtttaattgtaaatatgtttaattgtggactcatcacatggtttacatgcttgactgtaacacaggcgagcgaaagagagttgcaactcagatttcgaagtcaaattgtttcgattgttcattcctggcagtgctaatgttcggtacatgggaatggtgaagtctgatgtgaagtataggtcatacttttgtctattaggctagtgcaaacaatttgttgtgtaccttctgttattttagcttgtacatctgtaaaattgtgcacaatgtttggtgtaatgggctgtgacaagtgatttggcccaaaaa

SEQ ID NO: 45739 - DNA, 495 bp, Setaria italica
  Peptide Sequence Number=SeqID_111713
ctagctgatgagagaaatcatgcatgcctctgcttgcggcaatatttcttattcatcacagtattgaatccatcaatcacgcgcgaacgagaggcccgatccgctgagcttctcctcgacaatggcgtccaggcggcgcgccatgtccggcgtcatgtggttggcccagtcccccgcccctcccttcctgaagtaccagtcgttggcgaagtgggtgccggcggtgcccgagcctcccttgttgacctcgacgctcttcagcttgtcgatgctgcagagcctcacgatctggtcgacgacccccgcctcctcctcagccggcgagaacggctgcccgacgaaccgcgccagcttcctggcgttcccggcgggtcgcgcagcatctcctcgtaccttaggaacagcaccgtctccgggctcgccttgctcgcgttccagtacccctaggagatggtccccagactgggcccgctcaccgacgtgccgttgcaggcc

SEQ ID NO: 45740 - DNA, 680 bp, Setaria italica
  Peptide Sequence Number=SeqID_111714
gccatcagaggctggagatggaaagagtagtgtttatccccctgtgattggcaattccatttcctttaagcttcaagacagaaagggccgtgtgcatagattcacctgtggctctgagagcttggatgagcttgtgtcatctgtaatacttaatttttgtattacagatgaaaaggagacattgcaacttttgtatgaagatgatgaaggcgaccgagtgctgctgacaacagacgccgatctggctggtgcagtgctccatgccaagtcatctgggttgaaggtgctgaagttgcacatcgaagatcctggtttgaataccgaagtgacaaaaccgtcacagcagctggcaccacctcccagcaggagtgggatatcgccggttcatgttgggttgatggctggtgcagttgctctcagtggtgcagcagttatggtttacttgaaacgagctcagctgtgatttctgaaacccagagagatccatggctttctttttaggtttcttctctttttcgaagagcgggatcgatggcattccaaagtagcgttgccatcagctaatgcattctgaagctttgccttcactcggtaccaagctaaaatgaaggaaagtacagaaatgaagatcacatctgtgatctgttgaactgacggtccatacaggtcacgggacaaga

SEQ ID NO: 45741 - DNA, 443 bp, Setaria italica
  Peptide Sequence Number=SeqID_111715
gctcaggtgtgaacatcactaggcatgcctgtctgtatgaaactgcccctgcttagtgactgatcagccacggttcctgaactctgccattcggggtatgactaggatgggaccccacgagttgcttaagaagctaaaggaaatcgagaaggacataggacgcactggtgggataaggtatgggccccaagaccaatcgatctagacatacttctatatggcaaatcccagattgatagtgagactctaattgtgccgcatgaacgcattcatgagaggccatttgtcttagcacctctcgtcgaccttctgggtacatcctgcgacgatggtatcgagacaagttggcactcactctcaaagtgcagtggcgggttctttgaattatggaagaaacttgggggtgaatctgtaattgggacagaaggtattaaaagggtact

SEQ ID NO: 45742 - DNA, 152 bp, Setaria italica
  Peptide Sequence Number=SeqID_111716
attcatctggttgattgcttttgtatcttctccccagtgatagacgataagcagcaaacatcgctgtactcaataggactattagttgcatatctttcactagataggagcacagcctaatccctgcacatctggttgctcatcctcgaggg

SEQ ID NO: 45743 - DNA, 661 bp, Setaria italica
  Peptide Sequence Number=SeqID_111717
taaagatttcacgtgataactgaggatttgtccgacatatgtgataagagcatttacagcagttccccatttcccaatccaactaccgtattgggagagttggtaaaaaaaatagtgctccagcaaactccctttacttttcccttttctcaataattattgggagaacccaataatttaccccaactctccctaaataaaggaggagttgtgactctcccaatatggttgttggattgggatgagattattgggagactgcaaaagtaactctcccaataacaatgaaagagatattgggatatcccccattaacttgttattgggaaatatttattgggaaactgctggagacgctctaactaaggatttgtcatgaaccaaatttgagagctgtgagggatgaaggaatccagtggttggtaaacaaacgccgaactggacacttgagattgggtgctgccaatggtgcaaagtcgcccaaatccaaggttcagggtagagggtggattttttctgacatttctttgcttattttatcatacaccctatgacaatctttatagattattaggtgctttaatgccttagccaactgctaacaaactttgtaatggactaaggatactaactgatctccatttgtatgggaaccgtaaat

SEQ ID NO: 45744 - DNA, 245 bp, Setaria italica
  Peptide Sequence Number=SeqID_111718
aagacttagagcttgcgtgtcgcgtgggatggtttgcttcctgtgtaaaaagaccaatgtgccagatatcggatattcacataatatagttgctgagggggcaaggtgttgtaattgtgtagaagtgcccccggtctcacctacaaatacgagggcgcaatgacattctaatggatctttatccgactatacttcatggaattatagcgtttattttcttgtgttcaaaaaaaaacaaaaaaaca

SEQ ID NO: 45745 - DNA, 456 bp, Setaria italica
  Peptide Sequence Number=SeqID_111719
tacggacctcggccatgtcaatacaaatgaagaagcatcatgatgtgtctgccaaccttaaaaagatctgctcttataaatatatcttcatctttgagttattagaacagaaatgcaaagctgcttgccattgttagtgtagaggaagaataataaccttgagcggcagaatgatattagaccccttggattttccaatgatccttcactctgacagtctatatatgaagtgttggtgaagagatatcaaggtgaatcagtagtagtacaatgtacaatggcagattcaatttctcaaaaaggttatttagcacccttccctgttttgggtagttggtctcagtgtgcctccagatgataattctaggtccaatcatcatcaactcagcctcatttagaggcctttgttctgtgtgtttgtcagattggtctctacaagacttaactcagccaagg

SEQ ID NO: 45746 - DNA, 569 bp, Setaria italica
  Peptide Sequence Number=SeqID_111720
gcgggtgagtgagaaaacgatgctggagatggagggaggagtgcagggagcaagactcgagaactggtcgattatcaggaagcagcaggccagagagattggtcagaatcaaagcgttagaaaagaaatcctaaactactaggacggggaagcacggaagggatatcaggatggcttcttcgcgcagttggagtaagcagcagactggaacttcttctcgcctccggcaggtcgaacgtcctcaatgctgtagccaaggggagcttcatacatcatggaacgactactgctagacttcttgccacccttagactccattagtacatcaaattcaattcaacgaagctatgtgtggaaccccccgattcccgagcgcgcacgcgtgatccggaacagatctcacgaatttccccccttcaccgcctcccgacgcagcagaacctggcagagaccagcgaaaaggattctctcctagaactcagcgagttcctcggctccgttagcttctctcaacgagacgagctgcggcggcggcggcgagggaggaaattctttggcaacaagaagcg

SEQ ID NO: 45747 - DNA, 402 bp, Setaria italica
  Peptide Sequence Number=SeqID_111721
caccgcgcactcgcgcaacctcatcgtcactgaccaaaaagctccgacgagcgaggcgaggatgccgccgtccctgcggccagcagcagtcctgctggtcgcggccgtgtggctgtggtcggccgcctgcgccgcgggcgacgacggcgacatcacgtcgctcctgccgccggggaccgcgtcgcctttcccgttctgcccggtgcggccggccggggtctccacggggccgttcccctggatgacgccgccgccgccgtcgacggcgacgttccctcaggacccgggcttcctcccgtcaggggcgtgccctgccagcgccagcggcgcggtggcatggctgccgctgctcgctgtgttctctgctttcttgctgccctggatgtatcggtagctgctcag

SEQ ID NO: 45748 - DNA, 914 bp, Setaria italica
  Peptide Sequence Number=SeqID_111722
cttcctcctccatcttcccccttcccctgcttcggcggcggcgacggcgaggccaccggtgacgcctccctccttccccccgccggcttcggggcctgctcgtccctccctgcccacgctcccagcgcgcgcgccttccagggtccaggcgactaggccgccctccacagaagcgcggcacgccgcccaccttggaggtccccctccgctcctctgctggactggagggaagtgggatccgccaggaattggatcggcttcccctgttcttggatacattaggagtgtcgttcgcaaattcgttgttggcaaggctctgacatggatgatggggattcatctgacttcaccttctgcaaggttacttctgaagaaaacgatggtcaattaggatctcctaaagccattcccgtggcaagtatgtcgctcgaggatattcatgttgcaaaaattgcaaagaaagatggcttgaaagctaatgactcagataaaggtagatctggtaacagcgctagtgtatcaacacaagacagcaacatgaaagaaccaactatacaaacgagtggtggagcagaatcaaatgtgtcatcacaggcaaaaccttcatcgaagaaacctgcagtgcggaaaaaggttcctttcgagaagggctatagccaaatggattggctaaagctgacacaaacgcatcctgatctagctgggctcaaggggcagtcaaaccgaggttaattctttggaagaagttaagcagcataaaacgggagactgtatttggacagttcttaaaggtcgtgtatacaacattgctccatacatgaaatttcatcctggaggagttgatatgcttatgaaagccactggaaaggactgcactgctttgttcaataaataccatgcttgggtaaatgcag

SEQ ID NO: 45749 - DNA, 485 bp, Setaria italica
  Peptide Sequence Number=SeqID_111723
ttgaccctaagcctgagtcttcgactcaacctaaggctcgggggctactccatatggagtgcgattgacatcgcactaccatataaaaactactcgaaacgaagacaactcggagctgcagaaagagtaccttccagccacgtgacagtactcaggcacttcagtccgcaaaactacttgggtagtgcctgcagagcccaagactatggcgcacgactacaaagtactcgggggcttgtcgggactactccccggacccacgagtaggccttgggcggcccactaagggacatactcggacgtgatcagaacaaggatgggcatatcctactcggactagtcttgtatgtttatggaaaactactcggacgataccgagtagagctctgtaatagtacccgactaggactcagacttgtaaccctgccctcccgggtatataaggccgggcagggaccctcctcaaacacaatccttaagaccag

SEQ ID NO: 45750 - DNA, 498 bp, Setaria italica
  Peptide Sequence Number=SeqID_111724
tcgtcgacgaccgcggctcttaaacgtggccagccatgccacatttccctgcccttcccagtgtattcgcgccaagtcagtatctagaaacgtacagtaactactagtacttggtacagtgtgttgaggccgaatgttccctaggagttggggtagttagaaagagggccttctcattcctcttccatgatctctggagccctcgacatattccgggtaagctgtcttgtcatcttgaccgagttaagctgaagtagcctcccatcgcggaagctcgagttcctgcgcttcaactctccacggtgcgtcgtgaactcgtccagtatttccaaagcgtattcaggctgggcgtctctgctgcgaacggactcgtcgtcgccgccgcactctgtaggagcaggggtgaaaccctcaagttcttcgtactctgctgcgtccaattccctcaggtgtttcgcgtcgaaatacttcggaatgaaatgctgcctgatgacaatg

SEQ ID NO: 45751 - DNA, 263 bp, Setaria italica
  Peptide Sequence Number=SeqID_111725
cggcggcgcccggcgcgtcggccggctccaacgccggcgccattccttgagaacaaaaagtcacaaactgaccttgaagagctggaatgtgcttgcttgtgtttactaatggatcgcaaataatcttactgcaaggatggttggtggtggttgtaatcactggtgcggcaagttttcaggtttgtttgctagggcgtgtagatctgtcactaatttttggagattaacctactgatccctttgcttgttattgtgaatcgaat

SEQ ID NO: 45752 - DNA, 388 bp, Setaria italica
  Peptide Sequence Number=SeqID_111726
cccgaccactccctcaccgccttccgcctcgtaaagcccccctccgaacgcgcgctctccgcgctcctctccgcctaccacgacaaccgcctctacgaccgcgtcgtcgaggccttcaacaccctacccgccgacctcgccatcaagccgggcatcgtctcccacaacgtcctcctcaagaccctcgttgccagcggggacctcaccgccgcccgcaaggtgttcgacgaaatgcccgacagggctggcgtccagccggacatcatctcctgcaacgagatcctcaagggctacctcaacgccggcgacgacgctgccttcgaccaactgcttaaggagatcaccaagcggcacctcaagcccaacgtcgggacctacaacctccgga

SEQ ID NO: 45753 - DNA, 688 bp, Setaria italica
  Peptide Sequence Number=SeqID_111727
actaacaattaatagactagacttagaaaggaaaagagggaggagctttgaagcccaagagctgctggacgccatgggggcaaagggcgtcccgcccaaccgcgccatcttcaacacggtcatcaagggcctctgcaacgagggggaagtgggtgctgccatggcgctcttcagagagatgcgagaggtgcccaggcagaatggcagaggggtctcccccaactttgagacctacattatgctgcttgaggccctcgtcaacaagagtgtgtttgatcctgcattggaggtctgcaaggagtgcctgcgcaacaaatgggcaccaccattccaagctgtcaaaggtttggttcagggcttgctcaagagcaggaaggccaaacaggcaaaggaggtcctcacggccatgaggaaggctgtcaagggtgacgccaaagaggagtgggtgaaggttgaggctcagttccaattggtgcttgctgacaagaaagcctagccgccaggaacgtcctgcaaggagtaggtcatctgttatcgctcgaaatggttttctttcacatgagatttgcattttctatcacttgagtcatgcatgctgaatgaattatgacaacaaatgcttctcatgagggcatgcccgtagtttgtttcaattcctttttacattcaaagtttggtaaattcagaa

SEQ ID NO: 45754 - DNA, 554 bp, Setaria italica
  Peptide Sequence Number=SeqID_111728
gaacaacaaatcaatagtatgatgaagaacatggcactagccggcaatggtatgaagaagttaatcctcgctgttctcttactgtgtctagttatagggcagatacaagtggaagctaagagctgctgcccatccaccactgcaagaaatgtctacaatacctgccgtttgacgggtgcatcccgtccaacgtgtgcaaaactgtcaggctgccaaattatcagcgggaacaaatgcaagccccctaacgaccacctcacccttgacccggacactggtaaataataaatttatctcacttgatttctttgtgttttgagtcgttaatgtattttccatctgatgaaacgcattggttttgcattgaagaggaagttaatgtgcttaacttctgcaagttggggtgtgcgtcgtctgtgtgcaacaacatcaacgctggtaagcaccttttgctcagacagagaaaacaataatcattaattagcggcagctagaatccgataatctaatatatatatataattttatcagctctgggaatgaagaggcgaacg

SEQ ID NO: 45755 - DNA, 880 bp, Setaria italica
  Peptide Sequence Number=SeqID_111729
ttttttttttgaactaagaatactactaaacatttccaaaatatcattggttccatcctccagatcaacgggccgttatcacaccaccaaaaacagtcatgaaaacgaacttcaccgctcaggtaaagtgcatatgctgcctcaagacgagcacttcgtcgctccaaaatctgaatgtgcaaagaacattaactatcttatgcctgggaggagagaagtggcgttgatctctattgcttgaagtaacccttcagcttcctcagccagaagaggtactcgcggctgtccttgttaatcatgtactcgtgcaagaagtttgttgtcaggggtgagatgccacgcagctccaggtacttgtggaatgccctctgcaggttctcatcaaggtcattgaaatcaggaccctcatatgcaattaagtctgtttcatcattccctgacggctgcatcacggacaaggagtcgatgaggacctcatcaggatacgcagtgcaggtgaattcaagcacggggccatcacccttggtgatagtgaccgtgagagggacactcgactgggggggcttctcgccttcatcgtcgttgctgtcattttcatcctcacccttgtcctcgtcatcccggtcatgatcaggctcatctccagtgactaggctgggcatgtgagccacaatctcaatctgctcaccatgatatgttcttttaagggtaactgcattcgtccccttcgcatcagtgattttgaaagggaagttatctggaatctcctcaaccctgtcgtggtcgtcgcagtcctcggcgtacttgatctcggagtcgatgacgctgaggagctcggcgtcggagctgggcctcgtcgcgggcgccgacgagaacggca

SEQ ID NO: 45756 - DNA, 469 bp, Setaria italica
  Peptide Sequence Number=SeqID_111730
cacgccgccgccgcgcccccgccccgccccgccccgctcccggcgaaggccgcctgatcgcgttacataataatagtgatttcgcctggtatcgcgccttgcgtttgcgtctgcgtctgcgcctgcgtgcgtgtggtgttggcgccggttaagaatgtgcttagggttaatcgcacttggctgacagtgtaattaaggtggtttgccgttcccaaccatgtgcgtgcgttctgctctgttcgttccaggcaataattgattaatcccgcacgattagtggcttgatgtgcccgcagctgctctgctggtggtagtgctgctttacatgctggtggatggtgatgttgaagtcgaaatgtcgaatacatgtgtcccaccgttaattaggatgtaagcttggtcactgattggcagtaagcaacagttaccgccaagcatgaaaaaggccagaataatgtgccatttgttt

SEQ ID NO: 45757 - DNA, 426 bp, Setaria italica
  Peptide Sequence Number=SeqID_111731
ccaaatctggtagcacctggaagttccatttggggtgcttggagttcccttggattggattctgctgaatttgctggtaattggacaagttatcttcttttacaacctttttcttctgttttccgaatgtttcatgaaatggcaagatttgatcagttatgtccttaaccttgttgaaaggcacactttttcaagacgaagaagggtacaaagtaaggttgaaataaagggttaaatattgactaatcaattttgcaaaaaactaaaaaggtatgataggaggtttaaatgattatatgacaattgctgctgggcttaaatttttcacacgcacgcacccaaaagggattgcgaaagtactgttcaattttgtcatgaaagccctttaaagaaatatacctgcctttgcattagagtccaatatta

SEQ ID NO: 45758 - DNA, 867 bp, Setaria italica
  Peptide Sequence Number=SeqID_111732
aaacaagctttagatacagccaacaatgtcagtgctgcaggagttatattctatttagacccatttgttcttgggttccagttgaacccaactccaatgcgcatgcctggacttataataccatcatctgatgactctaaggtatttctcacttactacaatgactccctagtgagagatgagacatcaggacaaattgtcagctttggtggagttggaaaaatactagggggtctaaatccgatttatggaaattctgcaccgaaagtaatgttctattctgctaggggtcctgaccctgaggacaactcattgtcgaatgctgacatcttgaaaccaaatctggtagcacctggaagttccatttggggtgcttggagttcccttggattggattctgctgaatttgctggtgaaagttttgcaatgctctcgggcacaagtatggctgcaccccatgttgccggccttgctgctctaatcaagcagaagtttccttcttttagcccagcagctatagcttctgcattgtctacgaccacaactcttagtgacaggcaagggaaaccaatcatggcacagagaacatacagcaacccagactcaacacagtctcctgctacagcatttgatatggggaatggctttgtcaatgctactgctgctttggacccagggatcatatttgattgcagttacaacgatttcttctcctttctctgtggcataaacgggtccggcccagtagtgacgaactacacaggcaacagctgtgcggcttccaccatgacaggagcagatctaaacctaccctcaatcaccatagcagtgctcaaccagacaagaaccataactagaacggtgacc

SEQ ID NO: 45759 - DNA, 479 bp, Setaria italica
  Peptide Sequence Number=SeqID_111733
cataatccagagcattatcagcttctattgatttccgtccttgaaaatcctccggtaaacataagatgccactggcggaagccgagcaatcaagtttaggacatcttcatacgtaggctcccagaacttgtttttggcagtcctttgtcataagcttttgaaattcactctcaacctgaagagccattactccagtggtaaactgtgtcataggatgtgcagttacagggagagcatctattgccttatagacatgtgctgcaaccatatcaattatcagctgctagcgagcaaagtggcaagatagagcacataaactacacatgatcgtactaacggaaacatatggacctctctattgatttttttggagttcagatctcgctattaatctgtgactacctttgaacttgcagaaaagtgggacattagcatcaatcaattcagatagtttctggatttaatttgaccaaatttcc

SEQ ID NO: 45760 - DNA, 445 bp, Setaria italica
  Peptide Sequence Number=SeqID_111734
ctggcactctggaattgagaggcccctaaaacgaatgccctcctctgggtcaagtagtgatgtttcccaaagcattccaatcatccctctcattccaccaaggaccatgtccacatttatgtttccaagctggacctttccatgctctgacttgagcttctttaagcgatcctgtaacaaatacagcagagtaagtgatggtttctcctaacattcgagaacagtaaggcgagatgaacaggtgttcatatttcataaggacaagtttttacagaaatcagctgccaggtgggtttctcttaaactaattctaatttttctgatcgcagctaggtgcaaatataaagctgcacacaaactaagtgccactgacagaagcgggaatagaattgatgcataatagatgctactttcagagaagaaaattgatttcatgttccaccac

SEQ ID NO: 45761 - DNA, 554 bp, Setaria italica
  Peptide Sequence Number=SeqID_111735
caagacctaatagtttaagacttacaaagacattcaagcagccttgttcttgcagtagttttccagccactccatggtgacactcttcggcctctccagtggtaggccaagggcacggtcccagatgagctgagatcctatccccatgctccttgagacaccaaacaagactgtgtaataccgtgcttcagataatccaaagtggttcagcaaaactccactgtgtgcatcaacattcggccatgggttcttgacctgagaatacatgagcaaagaatggtgttcatgagagtatgttaaaacaagagtggagaacatgatcaaccacattaccttgcccagctcagtgagaataggaggcacgacttcatacaacttggataccaattggaaaagtggatcctcaggcagatgcttcaaggcaaactccctttgacatgaataccgtgggtctgtcttacgcagaactccatgaccaaagccaggaacaacctttccactctttagtgtcttccagacatagtctttgagttgatctgtggtaacatcactcc

SEQ ID NO: 45762 - DNA, 1901 bp, Setaria italica
  Peptide Sequence Number=SeqID_111736
tttttttttggtttcatcagaatatcccttttatcatgaagaactgtcagcttatgctgccaaaacccaaataactgtaaacagactcgaacgagcaaagttaaaagaactggcgtgcatcgccatgtataaagattaatgaacatgtcctattctcgtctgctcagtggtgccgcagagattcaactatatggatgtcacgagtgacggaggatacaaaattctgccgtctgagagcctcttgctcttgttattcgaccgccaaaaggaaaacgactactgtaatttattaacaggaaaaatgacggtgtgtaaaaaagcatcagcctatgtttagcttcaagcagccttgttcttgcagtagttttccagccactccatggtgacactcttcggcctctccagtggtaggccaagggcacggtcccagatgagctgagatcctatccccatgctccttgagacaccaaacaagactgtgtaataccgtgcttcagataatccaaagtggttcagcaaaactccactgtgtgcatcaacattcggccatgggttcttgaccttgcccagctcagtgagaataggaggcacgacttcatacaacttggataccaattggaaaagtggatcctcaggcagatgcttcaaggcaaactccctttgacatgaataccgtgggtctgtcttacgcagaactccatgaccaaagccaggaacaacctttccactctttagtgtcttccagacatagtctttgagttgatctgtggtaacatcactcccagtttcctcaattacagatttgatccatagaagcacttcctgattagccagaccatgaagtggcccagctaaaccattcagagctgctgcgaaagaaagatagggatctgacagggcacttccaaccagatgaccagtatgtgcactgacattcccaccttcatgatcagtgtgaattgttatatagaggcgcatcaactccagcattttgggatcgtcaaaaccaagcatgtgtgagaaatttgcagcataatccagagcattatcagcttctattgatttcccgtccttgaaaatcctccggtaaacataagatgccactggcggaagccgagcaatcaagtttaggacatcttcatacgtaggctcccagaactttgtttttggcagtcctttgtcataagctttttgaaattcactctcaacctgaagagccattactccagtggtaaactgtgtcataggatgtgcagttacagggagagcatctattgccttatagacatgtgctgggacacttgaacgggccagcaattcctttgaaagggaatcaacttgctctttggttggaacctttcccgtcagaagaagccaaaggagaccctcaggcaaaggctcaccacccttaaccgccgtcggcagcactttctggcactctggaattgagaggcccctaaaacgaatgccctcctctgggtcaagtagtgatgtttcccaaagcattccaatcatccctctcattccaccaaggaccatgtccacatttatgtttccaagctggacctttccatgctctgacttgagcttctttaagcgatcctgttgttcgggaatcagttcctgcaattgggacctaagatcgagatcggaagcgctctgcatctgcacccatctcacaccacccagcgtggtggcctcctgcgtcacgcgggatcgcagcctcgagaccgcggtgaggccccggaagaacgccatggccggagcgctcggctaccgcaccaaggaataccaaggaatgaagagatcaacacgggcggggacgggccgcgcgttccgcggcgagggaggtggggagccgagaagttgggggaggaggaatgggggtggtcgtcgcctcg

SEQ ID NO: 45763 - DNA, 206 bp, Setaria italica
  Peptide Sequence Number=SeqID_111737
gatagctaacacgctgtactacaatccttcgctagcacttcaaaagttgcatacactcggagttgcaacagaaattttcaatcttggattctgcaacttgatccttgtaagccacaagcagctctagtgttgatttgaaaatcctctctagagcttctcctggaatgtgactagctggaaggcctataagggaagtcaatcctaag

SEQ ID NO: 45764 - DNA, 549 bp, Setaria italica
  Peptide Sequence Number=SeqID_111738
gaaagctgaaagcgagaagcatccccccaccccccacccccaaaaggggaaaccagcagcagcagcgcggaggtaaactatcagttcccctcaaattcctcttccgtccctctcgaatttattcaatcctaccctgaattcggcgcattggttgtgcgatcgagccatatctggtgtgtttttgagcttcctcgagcttgaccggccgaatctgcgctggtttctggtccgggtttgggggaatctcggggtgtttctagtgctgatgccgtcgagctcgaatcattcccagtgtgtagatagataaactaccctgcttcccgcaggttcatccgcctcgcctcgcaagcagcggctgatccacgagcaagggggttaagctccctcgaatctccagtcatgaagttgcgctcggattcctcgggcgggggcgacgaccactggaccacggccgccgccgccgccgccacggggggtggcggctcaggcgagccgaagtaaagaaagacaagacggaacggaaggaagaccgaccctaccaagactaca

SEQ ID NO: 45765 - DNA, 448 bp, Setaria italica
  Peptide Sequence Number=SeqID_111739
ttcagaagatttgcataggtcagcagttgcctagcgcaaccgtgcaaagcaccgaaaaaaaaaaatcaattcggaaactaataatctcaccctcatggattgatcctctacgtttcgtgcccttgttggctcctgtgaggcggtactcgtgcatgatccagtctgtcttggtgcccttgggaggcttacccccatagaacacaagggccttcttcactccgatgttctcgctcgtcggagtcgacaggatggccttgtcggtgccggtggccttccagtagcccgatccggcggcacggttggggcgggcgccattcgggtacttgcgatccctcgggctgaagaagtaccactcgttctctccaaacaaagatttggcaggaagatcccacgggttgcactggtagatgttgacctcggcgatgatggggacagggcatgggaggga

SEQ ID NO: 45766 - DNA, 429 bp, Setaria italica
  Peptide Sequence Number=SeqID_111740
ttttttagctaaggtatattccaatagagcaacaagtggagtgatccaaccctctccagttggataaggacaccaacaacagcacatgccaaatacacacagtacaagaaacgtggtcatccttagcttcttcattgatcccatccacacgtgactttcagtagtacgtacacctggccctaatttacaaccttttaaatgaaaatgaaaacgaaatgcttgagcaattttgaatttttccggtcacaagcaggaacaatccagtatgaatttttccatcagctctgtttgtttgacccagtgaagtttccgtggtatgaattcacaccaagatctcgctggttgcaatagtagcacacagatcgacgctactgcatctcgatgaatggatagctcagcaggctgctgcactgaaagccactcgtgtcc

SEQ ID NO: 45767 - DNA, 799 bp, Setaria italica
  Peptide Sequence Number=SeqID_111741
tttacttttacggtctttcggcttgcatcgaagttatgccttgttgatttacctggatatggatttgcttatgcaaaggaagaagttaaggaatcatggcaagaccttgtgaaggaatacgtttctaccagggttggcctagaaagagtgtgtcttcttgtgcacactaaacgtggaatgaagccattggactatgagcttgtagatttaatggaaaggcacaagacaccgtaccaaattgtactgaccaagactgatttagttttcccgatagatgtcgctcgccgtgctgtggaaatccaagagagtctaaagaagaataagtcagtggtaaaaccagtgatgatggtgagctctaaaacaggagctggcatacgcaacctgagaggtgtgcttggaaaattggctcgcttcatcaaaccttagccaagcgactgcaagttttggacactgcatcaaaggaggctagctaaagcattcctaggtaggttaggattcggaggctagctgtatcacaggctcagatttggatattagtgaactgttgtcattttgaggggattaatgccatgtagagatcagatcacattcccgatctacataattccgtcaattgcttaattccgtgaaataactgaggtttccacatttggagatatacggtgctcacaaaagcctactggtgttttgttggctcttgctggtcaccgtacatccttttatgcatggctccttgatgtagactgtggagtacattttcggtgatgatttatgagtcactcacagatgtttatgttac

SEQ ID NO: 45768 - DNA, 671 bp, Setaria italica
  Peptide Sequence Number=SeqID_111742
taacaagacgaactttacttactacgaagactcgggcttgttggcgccgaccagcttgtccacctgctgcccgttcttgaggaagaagaacgtcggggtcgcccggatgtcccacgacgagctgaattcctgcggagggggagaaaaaaagacagggagtcaattaatgacttcgccacacatgtgcagtagcctgaacactgcagttaaggcgttatagttttaaagcctgtcaattgttctgatgcagcaagactgggtagcgcaatgatccgtgtcagatgcagtctctgagctgaaccccaacgactagctatgcagaaacaattttcactttttagtttatacttcaggatcagagaactggcatcctacatgaggaaactgtcagtcttaaaaagacatgactgcactatatctttgtaacaacagggactgagggaacccaaagaaactgacaccacttgcatgtgtgaaacaaaaataaggtttcataaaacttgattaccattaaatcatcgacatcaacagtcaagaacatgagctgtgggtacgtctgcgacatctcagcattaaacagtctaaaattgtacccggtctattggtccctactacctaggtaagcactgaaatttgcaaccacaattttcccatccttgtttgcctcctca

SEQ ID NO: 45769 - DNA, 935 bp, Setaria italica
  Peptide Sequence Number=SeqID_111743
actacaagtgtagagtagtttttttttttttgaatattgccgatcatccatcatgctcgttgaaccatgatttatcaactcattcatgcatgtacttgccactggttaccagctagtaccacagaaatcaatacttacatcatcacatcgtcaccaaggagctaggcctagctgtacagtctgcacatcggagaagagaccacgcggatcaaacgcagctacacgatgggcacaaacaagtgcgcgggtagaacgaacagcacaggccgacgactgctgacatgatatccgcctgcatcgtcctcctgtcacttgcggcgtcacggcctgtcaggcggcgccaccgacccaccagcgagcgcagcgactttcttctcgagctcgggcttgttggcgccgaccagcttgtccacctgctgcccgttcttgaggaagaagaacgtcggggtcgcccggatgtcccacgacgagctgaattccattaaatcatcgacatcaacagtcaagaacatgagctgtgggtacgtctgcgacatctcagcataaacagtcaaaatgacccggcatggcccacaccaggaagcactgaaatttgcaaccacaattttcccatccttgtttgcctcctcaactttttggtcccagttctctttgcttgtaatgacatgaacattgccgcctccgaaatcaatcttgtcctcatcatcagtgtgctttgcaatgcagcagcatctcatcaggcgcttaagtaccattgtcaactgttggcacctggcaaaactgcaaactccaccagactctttcaaacagggaactggaatgctggaatcggaggggcggatggatttggcgtcgaaggagaagcggaggccggaagccttccgagccgccgagttggggagaaggggagctggctgttagtgctgatacctttg

SEQ ID NO: 45770 - DNA, 524 bp, Setaria italica
  Peptide Sequence Number=SeqID_111744
actaggctggcatataaggactaaggagtatcctctttcttaaatggactatatggtactatacaaattacattcagacattcagtggatgctatttagaagtcagcataggattatttagcatttcttcaaccttctgatttcactcccatcttgccacctcagttttttaaaacatagtctgtggtactcccgtatgggggtctgagtttgttaccagcctattggagccaagaaagtataaaccaggagccttatataaaatttggtcctaaaagggaaagatctaaatagtaaataccaaatgatttcatgattttgctgtgtttaatccctatatatagtatcatggatacatgtaataattttgcacataaccacgaaaaaggtgtcaacacagcacttggcatatttttacttctcctgttttccaaataccatctcggaattgcacttggcacatcatcacctcaagaatatgacatgttggatagttacccttttcttatcagaaacatcgacat

SEQ ID NO: 45771 - DNA, 131 bp, Setaria italica
  Peptide Sequence Number=SeqID_111745
gcgtcgcacggcgatgccggatcgaagcccagatccccattaatggcggcgtccctctcagagttcccttttcttttatataaaacaagcgcgtccatttcagtgtcgccaggcggcatttatgtgtcagg

SEQ ID NO: 45772 - DNA, 432 bp, Setaria italica
  Peptide Sequence Number=SeqID_111746
tagacaaactcgacaactgctacagaaagctgcagagatgggagcaaagaccagccaggatcctatatcaccattgctcctaaaaagtttcccaagtaatgtgactactcgtgatcatatggacatatcttctggaagccaaggagattcccttgggaattcagcagctaatagtgttggcatcaagacagctgaagatgagggctcttacatgagtggtcgcagtaacattctgatgaactcaccatgggtgagtagttacaaacctactacagtgcctttaattggactgatgaatcatccatttgccatgagatcagaaaaggagagccctggcatatttcctggaagtcagatgcagcacagcaggcaggaaaatatttcaggggtaggagatgctggactaacacaagactttctgggcttaggagg

SEQ ID NO: 45773 - DNA, 570 bp, Setaria italica
  Peptide Sequence Number=SeqID_111747
ctgaccttttaacgcttctgactagttgatgactaaaatcactcatatcactgcagctctttacagttggaggattcttcaagttgctgctgggattgttgaggtaatatttaggccgaatggacaatcctgaaacagtgctgctagtatggcacaattctatattgctggaggtttgttttctcttagccgtggaataaaagttgaatctacaagaactgcacctgaagaatgaaaaccatccaattctgtcatcaccgagggttgcacgtggctggtttctgtaatatttctctctgacggatgacatcttcgagaacttccataggagctcttatgcttgaattccccaatgtctgaagataaataatctgtggatccactgctatatctgaaatctgatagtactccatgaacacgccgttgcttgtccacatgggcaaacccttccgccacccgcggcggcaacaagaacgggtcaactccaaatcatttagacctttaccttagtcgcacgatgggaaccattcgaacatgttacatcacaggccaccttaatcaaaaaccgaa

SEQ ID NO: 45774 - DNA, 407 bp, Setaria italica
  Peptide Sequence Number=SeqID_111748
ctcgatcccctccatctgcgtccctcgatgatggcggcggcgacccacaggatgaggatgaggtgacgtggaggtggaggtggaaggggcccgtggaaccaaaccctatctatctgcctctgcttcctcctccaggtcttcatccaccactgccaccttggtagcagcttaatccgacctctgtgcaacccgccgccatggatgcttcccctagggtgatgtccaatgaccgaattctgagaccccttgcatcataggatgacatcagctactggaggagtttctgcaggagaaacaacaacttgggcctgtcctgcagctgatgctccctatttgaggcagaatgttgaatcaaggtaagagataattcggtttgccaatcttcctcatattcactaattcacctg

SEQ ID NO: 45775 - DNA, 230 bp, Setaria italica
  Peptide Sequence Number=SeqID_111749
gttgtctatgcttccgactatgtaattttatagacagttacaaatcaaattgacaacagtgatatgcagattgtaggatcacatggcaatccctagttgtgccgtgcatggcaccacatttaaagaaaagttaataagggatagttaaattgattcaccatgtccatgtgtttcactttttagaacttgcctagcaggtagcagcaaacagcattggtgactaattcatg

SEQ ID NO: 45776 - DNA, 500 bp, Setaria italica
  Peptide Sequence Number=SeqID_111750
atggcatatatcagggctgacatgctggacaaagcagaagagttaatcaaagaaatggaggatcagcagatcttcgcaggaaaggaggtctacaaggcgctgcgtgagagccttttcatacaaaggcgattcagatggggcacagcggatttcgatgccatacagtttgcagggatagtgcctgacacgaaactgtgtgctctcctggtgaatgcttactgtctgtccaatagaatggcagaagctgtttgtgtgattcgaaatatgagaagtgcaggagtgacaccttgcgacaaatgcattgccttggtactgggtgcttatgagaaggtggacatgctagaacagcacttggatttttgaccgagcttgaagaaaacgggattgcaattggccaagagccctctcagttgcttgctgtgtggttcagaaggcttggggtagttcatgaagtcgaacaggttctgaaggagagctctcagaagacatgacgaccaagc

SEQ ID NO: 45777 - DNA, 252 bp, Setaria italica
  Peptide Sequence Number=SeqID_111751
gttcgtcggccggagcgtcgcgctcgagctcatcagcaccaagatccaccccaggaccaagaagccgatgctgagcggccaggcatcgatcaaggactggtgccagaagaggggcgtcaagggagagcacgtcgtgtacacagcagagttcatggtggattcggacttcggcgagccgggtgccatcaccgtggccaaccggcaccaccgggagttcttcctggagagcatcgtcgtcgagggccggcttcc

SEQ ID NO: 45778 - DNA, 474 bp, Setaria italica
  Peptide Sequence Number=SeqID_111752
agcttaacttgccacaaaatgcaaacccattttctttacgcgttcagcactaagcaactatgtacaggacataatttattttataatcccaacattcaacaaaatattttttgagcaaaacattcaacaaaatattattcacactgttcagaattcagaatgtaggaacaaatgtatgggagcaacaagaaactgagtcaactgaccaaatctagagtaaaagaattcactcgcaaacttagttggatgtcatatccacattaaatgaatccaaaggtgcatctagaaaatggcaacttagcaaatctgtagacagtagattaacatgcatctgtactttctggtatgccaaactgaaattcatctctgggaagaaaggaacagacaacattaattgattatgaaaactgcatagttcaatcatagcagaacaattacctagcttctttgtcaaacccaaaccgggcaccaaag

SEQ ID NO: 45779 - DNA, 655 bp, Setaria italica
  Peptide Sequence Number=SeqID_111753
cggagccatgacctcccccaataaagaaaaaagatttctactacccctcgtcaattgtcagcttatagactacatcaggactcagcaggccaacacctcaagggccaagcccaattggcattctgtcagctgttacctagcgttcaacaacgcacgtatgcacacaggtggttaggcgtctgttcacgtacctaatcacgtgactttccattccaatctcgcgacgcgccgccgccgccaaaacctcgcctgccacctgcaatctgcgggatgtcggaatcttgcactaccattacaccatcgacgacgagcaagccagtggctatggcagtgtggctgcaatggagggcaacatcacggctgaccctcttacttctggtattcctccaactcaaagcaagtcttatttccctaagccatatcggtatatcccataaattgttttcaattttatttcttatctcataatatcataggaattttttttatgaaatttaggccaaagctttgttcttactctacctattgtatgcttgtggggacaacgaaaaattaggataaaattatcaaaattcttgaaccgacaaatgtttatctgtacccctttaattttatctccagttccaccactgcgcatgatgacaagctaaaattt

SEQ ID NO: 45780 - DNA, 612 bp, Setaria italica
  Peptide Sequence Number=SeqID_111754
catctacttcaacgcgacgctggcagccatatgggcggcgaagaaggacatgcaggcgcagttgcagccgcttgaggcgaagccgagcggcggcgtggctacgctgggcgacgaccagagctcgtcgggcggcggcgtggccacgcagggcgacgaccagagctcgtcggaaggcagcggcaccagcagcggcagcggcgagcacggcaaggaggaagggagcaacaaggagggcgagaagcagggcaagagctgcctcaccaaagaggagtgccacaagaagaagatgctctgcggcaagggctgcacgctctcggcccacagcaagtgcgctgccaagtgcaccaagtcctgtgtacccacctgctaggagccggagccatgggccgtgggccgtggccgagatctcgatcgagcccttcagacttgagtcctgtggtgaagtttatcttgtgcgttgcgttgaagtagatggaaggaataaggaggggcacttgctgcatgcgtgcctctctgatgcctatcttttgtttgggttacaggtttgtgtctagtttcgttcaaaaaacaggtttgtgtctaggcatactgtcttggcggcaattattttaa

SEQ ID NO: 45781 - DNA, 519 bp, Setaria italica
  Peptide Sequence Number=SeqID_111755
cgtcccaatgtagggacagcaagttggtacaagaaagcatatggttcattcagtcatacatggcaattttacactcggtaatgtgtatgagccagttgcctagatggcaagtgaaattcatagctccatcactaagctcacttcttgagagtagcatcttcggaatcgcatggtacaaggactagaactgggacttgcaaggctatcgaagtagggatgctccatcgctgcgacagctgatatcctgtttgaaggatcaagctgaagcattttctgaaaatgcgaagcaacggttgcaactcagagtcaccaggaaagagagcttgtcttctgaccatttcagcttggagccacggatcccgaccggccgtctagtggtggtgatcgccggagggacggtggacgcggttgtaggcggcctcgcctatgaggtagatcccgaaggccggattcttgaacagctcggccgccggcttcatggagagctcgtccctccgccggccatggaggagtctggat

SEQ ID NO: 45782 - DNA, 785 bp, Setaria italica
  Peptide Sequence Number=SeqID_111756
caatagtttattcagccatacacggcaattttacactcggtaatatgcatggaccagttgcctaggtggcaagtgaaattcatagctccagcggaaagctcacttcttgagagtagcatcttcggaatcgcatggtacaaggactagaactgggatttgtcaaggctgtcgaagtagggatgctccatcgctgcgatagctgatatcctgtttgaaggatcaagctgaagcatttttgatagcaagtcaatgccttcgggttccagcgttgggaccgcacgggtcaaactctggggcttccactgtggaaactcgtgccagtccctcaaagcactcactccaggccactgctcctcagaaggtgttcccaacagcctgaaaatgtgaagcaactgttgcaactcagagtcaccaggaaagagagcttgtcttctgaccatttcagcaaagatacatccaacggaccacatatcaacaccagttgagtaatgcgttgctccaagcaaaacttcaggggctctataccaaagtgtcacaatctcatgggtgtagcttttcattggcacagtgaaagctctaccaagcccaaggtctgcaatcttcagtatccccttctccttgtcaaccagcaggttttgaggcttcaaatcccggtgaaggacgccatgaccgtggcagtgtgcaactcctttgcataactgatacaaaaaattcttgacgaggtgcgtgggtagcggccttgcgttggggccccttcggtagacgtcgaggtacttcttgaggtc

SEQ ID NO: 45783 - DNA, 449 bp, Setaria italica
  Peptide Sequence Number=SeqID_111757
ccccaacaagccaagatagtaagaagaagtggagagaaacctttattggtgacagagatgaaattgaggtgataggaagggaaagagagaagaaagacatactgactaaggtgttgcagaaaaatggagagaaagaaagctttatcattcctgttgttggccttggtggaatgggtaaaacaacattagcaaaggctgtttacactgacaaggaaacaaatatgtttgatgtgaaagcatgggttcatgtctcgatggaatttcagctaaataagattgtgtctgctattatatctcaggtcgagggtagcactcctgctaatgatgttgatctgcagtacctaaaatctcaacttgaccgcatactccatggcaagatttatcttatagtcttagatgatttagtgggaggaaagaggaggtctaagttggaggatctgatgaacatg

SEQ ID NO: 45784 - DNA, 310 bp, Setaria italica
  Peptide Sequence Number=SeqID_111758
acgctttacataatgatggctttctttcgttgatattctcaatcaatatccaacaaaactcgtaagttatacctcttgttcccagatgttacaaatccaactgcaaatggttcagcgcggtgctgctgtatcagccactaacaatgagaatgcggagcacagaaagaatggctgaagctgtaaataggcagagatgaggacgggataaaacaaaacaaagatttggctataccacagggcaaaactgttacgtggtgccttgccttgattttggtaggcttgttcacttatactaacctgttagtgccct

SEQ ID NO: 45785 - DNA, 707 bp, Setaria italica
  Peptide Sequence Number=SeqID_111759
ttcgggagacctcggtttgcagcaactcgtcatcgaggatgctccctgcctggagagattacgtcatgatactcctatttcacatcacaagatgatggacatcttggtgatctcggggccaaaattgagcattttggggcgtatctatgatcactttcccagatttgagattggcaccacagtttttaaggtctttatctttgtcaaacaagagtcttcgtttgggtttggttcttaacttcatgaaatgctttcctgcttggagcagctgaacatcaatggttatagagtcaataaggcttgtgttgaagtttaggaacgttagcaatagttggattgaaggacagcgcagcctgcttcagtttgaaatgagagcttccaagggtgcacagttggattttgtgtcttctgatagtttgcgtgatgaggaaaccgcgtgatttctccagagaggacctcatttccagcatttcgatgtctcttctcatggaatattgttcaagatacaggattaccggaccatgaaccacatacacctagggagaagcagattcctgtctgcttggggcaatggaacagtgacttcaatcttgttgtagctctgccaaaagtgcaaggaagcctgcattttcacttgtgctactgctaactactgtacatgtataaacttgtagacttgtgatagtcctgtcaacagggatggtcaa

SEQ ID NO: 45786 - DNA, 740 bp, Setaria italica
  Peptide Sequence Number=SeqID_111760
cttgtggatgattcagatgacaatagcattgatgatgatgccagtttgtctgctttactcttcagaaagttcaatcaacaatgaggatatagacagaaaaataaatgagaaaccttttcttgtttatcctaaggaggaaaatgatccacttggatcagaagttaatgaagatttccgaagcatatttttgaatacctctgatggtcctacctgtgggttggagaagagcctgttacctttacggttaaagattcctactggggcttcaaatgattgttttgatagatattggcagtacaagtcagcacctaatacttcctatgaagatgcagaaaaatgcctaaggttggctcttcattcaaatccaccagtgatggcagccttgttgccactaatacagattctcctgcttggtgataaactgaaagatgcacttgacgagcttgagagaacctgcctcagttcaactacagccctccctttcaggttgagaggtagactgctagaagagtatttcgaccaaaaccaagtatcaaccatttcctcttgctatgaggaagctttgagaagagatcctacatgtagctactcaatggagaggctaatcaaaatgcatagaaaaggatactataatacaatccagctactcgaggcaatagctctacatttagattccgtccaatgggaaaccttgcatctgggaggagcttgtattgtgcttccttcggcttttctctgac

SEQ ID NO: 45787 - DNA, 698 bp, Setaria italica
  Peptide Sequence Number=SeqID_111761
ggctcaaggtggagctgaagctgccggtgctcgcactggtggactctgatccatatgggctcaagatcttgtcagtgtacatgtgtggttccaagaacatgtcctatgacagtgccaatctgacgacgccagacatcaagtggctaggggtccggccgagcgacctggacaagtacagggtgccagagcagtgccgtctccccatgaccgatcacgatatcaaggtggggaaggagctgctcgaggaggactttgtgaagcagaatgagggctgggtgaaggagctggagacgatgctgcgcaccaggggactagctgagatacaggccctcagctcctttgggtttcagtacctcaccgaggtctatctgcctctcaagctgcagcagcaggactggatttgatatttgagtactcttcgatgcagatatcggtgatttcttttgccaagactgtcttctacccagaatttgcaaggatctaattgacatgagtggagacctctaactagttgattcttaagttgattcttaccagcacccttgtatcacttgtgtatttgaacatcagctgtcgtgttatgtatttctgctggagactattcatggaacaattgctgccagagatgtactcgactggaagttcgtatcacagtagtgaaattcatacttcacgtgtctttggaaacaaaaaaaaaa

SEQ ID NO: 45788 - DNA, 572 bp, Setaria italica
  Peptide Sequence Number=SeqID_111762
cattacactggtaatactggatgcttggtttcagctttaggattgtcagatacctgtcataccgtgtttgagcaaaacataatgaacagcagcagcaccgtcaatttttttctcaatctgtagttttctaatacagtatgctgcaaaaacttgcataaacttcactagctatctctgccatctgtttgcatattggccacagtataattgcctctatcttcaagcacctcagtgcggtggaaagttcactgcaaaaattcctgctcctgtgttgtcttcaaaggcttcagtaacttcagtgatcaatgcagatagtttcgattttgtcttggtttttttaagaggaagtgtttaaatgattttgccaaatctgaattgccccttgttcttgaaagcaaccagtagttgctaattattctgaattgccttgcagatttaccaagtgaaccagtatttaccttcggtttgttttctgcaccacggtggaagttgaaggacatctttaaacttggcgctctccctcccccaccgatcaggcgaccacaatgcgcagagccctccgcccccgcccc

SEQ ID NO: 45789 - DNA, 399 bp, Setaria italica
  Peptide Sequence Number=SeqID_111763
ggcacagagtaggatgaggacaagggaggggcaatcaacagtagttacgcggggaaggtgaattaagaaacaaccggtagcgctcaaaggcaattcgaaatccatccactcgatcccttgggggaagtcacaattaaatcgcacttcatttttttctttgaaaaatcgtattaaggctaaacattcttgctttgcttcccctgtcacagttaccacgggtcgagcaacaacgatttaacccagtaaataaaaccccgaatcggagacaacgaacactcctgtttgacaagtaacggtcgcgcaatctaatccaacccaacacaaccccgaacccaaggaaggcattgggagcaagtacctggccggaggcgaggacgacgggatccctcatgatctccg

SEQ ID NO: 45790 - DNA, 456 bp, Setaria italica
  Peptide Sequence Number=SeqID_111764
gtctgttcatcgggtcactctggatgcaagcgtggatcaccttgccgatgactactagctcttcttccttatgatccttcagtgtaggatcaagcagagagaccatgctccggtcaccgttgtttatgcactccagagcctaggaaggagaaacacagcatcatttgatttttcaagatgatctctttttttttcagttaacaggatgttccttcgttaatatcattaccaagctgacgagtgagcgctcgcgtgcaggttcaggaagcttccccgagatgatctcaagcagtataacaccaaagctatatacgttccctgctagggcagcagacacttgttcatggtgacggtcaagctcaccatttgcggcgatttcccttggaaatcacttcgtgccaaacgctcatgtcaacgatctgcagaagcactcaggttggatcaagttgatagatt

SEQ ID NO: 45791 - DNA, 1234 bp, Setaria italica
  misc_feature (1)..(49): n is a, c, g, or t
  Peptide Sequence Number=SeqID_111765
nnnnnnnnnnnnnnnnnnnnnnnnnnnnnnnnnnnnnnnnnnnnnnnnncttttgatgcctgatggcaccttcagaattcagacacatgatgcaaggaaaggcactgccaagcatccacgaggataactatttctacaattttacatttacaccaggtggcatgtcacagcagttgacgtgctggatgcatgcacaacggttgcttagaacgtagaagtatgcagagcgtccttgcatcatgtgttttcttcagaaagcatcggatggatagcatcccttctcgccaatgattagcttccttccgcggtcgaaagaacctccagctctgcccaccagagcggagacagtctcggcgtcgcagccactggcgagatgcctatggcttccctcagcctggcagtgatctccctcatgctcggtctgttcatcgggtcactctggatgcaagcgtggatcaccttgccgatgactactagctcttcttccttatgatccttcagtgtaggatcaagcagagagaccatgctccggtcaccgttgtttatgcactccagagccaagctgacgagtgagcgctcgcgtgcaggttcaggaagcttccccgagatgatctcaagcagtataacaccaaagctatatacgttccctgctagggcagcagacacttgttcatggtgacggtcaagctcaccatttgtcggcgatttccctttggaaatcacttcgtgccaaacgctcatgtcaacgatctttgcagcaccatcttcagagagcagtatggaactggactgcaggtcagggtgcaccactggagggttgagctcatgcatgtgttggatgcagtatgctagtcccataataatccgcatcctacctcgccaaccaatgtgctcaaaatcctcaccatgaagactctcataaagtgtcccattcggtgcgtattcaagcaccatcatcctggtgaaaggttcctcctcctcacaaaagccaagcatattgatgaagtttttgtggtttatccgcgacagtgaatctatctttttcctgaagcagctctctgaatgctgtgaccactccttgcttgatgtaatcgtagtggataccacagcgatctcaacaccagatgataaagtccccttgtagacagtgtagtgtggataacttgctacaatgttgctgaagtcctcacaggcacgttccagctctgacagctgtagttttggtactcctgtg

SEQ ID NO: 45792 - DNA, 412 bp, Setaria italica
  Peptide Sequence Number=SeqID_111766
gcccctagaaatgttgcgctagagagaagctgcaagggaagtcccgtgaatccatggaagtaaacataatatgactagttatgatcgttgaaagcgatacatgaaatgacttagttaagctttattgcccccaaataattcacacataaactttctctttttttaccaggcaggagagttgccgattatattaaaaggaagatgaaaacccagattggggaatacaacaaaggaagaaaataacaacccagacgcaagcaactcaatgttctgagggtttagtgattcatatacagttgtgtaaaattagtgtccaaccaaacatgcccttaatgttactgtaatcatgatgataagaaaccaaataggcagtgcaggctggtcgttacacttttgtaatcggcactgccgt

SEQ ID NO: 45793 - DNA, 542 bp, Setaria italica
  Peptide Sequence Number=SeqID_111767
gtcttagccctgctgtcctcagcgagaatggaaaatttctactagcagctaagaggaatcgccgtacaacctatactgagtacatcatttctatggatcctaaaaatatatcacgttcaagtaatggctatgttggaaaaatgaggtgaagtatcttaccttaacagcaatattccaatctaactctaaattgttttttttgagttttgtgtggtgctgtccatttgaatctgacattgtagcaccaacaggtcaaattttcttggcaccaaattcgtcgtgtacgacactcagccgccatacaatgctgggagccttgtttcgtgtggacgcagcagccgtagaatctcctctaggagggtttcccccaaggtacccactgctagctatcctattgcccaggtgaactatgagctaaatgtgcttggcacaagggggcccaggcgtatgaattgcaccatgcattccatcccagcctcagcaatggaacctgaaggcatggtaccttgccaacccaagcagctcttcctccctgcctcgtc

SEQ ID NO: 45794 - DNA, 467 bp, Setaria italica
  Peptide Sequence Number=SeqID_111768
atatattagagatgagaacaggcatgtagggcaataagtatttatatgttgtgtgtgtgctggtgtagtttgttgccgtggttgattcagtcatttgtttgccctagtgtggtgtggcttgtcaaagctaagaaccggcaattgttctgagctgcaggtgcttggtacaattgccggttcttagctttgacaagccacaccacactagggcaaacaaatgactgtcaaaccaaccagacaacacaacacgagcacacacacaacatataaatacttattgccctacatgcctgttctcatctctaatctattcacaagccagcttggtgtcgaagctcgtcaaacagatggtgaaggcctggaatgctgagagcgggtatcggtagtccattgtgaacatgtccttggcaaccttaccaaactgcaggatcactttatcatgatcagatgctgaagatgactcgaag

SEQ ID NO: 45795 - DNA, 690 bp, Setaria italica
  Peptide Sequence Number=SeqID_111769
gtgtgagagtcgacgaacaggatttggatagggctcactctgaagatcttgatcaccacaagaaatttccagttattgtgccttttcactggacatgtccttccgcagcatagtccgtgatgttaaggaaagctttggtagcttatcaagacggagtttttgaggttagaatttctggtctgcctggtcttggtcatcacagagggaaatctgttggatctctgagcaacctgcacgatagacctatagtagttgatcaaagcaggtgggttggtcttcctcccgaattgcttcgagatgtaatgaaaaggcttgaggaaggtgagagcacttggccatcccgcaaagatgttgttgcttgcgcagcagtttgcggaacatggagagagatatgtaaggatatagtgcccagtccagaattttgtggaaagctcactttcccggtgtcacttaaacaggtaacagtttaattcagttaccaggggtggaaattgcaaaacctctattattaattttgccgcttgtattttggtgccttgatccattacttatcctcttaaacagttgcaaaaaataaatgattgtgctgcccaaaatattatgaatcaacacattccctctgtttgagaatacttgatactatcaatcactttatttatttacaaatatttgccactacatgcttctcaa

SEQ ID NO: 45796 - DNA, 464 bp, Setaria italica
  Peptide Sequence Number=SeqID_111770
atcttttgtaattgagaagcagagaacagcctctgcagtatatgtccacctacaaatgtttgcacccatctaacttcgtcttttcatgtacagccgggacctagagatgaaatgatacagtgttttgtaaaaagggacaaatcaacatcaacttattatctttacctatgtcttagccctggtaagtgtaaacacgtgctatgctttttctattaatatccttctgagcaactttatatgaataattgaatatagatcgcaactttatatgattaggagaaaatgttcatgttaattctgcagctactcccttgctctagtgattttccacctcagatttggacaaccaaatgtgttgcttcctgtggcctttgagatatgttttgccttttggtctttataagtcaggactattagatatgaattgacctagaaatacagtggcaccagatccttgtcccccc

SEQ ID NO: 45797 - DNA, 126 bp, Setaria italica
  Peptide Sequence Number=SeqID_111771
acccctactagaagccgagctgtgcaactggggggcagtttaaacagttgatcgatcatagtaccggagaaggtggctcaactgtttaaactgcccctctgagctgtgcaactggggtgttctgta

SEQ ID NO: 45798 - DNA, 604 bp, Setaria italica
  Peptide Sequence Number=SeqID_111772
caaccattgatgcagctaaggaggtactccgcccaaaccacaatcccacataataaactatgctcatcaaccaagtttgttcagtcacgccatggtgacctaactacttggaaaagcagctgaggaaacccatcattgatgtccaaaagcttacacgaaagatgtagatgaggatgatacaatgtgatccgatctgaacaggggagaagaaccatagaagggtaggaccgtgggtcatcaccttatggacaaacccaacatagataaccactaaagatgggacaatgccccctagaaaatattatggaaaattcatgacgtggaagagacatcctgtcgcgaggagtcatggaagcataagagggggcatgaaacatagaacctggaaccttatcatgtgagaaagtctaaaacccctgaggagaggggtgggggcaaggaaataccttctcttttgaggacgatgagtgcatactgcataatttgcgagtatgctagggacagtccactagggtgcatcctctcatcacaacacactttcacccataataaaggtcaggaacttgcataaggtatcagcccgggtggtacatgacactactgg

SEQ ID NO: 45799 - DNA, 525 bp, Setaria italica
  misc_feature (4)..(4): n is a, c, g, or t
  misc_feature (19)..(19): n is a, c, g, or t
  Peptide Sequence Number=SeqID_111773
caancttttttgagattcnctttatactctgaaactgggacatgttgtcgctcactagttcttcctaaaaagggccgcgtcattttgcaccaaagaatatagtggttgcaagaggtggtgcaataccaaccagtggaaagatgtgatctatcaagaaaagcgcccatcttgtgttgtatccactgtaacctctgacaactacatcagcctttcgagagtacgtgtcaacaagtgcagcgccccagccaccggggcggaaggactgctcggtgatggaatcgccgaatagcaccacccgtggccgcaccagtccttgcgatccacctgcggcacccgcagggcagacaggagggtgtacagtggcagaggccgcagggcaggaatcgggcatcatcatgtattgtactgcgactctggtgactagtgcttgctgttgattgtttcgtccctagaccgctgaacggctggatctgcacatacttgtacttcgcagcacgcaactcgctggtggccttccggcccggt

SEQ ID NO: 45800 - DNA, 1124 bp, Setaria italica
  Peptide Sequence Number=SeqID_111774
ttttttttttttcgtaccaaaatatttctttagtatattttttaccatatctaatactcattgcaatgagaaacaattctccatttcttatggagcagaaatggaatctaaatttctcaaacaaaacaagaaatgtaagtctagatgaatctcagctcatccagaagctttggtccattgttttgggtagaagggaaccataactttcaatgcaggaagccggcagttcaaaccccgaaacataacacagcttgaaattacttcattggaaagccttatctggacaactgccatctattttggaatgatgagggaagtcatacggcatctcttctgctttcaggccagcatttctcaatgttttgacaacttccttgtgaacaatggcatttccttctggtgtcagatgtaggccgtcacttaggaaaagtgtctgccatccttcagtttcctgcatctttgaccaaatattaacacagggtatatgcatttctctggcgagctcaatgcattgaccagcatagacaccagccatttcatttgtcctttcaggtagcttcctcgcattctctccatacagcgaccgtgcaaatctttctcttccttcttcatcaatgggaggtggtgtgataagtataataaccatggaattggaacaatccttcaaatgattaacaatctttttgagattctctttatactctgaaactgggacatgttgtcgctcactagttcttcctaaaagggccgcgtcatttgcaccaaagaatatagtggttgcaagaggtggtgcaataccaaccagtggaaagatgtgatctatcaagaaaagcgcccatcttgtgttgtatccactgtaacctctgacaactacatcagcctggtacaaagaaaatcacaattatccaagcatccaaacattgggatatagtaagatttacaaatgcaccgaagaagcaatgtgggtaaaagccctcttgatgggaggaaaaccaacatggcgtatacagtcaaatattgaatacacctttcgagagtacgtgtcaacaagtgcagcgccccagccaccggggcggaaggactgctcggtgatggaatcgccgaatagcaccacccgtggccgc

SEQ ID NO: 45801 - DNA, 605 bp, Setaria italica
  Peptide Sequence Number=SeqID_111775
cgtcatttgtttcattgcacttataattcgacacatctgttaggaaggagctccgctgcttaaaaagaaaggatctggtcgaggcattggcgaaaaacctacctgtaggaacaatccgctttggctgccacatttcaaaaaattttgaagactccgactgccactgtaccgttcttagtacagtggacggaagtaccatcaaggccagggtacgtactcgatggtaggccccggctctgccacggtgctctaagcgattgatctcaacaaatgcaggtgctgattggttgtgatggggcgaactcgatggcagcccaatacttgggactaggcagtccatcgcatcttcctcgcttggtccaccttggattcacaagctacctgcacgggcatccatttggaacccgtttcctgcgcttcgcagctcaggatttcgccgtcggacgcatgcctgtcaatgagaatcttgtccatttcttcgtgactagatcaagcccttccacacctgttcatgtactcagtgttttgaaaaacagagctgctcattaccacctatgttgttattcactttacccctaacgaaccaaatactaacatgttggaac

SEQ ID NO: 45802 - DNA, 377 bp, Setaria italica
  misc_feature (365)..(377): n is a, c, g, or t
  Peptide Sequence Number=SeqID_111776
cgactccctcgcccaggccgccagcgccaaggaggacagggacgccgtcaagaggcgggtggtggccgtggcggaggccaccagcaacgcgctcgcgctcgtcaaccggctcgacccggcaccgcaccgccggctctagcagttggccagccaaatcggtcatgtttgatctccgcctccatcgccatacctgtaccttttggatcggtcttagtgacgattgattttgttgttcttgttcttgtctgcgagtaactgtgtgcaaaagtaattggttttcagtcctggttttcagaatgttctgcttttggttaactaataaaataatctaagatgtgatgaacctgaaaaaaaaaaaaaaaaannnnnnnnnnnnn

SEQ ID NO: 45803 - DNA, 509 bp, Setaria italica
  Peptide Sequence Number=SeqID_111777
agcaacaaggcaggccgtggcactgtagatgtaagtctatacatgtcgattcgccactgagccgtccccccagccagcgacggcgctttccagacttgtggagcacaggattcgaagcgtgcgcgagtttttctccaggttctggatcatccgggacaagctagcagccctgcccggctgccctgaaggctgaagacgatggatggatcatggatgtctcgacccatacctctccgatcacatgattgtgacgaggcgaaaggggacggctgcggcttgcgcggcagcccggggaacttggttttctcacgaatgcacgtgtcgtcgcccgtaaaagacttggatttgggcgcgccaacctctctttcctgagcgggagtcgtattccgccggagcatctgaacaaccgaaaggttaagaggcctccggcctccggggcttctttctttcccggatcatctgctttagcacttttgcttcttctgtagttctgtgcaaggttgaaggtt

SEQ ID NO: 45804 - DNA, 252 bp, Setaria italica
  Peptide Sequence Number=SeqID_111778
gctcattatcgtcctcgtaaaccccaacctttaccggcccgccatccggaccaacgctttgtctgtttgcacggcggcgggcatgatgagtatcatgggcgcatacgccgccggcagcacgcagcatctcaagacatccatctacatcttcgcattggcggcgttcgtcctctttgtggtcatagtggctgttgtgttcttggtcatccatgagaaaagggatcagagggacaaagctaaaaagaaaaagca

SEQ ID NO: 45805 - DNA, 602 bp, Setaria italica
  Peptide Sequence Number=SeqID_111779
ggttgctggtaatttaaatcttccattatttctttggaaaagtctaattttcaacctccaactactccaactatagcagaagtctgattttcaacttgcaactacaaaaccggacagggagggcaatccaattcaactgtcaaaaccgggcaaatttgaccctttgggtggttttgaaggtggttttgcattttctagaaatttaatttttttgatttgatcaaaaaaattcataactaattcattcaaatccaaaaatatgaagttggcacaaaaaagttttctaaaaatgtaggctatttgttggcactctatttggtgttgtttacatcatatttgttactactcctagtattttattgctcataataaaacataaggaacatgaacaactaagaatcaaataattccaaatataacaccaatagataggttacatttttagaagttttttggcaccgatttgatatttttcttatttgaaatgaattaattatgaatttttccattaaacctaattttttaaaaaattttagaaaatgcaaaaaccactcttgaaacccccgaaggtccaaattttgtagttataggttgaaaatcag

SEQ ID NO: 45806 - DNA, 594 bp, Setaria italica
  misc_feature (1)..(48): n is a, c, g, or t
  Peptide Sequence Number=SeqID_111780
nnnnnnnnnnnnnnnnnnnnnnnnnnnnnnnnnnnnnnnnnnnnnnnncttttgatgatgtcggaagctatattgctgggtaccacaattgatcacaggctagcaaccacaaattataccggtagttgagcaacagattccctcaggttaaaaaatgacatctgtttcagtaagacactaagatgcagaaccatgagtccttgacgcattcacaggttccctgaaagggaatttgactatcacctttgctgctatcacttttactgattgtacaaaattttctatcgcctaaatctgaggttacccggaaatgtattgtaagatgtacacaactctgttaacaagacacaaaattggatgacacagtaattacaactaaatcctcaagtcagaccacctagatgttagatgatgagattgacaaatcaatacatgttctttacttccagcgctgctgcaccatgtcatgtcatgtcatctcatggtcaaaagctacttgcatgaacctcttgtaaacttttacttttgatttcagaactcataggacgtaaagaatatagcgccttgagatatataaatagccagccttggagt

SEQ ID NO: 45807 - DNA, 265 bp, Setaria italica
  Peptide Sequence Number=SeqID_111781
gctagctcatcttggcacgtcgagacgatctacactgatcagcagcttggcagagcgagcgaaatggcgagcgagctcgtggccatggcgctgcggttcctccgggagtacgtgcgggtgtcggaccttgccgtgacagcggcggtgctgttcgtcttcagcgcggtcaggaaccgcctgtccaccaagccgggcgcgcccatgatgtggccggtggtcggcgtcatcccggccctcgtcgcgcacttcgacaacatctacgacg

SEQ ID NO: 45808 - DNA, 324 bp, Setaria italica
  Peptide Sequence Number=SeqID_111782
aaagcgtctgatccaaacacaacattacattgctggagaaacccaggcttggatatcaccgatcaaattagaatcaccattgccttgtttctcatcgctaaggttgacaatttttgtacattatcacatttgattgttactattataagaataaaatggacaagcagtctttagacttgtcataaaagtgctaccctgactactcatgatatttagaaaatgcaatcatatcattaattttaaggaccatccgtacattccactcctattataatttcacctcaagcttctttacacatacttccattggcgggtctagatgga

SEQ ID NO: 45809 - DNA, 1229 bp, Setaria italica
  Peptide Sequence Number=SeqID_111783
ttgtcacatatcctctgcatattctgtagaaaaagtttagttttacttgcttggtactgtcccctttttttgcgatagatataattgatatgatgcttgtaggatggtctaatcttttaattttggtgcaatatttttgtttaatattggcttactgcagatttttgttgcctttcttacttctttaggtccttggtcaagaactcttgagaggttgcatactcaatctgatattttcatttatattatagatgttcaatccatgatgtgatggctagatttcctatgcactatggatgttttagcaatatataactttggcttgtgtctttcttactgcctcaattcagccgctattcttcgtcggctgctgatgattaagtgttcagctgtcctaattttcatatggatatgcatctttacctcgtctttttggtacaaaaaatacatgaatgtgtatagaaaccaaagaatgatctgtttactaacttagtgccaccgtcctttttggaacgactagctcacatcaaacatgcttctaataattcccatttatctggcccccattcttaaagtttgtcatggttcctgtttgagttcatcatacctgtcagttattttgtggaatggcagtttgttgtcatatagagttccatttttttttttgtctctgatttgaccctttattactgtgatcttgctgtttgtagtgcttttgtgaggttatgtttttctactcgcagaatgatatatgtgtttcggtgaaagtatataatacttgaaaaacattgcagaatgaaatataaacatagttatccaatacagactttttaaaaactatatttttgaagctatatcttttttaatgtttacgtaaattttcctatagtcaattatttcttagatgtgaccatcttttttttatccaaggcaaatgataatattttttcgcttcgtgtgtgccatattttttacatgctgatgttttatgttaatctgaacatgatgcatacaaaatggatttatttctgtatttagattcatcaaactctctgtagttatgttccctccccatctctaattttttttttgagtacatgttttcatgcagtgtatcctaaaaaatcaatgtttaaccaaaaaaatgtgtgttactttttacactttttatgcacatgcatccattctttttacacttttctgttctattcatcggccctcgtcatcca

SEQ ID NO: 45810 - DNA, 414 bp, Setaria italica
  Peptide Sequence Number=SeqID_111784
acgggacggttcgggcggtagacaaccgcacgggaggtgctgcaggcggcgcagtacgtgcccagcgggtgcgacggcatggccaccggcgcggcgatgcctgcggagaacggcgggttcgacatgatggtcaccgtcgcgcacgccgtcgtcgcctccttgtccaagggctactgaccatcacgtcttagtacatcaggacaaagtcgttgtaataaggcgctgtagcaacaactccatgagcccgttcatgttgttgccgtgccaatagattaatggcgcagcttgcgttttgacaagctttcaggctgagctcgtattgttgttcatgtcgtgcgcggttgcgcgccatcaaagttaccttgtgttcgttggttgaagaagaggaaaagatggcataagagcaacctcaaa

SEQ ID NO: 45811 - DNA, 1074 bp, Setaria italica
  Peptide Sequence Number=SeqID_111785
ccctcccccgcgtgggccaccggcggaggagcgccgtgtcgtcttgggcaggggcaggagggtaaattcaacgcaccgcgctcgcgcgggaaatccggagggggcgggtggtacttgtgtatcacccagctttgtttcgtcccagcgctgctctgccctgcggctctgcccctccccctttcaccccctccccgcgggacctcggggccgtgggtctgcgggggttaagggtttcgtgctcgcctcgcccagcttcggtcggggtcgccgtcgctgtccgctcagatgctgccgcctgctgcttctgctgggacgcgcctctcgcccccgctccgtagctagcgcgtcgtcgtccgggatcgatctgagcgcgcgcgccctgtcgccccgcgctccgatcaagtccggcgcctcgtgatccccatcgcgcgcggctcgatcgcgcccccaggatgcgagcggtttgaaggttcttacaatgagaatcatgcagttttccgacttcgcatcctggactgtttctcgtgttcctcttggattgctgaagggcaaagccatggagagtggaaccaacgccagtcatgctagggaaaggaactacgaggtcatggaagaattcctcagttcaaccaccccgatccttgcacatactgctctcctcttgagcttggagaagataacctgaggatctcctacctcaggccaagccccccagcgcagcggccccatcgtaagaggggttattcgtctgcacgtgcccatcaacaactcctgaaactattctccacactaacactgatgaactcatccgggtggttctccatcaagttgagctctagtgatagctaactatatatagtacgcctctaccaccctcagtttcatagcgccctctattttgttctgctcggcctctaaggtgaactactgccccaagtttatgcttgtgtgctcaagatgagcgttgtgccatgtgtttttggtgcgaatgtattgcagggtagaccaatttgtagactggagatccgtggactcgatgcttattaaatccgttatgttatgtaaaaaaaaaaa

SEQ ID NO: 45812 - DNA, 484 bp, Setaria italica
  Peptide Sequence Number=SeqID_111786
cgctgagtccatataccgtgatttttcagatgccaacctactaaggtatgacagatttgcagcaggaccgcccaaatttgcttcatccaagaaagcatttctgcttgcagcaataaccttagatatgtcaggtgaactgtggtacttctttgagtaagcagatgagcctacactctcaccaacgtaggtaggatcgtaataagatctatccactgccattgtagttaagcggttcaatgttgggctttgcatagagctaggtcccagtgatccaagcacatcctggttatgagcattcatcgtagagccagtaatagcagattcagaagatctaggaagtcggcgtgggtccagttgagtgcttgactgcagatttcgacttgcattcatgccttttaaatagtttgctaggtgatacccatgaatggtagcaggctgataaaactggttatctgagtaagatggtgcatggaaattggaaaaa

SEQ ID NO: 45813 - DNA, 610 bp, Setaria italica
  Peptide Sequence Number=SeqID_111787
ctgggtgtaacacattttaattccatgcagcaaaaaaaagctagtgcttgcaagaaatgtgattagttgttagttgtaaatatggcattctgaagcatcttatatgtctagattaaaatacctaactgtctagaaaaataattccaaatctcaaactaaccatgtaggattaacccaataccgccagcccaatgatggaccaaattgagctgggtgtaacacatttcatgcaggataaacaaagctggtgctctcaacacatgcgttgaaaaactagattaactgttagttgtaaagatgccattctgcgacatcttgtatgtctagattaagacatctaactgactagaaaagttttaggaatggatgaaactattaaagctattctttcacccttcttttttttgtttgtaagacgtactatgatatctattgggaccaggaaatgcagaagcccaatatggaactctgaatcctaacaaagcctttacaatgttcaaatgtagcatcagagtatgcttggctcgcatacacccaccataaggtttaacgtgcatgagtaattatgtagaatacttaccattgagtattgtacttcgtattgttcttt

SEQ ID NO: 45814 - DNA, 850 bp, Setaria italica
  Peptide Sequence Number=SeqID_111788
gtcaattgcatattccctaacccattcatgccctgtactatatagaagacgaccaacctccttttgaaatgaagaagttgtcttctgattgaaccttttgctctttcctgctcttgttattttctcctcaagatcactccttaagcacagtccaagatttgggtattcaagcttcaaagactggtttgcaagataaacttgtgaggcaaacatcatgtcttctctatactgatcggagacccgttgctcttcaaattgactcagagttctccagatatgtaaaaagaatggacggtccattttcccaattactgcataggaccaagcaatattcccaatctgatctcgaccgaagttcagaggacggtccatctcttgatgcatgcttgatgttacatcagacacatggcattggaacctggcatcattctgaaaagcagcatctagtgcatcaagtctaaaggatgggggcactcattcagagaagcacatccccacaagaactgagcaagctcttgctccttgaaggtttgcagtatctgtgctgctctctgggccagagctgagaaaaggcctggtgctgattggcgcatggatgcgaatgctccagcaacattggcaacattctgtgcattgaactcttgaaccttggttatggcaacatcagcgatcctatccatctctgattggtagagcaggtcgccaccaatcttggacaaggcccaggctatgttggagataccctgtggcgagcactcaggcagggccaccatggccatacccacgagcatggacatgtccctctgacgcgcaaaggcgagccggtgcgtctgcatcatggacaccgctt

SEQ ID NO: 45815 - DNA, 538 bp, Setaria italica
  Peptide Sequence Number=SeqID_111789
gggctttgcctcctccagggctgagcaggctaaccgcgctgacagagagctggtggaagactgatgggctcaagggatctgcagggctaaacataaccccagcagaggccagatccggcaggtctcggtcagatatgctgatgccactcagttgctcagatactatcttgaatgccttatctagtattgcgtcgatgtacttctggttcgcctccattcggatctgcatatgcttctggacctccacttgctcatgcaatcttcgttgcacttccatttgtgctctcagtgcttctttaagttcttgactctctttcacatctggagtagaacctctaggagacgaatttgttccactctgagcttccataaggtaagaagctgtaattgcgagggaaggccacagatgtcattatgaatcgacataacattacaatgttatgcttacagtaaaatgattatacacagggcacaagagctcaaatgcaaacagtgttcaaacaagttttagtgctaacagtgaatctgatacaagata

SEQ ID NO: 45816 - DNA, 1099 bp, Setaria italica
  misc_feature (1)..(31): n is a, c, g, or t
  Peptide Sequence Number=SeqID_111790
nnnnnnnnnnnnnnnnnnnnnnnnnnnnnnntttttttttttttgtcagtggcacagctccacataacccgagcgtgttgaacaagatgttataacacggaattctacaacagtttagacaacaagcgaattacttgatcttgtccatcaggcattagatgttaacaagggtcggtctagattggacgaaatagaccaagataaccttgttctttacatgtgctacagttgcaggacgatggggactacacctccacagatcttagacgtaactcctctgattttcccagaatgtaaccaggtcaagcatcacagcatgttggcaatctatttcagcgtcaggtcatgcattgcaccgagctagcaatgtacctcagcgtgacttgcgcttcagttctggtggcttctgggagatgtcgatggcaacatgcggaagggctttgcctcctccagggctgagcaggctaaccgcgctgacagagagctggtggaagactgatgggctcaagggatctgcagggctaaacataaccccagcagaggccagatccggcaggtctcggtcagatatgctgatgccactcagttgctcagatactatcttgaatgccttatctagtattgcgtcgatgtacttctggttcgcctccattcggatctgcatatgcttctggacctccacttgctcatgcaatcttcgttgcacttccatttgtgctctcagtgcttctttaagttcttgactctctttcacatctggagtagaacctctaggagacgaatttgttccactctgagcttccataaggtaagaagcatctttggattgctctgtcaactctttgccggactgtcttcccagtctgtatttctgaagatggcttttcaagtgaaaaagggtgaggcccttcacacccattgtcctcatgatagcttttggtgttgctttgtcgggcccgccgagctgggagacggcgtcgacgaaacggtcgtggaggtcggccgtccagcggagcctgggcttggggtcggccgtcagcaccacgctgggcccaccgccgtgcccgtgcagccccagcctgggcttggggtcggccgt

SEQ ID NO: 45817 - DNA, 411 bp, Setaria italica
  Peptide Sequence Number=SeqID_111791
ttaaccttctggagcattgtcgatgagcatagccatgtttacttcttgaaatatcacatcttagcctcagatgtgataaaagtttaagatgcatcttgtgtccttatggttttattgtcacatttataggcaccaccttctcagttgtacactctgcagtgtagtagatctgcatgttagtctatttacttaccataatattatcctgagggtggtgtgcacaagcacttattgttcatgttggaccactaaagaaggtttcctggcatgcaccatgtggttgggtgagactagagtatatcatcatgtgtggttatgcagtgcagtttaaatgcttcaaatgctactaacatggattgctgagctgcaatatggcaacttgcagtggtgtgattatctgccctcaacttt

SEQ ID NO: 45818 - DNA, 352 bp, Setaria italica
  misc_feature (276)..(352): n is a, c, g, or t
  Peptide Sequence Number=SeqID_111792
gtgtcgcactccggcatcctcaacgacaggagcgcgctcgagcagatcatcaggatcgtcgactccatcaacctgaacgccacgagctatcagccgtcttgagatgctttgcattggtagacgactgattttaaaaattccacttcaaactttgagggtgcatctttttgtgcacatcaataagtcatcttgttagaggcaaaaataaacaagagagttggatttagctttttgaacgttgcagtttgaataagttaaaaaaaaaaaaaaaaaaannnnnnnnnnnnnnnnnnnnnnnnnnnnnnnnnnnnnnnnnnnnnnnnnnnnnnnnnnnnnnnnnnnnnnnnnnnnn

SEQ ID NO: 45819 - DNA, 2271 bp, Setaria italica
  misc_feature (2188)..(2271): n is a, c, g, or t
  Peptide Sequence Number=SeqID_111793
gtcgcctccccttatcgtcgcccacgttgagacacgaattcctcccacctgggttcccccgcctccacgccactccgctacgcgctacccactgccccgggcctcgccccagtccgcctccgctgcctcccctccctctcttcgcctcccgtagtctgcctctgcatattagttgaagcagagctgacaacaatctatcaagaattgcttcgacatggatactggctgcctgtcgtctatgaacattactggggtgaaccaagcaagatcgttagcaggacaacttcctactcagagatgctttgcaaatagtcaccatgcaagctttgctgtgaaatctcttgttgtgaggaacaaaggaagaaggtcacaccatagacatgctgctttgcagattgtctgcaaggattttccaagacctccgctagaaagcacaataaactatttggaagctggacagctctcttcattttttagaaacagcgaacgccccagtaaaccattacaggtcgtgattgctggtgcaggactggctggtctatcaacggcgaaatatctggcagatgctggccataaacccatattgcttgaagcaagagatgttttgggcggaaaggtagctgcttggaaggatgaagatggagattggtatgagaccgggcttcatatcttctttggagcttatcccaacatacagaatttgtttggcgagcttggtattgaagaccgtttgcaatggaaagaacactccatgatatttgccatgccgaacaagccaggagaattcagccggtttgatttcccagaaactttgccagcacctgtaaatggaatatgggccatactgagaaacaatgaaatgcttacctggccggagaaagtgaagtttgctattggacttctgccagcaatgcttggtggtcaaccttatgttgaagctcaagatggtttaacggtttcagagtggatgaaaaagcagggtgttcctgatcgagtgaatgatgaagtttttattgcaatgtccaaggcactcaatttcataaatcctgatgagctatccatgcagtgcattttgattgctttgaaccgatttcttcaggagaaacatggttccaaaatggcattcttggatggtaatccacctgaaaggctgtgcatgcctattgttaatcacattcggtctaggggtggtgaagtccgcctgaattctcgtcttaaaaagattgagttgaatcctgatggaactgttaaacacttcacacttaccgacggaactcaaataactggagatgcatatgtctgtgcggcaccagttgatatcttcaagcttcttgtaccgcaagagtggagtgaaatttcttatttcaagaagctggagaagttggtaggagttcctgttatcaatgttcatatatggtttgacagaaaactgaaaaacacatatgaccaccttcttttcagcaggagtccacttttaagtgtctatgcagacatgtcagtaacctgcaaggaatactatgatccaaaccgttcaatgctggagttggtctttgctcctgcagaggagtgggttggtcggagtgacactgaaatcatcgatgcgactatggaagagctagccaagttgtttcctgatgaaatcgctgccgatcagagtaaagcaaagattcttaagtatcatgtcgtgaagacaccgagatctgtttacaaaactgtcccaaactgtgaaccttgccgacctctccaaaggtcaccgatcgaagggttctatctggctggcgattacacaaagcagaaatacttggcttccatggaaggtgcagtattatctgggaagctttgcgcccagtctatagtgcaggattatagcaggctctccctcaggagtcagaaaagcctacaatctgaagaagttccggtcgcatcttagttgtagttgaggctcccacttggggtgccatcttatcacctatttcatgggaacccaccaactggtcatggtgaaggcacctgttatggtcctttgacaattccctagagttgaatttgtgacactagttggtatatcatattgggaaaaagtgacattatgtaaaacgacctgcatagcaattgttagaccctttggaaaaggaaaagcgaaaaagagatctaaagaaataactaacaaaggtaaagaaaaaaaaannnnnnnnnnnnnnnnnnnnnnnnnnnnnnnnnnnnnnnnnnnnnnnnnnnnnnnnnnnnnnnnnnnnnnnnnnnnnnnnnnnn

SEQ ID NO: 45820 - DNA, 293 bp, Setaria italica
  Peptide Sequence Number=SeqID_111794
tttttttttgttcaaacacccagtctattcagatagcaaattcttcagacagcaaacttatcccgccagaaaagcgagttctagacaagcttatacaaccatgagagctgggctcatttacggtcggtagtcaactacggaggagtcatcagtcatcacttcgccggatcacggcgcagttgctgacatatatcgttcgcgagtctcttcagcgtagcggtcgacgacccgccgtccccgacggcgttccggcacgccgccttcatctcggcggccttctcctcaccctaacc

SEQ ID NO: 45821 - DNA, 448 bp, Setaria italica
  Peptide Sequence Number=SeqID_111795
ccgacacacacacacacacacacacacacacacacacacaatgctgttaatttatactacgtgcatacacgacagccggcacaagcgccacgtcggcagctcgaccgttcgcctggctctccatggatcaggcgcccagcctggcgtccatctcgaggacggtgctgaggttcatggggctgacgtagtcgagagacccgctcatgaactggctgacgatgatccggttggcgcgctccgtggggtggtaggggtcccagaacacgtagcgcccccggtcggcgcacaggttggacgccgccgtgcacaggcccagcccattgtggggaccctgcccgcagcacgcctccgtggccgtcgcgaacccgtacgccgccgggtcgctgacgaagtcgaagtggacgcggaacgcgttcgccgcgacgaaggtccccgcgccgaactaact

SEQ ID NO: 45822 - DNA, 802 bp, Setaria italica
  Peptide Sequence Number=SeqID_111796
cccaattcatcaaagccagtcgggaaaaaagtttcagtgggaggacagtttactacggttaagagaaattctaacatctgtctcaatacaggttcaaatatccgtacaacccttcctgttgtaacactacactgcatttaagtctcagttgatcacactcagaacattggagtactatcttgttccttgaaccatttacactgctgcaccaggatcactgataacacccaaaaagtcatcttttattgtgccaatgcaaaaaatttctgttgcatcaacacgagtaccaataatcttcagccgcacctcactctccttctgaatttttacctgaaaagacaaacaagaaactcacaacgagcacaggaaaatgacaacaaatagctttgaacagaaaattcatcttacagcaatagctcaataatcacacctactctttattaaaataaaaatatcttcataattcattaatgcaagtatgaattgatgtaccatcaaagaaaaattacaagaaattttatttcgaagacagcacttacaacacttgatactcaagagtaaacaattatcatataagagaacaactatccaacaaatatccatcagaaaaatattctccacttactgcgaacttgatgaacctaaaaatcataacttgccagcagtggttacagatgatgagaagactcataactactacttttaggacagaagcataccgatccatcagaagttgtgtagtttggcacatcacccgattggaactccatatcgtcaggaatcaaatgattcgacacaaaaa

SEQ ID NO: 45823 - DNA, 908 bp, Setaria italica
  Peptide Sequence Number=SeqID_111797
ttttgaccaaagttatgataattggcaagatatttgaagatacaaatgcctcagaacaatgacgtgatttgcaacaagcaagatgtgaatcccaattcatcaaagccagtcgggaaaaaagtttcagtggggaggacagtttactacggttaagagaaattctaacatctgtctcaatacaggttcaaatatccgtacaacccttcctgttgtaacactacactgcatttaagtctcagttgatcacactcagaacattggagtactatcttgttccttgaaccatttacactgctgcaccaggatcactgataacacccaaaaagtcatcttttattgtgccaatgcaaaaaatttctgttgcatcaacacgagtaccaataatcttcagccgcacctcactctccttctgaatttttaccgatccatcagaagttgtgtagtttggcacatcacccgattggaactccatatcgtcaggaatcaaatgattcgacacaaaaatctgcaccggcccagcctctgcgaagaagcccatcttattgaccatggtgacgacggcctcgaggatctcacccttgaagggcctgaagacgacgcactggtacttgacggggaaggtgacgtagccggtgccctcccggatgagccccttgccgatgtcctccacccccgtgatcgccaccacaaacccgtggcgcccgctgcacgtgccctcgacgtccttgatgagcttggagacgagcttgtcccggaggtgcggcccgaagtgccgcgggtggagctgcatgttccgctccagcacgatgtggaagaacatcttgctccgctcccctcgacggcggccggcggcggcgagacgagtcgaggcaaagcgagtcttttctgaattgcctagaaatagacca

SEQ ID NO: 45824 - DNA, 777 bp, Setaria italica
  misc_feature (751)..(777): n is a, c, g, or t
  Peptide Sequence Number=SeqID_111798
cgttggcatccctgcctgccaaaaatctgaggaccacgtcttctctgattcttcacctgaacaaaatcacagccgccgcagacgacgcacggcgaggggaggcgagccgcgagcgggatggcgcggagcgtgtcgtacgtgtcggcggcgaagctggtgtctatggcgcgcggcaatccccgcgtcgccatcatcgacgtcagggacgaggagaggagctaccaggcgcacatcgcggggtcgcaccacttcgccagcggcagcttcgcggcgcggatgccggagctggtgcaggccgccagcggcaaggacaccctcgtcttccactgcgctctcagccaggtgcgaggtcccacatgtgctcggatgttctttgactatctatcggagaccaaggaggattcagagataaagaacatcatggtactggagctcgggtttaacggatgggaggtttcagggcagcctgtttgccgctgcaccgacgctccttgcaaagggacgtgctcatgaacacacgagttccatgtcaggccttcacaatcaacgatcagcatggtctccgtttctgctctcgctcacatcgcctcgttacacgagagttcattgggttaactggcaatgctattttgtggaaacttcgttgcataactaccactttactgtcagatacaaacactccacggtactgattcatttcagattggctgcaaagatgatactgttattatgttaaaaaaaaaaaaaaaannnnnnnnnnnnnnnnnnnnnnnnnnn

SEQ ID NO: 45825 - DNA, 318 bp, Setaria italica
  Peptide Sequence Number=SeqID_111799
cgggcttccggcttgccgcagccggaacaatcactcaatcagatgcagatgcttctctcccccagccccccacccgccgccgcccacctccccgccgccgcgcccgcctggacgcagccgcttcgcgcgcgccggctggccggtgttcctcaagcctccgcctccgctgaatttccaggattcgttccagacggcgtccagatgccacccggaaggcgccgccgccggagtgtggccggcatcgaccaggacgagctcctcgacccggaggccctcgccgacccggacagcagcttcttcgaaatcaacggcgtcagg

SEQ ID NO: 45826 - DNA, 466 bp, Setaria italica
  Peptide Sequence Number=SeqID_111800
gcaaaaggaatagacaggagcaaccgtagcctggagctgccgccacgaagatacagcattccggtaggatgatactgaatgagtacacgttgtctcaacatctggagctgtactgttgcaaagcggtcaggcttgaagacatgattggaggggcttgcttccattgtcaccaggcatcatattattaaacatggactcctatttggcagcttctaggtgaagaaacttcagcaacagcagagacacaggatatccagagagctaacttgtctcttcagggatgtgcatgccaaagccacgtttcattttttcaattctataagaaagtagaaaagggccatgcgtttactgtcaagcaacttacgtgggagcaagctttccaagaccacgtaacttcatgccagtcgtatcgtcaaccacagttcctgatatctcaacagaatatgactttccagatatacgagga

SEQ ID NO: 45827 - DNA, 1615 bp, Setaria italica
  Peptide Sequence Number=SeqID_111801
aaatctccctcttcacagagttgcgtaaaatatttacatatagatacactctattgcaagcgaattgcaccactgtaccacaaactcataacagtaacaaccaccgattgctacccatggtgtggcaacttgcaccaacaacacaagcaactgcaaaatgtacagaaacaggaggaactctcgcaaaaggaatagacaggagcaaccgtagcctggagctgccgccacgaagatacagcattccggtaggatgatactgaatgagtacacgttgtctcaacatctggagctgtactgttgcaaagcggtcaggcttgaagacatgattggaggggcttgcttccattgtcaccaggcatcatattattaaacatggactcctatttggcagcttctaggtgaagaaacttcagcaacagcagagacacaggatatccagagagctaacttgtctcttcagggatgtgcatgccaaagccacgtttcattttttcaattgtgggagcaagctttccaagaccacgtaacttcatgccagtcgtatcgtcaaccacagttcctgatatctcaacagaatatgactttccagatatacgagggagccccctccctacaagcaaatcaaaatctttctggtggagctctctgccatttacaaaaactccagtattcccaccagcacagttcttgggcatcggatagttgaattctttaataaatggagggataatgcctctacattcttgaccaaagacaccccaaaatccagcacggtagtcgtaccaatatgaaccagggccaacaggaccagctttcttctctgctttccggagagctcgttcagagattggatgaccattgattgaaaccttagcactgtctgcagactggttgaataaagaaaggtccttgaaacctttcttcaggaaaccagtaaaaaaggatgaatccccattcttaccaatggaagactgcatctcatctacctcggcctcagatgaaacacgagaacttgagtttgtgcactcattaactaatgagttattcttggctggcgtatcgccatttatattatctgagtgcagcagtttaccagagtcacccttgatgttctcttgttcatatctcttagttatgctctcaacttcaagagtattgctgtcatcctttttgttgcatttttcatatctcttactaatgctttgaactctgaagctaccattacgttcgtactttatgctcataccttcatcttcaaggctgctggtaacagcattactggtcttttgtttgtatttgttacccacaattctgtcttcaggactgccaacattaccatgtttaccttttagttcatgtgttcttcggttactacattcatctccaagcacacccctatggccttctttactcttctctgtacatttcctaccaagactttcatcgccaccattggcttcataatctgctttgttatttatgtcatattcctttcttctgatttgatccccaccactataatctttccgttgactggagaatggatcaatttgtttgtcctctaaaaattggaccttgtggactgcctgtatctccttgacataatatgtccttc

SEQ ID NO: 45828 - DNA, 614 bp, Setaria italica
  Peptide Sequence Number=SeqID_111802
gttcttttcttagtgtaaactgcaattatccttagcttctcctagtatcgacctttatgcttgtgagttgtggttttataaacttctaactggcacttggttcaaagcttgcattgctattatgtactcatttctaaataagattttgggagctaaaactaattagcagtctggttctcttttcctgaaccaagattcacaatcatattcttgttaacataatttatgaaagtttggagtccctgtaacattgaatgtaattgacggttcctgtccatagaaagttgacttgaacattaagtgaactgcatgagtctaatttgagaatatgctggttatgtttgaagcttaattaactggaagtgcgctccaaataatttgtcttttgttgttagggatcacattcaccatattgtgttatgcctgtagatgtaaatttgttgcagttgtctttgtgatatccaaagctttcattctatttctgattagatttacttctctagtagtgttttatataatttcatacgttcaaaaaactaacagtgtttttgtctcttctatgagatgcactaccttgcatcatttcacatccctacaggtttagtgttatctga

SEQ ID NO: 45829 - DNA, 287 bp, Setaria italica
  Peptide Sequence Number=SeqID_111803
ctcagacgcttcctgtgtctgagatctagtgacgaagacgcaccatcagattccaataaccataagcatcacaagagccgctccttggaggagtcatctgatgaaagagctgcggatgaatcagagaagatgagaaatggcaaaaggtctcacaagaacagccaccaccatcactgtcaccatcggcaccaccatcatgaacgcagaactactactgcgttcatgatggaggcacttcagtctgcgctgtcaccttcaagggctttctggtcgtcgttaggttctgc

SEQ ID NO: 45830 - DNA, 312 bp, Setaria italica
  Peptide Sequence Number=SeqID_111804
tcctcgagtcgaggcggcgacgacctgcacgcgcgcgcgcgacagcagcagctccgcctccgcctgcgcttccccgatccggtgaattgtggtctaagcaaaagaaaagggaagggtctttctctggactaggaattttggacgacaaggtttagtgttatctgatttttcgggatggatgccaagaagttcctgcagctggtcgaagagaagaaaaagaggatcctcgagaagaaagaagcaccactgaaatgggagcagaaactggaagcagcagctaaagcaaaggctgatgcagaagccaaggcgaag

SEQ ID NO: 45831 - DNA, 342 bp, Setaria italica
  Peptide Sequence Number=SeqID_111805
ggatagattatttaatgaaaaataatttcccatctctcatgaacattctatcgaacacctgctgggcaggttagtattcatccatcttggcagagcattttcacgaacagggaggcggtgattagattacttactgatctaacaaagcaagcaaatgagagatgagaggaagtagaattaatgttgtgtcgctggtagattgcgacattcgagaacagcaagatgctgttgatgcagggctggcatcatgctcgagttggatagaagaggtacctcaggtcccaagacggtgagaggggcacagggatcggcgtgcggcggcggcgcactgcgcaaagctgg

SEQ ID NO: 45832 - DNA, 506 bp, Setaria italica
  Peptide Sequence Number=SeqID_111806
aaatttgccagaagaaataaattgattttccagcattgaaagttctgtgctatactttttttatataataatgggtcgtactgctatgtctacggtgttaagtagttctatttgcctccactgtatggtgcaagacatggtttttaaggtgttgcctaggcaatgaggtggactgggatctccttacggcatgctgccaccccgttgctttacgcacatgctattgccagcttgtttctgttgctgccctctcctgccctctcctgctttattccactgttgttcgcttgggtgttggccactgttgcctgccttatccgattgttgggagggcccatgaggctgctgcagtcgattggagtggaaggggctgcattttccttgtttgttgaatatgtgtgcaaggcgtgggtcacttcatgccttgggcacccagacggtgaggcataccgtggtcgccacagctcgttttaccgccttgtgaaccatggtgcaaggatttaagg

SEQ ID NO: 45833 - DNA, 271 bp, Setaria italica
  Peptide Sequence Number=SeqID_111807
cggcgatgttgttgggccccaggatgtcgagcatggactgcgggtagcccgggacgaagccggcgccctcgctggccagcgtccggcggttcagctccgggtccatgcacaccaccgtggggcaccctaggatatgcgtccggaagaggctcccgtacctgagcctcctggccttcatgaagctgggcccctgcttgaggaactcggtggtctcgccgaaaagcggccaccccattgtgcccggcggcaggccccggcggcggctgtaccg

SEQ ID NO: 45834 - DNA, 346 bp, Setaria italica
  Peptide Sequence Number=SeqID_111808
catcaaattaaagatagataatgaacaatatgttcaacaaagtagacgtctaatctgttgcagaaacacattccatgttacaacatgtgcggactaagaagtttagagccattaagtcacgagcaccaaaaattaggaaaaatgaactaatggaggaaacgagaagcatactgaggttgcagctggtttattgaggacaacgtagtcatcagcaactgctattacccttgatttccaatcaatttcataacacctcggaaaccggtttgggggtgcacatgaaccctcagatatgtgccggcctcaagaagctgggttgggatccgtcaccctaaatgtcttctgt

SEQ ID NO: 45835 - DNA, 1072 bp, Setaria italica
  misc_feature (1)..(15): n is a, c, g, or t
  misc_feature (107)..(107): n is a, c, g, or t
  Peptide Sequence Number=SeqID_111809
nnnnnnnnnnnnnnngagctgctgtatatttaactcaactaaacattccctgaacattttcggcgtgttaggttttctgttgctgtggccaaccatccctcccaatntcccatgatgcctcaatgagtcccaccccaggcatgtaggcatatgccatcgtttatcagtaaatttggacatctgtttctcttttgttacttcaaagaatacatggttgatattcccatataccatttttttatcataccaggtcagactccactgaatcctgccgccaccacggaacccctgccttatagctgtggtgttcaccttcatgatcccatgagatttctgatgcttgcaggccaattacggattttggttccttgccgtgggcagcaatccatgcttcaacggcagcttctttctcctcttcactattgtaactcagcctctcccttctgaatgggtttatgcttggattagccttcgctgccattgcggcagtcatgtatgcagaatcccctataattggagtgcctatggcagcaagctgtgcccttatctgatgagttttccctgtcaagagattgattttacattcataggcagcttcttgctggggccatccacagtcgtttacattgtaagctttcctggtcaaagaacttggccatggtaccttcttacaatcaagcacctccatttgacagagataccattttgcaatatgatcttctgaaactaatctaggagcgcgattaacaggacgcatataatgggtaattgttcctgtagacacaggtgctgtagtaagcgcaagatacacttttttgacctgtttttcccttatcagtccatggaaaactgagcagaactctttagttttagacagtactacacagccttcagagcagttgtcaatttggtgagtcgtcattaacggtgtttccaaccctaatgcacgtgaagtaaacacagcacaggattcctcaatgttatcagttgctcctcccactgaggttgcagctggtttattgaggacaacgtagtcatcagcaactgctattacccttgatttccaatctaa

SEQ ID NO: 45836 - DNA, 488 bp, Setaria italica
  Peptide Sequence Number=SeqID_111810
accagggtttttatttactaaattacttgcatttgtgacgcgaatgagagttgcagggcggggacgaacgattctaccagacctgcgtttcgcgtcagcttttgatggacgtggctcggctcgagtggcgcgggtccgctctggacctccggtggtacgaggcgctgcggctcggcacgactctctctagttccacgtcatccgtcaaaacaattttactccaatcaaaaccgtgtccacatctgaatagaagataggagtaaaatggactttttcctaaatcaaaagttacatcacacgatcgtctccgcatggtagagcctcctcgggataaatattttcatgaggctaatcctgagagcggacaaattcatcgtttaaaagaatatattttcacattgaaggtctcaaattcaggatcctttatcgaacggatttccaagatgaagcaaagtcataggcacaatggttcacaagcaggtcagctt

SEQ ID NO: 45837 - DNA, 518 bp, Setaria italica
  Peptide Sequence Number=SeqID_111811
aggaagcagcgtcgatacaaatttgaactgttccagacaatgcagaattagactccactgccattatgacatcaacattgataggatgaagattactagactgtagaagatgtgcacaccttgtgttgcttgtacttgtctcgaattgccattaatgatgaacacttcctgttgagctgcaagtcatgtatggctatgatgcaatccttgagttcagagggatagttgagaactattgccaatgagatgcttctcagcgaagtaggtgctgaaagctatttatgtgttgctggttctttaggagttgctgctgagtcgctagtagtgagaccaggcattcttttgctttgtgaattgtattttttttgtatcatattttaggatgagttgccttggtctgttgccacaaatttgtaatgtttgaataataattaggactaccttaaccaaataactaaggaaaataaactaaagaaaattaaagaaaatttaaacaaaagtaaaaacaaaaaaaaaaa

SEQ ID NO: 45838 - DNA, 1069 bp, Setaria italica
  Peptide Sequence Number=SeqID_111812
ttagtaattgtccttggttcttctacttacttagtcgtaactcagcagcaactcctaaagaaccagcaacacataaatagctttcagcacctacttcgctgagaagcatctcattggcaatagttctcaactatccctaagagctcaaggagagctcagattgttagccttacagtggtgtgggtccaagaccagctactcagctaagtcttcaagatatgaagcagggatcacaacaggaggaagcagcgtcgatacaaatttgaacttgtgttgcttgtacttgtctcgaattgccattaatgatgaacacttcctgttgagctgcaagtcatgtatggctatgatgcaatccttgagttcagaggccttgtagcctgtcaccttctgcaacttcttgttccaaggattgacatctggatcaatggtcagcctagcaacaaacataactgaagcagcaactactgatggcaagaaacggagacagccatagtccagcagactcagctcagcaaggtaactccccaagaactccattaacaagatggagcgcttcttgtcttcatgggcagatctcgtgaaccgcctcaggaaggtcttgattgtaggattgcccaactcgaactggagcagcttgagtatgtcgctctccatcttgacgagctcctgcttggtgtaggtgttgtctgtgatgtagcagaagtcctctgcatgaggcggactgatctcttcgtacttcgctgcaatgagcatggcggcgacgccaaggagctgcagcctgtcacggctgagcgcattggcggagaggaagcggtcgacgtaggagatggcgaggtagagcgtgtcagccacgagcttatactcctcggcgacctcgacgagccagtcgacgaggatggtccgcatgttggccgtgacgtccgactgcaccgcctcgatgtagtcggatctcggccgccgccgcggctccacctccagggcgcggaggtaggtgtagatatcggaggcgtaggacccgcagagctgcgggtcggcgggcgccgccacggcggcgcgcggcggggaggag

SEQ ID NO: 45839 - DNA, 245 bp, Setaria italica
  Peptide Sequence Number=SeqID_111813
ggtctcggggctcaaaatccaacatagccattgcggctcaaggatttctcgattcttgctgcctccttggcctccttggggcggcatttccggtccagaccgctcttttacggagttgtgtgcttgcgccgagggcggcgctctctgccggaggagatgagggcctgccatgtctgttccgttctcgcgcagctcatgctgctgtggctgggcgtcgccgccgcgcagaaggccacttcttggaa

SEQ ID NO: 45840 - DNA, 353 bp, Setaria italica
  Peptide Sequence Number=SeqID_111814
actggaaaacggttttaatggaagtacaaggtacttgatgcaaataaccgttctcatgaatcacgatttggacataaatacttctatatacatattgttggtgaaatcaaaataactgtcacataccaaaataataactttattttggcatggagtacttttccagagaggcaaagacatgcaggccaactaaaaattagaagacagcatactctgtgccttatttattgaagaatatgagatgaaaattcgtagcttcttttacgattcatgtacaaaataccagttcatttgctgctaccattcagataataaatgcttcagcttgtcaatgctacagtatctacttaaat

SEQ ID NO: 45841 - DNA, 278 bp, Setaria italica
  Peptide Sequence Number=SeqID_111815
ccatagtatccaccacgggaacggccaccacctcggtaaccacgggcgccaccacggtacggctgccgatgccttggaaactcaccaaacgtctgcacagcaataacaatgagtaaagcagtaacagaagaagctcaagggtattggtggcttctgtacctctgtgtcaactctccgcctttctgaaaatctgccccttccgtttggtcctcctccacgtccaaatgttccgctggagagggaatcaaaaaagtcgtccttgacataaacaggcttga

SEQ ID NO: 45842 - DNA, 514 bp, Setaria italica
  Peptide Sequence Number=SeqID_111816
tgagcttgggtacgtggttaagctcgtcaacaatggcattgaggaggacgtggaaatgattcttgcagaaacaagaggtgatgcgaccatcaattctctaactgtttcggctaatcctgcaaagaagtgcaatgatgcaagtagtttacaaggtaatacttcgttaattatccccactcgggttggctcattctcttttgacgtcaaacatgatatgaagaagagaatcaaatatagctgctgctatggcactgccgtgcaaggtttttattggagctaattttcgcaaggaagaaaagccaagaattggggtacagattggctccaacatgatttatattagcaagcatgatctatgaaggttagagttgggtaaggaggtttggccaggaagtttcaacaaagcggagaggacatggccccccttttcgatagagctcctttacggtggacaatactaccctatactactgttcgaaaaggactcgtatggaaggatccaacggttgagatt

SEQ ID NO: 45843 - DNA, 349 bp, Setaria italica
  Peptide Sequence Number=SeqID_111817
gcggagaaggtggaaggggaagaactccttacggaaccccggcgaccgccagatctgcacgaccttcccgacggccacggcgatgagctggccgtcggggctgaagcggacggctgacggcgcgcccttaaaggagacgcggtggaggacggcgcggcggctgaggttggcgtagagcgcgcgaccgttatcatcggccgcgaggaggaagtcgcccgagggagagacggcgagacgggtgacgttggaggaggactcgaaggggagggtgagggaggaggaggcggcgaggtcggtggaggcgacgcggttgccgaccgcggagaggaggacggaggaatcgccggcg

SEQ ID NO: 45844 - DNA, 2073 bp, Setaria italica
  Peptide Sequence Number=SeqID_111818
gcaccgtggggataaacatcatgcctgttgggataaacactgtgcagctgcagtcactgctccagcaacctgatctcgagcggcaggtcgcggagctccggaaccaattcgataggaagactgtcttgcttggtgtggatgatatggatatattcaaggggattgatctgaagattcttgcatttgaacagatgctgaagacgcacccgaaatggcagggccgagcagtgttggtgcagattgcaaacccaaaaggcggcagcaggaaagatctggaagaactgcaggccgagattgaagtgagttgcaagaggatcaatgaacaatttggacggcctggatatagtcctgtcgtgcttgtcaataggacactgtcgagtgtcgagaggatggcttattacaccatcgcagagtgtgtcgttgtcactgcagtcagggatgggatgaaccttacaccttatgaatacatcgtgtgtaggcagggagctccaggtttggatggttctggggatgatagaccgaggggcaagagtatgcttgtcgtctcagaattcattggttgctcaccatcattgagtggagcaattcgggtaaacccctggaacatagagtcaacagcagaggcaatgaatgagtccattgctttatcagataatgagaagcaactgcgacatgagaagcattatcggtatgtcagctcacacgatgttgcctattggtctaagagctttattcatgatttcgagagaagctgtagggaccattttaggagaagatgctggggtgttggactaggatttggatttagagtggttgctcttgaccggaatttcaaaaagcttacagtggattctattgttgcggattacaagaagtcaaagagcagggtcatactactggactatgacggaactctaataccacaaactacaatgaacaagactccaaatgaaactgttgttagcatgatgaataccctgtgtgctgataagaagaatgttgtttttattgtaagtggaagaggaagggatagccttgaaaaatggttttacccttgcccagagcttggcattgctgctgaacatggctactttatgaggtggaccagagacgaacaatggcaaatacaaaatccgacctcagaatttggatggatgcatatggctgagccagtaatgaaactgtacacagaggcaactgatggttcatatattgaaaccaaagagagtgctttggtttggcatcaccaagacgctgaccctggttttggatcttcacaagcgaaagaaatgctagatcatttggaaagtgtccttgccaatgagccagtctctgtaaagagcggtcaacatattgtagaagttaaacctcaggcagtcagcaaaggatttgttgcagagaagatcctttcaactctcatggagaagggaaggcaagcagattttgttctctgcattggtgacgataggtcagatgaggatatgtttgaacagatttctgatatcatgaggaggagcatggttgatccccaaacctcgttgtatgcctgcacagtcggccaaaaaccaagcaaggctatttactatttggatgatgctaatgatgttctgaacatgcttgaggcacttgctgatgcatccgaggaggctggttctggttcaccggaagcaactgaggaagagggaccgttgacactggagcaagcatgatgagggcatcagatgtcgtggagacgtcggattgcttagctggtgcgaaactgccaccagcaagtcttctgactaaaactgaagccgatttagtttggcagagtgaaacattagcaatacccggatagttggatcatgtcaataacctagttgtttctctattttctgctttgttttccattttgccgtatggtagtgctagagtaattttcatgttatgtctagataggaaaaaaatgtgcctggagggaagaatccatggcagaatcctttgacttctttttgcttggtatcaggtacagtatggaagattggagtatttccgcgagtttatagaatataagctgaaattagtaggtgaccg

SEQ ID NO: 45845 - DNA, 339 bp, Setaria italica
  Peptide Sequence Number=SeqID_111819
gcaatatggataagaccaaaggccatggtacttcagtttcacttaccaatcaatatgctaccgttatctctcctattcctcttcctctcctgcccagcaccattggctggccaaaccttctgcggtaatcataatggtgccaggtacataccatacaacacctacaaatccaaactgatctcccatgctgaaacactgattgcccgcactgtagagatgcacttttagttgtcttctcaactacaactcattggacttatgcattgtatgtacagacaacacagctaatatcttggttggagttggagtgttcctaatggtaatatttatttcttgctt

SEQ ID NO: 45846 - DNA, 352 bp, Setaria italica
  Peptide Sequence Number=SeqID_111820
aaagagtaactgcacgatggggtaaactggattgtcccgaacgctcgtgtgatctagaaggcgccaacgacatcatgccaaatcgatgacgcaaacaagaaattcctctggaatatttacttcaatgaggatttttaaacaagctattgtatgagcctactaccagggagatgaggaaagagagttcagggctccataccgagttgctgacattgtagagcgaagagcgtctacctgattttctgtatccttgggcgctggtggtgttagtggtagtagagtatgttggattcgaatctggcgatgtttgtactttgtacagttttaccatggtaacagtaatcaaattttg

SEQ ID NO: 45847 - DNA, 478 bp, Setaria italica
  Peptide Sequence Number=SeqID_111821
ggggtgaatgatgatatgtgaattgtcggcagctggaggcttggatcggagccattcaaacgtggttgcgtttgatgtggcaaaggagaaaggtgtgttgttgccttgctggtaatgacatctcatctcattcagtcgttttatgtcaccagcacaggtacaactacagctacaaagtgacgggtctgtatccttgatcgattctcaactctgaagctggtgttttcagctgccagtacattgaatccaagcaccttctaggcagctacagcctacaaagaaaagaagatacatctctgaaaaattgtcaaattttataggctataactgctaaagtttatgcatagaatttcagataacacagaggtaaagttttatgcactctttagaatttcagataacactgttgggtgcttgtgatttttcatgctagcagtagcagccatggcgacaaaaactagaggacgcacaagcaacg

SEQ ID NO: 45848 - DNA, 331 bp, Setaria italica
  Peptide Sequence Number=SeqID_111822
attctggtgtccacccatcatgttcatgtacagttgactaatcaaaggggtgaaaagtttgtgatctggtcaaaaggataatgtactatgttggcctggagccctggaatttgtgacgtagctggatagtggtttgatggcgtgtggttccacctagttatttgccttgtaatagcaggtaaagcttaatatgtttaactgcatgtatcataaaatataaattgcggcggtagtttagagtacgataaaaactaagtttcattaacaatagcattgcacttctacgtatgttctcccatatttacggcgagatgtctagtctggttttttt

SEQ ID NO: 45849 - DNA, 1419 bp, Setaria italica
  misc_feature (1)..(25): n is a, c, g, or t
  misc_feature (1418)..(1418): n is a, c, g, or t
  Peptide Sequence Number=SeqID_111823
nnnnnnnnnnnnnnnnnnnnnnnnnttttttttttttttttgttaaagaaaggaatggtgctgatttcacattttagcaccagcaggagaccgagcaaaggacagacagcattccgtgtcgtctagttacaagaataggggcatacaatctgatctgattatgctaatctgacctaccacatcaaaattgggatcaattacaagaaccaggatgccaatggcaacgccacaagatgtcaaatgcagaacaggcgaatgcactggctggggcttcctaatcttcaagctccaacctctgcatccattcttttggctcaaagttgagccggcaatggatgagcaaaaacacctacgctaaagatccgtgtcagaaaaaagaaaacaccagccaagcaaactaaacctggctgggatagtgggatgccaatctttcactgcgctatctgtagttacagcaggatgcccggccgcggatcaacttatcccacaagcacagcatctgcctaggcgactgatagtgggcagtgtagtagttctccaggcaaccgtactggcagaacttccagctgtgggagtactggacaggcgtcgtggaattgaatttttcaacccatagacccatacttacatcttccatcttaaatagccttaaactctggttggcgtgctgagatacaatgaactttgctatgtcaccagagattacatagcccggtccatttgcataaggcgggtagatatcttcaggccattcctcatctgtaactgcccattttccggttctcaatggtctgtgcaagaggttaaggttccccatatacaacggtttgccaccgttgttcaacttgatgtgtctaagaaccacatctaccctaacaaatgtatcatcatcacatttcattatgtatgcagcagtcaagttctggaccccatactcacaaatagcaattgtcttcagaacaaccagctcataacgatctatgaatggcaaaatgacaatgtctccaaagtattctgcttctttcttcagcattacattgacctctttccttgaattcagtgcaacaaagaatcgagcaactgcttcagaagacttaatttctggagtctgcatccatgtttttctcacagccatgcgctcagcaaaatgattcgacgcagacaatattccaatgaaaagggaaacaggacgttttgggagtggccgagacctccacttttctgacatctcaaggacttgttgaagagaaaaactaggatgagacataggaagagcagtggcataaactgaatgtacatctacatctcccttaacaaataatcctgttgcttcttcaagagtgaaccctggtcgataaggaaaagatgtcacatgtcgaccgccgacgtaaatgtggaaaccttcaactccggccttnt

SEQ ID NO: 45850 - DNA, 457 bp, Setaria italica
  Peptide Sequence Number=SeqID_111824
gaatctgtcggcctattggacttggcccacttaactgtttccatcttgctaccaggactggttgcatggagatttgcagttaacagattaggctgtcacatggtacaccagactagtacttattagccattataactttttagacaactgcaattgatttttacataggctaaattgttctttgtaggtaaactaccacttttcaaagagctacgacaggttaatagcatgaagttagatagaggtcttacaaatcaggttcagatgttaagtaccattgaaaactttcacctagaggccaactggcacatgattatttgtgcacacttaatacatcagtgtaaactgcaaaaagaacaggctcagcagccaaatctaaacctcaaacatgacgcgtacattaaacgacacaagcactctgctatacaagattgcagctaaacaaaattcctgactt

SEQ ID NO: 45851 - DNA, 307 bp, Setaria italica
  misc_feature (302)..(302): n is a, c, g, or t
  Peptide Sequence Number=SeqID_111825
agggtgggtcttggcgatcccagcttcagcgcaagaatacccgaagtatcgtcgcaccgtgaggcggaatagtgcgaacgaaaggcagacgtccttcaagtggcagatcgctgggtcctcagcggacgactgtagaacgccattgccatggaggcagatcttgtgcaaggtgattagttcatcagaagctgtctggatgtggtcttgtctaggtcctgttggcaggctcacgtggaagggatgaacaaggtagttataccccccggatggtacgagggtcataatcatcgggagcgccctcngccgc

SEQ ID NO: 45852 - DNA, 527 bp, Setaria italica
  Peptide Sequence Number=SeqID_111826
aattcaagtcaggcatgccagtatgaagaatcaaaaattgcaaatttgcgggttcaaagaaagtgaaaactgacctgtcccatctcaacaagtgcaatttctttcaggcttattcactgaaatattagaaacccttttttcttcttaatgacttcgctcttcacttacttcatatccaactattgatagccggcctagtttcaaaggatacccagggcgctaagcatgaataggagacagtgaaaaacagcaatcagtataagaacgaaaacaaatagtagaaaggagttaacttgggtataggtttctagcttgggtgggaggactcactcactagggaggtagccgcaaaaataggaaacatagggagtagcagcaatagataataggaaaagtaggtgtaaagcagctaccgatagaagtctaacgaaagtaggaaagaggagtgacttgaggataacgaaaccactaatctaatatagataggatttcctatgcataagatttctgagtagtacttgaagctt

SEQ ID NO: 45853 - DNA, 176 bp, Setaria italica
  Peptide Sequence Number=SeqID_111827
taactggcaagactatcacccttgaggtggagtcctcagacacaatctgcatgccaccccgcagacggagcaccaggtgaagagtggactccttttggatgttgtaatcagcaagggtgcggccatcctcgagctgcttgccagcgaagatcaggcgctgctggtccgggggaatg

SEQ ID NO: 45854 - DNA, 1112 bp, Setaria italica
  misc_feature (1)..(61): n is a, c, g, or t
  Peptide Sequence Number=SeqID_111828
nnnnnnnnnnnnnnnnnnnnnnnnnnnnnnnnnnnnnnnnnnnnnnnnnnnnnnnnnnnnnccttttacttactcaaacattcacataaagatgtaatccagaacatgaacaaccagattgccacacaaggttcagggttcacttatttattcatcacggttcaaccaagctgctgcacagcagcaaacgttcagaaacactgccacacgacatacgactcggacaggcaaaagacacccgtgactcgaccaggacacagaccacaggacacgcagacaatctccatcagagtaaaagccagacttgtgaacccagggacgacagcagctccatggccctcagaacttactggccaccccggaggcggagcaccaggtggagggtggactccttctggatgttgtagtccgccagggtgcggccatcctccagctgcttgccagcaaagatgagtcgctgctggtctggggggatgccctccttgtcctggatcttcgccttcacattgtcgattgtgtctgaggactccacctcaagggtgatagtcttgccagtgagagtcttcacaaaaatctgcatgccaccccgcagacggagcaccaggtgaagagtggactccttttggatgttgtaatcagcaagggtgcggccatcctcgagctgcttgccagcgaagatcaggcgctgctggtccgggggaatgccctccttgtcctggatcttggccttcacgttgtcgatcgtgtctgaggactcgacctcaagagtgatggtcttgccggtgagggtcttgacgaagatctgcattccacccctgagcctgagcacaaggtggagggtcgactccttgctgatgttgtagtcagcaagggtgcggccatcctccagctgcttgccagcgaagatcaggcgctgctggtccgggggaatgccctccttgtcctggatcttggccttcacgttgtcgatcgtgtccgaggactcgacctcaagagtgatggtcttgccggtgagggtcttgacgaagatctgcattcccacccctgagcctgagcacaaggtggagggtcgactccttctggatgttgtagtcagcgaagggtgcggccat

SEQ ID NO: 45855 - DNA, 355 bp, Setaria italica
  Peptide Sequence Number=SeqID_111829
ggatcaagtaggtttaggttcactctgaaatccgtgttatcttgtggtggcgtatgtcctttttctatacactagtatggaggcggtcgggatgcggagggttggtgcgaggtgttcaaccgtcgcaactcgaagctccggcctcgcccgcagcggcgtccacgacggtcttagagcgaagtgttttaactgcttctccacaatgaatcgaagtgttttaactgctgctccacagtgcttgacttaggtaagtatattggtgttgtctaatagaaggtcttatgcattcacatgtaactttgagatgacttaacaaataacttttagatgacttaacaaaaaaaaaaaaaacaaa

SEQ ID NO: 45856 - DNA, 343 bp, Setaria italica
  Peptide Sequence Number=SeqID_111830
gtcgtcccccccgccgtgctctccgcctgcggcctctgtatcccgcaaccaaaaactaccaaaaaaaattttaaagtaaataccccaaactaccgcgagatctatcagtatcgagcgacttaccaatccgattgctagggtttagatccgattttttcgtaaaaaaatactgaaaaaaaagtttaggtcgaggggtgtaggaggcgatggcggcgcaagtggcggcggcggtggtggcgaacgggagcgcgggcgctgtccccgcggtggtgtcgccgggggcggtcggcgtcggggtcggcgtggcgcagccgctcccgaccacgtcgctctacgtcggcga

SEQ ID NO: 45857 - DNA, 182 bp, Setaria italica
  Peptide Sequence Number=SeqID_111831
ataaacaatggtattgatgtaagccagcctctccagaagcttcaaccgcccgctgtgggtacgaggacaaaactgaatggggcaaagagattggcttacatcaataccattgtttatccaatcacatccattccacttatcgcctattgtgtgcttcctgctgtttgtaaggagacaaatag

SEQ ID NO: 45858 - DNA, 416 bp, Setaria italica
  Peptide Sequence Number=SeqID_111832
tgtagccctaggttcaatgttgtgtttcttgcaaaagggaacccatttcctagcgaactctgcagtttctgatagtgcttcaaaagttaacatagctgaaccatcatcagaaacatagcatgatactttgtcaacagggtaatccacggcaagaatggacaggacagtgttggcagtaattagaggaggttccttaagtgggtccacagtactgacaaagacatcaattggagccaactgcgatggctcaccctctctatcatatctgcaaagttgaatcagaaatctcagtgtgaaacataagggcacctaaagataataagtgatgcattaccaacatcctgtagaaaaacatcaaagtgcaacttgcctcaatgcaagtctatccaggtaagtttcacggttgataggatacc

SEQ ID NO: 45859 - DNA, 465 bp, Setaria italica
  Peptide Sequence Number=SeqID_111833
aaggttaggaattttagtcttttaaggtaatctattttttgagcaaagtaaaattctggagctcttggttcaatgttgtgctttttgcagaagggaacccactttctagcaaattctgcagtttctgagagagactcaaaagtcaacatagctgaaccatcatcagaaacatagcatgacactttgtcaacaggataatccacagcaagaatggacaaaacagtattggctgtgatcaatggaggttccttcagtggatccactgtactgacaaagacatcaatgtttctgatgatggttcagctatgttgacttttgagtctctatcagaaactgcggaatttgctaggaagtgggttcccttctgcaaaaagcacaacattgaaccgagagctccagaattttactcgctcaaaaaatgactacctaaaggacaaaatccaaccttcatttgttaaagaaagg

SEQ ID NO: 45860 - DNA, 779 bp, Setaria italica
  Peptide Sequence Number=SeqID_111834
cctcctcaggtatttacacgaggggtagatcttgattgagacttttcgacgaaggggtctcatagtcctgatcagcagttcacgccgcattgccccaaagcaacggctttctgtgttggggagatgaaagggtcaatcttcacccacagcagggagaagatagacgcaaggaggatggaccagacaatgacgatggttggcgtgcggttctgcctgcccatgagacccttgaggaaagggtagagatggaggatcacccagattgagaagaacagctttccaaaaaagcggacccccaggattggtagccactgttaatagcatatgaaattcctgccaccattccgaccaggttaatgacaagcacagtggttggtgggatgagcaaactggtccacttgaacacatatagctcagcaaagtcgccatcctcatcagatgcctttgaggtaactgtgaagttggtatcaatcccggccagcactttcagcagaccctggaacaccgcgaagagatgggcagaggtgccaccaataacccaaaactgctcatttctccaccaatcttcaatgccaacaccactccatctaagctccaatataccagtggcaaaaatggaggcaaaaaggagaatgaagaacatcccagcataattactaatctcaggaatgataaatttgtttgtaaggagacaaatagcaggaagcacacaataggcgataagtggaatggagaggctggcttacatcaataccattgtttatccaatcacatccatt

SEQ ID NO: 45861 - DNA, 291 bp, Setaria italica
  Peptide Sequence Number=SeqID_111835
gtctgcagcaggcgccactgaagaagctaataaacaggggcataatttagatgcaatccttcttcatctacaacaaaaattcccatctagcctcctcaggtatttacacgaggggatagatcttgattgagcctcttcgaagaggggtctcatggtcctgatcagcagttcaccccacattgccccaaagcaacggctttctgcgtcggggagataaaagggtcgatcttcacccacaacagggagaagatagacgccaggaggatggaccagacaactagtgcgactgag

SEQ ID NO: 45862 - DNA, 3758 bp, Setaria italica
  Peptide Sequence Number=SeqID_111836
ggaatcttgcacgacttcagcaaacaggatgcatatactacagagattacagagtacacagtacagagatacactctacgcagttacagagttctcgactggacaatatagtttagcagtcaaagtacctaaatagcatcacaggagcccacagggagaacgtagtaacggagttctcgccaggcaaatgttggtaccactactaagcaacaaacaagtaacacgacataagtttacagtttttatgatgcccactgcagtagagtcaccgaataagctagggataacttggacgacgcatcttcatctccatctaccacaaaatcttgcctagcttcctcaggtatttacacgaagtggggcagagctttgattggggctgtgccatgtttacagtccccagcgggcagttcagatcagatcagcagtttaccccgcattgccccccgagaaagagctttctgggtaggcgatatgaaaggatcgatcttcacccacagaagggagaagatggaggcgagcaggatggaccagacgatgacgatggttggtgtgcggttctgtttccccatgagacccttcagggaaagggtagagatggaggatcacccatattgagaagaaaagcttcccgaaaagcggaccccaggattggtagccactgttgatagcgtatgatactcctgctactatgcccaccaggttgatcacgagcacggtggttggggggattagaaggcttgtccacttgaacacatatagctcagaaaaatcaccctcttcgtcggtcgcctttgacgtaactgtgaagtttgtgtcaatccctgccaacacttttagtagaccttggaatacggcaaagagatgtgcagaggtgccaccaatgacccaaaactgctcatttctccaccagtcctcaataccgacaccactccatcgaagctccagaataccggtggcaaagatggaggcaaaaagcagaatgaagaacatcccagcataattgctaatctcaggaataatgaatttgttggtgagtagacagatagcaggaaggacgcagtaggctatgagtgggatggatgtgattgggtaaacaatggtgttgatatatgccagcctctccagaagctttagccttccattgtaaccataccagataggacagtgtctgctgagaagaatttcaactgaaccaagagcccaacgtaaaacttggttgagacgatcagaaaggttaattggagcagaacccttgaagcaaggtcggagtggcatgcagtagatggatatccaacctcttgcatgcatcttgaacccagttaaaatatcctcggtaacagagccatatatccatccgatctctttcccccattctgtcttgtcctcatatccacaactaatgacgtggatagcctcctttagcagggaagctgggtttgttgaaggtggtatgccaccttgagtcataaaggtggatgcaataaaaattggggactggccaaagcgtttctccaagctcttctgggacataagcagtgatctttcatcctcataaccttcaaatccctcttctatatcttccatgttgaagataggagctgaagattctgttctcttcatagcacggtttttggaatcaatatagctcttgtccttcctctttctgccaccacagcaacttttaatgataatgttaggctccagatcagcttctgtcaatacaggatcatagccgtacaaggcctgcctattgaaacagcatcctgttcccacataaactggtccttgaatgccatctaaacccttcatattaatatcaaagaagacaatgtttcggttcgcatatcgatcatgcaagtctataccatcaaatctttgcggaaactggacgtagcaagttttccttcctagtgctggatccatcatgaagcacatagcttctctaagagctttgctgctattgaagtagtgatcacaatccacattaagaagataagcaccatttgtcagcacagctgatacacgaatcaaagcattcatggcaccagccttcttgtgatgctgaaagcctggcctcttttcacgagaaacataaacgagccgtggcaactcatttccatcagtgtcaaggccaccactgtgccccaagaatacctggatcattcctggatgatctcttgggttattcccaggccaaggagtgccatcagccatggtccagccctcttcaggtattttttgtgctttcgctacaagggcattgatccgtactttgaactcttcatactccctcttcatagcccgcctttctttgacaaaagaaggttgtatcttgtcctttaggtagtctatcttttgagcaaaataaaactctggagccctaggttcaatgttgtgtttcttgcaaaagggaacccatttcctagcgaactctgcagtttctgatagtgcttcaaaagttaacatagctgaaccatcatcagaaacatagcatgatactttgtcaacagggtaatccacggcaagaatggacaggacagtgttggcagtaattagaggaggttccttaagtgggtccacagtactgacaaagacatcaattggagccaactgcgatggctcaccctctctatcatatctcaatgcaagtctatccaggtaagtttcacggttgataggataccactttgggaactgatctagaagccaagacaaggcaaaccaaacttcacagataacagatacaagccataatccataagcatcccatactggatgagttatacgatactggaagaagaagcaaaggatgataaggcggagaacgatcactgttcggtaaaggttaagctcattaggagatataggcactatgcgacttagaggtagccgcgcatcatcagccatttgcagatcttcaccatttgatccagttccttcaatatccccttttccttccgctgcatacttatgagtcacctgtatcatatttttctcctgtttaactctccagctctcgactctttctttccagtcaacacttccaacaccgtaagaattcaagtccttcgaggggtccacaatcctcacaggtactggaatgcttggatcaacatagcttggagttgggctgcgaatagaatggcgatcgggagaagcatcagggatatctccagaaatctgctgcccacttgtcagacacggaatcctatgatgcggttcatgtcgagaagacgaagagatatcaacatcttcgccttgtccctgcagctgccattgaggacctttgccattgccttgcgtatagttgaattcgttatccaaatcatcaacttcatcctcctcgtcatctcccggaactcgagggctccctttgtgccgcttgtatctagtcttgcactgaggacagcactgattcccctccttgcgctcatattcatagcatggccgacaaaccggaaaggcgcattcgttgcaggcgacaaagacatcgcccgtagctgagagccccacggtgtcaccacagatttgacatatttgttcgttcgcatttttcaattgcttagccgtggcgccgccgtcgccgtcgtgccggatcgtgacgaccccgtcgcgggagccagccaccatccccctgttcgccgccatcgccgcgccaagcctcaccgcgccgccgccgccgcagcccgcctcccccctctcctgctcgctccttacgcagcacgcatcccggtggcggtgcgagtagacgacga

SEQ ID NO: 45863 - DNA, 3797 bp, Setaria italica
  Peptide Sequence Number=SeqID_111837
atttcccggcaccagaaacaagagagttgatcagaaaatcccttatatagttgtgctaagagattacagtgtttgctcacaaaccaaagaatgtatcagagtctttgcgtataaataactgtcatatactctctgtgaactgtgttcctcaaaacaaatgataatttactctaaaacaatcaacaccacgtataaattcacaatttacgctgtagcactggcaccgaataagctagtaaacaggggcataatttagacgcaatccatctttcatctacagcaaaaaatttcccatgtagcctcctcaggtatttacacgagggggtagatcttgattgagacttttcgacgaaggggtctcatagtcctgatcagcagttcacgccgcattgccccaaagcaacggctttctgtgttggggagatgaaagggtcaatcttcacccacagcagggagaagatagacgcaaggaggatggaccagacaatgacgatggttggcgtgcggttctgcctgcccatgagacccttgaggaaagggtagagatggaggatcacccagattgagaagaacagctttccaaaaagcggaccccaggattggtagccactgttaatagcatatgaaattcctgccaccattccgaccaggttaatgacaagcacagtggttggtgggatgagcaaactggtccacttgaacacatatagctcagcaaagtcgccatcctcatcagatgcctttgaggtaactgtgaagttggtatcaatcccggccagcactttcagcagaccctggaacaccgcgaagagatggggcagaggtgccaccaataacccaaaactgctcatttctccaccaatcttcaatgccaacaccactccatctaagctccaatataccagtggcaaaaatggaggcaaaaaggagaatgaagaacatcccagcataattactaatctcaggaatgataaatttgtttgtaaggagacaaatagcaggaagcacacaataggcgataagtggaatggatgtgattggataaacaatggtattgatgtaagccagcctctccagaagcttcaaccgcccgctgtagccataccagataggacaatgtctgctaagcagaatttcaactgacccaagagcccaacggagcacttgattaagacgatcggaaagattgattggtgcagaacccttgaaacaaggccgtggtggcatgcagtagattgactgccagcctcttgcgtgcatcttaaacccagtaagaatatcctccgtaactgaaccgtaaatccagccaatctctttgccccattcagttttgtcctcgtacccacagctgatgacatggatagcttcctttagtagagaagctgggtttgttgaaggtggtatgccaccttgagtcataaaggtggatgcaatgaaaattggagactggccaaagcgtttctccaatttcctctgggacataagcactgacctttcatcctcataaccttcaatgccctcttcgatgtcttccatgttgaagataggagctgaagattctgttcttttcataatacggctttggctatccatataactcttgttctttttcttccttctaccacagcagctcttaacaacaatgttaggttccagatcggcttcagtcaatacaggatcatagccgtacaaagcctgcctgttgaaacagcatcctgttcccacataaactggaccctggatgccatctagacctttcatgttgatatcaaagaaaactatgttgcgattagcatatcgatcgtgcaagtcaatgccatcaaatctttgtggaaactgtacataacaagttttccttcctagtgcaggatccatcatgaagcacattgcttctctaagagctttgctgctgttgaaataatggtcacaatccacattgagaagataggcaccatttgtaagcacagcagatacacgaatcagggcattcattgcaccagccttcttgtgatgctggaagcctggtctcttttcacgagaaacatagacaaggcggggtaactcatttccatcagtgtcaagcccaccactgtgccccaagaacacctgaatcattccagggtgatcccttgtattattcccaggccaagcagttccatcagccatggtccaaccctcttcaggcactttctgtgctttggcaacaagggcattgattcttactttgaattcttcgtactctctcttcattgctcgcctttctttaacaaatgaaggttggattttgtcctttaggtagtctattttttgagcgaagtaaaattctggagctctcggttcaatgttgtgctttttgcagaagggaacccacttcctagcaaattccgcagtttctgatagagactcaaaagtcaacatagctgaaccatcatcagaaacatagcatgacactttgtcaacaggataatccacagcaagaatggacaaaacagtattggctgtgatcaatggaggttccttcagtggatccactgtactgacaaagacatcaatgggagccagctgcgatggttctccctctctatcatacctcaatgcaagcctgtcaaggtatgtctcacggttgattggatgccattttgggaactgatcaagaagccaagacaaggcaaaccaaacctcacagataacagatactagccacaatccataagcatcacgcactggatgagtgacacgatactggaagaagaagcacaggatgataagacggagaatgatcactatccggtaaaggttgagctggtttgaggaaatcggcacaatacggctcagaggtagccgtgcatcatcaaccatttgcatatcttcaccatttgagccagttccctccatgtctcctcctctagcctctggatatttattagtcacttgcatcatatttttgtcctgtttaaccctccagctctcaactctttccttccagtcaacactattaagcccataggaattcaagtccttcgaggggtccacaatcctcacaggaactgggacgcttggatcaacatagcttgatgttggactgcggatagaatgacggtcaggggaagcatcagggatctctccagatatctgctgcccacttgtcaggcggggaatccgatgatgcggctcatggcgagcggatgaagacagatcagcgtcatctccttgaccatgcagctgccactctgggcctttcccattgccttgcttatagttgaattcattgtccaggtcatcaacatcttcctcctcctcatcaccgtgaactcgagggctacctttctgtctcctgtatctagtcttgcactgagggcagcactggttcccctccttgcgctcatactcgtagcaagggcggcagacagggaaggcgcactcattgcaggcaacaaagacatcgcctgtggctgaaacaccaacagtgtcaccacaaatctggcagacctgcccattcacactcttcgcgggcttagccgcggcgggcgcgtcgccctcgtggtggatcatgacgaactcgttgcgcttgtgcgagcccgccaccatccccttgttcgccgccatctccgccgctccctttcactccccgcccccaccgacaccgacgaggctggcggagaccgatcggcccgcaatgggcctctagatccgagcggcggcggcggccaccaccatgcccagatccctccccgcgctcgccgcaatgccgcagtggtggtgctgctgccgcctctgcttcctctccacaccttccc

SEQ ID NO: 45864 - DNA, 4138 bp, Setaria italica
  Peptide Sequence Number=SeqID_111838
agttaacaatgccaagagttaccagttgttgtatagagaaccctcagcttcagtttaataagaactaccatccacgagggcaacaaggctgcacaccgcagtgtgctggggcatacttcgaacagaaaacaagctagcgctctagcagcagttcaataactgtgctgccatctgattcctgaataccggagacaccacaagagattgatccctccatgtctttcaagcattacagagtgctatcacaatcagcaacatatattgttgccagcaggcagcagatcacggttctatattcccggactcgaaaaccaagagagttgatacaacagctgccttatacagttgtgctaagagattacagtgtttgctcacaaaccaaataatgtatcagtgtctctgcgtataaataatagcatcgccatatagtttgtgtgaataatgttccctcaaacaaatgataatttactctaattcaataaacaccacgtataacgaatgcaaaattcacaatttacactgctgcccggcaccacagggaagagggaggcttcacagtttgttgtctgcagcaggcgccactgaagaagctaataaacaggggcataatttagatgcaatccttcttcatctacaacaaaaaattcccatctagcctcctcaggtatttacacgaggggatagatcttgattgagcctcttcgaagaggggtctcatggtcctgatcagcagttcaccccacattgccccaaagcaacggctttctgcgtcggggagataaaagggtcgatcttcacccacaacagggagaagatagacgccaggaggatggaccagacaatgacaatggttggcgtgcggttctgcctgcccatgagacccttgaggaaggggtagagatggaggatcacccagattgagaagaacagctttccaaaaagcggaccccaggactggtagccactgttaatggcatacgaaattcctgccaccatcccaaccaggttaatgacaagcacagtggttggagggatgagcaaactggtccacttgaacacatatagctcagcaaagtcgccatcctcatcagatgcctttgaggtaactgtgaagttggtatcaatcccagccaacactttcagcagaccctggaacacggcgaagagatgggcagaggtaccaccaataacccaaaactgctcatttctccaccaatcttcaatgccaacaccactccatctgagctccaatataccagtagcaaaaatggaggcgaaaagaagaatgaagaacatcccagcataattactaatctcaggaatgataaatttattagtaaggagacagatagcaggaagcacgcaataggcgataagtggaatggatgtgattggataaacaatggtgttgatgtaagccagcctctccagaagcttcttcaaccgcccgctgtacccataccagataggacaatgtctgctaagcagaatttcaactgaaccaagagcccaacggagcacctgatttagacgatcggaaagattgataggtgcagaacccttgaaacaaggacgtggtggcatgcagtagattgactgccagcctcttgcgtgcattttaaacccagtaagaatatcctccgtaactgaaccatagatccagccaatctcttttccccattcagttttgtcctcgtacccacagctgatgacatggatagcttcctttagtagagaagctgggtttgttgaaggtggtatgccaccttgagtcataaaggtggatgcaatgaaaattggagactgaccaaagcgtttctccaatttcctctgggacataagcactgacctttcatcctcataaccttcaattccctcttcaatgtcttccatgttgaagatgggagctgaagattctgttctcttcataatacggctttggctatccatataactcttgttcttattcttccttctaccacagcagctcttaacaacaatgttaggttccagatcttcttcagtcaatacagggtcatagccatacaaagcctgcctattgaaacaacaccctgttcccacataaactggaccctggatgccatctagacctttcatgttgatatcaaagaaaactatgttgcgattagcgtatcgatcgtgcaagtcaatgccatcgaatctttgtggaaactgtacataacaagttttccttcctagtgcaggatccatcatgaagcacattgcttctctaagagctttgctgctgttgaaatagtggtcacaatccacgttaagaagataggcaccatttgtaagcacagcagatacacgaatcagtgcattcattgcaccagccttcttgtgatgctggaatcctggcctcttttcacgagatacatagacaaggcggggtaactcatttccatcagtgtcaagcccaccactgtgccccaagaacacctgaatcatgccaggatgatcccttgtattattcccaggccaagcagttccatcagccatggtccaaccctcttcaggcactttctgtgctttggcaacaagggcattgattcttactttgaattcttcgtactctctcttcattgctcgcctttccttaacaaatgaaggttggattttgtcttttaggtaatctattttttgagcaaagtaaaattctggagctcttggttcaatgttgtgctttttgcagaagggaacccactttctagcaaattctgcagtttctgagagagactcaaaagtcaacatagctgaaccatcatcagaaacatagcatgacactttgtcaacaggataatccacagcaagaatggacaaaacagtattggctgtgatcaatggaggttccttcagtggatccactgtactgacaaagacatcaatgggagccagctgtgatggctctccctctctgtcatacctcaatgcaagcctgtcaaggtatgtctcacggttgattggatgccattttgggaactgatcaagaagccaagacaaggcaaaccaaacctcgcagataacagatactagccacaatccataagcatcacgcactggatgagtgacacgatactggaagaagaagcacaggatgataagacggagaatgatcactatccggtaaaggttgagctggtttgaggatattggcacaatacggctcagaggtagccgtgcatcatcaaccatttgcatatcttcaccattcgagccagttccctccatgtctcctcctcttgcctctgggtatttattagtcacttgcatcatatttttgtcctgtttaaccctccagctctcaactctttccttccagtcaacactgttaagcccataggaattcaagtcctttgaggggtccacaatcctcacaggaactgggacgcttggatcaacatagctagatgttggactgcggatagaatgacgatcaggggaagcatcagggatctctccagatatctgctgcccacttgtcagacggggaatccggtgatgcggctcatggcgagcagatgaagacagatcagcatcatctccttgaccatgcagctgccactctgggcctttcccattgccttgcttatagttgaattcattgtccaggtcatcaacatcttcctcctcctcatcaccgtgaaccctagggctacctttctgtctcttgtacctagtcttgcactgagggcagcactggttaccctccttgcgctcatactcatagcaagggcggcaaacagggaaggcacactcgttgcaggcaacaaagacatcgccggtggctgaaacaccaacagtgtcaccacaaatttggcatacttgcccattcacactcttcgcgggcttagtcgctgcgggcgcgtcgacgtcgtggtggatcgtgacgaactcgttgcggttgtgcgagcccgccaccatccccttgttcgccgccatctccgctgctcccttcccactcccctccacggacagcgaccgacgagggggcggagaccgatcggcccgcgagggcctctagatcggagcggcaacggcggccaccaacatgccctggatccctccccggctcgctgcaatgccgcagtgtcgctgctcggctgctgctgctgcc

SEQ ID NO: 45865 - DNA, 1018 bp, Setaria italica
  Peptide Sequence Number=SeqID_111839
ttttttttgtataaacaagctggcaagctacagtgctgacagttacatcatgagactacagacaagttgccattggagagtcaagacacatatccagagaagatcagaatcctgcgcgtggacaaaattttggtgtttcctaacgctacctaatccttaaacctccaaaattctacatgagtcttcaaaaaagaagaaataaagagagaatgaaaacaagagctaaaaatgaatggacataaagtgagagtttgcatcaacccatcctaccccacgaagtaccctagtagtgctacgggcaaaaaagagtttgttgcagatttgacaatttgaagcaaggaccctgcctttctgccgcctaactaaagcaaccatagacctgagcaatccgtgcatataaattgcgcctgtagctctcttgtggtaaaagaaaaaaaatcccttgttcaattctgttagaccattcttgaagtatgcttgtatttaatatgttgttcatgtcttggcaaatgatttaccatttcaccacatagaaggcacatagacttgttccttcaagttctgggcggcactctcagtgggaaaccctcgcacagcaccaattgtccactgtgatatgattccagcagcaacagcaaatctcagttgcctctccaatgtatcctggtcctcgtacatctcaggacaagttatcaacttcctaatagcagcagcaacaacagcatccccagaacctgttcggtcagtggtgtatggagttatgagtgcatcctctgtcccaaccacacagccatgaaacttgggcgtgtagtagtggatccgaagtgtcccgtaggtcacaagcaggacctttattccatcatgccaaataggagcgatctcttcagggctgtagtggtagtactgtggccagtttcttgtaaaatggaatccttccagataatactgaggtggagtccttctcttgtattcataatactcatgatcaaggaggaattcaagctcgtcccttgacagt

SEQ ID NO: 45866 - DNA, 650 bp, Setaria italica
  Peptide Sequence Number=SeqID_111840
tttttacttaaagtattcttattcatgatgaatgagtagcatcaatatctgttgtcagtctacataattcatgataaaattaaagtattttaaattcagagtatacagcgagtttttaggtggttgcaaaatcctctgctgtttacactatgatgagtaatacttgtgcaagttggaccagctaattaaccagcttgctgccagtgttgctaatctatattgcttcaatgatgcttctactcaacttattgatgttatgttgctcttgatggttgaaaacatgattggtaaatcatcagagaaaatgttttgcctctgcctgcctgacgcccctcccgttgcttcgcaccagagctccccatttctgatgtgctattattgctaaagttttccagaatttacatatgcagaatcaggcatgattggttcctgatgcagtctggagccacaactaaagagcagcatgcttgcaattacaaacaggcatgattcgtctgggtcagtcagtctcacaaatcagcatgattctattacattcatatcaatcagcagcacaagttatcttcaaatacttgtcaagcattctgtccttagtcaagtcagtgaagtaccccttctcaacttcgagcccttgctctgctgcaatctgc

SEQ ID NO: 45867 - DNA, 285 bp, Setaria italica
  Peptide Sequence Number=SeqID_111841
ttgaacattacagatcctgaagttgggcctgcaatagctgtttccatccgtgagcagctttatgagattgctagtcagagtgtctctgttatgagagaaaagcaattgtccaagaagggaaggcgagcaccagaattttcttcgaatagcaaagccgtgaacaatgcagtggacttgttcaagtatttcggcagcaaaggaagcgtcattcggtaccatcttttcttctagaaacattgatccgctaatgattggtgtatttggttatgatggtgtcatttatgt

SEQ ID NO: 45868 - DNA, 388 bp, Setaria italica
  misc_feature (351)..(388): n is a, c, g, or t
  Peptide Sequence Number=SeqID_111842
ttgcaagtcttcaatccctttgattcagacgtaggactacaatcctgaagagaattgttgagcaagctgctcattgtccctaagctcgaagggttttcagccaaaatttgtttgccgtggggatgctgcctgcctgacattattagtcctaggatgtgttcattgttgtttgcatgccttcagcaatatgtatgtatagtgtcagagtgtttattccctgatgccggtgccttgactctgtgacatccattgttgaatataccttcaatcttcagtaaaatgcaatgttaaaagatgggcaaggcactaaatcatctaccccaaaaaagggtagtagtgagaataaaaacnnnnnnnnnnnnnnnnnnnnnnnnnnnnnnnnnnnnnn

SEQ ID NO: 45869 - DNA, 1064 bp, Setaria italica
  Peptide Sequence Number=SeqID_111843
ctcacgtaggtagcacggcggcgcagaccgaagaagcatcgggcgggcacggacggcggcgttggtgcatcgaccgccggcgagaaatagagagatgaagacggtcagcctcggcgcctccaggccctccaccgtcaacttccgcatgccgacgagggacaacctggtgccgatacgcgtcgacatcgaggtggacggccagcgctacagggacgccttcacctggaacccgcgcgaccccgactcagagatcatcagcttcgcaaagcggacggccaaggacctcaagctgccggccaatttcgtcccccagatgctccagtccatccaggggcaacttgcggagttccgctcctacgaggggcaggagatgcagatcaaggagaagattgtgcctctcaagattgacctccgagtgaacaacactgtaataagagaccagttcttatgggatattggcaaccttgatagtgaccctgaggaatttgcaaggacgctatgtgatgatttgaacattacagatcctgaagttgggcctgcaatagctgtttccatccgtgagcagctttatgagattgctagtcagagtgtctctgttatgagagaaaagcaattgtccaagaagggaaggcgagcaccagaattttcttcgaatagcaaagccgtgaacaatgcagtggacttgttcaagtatttcggcagcaaaggaagcgtcattcggaaaaggaaggaatggtatctgtatgagcccgttgtcgacgttgtagctaatgaggaagatggaaaagaggagcctaataattctagtaggccgaagaagcgagcagaagaagagaaagttgcaagtcttcaatccctttgattcagacgtaggactacaatcctgaagagaattgttgagcaagctgctcattgtccctaagctcgaagggttttcagccaaaatttgtttgccgtggggatgctgcctgcctgacattattagtcctaggatgtgttcatcgatttgtttgttttgtctattgtcctttctagtcttaatttatttgtttatttgtttattt

SEQ ID NO: 45870 - DNA, 513 bp, Setaria italica
  Peptide Sequence Number=SeqID_111844
gggagaagggcagtggaaagtcaactgttatcagtttggttgaaagattttatgatccacaggctggtgaagtctgcatagatggcattaacatcaaatgtttcaagttagattggataagacaaaagattggtcgtgttagccaagaaccactactttttacgacctctatcaaggagaacatttcttatggaaaggaggatgcaacacttgaagaagtcaagagagcagccgagctcgctaacgcagcaactttcatcaacaatttgcctaatgtacttaaataaacacaatacataacagtatcctatgttcacatctataaacataatgttaacccccttttatctgaaattaggtctatgacgcaagagttggtcaacatggaactcaactttaagggggcagaagcaaaggattgcgattgcaagagctatccttaaaaaccccagaatactcttgcttgatgaagctacaagtgcattggatttggagtctgagagggtagtaccg

SEQ ID NO: 45871 - DNA, 293 bp, Setaria italica
  Peptide Sequence Number=SeqID_111845
atatctgctatcttcacctggttgtgatcagtcttgatttagtagctgctatgttgctaccctgtctgtgtttccctaagttgtggactgatgaaaagctaggtgctttactgttgaatatttggaacttagtttaccacaactcgaaataatatagaaatggtatcttagcatggtttgggtggtagttatgtcttccttgatgaactctgagagcacaatggcttctatttggttgatcatttgtgctctatggtttgtctctagcacggcactagagagtgtctctcctc

SEQ ID NO: 45872 - DNA, 419 bp, Setaria italica
  Peptide Sequence Number=SeqID_111846
cgcgctgcctcatttcttgcttctgcaccgcttcctctttcttctccccctcgtcgtccgctcctccccctcgtgcggcacgcccatcaccgtcttgctgatgttgcgcagcgcggccggcggcgtctttctggtcttgggcgctggcagcggctgcgggcttcaccgccgccggcggggacgggtcctgttgtccggcggcggcgccggcctcgacccggacgggttcgggcgcgacgccgggcatggtgacttggacgacgccgtccacgaacctggcgtggatggccttgacgtcgcagtcgtcggggacgcggagctcgaggcggaagcggctccagcggttgccggcgacggggcgctccccgcgcacgatcaggcgccggtggttgcggaccatctgcacccggacttgctcc

SEQ ID NO: 45873 - DNA, 657 bp, Setaria italica
  Peptide Sequence Number=SeqID_111847
ttttttttttttttgagtgttttgctggtcaagacgggagaactcattgcattatctgataacagaaacaaaaatacagccattgttcaagagtttcaatgaaaatgtcaccacttggcatagcagttcaaggcagtagaatagtaataagtaataacctaagaatggtacattagccacagcagttgcaagggatacaaagcaagaaagggatttcaagttccccccgcaactccaaacaaagaaggtagccagccaccataaactacacctattgtgcctcctctgtatctcggctcttctttttcttctcctttttcttctcactcttctcagcttctgcaccatctccattctgagcactctctggatcagcagcatcacttccttccttgctcttcttcttcttctttttcttcccgctgcccttctcatctgccacatcgacctcctccttgacctccacggcctcagctgatcctgattcacccttgtcttccttttcttcttcttcttctcactcttctccccttcaactgtctcagcagcttcctcaaccttgatcttctttgaaggaacagaagcatcagcatcattgtcctcctcatccttctgcctcttcttttcttctccttgacctcgtcagtcacagctgcc

SEQ ID NO: 45874 - DNA, 633 bp, Setaria italica
  Peptide Sequence Number=SeqID_111848
gtcggggatcggcggcggcgggggccgcggcgggagcacgggccgctggcgagcgccgttgaaggactctacggtggagctgaggctgctgcaggccggcatggcgaccggcggcgtagagacacccggggtggtgtacggcgtgtatgcggcgggcatgtggtggtggtgggcggcggcggggagcgggaagttggtcttggccttgggcccgcgcagcatccgcgcggcggcgtcgtaggctcgggcggcgtcctcggcggagtcgaaggtgccgagccagacgcgcgccttcttcgccgggtcgcggatctccgcggcgtacctgccccacggccgcttccgcacgccgcggaaccgcgactccacgtcgaagtccgccgcctccgcgccgccgcgccgcatgccgccggactcgctggttcacggctccaggcccgtgagggtagaaacggaattggggtcggaatcggagctggggatttgggaatcgagggggtggaggaggaggggaagagggaggaaggtggggaggagttaattggaaggcttgcttgtttgcgctgccaccgcccacgacgccccacccccaccccccacccgctcgcctcccacctccaccaccaccatcct

SEQ ID NO: 45875 - DNA, 346 bp, Setaria italica
  Peptide Sequence Number=SeqID_111849
tggggttatgttcagtcaggccatatggccggccgcactggctctgttgccgtgtgtgccatgggctatggtagatggattcctattaggcaaggatctcccctaattggccttgttctataagccaaaccctaggacatccttgccacattgtatccattaatcaatctactaattcctgagccatacttgcttccaccatgtgacctctaaattaaagctcatcacacagaacttaggatataaaaagccattatacaccaattagtgcaatggaagatgtaaaaaattgtagtgtatgtttccagagggtagtcttttcactaaagacacctttcaaattgag

SEQ ID NO: 45876 - DNA, 488 bp, Setaria italica
  Peptide Sequence Number=SeqID_111850
atttgttgatcggagacgaaaagcacgccaagcatcaaaagaaacacctgtcgctataaatcaatggtgtattcagctatgtgcacactaaaaaagttactagaaggacttcagcttgcgtggcaacaccaacaaatctctgacaatacgatcgactacttctggaagagcaagatgtctaaaccggctcgctaatgactatttcaactactcgtctcgactgaaaaacagttgagggcgggcctcataccgtcaacaactagtcggaatcaattctgactagtcggcttcatcaacgaccgtcacggcttcatcgacaacgttcacgaatcaagctaagtcatttttttaattattttatataatttttccagagctacttgtgtatgtctctcgacggaaactaccctccagagctacactttgctgactactcctagggtatgttgaccgatagccacaggcttggtacaccgaattaggaggct

SEQ ID NO: 45877 - DNA, 360 bp, Setaria italica
  Peptide Sequence Number=SeqID_111851
ttttcgtattgagggccaaataggctatgcaacataagttgtgatccaccttgcgaagtgatgggtgaacttgcagcactgttcttgcaacaaaaacaaagtttggtgctaggaaggtcaggggagcagccaggattttttattgagggccaattaggctatacgacacaattgttactagtatactaagaagttcattagacaaaaggaagggggtgtgtgcacattttctagtttacatttgcagttctactttgcaaccaaaggtgagtaatttctaaactgtgggtacgtaaaaagtttgaggacggagtaataataactagtactatattggtgtatacgtgatgttagtaactt

SEQ ID NO: 45878 - DNA, 295 bp, Setaria italica
  Peptide Sequence Number=SeqID_111852
acgactagaacgctgacggaggcaaagcgcggggaggagatcatcatggcggaggaactggccagcttgttcttcagcttctcttcgtatgccgccttcttcttctccagttgctcctcgatctttttgagctcagcctccatctctgctttctttgcgttctcccaagaagtgatgtaggcaagtttcttggcggccctgttctcggctcttgccttctcgctctcctcccatgcagtgatcagagtcaatctcttctcggatacaattttcgcgagataagcatctctttcag

SEQ ID NO: 45879 - DNA, 317 bp, Setaria italica
  Peptide Sequence Number=SeqID_111853
cgtacttggcggccagttcctccgccatgatgatctactccccgcgctttgcctccgtcagcgccctcttctcctctgcggtcttgtggagcatggccagcttgttcttcagcttctcttcgtatgccgccttcttcttctccagttgctcctcgatctttttgagctcagcctccatctctgctttctttgcgttctcccaagaagtgatgtaggcaagtttcttggcggccctgtcatcgatcatcgcagacaagcgcagaaaatgagttagttgcagacagtacaagctgttggtggtgtggttgagaggtcag

SEQ ID NO: 45880 - DNA, 336 bp, Setaria italica
  Peptide Sequence Number=SeqID_111854
tgaaaggtgtgcttttatttcgtgctttgagtgcatcgtaagatatttatctctaccatcaaatcgaaccagagtgacgtgccatttgagtataacacacgctgatagtttaatccgtttttacttttaagtgacttcgaattaaatgccactcaatttacttttaagcaactgccagttgaacacagctgattattacctgttctcggctcttgccttctcgctctcctcccatgcagtgatcagagtcaatctcttctcggatacaattttcgcgagataagtttaagtactaattaacttatggaataagatgggtgcagtgagtttgaatga

SEQ ID NO: 45881 - DNA, 422 bp, Setaria italica
  Peptide Sequence Number=SeqID_111855
cctgggtgtttctaggggacagtttctttcatgcgtcaatgcatgtttgtgagccggtggtgtgcctgatcatgtcgttgctttgagctttgctagtctaccatgcatgcatcacacttctactttgaactttgaatcgtgactctgtcgtgttcctcttggtaatgcgtaggcattagtatgtgtgttaaagtaggctgcgtatttgagactgcttattctctgtgccccgtttctttgagagcggcttcttcaattgcagtagtgcacagcagcttgaatggtttgatctggcgatggcggctgcattgtccagttgaacagagaaagggccacgccctcaatggaagcacttctgatgcgtcaccagaatcttctttccaggcagcttcatccataccgcctcctttcccagtttcttt

SEQ ID NO: 45882 - DNA, 313 bp, Setaria italica
  Peptide Sequence Number=SeqID_111856
cgcaactagcctttctttcttggcggttcttggggccttgtggggtgagcgccgacgaggtttggagggaatgggggtggtgcggatgaagaagcaccgggcggcttccgccgtgttcctgtacgccgtggtggttcttggggtgttgatgggcggcgccggcgtccgcgccttcgaggatggcaccgcggtgtacattgtcaccatgaagcagtcgccggtgttccacaggcgccttaacttggagaagttcgggaacagcagagtcgccgatgccgcaggaggcaccagcggcggcggcggaggaagcggg

SEQ ID NO: 45883 - DNA, 1087 bp, Setaria italica
  Peptide Sequence Number=SeqID_111857
gggtaatggtaatgtgaaaaatacaggcgttagtttcaaagttttttagtaaactgttatcgatagtatttccatgctttttccttctaggcacggtcaaaaaaggctgatggattcaaatctttcagcatcaggagaacctgcctgaaagtgttattagtaaacatatatataattgtcaccattagatatatatgttggcggaacgttgggcaggcatagtgtgaaaaaattaggtagccactgcgccatggttaattaggattacataatcaacagaaactttgtttccacctcatctacgtacaatgcacatagtaactgtatccaaacacaagaaagcatttcaaagcagacacattaatggatcaattgcattgttagtgattttcagcgaactaagtatttgagcaagcaaatgggaacagagatttgcaggcttgcctatatagactattgcatccttcatcagcccttttctttaatttgcatcacttccttgtatcctagtggtgtaatcttcgcaggaaagaatagggatactcatcagtctttaatttgctattttgaagcggatcgagtgtctgcatgttttgataatttgaattatgattcttttttcgtcaccatcttagcagacaaaatggcattgccatacattagatgtaactgtgatgagactgttcacccaaaccatagcattgttcaataaagttagtagatgggaatttagaagatcattcggatcttgcaagaaaattaccattgccataagtagcagctacctttattttatcaaaatatagatcttaaaagtattagcattgacttggatcaaaggaaagcacttctaaaaggccatgaccattgttttaagaggctcgaactttctagatacagctttgtaaagtatcaatggtggcaaaagagaatggtccagctatgggttgtcatgtggaagttgatacccatagcaaaaattttatgaatgagtgcttgacgtgtataactgttgataaagaaatttgtgcaaggatccttcctaatattgcaggcagacaaatactatttttagtccttatttcct

SEQ ID NO: 45884 - DNA, 265 bp, Setaria italica
  Peptide Sequence Number=SeqID_111858
gtcgcggttcctggggcgggccgttctcgccggacgaggaggaggcgggggtcggccatggacgtggtgaggatgtgcagcaagctcaaagatctggaggtgaacagggtaggctctggctcgtcacccctaccaggcattcgtgaaggtggcttgatgaacaagaacaactcctacttcagcagaggggaggtgggagactgggcgaatcacatgacaccagagatggcgcgacgtctggacgtagtcatggaagagaggctcc

SEQ ID NO: 45885 - DNA, 424 bp, Setaria italica
  Peptide Sequence Number=SeqID_111859
ttaaatgaatctcaacctctcccacaattctctccatggaattctaccgactgaattggtgttgcacaacagcatcgctgtccttgatgtcagcttcaaccatctgacaggtcccttgaaagagctgcgacctttaaatcacaatcttcctctgcaggtactgaatatctcgagcaacttctttacgggacagtttccatccacaatatggggcgcaatgaagaatttgattgctcttaatgctagcaataatagctttgcaggacagataccagcctctatctgtaagagctccccttccttcagtgttctggacctttgttacacaaattcagcggcaatatacctccagaacttggcaattgctccatgctgagactgatcaaggttgggcacaacgaccttagcggagctcttcctcatg

SEQ ID NO: 45886 - DNA, 369 bp, Setaria italica
  Peptide Sequence Number=SeqID_111860
tgcagaatcagcatgcatgagactacaatagttgaattatacataagtgtcatgcgatatttagtgcgattgtgcgaactgctcgtggttattattttgttgttgccgagttgaatattttctaaagctactagatgcaaaaatgggaaatgttgaactcaagcttatcttgtacttttgattggacgaattgttggttgtagcatgattgtaggtttgctgtgagtaaataatcaccaatgcatttaggtctgattcatgcttcatgtgtttgcgtaaaattaagatcctggaatgacttagccacgtgtcactggatgaatgtggttgagaggatttggaatatatagatatgtcttagaaaacctt

SEQ ID NO: 45887 - DNA, 597 bp, Setaria italica
  Peptide Sequence Number=SeqID_111861
gaatccgtggtgcagctagtttgtcaaaccgggggtgtagcagtttttaccgtaccgacaactaggaaaaatcctgctgctgtgataaagaatttgaaagctgctggtttgcatggtattgaggtctatcgaagcgatgggaaagtatctggattgagtgatctagccgatacgtatgagcttctgaagcttggtggatcagatttccatggacgggatgacaaggaggaacctgatgttggaagtgttgatcttccggtcttggctgtttttaaatttcttgagatagcaaagccaatctggcataatgcaatcaaggaaatatttgcaagtatctctgaaaggactactgacttgaatggatccaacggatttcgacggataagttctgctggagatttctgcattttgcgcctttcttctaaagactcagagctgacagatgcttccgaggttgaggtcctccgagcagaacttgcagacattggcctcactcctcagtaacacggaaccggaagcccgcaattgaccatgaggcagaagtgacatggtaaatgtactagcttaaaatcaccagtccattttgtaccttatctt

SEQ ID NO: 45888 - DNA, 640 bp, Setaria italica
  Peptide Sequence Number=SeqID_111862
tcaaattcttgggtttaaaggagatgagaatgctcttgtccaaccaaacttgctcaaccaacaccgcatcgtactttctgtccttgccattaccgttcgacgcatcaatgatgaaatggtaactctggcctagccgcggatcctcccccttatcaccacccaccacccgatggaagttcatcttgccttcttgttgtactccaccaccgcccacttgccaagctcttggacactggagcatcaataactggtaatgggtaccatccttgctgcggctgggagatcgcggtagcgggcattgcaaagatgtagatggccgcaatagtgacgacaacaaggaggaaggtagctctcatggttggccgtgtagtaattcctagtttgcttggaaaccaattccgttcatgttctcctgaagatgatatctcgacgctagcgttctccatacttccatagatcctgtagatcctgctagcatgcatctgacgattcttgcttgcgattagttagcttcaacatgaggaacatcagaaggcaagcgcgagccaggtataggagatgagcaaggggagatattgacgcggctcaatccaagaacatggctgccgtgccaatcagccaagccttcggattgaggcgc

SEQ ID NO: 45889 - DNA, 256 bp, Setaria italica
  Peptide Sequence Number=SeqID_111863
ctataaatcacttctgcaacctccacaaacaatgtcttctagttcaaagcaccatatcaaccctaaccaacagcgagtggatgttgagaagctaaaaacaaggtactatgctttaactagttcagaagccaacaaattcaatatttaaatatttatacagcatgtctaacacaaaataacgcaattcaactgatgttcctcatgataagattgtaagctataaatcctgggcaagtttggtaatctgcaagtgttg

SEQ ID NO: 45890 - DNA, 343 bp, Setaria italica
  misc_feature (320)..(343): n is a, c, g, or t
  Peptide Sequence Number=SeqID_111864
gtgcgagattgcaactgcaaggcgcccaccgcccaagatgagaaagaataatagctaatagccgaatgaagatcctgagcagcttgggacgtggtggtaaactagtaattaggatccctgaatcaacatgcattctgaagactttgcatacctatttcgttagtttcatgttcatgactagagactagagagtacagatgatattttttctgttagtaagaaaatatatcgatattttctccgtttgttacctctgtgagaatgttattatgctcattgcgggctatacaaattaagttggacgttttaaaaaaaaaaannnnnnnnnnnnnnnnnnnnnnnn

SEQ ID NO: 45891 - DNA, 791 bp, Setaria italica
  Peptide Sequence Number=SeqID_111865
cgaggttccttcttgtgttcacttgagatcttgaggtacgagcagttatgtatgctcctaggagtacactcctgaagtatgtgagcattcatatgcatctggtggcgcttatgcctgcgtttcattccggtgaatttttacctggtgtttgcagaaatccaccgttgcgacgtaccatttgagtactaacatgcttattattacgagttcatgcagcttttgagacatttttgtcagtagtcaccatgcatcatcctattttcggacttcagagtttagatcatgcatgtgtatagtaatgcatttcttggtatttgaaacgaaacgaacatgcatatcaagttgacaagctaagcatcgatctaatctacttgagttttgcacaaccagcgttcctgttcaaaaactcgcttgtttgatgctctgtcaattgtcccgttctttttcttaaacttaatgaaatgctcatgctttgcgactacacattttgcacaatcacatgttgattacatgctgtccgctcccacgattgaactacggatcatttgtataggaagaaagattggactggtgagatagatccaaatgctgatggcttccctgttctgtcgaccatggagtcgaaataaacaggagtgcagatacctgtaaggctgaaagacagtcgtagctacggcgagcgaagcctctgtaattcttcttggatcgatcttgaatttatgtttgaggcctgccacatgaaggcatgcgtatgcagcagtcatacagtttgagtacttttttttagaacg

SEQ ID NO: 45892 - DNA, 551 bp, Setaria italica
  Peptide Sequence Number=SeqID_111866
gccgccggaagtaacaggacgagggagccctccgagcagctgcggctggcggtgcgggcgcggaatggtcaccgcggcggcggcatcgggtggctccagcagttcgccgtgctgtcccgccgcaccttccgggagcgcgcccccgactacctggacaagatgcgtctggcgcaggccgtcggcgtggcgctcctcctgggcctcctctggtggcggtccaaggccggcgacgaggcccagctccgcgaccaggtgggcctcatcttctacatctgcatcttctggacgtcctcgtcgctcttcggctccgtctacgtcttccccttcgagaagctctacctggtgaaggagcggcaggcgggtatgtacagcctcagcgcctactacgccagtagcacgctctgcgacgccgtcccccacgtcgtctacccggtgctcttcactgccgtcctctacttcatggcgggctccggcgcacgccggcgtgcttctccctgacgctcctcgccacgctgctcgtcgtcttcaccagccagggcaccgggggagcc

SEQ ID NO: 45893 - DNA, 513 bp, Setaria italica
  Peptide Sequence Number=SeqID_111867
atacattcagagatactacattgcatccgcgagggagctagtaaggatcaatggaactacaaggcacctgtcatgaacttcgcagcagagtcgatgttgggggtgatcaccataagagcatttgcatcaacaaagagatttattcagacaaaccttcagctcatcgacatagatgccacactgttcttctacaccagtgccgcattggaatgggtgcttctacgtgttgaagtgctgcaaatcttggtcatcatcacatcagccatccttcttgtctccctaccggagggagctgttgctccaggattccttggcctatgtctctcatatgcattgacactttcatctgcccaagtattcttgacaagatgcaactcatatctggaaaattacataatatctgtggagagaatcaagcagttcatgcatctcccagcagaacctccagctgttatcagtgacagtacggccttcctccttcatggccatctaaaggaagaatagatttaaagg

SEQ ID NO: 45894 - DNA, 514 bp, Setaria italica
  Peptide Sequence Number=SeqID_111868
aagcgttgccttccttcagaggatggattccagtaaccttcaaatcactgaaagtaccggatgcagaaaacccgacagagatggggaagaatgatgatggatcagctggggggacaacaaattccatggaaccactgcggttggactgatcaataaggagaatagaccattccaacacagagtttcttgagtcaaacttccactctccgtctatctgtttaacatttggagcctcccgaagtgctggcagtggtatagatatgacaacattgtgaagatcaaacatctcagaagcttcatattcaatgttgacataggtttcatttccagacacggacggccagcaattgactacatcgagcaaaagcatgttaatgcaagtccaaatttccaaattcttagacagatataaacaaagttatgttgcacctgagagaggtaaagatgattcgttcatcccctggattctccatttcaccagaggagtttcattttgaccactcgggaagggcct

SEQ ID NO: 45895 - DNA, 430 bp, Setaria italica
  Peptide Sequence Number=SeqID_111869
gaatagtagcatgaggttaatatatacacagctctcagaaatgagattcatattggttaagattttgcatagatactttcaagtacctatagtgcatgttgcattttaagttttccccctcagtaatatgtaaaatctgtaaaatccagataggccagtatggccatcttgagcctatgttcttgaagttaacaccccaccaccccaaaaaaccaagtttctattttaattcatattaaataggatcatacaaataaggtaatttccaaagaatcagaagattaatatatgcaaaagtaggatacgagcttggagagcagcctcaaagtgtccagatctttaagaatattgctctacttgtttgtgataagtagaagatacaaaccttcaataggtttataaacataacgcactattttctagtttccaa

SEQ ID NO: 45896 - DNA, 326 bp, Setaria italica
  Peptide Sequence Number=SeqID_111870
gcgggtgttgggccgtgcgaactgcggagtgcccgagttgggtggttgtgggtgggctcagtgtagtttggtaactgggactagagcggggatggtaattgggtcaccttctcccaaatcttgaacattaacatttcggaattatcaagaccaagcccacaaactatgcacctcggcaggcgtcagcgaagaggatggcggcctcgacggtggtggcggcgaaggagtttcccgcggcgcaggcggggaggagcgcgccgaggcgggcggcgtcgacggggaagccgaggaggagcgggttgcggagcaggtggcagaggcagcct

SEQ ID NO: 45897 - DNA, 1386 bp, Setaria italica
  misc_feature (1)..(38): n is a, c, g, or t
  Peptide Sequence Number=SeqID_111871
nnnnnnnnnnnnnnnnnnnnnnnnnnnnnnnnnnnnnnattcacaaagaacagctcaacatatatctacattgtgaatgtgttgtccatgttttcccgaatatagaatcacaaacgcagcaccagtcaaaaattgctccaacagcattcagacagatagccggagaagaattagagagatacagctaaattcctgtggtcacattgacatcaatggacaagatcaaccagcgtcttcctccgggggaacctctgcggaagccgaagggacatggaatcctcaatctcgatgggcaggtgcgtggccacgaacacgatcccacccttcttccggtgctccgcgatgatgtactcgagcagcctagtgccatccgcatccagcgcgacggagggctcatccagcagccagatcgggcggtcgatggctagcagcctggcaagctgcagccgcttccgctgccccatggagagcatcctagacttctcgttcatgagcctgccgagccccatgagctcgatggctgggcctgccctgctaccgtccttcccctcgaggagctcgaaccactgcacgttctccagtaccgtgagcttctccttgacggcgtccttgagcgacatccagttgagctgcagcttgtactgctggaacacgcccggggaggtgacgtcatggccgttccagaggatctcccccgcctgagggccgcgagaagcccgccagcatgcggagcagggtggtcttgccggagccgttggcgccggtgaggacaagggccgtgccgtcgttgacgctgaggttgatgtcacggagcaccgtctgtgcgttccgcatgcacgagacattgttgagcaggagccgcggtggcggggggcggagcggcagcatctggctgagtggtcgggtggctcgggagctggtgagtcggttggaggtggacgtacgggcgcggcgaggtgggtggccccggggtggaggtggtggcgatggttgggggagtgcggcggcgagcggcgcacggagagaccgtgtgggagggcagctgagaggagtgaggcgggtgttgggccgtgcgaactgcggagtgcccgagttgggtggttgtgggtgggctcagtgtagtttggtaactgggactagagcggggatggtaattgggtcaccttctcccaaatcttgaacattaacatttctgcaatttgatgatttgacaatagtaaatcagtttattagcactaactaagaaaccaattagcgtaccatcttcaatggctttgttgatcaccggaattatcaagaccaagcccacaaactatgcacctgccacaggaaaacaatcactcagtgatcagagtagccacaaagattatcagatctgagaaaaga

SEQ ID NO: 45898 - DNA, 1915 bp, Setaria italica
  Peptide Sequence Number=SeqID_111872
tttttttttttttttttgcaagaactcaggtgcttattttctctggcaacaatacatctgaatgaacatcaatccgcgcaacacgctaaaaatgaaagggcaaaaggataatattctccaaatgcgaaacaatgctccctgccatggctcgaagaagttcatggcaaaaatacgttgtgttactacccggtgccgttggagtatttaagtgaaacaacactcgaccatgataagagcattaaactacttgatagttagcagtgagcaaacaagcccgctgtgaaaacttcggagcgttgccttccttcagaggatggattccagtaaccttcaaatcactgaaagtaccggatgcagaaaacccaacagagatggggaagaatgatgatggatcagctggggggacgacaaattccatggaaccactgcggttggactgatcaataaggagaatagaccattccaacacagaatttcttgagtcaaacttccactctccatctatctgtttaacatttggagcctcccgaagtgctggcagtggtatagatatgacaacattgtgaagatcaaacatctcagaagcttcatattcaatgttgacataggtttcatttccagacacggacggccagcaattgactgagagaggtaaagatgattcgttcatcccctggattctccatttcaccagaggagtttcattttgaccactcgggaagggcctgtttggatcttttgctcccaaaatttgttgactgttaaacaactccttgttgatattggggtgtgttttgaagctaagtccaggaatatcttggctttcaatctgcaattggatgaatccatcagcatcattgagaacctgaagagcaagggttccttgaacatcaaagttattgatacctccatctcttttaacaacaacattgagcttctcctctatagtcactgtgacaggatcacttggtggaagagcagacaatcttgaaggaactgcacttggttgtacatcctccaaaatgacttctccttcagctttcaatgattcgaggaattgatttgtcttctgtgtcttgcccaatttcataccaagacctttaccgggtgcagtagcagctgtagatggatgacctttgggcttgctagcaaatgagtccatgtcagcgctcagtccacctaatccagaaccgctaccaaatcgagaaccactgatgctcatatcattgaaagctttttcaatcacacgtggaccagatattgatgagtatccgcctttgtcaagtttacctctttccatcctcattttgtcaagctcattagccttcttcttcatgacatccttcgtttcattgattttggcttgcatcatcagcttgtgtgccttttcttcatggctctccatctcacaatattgtttgacttgttgcactgttacattttccttatttccgagagagatggcttcgtcgaaagcaaaaataagctcaaaagctgttttacagacaccttcctcatccaaggaaggggagtattcaggcacgagcttggagagcagcctcaaagtgtccagatcttcaagaatattgctctgcttgttagtgataagtagaagatataaaccttcaataggttgataaacataacgcacattttcagtttcaacatatgtgtgctgcttcccagtcccaaccagtttcgggaacgcagcgagtaatccttcaattcttatgcgagacatgtcaacaaactgtcttgaaacaagtgcttttcctgactttgaaacgatggaagctgcaagaaccaccatcttcaatggctttgttgatcaccggaattatcaagaccaagcccacaaactatgcacctcggcaggcgtcggcgaagagggtggcggcctcgacggtggcggcgg

SEQ ID NO: 45899 - DNA, 2073 bp, Setaria italica
  misc_feature (1)..(39): n is a, c, g, or t
  Peptide Sequence Number=SeqID_111873
nnnnnnnnnnnnnnnnnnnnnnnnnnnnnnnnnnnnnnntttttttttttagaaactacctcgagcacttatttctcagtaaaattacatcacatcattttctccgtacaaatatcagcatcaatttgtgcaacatgccacacatgaaaagggcagaaagagagcactaaatacaaaatgattttcaacgcctcggcccgcagaagttcatgacaaaaaaaacacattatatgacaagcaagtgccattgaagcattcaagtgaaacaactcaaccttgataagagcatttaaactacttgatagttagcagtgagcaaacgagcccgctgtgaaaacttcggagggttgccttcctttaaaggaaggattccagcaaccttcaaatcactgaaagtacttgatgcagaaaacccaacagagatggggaaaaatgatgatgggtcagctgggggaacaacaaattccatggaaccactgcggtttgactgatcgataaggagaatagaccattccaacacagagttcctagaatcaaatttccactctccatctatctgtttaacacttggagcctcccgaagtgctggcagaggtatagatatgacaacattgtgcagatcaaacatctcagaagcttcatattcaatattgacataggtttcatttccagatactgacggccagcagttgactgacagaggtaaagatgactcatccatcccctggattctccatttcaccagaggagtttcgttctgaccactcgggaagggcctattgggatcttttgctcccaaaatttgctgactgttaaacaactccttgttgatatttgggtgtgttttaaagctaagtccgggaatatcttggctttcaatctgcaattggatgaaaccatcagcatcattaagaacctgaagagcaagggttccttgaacatcaaagttattaataccgccatctcttttagcaacaacattgagcttctcttctatagtcaccatgacagggtcagttggtggaagagaaggtgatcttgtaggaaccgaacttgtctgtacatcctccaaaatgacttctccttcagctttcaatgactcaaggatctgatttgtcttctgtgtcttgcctaatttcataccaagacctttgccaggtgcagtagcagttgtagatggacgaccgcctttgggtttgctagcaaatgagtccatgtcagtgctcagtccaccaaatccagaaccactgatgctcatgtcactgaaagttttttcaatcacacgtggaccagatattgatgagtatccgcctttgtcaagtttacctctttccatcctcattttgtcaagctcattagccttcttcttcatgatatccttggtttcattgattttggcttgcatcatcagtttgtgtgccttctcttcatggctctccatctcacaatattgtttgacttgttgcactgttacattttccttatttccaagagagatggcttcatcgaaagcaaatataagctcaaatgctgttttgcagatgccctcctcattgagggaaggggagtattcaggcacgagcttggagagcagcctcaaagtgtccaaatcttcaagaatattgctctgcttatttgtgatgagcagaagatataaaccttcaataggttggtaaacgtaacgcacgttttcagtttcaacataagtgtgttgtttcccagttccaaccagtttcgggaatgcagccagtaatccttcaattcttatgcgagacatgtcaacaaactgccttgaaacaagtgcttttcccgactttgaaacgatggaagctgcgagaaccaccatttttaatcgccttggttgatcactggaattgtaaaaaaacaagcccacaaattatgcacccgttggatgctgctcgtcgaagaagggctccacggagactcggcgtcggcgaagggcggacggaacttggggaagggcggcgccgctggcagggaagagggggcgcgccgggagaccgagtgagcgagagggaggagcagagctggtgtgtttcgtttgtaaaacac

SEQ ID NO: 45900 - DNA, 722 bp, Setaria italica
  Peptide Sequence Number=SeqID_111874
ggttaccgttcctaacggggcgaacctttggattgacaatgaggaacagatggcgcagaggtgacagtaggctgattgagtaccttgaccaggagcaacatcaggacttcaaacaacaaccctggccaggggacagtcacggtgctgtcagcatgagcacttgagcagctcctccctgtctcactgtctggtgtgggacagaggacagattcagtgattcagtgtgggacaaggagtcgaattggtatctgggttcagtatttaatttagatgtgcaagaactaagaacatgggaagagaagtttgtgggattatgtaaagtaaaaccatagggaaattttacttccatgaagacggcaggtttacttgaaagtggagcatgtccaagtccaatgccctcatctgcctcaacttcagcactgtcatgagccctctgaccaggttgttggcaaagagaaggatttacccagaaataaatgttgcttgtcccaaccttccattgtgctgtcagagttctttgctgcaataagctgaggttgaaatccatgcatgatgcatcaatgtgtatcatccaagcaagctatcacaatcctaagtgcccatcactgtcatttctttcctcaacttctccaccatctcatagtcttgagacttctcataggcacaaataaatgcatggtaaacctcgctaccagcgttaaatccttttccagccatctctg

SEQ ID NO: 45901 - DNA, 992 bp, Setaria italica
  misc_feature (1)..(40): n is a, c, g, or t
  Peptide Sequence Number=SeqID_111875
nnnnnnnnnnnnnnnnnnnnnnnnnnnnnnnnnnnnnnnngtatgtagcctgcactcttttattagaccatacaaattcatagacgagcatcaagaaccatagctcagcagttgaaactcaccgctataatgaactgtaactaggaatcttaaggttactttacattaccgatcagtaactccacttcagctctcaatgttgatggaaaggcatacagccagatttccgatgttgtatctgttttagcggccatccaactaacaaagtggtcatcgaagtctaagtaggcagaattgttgacagccactgaaccggtgcaacttggataggatggatgactctcctcagtgtgccagcaggcaaggcggatacagagcttgcaaacagtgtgatttactcaagccacaagcaaagacatgattcaagtgcccacaagacacaatcatcaaagactcaagcctcatgctgtggatacattgacatcaccagagacgcccgcaagatcagcacttggattgacatgaggaacagatggcgcagaggtgacagtaggctgattgagtaccttgaccaggagcaacatcaggacttcaaacaacaaccttgaaagtggagcatgtccaagtccaatgccctcatctgcctcaacttcagcactgtcatgagccctctgaccaggttgttggcaaagagaaggatttacccagaaataaatgttgcttgtcccaaccttccattgtgctgtcagagttctttgctgcaataagctgaggttgaaatccatgcatgatgcatcaatgtgtatcatccaagcaagctatcacaatcctaagtgcccatcactgtcatttctttcctcaacttctccaccatctcatagtcttgagacttctcataggcacaaataaatgcatggtaaacctcgctaccagcgttaaatccttttccagccatctctgcctggagtctgatcgccacctccacctcccct

SEQ ID NO: 45902 - DNA, 375 bp, Setaria italica
  Peptide Sequence Number=SeqID_111876
aggtggggaaactcaacccagggatgcgggcagcagtgcacggctgatggaatgcattatgatggcgaggtgtatgacgccgtattgcatatcatgctcaatgcattggtgattgagtcacaacaaaggatttgagtgggtggggttcttgaacaggctgcatgcatgatgcatgttagtcgaacactatgtttcagcaaccatactgcatggaaaggttatgccaagagttaatacaccagtaatgtgccactatactcttcctgttcaaaatgaaataagatttagttagtgctatgtactcttcagaagaactaaggtgtagttattttcttcacttagtcactggtcttcattgtgcacctttacacttat

SEQ ID NO: 45903 - DNA, 433 bp, Setaria italica
  Peptide Sequence Number=SeqID_111877
agaagaaaggaagcgacgggaggagatggaggcgaggatggaggtagattggcagagggaggcgagaaggatggaggcgagggtggaggcagctgagcggagggcggagcagatgttccagtatatgcagggtgttttgagaggatgggtcaacctccgccaccgaacctattccctccatctcctacatctactcctaatcaatcggcggcatcaaatgagccatcggacccagctttgtcgcagtggccatcgttgcctccttagtgactgatgtctacttgtggttgcatggccacttgtctcacttgtggattacttgtctcacttgtttgcatttgtggcaaaatacttgtggattacttgtctcacttgtctagttgtggttgtgaatgtctacttctaatgatgttgtttatttgtgtgttgtgaa

SEQ ID NO: 45904 - DNA, 483 bp, Setaria italica
  Peptide Sequence Number=SeqID_111878
aggacaaatgtgtattcggagtccaaaggggaaagatcttaggctgcttgataaccacgaagggcatcgaggccaacccagacaaaattacggcgctagccaacatgtcagagccaacatcactcaagcaggtacaacggctcactggcaggatcgcagccctaaaccgtttcattccgagagcagtagagcgaagcctccccttcttcaaaacactccaaagctccaaaatatttgaatggggacacgagcaaagcggagcattccaggacctcaaggagtacctgcattccatgacaaagctatgcccaccagagcccaagtcaccactgctgctttacgatcagcctcagcaacagctgtcagcactgcgttgatccaagagaaagaaatcgaaggcaaaatcaagtagataccagttacttcgcatccgaggcattgagcggttcaaagatgcattactctgagttagaaaaattgcgc

SEQ ID NO: 45905 - DNA, 442 bp, Setaria italica
  Peptide Sequence Number=SeqID_111879
ttttaataaaaaggtaaaaattgagtaaaaaaagggagaatgcatgaaagactcattgaaattacatttcagtattagatgtaattagactgcaatcatcatgtaacataaaaaagatactctattatcctttgatttggatccattgcctttaatgaaaagctactataatctacatatgattttatatgcacaaaatcttgcagattgactatcaaaacaatactagcataatttctaacaagcatcaatactaaaataatttttaacaaaacatgaaaagtttagaactgtaacaagcacgaagagtctaaaactataacaacatcagttctacagatcataagccaagcaaaacgaaacaaactgatcctacagatcagaaagcaaggcaaggtagaaagcaaggcaaggtagacaaaaatggactcttacatagcag

SEQ ID NO: 45906 - DNA, 234 bp, Setaria italica
  Peptide Sequence Number=SeqID_111880
gtcatggcggaggcggagtctcacggcatcgtcatcgtcggcggcggcatctgcggcctcgccaccgctcttggtctccaccggaaagggattgcgagccttgtgctggagaagtctgaagtcttgcgggcagagggcgcgggcatcggtgtccaggccaacgggtggcgagctctggagcagcttggcgttgccgcagagctcaggaagactgccggtctcatcactgcgtat

SEQ ID NO: 45907 - DNA, 704 bp, Setaria italica
  Peptide Sequence Number=SeqID_111881
tccgtattaaactaactaccggtaaagtctaggtctaggttgttgggtattctttgtctattttcttcggttacaacctcagtgccctcacacggctgcatcccaaggatgttaataacagcactgacagcctcagccaagctctctctaaccccaagaccatactcatcaacacgctcactctctgggtccatatttttcccaggcatttctgaagtttgagacagcaaccctcagcatataatcagctgcaaaaatttcgaagtcctctaactggtattcatcatccacaccatcctcatcagcttcccctgtaaatgtgtcaacctctttaacagtaaacttcagcaaattaaacatttttccaatagcaggtacgcgctccggctttttcaaaagcaacaaaaattttgcccagtagtattataaggcaagcttgccagaggctttgacaaatttctgaaaactcctcagcatctgaggagtcaacacaaacagtgacattttctagcagttgttcttctatagtgtttgtacaattgtactgcaatacaacatagctatcataaatgtgcttaaccacattaacagcatattcagtttctgcctccgtcagctccacgggttcagaggacttgaagagtcttccaaacccagagaactcaggaatggatgaaagcatcttctcattaagtctattctaa

SEQ ID NO: 45908 - DNA, 515 bp, Setaria italica
  Peptide Sequence Number=SeqID_111882
tactaccggtaaagtctaggtctaggttgttgggtattctttgcctatctcccggttactacctcagtgccctcacacggctgcatcccaaggatgttaataacagcactgacagcctcagccaagctctctctaaccccaagaccatactcatcaacacgctcactctctgggtccatattttcccaggcatttctgaagtttgagacagcaaccctcagcatataatcagctgcaaaaatttcgaagtcctctaactggtattcatcatccacaccatcctcatcagcttcccctgtaaatgtgtcaacctgacaaagtgggaaggtatctagtatcttagttatagaacaattcaaatacagtggcttaattattaaagcccatgccttcatttcattctaaattaaaaagacttaatagtcatgtgaatcctagaatattttctcaaatttctcagaattaaaggtggtaaactaaaacattacagattgctcagagagtttccagactag

SEQ ID NO: 45909 - DNA, 2417 bp, Setaria italica
  Peptide Sequence Number=SeqID_111883
ataccaaattcatatgatacagaactaaccatactacaatcactggaaaacacaggataacatgagtaatgtttgatattggagaagattatatacatgcaccattacatttacctctttaacagtaaacttcagcaaattaaacatttttccaatagcaggtacgcgctccggcttttcaaaagcaacaaaaatttgcccagtagtattataaggcaagcttgccagaggctttgaacaaatttctgaaaactcctcagcatctgaggagtcaacacaaacagtgacattttctagcagttgttcttctatagtgtttgtacaattgtactgcaatacaacatagctatcataaatgtgcttaaccacattaacagcatattcagtttctgcctccgtcagctccacgggttcagaggacttgaagagtcttccaaacccagagaactcaggaatggatgaaagcatcttctcataagcatcaacagctgaaacaggtgcagaggccgcggcagcaggtgccttctttccaggggccttcttctcttgaagtggtagcgacctgacatctctcgacaccaatgaaatgtcaaaaggctcctccgaaggttcataggttcttaggcttgcttctaagttggcaagtggcacatcaaaagatccaaataggaagtctttcacatccttctcattgttaccaatggcaacttcaccaccaagagtttggagatagagtgtagcacgatcacgaacctcatcttcagtatcaaacaggcatcgtcgcaggagaacgaagatccgaggcttgagcgtgtcaactagggcaccaaactttgccagcgtgctgacagcactagcacgaacagtggcattttccaatatcacacggttgtagatgtagcgaatgtacctgcttggatctgatgtccttggcccttcatttcccagaaaatgcaatatctgactagaaagatatgtgaattcgcagtcttcaatgaattcgcagagatgtagcaggccaatttctttggcatctggtatctcaatgatcagagtaactatggaatccactatggcctttttatactcgaagcccccttcttctcttaaactgttgctcagaaaattcaacattgagcgatatttgagcgggaacttcaggcacagagaccgtatagcttcgacaacaactatcttgaattcatctgctatgtcagacatgaaattggtaatctgtttcatgaggcgatccacgcttgattcgttgccagttttaagaagagtagtgattgccagggttgctatactcctattcgtgtctgagatcaaactctccaagtccacgttgcagtttgtcaccgccagagggcgtgtcatggcaaccttattgagagtccgaacagcagcaaatcgaagcacaggcttggatgatggactcaaaaatgactgcaacacggcaattgctggggccaattcacgacttgtaacatccatctcagttattttccgtgcagcttctaacatcaccatatctgatttatgtctgagggatgattccagaaaatcaaaaaatagacggtcaccattttgtgtgttcgtgcttgactcacgcataacctgacttgcgtaacgaatcagaagacattgtgcaagaggagaacggacagatccccttgtcaaactggaaactagcttgctaacagccaaccgatcattctgtctgatctggtgaagaagagcaagaccatgaaactggacaagcggagctcttgattgaacagcttcttggacttcattgctccatcttttcacaatttctgggtttgcctgagccaggtggatgccactaacaagagcagcactagcaaccactggattcttgtcaacaatagcttgcttcaaatatctttcaatttgagttagtagggtgccatcaattattctacaaagaactctaatagcattggcacggtacatatctgtcttgctgttcatatccttcatcaatgagcttgtgactatgatgacctcatctgatgatggagaaagctctttgatcattaaatacaccagcctcctaagaccagcatcactagactggaacaactttgttacggcaaagaagacttcggtggcctcaaccttcgtgaatgtctctccttgattgagcaaatataatagcttggtgatgacttgcgagcaccgtctgacatcaagttgtggatcgtggaaagcccgcgcctcctgcagaacagctcccttctcgatcccaaagaatggcgaatattcgacttcctcgtcgtcgtcgtcgtccttcttcatgtacggctgcgccatctccggtccggccaggtcaccttcgacgagggagcgaggcatgcgacgccgggtgctgtgccggtgggtggcggggttgg

SEQ ID NO: 45910 - DNA, 1087 bp, Setaria italica
  Peptide Sequence Number=SeqID_111884
ggacaaaagggtacatttctgttcccgatgtttcatgaaatctgtacttgagtcaacagtgtagcaaactaccatatgcgaagttatttgtacagcaaaaaaggaacctattacatcgtatgctatctgataatattcacgatattcacgaagcgatgaggagtctgtaggcatcgaaatgttaccactatttctagcacaaacggctataagtgaaggctatctactgttctacattgtttcggcagaagatgtgggtctagtgcttcatccactggcgacaatctcgtgaatcttgtcactgacttcagggtcatctgatctgacagccagcttcatcgccacttcgttgggcccactgagtccaaatgacaacctgactagaaccttcacatcaccgataaacacaccggaaagcaggcaggtgtgggatcttgcatttctcggtacaacctcagtgccctcacacggctgcatcccaaggatgttaataacagcactgacagcctcagccaagctctctctaaccccaagaccatactcatcaacacgctcactctctgggtccatattttcccaggcatttctgaagtttgagacagcaaccctcagcatataatcagctgcaaaaatttcgaagtcctctaactggtattcatcatccacaccatcctcatcagcttcccctgtaaatgtgtcaacctctttaacagtaaacttcagcaaattaaacatttttccaatagcaggtacgcgctccggcttttcaaaagcaacaaaaatttgcccagtagtattataaggcaagcttgccagaggctttgaacaaatttctgaaaactcctcagcatctgaggagtcaacacaaacagtgacattttctagcagttgttcttctatagtgtttgtacaattgtactgcaatacaacatagctatcataaatgtgcttaaccacattaacagcatattcagtttctgcctccgtcagctccacgggttcagaggacttgaagagtcttccaaacccagagaactcaggaatgtcgtaagttccttcttaacttggttatttctattctattcct

SEQ ID NO: 45911 - DNA, 933 bp, Setaria italica
  misc_feature (1)..(99): n is a, c, g, or t
  Peptide Sequence Number=SeqID_111885
nnnnnnnnnnnnnnnnnnnnnnnnnnnnnnnnnnnnnnnnnnnnnnnnnnnnnnnnnnnnnnnnnnnnnnnnnnnnnnnnnnnnnnnnnnnnnnnnnnntttttttttttttttacaggaagcaaccgaaccgtagtttatattgctcttaaaagtaaacatagtaatatttgacattttactggagctacggaatggcagtatggcacatctatttcttctgattcaaggcccaactcaatgaaaattgaaacaatcaccaggtcttgagctcagaggaaaaatattcaccagtacaaaaacaaatccatgcaggattcaagtaaaaagaagaaacagaagtccatgttttagatggagtataatttatttaagaatcattccctccatcccacgtccatgagtttgcaaacttccaactcacattctgtcatcaattaaccagtcaatgcagcattgagtgcactgtggacatcgactccgatctgagcctcagccttctccaagtcagttgaggctgacccaagcttggcagtgaattcagagagacccttctggaccaaggctgggtcgatctgatccacagggacagcctcaacggctacaatgtcagctatggagtttgcatggacgaatgcaaacccactgctcacaaagtacttggtcacatcgttcccctcatgtaccgagagaacaccaggcttgagctcagcgattgtggcaacatggcctggcaaaacacccatctgaccagttgtagctggtacaatcaccatgtcaacctccttgttggcgatctcggacttgtaggggaggacgaagttgacggtgagcttggtggggatggtggccggcgtgggcgggcgcggctgcatcagggacatgggcgtcgaggggggctcgatgttgggagcgaccttcttccacgcctcc

SEQ ID NO: 45912 - DNA, 1052 bp, Setaria italica
  misc_feature (1042)..(1052): n is a, c, g, or t
  Peptide Sequence Number=SeqID_111886
ccgatctccatcgctgctccgattcttctgcccgagcgcttcgtcgtctcagcctcgtcgcctgctagcggcctagccggcgccatcacacccgcaggccccgccggaagcgaggagctgcggaagcaggggagggccaacgcggcgactccgctcgtcgactccgccaccgtcggcggcctctcgcgatgccgcctctcacggctcccaagtccggcgacgccctcttcgccagcgtcgatcgcgtcaatgcggagttgttcaccctcacgtatggcgccatcgtgcggcagctgctcacggatctggaggaggtcgaggaggtcaacaagcagctagatcagatgggttacaacattggaacacgattggtcgatgagttcttagccaagtcaaatgtatcaaggtgtgttgacttcaaggagactgctgatgttatcgcaaagcttggattcaagatgttcttgggtgtgactgcaactgtaaccaactgggatgctgagggtacaagctgtagctttgtattggaggacaatcctcttgttgattttgttgagctccctgacacttgccaaggccttcagtattgcaatgtgttaagtggagtaatcaggggagcattggaaatggtgtctatgaagacagaggtgacatgggtccgtgacatgctccgtggggatgacgcctacgagatgcgggtaaagcttatcaagcaagtccctgaggaatacccctacaaggacgatgactagtttgattttcaggccaggttcatgcagcagggcgccagtttgcttgtctggatgctcattttgctgtactttgttgtggatccagttctggtattacatgatgtcacatgagtaaaccgttgattgcatttgcacttgccgtgtgtattgtagaaatgctacatatcttccatgcctcggggctttgaattagtccggtgaattaagggcatttgtgatgctcgcgatagttcttgctgtgtttatccagacataaagctttttttcaggctggttaactagcagatcannnnnnnnnnn

SEQ ID NO: 45913 - DNA, 869 bp, Setaria italica
  Peptide Sequence Number=SeqID_111887
gtctgggtccttcaatgctccatcgtctcctcgagcttcttaatctttctagtaataatcttcacattcttgctctaaatcactgatctcccgttctaactctgttaataatgttccttcttgctttttcatccggtggctcttcattttccaagacgaaatagacttactaaactacttagttagacgaaacccaaggtacaaattgttcacacaagtcattctcatttgggcggatatggacaagcatcaacattttggaatcacatcctagagaatctctaagaacttgtgtaagcttgctattcctataagggacatgagcttttttggtttgaagtgcatcaatcacatcccctagggctgacagtgacaaatttatggctttgccttccttgagccgtttcccagttgcttttgtctttacaagtctttcacttccaccaagatcaatcatccacaatttgtttcttgctttttttctctccggcgcgtcgaaggaggtcaatgaaagacgaatcaaacagtgagatctgcttgatgtagaattagccatagtgtatgctgttgatctaaggcgggtccccacttcatatagtctttttacttcttggaaactattcacagtaactgccaccaggttttcaatctcaatgccgccgtcaggatctgttttgatggaaaggctcggcactttcttaaaaccatgtgtcttgcttccaggaactagcaggtctcgtaggtttcccatgtaaatctcgagcatactgaaagtgaacagaaaccttctgtggctttctgaagctcgatcaaatagtgcttgaatcccacgtggtattacacctagatctgtagctgtaggctttgcc

SEQ ID NO: 45914 - DNA, 369 bp, Setaria italica
  Peptide Sequence Number=SeqID_111888
cgcgcaagcttcacccacaagaccctccccccaccctacgccaccacgcgcacacacctcctgtcctgcataattgccagccacgctgctcgaattctctcttcatcgggggctcacagctcacgcgcgcgcctgcctgcgccaagcagctgagccaaggaagccttgtcgggcatcgttggttttctgcttaggccacagcgctgagctcgatcgcctcgggagggctgcagatggcgcgatgccaggggaccgtcgagagcctgtgccagggcctgctggacctcgacgacgacaagttcggcgcaatgtgcagcgcgttcggctacctccaggagtggccggacctgggcgccatgtgcggcgcga

SEQ ID NO: 45915 - DNA, 541 bp, Setaria italica
  Peptide Sequence Number=SeqID_111889
ttattatggctgtccgattggtctgtgttttgttcttgtgtaatccttgagatgtttctttcaaagctttctttgcacactaagatcgaacagagaaagaaatccatagctatgaatgtcggggatttttcagggttgggatccctgtcgggggtctgatccctgctcggggatggggacgggggaaaattgcccccgtgtgcaatgtcggggaagggagcagggtgattttgttactcagggtgcagaacgttccaccgggaccccgacgggggatagcccccgttgccatccctacatgcacatctgccttccatgctttttttcacaaaaaacttggccacttccaagttcctattgtccttttgtttccttttatttgccaaacataaatgaattgcacaaagaatacataagtaaccatacagcacctcaggaccagtggcttcagaacatatcaaacagttttagtttgcatccaaaacagagtttattagatgtaccttacgtatagtagcttctgattcatgaagacttccat

SEQ ID NO: 45916 - DNA, 453 bp, Setaria italica
  Peptide Sequence Number=SeqID_111890
aggaggcaggtgttgggctcgtgcgggttggtggcttgatgcgagctaattgatgttggtgcatccaagtccgattcgcgggcgttcgtcacattttttggcttgtggttactatgttttgcccgttcgttttttttcaaataaaagttgcgcacaactgatgtaaaaagagcttatacctttccttttgaaataatcaagctaaatttaggccccgtttcgtagggcttaccttggtttcggtgtcacatgttttgcgcaaaacaagacaccgtagcgagaagtcgttttgtaagccgagcctaaaataaccactatttctagaccccctttggcaggactccggaaggtgcttgtccaccggctccacccgaagctctgccaaagggtagaggagcaaacggcttgaacgatgaagcccctcgaaacccgctgagataagccattccacgg

SEQ ID NO: 45917 - DNA, 931 bp, Setaria italica
  misc_feature (870)..(931): n is a, c, g, or t
  Peptide Sequence Number=SeqID_111891
gcaccaggaacactccaagcacaacaagcagcatactcctcggctagccgctagctacttctcgcgatggcaatgctgctgccgcggttggctacggtgcttgtggcggcggcgctggcgttcgggatggcggcggcgcagggcccggcggcggctcccggcccggcgcccgggatcagcgacgagtgcctcaactcggtgctcaacatgtcggactgcctgacgtacgtgacggccggaagcacggcgcggcacccggacaaggcctgctgcccggagctggcgggcctgctcgagtcccacccggtctgcctctgccagctgctggccggcggcgccgagtcatacggcgtcagcgtcgactacaagcgcgccctcgcgctccctggcatctgccgcctcaccgcgccgcccgtcagcgcgtgcgcagcgttcggagtccctctccctgcgggactggtgcctactgcagcgccctcgcccatgtcaggcctctctccttctatgggtccagaagtacctgcgaacacgccggccggctcagcagcgaagtcgtcgaaccacgccccaggccgcgtcaccgccggtggcctcatcgccctcgccgcgctgcccctcgccgtcgcggccgccgccgggatgctctaggccaccaccggagcttgtgatttcttcttcattcttaccacacatatggtttgtgcattactatgtaatacgcacgtacggtacaaacaattgtttccacgcacgagattcttccgggttttgttgttgttttttccatgtaacaattcctttcggtgtgctgtaaaatttgctagagatagtgactgctgtgtacgtatagcatcgtcgtcttggtgtacnnnnnnnnnnnnnnnnnnnnnnnnnnnnnnnnnnnnnnnnnnnnnnnnnnnnnnnnnnnnnn

SEQ ID NO: 45918 - DNA, 429 bp, Setaria italica
  Peptide Sequence Number=SeqID_111892
ataaaagatgctatgaactaaatactgcatccaaagttagaaataaatgtgtgcttttacaaagacgtcataacatcaatcggggccaaggccctgcttaccttgctttcctacagatgcagagacctattaactgattctttaagatgccctgctaagtgctgcttttcgtctaataatttactatcccacacctctacttttttatttcgaactacagctccagcattaggtggaactatttatggagctgcttgctctccatctaatactaaggcctgcttatgtgcttgtctccaggtgctacggagcaaatacctgattctttgaaccttcttaacaaagaatcgtcagaagtggcatccaagcaaggtgatgctactcgtgaagctccttctgaagctcctgaagcctgcttcagtggtgcta

SEQ ID NO: 45919 - DNA, 363 bp, Setaria italica
  Peptide Sequence Number=SeqID_111893
ttcggtgtgattaaagcatttaaacatttattttggccatgctttgcacttaaaagtttgattgtattttagaaatttccttcctgatcactctgacaatgatcctgcatgtttgagagggaaaagaaacaattttgcagtctgcatctctagccttttcccattagcttctacatgcaattatgaactgagtattagacgaaagtgaaactaacggcgatttgccttatcactcttatggtaagacctgcttgcctggcttgtttgcaggtgacacacatcaagtagttgattctttgaatgttgttcataatggggaaccacaaatcgaaaggactgaaggtgctacggagcaaatacctg

SEQ ID NO: 45920 - DNA, 425 bp, Setaria italica
  Peptide Sequence Number=SeqID_111894
tcatgcttggacgagtagcaggcatcaagaagtcttcaaaagaatacaagataaatgacacatatacaaatgttctcttatgtgttaccggtttgtggaatgatgtcaatatctctgagctctcagatgaggactttgtagaggatgaatgcaatgatcttatttctttagttaagaaaggactcctggagagggctaccattgctgagtttgaggagaaggtggcaacggtacatagagacatagtaaatcattggattgaaagagaacttgtgatactggaagatatattgacagagcacatatgaaagggtggcacgtagaaatggaggaattactgcaacgaaaaaagctgcttagtacaccagctgaaagacagcgtcgacttgaagagattccagaaattgttccagatacagaatatg

SEQ ID NO: 45921 - DNA, 654 bp, Setaria italica
  Peptide Sequence Number=SeqID_111895
gcaagtagctaatcctctaaacgatcttaaagaaggagccaccgaaaggtgcagcagcggatgcagttgaatgcttaaaagtcctggagaaaccaccagaaggtgcaggagatcaagtaactgattcattgatcgttctgaatgaagaatcatcagaaggtgacacacatcaagtagttgattctttgaatgttgttcataatggggaaccacaaatcgaaaggactgaaggttctgaacagctactacctgattctttgaaccttcttaacaaagaatcgtcagaagtggcatccaagcaaggtgatgctactcgtgaatctccttctgaagctcctgaagcctgcttcagtggtgctattcttgatctgcactgcattctcaaatgcacgatactcaagatgatagcccaactcaagccattgatgttgaccgagaggaaagtgaccactcccggcaagttgtcatgacaaaggataaagaagtagaagtcatcaatctagacagtgacgaagatgaggatcttcccacggtgcaacataagccagaaggcaacacggtgcattctccaagggccatgaatggtggcaacattctcatagagtggtccgagtcagcctcgcctgcaaccttacatgctcagagaggcatgaa

SEQ ID NO: 45922 - DNA, 1140 bp, Setaria italica
  misc_feature (1098)..(1098): n is a, c, g, or t
  Peptide Sequence Number=SeqID_111896
ctgtgctgtgatttgatttcattttagatttcgtacttatttaatgttcacttatcaattaatgttatgtttttgctttcatttttgacattttcattgtttattggatatgttccctattgagtttactaaatacttttttagagctatttatattatctacgtgtattaataattttactaaaagcatctatgttattttatatcgagagaatacatttatgtattatgattcacaatccttcattgtgtcatattcactctccatctttgagttttccaattagttgccacttatggtttgcttttgtatctatgtggttaaaattttactttggccgtgcactccccaccccaaaaggttccagcagcatctagggtgtttctcatgtttgcgacttcctattctgaactttatttagttactagatgaaactgatggtgagttcgtctgatctctgtccaccaacttaacttccttgtctccaggagcagcacagcaagtagctaatcctctaaacgatcttaaagaggagccaccgaaaggtgcagcagcggatgcagttgaatgcttaaaagtcctggagaaaccaccagaaggtttgttttagttgttaacttgttatggacagaaaggatgggcttaagtattggaggcatagaaataaggacttgagtgtgcctggatcagcaactaaatggattcagctgagcctacggatggctgagatatgcatgttactatttatagtagagttgaattagtatatctgttcccttgtctacttcagagtcatgtttattaattagctagcattgtacgacgcctcttatataaccgtaggcggttgataagtctgtttatcaaggaagcaataatacagtaatgagctctgcccaaactaaatcagtttgatcagaacttcttcgcacgggagaagtttggtgattagagttatgataactcttatcccttcctgctggtttcttctacatactataatattagtacgctatcatgatgtttctgtatatagtaactaggagaaacattgtttgtaattgttttttatggtttgctttttttttaaaaaaaanttaagttgcactcatgttttattcacactggtgtgttgagca

SEQ ID NO: 45923 - DNA, 804 bp, Setaria italica
  Peptide Sequence Number=SeqID_111897
aagaatcgtcagaagtggcatccaagcaaggtgatgctactcgtgaagctccttctgaagatgatagcccaactcaagccattgatgttgaccgagaggaaagtgaccactcccggcaagttgtcatgacaaaggataaagaagtagaagtcatcaatctagacagtgacgaagatgaggatcttcccacggtgcaacataagccagaaggcaacacggtgcatgctccaagggccatgaatggtggcaacattctcatagagtggtccgagtcagcctcgcctgcaaccttacatgctcagagaggcatgaatggggatgttctccttgaacagtgcaagtcagcacctgcaaccatgaacggtgttcttcagccggagctgcgccagccagcacctgcaaccatgaacggggttcttcccccgagcagtgcgagccagcacctgcagccatgaacggggttcttcacccggagcagtgcgagccagtgcctgcagccaagaacgcggtgtcacctcgcgagcccctgtggcattacgtggatcctcagggagacccccgagggccgtttgcgctggtgcgcctgtctttctggaaacagagcggcttcttcaacgaggacttccgagtgtggatgacggggcagaacgccgagcagggtatcttgcttacagatgccttcaagatgcatctgtagcctgctcactctccctcgagactctggacatgtaacatctcttttgctcattctccggtgcctttaattttgttacgccctgcttattaatttctagttcgggtcta

SEQ ID NO: 45924 - DNA, 1378 bp, Setaria italica
  Peptide Sequence Number=SeqID_111898
actaatacttgatcgagaagaatgctgatgctgatcctgatgtggcaaagacagatcacgaagatgcacagattggcaaaattttgtttaaagactactgggaagtaattaaagatagagaacgtttgtcattggttgacctggaagaagctagtgctcttctgaatataaggcttaactgtaaaggaggagtgaattcagagaaatctccagatgattatcacaaatcagatggaaatatattgcctgacaatgataccaatgaccaaacaattccttctgactctaagcgcaagcaaaataaagtgaacacatcactgaaaaacaagtcaaataagaaaacatatgttggctgggcttcggaagagctaattgaattcttgtcaagttttggcaaggacacagcaaaacctcttgatgaacccgaaattgttggagttgtcaagggatacattaaacagaagaatctgtaccaggatgataagaaactttgtttcttttgtgatgataagttgcaacctctgtttacaaggagaaaagtgaggtgcaaaatgatccgtaggttcttggcagtccatctaacttcaaatgctgtttcagatgatgaaatatctgatggttctgaagatgatgataccccagttatgaaaaagaaacctcggaatagtctggagccgaagattgctaaaagggtttcagaacgaagcaagagatgttttgcctcccttgttcagaataacatcaatctaatctatctgagaagaacgttagttgttagtcttttgagtcagccagacacatttgaacagaaagttgttggctgttttgttagattcaagattcccttcagtatggactgctataaaaattctccaaatgcattcatgcttggacgagtagcaggatgaatgcaatgatcttatttctttagttaagaaaggactcctggagagggctaccattgctgagtttgaggagaaggtggcaacggtacatagagacatagtaaatcattggattgaaagagaacttgtgatactggaaagatatattgacagagcacatatgaaagggtggcacgtagaaatggaggaattactgcaacgaaaaaagctgcttagtacaccagctgaaagacagcgtcgacttgaagagattccagaaattgttccagatacagaatatgaagaaaaggaaactaaactggaagttgcaacaagtaactcttctcaagagaatagaggtaaaagaagaggcagagtttgtttcatagacgtggaagaaacttctaaaggagcagcacagcaagtagctaatcctctaaacgatcttaaagaggagccaccgaaaggtgctagtgtagtcggtattgtctagt

SEQ ID NO: 45925 - DNA, 461 bp, Setaria italica
  Peptide Sequence Number=SeqID_111899
acttcttggagctacgatgtcgatgcttcaagaggtgattcgctcagtagagcctgctgctgcgtcaggctcgggaagtgccggcctgtcctcatcctctggcagagtgctggctgtagttgagaaatccaagcaagcgactgcttcaggtgctgctctgggtacagttccgcttgtggagagtatccagaggctagtactcagcccaccttctgatttggagctccagagggccatggatgtgttccggggcgtccaggaaagaagccaccagctggagcaggagtgcgcccgactgaaagaagcgcttcgggttcatgaagtcggggcaaaaatcctttgccgtggagcgcacggatcacgccattctgcaggagaaactcgagagccgctataaatccttgaacaagaagtatcaagagctcaagaaacaggaggcgtctgcaaggaccaagtcattg

SEQ ID NO: 45926 - DNA, 537 bp, Setaria italica
  Peptide Sequence Number=SeqID_111900
cacagatagacaggacaaagatcagaattagtcacgcacccaggaggagagccaggggggaagggaagagagagccagacagggaggaggaaacctttcttcttcctcgccgccttctcctttcccggtctcgtcttcctggctcttgttcttgaatccgccagcgagttcttgagtccgagcgtggcaatctacgtccttttcttcgcctgttcaggacccgtgtaaccgaaggactcgatcaaatcgaattggaaaagaacgtaaattttaatctgctaggggtggggggaagggcgggcggtcttggcagggggcgaggcgggccggccggttgatcggcgatggcgccgccgtcgagggactactggctcggcttcttccgcggcgcgggggacagcatcttcgacgccatcgacgcggccatcaccgtcgccgcgtccgaccacccgggcgccctccgcgagcgccgcgacggcatcgccgagcgcctcttcaccgcgctcctggtgaccggcgccacggcggcggccgggg

SEQ ID NO: 45927 - DNA, 562 bp, Setaria italica
  Peptide Sequence Number=SeqID_111901
aagtttaatacaaatcttggaagcttgtaatgaaacttatttttaatacatgcagatcaatgagcataaactacaagcagtaggtacacataggaatggctcaaataaagcatagaaccgtacgcgcagaaggctgccgcgcgcgtcggtcttgggctctaaggaccaccggaagcatcgtcgcgcgacttgttgccggctcctccctccgccgaagaccggctgccagtggccggcggcggcttgttactgttcccttcctgccctttgccggcatctcgtcggccacccccactgccagcaccggggttctggttctggctcccatcgagcgaggtggcgcccttggttcctgccggcccgtcgtcgccgtcgacgttgaagtcgagagggagcgcgcgagacggctgacgccgatggcgagacatggccggcgcctgacgcacgcgtcggaagaaaaaccctgtacttgggaagaaataatttgccaacgtcgcaagatgctagtatatagtaataatgtagctggtactattgcaatatgcaacaagctaagttcgtt

SEQ ID NO: 45928 - DNA, 1359 bp, Setaria italica
  misc_feature (11)..(11): n is a, c, g, or t
  Peptide Sequence Number=SeqID_111902
cccatccaaancatggaggctagagcggaaggggagaagacgatgacgacgagggagccgcacgaggcgtcccgccgcgagcgcgaggggcgcgactcgcacgggaggcgcccccactcctcgtccaggtcgcggagggacgaccccaggtaccaatccgctgcacctccgtcgggattctcgatctggttgcgatttggtttggattagaatgctggtgtttggggggatcgggaattgtttctgcgacttgcaatttcttaaagttaatgcgatttgtatccttattaacccatttttcgcaatcgctttttggtagcccgaggagaagaagagatgacaggaggcatgaatcggatagggcgcactatagaagtcgagatgaagaatctgcgaaggtgtcggaccgtgatcagaagcggaacagagatgctgagcagcgcgatgatcctccgaatgctgagtcgaagtcagtgagtgatgccaagaatgacccgtccaccaggcgtgagagatctcctaggggaaccaaacggttttcagagtcgagagaggcttggcggcctcggcctttctttcaggtttttaatcttttctccatttataaaagggcacaacgccaatggcttgtgctctgtttcaaatggtttgatgctatagcctatagtgtgcttatactataatggcctgaataaccttttgcatttgcattgttagagagctgtcatattaaattgctgaacatcaaggcatttcactttctgtaacctgacctgtgctggaaatgtacctagcagattagtgttaggtagatccattggtcaatacttgctggtcatgccgagtgcatcctgattatgacagctcagctcaggctgttccgagtgccaagtggctgccctatctgttgaaaagaaccaacgccacattatttactgcctttgtagggagtattgtcgaataggcaaatagtgctttgatatcgttaatggcatttagtctacatttgccagtattccctgttggtgttattctgaataactgctacgtattaatgttcagtcgaattcaggggctagggagtagatatgattccaatgtaaactttatctgttaagatcaagaagtgatttgccattttatagatgttccctattctaatcaacaaccttagataaatttgatttgaggacatgatagtgctgtttcttgctggtttgaatgggaagtacatcagatactcgtgttacttcttgctggtttggatgaggagtactgaagtaacatcactattctttctcataagtagattatgcaattgcaacttattttagtttatagttgaagttcaactgttta

SEQ ID NO: 45929 - DNA, 644 bp, Setaria italica
  Peptide Sequence Number=SeqID_111903
ttaggatctgtgttatcatagctagatagtagaatcgacatgtgagctgatcagctcaaattactgccccttttttccatacataagttatgcactataatttaagctctatttgtcattttgcagaaatctatcgctggcctatttcagtgatttaatttcatctaatgcagtttgtgcataaagaataataagttgttgctaaaactatacatttttctgttaatttgtcatacataaataacatattcctcctgatgtagtgggagtacttttatgacgcatgcattcaaatgaactgtttataacaatgctagactacctgcacttgtatgtacagcacaatgagcgtggaagtgctgggcaaggtggtcggcgctatgaccgtcaggctagtggctacggaagacagagggatcaaaaggacatgatagagataaacaaaaggatgcggggcacagtttgcagggaaaggttgagcaggatgatggtgattctacatggaggcatgatggatttttccagttggaggaagaagcacccctggccaagaagaggccaccttttcaggagatgaagatgcaagactctgctgccactgttacagatctggactctggatcaaggaacctgatcagcctggg

SEQ ID NO: 45930 - DNA, 499 bp, Setaria italica
  Peptide Sequence Number=SeqID_111904
tacgaaggtaggtacaagctacaaaccctaacccatccaaagccatggaggctagagcggaaggggagaagacgatgacgacgagggagccgcacgaggcgtcccgccgcgagcgcgaggggcgcgactcgcacgggaggcgcccccactcctcgtccaggtcgcggagggacgaccccagcccgaggagaagaagagatgacaggaggcatgaatcggatagggcgcactatagaagtcgagatgaagaatctgcgaaggtgtcggaccgtgatcagaagcggaacagagatgctgagcagcgcgatgatcctccgaatgctgagtcgaagtcagtgagtgatgccaagaatgacccgtccaccaggcgtgagagatctcctaggggaaccaaacggttttcagagtcgagagaggcttggcggcctcggcctttctttcagcacaatgagcgtggaagtgctggcaaggtggtcggcgctatgaccgtcaggctagg

SEQ ID NO: 45931 - DNA, 1041 bp, Setaria italica
  Peptide Sequence Number=SeqID_111905
ttatttgggtttatttgttattttcgtcgagatgaagaatctgcgaaggtgtcggaccgtgatcagaagcggaacagagatgctgagcagcgcgatgatcctccgaatgctgagtcgaagtcagtgagtgatgccaagaatgacccgtccaccaggcgtgagagatctcctaggggaaccaaacggttttcagagtcgagagaggcttggcggcctcggcctttctttcagcacaatgagcgtggaagtgctgggcaaggtggtcggcgctatgaccgtcaggctagtggctacggaagacagagggatcaaaaggaacatgatagagataaacaaaaggatgcggggcacagtttgcagggaaaggttgagcaggatgatggtgattctacatggaggcatgatggatttttccagttggaggaagaagcacccctggccaagaagaggccaccttttcaggagatgaagatgcaagactctgctgccactgttacagatctggactctggatcaaggaaacctgatcagcctgggcccacttctgcaataagagaagaaaggagaaattatcacccaaggggatttggaaatcatagaccatttataaggccagatgatcgaggtttcagacgtgggtttcctgaccacaggagtgaaggccagagaaatgggtatgattcaaggggaagatttcctggtaggggaggaatggacagagacaggtttatcaacccatatggtgggagaggcaacatatatcatcagacttctggtgatcaagaagaaaaatggaagcatgacctctatgatcagtcaaacaggagcccacctccaaagaccgaggaagagcagattgctaaagttgaagcgttgttggcgctgtagttatcttctctatctgtctggagttatttgtgatgttagatcatcatgtatttggtttcatctttgttgaacgctgtccttttattctatatattttgcgtatctattggggattagggactattcgttgagctattccattttgagtgaagg

SEQ ID NO: 45932 - DNA, 1889 bp, Setaria italica
  Peptide Sequence Number=SeqID_111906
caaaccctacacggtagctggataaccaccaaccagggaaggcaaaatgtgaaatacaagggattttttgaaagcccggaaatccgcatggtcgtatgcattatcagttcgtacgtttgtacagggaagtaacgcttgaacatgactcgtacgtcctggcttggaattcaattcatactggaatcctcctctacatgcaacggtaatctgaccgtgcacaagcaagccgagccagtcaaagcgtagaagacgtgttccttgggcaaaaaccggatgctgtgaagcaaatcaactcaggctcaggcaccgaacgtccaaacctactcattcactcaagcagcaacatctagtacctccctggcatttcctctccatttcttggcaaaactgcaccagctcagtactgcaatcattctcaacgttcagtctgttctgttgccgaatcagaagttcagaacacagtggaaggctgtgtattcgctgggtactccggattctctcatggatttcaaggttgctcatttgtcaggctagtacaccatttcgggccaagaccaaaccagaagccagcgccatcccaaacagagcatgcaaccgcacacagtagtacttcgccatgaaaatcttggcattgtcctcgtgatttttcagcacatagtccacaaccaatttgcccacaggcagagtaagtccacaaaggacagtgcaagctgatggaagagctttgcttatggcaaatgcagccaaaagaatgtaaagcatggcaatagcaaccgccactattcgtgatcctgcttcagtgccaactcttaccaggggagacatctttccaacagcaagatctccatcaatctgatgaaaatggctgcagaagagtatcaaagtagttgtcaacccaactaggactgatgaagctacgactgttttggtgagagggagcaccacctttccacttgaaatatttacgctgctgtttgagaagtagaaagctgtggttgccaatggaccaaagcagcaaaacacaagggctcacctagtccctgataacttaatcgaaatggaggacactgataaacataaccacagaagattgcacacatcaccaagaaaatgaatctagcatccccggcttctgcaaaggcccaaaatagccccacaaagccgagtaaaagagaaacatttgcagcattttgtgtcacagctcgactgccaataatgttaacaacagattctttcttgttcttatcagccccagtatccgaatcaaagacatcattgctcagattgagccaagtgatcacaaggactgccgctgccaagatagtgaagtagcgtctggcaaagaatagccctgcgtgatgataagcagaagcgctccctaccgtgagtggcacaagcgccacggagtatatgggcagcttcgccgccctccagagtaacgtcgcgcgtgacagctcgccgaactcctcggcttcaccggaagctgctgtagccgagcaccgagcacgccgaagagcgcttggccttctcgccgcggcagtggcaacgcagctacggcgaggggaaggcgcgaggggagtgaccaggagaaaaggcgcgagggctattccggcgagcggcatcagctgcggccgcgcgggagccgggaggattgtgagtccgggagaggttaggcgcggcgctccacgaagcgcgtcgcgggcgccggcgtccgggagcggcagaggtgctctcgctgctgggcctgcatggataaggctgggcgaagcgatagcgagggcgccgacgagcctcccatagtaggggttgtttagctgactagtggtactacacaagacagctaaacaacccctactatgggaggctcgtcgtcgcggtcgatcgagtcg

SEQ ID NO: 45933 - DNA, 384 bp, Setaria italica
  Peptide Sequence Number=SeqID_111907
cactagtgtcgcagctgagcttggatccagaaatatgctacattgctatgcagctgtgttttccattataggtctattgccagctctcggaatatgttattaccagcataggtgctcttataacactaaaatggcaacatcattggctgtggtattaggaatggctgtgttgtcttaatccagttccttgtcagttgtcacggattattgcttacacatcatgtaggaagtagcaaaatgccacttgtcattttagtttatagactactgacagtggactacaataaccgtttaagtctgtcaaacactgaggataccatcttttacgtgttatggtgataaactagtgtaaatacaaagtaactgaaatgaatctgtaatact

SEQ ID NO: 45934 - DNA, 608 bp, Setaria italica
  Peptide Sequence Number=SeqID_111908
cctatgtactccttatactctttcaaaatttgagaccagaattctgctttctatggttttttagcttccatctccatagtgaaggcaatatgcatgtgactgtaggttgctttgctcaatccattgtgtctggtgcactgactgtatacaatacaataaagcaagtttcatatagcaatcaacttagtgacaaagttataaaaagatgaagtagcagagcccttagtcgtacatcaagtaaaaaattgtcacatgcatgcctcttgagaaaaagactaaaatagggtgctgtgtgaaattatttccttgcagttcctacagttgctctttatccatttcttctaactttcaactttattcgatgtgattgttatacatattactcaggtgaactttttacatccaggtggaactaaaacaataaaggtggcagacacacaacatatgatgaaggtacaaccatagtgatattttagcatgcaaacagtttggagtaaggcttatgtgttgtatctaaataactaaaggaaaacataagaagagaaaacaaaaaccaaaattcaactgcgatggcaagataattcttttgctgcatagttttggatgaa

SEQ ID NO: 45935 - DNA, 1130 bp, Setaria italica
  Peptide Sequence Number=SeqID_111909
ttgggacgttcaatcaatccacagttcattgcaagctttgcttctgctgctggtaaacgaccccatcaggattttgactctcaagagtctgatccagagtggggttgctggacagcaaagcatgagctgaagaagccatcaatcagtctgttgtttccaacaattgacagggtgaaaaaaggggcttgcggaatccagttgtgccggaatttgctttctctacctgagaaaacatggcaaagactgagatctactggcatatttcatgatgcaatccctcaaccatatgccaggatagggcatcctatgcatgttaaggttgctcaaagacgctttgaggctcgtcctgggggacattcatttggctggacttactgtgggtctcacaatttcagtccagcagcatgggggcaagtcctttctcctccctccagagcaaatcctaatgaagtcagagcagcacctcctggtccaaggctgcacgtttgtaactatgagctcggcatcatactcatttctccaccaccaggcaagtcaaagcaagcaagtgaaagtaagcacaggattgagggcatcaccctaccgtttgttgtgcctccgccgcgatataaggggagtgataggccagcgactcggttggccatgcgagaggctgcggctgaagcttgtgttctgcagagtaacgatgttgtagacttgtcagatgatactgacgaagatgtgccagatgaagacgatgagcaggaggtcgagctgtctgattgttctcaacaagagaaggaagaggagaagatttacgcggagacgctatgggggcaggtagattcttctcagagccaagaaaaggattagtgaagttggagttcggttctttatgcagtcttgcagattcagttcgttgtggacttgtggtagtcagtaccaaaggttgatgtgacagaaggcatgttcaaaaagctgttcttggaagcttggggttcgctgcattttttctcaagcgaattgaacttcctgaaggagagcaagttgttgtattgaagtatcatttgatgggcaggcaaaatctgacgaccagatttcagataaagttgattcctttctattgatttgtttgattagatttacgttgt

SEQ ID NO: 45936 - DNA, 496 bp, Setaria italica
  Peptide Sequence Number=SeqID_111910
ttcatcatcagggaggatagacaaagatcagttcttttcatcatacatgaaaagtgtagtactgaagttcccagaaatgaagtagggcaaataacatccaaatgtaaagtaccaaaagagcgttattactatttatactatccattgagcgttacaacctaaaaacatattctgaattttggcgccaaacatgctcaaatatcacagatatataaggtaacatggtctacaaattcttcaatccatgatctgatatggacatcacatttattaaattcactgtatctacaccgcaagcaatgggtgaggtacaaatgttgaagtacatggtagagcaagagcttatatgagaccatactaactacttgaaccctcgaggtaaaccaattcacacaccgacgagcatacacgacctcctgatggaaacaaccatttgaattttgatgtaagcagatcgaaacaaccagggcagcagcgccacagataccagaaccta

SEQ ID NO: 45937 - DNA, 440 bp, Setaria italica
  Peptide Sequence Number=SeqID_111911
acaggatcattccacggagagccagggaatcaggtttctcaagagcacagtttacacacaactctcctacctgacaatctttgtcatcgccatctgcatcactgagaggagaaagctcaaagaagatcccctcaacttcaatgtgctcagcattatcgttgaagtcgttagtgcttatggaaatgtggggttttcaatgggctacagctgcagcagacagatcaatcctgaccaactctgtacagatagatggactggtttcgccgggaggtggagtgactctggcaaactcatactaattatcgtgatgttctttgggagcttaagaagttcagcatgaaaggaggcaaagcctggaagcttagttaaatgcagcacctgatacattgcaggttcctgtggttatggaatctgatcaagaatacataaagatggcaaaa

SEQ ID NO: 45938 - DNA, 168 bp, Setaria italica
  Peptide Sequence Number=SeqID_111912
tgtctgcagtaatttctgatacttgatttgacagaactgaagaagattttgcgaacaacttagttcgacttgaagcattgctaacctttgaaattgtagtttttaatgctttaattacacaagaaattttgtgtatttctaagtttataccatgttttaacaaacggg

SEQ ID NO: 45939 - DNA, 678 bp, Setaria italica
  Peptide Sequence Number=SeqID_111913
cgactccgacgacgcctgggaggaggagcgccaccaccagcggaacgtcgcgctggcccacatcgagcagcaccgcctgcgcggcgtcgtgatcttcgcggggctcgccgacgtctacgacatacgcctcctcgagaacctccgccacataaggactctgggtgcgtgggccgtggccacagtgtggcagcagcagaggagggtggccgtggaagggcccgtctgcgtccgcaacaccaccaccgccgcctggttctcctcttccaccagcagcacgtcggactccgtccacggcttcgccttcgccagccaccttctctgggaccctgccaggtgggaccgcttccctacctcggagcccgaccaatcgcaggactccatcaagtttgtgcaacgcttgctggtcgaggactacaacgaaacgatccctgctggctgttcatcaccgacgatcatggcatggcgtctcgtcgacactacgctgctgctctagcatgcatcatccttctttcagatatatgcatgcaccaccgtccactgcaaactatggcagcttattattaagtagttccctagctagatccacatatacgagctcgagctagcagcgagctcgatcaatcatcaaggaagataattaaaaaaacctgcataattacacactactgtataatttaa

SEQ ID NO: 45940 - DNA, 481 bp, Setaria italica
  Peptide Sequence Number=SeqID_111914
tcctattcccatccgccctttcaggtggacggcaacctagggctggtaggggccgtcgcggagatgctgttgcaggagccacgacggtcggattcgcttgcttcccgctctgccaccggcatgggaggcggagggcgaggtgatcggtctgcgggctcgcggcggctatcgcgtctcaatgcagtggcgcgacggctgggttacctggttcgagatcgtggcagaccgtggccatgctgaagacgtcatcatcgtggtcaacgggcgcgaacactggatccgccctgataaacgccgaccgtggtcacggcacctgtaatcctaccgtcgggcgagagcgtcgccccgtcgggcagccctgtggcagtgaagtgcacgggcaagccacgcgaatcggtggtcggtcattcgggagttaccggctggcccttatcgctgcgcatttgtcccgctgtcagctgggtcaccacatcaggggcct

SEQ ID NO: 45941 - DNA, 832 bp, Setaria italica
  Peptide Sequence Number=SeqID_111915
cctaacatttcattgtgggtcctccaaaagtgtgttctactgatgttctcggtaacaaaaatcagtagggcacctcaaaagacaaacagctttgcagctagatattataaagaactagcatttgagactaataattctatcaaccaaaagcttaaaacagctcaatttaccaccgttcccttggtctgccatcaggaaatacaggaacagctgccctgccattggcagaaccatcagtgtttttcatagtaacctcaacttcttgtggacttgagtcatcatctgcaaagtctggcggcgcgtcatcattctcaccaaaccaaccatcgccccattggtagccaccatccgatttgccaccagaaagttcactaataaaatcttccatatctgacagtccctcatcttcatcatattcttcgtcacttccttcatctgacaatcgcacagctccattggctccctcagcttcctcactggtcctagccccacctcttctagggaaacgcgggacaacaacgagagccctcattttctccttaagcagcaccagcttgttcttctcaaccagctgtgagtccttgtatgcttcgcggaggaagactgagtccctatcccctttgaatgatacataaaacatgtctgggtgacgaatgatcatgccccgcaaggattgcgagaatcggaactcctccctgaagtgcgtcaggtgatccaccaacgtgcgcttctcaactgttaagctaagaatctcatgaaccactccgcaagcatgcttctccttctcagcagacccagaccgcaggtgcgagaagtcagcatatggcgaaat

SEQ ID NO: 45942 - DNA, 450 bp, Setaria italica
  Peptide Sequence Number=SeqID_111916
ggaagtatttacagcaggaagcatgatcttgcaatgaattacagcaatgccttgttcttgtacttgcaagattttggcttaggtattgtgaagatatctgtttaggtgttgttaaaatatggtaccaataagacagtcagtgaccccatgattgtcagttatccaaaaacaaatatgaagtcacctgtttcgaatcagatgcaaactaaatacaattaaattattattctttcaggttaacagttgcaatttgtgaatcggaaaggtggagtatgtcattgtgattatatgtatctgattcgctaataagatagccatgttaacagttgcacgtttcaaaatgctatccggaaagatgtacaaacccacaagttttgaatcaaacagaatctaatatgaattgcccactgattacgatcaatctttattttattctatttaatttactta

SEQ ID NO: 45943 - DNA, 472 bp, Setaria italica
  Peptide Sequence Number=SeqID_111917
gcagtttttactaaatttttatctgtatataacttttacttgtttatcttaaaaaaactgagaatatgggtttgagttggcattgttcactgagttcaaattttttaaagactcgttccctgctcccatgaaaagaaactatgtgtcttctatttgattatctgtaaatacatgaagatatttacaataatcttgttaccaaagcggtccaattgttcaaaatcgcatcagtaatatcttgtgttcttgtttttatgatttttttgtaagatgcaaatattaatgtaggatacaaactaccggcgccgcacatgttagcattaattgttctgtctgcattatgtaaaggaaaggtagctatccatctgtgaacaggactgcatttatgttaaacctgtacccctttaaaattatgtttatgtttatgtgaatgagaaatgaccgtgggcatgaagttgtgttagcatatttg

SEQ ID NO: 45944 - DNA, 471 bp, Setaria italica
  Peptide Sequence Number=SeqID_111918
acgaccgtcatcgacgatgccctcaccgaggatccctcgtcctcctccgccgccgtcggccgcgtgcagggcttctacatgatgacgtcgcagtcggggggcgccgtgctgacggtgtgcgccaacctgctgctgacggcggggggctacaacggcagcaccgtcgcggtgatgggccgcgacgacatcgcggcggacgtgagggagctcgccgtcgtcggcggcacggggaggttcaggatggccacggggtacgtgctgtggaagaccaacagcatgaacgggcccgacgccaccgtcgagctcgacgtgtacgtcaccacgggcggcggcgccaccatcgactcctcgacgcccgtcggcggctcgtcgtcggccgccgccgtgcgggttggagggtgggtcagtgcggtgtttgtcgccgttccggttacggtggttggatcctacgtttagtttggtggtgcggta

SEQ ID NO: 45945 - DNA, 414 bp, Setaria italica
  Peptide Sequence Number=SeqID_111919
agacggcggccgccatggtcgcggtccacctccaccgccccgaggtcctcccggacccgttcgtcgtccccggcgggttcccgtgccccctcaagctgcgcagggcgcaggtcaacgaggaggctctggcgcacctcccgctcttccgcgccgccgaggccgagagctgcgccatcgcgttcaacaccttctcggcgctcgaggccgacttcgccgcctactaccagagccagctcgtcgggcgccgcaaggaggtgttcctcgtcggccccacgcgcgccgccgccgtctctgcccgcaccgccgagcgggaccccatcctgcagtggctcgacggccgcccggcggggtcggtggtgtacgtgtgcttcgggagcacgtgcgcgctgggcgagagccagctccgcgagcttg

SEQ ID NO: 45946 - DNA, 432 bp, Setaria italica
  Peptide Sequence Number=SeqID_111920
gggcggaggagaggagcgaagggagcaggtgggaggggagggatgggaacgaggcgatggaggaggcggcgacgtcggggtccgggaaggagaggtcggagctgagggaggagaggaggagcgggtcgaggaggtcgggcggcagcgggagcgcccggaggagatcgagcgcgaggcgcttgcagacggcggaggagggcgccgacaggatctcggtggcggcggtgcgggcgagcgcggagacgtcccgccccgcggcgcactgctgcagggcctgcagcagcgcggaggactgccggagcgcgtccgaggagcggaggtcggtggtgatctgcgcgatgaggaggtccatcgcgcccccgaggtggaggggctccggcgatcgccggagctgggggagaggggtggtggcctagatctgagggagacgag

SEQ ID NO: 45947 - DNA, 418 bp, Setaria italica
  Peptide Sequence Number=SeqID_111921
gtctccgactcagtgtgagtagttctccgactcagtgtgagtagtgagcaggcggtgagctcgtttcgggaggttttgtttgctaggggcttgttgccagtcaagcatgatgactaccatatgatgcttagatttttaaaagcaaggaagttcgaccttgagaaggcagcacagatgtgggcagacatgctgcactggagaaaggagttcgggacagacacaatttttgaagattttgaattccacgagctagaggaggtcctgcaatactatccccatggttatcatggggttgacaaggaaggaaggccagtatacattgagttgcttgggaaagtagaacccaacaagcttgtacaaattacatcagtggagcgctacattaagtatcatgtgcaagagttcgagagagctttcc

SEQ ID NO: 45948 - DNA, 608 bp, Setaria italica
  Peptide Sequence Number=SeqID_111922
acctccagggtgatcctccaaaaacttggtcacattgtacacctgtgaaaatacaacatatccgttagaaagctctgtttatggaaacaggaaggggtttactttttcatcaatacagtcatacgaagccttgtcagcatctcaattagaggaaatgaccccaaacagtagcccatctttcttcatcacataaagtttacagaagtaaaagcaaccatcatttatttatctcaaaggggaaaaaatgtatattcaatcacagggttttatagtgccagcctgcatataggagaatatattttgtggaacttaaaattgagatacaaatcaaactaatatcacagttgttatacaacgacgacttggaatactagtacaggctactaaaatagtgagcctacagaaccaaagatgcaacaagaacattccagatgcactacaagacacggttgaggtaactgaggccaccaaatattataggctgcataataatctttaaaaggtttggctccaagaaagtgacaggttaccaaagaacacttaggtgtatatacagacaatatggacagacagcggcacctagaagaatgtatgctcactagtgagac

SEQ ID NO: 45949 - DNA, 428 bp, Setaria italica
  Peptide Sequence Number=SeqID_111923
aatacaagtacaatgactcctgagatacaattttagctagcataatctggtggggctctgtgcatgggccgcgcgcacacgctcgttgcacctgcacctgcacatgtgcaaatatcatagagtgagcatattcatgtcagcatgctttcttagtctctgggataaatagacattttagtttggaatttggatatggaagtgttgtttctagtgcagttttggaatttcagaagcttaggataagtactaactactatacaggcctgttctcatagcttctagtgagccttgatcattgtaatattaatctttttcgactcttcattgcagatgagagtgtggttgctcttgccaacggatgtccacacctgcgatctttaggtctttacttctgccagaatatcacggaccgtgcaatgtactccctc

SEQ ID NO: 45950 - DNA, 226 bp, Setaria italica
  Peptide Sequence Number=SeqID_111924
cacgctgaaagtggtggcccattgccgacattatcaggatggaaggaccttccagtggagctactgttgaggatattatcaactattggagatgataggatggtcatcgtggcatctggtgtttgcacaggctggcgtgatgccctgggatggggggtcactaggctttccctctcatgcttgaagacagtgcagtagaggctgttgccaactactgtcatgatct

SEQ ID NO: 45951 - DNA, 1283 bp, Setaria italica
  Peptide Sequence Number=SeqID_111925
cgcgccgccatgggcctcttcttcaaccgcttcttcttcttcatcagcgtcggcacgctcctcgccgtcaccatcctcgtttacgtccaggaccacgtcggccggagctgggcctacggcatctgcaccggcgccatgctcgtcgccatcgccgtcttcctctccggcacccggcgctaccgctacaagcgcggctccgggagccccatcgtgcaaatcctccaggtactcgtcgccgccgcccagaagcggagcatcaagcagccactcaccgcctccgcgctctacgaggaccgccccgagcacgcccgcatcccccacaccgcccagttcccgtgcctggacagggcggcggtgatggcgggcgacgacgacaacgaggtgggacgcgacgggcggccggtgcccaacccgtggaaactgtgctccgtgtcccgcgtggaggaggtgaagatggtggcgcggctcatgccggtgtgggcgacgacgatcctgttctggaccatctacgcgcagatgatcactttctccgtggagcaggcgaccaccatggaccggcgcatgggccgcttcgagatcccggccgcctcgctcaccgtcttcttcgtcggcgccatcatgctcaccctcgccgtctacgaccgcgtcttcgtcccgctctgccggagcctcatgaccggccggcaggggctcaccaacctggagaagatcggcatgggcctggtcctctccatcgccggcatggccgctgctgccatctgcgagaagaagcgcctcgccgtcgccgccaccgctgcggggcaacacgagtcactgcccatcagcgtgttcatgctgacgccgcagttcctgctggtgggcgccggcgaggcgttcatctatacggggcagctggacttcttcatcacccggtcgcccaagggcatgaagaccatgagcaccggcctcttcctcaccacgctctcgctcggcttcttcctcagcagcgcgcttgtctccctcgtcaagggctgcacgacgtggctcggcgacaccatcaaccacagccgcctcgactacttctactggctcctcgccgtgctcagcgtcgtcaacctcgttgcctacctcgtctgcgccatgtggaccacgccgccggccagcagccaggcggagcagccacagatcgcgatgaccgcagacgagaaatgctagcaacatccctgctacagacctctattattgcaccagtcgctattagttgtcgacttcaaaatcacacatatacgtactacttgaccgcc

SEQ ID NO: 45952 - DNA, 343 bp, Setaria italica
  Peptide Sequence Number=SeqID_111926
caaggcaataacttggagcttgaattcagaaccatttaaatcaaaaagggtactcgttcttgagcaaaatggaacaatgggacaatgtagagtatgtttgaggtgaagttgaactaagggcagaagaatttgatcatgaaatcaagtcattaagggagctctatggtactgacgacgactgacgaaactgaatgaaggattcagtgcaattcagaagaactcgagaaaacaatccaaattccatcaaattcagtgtttatctcgaactgacgccaaaataaaagatgaccagctcgagtttatctccaagttctgtttaaacgtgggaggccgtcggattgcg

SEQ ID NO: 45953 - DNA, 358 bp, Setaria italica
  Peptide Sequence Number=SeqID_111927
atcgaacgccgcccgccgcacgctccgtcccgacaccctccccgcgcccgtcgccgccaccgtctccacctgaggaggaggaggaggaggcggcctcggcgccaccatgtacctctacagtctgacgctgcagcgggcgacgggggcggtgtgcgccgtcatcggcagcttcagcgggcgcgacgcgaagaaggcggcgtccgggtccgcgtcgacgcaggagatcgccgtggcccggggaagcacgctcgacctcctgcgcttggacccggagacgggccgcctccgcacgctcctctccgtcgacgtcttcggtgccatccgctcgctcgcgcagttccgcctcaccggcgccagc

SEQ ID NO: 45954 - DNA, 607 bp, Setaria italica
  misc_feature (528)..(607): n is a, c, g, or t
  Peptide Sequence Number=SeqID_111928
atccaacatatatttcaatagtgtttattgtacaaaatgccacattcatcagtatggcccaaagaccatactgatgaatgtggcaatggatcatctcaaatcacaacatgttcaagtggcaaggtgccagatgaaggtagtagccctcaggtctcatcagaagttgcctgcgatgaaaatgctatactgaaggttatggaattccttgccttgccgagggctgatgccatccaactcctcatgcagtacaatggaaatgcagagacagttatccaacatatatttcaatagtgtttattgtacaaaatgccacatacgttttgcttgctttaaaacagaattctttgtcaatacctttcttgtctttgtacaggaggttctgatagaactaggctacgttcccttctcctgtatattctgcttgtcacttcgtccatgtaacaccaaagcatagcaaaagaggaacccaaataacagttttcaagcaagtcaccaaggaataatggttacgttcttggattttttagnnnnnnnnnnnnnnnnnnnnnnnnnnnnnnnnnnnnnnnnnnnnnnnnnnnnnnnnnnnnnnnnnnnnnnnnnnnnnnnn

SEQ ID NO: 45955 - DNA, 1620 bp, Setaria italica
  Peptide Sequence Number=SeqID_111929
cccgccgcgctcgctgaaccaatcgcctcctattccacctccacaagcaaagattcgtcgagctggtgaggaggggcacggaggcggacagggacgccgcactcgattgcctccgcacggccctcgcgccctgtgcgctcgacgcctacccggaagcttatgaggagttcaagcatataatgcttgtcttgatatatgacaaagatgatcaattctccccagttgtcaatgagtggtctataaagaggaggtttgaacttgctggtttgctgtcatccatactaagggctcagttacaagcttatgatcctattttgtcgatgaccttaagatacttaataagcattcacaaggtatattgcacacaccaaggaatttcatcacctttatctgatcttactgagcgactgctctttgaggatcgtgatccacctgtggttcctcaggaatgctcactagaagcaccgccatttgatgaggttgacgttcaagccctagcgcatgctgtggagttgacaagacagggtgctgttgatagcttgaagtttgcaaaaggggatttatatcaagcatttcagaacgagttgtgccgaatgaagctggacgtgacacttctggataaacttgtacacgagtattgcatatacaggggcatagttgaaggtggttcccatgttcttcctggaactgctgacttgaaatgtagtcaaaacaattatgttaataatgaaacacagcttgaatgtgaaatggctaacaatcagaatggagattgtagcaccagtgatatcacccgtgatgattcttggtccaggaggttacgtagggttagaagtagtacatctgggcagcgaagacgaaagagatggagaggacgggtagatgatctagattatgcttgtgaagctttattggatgtaaataagcatgatagcttgtctcctgcccttgacatggacgaagatactgtggtagaacaacaggacttggtggcaaattctaatacatctgatactaaaaacatggaagatcagaaatatgaagttgtcctggagatgcaggacctcacacgaaaaggaatggcttccaaagttgtcgaggaaataagcagcatagatcctgatttctttcaacaaaaccctgttcttctgtttcagttgaaacaggttgaatttcttaagctagtagctgctggtgaacatgttgctgctctcaaggtagcatccactcatctgggacctcttgctgccaccaaccaagctttgctgaagcccttgaaggaaactttggtaacactgattaaacccaatggagatgtactgaatgcagtatctttgccggttcttgcaagttctctccaggttgcaatgagcaggaggcttggtattgaagaaccccagctaatgaagatagtcagagcagcaatccatacacacactgaattggtttaagcttcagatgtgcaaggaccgttttgagcattttttgaagattgattctctgaaagaggttgatccaccagtggaagttgcagtatgcccaaggaccatactgatgaatgtggcaatggtattctattcttctaaattctactaactatttgttttcttaagtttggtt

SEQ ID NO: 45956 - DNA, 567 bp, Setaria italica
  misc_feature (558)..(558): n is a, c, g, or t
  Peptide Sequence Number=SeqID_111930
aaaccaaacaactaatttagcaggtaccatcagagagaacattgtgtatggcaccgaaacagcgagcgaggaagaaattgagaatgcggcaagatctgcaaatgcacatgacttcattagcaacctgaaggatggatataacacaaggtgtggtgagcaaggtgttttactttcaggagggcagaagcagcgcattgctattgctcgtgcgattctaaagaatcctgcaatattgcttctggatgaagctacaagtgcattggacagtcagtctgagatggtggtgcaagaggcattggaccgaatgttgacaggcaggaccagcgtagtggtggcacacaggctgagcactattcagaactgtgacatgatcattgtgcttgagaaaggaattgttgtggagaaaggcacacatgcatccctccttggaaaagttcctgctggaacatacttggattggttaatatgcagcaaggaagcaaaccacaccaacagctctgtgattctgcatgaaaaaaccatagttccacattagcagtacatgtgctgtcttccttnaacaatggg

SEQ ID NO: 45957 - DNA, 441 bp, Setaria italica
  Peptide Sequence Number=SeqID_111931
tactgcatcatgtgcgagcgcctgtccatcagggagaggcgaaccaccgccgttctggggtgcctgctgtacctgagcctcatcggctacaaggctgcagtcccttatttcacggtctttctgctgatcaactatttcgcgtcattttacatcatattccggcgcacgtcccagaatctgatagtcctgcaggagcagctcagcttcatagaggaggaggacatccattcattgcacggcactctgaacacaaagtacacaatgttcaagagatttcagggtacgatgcaggtggcagcagtggcattcatcatggtgtacatgagggctgacgacacgccggataactactggtttcgcgtgttagtgcgtgagtgggtgcagttctgctacttcatgtacattgggtggaacttcagaatccctgaagcatcgcttcta

SEQ ID NO: 45958 - DNA, 428 bp, Setaria italica
  Peptide Sequence Number=SeqID_111932
tggctcttgctctgggcggctgggcctcagatctcactcgccttctcgctcatgtcatggatgcatgggagagggaagcccatctgcccaggaatggatttcactgcaagcaaaggtagaagggatgggtggctgcagcagcaaggaatccagtaaaaattctctggactcgactctggagtctggaatctgaagcctgcagctgcaggcatgggcggcagaaggaacatcatgccttccacgacccaaaattgcattccactgctttctgttctttacacaggttattgaaaaagtttctggctgtgatagcatagatgcacagtgtgtaaatttgctcacggttgctataaagtattactggtaccacgcaatgcatttctggaacaagtagatataaattatttcctcaatccaaaaattggagg

SEQ ID NO: 45959 - DNA, 317 bp, Setaria italica
  Peptide Sequence Number=SeqID_111933
gctcgcggctctgcttcgttttcggcgtcgttttttttttcctttctcccgtgtcgcggccggcggcaccctccccaatcccatcgccatccgcccatccagaccccgggcggcaccccgcggcagcaggcagcgacgcagcgtcgcggctcccgcaccgcacctccacggcttggccaaggtgcccaggcggcaggggcgaggggcggatccgccgcggcgccattgccaggcagtgctggtccacccggatccacgccatccgcctgcagctacccgtgttcgcgcgccgtcaaggcggattcagcctccacgcc

SEQ ID NO: 45960 - DNA, 602 bp, Setaria italica
  misc_feature (602)..(602): n is a, c, g, or t
  Peptide Sequence Number=SeqID_111934
aaggcccaggacaaatgagaccttcagcagttcagctttccagatgaacctagcagattgagtaatgcataatactatgatactaatcctaacgcagtttgactaccatgatcatcagctttcaccagaacagaaatattctatctcagtcccaaaagggagtttcataattattgacgacaacatggtacaagagttcattgcttccatcaattcccagctattagcaatgaacaaaagaatttccaattactggtatggcttgcactttcgactgacgatttccatgtctaaccaccaactcaaaattatgacaacccaaaaaatttcagagtagcactgaagtaggatattgatcaaacgtgagctggctgcaggtaagttcgctcatagaggcccatcacctgatcagctactgcccacattatagcctgtccaggtggaatcctcatgagccgggggagcaggcctttccacagcgctcgcagcccctcttcagcatatattgttcgaatcgcatggaccatgcctgtgtacttgatgtcaccagttctcccttgagccatcaacctagttttcacgacatcgaagggtccagtgcn

SEQ ID NO: 45961 - DNA, 413 bp, Setaria italica
  Peptide Sequence Number=SeqID_111935
aaaacaaaaggaaacccgaaaacgacaggcccgacgagttctcgccggagaggttcgaggagagtggaagggacttcagagggacggacttcgagttcataccgttcggcgccgggcggcggatgtgccccggcatggcgttcgggctggcgcacgtcgagctggccctcgcggcgctgctgttccacttcgactgggagctaccgggagggatggcggccgaggagctcgacatgaccgaagcgttcggggtcacgacgcagctgcggtctgaccttgtggttgtacctcgtgtcccggtgtccactgggtgaacatagatttttttttttccaaggaggttacagagttagcgtagctttattcgagaaaatttagtagtcacgcttgtgacaaaaaaaggagaaggaatt

SEQ ID NO: 45962 - DNA, 322 bp, Setaria italica
  Peptide Sequence Number=SeqID_111936
gtttcgacgcaataggcgcagtgggacgcgctggtggacgccgcgctcgcgaggctggaggccaggagcctgctgcgtgccacgcgccccatcgcactcgcgccgccgcccgccgccccggagaccttcgccggcccggggccctgggaccgcgccgccgtcgagatccggttcgaccgcgacacgctccaccaatggctcgctgaaggtggtgagacgggtgagcaggaagagaagctggacgggaatctgattcttttctccgggaatgactacatgggcctcagctcgcatccggcagtccgcgaggctgcagtgaagg

SEQ ID NO: 45963 - DNA, 476 bp, Setaria italica
  Peptide Sequence Number=SeqID_111937
aaacaggaattgctaaaggtatttgggcacaaacaggcttagttaatcatggttttatgcaaattttgttgtatctgttgcaactttcatacagaaaattccacaaacaccacacaaaagcaaaagcatagcttctttggtgattgcacatacaacttttggcgtattagtaaagggatttcttgagtagttgtagacaaccctgacacctctataagtagcatctgcatttacagtactccagtatttcactcacaagtcacaacagatgaggggcttcatttgactagattgaactgccctatgccatattctggattggttcacttctgtccagtaaatttcgttaatgttagattcaaacttatgtaatatgctgttcacacgatcttaccatgtctgcaactcaacacacattttagctttatctgaacagtacacactaaccccagggaaaaacataatcaatttggcct

SEQ ID NO: 45964 - DNA, 415 bp, Setaria italica
  Peptide Sequence Number=SeqID_111938
taaagtaaacccccgtaaaccgtaactaaacccggtaacgttaacctaacgtactaattaacgtaacttaaccaactaccactactgaacagccgatgagctggctggctcgccgccgctccaccagcatcaggcgtcagcgacctcctgttctggaggtctcgagatcctggcaccacccgtgtgctgcagagtgaattacagtcaccggtggtgataggatctcgtagtagtttcgttcatcagcattatcagtaccaacgggtccttgtgtggttccgtccagtaatccgtcaggtagttcagcttctgctcggtgtgcttgtggatttgttgctagcttggaatagctctagctggccttgctgggtgttgcagtgtgctttgttagtttgtttcagtgtgtttgcctgtt

SEQ ID NO: 45965 - DNA, 516 bp, Setaria italica
  Peptide Sequence Number=SeqID_111939
cttgcatatcagcagcaaagcttgtgaagctacttgagtccaaagaggtcaatcacattgaattttgtagaataaaaatgtcgtggacgagattatgctcatgagcagaaatgctgagctttctgctatcctgaacaaattgctggtacctgcttctgtggttaccggtttgaatgttgaagctgatatgctaatgaacgaatgtagctttatttcacaacgaatagctgaagtgatttctttaggtgttgaaagtgatcaggcaataacctcattcgaatatattccaagggagttctttaatgatatggagtcatcttggaaggggcgtgtgaaaaggatccatgctgaagaagagtttgcaaacgttgatagagctgctgaggcattatccacagcggtcattgaagactttatgccaattatttcaagagtgaaatctgtaatgtccacaaatggaggtcctaaaggagaaatatgttatgcaaaagatcatgaagctgtttggtttaaagg

SEQ ID NO: 45966 - DNA, 418 bp, Setaria italica
  Peptide Sequence Number=SeqID_111940
cggggcagcgcacgggctgcacgttccactcctccatgaggatcgccttggcctgctcgcagagcgccttgacctccgcctccgccaggaacttgcactcccgcagctgcgagatctggcggtccagatccgcgtgcgacggcatcgccgctgccgctccgctctacctcaaccgccccttcccttcccttcccctcccctcccctcccctcccctccccttacctagttccctccgccgccggcgcagccgaggagggggaggagcgccggacccggcgagcccgccggcgaggagggccgcgggggcgcgcgggggcttcgaggggatcgacgaggagtgaggtggaagcggaggaggtggaggtgctagcgctcatgcctccatttcttctcacgcttcgcggtgtttgttcgtg

SEQ ID NO: 45967 - DNA, 660 bp, Setaria italica
  Peptide Sequence Number=SeqID_111941
attatttaagaacaaactgtgtcaagaaattggatagctaaaatatggtaggcttctatattaaatcacttcctcactgcacctgaactaggaagtacggagcacaagatcatgcaaaactgtaaaatggagtcaactgggttctattttgccttacagaaattcacctggccatagaatagaaaaacacacaactgcaacaatgtgaacgaataattctgaaatctggagttgtttagttgctacagttcttctcacaatcatacaagaatgctcactgtcccatgcagatgcaaaataaatggttcaatttacaaaactaccgtacatatatgttaaataaatgttaccatatctcataaatgtaactatctatctatttctttagagccagacctgttgtgtctatgcagatttcagctattatcaacacatcttgttctattatcaagatatctcaaaaggaaaacaggatccttaaccccaatttcacaagaaagacatacatagaatggtctacaattcaaaacatgcgaggtgtataatcatccacaattagcaactagtcacacatattgtggaaattctgttgccaacctcttgtatgcgatcaagggcacggatattatccaatgtatccagtgatggagagagaccacc

SEQ ID NO: 45968 - DNA, 512 bp, Setaria italica
  Peptide Sequence Number=SeqID_111942
tccgtaggtcgtctagggttcgtaatttggtaggtaagtttcttggttcctattgtttcttcaccgtattttcaagaattgcagccatgttaccacagcggtaacaatagttcggtgcactgaagactgtgacgacattcttatcctgtgcccaattgtatccttccattacaagttgatgggcccttgagatgagagagagaccatttgtatggttgaactgctgtgcaatgtcttgcccaaatgtgtaacctgctcctcttggtgaaattccccaaccacatctgtcatctgggtcggaccacaaaagatcacacatgggtccttcatgaggaacctcttgtatgcgatcaagagaacgaatgttatccaatgtatccaatgatggagagaggccaccatgaagacagaagacctgattttctataagagctgtgagaggcaaataatcgaaacaagtactagtaaaagtaacttaccaataacaatttagacaatttaccaataattta

SEQ ID NO: 45969 - DNA, 563 bp, Setaria italica
  Peptide Sequence Number=SeqID_111943
gtctgctctcatgatttcctctcaatattgtgattctgtctctataacgtacttttagagccactaacagggtcaccgtctccactgagtagtagccacggtctgcagaaaatacccatagtcaattcaacgacgtagtcgcccatgaagaggtagttggtgtcgggcgcgtcgccgccgatgcggaagagctcgatgaggtcgtagaactggccgtggatgtcgccgcagacggtgacggggcagcggaccggctgcacgttccactcctccatgaggatggctttggcctgctcgcagagcgccttgacctccgcctcgggcaggtacttgcagtcgcgcagctgcgcgatctgccggtccagatccccgtgcgacggcatctcgcccgccgcccgctccccccgaccgctgcagatgttggggtgggaggtggggggcgactccctctccggccggcgagcccgccggcggtcaggtcggggctagggtttgcgggggatcggcgtgggacggggaggaggcgcagctcatgcctcctattttttttcggccgctgcttt

SEQ ID NO: 45970 - DNA, 575 bp, Setaria italica
  Peptide Sequence Number=SeqID_111944
ttaggtttaggtctaaggcaaaagacctgattttctataagagctgtgagaggtaaataatcaaacaagtccgtgaagtacttccacacgtttgcatttccatatttccgtaagcattcatcatagaagccatacacttgagttatttgtctgctctcatgatttcctctcaatattgtgattctgtctctataacgtacttttagagccactaacagggtcaccgtctccactgagtagtagccacggtctcacaaatccacagatcgacggaagcccagcacgagtcgcgggaggctagaagaggcgggggaactgaccgacgtagtcgcccatgaagaggtagttggtgtcgggggcgtcgcctccgatgcggaaaagctcgatgaggtcgtagaactggccgtggatgtcgccgcagacggtgacggggcagcgcacgggctgcacgttccactcctccatgaggttggccatcgccaccgccaccatcgccaccgccaccatcaccaccgccgccatctccaccgccatcaccgccgccgcattcaccgcctcctcccgcgccagttcac

SEQ ID NO: 45971 - DNA, 3245 bp, Setaria italica
  misc_feature (1)..(61): n is a, c, g, or t
  Peptide Sequence Number=SeqID_111945
nnnnnnnnnnnnnnnnnnnnnnnnnnnnnnnnnnnnnnnnnnnnnnnnnnnnnnnnnnnnnttaacgttttatgtttcgagatattctattgcagcttctcttctcttgtgtctcaggataatacaaaatgggggtacaacaaaaagaaaagaaaatccaatcgccatgtacttttaacatgctctatggaagttctgagaagcagcaacaaaatctccacaccaaagaatgagcagggtacaaggcggctgaggaaacagattttttttcttaacggcaacatctacagaccccaggcgctgcagcacagaggagagaagttaaaaggagccgacacgccgattacaaaaagtagtccggggttttgcgtgtcatgtccggctcgatttgccgcggagctgggtcgaattggaggaagttctgatccatgttctctccaatttcgaggatcgcagccatgttaccgcatcggtagcagtaatttggcgcgctgaacaccgtcacaacattcttatcctgacaccaattgaacccttccattacaagttgatgggctcttgaaataagacttagtccgtttgtatggttgaattgctgtgcgatatcttgcccaaatgtgtatccagcacctcttggtgaaattccccatccacatcgatcatccggatcagaccacaacagatcacacataggcccttcatgtgggacctcttgtatgcgatcaagggcacggatattatccaatgtatccagtgatggagagagaccaccatgtaggcaaaagacctgattttctataagagctgtgagaggtaaataatcaaacaagtccgtgaagtacttccacacgtttgcatttccatatttccgtaagcattcatcatagaagccatacctgtagccaaacactacatgtaaagagcaccctagcactttgggtgcagttgtatagttgcatttcacaatgcagactgatgcaagaaaacaactgaaacaatgtatactttatcgcaaaccatgttgttattggaagcaaatttcagagttctatcaacatcatatattgaagcaattgtggtttcaatagtaagcgtgatgttgtgacccagaaacatcctttccacgcatcaataactggttaattcattacaagtcccgcaaagaagctaagttgtgtctataagatatgttgagacaatctcatgccatagaaagaatgcaagtaatcgatcattgtaccaaaaaccagccagttgttaaattaaccaactggaatattgtgaagttaatttagttgttcaactctaaacaggaatctataattgaagtcgcaatttttttttcaatctaactaagctagcggaataatgcgatttgcaactttttatttaattttttcaatctagataatggtacgaagatgaaggcctgacaagcatggaaatagagagtgtggattggaaggttagacaaaaatgtgtaaagagaggttcctcactttctttgtggaatgttgttgagggcttagagggctaggcccccactaaggataaactacaatatccaaaaattacaaaaccactagatctgcagctgcaggttcaggattctgtatccataccacttctccacattctaatccactctagaaaatgtttctacctcaaaatcaacattcactcagatttagaatgtggatagagacagagttcaagttctattagcatccaattcaaatgtagataaaaaaaggagcttgcttagcctaacttcagcatcaccttatgactttctgaagctgaagctaggtcaaaaatgtggagctcattcggcccctcttgtaaacctaagctcctttctactatcacaaaatccaaaagacacttacaccatggagttcaagaaaataatacagcaaccagagaaaacataagttttgtgccataaattgatttaattcacagccgttacgtgatcacatatgtagtccaaatactatgctaagttaatatttacaagcatctgatgccctttaccaagtaatgttactatcttcaacaaggatcgtgaatgaaaatgaagcaaagaaatccaaaatgcataatgacctgagtattacgagaaagcaactgatacggccagaagataaagataacaattgccctaattctcttgacactcaaacttttaagtgcattttgtaccaaacattattatggactcaatgtccagtaaatagcccatttcaaacttaaccatttttaggaaactttacttaatagtgccctccttttcttaagtaattgtaacaagaaaaatcctatgctgaaagaaactctctactgctgtagagtacaactagaggaataggaactcacacttgagttatttgtctgctctcatgatttcctctcaatattgtgattctgtctctataacgtacttttagagccactaacagggtcaccgtctccactgagtagtagccacggtcgacgtagtcgcccatgaagaggtagttggtgtcgggggcgtcgcctccgatgcggaaaagctcgatgaggtcgtagaactggccgtggatgtcgccgcagacggtgacggggcagcgcacgggctgcacgttccactcctccatgaggatcgccttggcctgctcgcagagcgccttgacctccgcctccgccaggaacttgcactcccgcagctgcgagatctggcggtccagatccgcgtgcgacggcatcgccgctgccgctccgctctacctcaaccgccccttcccttcccttcccctcccctcccgccgaatcggcgccaagaggatgggtcccggcggggcagcagcagttgcgctctctgcgagggatccaacctcccctcctgctgcaccgcgtgcgtcaacgcaaggctggtcgagtaccacgcgaggctgcgcatgatgaggagcctccgcgactccctccaagcccgcatcgccgcgcgcctcgaggccaagagcaaagtggatgagcagaggatctggtcccctcccctcccctccccttacctagttccctccgccgccggcgcagccgaggagggggaggagcgccggacccggcgagcccgccggcgaggagggccgcgggggcgcgcgggggcttcgaggggatcgacgaggagtgaggtggaagcggaggaggtggaggtgctagcgctcatgcctccatttcttctcacgcttcgcggtgtttgttcggtg

SEQ ID NO: 45972 - DNA, 533 bp, Setaria italica
  misc_feature (502)..(502): n is a, c, g, or t
  misc_feature (508)..(508): n is a, c, g, or t
  misc_feature (525)..(525): n is a, c, g, or t
  Peptide Sequence Number=SeqID_111946
gccccgacggcggcggcgccgtgtacgggtgccgtggggtcggcccggcgagggcgtacgcggtggacgttgccggagagcgcggggatgcggtgaccgcgacggtcgtgtgccacggtgacgacggcgcgtccaatggtaacctggagcacgcagcgtcccgtctgctcggcgtcggcggcggtgtgggtgcggcggtctgctatgccgtgcccgacgcgcagatgctcttggtgaagagcgagaaggtcccctcctcagcgtaatacgtgttggttttacgaactagaacttgtgatgcaacactgctagtacttgtacggtgttgggttttttcctcattttgaggaaaagtatgtgtgtcagtgtgcttgtcgatttactttttgtttaatttggtcgagcgtatgtgctccgttgagtgaggaatgtcaaaaataaagggcccatctacttgcgaagttacgaaatgcatatgcagtttttaaaagaaaaaaaaaanaaaaanaaaaaaaaactaaaagngaactacg

SEQ ID NO: 45973 - DNA, 1149 bp, Setaria italica
  Peptide Sequence Number=SeqID_111947
gccgtgtcccaagctccccccttcccaccaaatttgcaagaaacccgccgccaccattgcaagaacctcgaaatacaatcaaatctttcgctattccatcacgctggtgatcgaaatggagctcccaatccggctttaatcagagccatcagacctccgaaaatagtgttcaaataggggcaggagcgaggagccatcccatttttagccgttgccgcaggcccgcagcgggtcgtcgtcgtcgctgctcccaatctgcggccgtccgtgttgccttcgcctccaatccacaagagcgagcagcaccgaccgagtcgatccgctcctcttcttggttcttggtcaataagtcagctcagcaggaaagatccgtgagggttactgcagtcggcagggttcgaggattaggaaggtaaccaagaacgcaaggagcatctaggaagaagggaggggagatttgggtgtagattagtagatatattacaaatagatttgctttttgaggaagttaattagcaaatagattggtgaagaacccttgcaaacaaaaaactaacagggaaaatttgcaaagaaaaacatgtttgggacccaaattagggatgtggcagatgatttcaaccccagtaggaggaggacattgtggaacacacccaacaaatcgatgcccaccaccacccacaccatcaggtacaacacaggcaagaaaaacctgttcaacccacatctcatgtctgtcaagtttgaggacctgtacgggttcatggtggagggcaatgtggatgatgtcaatgtgctgaacgaggtaagggaaagaatcagggaacaagggagggtgtggtgggctctggaggcaaacaagggtgcaaattggtacctccaaccaaagatatcttcgaatgaggggatgattagtgtcacgtcacttaagctatcagtgctcacaaatactattacactaaggaggttgatcagaaagggtgtgccgccagtgctgaggccaaaggtgtggttatctgtgtcaggagcagccaagaagcggtcaacagtgccagagacatactacgatgagctgatccgggccacggaagggaagacgacgccagccacaaggcaaatcgaccatgatcttcctcggactttcccttg

SEQ ID NO: 45974 - DNA, 564 bp, Setaria italica
  Peptide Sequence Number=SeqID_111948
taccagcaactaaaggactctcagggtttacttgtttccctagcagaatttctttattttagcagcaacatgatgagatgcttttatctgttgtgcctttgtagaattgtgggctaaggaagctcatatatcttgttgaaggtgatccaaacacttcgaacggatctgtggcaagcattaaaacagcctgcttcaccactgagattttgaaggatttgatgttctgcggaccagtgggtataccgatacccagagaacatatggctatctaacacaatcaatagttgactactacagcacaaatttcagtcttgctaagagtgctcgtatttgcccaacctatgatgagtttgagggaaagtgccgtgaccttcagaagaaaacagtgagccaaatatttgctctgcaacttatgcaggtgccacaagtaacagagaaagttgcgctggctgttgtagagttttatccaactcttttctcactcgcaagggcgtactctatgcttgaaggtgatacccgtgcccaagaggagatgctgaagaacaagagcaaggtgataaacgc

SEQ ID NO: 45975 - DNA, 852 bp, Setaria italica
  Peptide Sequence Number=SeqID_111949
tagggttaacttgtatttgaggtacttgcatagtatgcaaagaattctggcagaaatgaggtagaggcccatgaatagaagaatggccagcttgaatatttccactcggcatgtctgtggtccctggaggattggccactgcattcatatatccccattgtggtactccatgagcaacaccatttgcagcctgtggaatccacgtattgcactggctcatgtgacaggctggaaacacatagttaccatgaggtaccaactctggacgagcagccattgaactgaaactgctaggaacatctgcagaagatccttctaagaatagccagccattgttactgcggtactctggtgggtttgaagctgcagaattgggaaaacaatttgattgaaacgaagcattccatggcccatatgcaggattctgaggcacatgagcagatgaacttgagcctgcaaatccatgaaaaaaatgatggttaccagccaccattgcattttttcttttgatgaatccactagcaccatcaccaaaattgacactgctgctactctcatcaatagttcctgtggaatgatataaagatggtggttgcgcattgcccagtccaaagctttgagtctgaggaacatatacgctcacagctgctgttgccatgctagggttgtacacagtagttgggaagacaaaacttgaagcaacaccagcatgtgggtatgaattatgaacatgctggtgctcatgattccgcagatcacagataccgacattagcagtacttcctggaactccaacagcaacttgcacacccaggttggacggatcacttccaggacctccataataggaac

SEQ ID NO: 45976 - DNA, 1146 bp, Setaria italica
  Peptide Sequence Number=SeqID_111950
atacaagcaggccaccgtgtctatatacaaatcgagctaattttgctttttgtatatagacaataatgttattggcgacggtcatccattcctcctatctgatgacaacgctgttgtcttgcagatggggcagaggttcttcatcatcaaccattgctttatgcacgtggcatggtacttgtggccacattcaaggatccctataagttctttagcttcatactcatcctggcatattatgcaagcatcattctccaaagaaagctcagaaaactgatcagacacgccagctgctcctggaacatagaaagttgacctcaagttctcttggatgtaactttctgtcaaaccagtattgacatcgcctatctgctcttccaacgctacaagctcctcataagtcatgttatccacatccagacgcatgtctctatgttcatcaataacatgtcctgcttcatgtatccttgatcgatccatcactgtagcattctgatatggcagaattcttaaaaccccattgttaacttggtttgcaagaggtggatgcattggatgcccaaaagtgtgctcagaattgaatgggagagccagcattcttggatctaatggaaggcctgcggcagaaggatttaaaccatgcaccacattgttactgaggaactgctgatggggtacttgtatttgaggtacttgcatagtatgcaaagaattctggcagaaatgaggtagaggcccatgaatagaagaatggccagcttgaatatttccactcggcatgtctgtggtccctggaggattggccactgcattcatatatccccattgtggtactccatgagcaacaccatttgcagcctgtggaatccacgtattgcactggctcatgtgacaggctggaaacacatagttaccatgaggtaccaactctggacgagcagccattgaactgaaactgctaggaacatctgcagaagatccttctaagaatagccagccattgttactgcgcggttacttcttggttgggttttgtgaaattgggaaaaacaatttgattgaaacgaaagcaattccaaaaaggcacataaggaaattacaacaaagacccaaaagaagaatgacatacctcataagtcatgttat

SEQ ID NO: 45977 - DNA, 620 bp, Setaria italica
  Peptide Sequence Number=SeqID_111951
tgttttttttaacacgaacatgtttatagtatatagaggagccactgatggctcacacacgattacagtcgactactgattcgtcatcaccaaatccttttattctaacaataaagcagtgctgctgctgcatattagagcgctgatcatcatccatcatgcatcatatgggttctggtaagcaacaaacggtgtcccttcactcaatcgtgttgcagtcgatgtcgggggtgatggggtaggacagcgagagcccgcactcctccggcagcgccctcgcggcggagagctgggcgtggacctggcggtacgccgtcttgaggcactcgcaggtggcccgcctgtcggcggtggtgtcggcggccgcgtagagggccctcacgccggcgcagcactggccggatgggctggcgtcgccgccctgcaggaaggacaggcacggctccatgtcgttgagcacgtcggggcacgcgatgtcggcgcgcgccagctgctgctggaccgccagcgccgcgagcaggacgacggcgatggccgagatcgtcttcatggctagttcctggggttagctcttccggtccttcggtgggatggctgggtgactacgagtgagaggacgg

SEQ ID NO: 45978 - DNA, 660 bp, Setaria italica
  misc_feature (610)..(660): n is a, c, g, or t
  Peptide Sequence Number=SeqID_111952
atcccggcggcgttcgtggcggagctcaaggcccggtgcccgccgggggacttcaacacgcggctgccgctggaccgcggcagcgagagcgacttcgacgactccatcctccgcaacatccggtcggggctcgccgtcatcgcctccgacgccgcgctcgccaacagcaacgccacccgcgcgctcgtcgacgcgtacctgggccccgcggcggggagcttcgagcgggacttcgccgccgccatggtcaggatgggcagcatcggcgccatcaccggcgacgatgacggcgagatcagggacgtctgctccgcattcaacaccaactgatgtgatctcagtcggcgtgacagagagagatagttatttgtgtgtacatttcatttcttttagtcgattggttttcgaatttagctagaaattctagagaaattgtgctcgaaaaagtggggcacatcgaggaaggaattgtgcggtggaattgatggagaacttttggtgcagcaatgcgatgcaagtactgcatgcatgtgacgattaggagctgcccctgcgtgcacgggtgtcctaaaaaagataaataaattgatcacttcattcagcaaaaaannnnnnnnnnnnnnnnnnnnnnnnnnnnnnnnnnnnnnnnnnnnnnnnnnn

SEQ ID NO: 45979 - DNA, 1628 bp, Setaria italica
  misc_feature (1599)..(1628): n is a, c, g, or t
  Peptide Sequence Number=SeqID_111953
ctgctgctaccatccacctcgccacctccctctctctaaagatggcgagaaggtgtagtcgtagcaatggtaccaacgtgacaggcttgggcttggccatggtggcctcatggctgctgctgctcgccggcgtctccgacggccagctccaggtggggttctactcccggacctgccccggcgccgagtccacggtcgcctccgtcgtccggcagtccggctccgccgacccaaccatcctcccggcgctcctccgcctccagttccacgactgcttcgtccgcggctgcgacggctccgtcctcatcaagggcggcagcggcagcgccgaggtcgacaacagcaagcaccagggcctccgcgggctcgagatcatcgagggcgccaagacccagctcgaggcccagtgccccggcgtcgtctcctgcgccgacattgtcgccctcgccgcccgcgacgccgtcgcattcaccggcgggccgtcgttcgacgtgccgacggggcgtcgcgacgggaaggtgtcgaacatccgcgacgccgacgcgctccccgacgtgcacgacggcatcgacgcgctacgctccaagttccgcgccaacgggctcgacgagaaggacctcgtcctccttacggcggcgcacacagtgggcacgacggcgtgcttcttcctgcaggaccggctctacaacacccctctccccggcggcggccgcggcgccgaccccacgatcccgccggggttcctgtcggagctcaagtcccggtgcgcgccgggggacttcaacacgcggctgccgctggaccgcggcagcggcaacgtcttcgacacctccatcctccgcaacatccgcaacggcttcgccgtcatcggctccgacgccgcgctctacaacgacacggccaccgtcgacgtcgtcgactcctactccggcctgctcagcaacttcttcgggccatacttccgccaggacttcgccgacgccatggtccgcatgggcagcatcggcgtcgtcaccggcggcgccggcgaggtcaggaaggtctgctccaagttcaactgatcgaccggccggtgatcccactcacgcaccggtcgatgcgccattagatccttcttcattcattgcacacagctggcccgcccatccgtggacaagcacggtggggtttggttgggtgctttcatggcggcgttgttcaattcgttcatcagtacagtatatcgtgtagatctcactgggaaaaaaaaaaggactcaagtgcttctgctgtatatgctcaccaaaatgaaaaatgcacgaggttcagaaaagcgatttgctttgctttaagatctgtgcagatttcattttgaagtggcatatatggctcgaagcggtggcggtggcgagggaatatatatagggtataagatagttacgtttgttcttgtgtttatatacaaattaattaatataagtggatatgttagtgattttgttggaaaatcattcgtcgtcgagtgtaactgtagaaagtgttgagttcttcattgcaagaggtgtcaaatattgtgacgaattgtcctctggcttaattaatttatgaattcttttaagnnnnnnnnnnnnnnnnnnnnnnnnnnnnnn

SEQ ID NO: 45980 - DNA, 601 bp, Setaria italica
  Peptide Sequence Number=SeqID_111954
ttacagcaatggacaagctcaagatgatgacggagaccatgtccacctgcgctcggtcgatgatgtccgagtgggaggcgcagctggcaaaggccggcggcgtggagatcgagctgagcaggcagttcgaggagctcaccgccgacgtgatctcgcacacggcgttcgggagcagctacgtccaggggaagaaagtcttcctggcgcagagggagctccagttcctcgccttctccaccgtgttcgacgtccagatcccggtgctcaggtacctcccaaccgagaagaatcgcaggacatggaagctggacaagcaggtgaggggcatgctaatggacatcatcaagagccggctcgccaccaaggacaccgccggctacgggaacgacctgctcggcctgatgctggaggcgtgcgcgccggagcacggcgagaccccggcgctaagcatggacgagatcatcgacgagtgcaagacgttcttcttcgcggggcacgacaccacctcgcacctgctcacctgggccacgttcctgttgagcacgcacccggagtggcaggacaggctccgggaggaggtgcctgagaacgcaacagggga

SEQ ID NO: 45981 - DNA, 528 bp, Setaria italica
  Peptide Sequence Number=SeqID_111955
ttacagctcacgaaaagcagtgcaggatggaggtggtatcacgtcactcactgggtatctcatgagatacatcaggttgctagtaaagcataggagttcacttgataccattctaggacatggtcactgggatgatctgctgacagttaagggaacgaactcaacaggccgattagtatttgggctcattgatgacctggatacagtgcttgagaaacaatccatgttactgtcttctaaagaacttcagtgcttgtttttgatgaacaacacacatttcatgctgcaggaaatcaagcaatcagacgtacagttaattgtaggatccaggtggattggaaaacgccaataccggatcaaagaatacatgaagggctacctatctgcagcatggggaccagttacgttgaatttggagactacaaaaagcacatcaccccgtaaaaggcttagggcaaatgtcctaagtttcctgtatgccagtccaactcccctgcagaattttgcttggtctttcaatgaaacttg

SEQ ID NO: 45982 - DNA, 1717 bp, Setaria italica
  Peptide Sequence Number=SeqID_111956
ggtattccaccccttccccttgttccatcccctcccaccgggccaccgctcgccctccctcccgcgccaatcgatcggcccatccatcgatcgagcacggggcacaggctcccaatccggagcggttcctcccgttcgatacttcgattcgatcgggttggttgattgcctggtttcggtgggcgccatggcggcgacggaggcctccgcagataagaacgccgtcttccgcaagctccgcgccaaatcggacaacaagatgtgcttcgattgctacgccaagaacccaacctgggcgtccgtcacctacggcgtcttcctctgcatcgactgctcggcggtgcaccgcagcctcggcgtccacgtttccttcgtcaggtcaacaaatttggattcgtggactccagaacagttgaaaatgatggtttacggaggaaaccaccgagcacaagctttttttaagcagcatggttggacagatggtggaaaaattgaagcaaagtatacatcaagagctgctgacttgtaccggcagttgcttgctaaagaggttgctaaaagctccacagaagatggcaataatagttggccatcttccccagtttcagctccccagggcccaaatcaaactgctgcatttcccgatctcaagccgacagaggcatcaaaagaaatgcaagtgaaaagactgagcctgttcgttcacctagagctccaactcattctttcaagaagccaattggtgcgaagaaacctggaaataagactggtggacttggggcgcggaagcttacgtcaaagccaaatgaaagtctctatgagcagaagcctgaggaaccagctcctgtcctgccatcggttactgagagtactacaactaggagcaaatcctatacttcacgatttgaatatgtagaaaatgcacctgcttctaggactgggagcagttcaggagataaccagatgagtggacatgttgcacccccaaagtcttcgaacttctttgctgaatttgggatggacagtggatataacaaaaaatcttccagttcatccaaagtgcaggttgaggaaagtagtgaagcaagagagaaattctcgaatgcgaaatcaatttcatcctctcagtttttcggtgaccaggccagctttgaaaaggaggctcaagtttctctccaaaagttttctggttcctcgtccatatcaagtgctgacctatttggccacccggcgaacaattccagtgtggatcttagtgcttcagatctgattaatagaatctcattccaggccactcaggacctgtcatctctgaagaacatggcgggggagacggggaagaagttgacatctatggcgtccaacatcatcactgatcttcaggaccggatcctctgagcttgacttatagtggagtctcctttacgttgcttcagtggctggcttcacccgtcaactgggtcacaaacctgccggcccggcaccatctgtctaggagttcgtaggcgtctgaaaacctcaagtgggacttagggaaaatcgaaagaaaggaaccttgtgcgaatgctgtagtcatgtatgcacctggagctgtaacagaaacgttcttttgccgttggttctgtttctgttccagaaggaactcaacatatattttatactttgctttgtaatgaccaattgcatgagtagttccaagttacgggagctttttggc

SEQ ID NO: 45983 - DNA, 488 bp, Setaria italica
  Peptide Sequence Number=SeqID_111957
ccacgtttcagccttagtgtgaacatatatgattacatttgggttgttccctattgttaacaatatagtttcacttccaccaaatgtatcatatatgttcttttttcttttagcccaactaggaggcaacattcaagtagatattctcttagtaaaagtagagttctgtaagactaaattaaacctttctaaggtcacaagttgaacttacaatggcatgaactgcccaatagttttactaggataagaagccccttctttctcaagcagaacagcacaactttaatagtcattgcatgacattacaaaatgacaaaaaatgaaccttgatcatgacatcacaaacataattttaacaggggagttttctttttccttagtaatcatccatattccatatattgatatatctaccttttttaacctctaaaacacaccagcacatcaccacaaatggtcacagagtcgcagtctaagtctctatcagg

SEQ ID NO: 45984 - DNA, 732 bp, Setaria italica
  Peptide Sequence Number=SeqID_111958
tactaaacttgtcggtctagttaaagtcctacttctagttctttagcaaccactataagcggaccggtacatcagagcagactgacaccaacgggagtcactactcactaacaagatgtagttaaaaaaaactcaactttctcaaccaatgcaaatcattattccaagctctcatcaacaaccgcccacatcttcagaagcagccaaacaaatatgatatttccatatgcatcacaaccgagcaacactacagttcaagtaacgaatgacacccctgctctgctgtgaagtgaccccatcagataactccagcatgaacaggcataagacctaacataatttacgataccaaagccacccaaagtgctccagatcaaaactggagatcacaaagggcctaaatagggccataagcagcttattcagatgcagttcaccttacaaggtgcatcactgactgaagttcatctctgagtatctcctgggcttgttctggcgctgatcaagctcttcattcccaatatcatttcgaggaggagatttagaccctctattagcagtaggttccctggatggaactgaagatgatgtctgtcctgaaggtctggagtaaaaactcggatcaagggctatataaggtggatatgatacctaccaaaaaagacaaccaagactagacaaccggaaccaaataaaataaggaacaaaaccaaataagttcatttcgttgtt

SEQ ID NO: 45985 - DNA, 2694 bp, Setaria italica
  Peptide Sequence Number=SeqID_111959
tggcaccaacacgacagatacgtattgcgtgccatctgaaaagatgagcactgccactgcatgagtaattatcgcttggtgattactctgaacaaacatcaggaataattgtggcaaaactgattacaaaggacgggatacaataggacacatctctacaccgttgtggtatagcatcccttaaaaacgcttaaatgctacatcatttgtagccacagccaacgcccaacaaacatgccctgtaagaaaaaaatgacatctttcagttttttaatcaaaccggctcatttctgggttctggctctggtaaagcgacatgcagctcatccgactgacaaaaaacaaagctctggaaattttaccatgaattgacaaacccatcaccctggaaaacagaaagacaggcaggtacctagatggcttttcaagcaggtaccccgaaaaatccatgtgagcacatggaaccaaactaactggacactcatttgagctgaaaatagttgcaaaccgcacccacatttcaacactgtccaaaagatacaaactgcggcagtaaagccactcagtcttagcaaccactataagcggaccggtacatcagagcagactgacaccaacgggagtcactactcactaacaagatgtagttaaaaaaaactcaactttctcaaccaatgcaaatcattattccaagctctcatcaacaaccgcccacatcttcagaagcagccaacaaatatgatatttccatatgcatcacaaccgagcaacactacagttcaagtaacgaatgacacccctgctctgctgtgaagtgaccccatcagataactccagcatgaacaggcataagacctaacataatttacgataccaaagccacccaaagtgctccagatcaaaactggagatcacaaagggcctaaatagggccataagcagcttattcagatgcagttcaccttacaaggtgcatcactgactgaagttcatctctgagtatctcctgggcttgttctggcgctgatcaagctcttcattcccaatatcatttcgaggaggagatttagaccctctattagcagtaggttccctggatggaactgaagatgatgtctgtcctgaaggtctggagtaaaaactcggatcaagggctatataaggtggatatgatcctccaaaagcaccagctgcaccggccaataatggcaaccatgtcatttcgttgtttcccatccccatctgctgctgagctacgtagccagggagagccataccaatagtaggaactccaggaccaccaggatgctgacccccaaattgcatcactggcagcagagctggagtgccaggaaaattttgatcgccctgggaaagaccagcagccccaataacttgggcgccaccatacataaatgaacccattccagtttcatggttattggcttttaccaccgctgaaggtgccttcgaattattctgactagggtatgaaccattctcaccactttctgttgatttaacaggttgatgctgagcaggtgacaaattgttagtccgatggttcaacggctgaggtgggatcctcgctgcagattgattcggcacttggcctgacttcgggtgcaagactggcgcgtgactctgcatttgcgtagaaatcctctgcatttggtgaaatgatgaagtggactgattatttgaagaaaccccggtgtttgaactgccccctgaagccctgacaacaggtgattgaccaggattaaccgatgatgatgtgaatcctgaattcaatgatgtcgttggggcccttccaggtgatgatctaacaggaccatcagcatgaaacctatcacgtccaccataatccatggttgtcctacctctaaccattggaccagattgtagctttgagttatcatccatcttcatggaagaaggaaggaccttattggaacctcctgtttgtatgtcccttctttgagctgctacaggaaaatcttggttggatgcaccagaaggataaaatggtggtgacgcagaatttaggcttgaattgatgacattctttttaggaggggcagcctctggctgtgtgtgtgaaacttgaccagaatctctggctgctgcagtatttggagcgggttctcgaaatcttgctgcttgttttcgctgggatccaacaacctctctgctgttccttgcaacagcttcataacgtcgaggtcctctccctctaactacttttggggggcggttttgggtgttgccatcttcctggtaactgcggttctttccccctctgggaaaaccacgaccaccacctcttgctttacctcgaccaccacgacctctaaaacgacctcttgacatgcgctgatcttcatagcgatcatcttgcaagttcatctcctcaaatctgtcatgcacccaagcttgatcatctttagcatcccataacttcctcccaccaaacattcgcctgcgccggccgcggttctcctcctgaaaccggtcatcatgcatgtagaaggcaccagaagtgggcactgcgaacggctcctgctccttctcctcgccctcgcccttggcctccccttccgccagtccctcctccccggccacgccatcctccccgcgtgactcctggccgccgccgccgccgtcctccgtgggcggtgccgcgcgcccttc

SEQ ID NO: 45986 - DNA, 251 bp, Setaria italica
  Peptide Sequence Number=SeqID_111960
cgaggcggccggagcggcagtatccatctatgagtgcagtgtaggtgacgacgttggaggcgccggaggctttcgccgtctcgagcacgcgctccgcgtcggcgaggcggccgtcacggcagtaacccgcgacgagggtgttgtgggagacggagtcggcggcgccggaggccctcagcaccgcgagcacacgctccgcgtccgcgaggcggcgaccggcgcagagcttcttgatgaggatgttacaggtg

SEQ ID NO: 45987 - DNA, 1575 bp, Setaria italica
  misc_feature (13)..(13): n is a, c, g, or t
  Peptide Sequence Number=SeqID_111961
gtcatgatcatangttttatgtgttcagatgattaccgattataccgctgattgtatttcatacatcaaagtttctcaatcatttattccatccgcacaatttgtaacacttggctaggtatgcataccactgctgtcatttcattgaatgtacaacgaacagtacagtttgcatagtgtaaacatgaactgatgaatctcaactagtgtttatttgaccaaatttttcacccattgtaatccatatactctgccgatatgctttataatcatccacagctctattaatcttattatggaaatttcattgggagctttgttaaactttaggtggagaatgtaatcaggcaatttcagaaaatatttcccagtgatggcttgcttcctattaatataaatcctcattcggggctgtgaagtcttactcaactatcacatttggtgctatggggatagtttttatgaatacttgctcaaggtctggatccagagctacgaaactgaaagtgtcaagcattacaggcaaatgtgggaaacatcgatggaaggcctgttaagtttgacaaggaaaacttctccttctaacttctactatgtgtgcgaaaagaacggggattcattatctgagaagatggatgaacttgcatgctttgtgcctggtatgctggcattgggagcgtcaggctatagcccagaaaaagcagagcaaattatgaatcttgcagaagagcttgcatggacctgttataacttctaccaatcaactccaacaaaattggctggagaaaactattatttccatggcggacaggacatggttgtgggcacatcatggaacatccttagaccggagactattgagtcactcatgtatttgtggcgcctaactgggaataaaacataccaagatttgggttgggacatattccaagcatttgagaagaattcccgtatagaatctggatatgttggtctgaaagacgtgaatactggtacaaaagatgacatgatgcagagcttcttcctggcggagacactcaagtatctgtacctgctgttctccccgccatcgttaatctccttcgatgagtgggtcttcaacactgaagcccacccactgaaaatagtcacaaggcatgacaatgaaggcggctcgggtggtggagaaggtaagggtatcgctgactccaagatccagccacaaggaaggaagcatggaaaacctgaatagaatttgactggtgcaaggtgcagggcttttgctctcgccatctgatctagacctgcacgacaaaggaaatccgttgtgatggaagttcggggttgagatggacacttttgcagcatcaggacacaaggctggatgaaactagagtagaatgtggcggtatagtttggatagtgacattgtgcagttgagtacagaaatatggttcacattatagcagagatttcttttgccttatgttctacccattttcatgtgtgtggaattacagtcaggtcatggcgtcatgctatatgaccagttgaccaccaacttggacagtgtactagcaggagaccagattctct

SEQ ID NO: 45988 - DNA, 1972 bp, Setaria italica
  Peptide Sequence Number=SeqID_111962
cgccacgatcgccgcccgggaccgcctctccctcgtccgcgactacgaggctgagatatccagattagacgaggaggtaaatcggttgcatgaccagttaagaatggcgggaatttatctggatgaaagtccaaatattgaaaacatcatcaagaaacatcatctagaaattgaccatgtcaataatgcaaggagagaaaaggttaaggaagctatgcttcacgcctggaactcctatgtaaagtatgcgtggggacatgatgagctccagcctcaatcaaagaatggtgtcaatagttttggtggtcttggggcaactcttgtggactcacttgatacactatatataatgggactaaaagaggaattcaagaaggctagagactgggtcgcagaatcattagacttcgacaaggattatgaagcaagtgtgtttgaaacaacaataagagttgttggaggtctcctcagtgcatatgatttgtcagctgataaaatatttctggagaaggcaagagacatcactgatcgactgttacctgcctgggatacatcatccggtatcccatacaatagaatcaacctagctcaaggcaaagccagtaatccaggatggaatggtggcaacagcatacttgcagattcaggcacagagcaactcgaatttatagccttatctcagaggactggagatcaaaagtatcagcaaaaggtggagaatgtaatcaggcaatttcagaaaatatttcccagtgatggcttgcttcctattaatataaatcctcattcgggggctgtgaagtcttactcaactatcacatttggtgctatgggggatagtttttatgaatacttgctcaaggtctggatacagggtaacaaaactgaaagtgtcaagcattacaggcaaatgtgggaagcatcgatggaaggcctgttaagtttgacaaggaaaacttctccttctaacttctactatgtgtgcgaaaagaacggggattcattatctgagaagcctataactagaacagatggatgaacttgcatgctttgtgcctggtatgctggcattgggagcgtcaggctatagcccagaaaaaagcagagcaaattatgaatctttcagaagagcttgcatggacctgttataacttctaccaatcaactccaacaaaattggctggagaaaactattatttccatggcggacaggacatggttgtgggcacatcatggaacatccttagaccggagactattgagtcactcatgtatttgtggcgcctaactgggaataaaacataccaagattggggttgggacatattccaagcatttgagaagaattcccgtatagaatctggatatgttggtctgaaagacgtgaatactggtacaaaagatgacatgatgcagagcttcttcctggcggagacactcaagtatctgtacctgctgttctccccgccatcgttaatctccttcgatgagtgggtcttcaacactgaagcccacccactgaaaatagtcacaaggcatgacaatgaaggcggctcgggtggtggagaagggcttttgctctcgccatctgatctagacctgcacgacaaaggaaatccgttgtgatggaagttcggggttgagatggacacttttgcagcatcaggacacaaggctggatgaaactagagtagaatgtggcggtatagtttggatagtgacattgtgcagttgagtacagaaatatggttcacattatagcagagatttcttttgccttatgttctacccattttcatgtgtgtggaattacagtcaggtcatggcgtcatgctatatgaccagttgaccaccaacttggacagtgtactagcaggagaccagattctctctgtattttatgctttgccaggactgatacagatgcaactttgatgttgcgcgatacatttgcttaagtaacaggcgacat

SEQ ID NO: 45989 - DNA, 350 bp, Setaria italica
  Peptide Sequence Number=SeqID_111963
gtatacacatcgttgctcttttaaaaaatatatgtcatcactagcagtttctcggtttctcctggctgaacaagacttgaagtttaaggatgtctagaaaaattattccctgatgagttgaagtttgttagcggtgcgtatcactcgagtttgagaccagtagttataatattcaaaagccacaaccgttttgatcaccatggcacactaatgctttcataagggatacaaaatatgcaataacctcactttggccagcaatggatcgtgtccaaagctaaatgggcactagaagtacttaaaagtcaataccctttgtgcagcatactgtacctgttcaatgcaaaatg

SEQ ID NO: 45990 - DNA, 1166 bp, Setaria italica
  misc_feature (917)..(917): n is a, c, g, or t
  Peptide Sequence Number=SeqID_111964
cgaagcgccgtggatgctgaccgtggcggccgggtcggtggaccggagcttccgcgccaccgtgcggctcggcgacggcgagatgttcgaaggcgagtcgttgactcaggacaagcacttcagctccatggtgtatcccctctactactctcagggcatgaactactgcgacttcttcgacgtcaacatcaccggcatgatggtcgtgtgcgacaccgagacgccggtgccacccatgagctcgatccaagctgtccgggaggctggcggcgtcggcatcgtgttcatcaacgaacccgatttcggatacaccatcgtcctggagaagtactacgacctccccatgtcgcaggtgaccgcggtcgacggaaccaagatcatgggctacgccatgaagggctcgtcgacgtccaaccatacggcaacgatcgtgttcaacagcaccgtcgtcggcgtgaagccggcgccgatcgtggcggccttctcgtcgcggggtcccagcgtcgccagccccggcgtgctcaagccggacatcatggcgccggggctcaacatcctcgccgcgtggccgtcggaggtgcccgtcgcggggcccgggtcctacagcttcaacgtcatctccggcacgtccatggcgacgccgcacgtcaccggcatcgtggcgctcgtcaagaaggcgcacccggactggtcccccgctgcgatcaagtccgccatcatgacgacgtccagcgccgtcgacaacgacggccacaagatcatggacgaagagcaccgggaggcaagcttctacgccgtcggcgccggacatgtggtcccgacgagggccgtcgatcccggcctggtgtacgacctcggcgtgcgcgactacgccggctacgtctgcaagctcctcggcgaggcggccctgaaaaccnttgccggaaacgctagcttgacctgcacggagatcgaacccatcggtgcagcggagctgaactacccggcgatactggtgccgctgcgcgccgagccattcgcggtgaaccggacggtgacccaacgtcggtccggcgaagtcgaactacaccgccaagatcgaagcgccgaaagggctgagtatcaaggtggagccggcggagctagagttcacggaggtaaaggagaggaagacgttcacggtcaca

SEQ ID NO: 45991 - DNA, 1442 bp, Setaria italica
  Peptide Sequence Number=SeqID_111965
aggcgggactacaaaggaacgaagaacaatcatcgtcttcatgtacgacgacatcgccagcagccccgacaacccccggccgggcgtcatcatcaaccacccgtccggtggcgacgtgtacgccggggtgcccaaggactacacgggcgaggacgtcaccgtcaacaacttcctcgcggtccttctcgggaacaggtccgccgtctccggcggcagcggcaaggtcgtcgccagcgggcccggcgaccacgtcttcgtctactacagcgaccacggcgggccgggcgtcctcggcatgccctccggcgactacctgtacgccaaggacctggtgggggccctcgagcggaagcacgacgccggcgggtacaggagcctggtgttctacctggaggcgtgcgagtccgggagcatcttcgagggcctcctgccggagggcatcaacgtgtacgccaccacggcggccaacgccgaggagagcagctggggcacctactgccccggcgacgaccagggcccgccccccgagttcgacacctgcctcggtgacctctacagcgtcgcctggatggaggacagcgacgtgcacaacctgcgcaccgagtcgctgaagcagcagtacgaggtggtgaaggacaggacgtcggcgcacggcacctacagcctgggctcccatgtcatgcagtacggcgaccagagcctcaacggccagagcctttaccagttcatcggcaccgacccggccaacgacaacgccacgttcggccgggacaactcgctgcgccgccggtcctccggcaccgtcaaccagcgcgacgccgacctcgtctacttctggcagaagtacaagaagtcggcggaggggacgccggagaaggcggaggcccggaagcggctgctgcaggtgatgtcccggcggtcccgcgtggacagcagcatggagctgatcggcagcctcctcttcggctccgacgaaggccccaaggtcctcggcgccgtccggccggcggggcagccgctggccgacgactgggactgcctcaaggccatggtgcacgcgtacgaggcgcagtgcggcccgctcaagcagtacgggatgaagcacatgcgctccttcgccaacatctgcaacgccggcgtcggcgaggacgccatggccaaggtagcgtcccaggcctgcgccgccgcccgttgaccacatgtcttgtctcgttctgcctccttcgaattcacctattcacggtgtgcgtgcgtatatatatagtactgcgctaagatgtggatacacggatgtcgctggcactttgtgtgcagtcactgtaaaactgtaaataattcacactgaactggacgtttggaaacacaatgaacttgaaagaaaggtgttcgctaattctttctttcttttctttttactttagttaaagttaacttaaaaaaaa

SEQ ID NO: 45992 - DNA, 468 bp, Setaria italica
  Peptide Sequence Number=SeqID_111966
tttcgttccacagcagccacgagcaagtcggaagaaccatccgtagagccgaggtcgacggcaatctgcactgccgcgcgctctccactacgccgcaatgcgttgagggctcgcggcaaccagccggccgcctggtgaacgaggagaatcgctgcgacctggtcgactgtgatgtcggggtctaccggtttgcgttgctcgtgtgcccacgcccaatcctccggatcaatgcgcgtcgacgggatgacaaggatagtccagtcggtcaacccctccgcagtgcggggagcatcactgcggtcacactggtgactctcgccgggtccggtctccgcagagtacttctcgtcactcacctagcaggccacctgttcgtcgacgtcatggagcacgggatgcacaccacgtctgcgatcatcgcatatgccgcatcgtgcagacagccatcccgggcagacagggcatttt

SEQ ID NO: 45993 - DNA, 201 bp, Setaria italica
  Peptide Sequence Number=SeqID_111967
gctggccgtaggggcgggcggactggacaatgaatgtcctgaggggttctcggatggcaacgattaccctagccgcaagctggagcttctcccatgtcttgccaagattgatgatggtaccaggggtgtgcctcccagcaatggcgtgggcaccagtgtactgcgcgaacttgaggacagcgcgctggccgtaggggcggg

SEQ ID NO: 45994 - DNA, 217 bp, Setaria italica
  Peptide Sequence Number=SeqID_111968
ttggaaacatccccacaattgcagactccttaatgggctgatgatcagtcctggggtcagtcaggataagaagacgcggctcgctgaaagaggtttgcaactggttggtgaatgtaccaggagtgtgcctgccagcaatggcaggcacactcctggggtcagtcaggataagaagacgcggctcgctgaaagaggtttgcaactggttggtgaatgt

SEQ ID NO: 45995 - DNA, 485 bp, Setaria italica
  misc_feature (457)..(457): n is a, c, g, or t
  Peptide Sequence Number=SeqID_111969
catcaggcgtgcgtgattactcttctacccccagttaggagtgggtgtcgcgacaggggcagcgccttgttcccatccaggggcggcggctgcaggcggtggggcagcagccgcatcccagacaccatcagttggaggagctgcaattcagaaaaatgatagcagtacttgtaaggctaccataacagatcaaaccacaggtaagcagttaacaatgtcaacatctgtgaacaaaatagacaacaggctaaatgagggaattctacatagcaacattactcattggcccagttaaggtatacaattttacacgactccatgaaacaagaatttaagtgagcatggaaaataaagaaacgagcaaatgtagattaaaccttgagctacccatagaaacatgaaagctcagctggtgtcagcttcccacttagacccagtagcaagccacttaaaaacntaagcataaggtacagcactgaatcacc

SEQ ID NO: 45996 - DNA, 820 bp, Setaria italica
  misc_feature (472)..(472): n is a, c, g, or t
  Peptide Sequence Number=SeqID_111970
cataacagactgaatatattatatagaaccatcacatcgcacagatccatgcaatataagcaacagaaacaaaagctacttataccacataatctcccaacgactctctccatcatggcacagaaatgttgaaaacagaacaggggcacaagaagttcagctagaacgccctaaaacagaagtgttcaatgcatagctatagaagatgcgtctgattttggacattcatacttcagaaaacactgattttaagccgcggaagacacatcacgaagcgagggcctatgcctactcccagccttgagcggggggttgggctgctgggtcccatccagtaggagcaacagccggaggtacagcacctgaactagtttggggttttggttttcgaccagtggacctctgatgtggctcagcctgttgctgttggtggcactggtgctgagtgggtgctgctgcaggtatgtactgntaaaattttatcatctttggtatggaactcatgcagaaatctagctgtgttgaaatggaaactatataacccacaccttgctctatgccctgagttgctcttataagtttgttgtggtaacacgaagtgatcacatttttctttgcagctccggttcctactggcgatggctgggatccagctggtgctccccctccacctgtggaaggtgcggtacctccggctgttgctcctactggatgggacccagcagcccaacccccgctcaaggctgggagtaggcataggccctcgcttcgtgatgtgtcttccgcggcttaaaatcagtgttttctgaagtatgaatgt

SEQ ID NO: 45997 - DNA, 385 bp, Setaria italica
  Peptide Sequence Number=SeqID_111971
atggatgggatcctgctgctgctgtccctcctccagctgccgctccagctgccactggttgggaagaaggcagtgccccactcagcaccaacaggtgcagcagggagggcaccaggttgagcctctgtagcaccccattgttcagttgcccaggtatcagctgcaggagcaccataatcagccactgcagcatagtcaggagcaacgggagcctcctcttcctccagctcctttgcttcctctggatccctgtagaagaaaagatcaaccatgacttcccacttgtgtccagggagaattgtgccacgcatctgcagaaccattctgcaagcaaccagaagaggcaaccaatgctctgctttcccttgttgtttgcaggaatgcc

SEQ ID NO: 45998 - DNA, 1259 bp, Setaria italica
  Peptide Sequence Number=SeqID_111972
ttttttacgccagtgctaaaggcatatattagcaaaatgcgcttgcagcaacactatccatgaaaggtggcaacaaagagtaaactggcagtgcccagctatgtcaacctccaaaactgacttgcattaaacattacaccatgatcaacatagctagagctactcaaaacagatctaccgacacaaacataaagtcaagtgactctgcttccctcctgttgatgatgaaggacaatccacgcggaaaccgcttactgccagccggtgggggccggggcactgccttcttcccaaccagtggcagctggagcggcagctggaggagggacagcagcagcaggatcccatccatcagcacccgccaggagctggagcagcaccccactcagcaccaacaggtgcagcagggagggcaccaggttgagcctctgtagcaccccattgttcagttgcccaggtatcagctgcaggagcaccataatcagccactgcagcatagtcaggagcaacgggagcctcctcttcctccagctcctttgcttcctctggatccctgtagaagaaaagatcaaccatgacttcccacttgtgtccagggagaattgtgccacgcatctgcagaaccattcttgcaagcaaccagaagaggcaaccaatgctctgctttcccttgttgtttgcaggaatgccaatatcaacatatcgcatgggagaatcagtgtcacagaaggcaatggtggggatgttcccaagagcagactccttgatgggctgatgatcagtccttggatcagtcaggatgagaagacgtggctcactgaatgaggtttgcagctggttggtgaatgtaccaggagtgtgcctgccagcaatggcatgagcaccagtgtactgtgcaaacttaaggacagccctctgaccataaggcctagcagactgcacaatgatgtcctgcgggttctcgatcgcaacaatcactctggcagccagctgaagcttctcccaggtcttgccaaggttgatgataaaaataccgtcggttcggcgcttgaagacgtagcgctccatctggaagtcgcagttcttggtgcccaggtgcacgtcggccgccagcatcatctggatgtcctgctccttctgggagagcgcccgcggggcgccgcctgccgccgccgtcgccatcgtcgcagtcgccgccggaagggggatgggggaaggtagggtttcgggtgcgcagggggacaggaggtggcggcggc

SEQ ID NO: 45999 - DNA, 1403 bp, Setaria italica
  Peptide Sequence Number=SeqID_111973
ttacagtcagcgagcaggtgaaacattttgctgcaatgaacgacatacagttttcaaaatgcgcttaaaatagtgctatccatttgaggtaacaaaaaagggccggttcactcgctgtcccagcagagtcaataacacaaaattttgatttgcatctaactcattactgtgaaaaattcaagctactcaaccagtgtcatcagcaatttggctcatcaggcgtgcgtgattactcttctacccccagttaggagtgggtgtcgcgacaggggcagcgccttgttcccatccaggggcggcggctgcaggcggtgggggcagcagctgcatcccagacaccatcagttggaggagctggagcagcagtccagtcggcaccagttggtgctggaatggcagcaggtggagctgcagcatcaccagccccccaatcaccaccccagttgtcagtccctggggcagtatattcagcaactgcgccgtagtcaggggcaaccagagcctcttcttcctcctgctcctttgcttcctctgggtctctgtagaaaaacagatcaaccatgatatcccacttgtgtcctgggagaattgtaccacgcatttggagaaccatcctggcaagtagccagaacaaacagccaatgctctgcttccccttgttattggcgggggatgccgatatcaacgtagcgcataggcgagtcagtgtcgcagaaggcaattgtggggatgtttccaagtgcagactccttaatgggctgatgatcagtcctggggtcagtcaggataagaagacgcggctcgctgaaagaggtttgcaactggttggtgaatgtaccaggagtgtgcctgccagcaatggcatgagcaccagtgtactgcgcaaacttgaggacagccctctggccataaggcctagcagactgcacgatgatgtcctgggggttctcaattgcaacaatcaccctcgcggccaactgaagtttctcccaggtcttgccaaggttaataatgtaaataccgtcggtgcggcgcttgaagacgtagcgctccatctggaagtcgcagttcttggtgccgaggtggacgtcggcggcgagcatcatctggatgtccagctccttctgggaaagcgcccgcgcggcgccgcctgccggtgccgccgccatcgtcaccgctggtgttagggtttcgggcccgtgcaccttgcgcgaggtagccggagcaaaggggagaagaggcggcacgggtgcgggaggtggccatccagatgatgctcgccgccgacgtccacctcggcaccaagaactgcgacttccagatggagcgctacgtcttcaagcgccgcaccgacggtatttacattattaaccttggcaagacctgggagaaacttcagttgg

SEQ ID NO: 46000 - DNA, 1312 bp, Setaria italica
  Peptide Sequence Number=SeqID_111974
attttcataacagactgaatatattatatagaaccatcacatcgcacagatccatgcaatataagcaacagaaacaaaagctacttataccacataatctcccaagctctctccatcatggcacagaaatgttgaaaacagaacaggggcacaagaagttcagctagaacgccctaaaacagaagtgttcaatgcatagctatagaagatgcgtctgattttggacattcatacttcagaaaacactgattttaagccgcggaagacacatcacgaagcgagggcctatgcctactcccagccttgaggcggggggttgggctgctgggtcccatccagtaggagcaacagccggaggtaccgcaccttccacaggtgggagggggaggcaccagctggatcccagccatcgccagtaggaaccggagctgcagcagccaccccactcagcaccagtgccaccaacagcaacaggctgagccacatcagaggtccactggtcgccaccccactgttcaggtgcttggtaatcagtgatagcagcgaattcaggggcagcagcagcttcctcctcctcctttgcttcttcagggtctctgtagaagaataggtccaccatgacttcccacttgtgccccaggggaggatggtgcccctcatctgcagaaccatcctggccaagagccagaacaggcatccaatgctgttccttcccttgttgttggctgggatgccaatatcgacataccgcatgggagagtcagtatcgcagaaggcaatggtagggatgttccccagagcagactccttgattggctggtggtcagtccttgggtcggtaaggatgagcaggcggggctcactgaaggatgtctggagctgattggtgaaggtaccaggggtgtgcctcccagcaatggcgtgggcaccagtgtactgcgcgaacttgaggacagcgcgctggccgtaggggcgggcggactggacaatgatgtcctgagggttctcgatggcaacgattaccctagccgcaagctggagcttctcccatgtcttgccaagattgatgatgtagatcccgtcggtgcggcgcttgaagacgtagcgctccatctggaagtcgcaattcttggtgcccaggtggacgtcggcggcgagcatcatctggatgtccgtctccttctgggacagcgcccgcggcgcgcctccgcctcccgccgccgccatggtggattggggatgcaagtgtttggtggtgtcccggaggggaggaggagaggctcgggctaggagtctgggagtggcggcggag

SEQ ID NO: 46001 - DNA, 1684 bp, Setaria italica
  Peptide Sequence Number=SeqID_111975
cgtgttcgccctcgagtccctctcgtcatggtggcggagcgcgctcatctggcggtccttcttcacgacggcggtggtggcagttgtcctgcggctattcatcgagctgtgcgggagcgggagatgtgggatgttcgggcagggcgggctaatcatgtacggcgtgagcacgatgttcgacgaccttatcacctaccacctcaaggacatccccatcgtcatcctcatcggtgttgcaggcgcgctgcttgggggactctacaacttcctcatgatgaaggttctacgagtctacaacatgatcaatgagggaggccgagcgcacaagctactgatggcggccaccgtctcgatattaacgtcatgctgcctcttcggcctgccgtggcttgcaccatgccggccgtgccccacgaggtctcctccatcgccagatggaacctgccacgcactgaatcgtttccggcggttccactgccctccgggccactacaacgacctggccagtcttttcctcaacatcaacgacgacgccatccggaacctctactccaccggcaccaacgacgtctaccacacgggttccatgatcaccttcttcgtggcgtcctacgctcttggcgtgctcagctatggcgtcgtcgcaccttcaggcctgttcgttcccatcatcctcactggtgccacgtacgggcgcctcgtcgccatgttgctcgacggccactccggcctcgaccacgggctcgtggccattctcggctccgcttccttcctcggcggaacgctccgaatgacggtgtccgtgtgcgtcatcatcctcgagctcaccaacaacctgctcctcctgccgctcgtcatgctcgtgcttctcatctccaagacagtcgctgattccttcaactccagcatctacgatcttatcctgcagctcaaagggctgccccacctcgacggacatgccgagccgtacatgcggcaactgactgtcggcgacgtggtagccggcccactcaggagcttcaacggcgtggagaaggtcgggaacatcgtgcacatactccggacaacgggtcacaacgcgttccccgtcgtcgacgagccgccgttctcaccggcgccagttctgtacgggctggtgctgcgcgcgcatctcttggtgctgctcaagaagagggagtttctgcgagcacaggagctgaggtacccgaaggagtacgtggccgggaggttccaggcggaggacttcgacaagcgcgggtctgggaagcaggacactatcggcgctgtgcagctgtcgccggaggagatggaaatgtatgtggacctacacccattcaccaacacgtcgccgtacacggtggttgagaccatgtcactggcgaaggcgctcgtgctgttccgggaggtcgggttgcgccacctcctcgtcgtgcccaaggcatgcgacaggtcgccggtggtcggcatcttgacgaggcatgacttcatgccagagcatatcctgggactgcacccagtcctgctcgggagccggtggaagaggctccggtggcagaagggcgccgtggccaagtacttccgttcccttctggtgtggatcgcaaacagcagctgaaggaaatatattattgctgctggcaggatgcttgcttgctctcggtacgtcattcgcattgttaccaag

SEQ ID NO: 46002 - DNA, 512 bp, Setaria italica
  Peptide Sequence Number=SeqID_111976
gtgattcctgaatggtttgcagggaagttctggtaatggaatttgtcaaagggaccccaataatgaatcttggcaatgaaatggcttaaaaggggcgtagatcctggtagtaagattgcagcaatggcaaagcaatccacacccaggaaacatccttatctgtaaggacacagaggtggctttacttgattatggacaagtgaaagaaatgccagacgatttacgacttgcttatgcaaatcttgtagttgcaatggctgatgatgatttttgagggccgaagaaggtttcagggagctcggtatcaaaacaaggaccatagctgataataagctagaagaattgtttcaattatctctgcgaatgttcgacacaagattaccacctggtgtgactgttatgtcaccttttgccgatgattcttcactttactaaaaattggagttggagagccttcccgggaaagagcttattttcagtgcttcgaacaatacagctttgcgagggctgac

SEQ ID NO: 46003 - DNA, 3021 bp, Setaria italica
  Peptide Sequence Number=SeqID_111977
aaggaaaaacccgaatttaggacgaccgatggcttgggtgaagagactcgtcacgctctgtgataaggccccagccacaccatttgatgttgtgagagatgttgtggagagacagtttggaaagagctttgatgacatattcgaagagttcgacgttgagcctgttgggtctgcttctattgcacaggtgcatcgagcaaggcttaaattatcgaagacagatgttgctgtcaaggttcaacatccaggagctgaacatctgatgaaggttgatatccggaacatgcaagcaatggccttgtttttgcagaagtatgacatcaactttgatctattctctgccaccaaagagatggaaaagcagatatgctatgagtttgactttgtgcgcgaagcaagggcaatggaaaggatacgagaattcctacgtctcaacaataagaaacctccggttatggtgcctcgtgtgattcctggaatggtttgcagggaagttctggtaatggaatttgtcaaagggaccccaataatgaatcttggcaatgaaatggctaaaaggggcgtagatcctggtagtaagattgcagcaatggcaaagcagaagattttgtcagatcttacccttgcatatggtcaaatgatcttgaaggatggctttttccatgcagatccacacccaggaaacatccttatctgtaaggacacagaggtggctttacttgattatggacaagtgaaagaaatgccagacgatttacgacttgcttatgcaaatcttgtagttgcaatggctgatgatgattttttgagggccgaagaaggtttcagggagctcggtatcaaaacaaggaccatagctgataataagctagaagaattgtttcaattatctctgcgaatgttcgacacaagattaccacctggtgtgactgttatgtcaccttttgccgatgattcttcacttactaaaattggagtggagagcttcccggaagagctattttcagtgcttcgaacaatacagcttttgcgagggctgactgtcgggatggggcttactttctcgtgcgctcagcaatggagaccaatcgctgaggaagcactattaaaagctgggagactaagggattcaaaatcaaagaaaaagagaagttttctcaggcgactattttggtgaaatagagacagcgaccatcaaagaataatctgtaatgaaccggcagtagccaaaagctcaagccttcgattcttcttcacagtatatttgtacacattcatttactttgcttgcgtgttatttgactcaatgatcttgatcattcctttatcagaatgtttatttttggcatttagacgagaaatcttcttggttccagtagctataggggttctattggaggctgatatgtacacaatcatcgctatatgttcagaatactcttaagatttttttttgtggaagtaggggtttggaagctcacccctttgatttaacttttgacttttcttgaaagcaaaagcacttccacagcttaaccaaagcttaaccaaagggacccttgtacaattcgagactgccgtgatgctattattccagacgctacacatgctactttacattattttagattctggtactgaaaaaaaaatttaagtcatggcgacaatgctctaaacatgtctcgactcccacaagaagtggaagaagactagacaaatgctgccaggcctgcgtgcatcctctgcaacaccgcaacgggcgtggtggcgtggcagtccatgacgagagggcaaggtaacaactacacgtagttcatccgtttggggagattgatgccagctcgctcaaggaggtcattcgctcttttcacagctgaagaaattacctcctcctcattgagactcatgatcttatgatccttcataatccactgaccattgcacatgacagactctatattctctgtcctcatgcaatagataatgttggcaatgctgtcatgtaaggggaccatggaccatataaatggattcacgacaaccaagtctgcctttttcccgacctccagcgaacctatttcattatcccacagaactgcttttgcgccattaatagtagccatctccaatacagtctcagcaggaagagcagttgggttagtagttccactgatgtatgcctcacgacctttgttgattagggatgctaggtacatctcatccacaatgctcattctgttattgcttggtgctccatctgtaccaagggagacacaaacaccagaatccagcatttctctaataggagcaaaccccaacatccgcatggcagatgcagggcagtgagaaaccttgacaccagcctttgaaaaatgccctatctcaggttcattcaaccagacagagtgggcagccagcaaattactcctcagaaaatcaattttctctaaatatgtcaccgtgccatgatcaattcctttggtccgcactataagctgattttcatatggtatttctgcaatatgcatatgaattccagtatttagcttcagggcaacatctcttgtttcaagcagtaaacgatccgttgcattcatgatctgtctcaacccaaaccatatcctgatatgcccatcagctgtattatgatgctttttgtatagttccttctgtgactgaatgcaatcatcagtggagcatgaactccaatttggaggtaaaccctcaccacagtccatcgttgactttgtcaaacatgcccgcaagcctaacaactccactgcccgtgccatttctgaaacaaactgcccacctgcttcagcaaagcatgtcaccccggaccggatgagctcaatgccgcagaggagggtggaagcgtaggagtcctcctccgtcatgtgtgactcatagggccagatcctcccgtgcagccacgtcatcaggtcaacgtcgtcggcgatcccccgcgccagctgctgcgacgtgtgcacgtgcgtgttcaccaatccagggaggacgatg

SEQ ID NO: 46004 - DNA, 459 bp, Setaria italica
  Peptide Sequence Number=SeqID_111978
acacagactctgtcactttccttggtgctctggtttcatgcatctgcgaggggcatgttgggttggggaggagttatttcactctgatgaccgatgagtatagcatcgtccctcgcatggagcactatgagtgcatgatcgaactgttggggaagcatggttacatggttgagctagaggattttgtggatcacatgccctttgaaccaacaaccgctatgtggctcaggatcttcgactgctgccgggaatatgggaacaaaaaattaggggagagggctgcgcagcgcatcaacgaaagcaaacctctgactccagttagatttgttgaaccctctcctgactacgagtgcagtggcagtgatgatgttgatgattccatgtcgttctgctaggcggacaaagctggtgaggatcgagattctcactgtgagccatgagactgtatttttttcggtg

SEQ ID NO: 46005 - DNA, 423 bp, Setaria italica
  Peptide Sequence Number=SeqID_111979
agggactgggctatggctatggctagtgcaaactaaaggctagcctggaattaaatggattcaggcaaacgtgtccaaactccaaaaaccaaactgaaggagggtattggcagttatgtggaccgaaaaccgagaagcaagttttcaagcattttggcatcacatgggtgggtaccaattgtgtggaaaacgtagatatagtatgtgctccgccagcgtaccaaaagccaaacagccttattgtgctccgccagcgtaccaattgcctaaagtatttttgttaccacaagggtgggtactggttcagtgggagctaaagatgatgaatgtttaataaatcaacagtgtggttggaaatgaagacatggcagcagccgtaccttccttctttttttggctaccagaggtttctcgtacctcgtc

SEQ ID NO: 46006 - DNA, 337 bp, Setaria italica
  Peptide Sequence Number=SeqID_111980
gattgtagaatgaattttgcataagcgtaattacactatctttgttacagttgcacctgataaccagatcaaagttcctacagcagatcacatagatgggcataaatgacaaatttcacagcaaaatagagtgctatctccataatttcttaatgaaagtcctcaatctcaattcctttccaccacctttccttccctccacctatcttgagcaattctccatacaattcaacgtcccagctgaaacctaattccctctcagcgaaggtctcgttgaaagagatgcggtggccatccttctccgtgtccaccagcacgccgtcgcagtcaaaccgga

SEQ ID NO: 46007 - DNA, 1077 bp, Setaria italica
  misc_feature (1)..(94): n is a, c, g, or t
  misc_feature (101)..(101): n is a, c, g, or t
  Peptide Sequence Number=SeqID_111981
nnnnnnnnnnnnnnnnnnnnnnnnnnnnnnnnnnnnnnnnnnnnnnnnnnnnnnnnnnnnnnnnnnnnnnnnnnnnnnnnnnnnnnnnnnnnnnttttttnttttttttttttttttttaggattgaataaacatgcaattttaacagttacatgtataacgcattgttgtttgtttttatatttgttcctttacaaacaattaatacttattgattaaatgtgtccttcctttagcttacatattgttcctggagtaggtccgtgcagaaattcaaatcaaagcgtacttctggtgggtctcctatgcaatcgaacacggcgtctgctgtcgcaaagtcctcttctgcagtgtagccgctttttgttacaatacacttcatgccggcagctttcgccgctgcaagtcctatattactgtcttcaacaacaacacaactagatggatcaactccaagtgtagttgccgctaatatgtagattgctggatcaggttttttgcgaggaaccacatctccagcaaatatggtaatcttttctgctttatcaggccccaataagcatgatactattgctgaaacagctttctcatttgacgtactgcacactgcaactttaattccctttcctaatgcttcatcgattaacctttgaacacctggacggagaggaagcaacttcttctcaattagggccatgaatagttctgttttcctcttgtgaagagaagcaataaactcctttctctcttcatcagtttttggtgccttggctggccatcctgttttgttgaagtaagctgtcatcctttccttccctccacctatcttgagcaattctccatacaattcaacgtcccagctgaaacctaattccctctcagcgaaggtctcgttgaaagagatgcggtggccatccttctccgtgtccaccagcacgccgtcgcagtcaaacagcagcgccgccggcagggcggaggccggtgcacccccgtcgctcgccgccgccgcgcagataaccgccgctctccgctcgcctcccggtgcggaggcagccagaagaagcgccgacgaccgaa

SEQ ID NO: 46008 - DNA, 594 bp, Setaria italica
  Peptide Sequence Number=SeqID_111982
cctgtccacacagatcaattcacctcagtaactgctgaagccaaggattgccagctgcatctttctgcatgtcaactttcagtttggcagccatctccatggccttgctctgatccatctcatctataggcaatgctgcgagttcctccaggaaaagctgagcccgagcagcccctctggtcacgtcatctgggctaaataccctcttgcgctttgacccaacctcgtctatcgaatcatcagaaaaggtgggtgtagtagaaaagtcttctaactctgctgcttggctttttgcaagagcaataacagcttctggaaaattagcaaattctgcaacgtgaataccaaaactttggtcacatgccccaggttcaaccttgtagagcatagttaacttccgacttgatgggtctatgtgagcacccacgtgataatttgaaattccgatatcagaaacttgttgatgctcatcatcatttctctgtgctaatgcagttaattcatggaaatgggttgcaaacaaggtaggtgctcgagtcacttccactagatgctcacagatagcccatgcgagaccaaatccatcatatgtgg

SEQ ID NO: 46009 - DNA, 183 bp, Setaria italica
  Peptide Sequence Number=SeqID_111983
ttgagttcctgatctctgaagtcaggcacacggattgttgaagcgtgacttgagctactatactgtggtccagatgactgagaagaaattcatggagaagttcatacacccttacacagaagccgcgtccacaccttgctgaagactatgctgctgcttgcagaggggaaagtggcctctaca

SEQ ID NO: 46010 - DNA, 442 bp, Setaria italica
  Peptide Sequence Number=SeqID_111984
ctcgctgggaaatggcggtcgatggttgacgcgccaaccgtcaagatccagggcgcgatattgacggcggtgaactcgccggggccgaagttccctgaagatgcagagacgacgatgcctctgcggacggctctgaacgcaccgatggccgtgttgtccttgtaaaacttgggcgccttggggggccgagtgagacggagatgacgtcgaccccgtcggcgatggccgcttcaaacgccatgaggtgtcggagtcagtgcatccttttgtccagcacggttttataggcggcgatgcgcgcgcccggggccatgccaatggctttgcctttggcgtagctgaagaaggcggcgtccgcgccggcagagccggcggcggtggaggcggtgtgcgtgccgtggccgatggtgtcgagcggcgacttggactcctttgtctcatt

SEQ ID NO: 46011 - DNA, 1508 bp, Setaria italica
  misc_feature (1)..(1): n is a, c, g, or t
  Peptide Sequence Number=SeqID_111985
nttttttttttttttttttctttacccacaaaaaaatcattattatttcgaaccatttcatatatgaatcaaatgatataaccaaaccgaacacaccctcaatcaatgaaacttgcaaaaaggaaattactggtagcccaaaacatgaatcgacagtcagggaccaaggcaaatcatgaatcaccaatcataatgatctcaagttcttatatattccggttccatatggatgccgtgcatctatttgttctgttcaaagctcaatttcagcatttggctacttccgcatatgcacagctggttattatgaaatcccgtctacttgaaagattttcttgtggagcagatccactgccgcggcttttcaatatcatcaccagttgttgttggtacatgccaggttccatcttcagattcctgaataacaattgaataaggaggcggtaagtgaagagtcgggccacgtcctgagaaagtaagcctgacctggtgtttctctttccacctggggaaaaaaccagtaccaagcagttgaaataagtggtctcgcatctcatcatttgtaacaagcaacgatcggcaactgacagccgcatacagccaataccaatcatcattggaaccaggaggggtagcatacagagctccagcattcctccaaccctctagaatcttctggttgaacggagctttcgcaggaccaccatttacacggctcctatgcaaaatgatcagcggcaacttctttgatttagttactctctgtatagcatttgcaacagagttcacctgggaaaaactgaaagctttactattgtaaaggccgacattggcggcatctataacagcatcaaatggtccatggcgacgtagccacctctgaaagccgaggaaatcctccctgacctcgcgcttgatggccagttcggtgagggaatttgcaaagttgtcagtctcggatggatcaatgtctatgcagacaagcctctccccgcagcgttggcatgtcccttccttgtccatctcgctccggccaacgctccattgccccttgccaagccatccctggccatgccagccgccgccgcccttgacgacgccctccctgacctggctgggatcccacttgtccacccccgcctccgacgcggcgtccgaccggaaccaggcctcgacaacctgggcggtggtgtcgcagacctgcctgacgagggcgcgcgtcctgtgcagtagcctgtacacctcatcggccctgcccttgtccgcgttgacgcggagcagcgcggcgagctcgggctcctcgggcacgacgccagaggcgtccatgtgggcctcgacctgcccggccccgtcggcgtctttggcgtcgcagtacgcgaagagggccgggccgtaggtgcggaggcgcggcggggtgcccgcagcggccatgcggcggacgacggagaaggccatggcggggtcgcgcgtggcggcggcgaggcgcgcgacgctggtgtagggtggcc

SEQ ID NO: 46012 - DNA, 580 bp, Setaria italica
  Peptide Sequence Number=SeqID_111986
ttaaaagcattggtgtgtatatgtgcattgtctttaagctagctagctgctaccacactgaaatagagtgtcaaccgtctgcctctcatcagagtcacaacgctacaattaatgcgtcgtgcatcagatgtctccgactcagtcgcactagtaaaaatgaagtcgtaatacacgatggaatgctgaactaatttgaagcacgatccacatcgaaatcgagtgctcgtattaggctcctgattgatccgtggtagcacgtacacggagaatcaagtgcgccgcggcctgtgcaatggccgtcacctgccttctccgtcatccacttccagatcggacgatgagcacgaagcaccggcactcccgccgccgctgctcctccgtgcacgcagcagcagcagcagcgccggcggcagtgccagaagtagtaatagcatcgccgccgctactgctagcgctagagctgctgctgctggtgctgcacgccgacgtcgtggtcgtcgccgtcatcgtcgccgtcgtggtggtggtggtggtcgtcgtcgtcgttgccgccgcggcgctgctgccgtggcgaggccga

SEQ ID NO: 46013 - DNA, 327 bp, Setaria italica
  Peptide Sequence Number=SeqID_111987
gaagaagcgccaaggcaaagcaaaaaatttacgccatgagtccaccacgactcgaagcagcagcggccgggccgctctaatcggagctccgaaagacgccgccgccaccccactcagtgtctgaatccgcagcgctcgcctcgtgctcgctgccactggtttccgctgcgggactagggttcggagaggcggcggtagcctagggtttcggcgggatgagctaccgcaaggggtcgaaggtgtgggtggaggagaagggggaggggtgggtggaggcggaggtgacggagtcgaaggagcgcgccgtcttcgtgctcacgagccagc

SEQ ID NO: 46014 - DNA, 434 bp, Setaria italica
  Peptide Sequence Number=SeqID_111988
tatatgccagagatatttaatagtgtattgacctcatttcaagccaggccgatcatagatccagtgggccaaaacttaggcctgagcttggaataatcaggccagaattggttgcccataagcacgtttgtgcttcagtaggcgggtgctacgttcactagcagttgctgagcttctttctagctgttaataaccacaaattgctgggggggtagcagccccatgacatagtagatttgttttaggaatcgaaaatctctctttttatatattttcattgcaaaaggtacaaatatcagcaataatgctgtacttagcttgaacttctttcagcagtggtttagtgccaaatttggtcatccactgcaggatctctaaagtaatatgtgtggaaaattactaaaaaaaaggagtaaacttcaaagagatttgac

SEQ ID NO: 46015 - DNA, 1885 bp, Setaria italica
  misc_feature (1866)..(1885): n is a, c, g, or t
  Peptide Sequence Number=SeqID_111989
ctacgatggagggcggcggcgacgccttcgggtcctcgacggcgccgctggcctggcacgacttcctcgagcgcatgcgccagccctccgccgccgagttcgtcaagtccatcaagagttttattgtgacattctcaaacagagctcctgatccagagaaagatagtgcatctgttcaagagttcctggaaaacatggaaggtgctttcagagcccacactccttgggctggcagttcagaggaagaactagagagtgctggtgagggacttgagaaatatgttatgacaaagctgtataatcgggtatttgcttcggtccctgaagatgtgaagagtgatgaagagctttttgagaaaatgtctttgctacagcagtttataaggcccgaaaacttggatataaaaccagagtatcagaatgaaacttcttggctgctcgcgcagaaggagctgcagaagataaacatgtttaaggctccaagggataagctttcttgcatcctaaactgctagtaaagtcatcaataacttactgctgaatgcttctattgtatccaatgataatcccccaggagctgatgaattccttccagtcctcatctatgttaccataaaggctaatcctccacagctgcactcaaatctgctatacatacagaggtatagacggcaaacgcgattggtgtcagaggctcaatacttttttacaaatatactgtctgctgagtctttcatatggaacattgatggcgaatcactgtctatgaatgagctagatttccaaaggaagatggattgggcaagggagcgcttgttgggattatcagctgactcagaaaagcaggataatcaagctaatcctgatttccaagaacagagatcacaaaatcttaaagcttataggagttctgatgtcagcttatccttgaaagaccctgtccagggctctggacaggacatgagaagggacagtgatgtgagtgtgagtggtaaaccagttgagcgggtgcaatctatttctgatttagagaagaaaggagctacggagctcctcaatgatgatgacttgaacagaaaattccaggagtatccgtacctatttgcccgtgctggtgatctgactattgctgatgtcgaaagccttttaaattcttacaagcaactggtagttaggtatgtggcacttgcgcaaggtaagggtgtcagccctgaaaccattcttgctccgagcgggcaaacagcatctgatcttgcagtatctgaggagcctgaaaatgtgaatagtgtggtaaataataacgaaaacagtgaaggaattagtaaaacttctgatgatgttacaagtgaaaaccatcattcagaagtagtcgacacagatgtatctgaacaaatgacccagaaaactgctgttgactccagtgatgattcaaaggtatcaaaggatgaagcatcacatcagcctgagaatgcatgacctgtttggtcaatgccgggatgaactggcgatacatggggaaagtactctgaagttcatatactcagagatgacaatgatcacgaaacagagtgcccatttccccggagcagtacgcagaaagcatctcttggagccacaaatgtgcatgctggaagcttgaatgaagatattcaacatttgtgggagattgatccattctgctgaagctgttcttttcttagatccaaatgtttgttcattgcattgtaggtcttatctctgttgtaaggttattttgtggtgaacacacctttcttttcttctgtaaactaatacttttgtaacaagaatttcttaagtgaagctagtttataccaaaaaatataattcaaagggaacaataaattnnnnnnnnnnnnnnnnnnnn

SEQ ID NO: 46016 - DNA, 406 bp, Setaria italica
  misc_feature (241)..(241): n is a, c, g, or t
  Peptide Sequence Number=SeqID_111990
tctcggaggtgaggtccggcggccgaagatggcgcggcggcgggatgagcgcggggcctcgggaagggtggcgcacggccaggcgatgcggaggctactccggtgcgacggcgaggcggagcaagggggagggctgcatggcgggatggggcggcgtacggccgagcagggcgcaggccgcggaggagcgctgaaacatccgtacggtggcagttgggctctcgcgtgtgacaacaaaatntagcaatccactctctttgtattatatttaggtcaaggatctatatagataatctgttggagtatttagatactctgatggatttttcggtacagcaatccgatttagatttaggtaagccgttggagatgctctaataaagtatcaaccgattgcatccgcgag

SEQ ID NO: 46017 - DNA, 619 bp, Setaria italica
  Peptide Sequence Number=SeqID_111991
cttctggctctctgacctcgtctcgccagcgtgcttgccatgtcgcaagcaaccaccgatctcgatcttgtttcatcggggaagacgaagtcacgcgattatctcgtctggcagcgccacgaaccgcgttcgcttctctttccggctagccttgacgtccggcgacgcgtactccggcatgcggggcagcgcgggccacctctccggcgtcctcggcgccgtccccgcgcccgccggcatcatgaacccggtcccccagtctggcgttgccgcgaacctcgggctccgctccggcgtctgcgggaacgcgccggcgccgacgccccagtccggcgtgggcacgaaccgcgggctccgctcgggcgtccgcagtatccccctctccggcgtggcggcgccgctgccggcgttggccgcgcacagctgcatgatcctggcggcggcttcggcgccgtcccggctctcggccatgagcttctcgacctgcgccttgggcaggcgcatccggagccggacgggcccaccctcggaggcggtggagagaggcgacgccggcgccgtggcggcggacgctgggagggagaggtcggaggtggaccggcgcgtgagcatgagcgac

SEQ ID NO: 46018 - DNA, 492 bp, Setaria italica
  Peptide Sequence Number=SeqID_111992
agagagaaaaaagagaaaaagaaattgagtaaatgacagacaccccagtccatgtcgccggaagcgaggcaggaagccgccgccgcggaccgcccgcagcagccggcgatcatcatctttagcccgcaaccaaggaaaacgaccatgggaccgagcgcggatcagtctacatcttctggctctctgacctcgtctcgccagcgtgcttgccatgtcgcaagcaaccaccgatctcgatcttgtttcatcggggaagacgaagtcacgcgattatctcgtctggcagcgccacgaaccgcgttcgcttctctttccggctagccttgacgtccggcgacgcgtagcaaaagcgaccaacgaaattaatttcaaatcgattgtcaatctgcacatgtattagggggataatgatgtgccggaaatttaaattatgctgggaaaacaagcaaagtaaaacgcatgacagaagccacaccccaataatgcggtttt

SEQ ID NO: 46019 - DNA, 228 bp, Setaria italica
  Peptide Sequence Number=SeqID_111993
ccaccggtggcagatctagatcgtagctacccagccagccggccgacaccgtccgccgcggcgttctccgccccgagatggaggccgtctccgccgcggaggccctcgacgggcacaaggacaggttcgatctcggggtcttcgtcggcgacctcgccctcgacgaggaagtcaccagtgatgacgagtgcctggaagggctgcagcaggagctcgacgactgacaag

SEQ ID NO: 46020 - DNA, 518 bp, Setaria italica
  Peptide Sequence Number=SeqID_111994
ctaagtctagttgagttagccttgttaatgctatgagaaaagtaccacaaataataaacaacaatataacgcttgcagaaaataatcgatattgtatctgctacctcctccacactgtacactccaccaaaaagagggaacagagccaactgtattttgcaacacagaaagaccagagcacatacagcgcatgtgctgacttagctactgagagggcaaattcatcaatgagcctatagataacacagtatgattttacgttgcaatcaaacatttattctctattacaacaggcaatccaagtagtacttaaggagccctttggtagggctttggctccggcttatttgccggcttatgccgaagccctaccaaatgctaaaaatcaaaacggcttcttcccagaagccggtaaaagcctctagcgtttttgcactaggatgagagagccgaaaaaagtggcttcccccagcttctcttcctcccttgcgccaagacaaatggaactatccctcaac

SEQ ID NO: 46021 - DNA, 486 bp, Setaria italica
  Peptide Sequence Number=SeqID_111995
cgtcggagaattgaaggacgatgagtgagttgatgaaaatggatttcaccaagatagtgaagacgtgggaggagttgcagctgcgcatcctcgtcctcgcaagcctcttcatccagtgcttcctcttcgtctccgcaccccagcgtaagcgccgaatcccaggtttgctcaggttcttcatctggctggcctaccttggcagcgatgctgtagcgatctacgcgcttaccaccctctccggtagccaagagaaagacagccatcccggcccgcaggttttgtgggtgccaatcctcttggtgcacctgggcgggcaggaggccataactgcctataacatcgaagacaacgagctatggaggcggcatgtcctgacagcggtgtttaaggtcaccgtcgctattaacgtgtttgtcaagtactacccgtggtcgtcgtctcctgacatcggaatcttcgtaccaggactgtcttttgttcttgtgt

SEQ ID NO: 46022 - DNA, 425 bp, Setaria italica
  Peptide Sequence Number=SeqID_111996
agtacgtccaactactcgtccgatgacgaaggtgctgccaccggcgggagcgaggccgtggacgacgaggcggaggagttcatccgccgcttctacgagcagctccgccgccagaacaccgtcgcgctgctcccctacatgcaggagtccgccgcctgatcatcaagttgtatggtcgtgtgatcgatcgatcgagttgatcttgatgatcatcaacaacatccaccacgggctcgcccgcggcacggatcgaagaactttggatgggtggcttgcttggcgagcatgcaaggaatggatgatgtacagcggcgcaatgcatgtgtacatatactgtttacttttagtagtacgtgcctatgttttgcatgtgtgtgtatgtacgtattgtaatgtgatgaaggaacgaagatgttgagtacccc

SEQ ID NO: 46023 - DNA, 665 bp, Setaria italica
  Peptide Sequence Number=SeqID_111997
ttccaccattcagttgatgtattctgttatctgcatgctgaaaattggaaaatgaattgatcgtttattcattcagacactgatgatgttctctatgcccgtcaatagaaatgtccaaggatatcagcttagactggattttctctctttttcgatgccattcaaatgaagtcgcaaaagttgccgagtaactggtctggtatgtcgaagacgacaaatccaaattattgttgtatcttgaattacatggtgttcaagatacactagaaaatctagcgcgcggctttgccacgcctttctatggttttggccagtgctaccatgttagaggtacttttatcatttatcttttatgtagcaaataatatactggaagtgttttgatcttggtatatattagatatagtagttaataaatacttggcgcccatctctagcttctttaacttattctatatccattgatttttttcatctaacggctgtcatagtgtgatgacgtggcaatccctggcccgaacttgaacccaggattcggtctttagagatgtgcttattatactacaatttatttgtaaaaggtgcaatttactgtatgagcatcttatcctttttgctctgcaattgtgtgcccctcttacaggataactgtcaaagaaaaaatg

SEQ ID NO: 46024 - DNA, 379 bp, Setaria italica
  Peptide Sequence Number=SeqID_111998
ccggcgaacgcgacgacgctggagagcacgtcgggcgcgccgttgccgagcgagaggagcgtgacgcccgcgatggccggcggcaggcgcagcgcctccgagagcccctcgagcgacgcgcagaagtagcgcgacgccgtgtcgccgaggaggtagaagaggaccagcagccacagcgccatcgcgccggcgcccagccacggcgcgcggccgaagtcgcagtagaagagccggaggtagtcgacgtacgcccccggcgcgcacggcgggtgcccctgccacgacaggtaccggcaccgtcgagccgtggtccggcagcgaccgcagcgccgcctcgcagctcgtcccctcctcttggccgcccagcagcagcaaggaa

SEQ ID NO: 46025 - DNA, 895 bp, Setaria italica
  Peptide Sequence Number=SeqID_111999
gcctccatctccagcagcagcgacgacgagtcatggtccccggcggcggccggcgcggacccgatcgagcacttgtactccggcaccgccgccggctccgccgtgaagcggtcgaggaggaacgcggacgtgtccagcgtcggaagcaagggcgcgggtgcgggcgtccagctgggcgcggcggcggcccccgaggcagcgggggaggaggatgcgggcccggggacggggaggccggtgatctcctgtaccatgcggcggaagtcggccgggtcggcggtgatgtaggtggtctgcgcgcgccgcgacggccggggcttgcgcttgctgacgcggcccacttttggtcccttcaaggcccgggccggcgggcggccagcagcaggaggcctggacgccggcgccggcgcgtcgtggccgctggagaggatctcagaggcggaggaggtcgaggaggacggaactgccggggagaccaaggacttggcggcggcggcggcgtgggcgggcgccatggaggcgcggagcgcggaggtgagcgcctcgttctcgaaggcggcggcggggaaaaggcagtagtggctggcggcgacgtgggtcggggccggcgcggggaggtgggcccaggtggggtcgagggcggcgcaggggtttgccatggctgggaggaggggtgctcgggctcgatcgcaggctggatttgggtgaggtgagcagcgattaatgcagtagggcagctttcaacggatctgggacctgagttacaaaatcagttgcaccatgttgtactacctgcactggcttcagcaatggatgatgtccagaacccacgcgtacaggcacatgctgcatcagctatcctaaacttcagtgaaaactgtagaccggatatttt

SEQ ID NO: 46026 - DNA, 393 bp, Setaria italica
  Peptide Sequence Number=SeqID_112000
acatattttcttccattctttgatgaactctccatgtatttaacacctatgttggtaagtgaaaagttgaactattagatttggagtctgtgttttactggtgttagggtagtaccagcaccgagcactacatcacaagttggtttaactctaatcttaccctgtagctcatattcacaggaactgaaactgtgtgttaaatgataggtaaacctaaacattctatgtacattcttaacttttcattaatttagggaaaggataaaacatcagaagaaagaaggattgccatatgcatttttgatgatgtcgctgaacactgtcgtgaagcagcagttaggtattatgatgcatatctcccttctctattagaagcctgcacaagtgaaaatc

SEQ ID NO: 46027 - DNA, 3316 bp, Setaria italica
  Peptide Sequence Number=SeqID_112001
aaagctctccgacgccgtcgccgagctcgcctccttcctcctgccgtccaacgcgtggcccgacctgctcagcttcctgtacaagtccatcgactcccagtcctcgcctcctgggctgcaggagtcagcgctcaacattctggcccgcctggcctctcacctcgccgccgtcttccccaacctccacgggctcctcctcgccgcgctgtcccatccctcctccgccgacgtccgcgtcgcagggctcaatgcggccatcagcctcatccagtcccttccctccgccggggcccgcgaccaattccaggacctcctcccggccatgatgcgcgctctcgccgagtcgctcaactgcgggaacgagggctccgcgcaggaggctctggagatgatgattgagctcgctggcgcggagccgcggttcctgcgccgccagcttccggacgtggtcgcctccatgctgcagattgccgaggccccaggactcgaggatggcacccgccaccttgccgtcgagtttgttgtgaccctcgctgaggcaagggagcgtgctcccgggatgatgcggaagctgccgcggtatgttgggcggctctttgcagtgattatgactatgctgctcgatgtccaggatgaaccggcgtggcatgccgctgtgtcagaggaagaagatgctggagagaccggaagctatgtcttcgcacaggagtgtctggaccggctggcaattgctgttggtggtaatacgattctgcccgttgcagctgagttgcttccatcatttttctcctctgaggattggaagaggcggcatgcagcactggtgacaatagcgcagattgcagagggttctgctaaggtgatgattaagaatctggagcagttggttgggatggtgctgaattcattccaggatcctcatcctcgggtgaggtgggcagcgattaatgcagtagggcagctttcaacggatctgggacctgagttacaaaatcagttgcaccatgttgtactacctgcactggcttcagcaatggatgatgtccagaacccacgcgtacaggcacatgctgcatcagctatcctaaacttcagtgaaaactgtagaccggatattttgacaccatacctggatggaatagttgggaaacttctattgttgcttcagactggaaaccaaatggtgcaagaggctgctctaactgctttagcatcagcagcagattcttctcaggaacacttccaaaaatattatgatgcagtaatgccatacctcaaggctattcttatgaatgcaactgataaatccaacagaatgttgcgtgccaaatctatggaatgcatcagtttagttggtatggcagttgggaaacagaagtttaaggacgatgctaaacaggtgatggaagttctcatgactctgcaaggatctcagatggaggctgatgaccctataacaagttacatgctgcaagcatgggcaagactgtgtaaatgccttggtcaggatttcttaccatacatgagtgttgttatgccgcctctgctccagtctgctcagctcaaaccagatgtgagtgtcacctctgctggaccagaagatggtgaatctgatgatgagggtgttgagactattacactgggtgataagagaattggcatccggactagtctactggaggagaaagctacagcatgtaatatgctgtgctgctacgctgatgagctcaaggaaggttttttcccatggattgatcaggttacaactacacttgtacctctcctcaagttctatttccatgaagaagttaggaaggcagctgtttcagcaatgccagagcttttacgttcagcaaaattggctatagaaaaaggtcaagctcaaggtcgtgataaatcttatcttaagcaactatctgattacatagttccagcccttgtagaggtcatgcacaaagaacctgagccacaaatttgtgcaagcatactggaatcattgaatgagtccatacagatatctgggacacttcttgaggaaaatcaagtaagatctgtagtggagggagtaaaagaagttatagttgcaagcgctaataggaggatagaacgaacagagagagcaaaggctgaagactttgattctgaagaagaggaactactcagagaagaaaatgaacaggaggatgagatttttgaccaagttggtgattgtctaggcactcttgccaaaacattcaagacatattttcttccattctttgatgaactctccatgtatttaacacctatgttgggaaaggataaaacatcagaagaaagaaggattgccatatgcatttttgatgatgtcgctgaacactgtcgtgaagcagcagttaggtattatgatgcatatctcccttctctattagaagcctgcacaagtgaaaatccagatgttaggcaggctgcagtttatggaattggcatctgtgctgaatttggtggttctgcatttaggcctcacactggggaggccctatccagattatacaatgtaatcaaacatcctaatgcgctggatttggataatgcgatggcatatgacaatgctgtatctgctcttggaaagatatgtcaattccatcgtgatagcatcgatgcatctcaggtcattcctgcttggttaagttgcctgccgataaaaaatgatttaattgaggccaagcttgtccatgaacagctgtgtgcaatgcttgagaagtctgagagggagcttttgggtcataataatcagtaccttgcaaagattgtgtctgttttcgcagagatattatgtgctgggaaagatctagcaacagaacagaccgccagcaggatgattaatctattaaggcagcttcagacaacgttgcctccttcagtattagcgtcgacatggtcttctttgcaaccacaacagcagcttgctctacaatctgtgctgtcgtcatagcagaccagaataacctcaatggtgtaaagcatatggtcttcacagttaccttttgtgttctatttatgtatgtttggagccagggtagggttcctggggtttgcttagcatacatgggcccttaggttttgtatgaagggcaaagcttgcatcaggtgtgtatattggttgcagaactgcacgtggatgtgtggctgggctatctccacatcaccgatgaagttgtaaagcaatatatctcgttcatttagtaattttaggtggattgaaagaattgtaaattaaaaacaattttgatagttgattttgatgccatatttcttaagccaaaaaaacaaaaaa

SEQ ID NO: 46028 - DNA, 616 bp, Setaria italica
  Peptide Sequence Number=SeqID_112002
gttttgagaagaatgaaaatgcatatattgcagttttgaggtgatccgtttgtccctaaaactcacaatcacttgtttcttgcacctcttgtgttcattgattccattttgctgattggatgatgcagcaatccaaggatgtgtcacaaacaaatgtcaattggaatgattttattaacttaaattgtagtgcatgaattttagatgccatgaacagcactatgggcagcaccaaactaggagaaacttggttgtgttgtaaaagaagtagtaggaacacaagtttgagccaaagaggactcagttcctacagacccacatcaccggcttcctatcatcttagtaggcctagacttctcatatgttgcactatagaatgtgtagccaagatgaggttctccatactttgggtctttcatgtttagttgtttacagtgcataaacaatgaagcattactttcacttttcttcagacttatttagtttaactcgcctgtattggcctggttccatttgaactggcatcagtaagaatgcctttggtttgctaaaaaaatcctgtatcattcataaaaaactagatcagtgagtgtttcatttgtactctaccgccttc

SEQ ID NO: 46029 - DNA, 267 bp, Setaria italica
  Peptide Sequence Number=SeqID_112003
agcgccgccgtcgggtgcacctgcccggcgccgtagtcgtacggcgtcgccggcgacccggagtccgtcgtcatcggagcacggtcgttgttcagctgggtcgctgtgccgccggcggatcgatcgggcatacatgagactctgttcttcgttgacggccatttcagaatttcaggttcggagatgaagattgttgttacctgtggtcatgatggccgaccggatcgcggcggggctccacgtggggttccacgccttgacggtggc

SEQ ID NO: 46030 - DNA, 1279 bp, Setaria italica
  Peptide Sequence Number=SeqID_112004
ccttcttggccgccgcgtcgtgcccgccggagaaggtcacctggaaggccagcttcttcgcgctcttcgtgaactcgagcttggtcggggtgaccttgacgttgaggccggccggcgcgctgacggcgacggtgtaggtggcggcctcctgcgcgccgacgttggtgacggcgcgggtcaccgtccggctgccacccttgccgccgagccccgacacggcaatcgacgggtagttgaggtcggagatgagcgccgcgctggcgttggccgcgcaggcgaacccgtcggggagggaggcggcgatgagcttgatcttgggcgcgtcgtagccgtagttgcagaggaactggaggtagtcgtcttccccggcctcgtacaccacccccgggtccagcgccgccgtcgggtgcacctgcccggcgccgtagtcgtacggcgtcgccggcgacccggagtccgtcgtcatcggagcacggtcgttgttcagctgggtcgctgtggtcatgatggccgaccggatcgcggcggggctccacgtggggttccacgccttgacggtggcggcggcgccggcgacgtgggggcacgccatggacgtcccggagacgagcttgaactgcgaggccgccttctgacccgccgggagcgacgacgacgacgtcgggatccacgacgctaggatgttgacccccggagccgcgacgtccggcttgagcacgttcccggtctgcgccgacggtccccgcgacgagaagtaggccaccacgggcgccggcttgtactccgtcacggtggccgtcggcgtgatcgtggccaccggttggctggcggaggcgatgtacttgtggatggccgcggcggcggcggaggtgacctcggtcaccgggaagtcgaggtaggtggtggccaccgacctctcggcgtcgttaacgaagatggcccccaccgccccggcgctctgcagctcgtccgccttcaccaccttcgacgtgtcgccctccgagtggttgcacagcacgatcttcccttggaccttgccgctgtccagcgtgccgggctcacagtggctagctgactcagcatcagaaactgagctctcctttgctgctgctccatcgatcaatggatacttgggggatttatccaagttcgagaagtttatggctccacctctgaccgcgctgctgttcccacccagcacgacgtcggactcgaagtcgcggtcgatggtggtggcggcgaccgtgaggatccacggcgccgcgttcacgacggtggc

SEQ ID NO: 46031 - DNA, 838 bp, Setaria italica
  Peptide Sequence Number=SeqID_112005
tcacgttgaagatggagaagttgaggcagaaggccagcacccctgacgtaatgatgatcgccagcgctggggccacggagtcgtaggtgtagagccagctcaccacgccgctgccttcaagcacgattgctggaaccgacaggatcatcgtcgcaaatggcgccatgtagtacaccgtgttgatgctgtcgaacttgtatccatggagcagggactctgccatgatggtctttgtggaagtggccaggcagcccaccatggcagcacaaaagccaaacgtgttgaagctcagctcggttatggatgtcagcagaatccctcccactattgggaccaaagaagcccagatgcgccactcgaaatatttcctccagatcaaccactgaagaatcaccgttgttgcaggagtgaaagattttatcgtctgcatgaaggagactggaatgtagcgaaggctgacattccccaacacgatgtttatgcagaatacaaatgacattgggaatatccttctccatcgatcctctgaggcaacctcgatcagaggctttgttttcagaactttgattgcgatataagctccaatagaagagcatatgaagtggacacacgacactgtcagaggaaatttgaactccaatttctggaagatccacttgttgatgatgatgacggtgacgttgaagccccaccactggaggatggcgagcaccgcccggatggtggtggcgttccccatcttgccgtcctccatggaaggattgcttcttgggcttgccggccggcgcctctctgtttctctcctctatctagtattaattgatcaatccgacacgag

SEQ ID NO: 46032 - DNA, 362 bp, Setaria italica
  Peptide Sequence Number=SeqID_112006
accacgcaaccccagccgcgcccacgccacgaaaccctcgaacccaacggcgcgcgcgcgggcgtcgtccggccggcggccaacttgcacctggccatgcccattcacacacgcgggagcgcgcgcatttactcggaccccgcctggccctgccccaacctccctcccctctctcccttcgcctgttcgccaccaccgtcttaatggtcgctccggtggttgcacccacccaacccattcaccccggcgtcgcccccggccgtgcccgccaggtcttcctcttcctcatccatcctccaccgccggcgaccccctatatattcgcgcccaacctccccgccccaccttccaagcccacccac

SEQ ID NO: 46033 - DNA, 1036 bp, Setaria italica
  misc_feature (150)..(150): n is a, c, g, or t
  Peptide Sequence Number=SeqID_112007
ttttagttttttttttttttgtttttttattgtaacgtgatcgaccgaccgctccgaccacatcctttatttcttaataaaatacagtacggacacacatgcacgcttgcacaaaccatttccaccacacgcacgtatcaacgtgtacgngaaaaaaaaaagcacgaagcgcggcctcagctcagcaagtagctagggggctagcaagggagatctcatctcatgcgtccaccgacaccgcggatgacatttgtacggcggccttgacaccctcctcctcgaccttcttcttctcctcctcggcctcgtaggcgtcgcgctcctggacccacaggtcggcgaactcgcagtccttgtacctctcgaaccacgggccccccgacgtgtagtgtatggcgcgcggtgccgtggcggcctcgtcggcggggtcgaccttgttgtgccccacgaggaagttccacacgaacggcacctccccgacctcgtcgtcgtcgagccacatgaagcggtggaggtaggcgccgctccgcgtgctgacggcctccggcgtgagcgcggcgcggttcttggagtggccgcagttgaagagcaccatggacgaccagttcttgcgcgggtacaccgtctgcacggcgccgtccatcttggtcgcctccgtgggcgtgtagtcgtggtgcacgcacagcacggcgtggcgcgggtcggcgctggcggcgaggcgcgccagatccgcgacgtcggcgacgaagaggaagtcgcagtccacgaacagtgcccacccgcggtaccccgccaggtgcggcgtcaggaagcgggtgaaggagaactcggtgctctccgtcgggccgcgctcccgccagtacagcccggcctcgcggagctcctgctggacgatggggatcacgtcgagcgggatggaggagcggcggagcagggagcggcggcacacgcggtacgcgatgtcctcgcgggagtcgtagcccacgaacacacggaacggctccgggccggcgacggcgacggcgcccgctcccgg

SEQ ID NO: 46034 - DNA, 754 bp, Setaria italica
  Peptide Sequence Number=SeqID_112008
tttcttacaatgtattgtgcgagtgcaataacgcaggacaatgttgctcaatggcatgaaataattggaacatgtagcaccttcaactgtaacagtatcggaatattcataactttgaaaatctcctggtacattgtaaaacctctatctgatagagcccatgttgcaatgccgattccctgattcgatatgctatgttagaaggaaatttatcagaatcttcccgaattgtgggttatatctccagaaaggtggtcatggtcctaaggaaagaaaaggtttttccacatctcgattctagagtcggtggtaaataaatcatgaggggcttgactgaaaagacaaaaggtattgcaactttaacattattacagatgaagaatacagtagcatctaccagtctgaagatgccactttctgcaagctaaagcacttacaacatatatggacataaaaaactcatagaacacaacagagtccagacagtgataaccatcagtattcagtaccgacatgggttttgtgcactctgctgtgttttgtctacctagatttttgcatgatttgctttgaagctattaactttagttgatttcaccacaaattcatagcaggtcctgatcgaaccttcttggtaaattttctaaaagcaagggttctatttaaaaaaacactagccaatggttacctgagggtgattaagagaaaggaaatgagataaacccaatagttcctaacaattcacattgcaatt

SEQ ID NO: 46035 - DNA, 266 bp, Setaria italica
  Peptide Sequence Number=SeqID_112009
gggggtaggcagttcggagctgatggcgcaatggagcaccgcggcgagcctagaccgatggattggtccacggcgctgcggctcgccgccgccgccgcaaccgtggcaggcgccggtgccgaccgtgccgccgccgcggcccgcgaagtggaagggcaggatcggctgcgcgtccgtaccaagggagctcagcgccgccgcggaggcggagcagaccgcgcggccgctggtcgacggggacactgaggaagaaggtgtagtgtgcg

SEQ ID NO: 46036 - DNA, 322 bp, Setaria italica
  Peptide Sequence Number=SeqID_112010
aaacgcatcatttaatcaaatagggaacacttcaggtcgatgcctttacttccccacgagaaaattcccctgttgcgaacgaccacgaccgcagcggaatacttgcagttgtcaacagcgatggggatcgaggcgttgcacgcaccgggtcgtcgagatcggcgtcgaagttcagcgacggcggcgcgccggagtcatcgccgcggacgcggcagcagacgaacctcgcgcaggcgaacgcgacgaaggctgcggtcatgccgaagccgagcgccgcgctgaccaggttcaagcccccgtacccgaaacaataggactagac

SEQ ID NO: 46037 - DNA, 410 bp, Setaria italica
  Peptide Sequence Number=SeqID_112011
ggggcggtggggagttgctggatgctacatgcagatgacatggcagcttgcagctctttcagtgagacccggcatatcgggcaagtcgtctgcttctccaaccataaatctaagcaggcaaggtgaaagttgtggcgacatgtcgggatgattctaagaatctctttctccttgtattcactgggcatcatctttagactggaaggcctcaaaaattatacttcatagtaggaattgcagcaataaccaaaggttccaacccagtacgatgctctaccgggtcgtcgagatcggcgtcgaagttcagcgacggcggcgcgccggagtcatcgccgcggacgcggcagcagacgaacctcgcgcaggcgaacgcgacgaaggctgcggtcatgccgagccgagcgccgcgc

SEQ ID NO: 46038 - DNA, 380 bp, Setaria italica
  misc_feature (366)..(366): n is a, c, g, or t
  Peptide Sequence Number=SeqID_112012
tttgagctcacaccaagccttgtggtggtggaggtgaagatgaaggcaggggacagggaagagtatgaagacttctgcgagagggagttgaaacctgggatgcagcaccttgtgcaccatacagcctccgttccggatataccttctgatactgagtagcttgaaaggtagagctctcgcttggaaggaatattaaaaaaagaaatttggattgaaaggatgaatgtttctgtttcagcataagcatttgggcagacaaatgttgtttatagttaaaagttgttacttcttttcagttaatattctttccgcaatccaaaatgttttgcgtatactggttgtgtgctaatatccatcatcaaaacnttcttctagttgtt

SEQ ID NO: 46039 - DNA, 484 bp, Setaria italica
  Peptide Sequence Number=SeqID_112013
aaacaaaacgaaacgacagtccaaaaagaacaccaagcaacacatggaaagaatgtgtcgcaaaaaaaaaaatagcccggcatgcagcagccactgtgacgacgacgacggattgacgaggttattataataatgggggctaatcagcaccgtgcttgatttgctagtgattaatttaagaggctagcaaatggcgacgacgcgacgggactgtcgcattcgcatcagctgtctggagtgtggctgtgatcggcggctctgttcaggaggtggcaatgcagtagggctccaggatgaagagcggcttctgccgcagctgccggcaccgccgcacgctctggagaaggtcctgcttgtctccccgccgcgacgtgaacagcaggagctgcttgggctcggcggcggcggcggcggacaggtgcatgccgccgcactcgtcgtcgtccttcgtggccggatggacgtggttccccgtcgaggcgca

SEQ ID NO: 46040 - DNA, 1038 bp, Setaria italica
  Peptide Sequence Number=SeqID_112014
aaatgaaacatacaggggtatcctagattgaaactacatagcaacttgtaatgtatgtgttacaactatggctgagagccgaaatagcttaagtcaggtacaatgggaatatgattgatgtacagtttccatcttaataatgatgggaacttggtattgatcgaccgagcagatggacgtgtaagtttcccttttaaggaataaatctgaacacaaatacaggactttgaaagtcaacaaacttgtaggatccttcaagcgagttcaagtatattgcttctcgaggctcctcgctcaccccactctgcatggcatagtccagtgccatttcgtaatcaacctgttcaacatgctgagtcaagcaatctttgaaggtcatctctgtcacctcctcagaatttatcttctcaaggagttcctcgtcttctttatcataacgcggccgtttcgggggagattcatctgcaatttctaccagagtctccataatcgctcttgcaacatcaggaatatatctgttcaagttctttttcctgtcctgacgctcacgagcctgaagtttcttcacaatcttagacttcagttgaagacagcactgcttcagggctgacttaacagcagatgatatttcagttatgtcatccccaatgtactcctttccagttcctttaaaaggtatctttgtactcacaatgctcacaaagacaccaatcttatcttgctgctgattaattttgtagctgctccaattgatcctttttagagcagttcttgtgatgacatcagcaccttgttcaaaaagaagtggtattctgtttgcaaacctaaaaatatttagaccttgtttaacatcttttccaccaatgcttatcccagcttcaacaataatttacgcctgggtatcataaaagagctacaccctgatatggttgcaacacatgcaagcagccctcaggtttttgaaggtcatccatttattgttgaagctgggataagcattggtggaaaaaaatatttagaccttgtttaacatctttt

SEQ ID NO: 46041 - DNA, 1182 bp, Setaria italica
  misc_feature (2)..(2): n is a, c, g, or t
  Peptide Sequence Number=SeqID_112015
tnagggctgcttgcatgtgttgcaaccatatcagggtgtagctcttttatgatacccaggcgtaaattatattcacctgcaggactaagacaattgccgctgggatcatcaaacttagcctgccgaaataattgatgtattcgaactaattgctgtggcgtaaggctcttaactgtcattttcggactaaaatcaggtcccatctccccaattaaacgttcagcatgcgatttgcttatattcacaaattcatgttgcagaaactgcaaaaggttttgctttgtagtctccacgattaagcgctttatcagtaataaatcaacagcagatgggtgatgctttgtttgaagtggaacaggaggcataacatctgtccggcgtgcaaactttattgttaaatttttgtctgctgcatcagatagaaatctaaacaggaactgagcgtatggtgtgatgaccgccatctgacgcatataatggaggatctttgaacgatgtgttgtccaatttccctcaattataacttggatctctgccccatgccaatgagttttgttctctcttttctcgtgtaaatgaacatgagggacatttttgtgaatatctatgtcgaggcgacagaacgaaacataattctggcctttcattgatgaattaatttcaataggaagtcccgtgctcatctttgaccatataagtgccattttagcaccaagtccaaatttcccacgtgtttgcctcaaaccatactttgtgccagataaaactctcccaagcatatttgggatatcatcatgtggcatacctctaccattatccttgcaagtcactttgaaaaatgcagcctcgccccggccttttcctcgagcagatggagcctccttaactttctttccaagtgcagcatttttagcttgagtttcttggaagcgtgcttccttggccaggcgtttctcacgagccttttcagactcaaaatcatcatagagggcctcatcaacacgctctcgatcaactagccctatcattgtgttgaacttgctcttcgtgatctcttctattgtaatctcaatgtcagggagctctgagatggactcagctgaatcaagagcattctcaactagctcccgcattgtggtgtacaaggatttgccaggattgtcgaaccctgcaatgttcttg

SEQ ID NO: 46042 - DNA, 410 bp, Setaria italica
  misc_feature (391)..(391): n is a, c, g, or t
  Peptide Sequence Number=SeqID_112016
aaaataaaaggaaaaacttgttgacccacgtgattccaatgctagttctgctgatatccaacaaaagcttaaggagcaaagtgacacactttggaagttaaaggatgaacttacaaagcatttatccactgctgaattaagggatatgcttgaagctaatgagcaagatacgtctggaccagagaggctcctattggaccgttgtgccgatggaatgctatttggagcgttgggtccttgcccagtctgtaataacggcctgtactattataatggtcagtaccaatgcagtggtaatgtgtcagagtggtccaagtgtacatactctacaacagaacctgtacgcattaagaagaagtggaaaattccagatggaacagagaatgattancttatgaagtggttcaagt

SEQ ID NO: 46043 - DNA, 329 bp, Setaria italica
  Peptide Sequence Number=SeqID_112017
cgccgcctcagtcacgctatcaaaccctgccgccgatgggggtcgcgacgatggcctcgtgcgcgccggcgtggagcgacccggcgcagaggagctgcgtcccggacaggatgatggtgaacgcctccaaagttctcaggctcgcgggcctccagctgatgctgatctccttgcacgccagccccatggcgaggagggtgagggtccaggtgacgagcgcggatgcggcggcggacatcatgttggccgggaacccctggctgacatcgtgcaggccggtgagcgacgtggagatgccaacgacgcccgtgatgagcgcgaagatgaac

SEQ ID NO: 46044 - DNA, 328 bp, Setaria italica
  Peptide Sequence Number=SeqID_112018
ccagttcacaacagccgccgccccttccagcctccatcggccaccgctccccttcctcccgcgcctcgccgccggccgccgccgcaccggtcgccccttccttcccggcggcccaatcgcaccctaaggcggcagcgcccgtctcgcgcctcaccgcgcgcccccaccaaatgggcgcccccggccgcgacctctcagctctcctcgctatccgccgcagcggcagccgcctgttcaagcggtaggcccgcccctgcgcctgtcggtggctggttggtggtgtcggtgtggggacgcggcgcgggaaaggaggggaggtggggggaaa

SEQ ID NO: 46045 - DNA, 205 bp, Setaria italica
  Peptide Sequence Number=SeqID_112019
aatctgggtgttgcaaggtgtggtcactttacctggttcttaaaaaaaacttggtaaatccgtgaatttttttcccattattaatcagtagaaataagtaattcatcaatttttctagtcacaaatcgcaatccagtacaaacaaaaacatgccttacagatgttgcagtgagaggccatgcaagttggaacacacttccggaag

SEQ ID NO: 46046 - DNA, 569 bp, Setaria italica
  misc_feature (39)..(39): n is a, c, g, or t
  Peptide Sequence Number=SeqID_112020
gtgtcacaatcagattcttcatgttctccttcacctgcngttttgtcagccactatgtcatccatagcctttctatcagcaaaattttcagtgtcactaaactgaaactgaatttcttctgtatactcagagaatgatactcttgcttctgcttcttcctcaggctcagctgtagcctcaaggacaaacccaacttcatctccactcacagaactggatcttcctgtttcaccttctgtttttatgctttgcacttcaccatagaccaaattggaagacccagtagcagttggtgaaccctcctctacttctattttattaggaaaattagctgactgagcaatgaattctgtggatccatctcctattgttgaggtcagagtaacagaaccatcaggctctctgttgcatgctttattttccacaattaagttttctgttacatcttcaggatcattgaccaaactggaagacccggtaacagtttgtgaaccctctatttccattttattaggaaaattagctgactgagcaatacattctgtgggttcatctcctattgttgaggt

SEQ ID NO: 46047 - DNA, 1059 bp, Setaria italica
  Peptide Sequence Number=SeqID_112021
cctcgattaagctcttagctacatcttcaggatcattgaccaaactggaagacccagtagcagttggtgaacctcctctacttctattttattaggaaaattagctgactgagcattgcattctgtggattcatcacctattattgaggtctgagtaacagaaacatcaagctctctgttgcatgcttgattttccacgattacgttatttgtgacatcttcaggatcatagtcaggcacataacttgatgtctctacaacactagaagaagcatcaggacaaaccacatcatgctgacaagcgaaatcatgaaccgcatcggtatgtgaaagtgaaacactgtccacagaaatatccatatctggaccattaccttgcaaggtttggggagctggatcttctaagataaaagctccatgttcttcaacaaccacttcaatcacgtcctttttgttgctggaagcaccactgcatgctgataacctttcctcagaaaatacctgttcttgactcccatcagagactccggaatgctcctcgcgttgtatgctgtcagccagtgagatatctgatgcatcacgaactttgtcatctgaaatattggacacagcatatgagctctccagagtttcagaactgctgaaaatgaccattttctcttgaactgcatcttgtgaaatctccacagtttcagaactgctgagaatgactactttctcttgaactggatcttgcgcagaagggatcaatgtaacctcatgcttttcgtctgtggttgcataagctggtgaattggcacctgtcaaattttggttggctccatatgaatctacagtaacaaactgagaaaccacctcactcttaccacttgtagtgtctgtctcaacagtatggatttcaaaaatgccattggaaaaggcctcctttttatgtatttcccttcctgcaacatcttccaaatttattgggggtctaactttaattactttagttaagtttaatttacgttaacttaaagtttaaatttttaactttaaattttaagttttaaattttaa

SEQ ID NO: 46048 - DNA, 433 bp, Setaria italica
  Peptide Sequence Number=SeqID_112022
cgccgcggcctgggcgagctcctggcgagcggcgcttttccagctcctcgacgacatcccgccggctcaccggccgttcatctcctccatctccattgacgggacctcggcgaccacgctcatcgtcgacagcgagacaggggagctcctcgccggcccgttcctctacaacgagagcttcccggacgcgctgcccgccgtggagtcgatcgcgccggcgaaccacaccgtgtgctccgcatcctccaccctctgcaagctcgtgtcgtggtggaacacgactggcggggccggcggcgccggctcggccgccgtgctgatgcaccagtccgactggctcctgtggctcctgcacggccggtacggcgtctccgactacaacaacgcgctcaaggtcggctacgacccggaggccgacgcctacccgagctgg

SEQ ID NO: 46049 - DNA, 440 bp, Setaria italica
  Peptide Sequence Number=SeqID_112023
ccaagcaatgggacataagtcgtaatgtttcatatattttactgcatgcaaaattcaattatggtagatttaacagtttcatatcgcaccataaagcactaatattccatccatatcacaatatatggaattggatgctattcaagacaaatactccaaatacctagtatattcaagtaataaatgaatacactacagctctcaaagctagaaggtacatcaggaaatagatagtaacatgtgatatgtaaggtatcaggtctatgagcctcacatgaactaaagaactgaagaacaccaatatatcacaaacataaactctaatgaaggaacacaatagcatagggtaaatatattaattcaactgaaataatctcctttttcccaaatcaaaaggtaaccgcaagtcagttggtgcaaataagtcattttcttatttt

SEQ ID NO: 46050 - DNA, 1114 bp, Setaria italica
  Peptide Sequence Number=SeqID_112024
tttagcctcttggtaccctataaatcccagcctccctcggctgttcacctgtccaactacaagcaagagcagaagagacaccacgaaaggaaccgagagagagaaaaaaagcttcatcttttggagtttgttgcgagtcagcacatgaggatccacccagcagcagctcccaccggcggcaagaaggacctccgccggctgccgcacgtgtacagcaaggtgctggagctgccgctcccggcggacaccgacgttgaggtgttcgaaggccccgacgccttccactttgtcgccgccggcgcgcgtggcaccggcatggtgcaggtccgcaccgtgaggatccaccctggggttaccaaggtagtggtgcgggcaggaggcaccggaggtggtgatgagcctggcgccgacgacatggagctcgacaggtggcggtcccggctgcccgaggcgagttgcccggccatggcggtggccgggtacgtcgacgggcagctcgttgtgacggtgccaaaggggcgtggcggcgatgaaggcgccgaaggcggccaaggtgaggtcacctggaggtgctgcagcggaggaaagattagtggaagactggtagttgtacagtagaagtaggcactctactatctagtaatgtcttgccatctttgtttttttctgaagatgggctgtttattgtgccttgcctggccttagtaatagatgtttcatgagctaccttcttgctggttcttaagcatatagaagcagctactgtaaattccctttggtttccatgaaatcaaatgtaaattctagatagacctgtgactttgagatgcccttccttatcttgatgtgcccacttgatgcaacttggattttatcgtggtggataaggtctggtggagcataatgtgtagaccagatttggtcagttttactgttagcatttctgaagatcagatgcaaagtggaccacttgcttggtgctgcatgtcacatggattcatcaaatatctccattttgatggcccacagtttgcagcctagtgtctgttagccctacctaagataatcattctggtttaaggccattattctttctagttctagttgtattcta

SEQ ID NO: 46051 - DNA, 271 bp, Setaria italica
  Peptide Sequence Number=SeqID_112025
aggaaagtgttgggcgcggccggtcgaggttcccggcgcccgccgagaagggcggcggcggcggtcggcagagctccaccgcgcggtacaccagggagacggagtcgtcgcggcagcgggggcgctccgtgtcgcggccgccggccgagcgacgaggcgtggcgcccagtgcggcgaatggcggccctgcggcgaggaggcagcggtatgcgtcggtggaccggcgcgcttccatggatcggcatcggtggtgcgattctgataatgatat

SEQ ID NO: 46052 - DNA, 847 bp, Setaria italica
  Peptide Sequence Number=SeqID_112026
agttttcataacagatggcctgccactataattgtccataacctgaagccgtgtcttgatggtatctactggcgtggtgataattgatgagcaagcaccagcaattgttcctgctgtcgcttggacagcaacaagttctgactcagatggttttgtttgtgagtcatttccataacccaagctcctccagatagcgtgctgagcaccaccatatgcactccaccaaagggcagaagctggtgactgggtcaacattgtgattccaaaacctcggtaaagcccccggatcccttccattctgacaaccttatttatcacatcaaatgggcctctatatgttgccatccctggcaatccttgaaccatgagcctttggcaaatcacgtctagaggcacaaaatatgcacttgaacagatactcgacactaggcctgccacgccatttgctacagcaattcttgatgcctctgacatatcgaaacgttctgagtatttaaatgtcatttgtttggagacctccagtgatgttagagctaatactcgcccaggtagagctccaactgcagaggtgccaaagcctctgaaaacaccagggatgccatcacttctcagtatcctcctaaaaacagcaaatccagacatgtgtgcaagccctccttcagcaacctgcatcctagtcttcacaacagccgttgggtgcagagcaccttgctgggccgtaaacaggatagctccaatcacatgaaaccttgtcttgtccaacctctcccagttgatgttggcctccgcgagcgcgagccccgccgcggacgcctccgtaggttattccgtcggtccgtccgtccgt

SEQ ID NO: 46053 - DNA, 815 bp, Setaria italica
  misc_feature (1)..(44): n is a, c, g, or t
  Peptide Sequence Number=SeqID_112027
nnnnnnnnnnnnnnnnnnnnnnnnnnnnnnnnnnnnnnnnnnnnttttttttttttttttttttttattggagctccaaacagcgcacactatcaggcaaatttgaaaatggccaacaaaggcaagtggcggcacataataacatttgggaagaaacatcataaaagcataattcatcagaactaccaaaaaggctcaagatcccctcaaggtgcatctggtaatcaactaggaataggcaagatccatcataagataaatatcctattacaccgatcgataatgctttcacgaaactttctttcagtagaagaaaccgagcactttgccaccgacattcttcctcctggcttcctcatggtccatgatgccagcagaggttgtcaggacaatgtatccaaactgacgagatgggagcagccgggcagtccacccctcgatctccttcacgccgacgtcgaagcgagggctgatcaccccacacttgttgagcctcccattcaactcaaccacaatcttccccgcacgatggtcatcaacatactcaaactcaccaatgtagccatggcgttgcatgacgatgaggaacttgatgatcacttttgaagagggccggatcatgacttgcctcttcccacgcttctctgcgttgtacatactcttcaaagcatcattaaggacgctgactctcaccatctttgcctagccttgggtctcgccgccgccttccgggctgagagatgggatcggtcgatgcgcgcgccgccggagaggaggagctagaaccctagagcgccgcctacttaagtaaacta

SEQ ID NO: 46054 - DNA, 369 bp, Setaria italica
  Peptide Sequence Number=SeqID_112028
ccccaggtgatgctgatgctgctggtttggggacaacactttgggaatcactgtcatggacataggtgttcactctgagaggcgctgctggggaagcagagagagcaagggtctgggaagtggccgtgacctgggttcaggtccatgattcatgcaggtgcagtatagacaagggtaagccaagtgatctcttttgaacccagtattcttatctataatctggggtaatattagctgctttgcctttccccaagcattgagtgggataatgagtaatcattgggcttttatcatgtaccgagcattttacatgcatcattcccattaatcttctcaacatttataggaagtgggtcctattattttact

SEQ ID NO: 46055 - DNA, 431 bp, Setaria italica
  Peptide Sequence Number=SeqID_112029
aaggaagaattagtaattagatactcctggaggatggctaggatttagtctactgagaagaagatgctggcatattgaaggaccaagagacagagagagcagttgccgttggccgttgcgcaagctggttgtcgatggtgccatggagggtggaggtgtccctggcggagatggtgttggcgatgctcggcggctgggtctcatccttcctcgccatcgcctacgacgtcgcgcgcgccctcaggagcgctcgctcatccgtgtcgtcggagtgattcatcttgaaccagatcgccagtcaattttgcgtgcgtactcacatgttcctgtacatcggtaatccagtacgaatttttctacacgatgcacatggtctattctctagcatatgcatccctcctaagatgagacaagattggataaatttgaca

SEQ ID NO: 46056 - DNA, 738 bp, Setaria italica
  Peptide Sequence Number=SeqID_112030
cataagggaactagaaaacaaaacactgcagctgatgtatctctgcattctggctcagctggtatcagctctgccctgggcccatgtaaaatacagagtgaagtagtgctggctgatgaacttaaagctgaaacgatgttgcagaagtctcaatcttctgcctccaatatttctgacagaattgacttagcatggactggctctggtcagtttgttattgatccatcacaatgtagcatggagacagttccagtcatacctgctgctctgaaggatgatcctgcataccagaaggttatagcgccaattagaataaaatcatttgattctgctgtcagttccagaaataggttatcacctgttgatgattcaaatgctagcataagaagatcttattctcaaaggcccccaaaggctattgagaaaactggcagggctcggtctccaacgttcatgagcaacttgtcactttctggtgtggtagatggtgagggacggttgctactgtctcaaaatgattcagatgttgtcgttccaatttatgatgatgagccatctagcatgatagcccatgccatgactgttccagaatatcacagcttcttgttgccactgatggatgagaataatgaatctagcgtattgaattatgtggcacataaatcttctaggagcacttttgatggatcaatgcggagctatggttctgatcagtctcaagctataactggaagtgat

SEQ ID NO: 46057 - DNA, 1107 bp, Setaria italica
  Peptide Sequence Number=SeqID_112031
agacaaagaagaatggaagtagactcaaaggtggcaagagtaatgtctactttgccaaaacactagatgacagatttgtcataaaacaagtgactcgaacagaattagattcattcgaggattatgcagttgagtacttcaaatatttaacagaatctgtatcttctggaagcccgacttgcctcactaaaatccttggtctttaccaggtttgtgttaactattctgtttactttcctgtgttcattgggtcctgtgagattgaatcgtggacttaactgcacattaatgcaccagatcactgccaagaatttgagagatggaaaggagctgaagatggatgtaatggtcatggaaaacctatttttcaagaggaaggtatcaagaatatatgacctaaaaggctccttgcgttcccgatacaatcctgatacatcagggaaaaacaaggttctcttagatctgaatctattagagacacttcacacaaagcccatttttcttggaagcaaagcaaaaagaaggctggaaagagctgtttggaatgatacgtcttttctggcttcggtggacgtgatggactactctcttttagtcggcattgatgaagaaaggaaagagcttgtgatggggatcattgactatcttcggcaatacacttgggataaacaactagagacttgggtgaaggcgtcagctttcctgggtggctccaaagatggtctgccaacaatcatatccccagatcagtacaagaagaggttcaggaaggccatgtcaaagtacttcttgactctccctgaccaatggtcaccgtgatgcctcagatgcattcaggcgattcaagggtgatgggaggacactttggtttcttttatttttttgtgtcctcccatcacccttgtttctgttagaacaatcgatccatctgtgcctcttgtatgttatttttgtccgcaacaggcaggatgaactctgtagaggattgtggcgattgctgtccatccaggcagaggttaggagtcaatacaatgtagggtatgtacatgccctacattgtaacatgaaatgcaaagaaatgagaaaaaaatacgcgataaaaaaaaa

SEQ ID NO: 46058 - DNA, 1051 bp, Setaria italica
  Peptide Sequence Number=SeqID_112032
ttaacggtttttagttactttaactttagttcttactaaaaattgaattcagatgttgtcgttccaatttatgatgatgagccatctagcatgatagcccatgccatgactgttccagaatatcacagcttcttgttgccactgatggatgagaataatgaatctagcgtattgaattatgtggcacataaatcttctaggagcacttttgatggatcaatgcggagctatggttctgatcagtctcaagctataactggaagtgattctaaggataaccatttgacggtttcttttgaggatgaagactcaaattctgttgataaagcaaaattttctgtgacatgttattttgcaaagcagtttgatgcaatcaggagaaagtgctgtccagatgagttagattatatccgctctttaagtcgctgcaagagatggagtgctcaaggtggcaagagtaatgtctactttgccaaaacactagatgacagatttgtcataaaacaagtgactcgaacagaattagattcattcgaggattatgcagttgagtacttcaaatatttaacagaatctgtatcttctggaagcccgacttgcctcactaaaatccttggtctttaccagatcactgccaagaatttgagagatggaaaggagctgaagatggatgtaatggtcatggaaaacctatttttcaagaggaaggtatcaagaatatatgacctaaaaggctccttgcgttcccgatacaatcctgatacatcagggaaaaacaaggttctcttagatctgaatctattagagacacttcacacaaagcccatttttcttggaagcaaagcaaaaagaaggctggaaagagctgtttggaatgatacgtcttttctggcttcggtggacgtgatggactactctcttttagtcggcattgatgaagaaaggaaagagcttgtgatggggatcaattagaactaatacttacggacaaataacaacttagggtaattaaaaactaaaacttaagtaaagtaactttagggttagtaaa

SEQ ID NO: 46059 - DNA, 1871 bp, Setaria italica
  Peptide Sequence Number=SeqID_112033
attgaggcagaagattgagacttctgcaacatcgtttcagctttaagttcatcagccagcactactctactctgattttacatgggcccagggcagagctgataccagctgagccagaatgcagagatacatcagctgcagtgtttgttttcagtcccaaatgtgacccgctagtgttgttttgttccctcatggggaatggttttgctgaatctgtgggcagttccaatgcatttgggtgtgtctgttctagagaattattgatagtcccatgtttactggagatcacatccttgggctcttctaatacactttcagtaagcttctcagaacattgtgtctcagttggcacagtatgacagttttctttagtgagggaatgcatcatgtacagtctgcggtcccatatgtgaatatcaagtgcaagctctcgcctcagatgattgagatctagaacatctaaagttggtccaaatgtctgcaagttatctatgttggaaaatcccgacaaaacatcgtacttcttccactcaactttaactaactccttaagatcggcaacatgtttatacaagcctgacttcatggtaacattctgggctttaattatctgttcaatgcagtcgagtttagccacaatttccttataaaggtgctccttcctagaggctacatcagcagcctctttgatgatccaatcttgagctgttggataagaaaagtccagtactgagggcggtaagttgacagaaagaatgtccactggtgaatagtggaagacagcaaccatgcttccgagcccataaaatcgaagacagtccctctgcagggagtgtccacaggaggcaattcgatttgccgtcgtgtgatttgagaagctaagttccagaaacttcccaaaagataatccacgtgctgcatccgacatgattaccctttgcgtggccggagggattccatcttttggtttgcacctgagacacctatgccacatccataccttcccatcatgctccccaggtaacttgacagatgcaagagttctgacactgattgtgagactgccttgttgatgagtataacatcgcacatgtgattccgcaggctccttgcaagattcgcagcatgaagtctgaacaaataaatcttcacgaaaatatcttccaagtggcttatcaaaagtaccataaaactttatgcgaaagagctgagattgcttgcatacaatccctctcagagggcaagcaactgacaaggaaaccaaaatgctctgtggattgtcagatgttgtgaagttgtgattctcattatgatcacgtattgctacacgatcttcatctgatatatgattccaaccattatccaagtcactttcaacctttaacatttgaccaaccagttcacctatgtgaccgttatgatctgctggcgtcctttttctggcacatgtctgaactgttatgcctacaggtggtatgcagctgtcatacaatgaagcttttgtggaataagggtacgtgtcaatggtttcaccagtataagcttcctgacttgagtcagctcttggatgggattctacatattccgcattaattaagtcagctcttgaatgctgttcacttgcagaagaaccatcaaggcaaggcatgatgcacccatttccagaagttctatcagcaatagtttgtaagtcattaaaattctgctgacaattacttagggaaaaaatctgcttctcaagttgaagatctgaagggacttttggaagtgttgcaccctcatcagcaagatatgatgtttcaagtgacaagtggtacgctgcaaataaagcaaactggacagcaagtttgaccttctttaactcttcgtag

SEQ ID NO: 46060 - DNA, 514 bp, Setaria italica
  Peptide Sequence Number=SeqID_112034
tatataacttgttatactggtatagaaaaatatgcgcgcacaaaaattggtaaaatattctgaaaaatatacatctaaaaatgcacaaaaaggggaaaatacaactttatcctccctgatcacaaccaatataaaacggattatatctagtaaaaatgaaattaaaaaagtgatcacacggcaacagggtgtctggtatattcgtcctctcatgcatgtcctttgcacaacatgaagaagtattattcttgtcacttgatgaagcccacccaaactcattgctttcatccatgccacttgagaaccgagaattaaacagaagcatttgtaaaaaaacaattacttaatctccacaaactaccacattactgctcactattgggcattgctatttttatactactatttattacataaaaccactaacattagtactaaatattaaaaaaaggtattgaatatatatcctacaagcatataacaatatgagtagagtttatgaactggtaattat

SEQ ID NO: 46061 - DNA, 505 bp, Setaria italica
  Peptide Sequence Number=SeqID_112035
taggaagaatggagacaaactttggagctgaaggtttttagccatataatcaaaggcatcctgacagggtggatggaatggcatgaagcctctggcatcctctgcgacaaacaaggtgcagaagctaaagggtgagttctaagacagcaaccggacctgtgatgtgatacggcgcaaaatgctgccctaccaaacagtggcatgtgtattagtagcagagatacacatgggatatacccaaagaacaatctttgggagggcacttggaaatcagcaatctgtgtgcccaaaacacgacctaaggtatggactatggatcaccttttgctattattgttactactgcactactgctacctctttttttatgcacttcctgaggctcttgctgggtttcatctcaagcctacatcaactgacttgagaataaaaggctttgttgttgttgttgtaaacactgtcagttgttagtaatcctccaaactccaaaggcatctaatcaact

SEQ ID NO: 46062 - DNA, 1091 bp, Setaria italica
  Peptide Sequence Number=SeqID_112036
caaaacgttgcccgtgctcagctcgtaatctcgtacagctgcggcggcggcggcagcgacggcgatgcggctgctccccggcgcctcggcgtcccgcctcccttccccgcttctgtcacttccccgtgcaagaccgagatgcgtgcctgcctcctcctccgcctgccgggccgcctcctcatcagccgcgggcgcaggcgacggcggcgcgcggaagccgtggctcttcgtcgggctggggaaccccgggaaggtgtaccaggggactcgccacaacgttggattcgagatgattgatgttatatcagaagctgagggtatacctctcagcagtatgcagttcaaggcaatggttgggaaaggtcgtattggtgatgcacctgtcatgcttgccaagccgcaaacttttatgaacgcaagcggtgggacagctggtttcatatttcaagataccacttaatcaagtcgttgtgatgtatgatgatctagatttaccatttgcaaaattgcgcttgctgccaaagggtgggcatggagggcataatgggatgagaagcatcatcaaccatttgaaacaaagtcgtgattttccacgcctaagaattggcattggacgaccaccggggaagatggatcctgccaattttgttctccggccttttaccaagagagagcaagaagagctcgattttgctttccataggggcttggaggctgtgcgaataatggtgcttgaaggattcaacaagagcgcaacttacgtgaataccacacagtcatctgaaatgttaaatagatgatagatttattactgtattcaaatgtgctcccatgccaaagagattttaaacagaggtaggaactgcagtaaggcacgctgcagtcagcttcacctgattcatcatttgcatggtcgccatcttgcctgcaagaaagttctgacagctgaagtgttcattgcagaatactgtatgatatgagcaatctaagtattgtgaattcatgatcccataacattgtactaaattatactggcttgttgatttcatctgtacttctgtagcgtgtaactggcattttagaaaaaaaaa

SEQ ID NO: 46063 - DNA, 471 bp, Setaria italica
  Peptide Sequence Number=SeqID_112037
agtatttctgggcaaatgtcgtgggtgtgtataataggaacaccccgaaagatcggaaacggacactaatgcaattaaagacccactggcagaggattaatacgaagatcgcccacttctatgattgctggtgccgagttgaggcaaaacattcctgtatccagtctgagaaaatgcaactgatggacaaaacatgggcaatgtataatgaggaagcacgggagatgtaccttgaggaagcaaaacatcatttcgccctcagccattgttggaaagctgtttgggatcaacccaagtggaaaagacacgtctcttctttatacttcaagaaaactgagttgtctgaatctgaggactgcacatcatcctctgaaggtgcacctgaaacagaaacaggtgaacagggtagcgtgcctgcgaagaagaaacacaaaattaatggtaaggtgtcatctcctccatcagagttgc

SEQ ID NO: 46064 - DNA, 2118 bp, Setaria italica
  Peptide Sequence Number=SeqID_112038
cgccgcctccaactccctgctcctcctcttcccgcggcccgcctccgcctgctccgggcgacgcggctggaggagagccggggctcctcccgcgccggtccctgccgctgcgccggctcggccgtcgcgcgggtcggcgacgacggtggggaccaggcggcggggatatgggagcaggtgcgggacatcgtcgtgttcgcgggcccggcgctggggctctggatctgcggcccgctcatgagcctcatcgacaccatggtcatcggccagacctccgcactccagctcgccgcgctagggcctgggacagtgttctgcgactacctaagctacatattcatgttcctttcggttgcgacctctaacatggtggccacatccttagctaaaaaggataaagaacttgcacagcatcaagtgtctatgttgctgtttattgctcttgcttgtggcataggaatgtttttgttcaccaaggtttttggtactcaagtattgactgcttttactggatcagggaattatgaaattgtcacttcggccaatacatatgcacagataagaggctttgcatggcctgcagttcttgttggcttagttgctcaaagtgctagcctgggcgtgaaggattcttggggtcctttgaaggcattagcagcagctagtgttataaatggtgttggtgatatagttctttgctctgtttgtggctatggaattgctggtgcggcctgggcaactatggtttcacagattgttgcagctttcatgatgatgcggaatctaaacaataagggttttcgagctttctcatttacgattccttcagcgagagagctgctgcagatatttgaaattgcagctcctgtttttgtgacaatgacatccaaggtagcattttatgcattgctcacatattcagcgacttctatgggagcaataactcttgcagcccaccaggttatgattaatatcttatgcatgtgtactgtttggggtgagcctctgtcacaaactgcacagtcattcatgccggagctgatatatggtgctaatcgtaatttgaccaaggcaaggatgctattgaagtcacttgtgatcattggagcgattactggagcggttttgggtacagtagggacacttgttccatggcttttccccagtctctttaccaatgacagaatggttgtccaacagatgcacataatactggctccatatttcagtgcattgctggtgactccttcagtacactcccttgaaggaacattattggccggaagggatctgagatatttaagtcaatcaatgagtgtatgcttttgcattggaacccttctattgatggttctccgcaacaaatttggtagtttgccaggatgctggtggatactcgtcttgtttcagtggggtcggtttgcaagtggttttcaacggctcatttctccaacgggcatgttgtacaatgaaaactttaaccaggttgagtacatcaaaacgaaggccacgtgaagatggcacataccattttggatatttggattgggtaagatcacgatgaagatggaaatggagatatgcaaacctgtaaagatcattgagctatcatctttgtgccatagcccataagttgtccactcagcccagctctatgtctgcgggatgtgcatgagtagcggatgatatttctttggaagcaaagtttgatgcgtagcctaggagattagggccatgaaagacaagttggctacctggggtagaactcatccttttgttcagtatttttcgtcctaggaaagtaggaattatactcgataggttcctggtactgagaaaggtaatgattacactgtcaaacacttgacgccgtaagtttggagttacgtgagcgcttacagggtgtcctattgatttatttttaagaagtacgagatgcttaataccatggaaattgttcagagatactgggaagtgagattgcaagaatgctacattgacctattccaggcttcaagcatccaactgtaaatccatacagtacatgccatcagtgttggcatcaatgacatgttctccaaatcagaataaattaagaaaaatttaaaaaaaaaaaaa

SEQ ID NO: 46065 - DNA, 655 bp, Setaria italica
  Peptide Sequence Number=SeqID_112039
gcgcagctggtctgccccagagcagcagcacaggcacccacaaatgctgcgttgatgtaagttgccggctcagagtgtgtggaatcccccctgttgtcagggaactggtcattcccatcaggtccgccaacgatggcaccgacatggacgttcgggttcgggctgctttgttgggaaccatgaagagaacccctcattgcaggtgaccttccttggcagagccttgatcgacgggatcgatgcgccacggtggtggatgcgccttgggaacttagagctgtagccagccatgtaggacatgcccattggattgtcccccaggatgtaacccacctgtgatgctgcaaatgaactgatctgatctggagagaaacttgctccactgcaccggactgcaccggtgcccgaagaactcagggtctttgagtagatcgacagaagcagggctgcagtcgttgtgtactgcatattgactgaatcgcttgtaaacagaagccctccaggagttgtgcgtatctgcgtgttgccactgttgggcatcacagcacagacataggagtccaggcccctcttgtagccttccagctctgtccttccagccaagtactcctgtgttgcaagcatttgagctccaggatacttgttgtcccagctg

SEQ ID NO: 46066 - DNA, 553 bp, Setaria italica
  Peptide Sequence Number=SeqID_112040
gccgcgtacgccgccgggggcagccgggtcaccaccgtgcccgtgtccaccaccgtcccgcccgcgaacgccgattccggcacgctcagcgcctgcccgcccacgctcatgcccgtcagcatcacgatgtagtacgtcggcgcgctcggcaacgtcagcagctgcgtcgtcgcgaaccccggcgccgcggcattcgcaccgccgcccagcgtcaggtaccccgtggtggacggcttcgtcgggaggcagtaggagaaggcactgccgtacacgcccgcagcctgtcccaccagcgacaccggcaggcggccgagaccgaggagcccgtcgatgccggtgaacagccctctctgcgcgtgcccgcagccgaagaggaacccctccaccgcgtccgtcgccgtcagcgtcagcgtgtcggagctgtacacgcccgtggtgttggacccgtcgccgtagctgaccacgtacccgcactgcgccgccgagcacccggacgcgtagatgcccagccccgcgcacgcggacccgccgcacggcacggcggcgtacgacg

SEQ ID NO: 46067 - DNA, 571 bp, Setaria italica
  Peptide Sequence Number=SeqID_112041
tgcacagaaagcagtcatttggatcaacatttacacttccgaaacactcaagctaaccatgctggcagagctaagaacaggagcagatcttcaagagtagctatgtaacatcattacagaaccacggcgcctgcatgctccataggttgaagatttcgacttcagatacagcacgtgcgagttcaagcggtcttgttttgtcttgtctctgaatcagggcatgaagtcatgaaggaaagcaatactgacagcttcatgatttaactggagcaaaagggtcgtcattagaaaaatttgctcctcgttgaaacttccagggtctacctccttcaggacccttgctccccaagatagccagattaaagttacgagcccatcttgagctatccatattctgaacaatggaaaatatctggttggctgaaattccagtgacccttacattggctgagacgattgcactaaagttcagcacccgcgcattctggtagatgaactggaggaaggccagctcatgttgcccccctgaaactcacagattgtcatcaccttgacgcacaacacaacactt

SEQ ID NO: 46068 - DNA, 312 bp, Setaria italica
  Peptide Sequence Number=SeqID_112042
cggcatcggcagcaacaagggcgcgctatccattgaccggccaccgtttcccgcccaacgaaaccatctccgattgtccatggccgccaccgcgtcgtccacgctgctgcaggggagcaaattctctagcgcgcgctgtgtcccgagaaccgccggccaccagcgtattccatgtggcgtagggaggaaatcggcgctttcttctggctgcctccgcaccgggagcgagcggagagcggcggttatctgcgcggcggcggcgagcgacgggggtgcaccggcctccgccctgccggcggcgctgctgtttga

SEQ ID NO: 46069 - DNA, 458 bp, Setaria italica
  Peptide Sequence Number=SeqID_112043
cctgttagtacatccaaggaataaggagagaaccaatgggatgttatgatcatgaattcagacacgctctccatttcttgtcagtgattgatgggcatatcaagatagcaactaagtactttgtgaatgtgtttactataacatatgggcatcctctgcctagagattgatccagagaaaaactgtatggaactcttccttcttgaaagaaaacctagcacattagatttgatgacaacgtagcattgttccttggctagcatgtcaaggttagcagatgatatgttcttcttgactaatcagttgaattgttttagttattcgatgagttttaatatctttatgtcttttttgtcgttgttgtttctaatggaatgttggtattggagctctgaagttcaatatttgttagtaaatccattggacaagtcataaaataccatttgttttgtgtcgcg

SEQ ID NO: 46070 - DNA, 178 bp, Setaria italica
  Peptide Sequence Number=SeqID_112044
tgcttttcagtatgtggggcttcagcttgctcatgtctgatagcctcactggttttaggaaaaactcatccgctccttcttccaggcatctgattcaaaatatcatgaaaattgagtcagtgattttacctagagccctatggaaagatgcactttaagcttttttttgacttttttt

SEQ ID NO: 46071 - DNA, 968 bp, Setaria italica
  Peptide Sequence Number=SeqID_112045
tttttaagaactaagaacaaaaaattttaacttaagaaattaacgaatattcgatctaagtagtaccggtttacgggttccattatattttgcaaatcaagggctaacatctgtgttgcaaattagcttgccaaaagctaagtaaaacaaagaataaagggagaaaaaagggggttaattctcctataatcagtttgcagctaactaactgtgccttgatctgtttctctggggcaaaatttcttcgttgtcttctgcctctctcttgcggctgttgctgttatcgctgctgctgctgtcgtttgtggggttactgcattcgttgctgttgctgtcgctttgctggtgctgttcctggtagtgctccttgcatctgcttttcagtatgtggggcttcagcttgctcatgtctgatagcctcactggttttaggaaaaactcatccgctccttcttccaggcatctattgatccttgaaggaatgttctcggacgacatgatcaccacagggatatctcttagagacgatgattccttgatcttcttgagcagatcatatcctgtcatgccaggcatgcagtagtctgtgattatcagattcaccgcgacctccagctgatccgcatgaacagaaactgggctgctgtcctcgccatggatccccaggaactcgagagccttgctcccggaatcgacagtggtgacgtggaatgaagaggtcttgaggagcctctcgatgagcttcctgtctgggaggctgtcgtccacggccaggacgtggaacggagtctccgtggccaccgccatggaagaaactccccctgctcgtgttcttgtgtctgactaggaaggatgatggtatgagcagctgcagagaggaagagttgtagaggaaactaaaagcagagaggtgcgtgtgcttgcttggtatagcatggagatgctttgctttgcttgcctttttgaag

SEQ ID NO: 46072 - DNA, 357 bp, Setaria italica
  Peptide Sequence Number=SeqID_112046
ttgacaggtgacatggccgaacctgctcctttcttgcatcaggccagggcgtccatgatatcttaagtagagttgaccaccaaactcttcaagctaggcattccattgccttgcccatagcttaactaggtatttccatggatttgaatggtgttctccggagtccaacctcttgctctccaatgaccaattttcaaaagggaaacaatatttgtacccatagggattaccgagcttagaattagtcagtgatcaaccatgagaaatgataactagcacaaaggaaaactaatgggaaagtacctctttctctttctcaagctcctggagctgagaccaaaagttattaggtctact

SEQ ID NO: 46073 - DNA, 219 bp, Setaria italica
  Peptide Sequence Number=SeqID_112047
cggccagccgctgcattcgtcgtaggcgagacggagcagaggcggccaggggaacatgcgaggcggcggccggtggccggcagccagcgatgagcggtagcaagcggccatcagagcaacggtgcaaagcgcgacgacgcgaatcgcgagttgatgtcgcacagttgtgccacggcggtgcgaggcagcggccggccgccggcggccggcaaccagcga

SEQ ID NO: 46074 - DNA, 729 bp, Setaria italica
  Peptide Sequence Number=SeqID_112048
tagggaataggcagcggcggtggaaagaggagctccagggcaccgaggatgcggtggacgacggcgcttcatgcgcacttcgtgcacgccgtggagctcctcggcggccagtgagagagcaacaccaaagtcagtgttggagctgatgaacgtcaaggatctcacactggctcatgttaagagccacctgcagatgtatcgaacagtgaagggaacgacggcagacagatcatgtgctgcaggccatgtccagatgagagatatgggctttctgcagagagggtgtgaagtgaatggctttgaagcgtttaaccacatcactacttcgaatactagaatgctggcagcagggaagcaggaggtcgcctggtgcctgcggccgcccttcgcacaccaaagcggctgccgctgccgctgccctgcccctacctcatgtctgcccaccataaccgctacttgctctcgcaagatcatcatcagggatggaggagaggtgcgcagcaagacgtcctgggtcaggacaacgtggcacggcgtctgcacacaggccttgctgacacggccgtcaggagatcgaattggagcgcaggtgtcgcgagccgctggtcgtcgacggcggtgccttcgccgtcgatgaccggcggcaggagcatcagcggcagttcagagcaaggatgctggatgacggcgatgaacaagcagcagcagcagcaggcgccatcaaggatt

SEQ ID NO: 46075 - DNA, 530 bp, Setaria italica
  Peptide Sequence Number=SeqID_112049
cagcgaccttcagatgccaccgagcgtgaatagcggtggctcctctgagattttggatcctgaaactggttctcctcccaacaactctgttaacatgcctccagctgagcttcctgttgaagcgaagggcatacaactcttcggcgccacaatcaatccgcatgttgtgcaacgtgctacaaatggcgcttccgaagaagtgaatggagctattaatggtgtggttgatgaaaatgttggaaaagatctgtaagccgtggcagctgtacttgaagatggttggatgagatctcactacctctgcatttgcatttcttctgcggcgtgattcctgccaagtgtctttgtggtggttgcagtttatcagtgagtagccttattagtaggctgggtcattcaaccccagcgaccctagttatttctgctagctgatagctttgctagagatgaagagaagcatgagtggctttattagtttaaaaaaaaatagttacaacacctttggtacttgcagcagaggtgcgtgaatt

SEQ ID NO: 46076 - DNA, 1980 bp, Setaria italica
  Peptide Sequence Number=SeqID_112050
tttttaaaaaattttttttaagaattagaaactaatagctttatacgatgagtgatggtattttaaatattttatctgaatacagactgtagctcatattgcgcatatatacagagattcaaatactcctaacaaatcaataattctttatcctgtaattctgaacactcgtattcagataaaagattgccagcacatatcttttacagaagaccaagaaagacacagccacaccaagatatagaagcgcacgattttattcaaatgtctcatgagctctgctgactctgttgctgctgctgctgctgcaagctgacaagcttgtggtaggcgccgttcctgttctcgatcagctgctggtgccccccctgctcgatgatcttgccgtcctgcagcaccgagatgacgtcggcgttcttgatcgtcgacagccggtgcgccaccatcacggtggtccggttcttcatcacccggtccagcgcctgctgcaccacgcgctccgactccacgtcgagcgcgctcgtcgcctcgtccaggagcaggatggctgggtccttgacgatggcacgcgcgatggcgatgcgctgcttctgcccgcccgacagctgcacgccgcgctcaccgaccttggtctggtacccctccggcagcgagctgatgaacgagtgcgcgttcgccagcttcgccgcctcgatgacctcggcttccgtggccccgtccttgccgtacaagatgttctcgtagatcgtcgtcgcgaacagcgccggctcttgctggaccagcccgatgtgcttcctcagagacttcagcttcagcttcttgatgtccttcccgtcgatcaagattcttccggcgatcgggtcgtagaaccggaggatgagcgacagcacggtgctcttgccggagccgctcatcccgacgagcgccatgctcttgccggccttcatcaggaggtcaaggcccttgaacacggtcacgtcgggcctcgctgggtaccggaactcgacgccccgcagctcgatcagcccctcgaccctcttgatgtcctcgcccgtgtcgatccggacgtccgtcttacgatccaggatatcgaacactgaggacaccatctggttccctttgatgatgtcaggcgccatcgccagtgtctcacccatggccagcgccgtcactatgagcaccatgaaggacttcatcacggacttgaaggtggccagctccttgctcatcagctgcgaaccataccataaggccagtgcataagaggagaagaggaagaactgggatacaccgtagaacaggccggcgccctggcctcgccggaaggacctcttggagggctccttaagctcatctgcgtagagctttatcaccttctcctccgagcagaaggctgccaccgtccggatgttgctcactgcctccgcagcaagcatattggccttcaggtacgacttgccaaggttgccaccataacctttcatgaacattttctcgctaatgtggccgctgaccatgagggggtaggtggcgagcacgaccagcgtgatcctccagttgagtatgaaggcgatgatgagcgacgtcacgatcatgccgacgttctgcagcaggatggtggagcgatcgacgacgatggtgcgcacgagcgtggcgtccgcctcgagccgcgacgacagcatggcgctggtgttgctggtgtcgtcgaaccacccgatctcgttccgcaggatcgccgagaacatcttctcccggacccgcagcgtgagccgctcgcccatgatgccgaagctgaggtgctcgatcacgtggaacaccaccgtcagcacggccccgcagcagaagagcacggagatcttgcggacctcctgcttggtggtctcccaccccatgtaataggacaccagcgcctgcgtgacgcccagcgcgaagagcggcatctgggagcccgccacgaaggcgctgagggtgcccgatacg

SEQ ID NO: 46077 - DNA, 167 bp, Setaria italica
  Peptide Sequence Number=SeqID_112051
attcagccaatattggctgaatctgtatgctgtggaaaacgaggccctgtgtacccaccaatgttcagcacattatctgcagtgttcatcataattctaggaacactattactaggagagagcctcactgctgggagcttgttgggcagtttcctggttttgagcgg

SEQ ID NO: 46078 - DNA, 844 bp, Setaria italica
  Peptide Sequence Number=SeqID_112052
ccaagaactcgacttccatagacctgtccattttccctgtgcgaacttcaaacctctcatttgttgatctttcaaacaattctttgaatggctcactgccaacaggcattggtgatttaagtgcgttgacattgctgaaccttcgtcaaaacaactttactggccaaatcccaagagcaatcaccaagcttaagaatttgctatacattgacttatcaagcaaccatttcaatggtagcatacctgatggcctccctgatgaacttgttgagtttaatgtctcctacaataacctgtctggctctgttccgagtaatttacttaaattcccagattcatccttccatccagggaatgaattactcattcttcctcgctctgaatcactaaatggctctgacaaatcagatgagggaaggcacggcatgaagcgtggaattctatatgcattgattgtatgtgttgttgtatttgttaccgggattattgtgcttttgcttgttcattggaagatcaatagctggaagagtagtgaaaaaggtactaaccaaggtaaacagcctgtaactcaaggtcagagtgctcatagaagtgcagaaacttcaacaactgaaatgcatgatgtatcattaggatcgtcgcctactgcacagtctggagctgtttcattgcctggaagggaaagacatcctgaatcccaagatgtgccagttgatgttgcttatttcaacgagccaattggtagtagctcagcccttaaagacagcgctacatcatcaatgccttctttgtcatcatcaccacctgatgcgtgcacccaacatcgtcactctatctttagagt

SEQ ID NO: 46079 - DNA, 217 bp, Setaria italica
  Peptide Sequence Number=SeqID_112053
ggcgggggtcagcagcactaggagcaggagcacggcggcggcggcacgggaatggaaaggtggccgccgcctcatggctacccgtaaccttacccgggtaaagctttgcctgttttgcttgcgagatctgaggagggagcaggagtgattcttgtgagaggaacgggacggtgggggagtggccggaggaggagagatgatcagctcgggtggtaat

SEQ ID NO: 46080 - DNA, 1703 bp, Setaria italica
  misc_feature (1682)..(1703): n is a, c, g, or t
  Peptide Sequence Number=SeqID_112054
tgtcggcggcgacgccctcgagctcccgcgctgcggaggagcagcctgcgcaggggtcggagcgcgcgtggttcaggggagggaggcggttcaggagccccatgctgcagctacacaaggagattatcgacttctgcgattttatctcaccttctactgaagagcaatcttcacggacagctgctgtgcaagctgtctccgatgttgtcaaacatatatggccccagtgcaaggttgaagtctttggatctttcagaacagggctctatctaccaacaagtgatatcgatgttgtaatatttgattccagagttaagactcctcaagttggcctatatgctcttgctaaagcattgtctcagaaaggtgttgctaaaaagatacaggtaatagcaaaggcacgtgtgccaatcgtgaagtttgtggaaacaaagagtggaatagcttttgatatcagcttcgatgtggatggtgggccacaagctgcagacttcatcaaggatgctgtgaagaagttgcctgctttaagacctctatgtatgattctgaaggtttttctgcatcaaagagagcttaatgaggtctattcaggtggaattgggtcatatgctcttctcacgatgctgatcacgcatctacagttgatctggggtgggaaagatattctggggtatcgtcaggccaaggaacacaatttgggaattcttttggtcaagttttttgatttttatgggcgcaagttgaaccattatgatgtcggaatatcttgcaactctgcaaagacattcttcttgaaaattgataaagactttatgaatcttgatcggccccatcttttatctattcaggatcccatggcaccagataatgatattggaaagaattcatttaactacttcaaggtgaagtcagcattttcgaaggcatactctttgttaactgatgcaaacttgattacaaacttgggacctaagaagagcattctgggtaccattgtcagaccagattcgattctccttgaccgaaaaggctggaacaacgaagatcaattgcctgacatgttaacggaaccctgggaaccggtaacccggcagtttgatagtgagaacgatgtagtgtacaattggcatgtgatagacgaggatgaaccattgcccagaaatagtcaatccacatcggaggacactagctcttccccatctaaaaaaaggaagtcctccaaatcaaaacagaaatcacgaaagaagtcgaaggctgatgtcacaggcagtagtaatgctgcaaatgggttcagagaggatagagcatccaagcgggaagcaggaagtagcaaaaggaggaaggggccaagggagtacgacagatttacaaatacactcccacaatacacgcacgttagtaggtggtaactttttggtggctgctaatagcattgacagtatggtctcagaggtccagcacaatttgacaccgagaagagcattgtgttacacttgtgtacacctagtgaagtctgaagttaccgataactattcagagaggttatcgatgactattcagaggtctatggtttgtttgtctatctgtttaacctctatcctttatgtaacggatagcaaactaagattcagttatatgcttatattatttgaacatgtcgaaaacaaaaaaaaaaaaaaaannnnnnnnnnnnnnnnnnnnnn

SEQ ID NO: 46081 - DNA, 969 bp, Setaria italica
  Peptide Sequence Number=SeqID_112055
cacaaccacaccaactcaccggcgggcggcggcgccgtgctcgtggcgatcccgatagtctccggcggcaggtagggcaggtacgctccggccgcacctacgcttgctgagttgcgcgctctttctctctctctcttgcgcgcgccattagtctccggcggcaggtagggcagattcgcagtcggaggcatggacgtgggggacggtcctcaccgccgagaggggtgcggcggctgacggccttcccgacgacgccctcgtggagatcctctcccgcgtccccgtgaggtccctccaccgattcaaatgcgtctcgaggacctggcgcgacctcatcgccgaccccctcaaccgtaagcgcctcccccagaccctcgaaggcttcttctgcagcgccggcaccggtgccgacttccacgggcgcttcatcagcctgccggggagatccgcgcctctcgtcgacccttccttctccttcctgacgaagctgcctgggattgagaacttcaagctcttgggttcctgcaatgggctcttcctctttgagcacggctggaatagcggcatcggcggaccggattacgccgtttgcaaccctgccactgagcaatgggtgactgtggccagctccggctgtcctcttgatcccccttcagaagcagcagacacctatttgatttttgatccggccgtatcaccgcacttccacttggtccatatgtgccagaaggattgtatgggtgagattgaggtgcgtgcctactcttctgagactagggtgtggagtgacaggacaagccaacagagtcgatgccaagatgaaggtggattggaacaattggttaatggtggagccatactgaatcccacgtggggcagtgcctttgttaatggcatgctgcatttagtcatctaccacgttgctggggagtatgtgatagctgcggagtatgtgatagctgcaatgga

SEQ ID NO: 46082 - DNA, 714 bp, Setaria italica
  Peptide Sequence Number=SeqID_112056
ggtggtgatggaggcggagctgccgcccggtaggcaggggaaagtagcgtacttggtagcggtgggtgggagcggcagcagcggcggttggttggacggtaggagaggcagagatggcgacgagtatatcggaggcctcgcgtacggaagcgctggagcggaggtccacgcgccactgtatggcggctggtacgtcgggaaggagctgtacgccccgcccggcgccgccggcctcgcggcgagcccccgccggctgcggccgagggacctcttcgggaactcaaagcttccagacgatcgatccaggagaacgttttccatcttgttgatctaggaggaaaggtttttaggtctctctgcgctattttgctcaggaaagacgggttttcgttgggattgctgaagggcaaaggaagttaaaaggagaactgctgagaaggttaaaagttgaaagaacttgtattagttttgagtgaaatctgcaagaggaagctagcaagatccttggggaagaaaaacagcaaggatgctaggattgatcgatggcggctttagagatcaagaagaagaaagaaacgaagaaaaagaagaacgaagaaaacgaggaggaagaagaggctatatctattctggtgtgtggagaagatgttatcttcctccagctgttgtctaaggcagtagagaaggaatggccatgcaccagaccaagcccac

SEQ ID NO: 46083 - DNA, 508 bp, Setaria italica
  Peptide Sequence Number=SeqID_112057
actttacaactttcactgtgttcacagagacacagacactagaacaagacagtgggagagatggtaaaataatactagttaacagcacggttcatcttgcaatcatatgtccagaaagaatttagctggaatagtttggagtatgaagctcaaaaggatgaactaaaagccttgtcttctgtttctggaaattcctttttcatttgtatttttttgacgtctacaggtagggcggtcaaagctgaatggaagcgctgaagaggcgaccaatcttcaacttgaatcgaatagtggatgctctgaatctctgctggatgaactctgccgctgcctgtccctttttattatcctgcgatgtaaagagagacgttctccatgtattgaacaaccttgtgatgagtgcctctggttctaatttgttgtaggttcatgtgccatgcctagtgacttgtgtcattgtatagtcacggactcacggttctctcggggatttgtttcgattcctcgg

SEQ ID NO: 46084 - DNA, 2325 bp, Setaria italica
  Peptide Sequence Number=SeqID_112058
ttactgaaccaaccaacaaatacctccggccggcgtctggttctccgatggattggaggttggcgtgaagggtaggtaggttgccggatagggacggggaggcggcgagaggtgttccgcgccgtgcccttcgcgtgcttcctccagacctccaccggccgacgcgcgcgcggcgccgctgttccaggtttcgtaatttccagtgttggccgctttaggatacaatgggaaagtccccggggaagtggatcaagtctgtgctcttggggaagaaatcaactaaatccggttctaccaaggcaaatgaatcgaaggctgcaaataacaacggttactcaactggggaggagcgtgcactttctgagaattctcctgtgatctctgagccagtgcttgttaacccccacaaaaatggagctgtttcagctaatgtgaaggctgaaaatgtcaatttgccaggcgatcgggccgggcaacagaaccaaagcattgttgagtctgagacatcaggtcctgggcaattgggagaagaccaagctgcagtgaaggcacaggcagcctttcgtggttacctggcacgaaggtcattccgtgcattgaaaggtatcataagacttcaggcactgattcgagggcatcttgtaaggagacaggctgtttcaacccttcgtactacttggttgattgtgaagtttcaggctctagttcgtggaagaaatgttagactctctggaagtgacatgcaattcaatttaaagtttggccaacatagccttggaggtgctagatcgtctgatgcatggaaagataagttatcttcgaatgcctatgttcggaagcttctgtcttcaccaattgtgctagaacctcttcactttcagtatgacaagagggatcccaattcaacctacaactggctagagagatggaccttaggctgcatctggaaatctgtttctcaaccaaaaagagttcctgatgggaaactactggtaaggaaggctagttatgcgatggaaactgaatcagccaagttaaagcgcaacattcggaagggctctggcgctacagtcgagagtttacccagtgaatctgagaaactaaaacgtaatccaaagaaatcctctaacttccctgctgattcagtaccagatagccagttatctgaacttgagaaggttaaaaggaacctcaggaaggtaactaattccatggctgaggcctcgaagatatctagttccagggttgattcctcaaaggtatctgattctacgcctgatgtcccaaaggtttctaatcctgtggccgaaatctcaaagacatctagtctcctgaatgggatctctgaccatcaagacagccaatgtgaaaaggcgctaaatgaagctcaagagtactctggcaatggtcatctattggaatattcaaatatagataacttcgatttggtacctggtttgaaaagtgatctggaaactcagtttgattcggtttctataggagaaaatgttgatgaacccactgttgttgccccagcagttgacattatgcctctgcagaacattgaaaatgaagacaatgttttacggaagaaagaggaagcaaggtcccaggaagagcatctgtctaacggaagccatagaactagcaagagaaaatcttcattccccaacaaatcagaatatgtggaaaatggaactcacactactcctgttcggccaaggcagccaagttatatggcggcaacagagtccttgaaggcgaaattgcgagcacaggtttcacccaagctggattctgattcatcagcagaaaagaatggcttcactcgacgccactctcttccttccagtacaaacagtagggcggtcaaagctgaatggaagcgctgaagaggcgaccaatcttcaacttgaatcgaatagtggatgctctgaatctctgctggatgaactctgccgctgcctgtccctttttattatcctgcgatgtaaagagagacgttctccatgtattgaacaaccttgtgatgagtgcctctggttcaatttgttgtaggttcatgtgccatgcctagtgacttgtgtcattgtatagtcacggactcacggttctctcgggattgtttcgattcctcgtcgaaggaactatgcctgtgtaagctgatgttaggactgcattaatccaataacatcatccggatggacactgctttgaaaatcgtagaaaactactgccaaggcacacataggctagtaaaagtaattggccacttaacgtttacgttttcctaattagttaatttagtaaactaaacctttagta

SEQ ID NO: 46085 - DNA, 677 bp, Setaria italica
  misc_feature (21)..(21): n is a, c, g, or t
  Peptide Sequence Number=SeqID_112059
tttagctagctaaactttagntgggtggatccaaacagggcctaagtagtggttaatttttatttttggccaatttcttcccacacctttccttttttagctaattttctcccatctctttcttttagggctactacgtcctgcatctttcctttttaatatcatatatgttccttaccctatttatttttgttggctcaattttatttacttatgagattagttggttcaatattttcttagtggcccaactttgttttagcagatttgttgggtctacattttcagtaattcaatattttataattaaaggaagaagtataatttccttttagggtgacaactaatccaattagtggtgaaccaccaaatagcatgccccaatatgttgcccactgaacttatgctaagcctataggtttgaggccactttgcttggcatgggcatggctcctgcctatccatctttattagcatcctataaaaaagtccaatgaaattttcttttgcagaaatagcagattaatttctttatctaccttaacagatattgtatatgttttacaacagaataatattgttgaaaacaaatgtagttttctcctgatgggaattactgactgatcatttgattccagggtaggtgatggaccaataccaggatcttcttcatatgg

SEQ ID NO: 46086 - DNA, 639 bp, Setaria italica
  Peptide Sequence Number=SeqID_112060
cgccagtccgccactgtatccatggattccatggggcggagctccgtgcggcttctcgtggccgtggggctcctgctgctacggttcaattggtgcttgtgggcggagcgtttccgatggtggtgagcacctggccgttccgggaggcggtcagggcggcgtgggaggtggtctcagccagtgacggagggggttcggccgtggatgctgtcgtcgctggctgctccgcctgcgaggcctccgctgcgatggcacagttggtccaggtggaagcccagatgagaatggtgaaactacattagatgctcttattatgaatggggtaacagctgttttacctactcatgccacagtacatgttgatatcttgttccagttcatagtggatgtgatacattgcattattttcgcttaagaaaactggcaggcgacaatggaaattggagctgtggctgccatgagatatgttaaggatggaattaaggcagcaaagttggtcatggaccacagcttgcatactctgctggttggagagaaggcaacagactttgcaatttcaatgggccttccaggaccaattaatctcagttttccagaagttaggttggcagtggtttcttgttcttcctagttttgtct

SEQ ID NO: 46087 - DNA, 370 bp, Setaria italica
  Peptide Sequence Number=SeqID_112061
caagcattggactctgtaaagcatgaggtagaaggaagtcaatgaagaagatgcttggattggttccaaagtgataatttactggagccaataaactcccatctgaagtttattgatcgccacaaccatgacactatctctatggctgtgattgacaagatgggtcacatagctgtcgggacatcaaccaatggtgctacatttaaaattccaggaagggtaggtgatggaccaataccaggatcttcttcatatggtgatgatgaggtcggagcttgtggagcatctggcgatggtgatattatgatgcgcttccttccatgctatcaagtagtcgagagcatgagacgagggatggaacccccaggat

SEQ ID NO: 46088 - DNA, 496 bp, Setaria italica
  Peptide Sequence Number=SeqID_112062
tggccaccggtggcggcggcaagcggcgggtgctgcagggcgggtctgggtacgtcggctacgacgcgctgctcagggacaacgtgccctgctcccagcgcgtcgctgagctgagcgctgcacgcgtcgtctccggttaatacaaatcatgtatttgtcgcggctaattaagaggttgctgctagcttgatggtgatgcttgtttaggagtttggaggcatggctgatcggttgtgcagtggatatgtatgtgtctgttctgttctgtgttctagctttcggtattgtttatctttagcctttgaaagaaccttctctatttttccctttactttgtgcgacatacagagcaacggagcacagcaacagcagctcctggtgagatacagaacaacggaacagagcaacagaagagatacaagtgcaattaagaagggtagcatggtaacttattttaacaactaccatttagctagtggatccaaacacccctagc

SEQ ID NO: 46089 - DNA, 1779 bp, Setaria italica
  Peptide Sequence Number=SeqID_112063
gccgcctcgctcgtccatcgccgccgccactagggtatttcggggtcagctgcgggagtggcacccaatacaagcgcaaaatctcaccgacaggtgggacccataaggaagtagccagctgccagcccactgacatgcgggactggtcgccaccgaagcgcctgtttgggcgtatcgcggattcgcggtgatctgaccaaggccagtccggcacccgccagtccgccactgtatccatggattccatggggcggagctccgtgcggcttctcgtggccgtggggctcctgctgctacggttcaattggtgcttggcggtggatggcggaggcgtggcggaagtgggcggagcgtttccgatggtggtgagcacctggccgttccgggaggcggtcagggcggcgtgggaggtggtctcagccagtgacggagggggttcggccgtggatgctgtcgtcgctggctgctccgcctgcgaggtcctccgctgcgatggcacagttggtccaggtggaagcccagatgagaatggtgaaactacattagatgctcttattatgaatggggcgacaatggaaattggagctgtggctgccatgagatatgttaaggatggaattaaggcagcaaagttggtcatggaccacagcttgcatactctgctggttggagagaaggcaacagactttgcaatttcaatgggccttccaggaccaattaatctcagttctccagagtctcttgagaaatgggcaaactggagacagaaccactgccaacctaacttctggaaaaatgttgctcctgctggtagctgtggcccttaccgtcctatcaatttagctcaagcattggactctgtaaagcatgaggtagaaggaagtcaaggaggcgtttgccaggattggttccaaagtgataatttactggagccaataaactcccatctgaagtttattgatcgccacaaccatgacactatctctatggctgtgattgacaagatgggtcacatagctgtcgggacatcaaccaatggtgctacattttgtactgcgggtatagcaacggagcacagcaacagcagctcctggtgagatacagaacaacggaacagagcaacagaagagatacaagtgcaattaagaagggtagcatgtatttcagaataatattgttgacaatgtagttttctcctgatgggaattactgactgatcatttgattccagggtaggtgatggaccaataccaggatcttcttcatatggtgatgatgaggtcggagcttgtggagcatctggcgatggtgatattatgatgcgcttccttccatgctatcaagtagtcgagagcatgagacgagggatggaaccccaggatgctgcaagggatgctatatcaagaattgcccgcaaatacccggatttcgttggtgctgtttttgcggtcaacaggaaaggagtccatgctggggcatgccacggatggacattccagtactccgtaatgaattccagcatgcatgatgtggaggtaattacagtatatccttagcaatggcagttcatggaagacaaaggtttgcttcatcagcaagtagggtatttcaatggtggtgatggacgttattttcttcattaacgctcaccgctgatgtagcaatgtcctgtgtggattgttccgacaattttcttaagccgattgttaacctactgggaccttattatacgtagttgaccctagtcgccaaagaaaagctgttaaaggacttaccaaa

SEQ ID NO: 46090 - DNA, 525 bp, Setaria italica
  misc_feature (510)..(525): n is a, c, g, or t
  Peptide Sequence Number=SeqID_112064
acgtggacgccgagggcgagggcgacgtggccgggatggccaccggcggcagcaagcgccgcgtgctgcagggcgggtccgggtacatcggctacgacgcgctgcgcagggacaacgtgccctgctcccagcgcggcgcctcctactacaactgccagcccggcgccgaggccaacccctactcccgcggctgcaacgccatcacccagtgcaggggctgagctagctcagcgctgcacgcgcgcgtcgtctccagttaatataaatcatgtatttgtcgcggctaattaatccgttgcggctgctagcttgatggtgatgtttgtttaagagtttgggggcatggctgattggttgtgcagtggatatgtgtctctcttctgttctgtgttctagcttcgcttcgccttcagggtgaaaggaaaagtgattatgatcgtgtaattctggtgtctctgaatctacagccaatgaattttcaccgtacgtctttcacaaaaaaaaaaaaannnnnnnnnnnnnnnn

SEQ ID NO: 46091 - DNA, 729 bp, Setaria italica
  Peptide Sequence Number=SeqID_112065
cgttggaattgctggataggatgaccaaggagaagaagctgcctaatacgatcacatatagttctgtgattgatgggctctgtaaggagtgcaggttgagtgaggcaatggaggtcttggatcggatgcgtctgcagggccggaagcctgatgctgggttgtttgggaagctaattgttgggctatgcaatgcaggaagggctgtggaggctgcaaattacttggatgagatggttcttgccggtattgaaccaaaccgtttgacttggagcctgcatgccaggataaacaatactgtgctgacagcattgtgcactaaaggtgaacttgggagggcttttcgggtctaccagagcacaaggactcgtagcatttctactgagccagcaactttccatcttctggttaagagcttctctgaaaagaacaatttagagaaagctgctcatgttgtgcttgacatgctgtcagagagatgcatccctgagagtgagacaatgggatgttattatcagtgggtactggggtaggaagaatgtgagacaagaagccaaggaaatatggaaccagctaactgttagttgatttgatcacttttgagaaatattgctctatgctgtgctattaccttatgtcccctagcacaaataaacatcttggccagcttttctcttcaggaactaggactagcaaaaatttgaagacccagttattgtgaagagaatgtgg

SEQ ID NO: 46092 - DNA, 1102 bp, Setaria italica
  Peptide Sequence Number=SeqID_112066
tttcttattttcggttctaacttcttcctatttatctttctttggttgagtgggatgtacttccacggtgcccgtttttccaattatgaagcatggctaagcgatcctactcacattggccccagtgctcaggtagtttggccaatagtagggcaagaaattttgaatggtgatgtaggcgggggtttccgaggaatccaaataacctctgggttttttcagatttggcgagcatccggaataactagtgaattacaactctattgtaccgcaatcggtgcattgatttttgcatcgttaatgctttttgctggttggttccattatcacaaagctgctcccaaattggcctggttccaagatgtagaatccatgttgaatcaccacttagcggggttattaggacttgggtctctttcttgggcgggacaccaaatccatgtatctttaccgattaaccaatttctcgacgctggggttgatcctaaagagataccacttcctcatgaatttatcttgaatcgcgaccttttggctcaactttatcctagttttgccgaaggagcaactccctttttcaccttgaattggtccaaatatgcagaatttcttagttttcgcggaggactagatccaataaccggtggtctatggttgagcgatattgcacaccatcatttagctattgctattcttttcctgatcgctggtcatatgtataggaccaactggggtattggtcatggacttaaagatattttggaggctcataagggcccatttacaggacaaggccataagggtctctatgaaatcctaacaacgtcatggcatgctcaattatctcttaacctagctatgctaggctctacaactattgttgtagctcatcatatgtactctatgcccccctatccatacctagctaccgactatggtacacaactttccttgttcacacaccacatgtggattggcggatttctaatagtcggtgctgctgcacatgcagccatttttatggtaagagtacttagatcattcctaacttacttcgttctactaacgatctattagatcgcgtccttagacaccgcgaata

SEQ ID NO: 46093 - DNA, 759 bp, Setaria italica
  misc_feature (750)..(759): n is a, c, g, or t
  Peptide Sequence Number=SeqID_112067
gtccttgtcacaccctgccacaagatggcttcctgttcctcaccaccatggccacccatccctctcctcctcctgctcttcttcctcctctcctcctccttctccttctccgtcctcaccgcatcagcagcacaagcctcctcccgacaggctgagagcggcggcaatgcgacggcaacggcggcgcagggaacggagacggcggcgtggacgccgcggctgcggaagactttcctggacggcggcgtggagcggtggcgcgggcggcggctggtggggcggttccaggtgtgcgcggtgtgcacctgctgcgggggcccgcacgggatgtgcatcccggcgccctgctgctacgccatcaactgcaacatccccaaccgccccttcggcgtctgctccttcaccccgcgcacctgcaactgcctcaactgccacctctaggcaggatctcctccttgctcggttcctggcgacgaagagatcgatcgattcatggtgagggatttgtttgtttggggtctcaggttggaagaactcatatagtggtagcagtaccagtagtatatatactcctacattgtagtagccatgactcgtaaagtagcggtatggcgatggttggattaattcagcttttttgtgcgatttgttcgtcctcttgaattgaactgtggatataaatcaagtcagtagtatctttctttgcagtaaaaaaaaaaaccaaagcgaatggagttagtaagttactannnnnnnnnn

SEQ ID NO: 46094 - DNA, 440 bp, Setaria italica
  Peptide Sequence Number=SeqID_112068
aggcctcagtggatgagatgctcaccaagctgaaatctctgaccacggcgaaacgcgccagtgaatgccctacactgttggcagtcgcccgtgatggagacagcgcttggtgctttcagagagcatcagatctttctgtgagtgacccctttgattggtgatgaagctcaagcctcaaggtgatggcatgtgccatgactaattctagcatcttgtggagctgatcgttgatttttgtcagtatactagctgcgcacaccttagaatgttgtctcatgttgtgtcatctctgacaagtgcgagtacagttctgagtgaattggaagaggcttatagttcatgcaatgaccaaatgctcctcgacatgtcacagttgaaaagactgcatttgttgcgaccaaattcctaatgttatcactggttggtttctttgtggtaaa

SEQ ID NO: 46095 - DNA, 762 bp, Setaria italica
  Peptide Sequence Number=SeqID_112069
tcgtccaatattaatcttgcaaagtcatgtaccaggtcatgcatggtaaacaatgcaataccttcatgatacgttccagaagttggtggtaacattgaaggttgaagaaaagacattcccaggagctgcgcaatgtattgctcactaagctggtgcttcttaatgtgcactctcataggccttatgaaccctagtgaaatccattggcggcttagatcatctttaactatgttgtgacctttcggaaagattgcgcagtaggtaaagcatggccttaccaggcgattcatactgctataacttaattttaaggctgcaagcacttgattatgcaaagatccatccattgaattagtttcattccagacatcactttcgttaactttctcccatccgtttaagtccttggatcgtagtgtgtatccaagagattgagcagctaaaggtacacctccacacttcgaggcaatctccaatcctatatccttcagttgttctttgtcatctctatcttcaaaaccacatttttgtttttattatatcccagcacacttcctttgacaggagttctatcttgtatggctcaatggttccaacttcctttgcgacgcgttcgtcgcgtgtagttactataactattgtgttttctgtcccaccaagccttagcatagttttcaaatcagtcaatttatatgggtcacgctcccacaagtcatccaaaacaatcaaaaatcttcttcccagctagtagcttcttgagac

SEQ ID NO: 46096 - DNA, 515 bp, Setaria italica
  Peptide Sequence Number=SeqID_112070
tggtcctagtattggccagattacacatatcaatccatttttcagattcctacacatccataccaatccatttttcaattcgaatttcgataaatcagcatgaacacatccagatcaatgtaaccgatccattttccatccctttatcaagaaaatctacatgcgcacgaaaaacgtcgccttttcacttttttcaagtagtagacagtagagatgtgcaaatgagattttggccagaccagagatccacctgggagttagcaaggaaccttcttaagggtggactcgcccttagcagccaggaatctggaacatggtcatgttcctggaacatgcatgaaaacctttcataagtgtagtaccacattccttgttcctggaacatggctgctaactactttttttgtaaaccaaatggctgctaacgcttcattattacagcagaaactgatgatcgaagttgtgattagagactatcaaacacaatgaccaagtcgacaatggcgtcttctagg

SEQ ID NO: 46097 - DNA, 556 bp, Setaria italica
  misc_feature (23)..(23): n is a, c, g, or t
  Peptide Sequence Number=SeqID_112071
gccccagcttagcatcgcattgntccccacaagatttcaacaggcaaacaaaagtcaagctgttaccttgcactccagtggccagcatatccaagaacagcctcacaacctcactgtggcggccaagcttctgatacccattcatcatcgcagtaccacgatacgacgctcctgtcgcccatttcgtcgaacaccttcttcgcatctgcaacctcatcgaacttcacataagcgctgatcagattgttggacacgaacacccccaggctgtcgagcgaccggagggcaaccgcatgtgctctccggacgcccatcttgctccggcaggaacgcaacaagaacgcgaccgcctcggagtccggcagcgacggcgcagccgagcccggcaaatcccctccccggtcttcatccgcagggtccccgtggccatcaccccggtgggattgggagagcaaagattggttcttggacttgaaagcttgcgccctgacgcggtgggacttactcttattgctccttccctgctcaccggagctgagggaggcttcgaggcaag

SEQ ID NO: 46098 - DNA, 335 bp, Setaria italica
  Peptide Sequence Number=SeqID_112072
cgaagccgtgctgcgggacgccggcgcgcggaaggaggtgatcgcggcgttccacgtcgcgctcgggtgcgtcgaggcggacccggagcgccggccaaggatgaaggccgtctccgacagcctcgacaagatcggggcgtgacttgtcgtcagttcgtcactgctgggtcaaaaatggtgctggagttctacatttccccccccgtaattatgcatatcgttattgttcttctcatttttatttttcgttttctcccctttgaggcaataatgatttgtagaaatatatagcacgggagcttatttactttggcataacaaaaaaaaaaaaaaaa

SEQ ID NO: 46099 - DNA, 412 bp, Setaria italica
  Peptide Sequence Number=SeqID_112073
ctgtcattttgacttctggcgaccaaagcatagcatagcatgaccccccacctccacagctccaccccattgatgtcaacaacttcagcttcaccccctgatctcgatgactcgagcggctctacaccttggatttgcttgccttatggtcattcagttttatgggttggatgatgccaagcgagattatcaatgcagagtgcagaaaatatgcagatcattccatggagcaaaccatgaatttgtccacttatccgcttaccaactcaacatgcttatcatgtttggttactggagcccaagtgaatttccacttccagcttctcttgtttctttctgtgtcatatgtagttcacaaacttcacaaatcccctactttcatcgcccactgtttccttgtacacgtaaactg

SEQ ID NO: 46100 - DNA, 593 bp, Setaria italica
  Peptide Sequence Number=SeqID_112074
tgagatccagcagctcctctccagtcttcgtattctgtttctctctatatgtcttcttgttcagcagcagctcaagatctttaaggtcatcctcctctgtcctctgcttcagctgattggggcctggccccggaccaccacccattggcataactgcccctggcggcatgaacggccgctgcagcggcatcaaccctggtggcatcctaggcatccccatgcccctggggcgtggaaacatcggtggcattggatgaccccacatatccggctgctgcagtggcggaggcctcggtatgatggcgctgttagcatcagtctcggacggggccggcctgtggagttggcggaggttgggcttggggaacagaggcggattcaggcagctctttgaggagtttgctccggtcaatggcccagaccatcatcatctgcttgcccccaatgatggcctcctcgatctgcaatgcgccgctgtcttccgcgatgcggcggagcgcaagggcaaccgcagcgtgcgcggatcccccaagctccgcagcaaggtcggcaagagccgcccgctcggcctcgctggccgacgacgtctccgg

SEQ ID NO: 46101 - DNA, 477 bp, Setaria italica
  Peptide Sequence Number=SeqID_112075
catattaagcttcttgaaagtgttattcattttccttcatatgcaaagctaccatcttctgcttctaaagttcaagaaagaacatggttatgggatcctttcgagatgaaagctgcactagaaaatagtttgttggaagatgaaagccataccagcataaagactcttgatattcttagagacttccctcaaagtaaccaaacaacttattctggtaccaatgatacttcatatgattaccctaatttatccgattggaatgatttaagtgaaattgaaatctttgaagacattgaaaggagagaaatggaggagattgatgaaagggtggaaagacctttgctatcatgggatgaagtctacagaaatgctcgtaaatcagaaaggctaaagccggaagtaaatgaacgtgatgaaggtgaactagaaaggactgggcaacccgtgtgtatatatgagatttataatggagagggg

SEQ ID NO: 46102 - DNA, 790 bp, Setaria italica
  Peptide Sequence Number=SeqID_112076
aagaagatggatcttcagaaagacaaggagccgatccaagatgctcatagatcaaagtgctctgtgcatagcaattatgacataagatgcttcacaggaagctaaatagaacggataaccaacaactacgaaactattctggggaaaggaggctttggagagaagtcttcaaaggagttctggaggacgaaagcgaggttgcagttaagaggctcatccgcaatgtgacagaaaacttccatcaagaattgactgtccatcgtgaaatcaaccataggaatgtggtcaggctcatcggctattgcaaagaggaaaatgcactaatgatggtgaccgagtatatccctaacgggaacttgtgtgatgcacttcaccgaggcaaaatccccattcctctagacattcggctaaggatcgccgcagactgtgcagaggcgttggcatacatgcattctcacatgaacactcaggttattcatggggacatcaagcctgctaatatattgttggatgacaacttcactgcgaaaatatccgactttggaatagcgaggctagtcgacatagacaagacactgttcactgagtttgcacgggggagcattggttacatggaccctctgcttactcgggacgcacgtctcactgtgaagagcgatgtttacagcttcggagttgtcctgtttgagctgatcactaggaaaaaggcaacggaaatagacgggaaagccaactttcttgatcacttcattggagctcttgcgggtggcatcaaaggggtgagagagat

SEQ ID NO: 46103 - DNA, 692 bp, Setaria italica
  misc_feature (24)..(24): n is a, c, g, or t
  misc_feature (41)..(41): n is a, c, g, or t
  Peptide Sequence Number=SeqID_112077
atccaacggagcattcagatacangacatgcaagacagaancttgagctcgtaaggagaagtagccgacctggtggacggtatgatcgagctgtcagaggagaaaatggaagtggaaatggagctagcggttgccaatgctcacctggacgagcatcaagctgagctcgacgatatgcacgccctccatatgcaactagaagctcaagaggaccccgaggaggatgagggagcgtctagtatggacattgaagaagacggcaccccttctcctactcatagtgtccatttgtagatgaagagttacaagggactcattcttttgtggtactcctcggcagcctaaattttggaaagaattgtaataggttagccttgagtcaagtactcgctgtgtttggaacaccgctgtaaataaagtcaattcctgagtctggcctttaactcttgcaaagtgttggaatgttagactaagtgagttgtgccgcgaccacacacgccgttttctgtgagtctgttcaagttggacgaccccggttcgcgagatcggatgcgccgacctttcgaggcagtctccgcctcgcccgacccctttttagtgtggatcgttgccgaccctttttctcaggaggatcgcctagcccgacccgtggcttaagttggattctaggagtctgggtagggtatgattcg

SEQ ID NO: 46104 - DNA, 936 bp, Setaria italica
  misc_feature (24)..(24): n is a, c, g, or t
  Peptide Sequence Number=SeqID_112078
caaaagtgccaaaaacacagagcntaaaccatctgaacacagctctgatactgactgcaggcagccaggcacacctgaatctcggacagctcttcgactacagtctacaggcttctgagcccctgaaacatagcacaaacgaacggcacacgagtccagttctcttcagcaaattcagactggccgaattcgcaacacggaggtagaaatagaaacaacaagattttagcctacgattagcagtggtggcagttagttgtggcacacgtctactgagcacacatctactgaacgctgacacttgcacacgagttcaccggctcgatcactcccacaacgggctgccgtacacctgctccgcgccagcctcgccgccgccgtagcagggctcaaacgagaaggcgctcccctcgccgccctcctcctcctcctcccactccatggccatgaccatgccgtccatgtaccagtcccccatgcacccgccggcgaacgggcccatgacggcgtcggtcgtctccgcccactccagggtgtcctcgtcgccgaagaatgcgtacggcgccgggaacggcctcgcccgcgcgctcccgtactcctcgaagtcggacaggatgccgtcgaggccgcagtcctcgcagtcctggtgcgcgtggatgccgcagctcggctcctggctgtcgatccagcagtcgccgtcgacgtcggccgcgaagccgagcgcctggcctgcgttgtcctcggcggcgagggacgcgtccaggagctcgacgagcaggtcgccgtcgatctccggcacctccatgacgtcgtcttctctctgctgcggcgccatgctattgctctccatgtacgtgtatggatcaagatcgtgtagccgagttctaagtttctaactgcttgcgggagtggggggtgagcaggagatgaatgatc

SEQ ID NO: 46105 - DNA, 425 bp, Setaria italica
  Peptide Sequence Number=SeqID_112079
aaaatagttacctttaaaaataagccgcgatgagaaaggcatgttgatgttctgctgaaggtgaacccacacaactagatagggattcagggcggagtgttcatctgtttcacggttgagtgaaccaattcagtattagaactaggcaggaaattatttttatggggttcagctatcacaacatctggaacatcaaccatgagcaatctattagttttgctcctgaccgacaaagtgggtcaccatttcagcacccatgcaacccacagaagctctgtttaggaaatttggacaaaagatcatataggaactcaaatgactatgctttgggcacagttctcccctcgcataatgaaattagcaaaaattcaagcatcctgtttgagctgcaggtatatgcatgcacaaataaagacacaaggtat

SEQ ID NO: 46106 - DNA, 401 bp, Setaria italica
  Peptide Sequence Number=SeqID_112080
tatatcttgttaattatttagccatgcttagacatagaatgatcactttggtaaggaaaatgattataggttaatcaacaccgattctaatatgactctctaatgttgttgaataaacgaacatgatggttaattggatacgagatttgagcggtgtgtacggtcacgagaatggagtctcagtgacagaccgcttgagtcgattaaggaccgtccattgttgatgttggtttgagcacccttttttcgtgctaccacatgttcctgaatgggatgaataagcctaataccttactcgctctatgaggtacggttctagatgtgtgctcctatacaacacgattgcattaccatctgtccttacaatcaactcattaagcaaacagccagcaacaaaaaat

SEQ ID NO: 46107 - DNA, 260 bp, Setaria italica
  Peptide Sequence Number=SeqID_112081
ctcggcagccttccagtcccttcgtctcccgcgccggcgtttccccttccagaaatccagctgcgcacccaccgtcgcgcatgccgtagcagcgtcgtccacccaggcagaaaccctctctccctctttgcatcgcccaagcaagaagccaacaatcctttctgtcttctttccatcacccaagcaatcctactcgatctgacctgcaagcgtgaagaaaaagggatccccttgaggccttgaacaaagcacgatctgca

SEQ ID NO: 46108 - DNA, 331 bp, Setaria italica
  Peptide Sequence Number=SeqID_112082
tttagcttgcttctgggcatcctggacacctgattgtacttcctgggctctaggtggtggagcccgattttgatcagcctctgttgctctctttgcaatagctgggtaaccagagtatgtagattgttttgcagtttcaccttgagcataatgagtgcccattgcacttttctgtttttcacctgcctcaggaccgacataagtgtgtgtaactgtctgttcaggaggctttccataaggtgtttgttgttttgtgtgtcaggcttgtcaacctgagggtggacgccaaaaggtttgctctcactttcactgaaccagattacagtgaaag

SEQ ID NO: 46109 - DNA, 592 bp, Setaria italica
  Peptide Sequence Number=SeqID_112083
gggaggatggtgtctagtgaattgaattggagaaatcttctgacataactttactagatttctgttttgccatcacaaaatagcttatactgatctgcatatgctacccaattgcaaaaaattgagccttgcgtgtcataatccatgaaccgtcaattcagtgataaaaaataatttctaacttatgtttcttccttgagtaactcaactctgaacagtgctcattatatatattgtactgaagcctgttacttctattgagagaggagatactttaagatgtactggaactggcatttcgactaaaatgtgtatgtattatatactacttttcttgacctcctgcttagtcctgagaacaactataatgttgcgtatgtcaagggaactgcaagatgtgttgccttatccctttcccaagcattgtgcatttgatccttagttttttttaattcagttgccagtaagcattgtgcaaaattcttctgaactatactttgcagtttgaaattaaagatgttcaaggtatctactctctacacagttcactatagcttctgggtagcttgagcgcactgcacacaggcttgag

SEQ ID NO: 46110 - DNA, 628 bp, Setaria italica
  misc_feature (622)..(622): n is a, c, g, or t
  Peptide Sequence Number=SeqID_112084
ggtcttttcacttgaaaagaatcgactttgtacatcatgctactatcaattgctacaaaagattacatttgtttcatgtatcaaaactgtaatcagtactagtaagtcacagtatttccccctcgctatgtcaaaatggggaaaaatgaatgttccctccagccacgaccacgagcaccttggagtggatgtctcacgtatgtgtcctcaactttatctatgctgtaatagcttggcatagttgatcatacctgttggggatagatccccaataccctgtgtcagtttcacaggatgctgggtgttctgtatccaggcactgcgttgctcttccagaaattcattcagacattccatcaactgtgagtaaaaaatcaccagtagtcaccacagcaacaggagccatctgaaaatacatgatagatctttgcgtcaccaacaacaatcttccgccttgagtattttgatatcagcttcagtgcatgatggcactggttacatacacgcacattcttcttgacaagaacgggagctccagcctcagatgatatcagaccaaaggcaacagccagccttacactatgcttattgggcagtactgttctccgtgatgccaaaagtnacgtac

SEQ ID NO: 46111 - DNA, 304 bp, Setaria italica
  Peptide Sequence Number=SeqID_112085
ggtatggtgagttacctgatatctttttttcaaaggaaaactctttatcattttttctgattatactgactagtcacttgaaattttaaaaggagaagttgtctggtatccgtgataaaaaagttccatttgcacattcactatccattgttctctcttgaaattcagctagataacttattgcctcaatttactttatttgataaatttcaataagataccatgcgatggctcttctagtcactcatccactgatcatgtggttatggtcgtcagcaaaagataaatgttctgacgatagcgt

SEQ ID NO: 46112 - DNA, 309 bp, Setaria italica
  Peptide Sequence Number=SeqID_112086
cctgccaaaaattttagatgaatctacttcgtttagcacctcctttggtgggattgataatgactcccgtggttatgtacagaaccatgataaagatggaactaagagcagagacaagtgttcaacagcaaaaaagctttttgctgacacgacagctgaggatggtgaaagcaacatcagatgtcttgctggattaagctatattggatcacaggagcctggtgatctgtcacaggcaaatgcttttgatgttgtggataagttgatttcaattaatggtggattatcatctcaagagaccaacccaaa

SEQ ID NO: 46113 - DNA, 487 bp, Setaria italica
  Peptide Sequence Number=SeqID_112087
ggccgggtggaggtttaacaaattcgaactttatgcagcagataagtaatatcctgtgccttgttggatgttacagtatatctaatcctaattaagtcatccaaccatgcaatgggacaaagttattctttatgcaacaaagtgcacttaaacatgtcaattttcatacactgcaacataaaatgtacatcacagcaatagcataattagttaaaattcagcagataatactacagagctgacaccgctatagacactgaccatgaagcatagaacaacatttgccacatatcatcctagtttcttcaagggaacaaaattaccataggagttcagtcccttacacatcaaatatcctgaagccaagaaaagatcatccaggctaatgacaagagcaactgatccaaattcctatttatcatcttaagaactttctaccggataccaccaactcctagcatcacactcaagtacttacaccacattg

SEQ ID NO: 46114 - DNA, 642 bp, Setaria italica
  Peptide Sequence Number=SeqID_112088
ttgtcagaataataatacaacaaattattgttgtcatactttgaagtttgttgtgttcctactgacctccaacaaattgttgttatctgtgagacaacatatatttttttccatgtcacaggataataaataaagcaatattaaccaagaagtctggttgattttgtaatcatatacttctggcacatcaataaattgccgactgaaagctaatcatatttctgctacatgcatactgtctgtgttgttatgttccgtactgccttgtttggatatactgtcatctatcacaaattttgacttcttatgtatgtgcacgttttcttatcctgaatagtttgtccaaaaattttgttgatattttcattgtcatctgaaaaataatcacttcactgttcaggaagaaagagatgcagtttttgccaagatagaagtttctcaggttcatctggaactgttgaaacgtactaatgttctcaatgatgcattctatatttcacatgatggagtaattggaacaataaacaatttccgcctcggacgtctctctaatgtggaggttgagtgggatgagataaatgctgcttggggttctaagtcttgtctacttgttttgttttgttcttattaccttatttggtt

SEQ ID NO: 46115 - DNA, 631 bp, Setaria italica
  misc_feature (564)..(631): n is a, c, g, or t
  Peptide Sequence Number=SeqID_112089
acccaatatgatgaagccatgaaatggtttctgatgtgcctgcaagagtttgttgattttgctgaaagtttggataaagagaacaacgttccacctgacgagttattgaagctcccctataagattgatggtgacaaagtagggggctacagggtcgtcctaggtgatttcaatacaagggagaattcgacaaaggcgctgaagaacatgctccgcgatttgaattgggttctcttctggtttatcggcaccacaagctttgcactgccctcgggagcattgcacacgcagatatgaggtttcgtctagcttgaacagttagatacttatattagcatagtttcagtacatgctgaattactgaccccctaggagctgattttagtcccccaacccccatagcgacaatacgacgcatttgatgttacataactagcatgtatattttttaaaaaaacttttgtcactcgttgcttgcaaactgctcctgttctttatgtgctcaagactttttcccctcagaaaactggacaggccaggagctgtgccattcaaattaaaagnnnnnnnnnnnnnnnnnnnnnnnnnnnnnnnnnnnnnnnnnnnnnnnnnnnnnnnnnnnnnnnnnnnn

SEQ ID NO: 46116 - DNA, 475 bp, Setaria italica
  Peptide Sequence Number=SeqID_112090
tgtccgtaaattggtaagtatttattctagtaccctactttggtaaattgtttaaagtagttactaaattgtttcttgtaattgtattgcatttcaacatttctcaatatggagtatttggaacaataaataatctccgtcttggacacactcatgtggttgagtgggatgagataaatgctgcttggggtcaggctgcccttctgttgcataccatggctcagtattacaccccgaaatttcagtatccttggcacataatgatgtttttctatcaagtttatgtacctatcattcttttgagaactatatgccacctgtcttgatgcattttactaggttgaccatgtcgatcatgttttgtttgttctggttatgttgctgtgtatacccaaatatattttggcttggagaagctatctccagcagccacctcctctgttgggcgcttatccaaatatattttagctctaat

SEQ ID NO: 46117 - DNA, 1370 bp, Setaria italica
  Peptide Sequence Number=SeqID_112091
ctccgaaggaggtggtgcacagcttacaccaccgggggtaaactccagtagcccttcaccaggaaacaattctggatttcactctagtgttacagtactgaaagggcttttgagattgctagctcacaaactcaggttgagcagccactttgtttggaatgcatgagggttctttctgataagatggataaggagattgaagatgttaatgctgatattaaagcttatgaggcttctcttcaacgtttggagcaggaaccctacaacatactcagtgaaacagactttcagaaggagaaacaaaagatcgaggaagaagaaaagaaacttaaagctgctattgaagaagctgaaaagctatattcagaagttacttctgaaatgaaagatcttgaaataaagtctaaacaatttgaggaattggaagagcggtattggcatgaattcaacagttttcagtttcagttgaaatctcaccaggaagaaagagatgcagtttttgccaagatagaagtttctcaggttcatctggaactgttgaaacgtactaatgttctcaatgatgcattctatatttcacatgatggagtaattggaacaataaacaatttccgcctcggacgtctctctaatgtggaggttgagtgggatgagataaatgctgcttggggtcaagctgcactgttgttgcataccatggctcagtatttcactccgaaatttcaataccggatcaagattcaccctatgggaagctatccaagagtcacagatatccacaacaatacatatgaactgtttggtcctgtgaatttgttctggagcacccgatttgacaaagccatgacatggtttctgacttgcctgcaagagtttgctgagtttgccgtaagtttggataaggagaataatgttccatctgagaaatcattgaagcttccctataagatagatggagacaaagtagggagccatacaatcgtcctaagtttcaataagaatgagaactggacgaaggcgctaaagtacatgctgtgcaatctgaaatgggttctctactggttcattggcaacacaagttttgcgccaccctcagggccagtgcgcgcacaatctctgaagaacaagagctcatgatgttttaacttgtacatagtttaaaataccaaccaaggtattgaccctagtcgttagactctagccgtagtgacaataacgacacagttgatgtacatacatgtagcacataatgtctattacttcaagtctgccgtcttgtccgaaccctcttgtatgtggattccaattccatcggccgttccattacaagttaagctaagttaaattaaagtatttgtttctaaaaaaaa

SEQ ID NO: 46118 - DNA, 428 bp, Setaria italica
  Peptide Sequence Number=SeqID_112092
tgcagattatcaacttgtgctttcaaaataccacacccagatgctgctaatcaacagtgccagggcaaagtgctcatcagttagaaaccaatcggcatgaatcatggctctgtcatggaatgcgattcaaagctgatgtcctcatggtgttagataggagctattgggcaaaggataaatggttgagcgtggatgtggattttgactttctactttgtgcgccaggttagtgcatgttgctttcttctccttggctcatctggcagctgatatgctgtttttacactatccttaaactaagatcaggttacctgtcacattcttgtgcacattttttatgagtgtatcgtcctcgtcctattgctatgccacatatgtccattgcaacattacaaattagatgatggcttgttaacaaaaaaaaaaaa

SEQ ID NO: 46119 - DNA, 429 bp, Setaria italica
  Peptide Sequence Number=SeqID_112093
agaagcccgccgcggtcgccgagcccaagttctaccccgccgacgacgtgaaaccgcgcaagcccagcacccgcaagccgaagcctaccaagctcaggtcgtccattactccgggcaccgtgctcatcctgctcgccgggaggttcatggggaagagagtcgtgttcctcaagcagctcaaatctggcatgctccttgttactggacctttcaagatcaacggtgtcccaatccgccgtgtgaaccagacctacgtcattgcaacctccacaaaggttgatatctcgggtgttaacgtggagaagtttgatgacgcgtactttgccagggacaagaagcagaaggcaaagaagaccgtagggttgaactttttcgtagtactagtagtaaggtaggtcgtacctaaggtaccttgtccgttcttagtta

SEQ ID NO: 46120 - DNA, 740 bp, Setaria italica
  misc_feature (738)..(738): n is a, c, g, or t
  Peptide Sequence Number=SeqID_112094
ttagttaagttaaagttacccgttaccgttacggtttcgtccgtagtccctaagtttcttaccccgtccgtacgtacgttgtaaaccgtcgtcaagcccagcacccgcaagccgaagcctaccaagctcaggtcgtccattactccgggcaccgtgctcatcctgctcgccgggaggttcatggggaagagagtcgtgttcctcaagcagctcaaatctggcatgctccttgttactggacctttcaagatacaaacggtgtacccaaatccgccgtgtgaaccagacctacgtcattgcaacctccacaaaggttgatatctcgggtgttaacgtggagaagtttgatgacgcgtactttgccagggacaagaagcagaaggcaaagaagaccgagggtgaacttttcgagacagagaaggaggcgaccaaggacctgccgcagttcaagaaggacgaccagaagaccgtggacgctgagctgatcaaagctattgaggctgttccggatctgaaaacctaccttggtgcacggttctctctcagggatggcgacaagccccatgagatggttttctagattagttggtgctaggtgcgaagctcaatagtcactttgcctggtctacctgagtgtgctcctgaattttgtatattgatagcaatagaaagtattttgtactagttgtatttctagaaaataacaaactaagtaacaaaaaataaacttaaaataanaa

SEQ ID NO: 46121 - DNA, 1116 bp, Setaria italica
  misc_feature (1089)..(1116): n is a, c, g, or t
  Peptide Sequence Number=SeqID_112095
ttaggggttaaagttaagttaagtttacgtttagtttccttctaagtctagtcttccgcctccactccctgccgccgccgccgccgccgccccgctgccgccgcgccgcgagacgatccaatggcgccgtcgtctaagctgtcgatgggcatcaagaaggcctcgcggtcgcacgcgtaccaccgccgtgggctgtgggcaatcaaggccaagcatggcggcgccttccccaaggccgagaagcccgccgcggtcgccgagcccaagttctaccccgccgacgacgtgaaaccgcgcaagcccagcacccgcaagccgaagcctaccaagctcaggtcgtccattactccgggcaccgtgctcatcctgctcgccgggaggttcatggggaagagagtcgtgttcctcaagcagctcaaatctggcatgctccttgttactggacctttcaagatcaacggtgtcccaatccgccgtgtgaaccagacctacgtcattgcaacctccacaaaggttgatatctcgggtgttaacgtggagaagtttgatgacgcgtactttgccagggacaagaagcagaaggcaaagaagaccgagggtgaacttttcgagacagagaaggaggcgaccaaggacctgccgcagttcaagaaggacgaccagaagaccgtggacgctgagctgatcaaagctattgaggctgttccggatctgaaaacctaccttggtgcacggttctctctcagggatggcgacaagccccatgagatggttttctagattagttggtgctaggtgcgaagctcaatagtcactttgcctggtctacctgagtgtgctcctgaattttgtatctgactggtgaacctttggtttccatttgaatcactgtcaaatctttaatgaagtcatatattttgctggttaatttaaaaatcttttgcacgacactactatacatgtaagctatttgcaaagtcctgtcctggcatttgtgcattcttccgtggctttgatcacatgagcaggtagttattgtattctagaaagtacaatatatttgctaaggttaaaaaaaaaaaaaaaaannnnnnnnnnnnnnnnnnnnnnnnnnnn

SEQ ID NO: 46122 - DNA, 450 bp, Setaria italica
  Peptide Sequence Number=SeqID_112096
ttccccactgctataactagtgaatgccaaagtcttatggacacatttcccaggcaagatgcatcacatcaaagtcaatgtatgggcgcaaatcccacatgaggcagtatccttcaagctctgatggcagcgtttttagggataatgcaccaacaatattttcctgcatcgcatagtcaagctccaacatgttgtgaacaatgatcatcacagtaacaagaaatacatcactgtccaattgatctgcacttttatcctcctgcagtagatgtaacatgttacccggtttccaccttacttcatcattgtaaacagcaagatattctctgttgaaaagaacactatgtaaatgattagtaaaaggaatgtttgaacagaaacttctaccccaatgatgcacgaatcaatagtcagcttgctgtcaatggtatgactgtctgaaactttcag

SEQ ID NO: 46123 - DNA, 522 bp, Setaria italica
  Peptide Sequence Number=SeqID_112097
caccccagttgtacttcttcagacctgatataacaccattaggtattatagggctcaaatcttcagatataccagcatcaattagcagatctaggtgtaaggctgtaatttttccatcagacttgaaaccaacagagtaatgagattttatagggtgccgactgccaaccatgatcatatcagtattacgattgagacacatccgcacagggcattgtaacttgtatgcgcaaagtgccgcagctgttgcaacagggaatgatcgatatccctttccaccaaagcctcctccaacccttcttgtaatgacacggacattcccgaatggaataccaaggcacttagcgatgacagtctgtgcaagttcagggtattgtgatgaactgtagacaaccatggtcttatcttcatctggaattgccagtgctgtctgtgtttccatgtagaagtagtactgggaagcaagttttacttcggttgacagtatcttgtgatcagcttcagccatgcccttagaaaaat

SEQ ID NO: 46124 - DNA, 595 bp, Setaria italica
  Peptide Sequence Number=SeqID_112098
gcggcgcgccgtagggggcggaggagggcggcggggccccgtagggcgcgccgtactgctgcccggcgggcggggccccgtagcctccgccgccgtaaggctgggaggagggcggggcgccgtagtaggggggcacggaggaggaggaggaggtcttgccttccttggggggcttctcgccgtagggcggggcggagggggccggggaggagccgtagggaggtggggcgccgtagcctccgcctccgccggcgccggggccgtaggggtagccggagccgtgcggcgggtagccggccatgggggcttccgggcttgccggcgacgagatcgcacacgggagacggtggccggtggggaattgggaatcgagaggggcgctcggaacggaacggaattgaatgcgatgcagcgaagcaggtttgagcagggggagggggaacgggacgggccttttatgacgtggcgaaccaaggcgggctcggaaggtttgggttggacttggagcgcgtcgaaaaggcaaagaaggctcggggccgcggcttgcgtgaccgcggacaacgccgacgcggcgccggcgcgttgaagcgatcac

SEQ ID NO: 46125 - DNA, 289 bp, Setaria italica
  Peptide Sequence Number=SeqID_112099
actctacgaagacatgaggagctcccccgatccacctctatcgctgccattccgtgttatcctgaaagggctggtcccgtaccccgagctgagggagaagataaagcaggattttctggagctttttccagatatgattgtatatgacccgccaggtagcttgtcagatgtagatgatgaattcaagttttgatgaatatatacatccttatgtttttgcttcaatgcttcatggaattgacttcataaggtctactacaagactataagcaaaaataaaaaaaaaaaa

SEQ ID NO: 46126 - DNA, 236 bp, Setaria italica
  Peptide Sequence Number=SeqID_112100
gacaatgtggtgctacagtaaacatgtgctaatgatggattaattaggcttaatagattcatctcaagtgtaattagttttataattagctcattttagtcctctaattagcctccaaatatttgatgtgacataaatattagtccggactaaagatccaaacaccccttaatcccgcacgtactttcatatcaacaagaagaatctctgtacataactatgacaatcaggaggtc

SEQ ID NO: 46127 - DNA, 289 bp, Setaria italica
  Peptide Sequence Number=SeqID_112101
gaatttcttcgattaatcgtggagtagataactctcgctcactttcgctctcatggagagggagacgccggagcccgcggcgccggcgaccttcctccgcggtgaggagggggcctccccggagtcggcgcgcgctaggttcgagcgcatgatccggcgcgtgcaggcggaggtctgtgcggagctcgaggcggtcgagggcggtgcaagcgacggcggcggcggcggggcgttgtttcgggaggacgcttggacgcgcccgggcggcggcggcgggatcagccgcgtg

SEQ ID NO: 46128 - DNA, 331 bp, Setaria italica
  Peptide Sequence Number=SeqID_112102
tgtttaattgtctgttaatgctaatgcactttttattcagtcatatgaatcttcttttgctcttgattttgacatgccaaagtatggagaactgttcatagatcatctcaagaggggagagggaaagaatatgattcagaacagcaatgaggtgcagagtttcgccggccaagataatgttctgtcgaccagcaatgcagagctttgccctgcttgcaatattgttcagaaagcatagatacattgtacattgcagtcacaaatttgtttctgattggaatgattcaatttaaatgcctcttcctttagtaaaacaaaaaaaaaaaaaaaa

SEQ ID NO: 46129 - DNA, 645 bp, Setaria italica
  Peptide Sequence Number=SeqID_112103
ttccgggtcgatattcttcagctaaagctccaattatttcaggtatgtacaatgttctagttaaatccgggatgtaaaaaactacgatgccattagacattagtggatatgatacacgtacctacatacactactacggttactctaacacaggtgacaagagtggtggtaactggtaagttacaaaagataacattccacattgctagcttgggtgcggcttctaggtcacgtcagacgcttcattttcccttcacagcttcagagttatgctgcaggatcattcctagatactgggttagtgccagtgtggagttgaggcctttggctttcttccaacagcaggcaaattgctggcattcagcttcctctcgaagcaagatggtcggcgcagaggaggtggcggcggcggaggcgcaggggcccttgtctttacacttccagtcggtgaaggagtcatgttatttgatttatatgcttgagcccgtactccctcacgcaaaccctccttgtttgactttctggaattttctaggccacggtcatctctaacattggaagtcagcattttacctttaggcaagttaaaagggctcttttgcgtccaatccacttgaaattccaccctttctttcgcatagctta

SEQ ID NO: 46130 - DNA, 2304 bp, Setaria italica
  Peptide Sequence Number=SeqID_112104
caaattactgaaatagcagccaagcaaattacttaaatagcaaatggcaactgacaacaataacaacatgataggatccacaatgaacataatagaggttcataacaacatatgggatccctccagtgcagcaagcaaggcctagggctgaatagtatgactggcaatagtagcaagcagattattactactgaccaataaacgactcgaatttcaggcaggctggctggctgcttatcttatcgaggatcaaaagcagcgctactgcatggctagcttgtagagacaagcaggcaggctccatcagcagtagaacatgacgttcttgacgctgtccttgagcgcggggaggggcctgacggctccgccggtggccgctcgggtgctgcgtgacgtcgacgagctggacggcgctccgcctccacggacgccacttgccagcgacccgctttccgagctgtcgggctccatgtagaaccgggcgcggaaagcagccagatgagcgtagtacgctggtgggacaatagatacagagcgcgtgcacctcgcataagtgtagcagaggttgttggtaagggtctgcagtgcatcagctgtgaagttgttctcatcccacaggacatggtagtgagcaggacggcttgtgcccttgatgccagcgtggctgcacaggaagaagtcaaactctgtagggtggcagatcttcgagtccacaacagtaccaggaagtatgttgccgctcctgtcaactgaattctgatcattgtggttgtgtgcaaacaaccttgtatggtgccgtttctggaccacgataaaagtcacctgtggctggtaatttgcttccagcgatgcacatgcccttcggattgcatccagctcatgcagtagaacttggtaaaactgcccttcactcacaccatccctgtagaatagtatcctctgaggcttttgaccagttgatcttttgaaggatataagaagctccctgatcatgccaccacagattgttcctctctgaggatcatgtgtcaccttatacagatcctctattagctcttgcctgtgagattgagcagaaactaaaccagcatactttgtcacctcaggccaatcttgggacgccacaacagctgcaatggaagggctgctatcttcaccaggatgaggatgggttacatccgcaccaaatatgatggtaggcctgtcagtcaccaaaggaatgcgtcttgacactgcatcaaccagtacagtattccttcctccaaccttgacatttaacttcagagcaagatttgccagtatctgtttgttcatcttaaaaacttgcttcgcacagcagcactgtgaaactatcccaaggtctatttcgcagacacgcttcaaatcaccataaagagaaccattattgtcaggaagtattcctataagcaaatcaagctccttgcgctgtggtccgagcatgttcattacatcatggaacctggctttcagagctcgctccacttgatcaggatgtgcatacataggtggaagaataggctccaaagcaaagtccattcctgaggcctggcacatgcgagcaagttcacgacagaatccgcttgcaacactctcttgcacatttcgagcaaaattgacgcagaaccagctcctgactctaccaccatttaccattttcttgttcatcatattccactgcccaactcttggcaagcagtccttctctctgccagtctcgttatatttgagccgaggagcaggtaaaatccgtgcctcaactgaagccaaacgctcactgatcttaatgccaaactctttagcataaggatcctcatggtaagagttatgattcaccatctgaattatgtcacgctcccgatcatgtgggcgctgacatgtctcctctaaaagggctcttatctgactctggtttaatctcttggagtacctctgcccctccactattttgcagacctccattggaaggtaagactaacgctgctggttgccaacctgcaggcagggcaggtaggtatgctggatggcaaagccatatgtctcttgaaaatattgtacaacagacttcactgtgcccccttgatcaacagggaaagttagctctcgagttgcctgagatgttaaaccagctattctatacttccgccgcatgttaccacggtggtaacttccaccttcactcctcttaaggccttcttgatcttgacacgttcagcatctgagaggggcctcgagtggatatcagtatttaaaagctgtgcaacaaaatctatcacaggtaatgga

SEQ ID NO: 46131 - DNA, 267 bp, Setaria italica
  Peptide Sequence Number=SeqID_112105
gtttcttgtcaagaacgagagccgactcatggccgtcatggcggcgcagaagagcgtgatcctctacccctcgctgggcgtcggccatctgaaccccatggtggagctggccaagctcttcctccgccgtggcctggccgtcgtcatcgccgtcgtcgactcgcccgacaaggactccgtgtcggccgacgcgatagcgcgcctcgccgccgcgaacccggacatcgcgttccgcctcctccccgtcccgtcctgcggcagggagga

SEQ ID NO: 46132 - DNA, 1009 bp, Setaria italica
  Peptide Sequence Number=SeqID_112106
tgtgcctccaccatcattagtgatcgtgttatgaaagatcttttcagtgatgaggctggaaactcaaactatatggaagcagaaaataagcatagccgtgctatgagaggtgcacctgcagattcactttttggccagttctgtttgcacgcactgtggtttggcaactgtaatatacgcgcaattgctgtgctgtggattgactttgtacgtgaaatccgttggtgctgggaggaatcggaaagattgcctaggatgaaaagcagttcgagcattgatctctcctcttgtcttatccaccaaaagttacaaatgcttgcgatatgcattgagagaaagaaatcactgaaccgcgagaaaggtgccggccacaaagatgaaacttcaaatgctacggcagtgaacaaaactcggaaaggatcagctggtgttgtgcctaaaatgatgctcttgaatacatttcaggaaatgcatgctccatatactcagttccttaggacgcacctttgatgaccgaggatatgcatgaagaaaggctccatgcagcagaagcttttggcaatgccattggtctatctggtcaactggaaagggatatattatcttcagatatgtctgcttttaaagctgcaaacccagacgccgtttttgaagatttcattcggtggcattcacctggtgactgggtgagtgaggacaaagcagatggtaattcgggttggcctcctaaaggaaagctttctcagcgtatgtctgaacatgggaatatgtggcgcaaaatctggaatgatgctccaccattgcctgtatccgaacagaagtcgctgcttgatcctgttcgggaaggagaaaaggtgcttcattaccttgaaactttgaggccacagcagctccttgagcaaatggtgtgcactgccttcaaatcatcagctgatatcctgaacaagaccacatatggtggcttcaagttaatgaagactaaaatggatcagctgtatgccacaatggc

SEQ ID NO: 46133 - DNA, 1239 bp, Setaria italica
  misc_feature (1140)..(1239): n is a, c, g, or t
  Peptide Sequence Number=SeqID_112107
taactaattaactaagtacttagtaattattccttgtaactaagtacctactattattagttgatcctattcagaaaggggttagggtgcttcattaccttgaaactttgaggccacagcagctccttgagcaaatggtgtgcactgccttcaaatcatcagctgatatcctgaacaagaccacatatggtggcttcaagttaatgaagactaaaatggatcagctgtatgccacaatggcgtcgacactgaaatctcttcaagggaattctgacatcagtgatttggctggagacctgaagaggctttgtcaagtctttgagcacatcgagaagttgctgattcttgctgcttccatccataggaagcttatagatgctccacgactggcgcaagcaatttttgctgattacttcaactactatcttccgaaaatgggaagtactttggaaagcatttgctatgaaaaggagttcaccactaaggaaaaagtggggatgcatgagagagatgctgtgtcaaaccttttttcctccccctactgcaaatcaatcatggaggaaagttttgagcatgggaaatctttgaatggccacgaaccaatgcaaagagaaatcatattctcagtcaaggagagaataagcaacggtcactattcgagtccgaccccattatgtactgatgatgagcagatccagacacataggatgtatatatctgggacatctaatgatctttgggttgcattgtccgtgacatcatgggattgagctgcacatatatgtataagagaagaggttgaatcgagaatttgcttagtattccgatggtgcagatctacaggtggattagcaacacagttttggcagcaaatcaaaggatcaaatcctcatccacgaaaataatactgggatatgtatgactgacgtctgtggctgtagatctgtatcttagtgccgtgagctgagtgaattctttgatttggctttctgtagagaactggagctacataagctccattttagccgagggcattgtttggagtggagtacttggaggtcgcatcgatcgtcttgtgtagtgtgatgtgacgtggagcatgatttacgctgcattctagttatgctcgcattccaactnnnnnnnnnnnnnnnnnnnnnnnnnnnnnnnnnnnnnnnnnnnnnnnnnnnnnnnnnnnnnnnnnnnnnnnnnnnnnnnnnnnnnnnnnnnnnnnnnnnn

SEQ ID NO: 46134 - DNA, 365 bp, Setaria italica
  Peptide Sequence Number=SeqID_112108
gcccctcttcatcatcttcttcatcttcatcatcctctccctcgtccctatccctccgcgagggccgctgatcctcctcgtcgacctcctcgagctcttcctcttcatcgtcggagagcaccgtgcgccccattgttctcgagagatctcaaccaaacgaacgaagaaatcgagccgagtgcgggcggatctccacaccacgccggtcgggtaccagcagagggcggaggttgaggaagagggcgactcttctccgcgagagacgacctcggcggaaggaggcctcccttgctgcggcccgtaaccccgcggcgaggaggcacagcaatgggttgcggccgaaccgcggtagaatagaggggtag

SEQ ID NO: 46135 - DNA, 473 bp, Setaria italica
  misc_feature (452)..(473): n is a, c, g, or t
  Peptide Sequence Number=SeqID_112109
aaacaaaaggaccaactagtaattagtactaacaacagctgatggtaagcgatttgaggtccctttggtgtatcttaatacaaacgtttttggggagctcctgcggatgtctgaggatgagtttgggttcacaagtgaagacaggatcacagtgccttgtgaggcagcagtgatggagtatgtgatgcgcttgcttaggagaaagccctcagaagaggtggagagtgcggtacttagctctgtcgtaaagcacaactacatgagtagcatgaccatggtgtccaagggtcttagccagtcactatctatattttagttgatgagaagcgttgtatgcatgatttgcactttgttcgggtacattttcatattatgcaacatgtagataactgtacataccccagtaaagaaggatccctgttcactccacaattacaaaaaaaaaaaaaaannnnnnnnnnnnnnnnnnnnnn

SEQ ID NO: 46136 - DNA, 327 bp, Setaria italica
  Peptide Sequence Number=SeqID_112110
caagaacaaccacagaggcagatcaaggaacaatcacagaggtctcacacatacacacacacctcgcagagatgagcagcacgacagtgctgttctcgccgagctcctccctgttcctcaccaaaccttctcccctcaccaagagcagggcggcggcggctgtgaggtgcagcaatgagccagccctttcagtgtcgcgtgaggaggagggagtagaaatgatggggaggaggcgttcattgatttctgcagctgcagctgcctgtggagcttcagtgcttgggtttgcaggggccatggcctggccgccactcaggcctgctggca

SEQ ID NO: 46137 - DNA, 193 bp, Setaria italica
  Peptide Sequence Number=SeqID_112111
tagaaacaactagtgcggcgaaaaggagctgacggcagtggattcaaaagctgtggcgtggaaaagaagcggaatcaaggcatcttggggctgaaaaaggcgctatttttcagcggctgccgtccaaatccactctcactagcgcggaaaaggactgatttctaggttgaaacccccaggcccaacgaacggg

SEQ ID NO: 46138 - DNA, 261 bp, Setaria italica
  Peptide Sequence Number=SeqID_112112
gttacaatcaggcttgtagccccgccaacaccagtcactattccaataatgtcacaatattgtccaattaatgttccttgagctgaactcgaacaaaaacctttccctcggcaaattgggaattaagagtcaaatcaggactaccatcgtaacaaccagtgacaggacaatgttgcaattcagtctttgcttcgggtcaccattaatcggggtcccagaaagctgcctctttcgcgtactacttcaatctagatggccatg

SEQ ID NO: 46139 - DNA, 422 bp, Setaria italica
  Peptide Sequence Number=SeqID_112113
tcccctagacggttaacgaacgacgggtacaccacagtccggggagtggtgccaaataacgtgggagggaggggagaggaagcggcttggacccgttgcagctttatctgcggataatggaaggattaccgaggtgttcatgctcgacggcaaccatgtctgcagactcctggtgaagcctgaggtccatggaggcagctgaagaagaagctggacctggagtttcagaaccgcagcctgcctggtgaagaagctggtgaagccagcctgtgacaaataaatgcagagtgctcaccacacccattggtttcaggaccgcagctgtccgtgcagttggagactccgttggagtcgtagatccattgacgctgaccgtttaactgtgtagattcgggtggcaaagctgagcatccaattgaaaa

SEQ ID NO: 46140 - DNA, 482 bp, Setaria italica
  Peptide Sequence Number=SeqID_112114
gcgtagcagtagcatcgttgccctcgaactcgacaaggatgacgcgaggggaaaaaaaggaacattgtaaaatcagagtagcgacgaacaacctgaaaggcagtttgcaccaaacaggtggtgtactgctactgtcgaatttaagattttagacctcccattagctgatgaagtctgctacgttgacatggcactgtcggggccacttgcctttcgtttccttggaactgtatacgtttacaaatgcagcatagcacccagcaagaaaccgaggcagattgagcaggtcgacaaaccagaaagttacgtaccctcaagacatcgttgatcaaggaagaccagaattgaactttcggcaccgtcgcaagcgattccattcgatgcttctgcgccgatttggttcatcagatgattgggtagaacgtggaatcttggtggttggcaacttggcatgagcggagcagcatcacagcctcagacct

SEQ ID NO: 46141 - DNA, 171 bp, Setaria italica
  Peptide Sequence Number=SeqID_112115
agagagactctgctccgtggtgaatgttcagatcccatatctggatcaatggagtgatgtcgaggggagcatttgagttgtctcggaggggtatcaacagctctgcataatgcctcactgcggttaccagtcattggtaatgtcaaggcaacacagggggaataggcagag

SEQ ID NO: 46142 - DNA, 488 bp, Setaria italica
  Peptide Sequence Number=SeqID_112116
gttgttccgtgggtggtcgaagctctgccacaccacgggcccgacgccgatgccgtggcgttgctccgcaccacgaggttgccgtcgtcctggagcgtggcgacggtggcgcgcgggacgaggtggcggacgcgttcgacgaccacagcaaggtgttcgatggcgtcacttggacgacaaggagctcgccgcggtcgctcagcgtgaagcgagaggctgacggctcgaggatcgggcgctctcggttggccacccacacgaccgtttgcttggagaccttcttgaaccagatgccgatgtagtacttcttggacttgccggggagaagaggccgagctcaaagttgccgcccttggagaccagcgtctggttccatgggagggactggcccaaggtgagggtgtcgatggcgccggttgtttggaggttgaagctggagaggagcaggaaaacgaggatgagcatggtggcttgcagttgcagctcct

SEQ ID NO: 46143 - DNA, 374 bp, Setaria italica
  Peptide Sequence Number=SeqID_112117
cgccggtgaagaggttgctggacatgtcgagcacccggagcgcccgcagcggggacaggtccggcacggtgccggacatgccggagtagctgacgttgagcacctcgaggtacgtgcagttgagcaggccggcggggaagccgccgcggacgtcgttgcacgccatccggagctcccggagcgcggggagggacgcgcagacgcccggcgggagcctgccgacgaggcgccacgacgtgacgtcgatgcccgtgacgttgccgccctcgtcgcaggcgacgccctggaaccggcagtagtccggcgccggcgaggagaagtcccacctcgacatgcccggcccggggaactgctccttcatcctggccaggtag

SEQ ID NO: 46144 - DNA, 391 bp, Setaria italica
  Peptide Sequence Number=SeqID_112118
gacttctcgtggacggtgttcctgcccgtgggcgcgacgcgcgaccacccggcggcgcacgtcaccgacgagaacgccgacctggcggaggagttcccgccggccatggtggtgatcggcgggttcgacccgctcatggactggcagcgccggtacgccgacgtgctgcggcggaagggaggccgtggaggtggcggagtaccccgggcatgtttccacgggttctacggcttcccggagatccccgaggccaccacggtgttgcacgacatgaaggccttcgtcgaccgccacagggccacgccgcccaagaccgacgccgcgtgatgattgatgaactggagtttctgttggttattgtgtgcgatcatgtagggaaaaaaatcataag

SEQ ID NO: 46145 - DNA, 426 bp, Setaria italica
  Peptide Sequence Number=SeqID_112119
cgaagacatctacaagctcagcttctgaggaaggatcctctcggtcatcactgtcatcttaaggatgacatttcaagtcccaactcggttctggagccacatagtggagagctccacaaggtacatcttcggcttgcctctggcatggaggatgcaactaaatgggagcctataagcataaagagcattgaaccagatggtgcttatgtgattgccagccaactaaatctcgttgaggaacagcacgggggaagttatgttgctaaccttgagatggagcttcagcaggcaagggatagggtgagcaagctagaagccgagcgggtttcagcaaagaagcaacttgatcacctgttcaagaactcgctgaggagaaagcagcttggcggaacagagagcacaagaggttcgagccattcttgaaga

SEQ ID NO: 46146 - DNA, 879 bp, Setaria italica
  Peptide Sequence Number=SeqID_112120
gggattccttgaacactcttgcatgtgttttgggtgagtgtgactccttgatgggttcttggcgggagcgagcatggttggtactgaggagtgccttgccgagagagagcttttttggactctctctataccccgtacctatgacgggtactttgtttgttatagaggagtaggtggcgtacttgtacgttgcaagtgctttggtacatacttgttggtagagtgctcgctctcagccgcctaaggaccgagtcagtttaccaccagtcacagcagctacttttcgtacttaccgctcgcttacgttatgggcggggttcggtgcaagactagtagtggatagtgctctgcctgtaggcggattggaggatcgtgtaaggagttcgaggtgttggcctgctctgaccagactgcgaccccgacgtgggtaggtttcacagcttcgaggtcctcactggtgacgacgtgccctgcagctgaggacgattccagactcgaggaaacaagatagagctatccacttactagggctctggctgttaggtggggtttgcacggctcgctaccgttcgagctccatccgtgcgggtacagttgtacaacctctgcagagtgtataaagctataactatagtccgtgtccactggttatggacagtgttgttgactaccgctacttctgactagacttttcttgtgcttctaccttccctccttttggagataggccggcgtttgctgttgagatgtgaggggagggagctctcacatcgcctggtgtgttgggtgctggacccttgggtgagggattcggtgatttgtgctgacttccttgtttgaggtgttgacctcgggatgatgtgctttgctgcttccttg

SEQ ID NO: 46147 - DNA, 441 bp, Setaria italica
  Peptide Sequence Number=SeqID_112121
tttacaaatttcaaaataaattgcttgatttatgtttggatgctggtgagagatggtatgaagacgaaattgtttccctattggtttgattggccgccatgatggctcaaactgtattagctctatctgatcatctcaccaaaattatcagctgtggatttgacaatgcttaataacgtccgcggtatattccactatccttttaaaattggtgatgtcatggcacgtaagtcgtgagaccttgtgcacctcaccgtaacaaaattctgactacaagttgacattgggctcagcgtacacactacaaagttgagatgggctcgacttgcggatcatttgctggaaatgtttgacgggccaagaaatcaaggtgggtttgcacgcgcttgggtctgccatatttgggcctgctcagacacttgtactgtagcctgtaggctg

SEQ ID NO: 46148 - DNA, 1192 bp, Setaria italica
  Peptide Sequence Number=SeqID_112122
tggcgagattttattattcatgtagtcgtatagtcccgtgagcgatgaactgacagcagcagcttaagaaaggacgctgacatcacatggaatcattgaaacatattggcttggagccaacgatttgtggacgtgatccaactgtgttcggctatggcatgttcttgtcgacaacaatttccccccttcatcacaacgggcactccagcaggtggccctggtctttgagcgactggacgcagtcgtcgaacatctcctgcagtcctctgaacttgaagcccagcccctgcagcttggacgtgttcagctgatacgtctgcttgccgtaaggtttgtccagccttcgtggtatggggaagatcgggtatcgttttgcgaggaaggagaccagctcgtcgttgtccagcaccactgagctgcataggtatctcccggtggcctcgggcgtctcgtacaccaggatatggctgctcgcgacgtcatcgatgtgaacatatcccattctcccgtagcaactgaacctggcagtgtcaccttgtaataagccaagtacatctgaagctgtaacgcataattcatgggataaactgggtccgatcacaaacgagggaagaacagtcacaaggtcaatgccattctccttggcgaactcccatgctgctttctctgcaaataccttcgccaggccataccatagctgcatcttttcacagagtggcacagagctccatattgtttcatccagtgagatatttggttgagcatcatccctgatcctcactgcagatgacgaagatgtaagaacaaccctcttcagaaatgggttcttcttgcacgatcttagcacattcagggtaccatttactgcaggaacaagcgttgcttccttgctactagagtcagatttagcgaggacaggcgatgcagtgtggaagacgccatcacaagacatcacggcttcgtcaaagctcccttcttccaacagatcagctcgcacaatctgcagcctctctttagcaccaggcaatttccaaaggtgtgccactttttggcgatttcctgggtctctgacagtccctaccacatgatatccagactcgagaagctgtttgataagccaagaggcaatgaagcctgaagccccagttacgcacactttacccttgtttgaggtcaccattttctaagacag

SEQ ID NO: 46149 - DNA, 365 bp, Setaria italica
  Peptide Sequence Number=SeqID_112123
gcgaactttggcaagcatttgccactagccttctggtcaccattgttggtgggagatggtggagaagaggtgaccgcacggccgccacatgagcagggaaccccagataggcgtcctcttttggcatcatcatcttcttggtcgtcaggatcaccacggttagcagcatctcccgagccggaggtgagcttgagtttaccggcaagagctctggcagtgtagagagtgttgagagcaagactctttgcgcacccgtctgcaggcgtgtcagcggcgtggtaggtgccgtcgagcgcgtcctggatgcggaagtagtcgagctcgtcgagcacgtcatcggcatcatgggccagctgccgcagcta

SEQ ID NO: 46150 - DNA, 494 bp, Setaria italica
  misc_feature (1)..(75): n is a, c, g, or t
  Peptide Sequence Number=SeqID_112124
nnnnnnnnnnnnnnnnnnnnnnnnnnnnnnnnnnnnnnnnnnnnnnnnnnnnnnnnnnnnnnnnnnnnnnnnnnngttagtactaattcttcaagctttattcagcacaggaacttggtaggctcatatatagttggcctaacctacatactttgttttcgagaggtgcacatttatagttgtatgcttcatatgcagccaggcttaattacaatatatataggcacaatacaataccaggtactccaggaaggttcagtaggtgggccttttcagttgaggaggggtatgggcctccaactcaaactaagtttcagtgcaaacggacgggcctgtcgaacaaccagctgaagcttacggactgggtctccttttgggctgcgcggtcgtgggccagctcctccatcctgcggatcttgcgcggcagcccgcagacgtagtcttgcgcgcgccgcccctcgccggacagcccccgcgagctccgccactcccca

SEQ ID NO: 46151 - DNA, 432 bp, Setaria italica
  Peptide Sequence Number=SeqID_112125
acagtgaacgcacagagtatataagaaacaatgcgagtaactgtcttgagaaggattacatggctaatagtccgattcggcactgtccacgggagctactgaccgatgcaaacagtttggaatcaattgaagaactaagggcttctgttccagatctcgtggcaaagttcaggttggagaacaagctggatgaagttggcaaggggaaacaattatcagatcaaaggacacgcactccaagaagtcctctgatgcctgtcaatcattacgttgagtgaagaacctagcaaattgtatgatgctcaaatgttgtaaagatggcaagatatcttgccgatttgccaccaccatatttatcatgccacagcttctgtatgctacatgcaaagattctgattagcattagatcataaggccaacaggatctgtttt

SEQ ID NO: 46152 - DNA, 450 bp, Setaria italica
  Peptide Sequence Number=SeqID_112126
actcagatcatctggaattgttgaatgaaaaacacagtgaacgcacagagtatataagaaacaatgcgagtaactgtcttgagaaggattacatggctaatagtccgattcggcactgtccacgggagctactgaccgatgcaaacagtttggaatcaattgaagaactaagggcttctgttccagatctcgtggcaaagttcaggttggagaacaagctggatgaagttggcaaggggaaacaattatcagatcaaaggacacgcactccaagaagtcctctgatgcctgtcaatcattacgttgagtgaagaacctagcaaattgtatgatgctcaaatgttgtaaagatggcaagatatcttgccgatttgccaccaccatatttataatgctaatcagaatctttgcatgtagcatacagaagctgtggctagtaggacaatagaa

SEQ ID NO: 46153 - DNA, 388 bp, Setaria italica
  Peptide Sequence Number=SeqID_112127
ccttgccggctccggcggcggagtcgtcgtcggaggcgaggaggcagtgcagctggaggctggaggtgatggccagcgcctcgccggtcttcacgcggagggactccacgtcgagcgcgtccagccggcagaccacggggttgaactggaacggcacgtccaggcgctcggcctctttggtgagcgccatggccgtctgggcgagcacgtccttgtgctcatggacggctgtgaggcggaggtgcggcgggccctcggggcgcgcggcgaggaggtggaggagctccagccactgggtggcgtcggcgccgccgaggtcgatgacgtgcacgatcttctccgactccatcgcctcgaggatgcactggttcgcggcggcgccggcgat

SEQ ID NO: 46154 - DNA, 749 bp, Setaria italica
  Peptide Sequence Number=SeqID_112128
gccgccctcacgcacacgtccgccagcgcccccagcagctcctcgtcggcctcctccaggcaccgctcctgcacctcgttccacagcaccagcgcctccccgggcttgcgcgccgccgcgacgcccttggccaggctgccgtacgtcgccacgtccggctgcaccccgcgctccttcatcctctccaccacctgcttcgccgtctccaccagacccagccggcagtacccttccaccagcatgttccacgccgctctgtcaaccgtcaccctcgggtcgcgctccatctcctcgaacaccttgtgcgccatcttgggctgccccgacatggcgaacgccttcatcagcgtcgtgtagctcaccgtggacggcgcgatgccccgcgaccgcatctcgttgaagaaggccagtgcgcccgcgctgtcgtccgtgagcacgcacccgtccatgaggatgttgtatgtcaccacgccgggttggatgccggcgcccgtcaccatctcctcaaagagctccttggccttgctgatctgcagctgttggcagtagcccttgagcaggatgttgtaggtgacccggttggccggaacaccagccgcggccatctcgtccagcacggcatgcgcgcgcgccatatcgccagcggcggcgagtgctgataccaccgtcgtgtaggtcacgtggtctggacggcttgcgggtgccgtctccgcctcccgtcgcatcgcgcgcagcatggtcaccacatt

SEQ ID NO: 46155 - DNA, 470 bp, Setaria italica
  Peptide Sequence Number=SeqID_112129
gcccgctcccgatggctccatcaagaggcggaagcgcaagcggaagcccaagacgaatgcctcagaggaggcaagatcgagggaggaggtcctctccaggatcgtcgccggcgacggcccttctccgccggaggcgcggaccgtcgcggagcgctcgttggagggccttgtcagcttcctcacatcctatttccgctacctcccaaactgggacgcgctgcgctatctcagtctggccagggccgacctcctcgtcgcagtaagcctcatccagaaggatcattgctaccggtacaaggatcagttccgaatctgctcacctgctgtcaagacttctctcaaatgcgctgcctggtctgcaaggcagcccaactttgatggctttctcgccggctgcttcgcacttgtgcctcatatcaacaagattacccagactttgtcagcagagggccgttgccgcctcactgctc

SEQ ID NO: 46156 - DNA, 250 bp, Setaria italica
  Peptide Sequence Number=SeqID_112130
ccatcttcaaacgcaaccaaggatccctgatcgcgtgagctaagatctccagcccatgggccatagctgtcaaaaattgtgttaagtatagctctgccacgagaagctgtaagaattgcattccgaagtccaatgaggcctctggtaggaatcttgtatttcagcaatgttggtggtctacagactaaaggcttaaaggttgccggattcagatatagggttatctgcagcccaaaatactactccagcc

SEQ ID NO: 46157 - DNA, 411 bp, Setaria italica
  Peptide Sequence Number=SeqID_112131
tgcaaccgtccaattgctatccttcctttgtgctcatcgtattcagtattagatacaagcatttgcagggcaccatctttctcaatgcgtggctctgggatgcatcttagaatagcctcaaaaagggggcctatgccacagacaaggtttgttctgaagaaagctctagaatttggacatgcagttgttgtagttgtaaacaagattgacagaccagctgctcgtcctgagtttgtggtgaattcaacatttgaactatttattgagttaaatgcaactgatgaacaaaccttgtctgtggcataggcccctctacagaatcaaccactagaagaactccttcaaccatgttgagaacacgctcaacctccccgccgaaatctgaatgtccaggagtatcaattatattgt

SEQ ID NO: 46158 - DNA, 246 bp, Setaria italica
  Peptide Sequence Number=SeqID_112132
cgacaaccaaggatccctgatcgcgtgagctaagatctccagcccatgggccatagctgtcaaaaattgtgttaagtatagctctgccacgagaagctgtaagaattgcattccgaagtccaatgaggcctctggtaggaatcttgtatttcagcaatgttgttccctccctcccgtgtgcctctcctatccatccgcccagtatccactcctctgcggctctgctcctcctcctcctcctcctcc

SEQ ID NO: 46159 - DNA, 3015 bp, Setaria italica
  Peptide Sequence Number=SeqID_112133
cgtgagtagaaccgtataatttgtcctcctcgcttcgtcagagagtggcgaaaggatgagcatgcctgtcgggcctcgcagggtgaagcgggcgtgcaccccgcttgtgaacttgccgacacgtcgcggtacaagctgatgaagcctctgtgccatttcggcataccatgactcgcgcggatgaaccagcgcaggtgtcaaaccagaagcccgcactgacgggatcgcagccgctgccaccgccaccaccggcgggtggacttcgtgctcccgagcgcaggtggccagcttccattacgaccatgcgccgcgtacatcggagttggttccttgggatctctttgtcagcagctgtagcagtctatgttccacatggttttctctgaagcaaccgtaatccactgatgcagcgtagcactcatcttgtagccctatctatgaatctatcaaagtgttcaattcttttatgctggaatctccagttcgcatgtgtttcatctgtttcttgtaacttacaataaacgtcttgcattgcaaaatctttgctccagtccttgctaggactgaaagaatcatgtacagtacacctatatctcctacatacagacatacatgtacccgctgagattgctgcagaaagcatgtacagcttatctgcagcccaaaatactactccagcctctctattgatgaataaagagactaatcagctgctttaatcatcaccaagttgcatataaccctatatctgaatccggcaacctttaagcctttagtctgtagaccaccaaaattgcctagttacagatttgtgtggggcaccatgtagccgtcgtatcagccctggcagtggaaaagccagcttctacctgaaactgatgccttcagaatgtatcgatacggtaatgctactttctcttcgaaatttttgggttcttgcacatgcggatgcttgcaggggtaacctccactagctcatcttcttggataaactctatgcagtcatccaaactgtagcttaaaggttcatcaagaaccactgtagtttccttgttggaacgaacatttgtagcagcctttttcttgcacacattaattgctaaatcaccaggtcgctgatggataccaacaatttgacctttgtaaacatcctggccaggttggacaaacagcaaacctctttcttgcgcattaagaagtgcgtaagaagtagtgcttccatcttcaaacgcaaccaaggatccctgatcgcgtgagctaagatctccagcccatgggccatagctgtcaaaaattgtgttaagtatagctctgccacgagaagctgtaagaattgcattccgaagtccaatgaggcctctggtaggaatcttgtatttcagcaatgttgttccctccggcccgctagcttccatgttaaccatttgtccacgccttttccccaaaagctcaacaactgaacccatgtactcctctggaacctcaacagcagctatctcataaggttctagttgttttccatccactgtcttgtttatgacctttggaggtccaatcataaattcatatccttctctccgcatgttctctatcaatattgtgagatgcagtgtgcctcttccactaacaaggaatgtatcagcagtctccccatcttctactttcatagccaaattcctttcaagctcacgatataacctgtcacggagatttcggctagtaacatatttcccctcctttccaacaaaaggtgatgtattgatggagaaagacattctgactgttggctcctccactttgatagtgggcaatggtgttcctgtaactttatcagcaatagtttccccaatcatgatatcattcattccacatacagcacaaatgtcaccggcaccaacagattcaactggaacacggctgaagttctgataaacaaaaagctcacttattttgccgaccctgcaagcatcatcaggtgtacaaaccttgacttccaagccacgctgaagttcccctgcatgcaaccgtccaattgctatccttcctttgtgctcatcgtattcagtattagatacaagcatttgcagggcaccatctttctcaatgcgtggctctgggatgcatcttagaatagcctcaaaaaggggtcctaggtcatcagccaaattttctggatctaacccagcctttcctttaattccacttgcatagactgtttggaaatcacactgttcatcagttgcatttaactcaataaatagttcaaatgttgaattcaccacaaactcaggacgagcagctggtctgtcaatcttgtttacaactacaacaactgcatgtccaaattctagagctttcttcagaacaaaccttgtctgtggcataggcccctctacagaatcaaccactagaagaactccttcaaccatgttgagaacacgctcaacctccccgccgaaatctgaatgtccaggagtatcaattatattgattttagtacccttataggttattgatgtattcttgctcaaaatagtgattcctctttctctttccagatcattggaatccattattctttcctgcacaacttgattatcccggaaaaccttggcttgccttaacattgaatccaccaaagttgtcttcccatgatcaacatgagcaacaattgctatattcctcacatcccttctagttgcttgagtactcttccctgcggagggagccggggaggcggcgacttccttgacctcctgctcgagcgaggcggaggccctgagggagcggggcctccgtcgtcggagcgagcgggggacccgcagcaggcagggagaggacccgaggtgggcggagctggccggcggcggcgcggcgcggcgggcggaggggacgccccgcagcgtgagggtctgctgcatctgcatggcgtggcggcgggtggtaggtggggggggccgcggcgggtggctgcggatggggttggggtggttttgtaaggcggggcggggagcg

SEQ ID NO: 46160 - DNA, 648 bp, Setaria italica
  Peptide Sequence Number=SeqID_112134
gtgtctccgactcagtcgcactagtggcgcgtgaagacggactggtcgcacgcgccgttcgaggccacgttccgggaggtgcgcgtggacggctgcgtgtgggcggccaacgccaccgacggggacgccggcgaggtgtcccgctgcaccgggtcgtcgtggggcaaggagggccggtactggtggaaggagaaggagatgtcggagctgagcgtgcaccagagccaccagctcgtgtgggcgcgcgcgcaccacctcgtctacgactactgcgtcgacaccgaccgcttccccgtccagccgcccgagtgcgccggacgctgatcggaggctgatctgatggatcatatcatcttcttcgctgggatgtcgatcgattatcatcgatggggtcatggaactgctggtttcctttcacctctctggcttcttgcgcttgggaatgcagcaatggctgtctgtactctgtagtgaggctttgcattggctgccgtgtgtggtgattctcggggtgggttgcgtcagtggaggtgtcttttgtaaaaacatgtcgatgatgggaatgaaggatgctgcggcgctctgttaaccaaaaaaaaaaaaaaaaaaaaaaaaacaaaaaaaaaactgaagactacgaccgaagga

SEQ ID NO: 46161 - DNA, 1164 bp, Setaria italica
  Peptide Sequence Number=SeqID_112135
tcacagcggcagcctccctcgctgctgcagagcagaacacaccccagtaacagagcaagcgcgtgggaagaagtgtgccttcgtggcaatggcgttgcggaacggaggtcgtcggggctggggcgcggcggcgtcgctggccgtggtggtggcggccgttgcggcagtgctgggcgccggggctgcggttgcggcggcggccaagttcgacgacgtggtgcagccgagctgggcgaacgaccacatggtgtacgacggggacctcctcaagctccggctcgacgccaactccggcggcgggttcgtgtcgaagaacaagttcctctacggcaaggccagcgccgacctcaagctggtgccgggggactccgccggcgtcgtcaccgctttctatttgtcttcgggcggggagaagcacaacgagttcgacttcgagttcctggggaacacgagcggcgagccgtacctggtgcagacgaacctgtacatcgacggcgtgggcaaccgggagcagcgcatcgacctgtggttcgaccccaccgccgacttccacacctacgccgtgctctggaaccccagccaggtggtgttcatggtcgacgacacccccatccgcgtctacgagaacacgtcctcccgccacgtccacggccaccaccgccacgccgccaacaccagcaccaccgactcatcgccgccgccgttcccggggccgcagccgatggcggtgtacagctcgatctggaacgcggacgactgggcgacgcagggcgggcgcgtgaagacggactggtcgcacgcgccgttcgaggccacgttccgggaggtgcgcgtggacggctgcgtgtgggcggccaacgccaccgacggggacgccggcgaggtgtcccgctgcaccgggtcgtcgtggggcaaggagggccggtactggtggaaggagaaggagatgtcggagctgagcgtgcaccagagccaccagctcgtgtgggcgcgcgcgcaccacctcgtctacgactactgcgtcgacaccgaacgcttccccgtccagccgcccgagtgcgccggacgctgatcggaggctgatctgatggattggtattctatttatttcttatttcttttcttttcgttatttgttatttaatttcgttatttcgttactta

SEQ ID NO: 46162 - DNA, 960 bp, Setaria italica
  Peptide Sequence Number=SeqID_112136
cctagcacatgtgaccaaagacagttggtgaagaatctttttcgtcttcgtttaccctccattgcctctttcttatcatgacagacatggcacaggaaaggacctttgccaaccttgtagtttttccatattgcagtgggttggcatgcagtgaaatcccttgcccaggtttcaaccgtgacaaacaaactgcacaactagagcgcccaaaatttttctcaagtgcatatccggtggttagccttttagaaagcattgcagagccatcttcaaatatttcttccaccacgtctggttcagcatattcactatctgttttaaagggcacatctggagatttttgcgaaacatattattgaacgcaattttcccctgcctcttaggaggagttggagctaatttttctggaggtagtatatcaattacgatgcaagtagtatcatccctgattcctcttggccggattgcttcattaacaattcgattggcagctacatctgatgggaacccgcgagaacagtcaagagccatttcacaactcaaatcgtcccaaacaccatcacttgcgatgataattctgcctccagcattggaaagcttcacttgcttaacatgtggaacagggatgatacattcaccaacatcaaaatcccctatcgatctagatagacacaagccacctggccaacatctcagaggaccaacctctgggccaccgacaatatccattttcccaaccttactcccacatgcagttactcgttcaacctcatcagggttggagtcgaaacgatgatcagcagataaatagtagaaagaaccatcagcagattctagtatgcaacgtgaatcaccaacagatgctaccgttacaacccactcgtctacaatcacaaatgtcacagttgtaccagaagttccggctagcctctggaaatctttatccgtcttgacaaacgc

SEQ ID NO: 46163 - DNA, 495 bp, Setaria italica
  misc_feature (183)..(183): n is a, c, g, or t
  Peptide Sequence Number=SeqID_112137
gagaccatcccggtccgggaacagagctcaaggaacttgatcctcccaaggggcttggtgagtaggtccgcaagctgatccttggtgttgatgtagctcgccttgatacttccttccttcaagcagcctcggatgaagtggtacctcacccggatgtgcttgctccgctcatggaaaacgggnttctttgccagggccagagcggacttgctgtccaccctgagctccaccgctgtagtgtctctgccaaggagatcaccgagcagtcgggcaagccaaagcgcctgagtcgaagcagtggaggccgctatgtactcggcctcgcagctggacagcgccaccacctgctgcttgatcgactgccagctaacgaggcacttgccgaggaagaagagaatcccgctcgtgctcttgctggtgtcgatgtcgccggcgtggtcgctgtcgctgtacccgacgaagtgtgccgccccgggacacccgtcgggtaacggg

SEQ ID NO: 46164 - DNA, 1121 bp, Setaria italica
  misc_feature (80)..(80): n is a, c, g, or t
  Peptide Sequence Number=SeqID_112138
aaaggaaattgcctttttcttggtaagagtttcaaatcacgccacatgttagcccactcattgtctgatcgaacaggttnacgtctgccaaatttggatagaagcagccgtataagtttgcttttacattcttcttatctaagtgagcactaaggaagaaatgtgttgtaggaacctctgataataagcaaagagccgtcctacttctacatggccttcagcaacttttagcctcttctccaatatatcaagatatttgacattattaagtttgtaagatgccgaatcatagtgataaaaatcttctggaccattgcccagagcagataagatatcagcacacacacattgcatctcatcataagaaaccacagaagaaccaagagcttgcttagcatctttcagattgcattcttcttcactagccaataaagatttctctcgttttgttttatggagtaactttgataatatcgatgacatggtattccactggttagttgcactgcacatataaatgcagtgaacagatgtttctatcatttcagcaagatccttgaagagcccatatattggtaactccccacaaccattttcaacgacggctaagcaaatggaaagctcattttcagcagctacctctttcagccatctaaccaggtaggattcttcttgtttgcgttcattacttgaggagatcaggtgaaatctcttcttcataaaagggattgcattttcttctagccgttgaacaactgtatcttctttgactcctttgaggatgattttgaacttctcataatcaggcagatcttcccatgtcacaagattcattataaactcattcaactcattagaatatacaacttggtagaggcatttaatgtcatcaaagaatggctgcaactctgcaatgcccttttgacatgcaagctctatcatggccagacaattttccagctgtccactcaagcagtcaatgtcccttgctctgttcttgtaccactcacaaagttcagcaacagaaggccatgaaaatcctgtagattgttttacaagtatttccgtttgatctctccaatcttgtctgactgggtagacaattgcttatatacgaaacc

SEQ ID NO: 46165 - DNA, 408 bp, Setaria italica
  Peptide Sequence Number=SeqID_112139
tcttgtttcctagtttttttgtctttatgttttattataatttaatttatcagttgtatacttctgtaatgttgtatatctagttgcaagttgttttgtaaaagaatctggtgaatttatcttgtatcaaaattctgtaggttattcatgcacaaactattaggttgtcatttgtggaatatttacatagttaactatcgccaagagaacatactatggtggttgtctcaatatctaaaccacaaacatacaattaaatgcttggaaggtacatagcatttgtccctttgattagttagttactgattcattaggactgattggtagcttgcctgtgagatgattcttctgttaatattggtacatagatattgtggtaccttaccattgattgctcttttacgttct

SEQ ID NO: 46166 - DNA, 200 bp, Setaria italica
  misc_feature (179)..(179): n is a, c, g, or t
  misc_feature (191)..(191): n is a, c, g, or t
  misc_feature (193)..(193): n is a, c, g, or t
  misc_feature (195)..(200): n is a, c, g, or t
  Peptide Sequence Number=SeqID_112140
attttcttttgatggtccaccgatcaacaaaatgtattttactagtagtctgaactgagcattgatgtaagcgaacacttaagctacagttttgttttctagtaaacatgctagatccatagggccataccttgagatatttccaaatgctgaaaaccaaaaaacaaaaaacaaaaaanaaaaaacaaaananannnnnn

SEQ ID NO: 46167 - DNA, 453 bp, Setaria italica
  Peptide Sequence Number=SeqID_112141
tagatgcggcaatgataattagcagggttttgaaattgtgggctatcacagtttcagttttgggccttgggcattcatgcactaaaccagctaatacgttgtatgccataatttttttgagctagtcaattgttggttgatatatcaagggtgctagggtatttggccagttctaattggtactctttaccaaaaagaagcacgatgtgttatttgctcgagcgcttttttgaatttcaatttttcttcattttatacctttttacatcacaatttcatttttcaaaaagttttacaaaatattttaagttagaatttttttcttaatttttagtaattgattcattcaaagttttctactttatctactttatttactactgtcagttcaagatcaggttccacggtatagcaggggcaatgccagtttcagtagtatccaaaatttagaag

SEQ ID NO: 46168 - DNA, 645 bp, Setaria italica
  misc_feature (564)..(645): n is a, c, g, or t
  Peptide Sequence Number=SeqID_112142
gttaaattcgccgcgcccttaccatcacgacaccagagggcccccggcctgacgcgcgagacctcctctctgctcgtgagaaaatggcggcggcggcggaagggctggctgcctaccggttggtgctgcgggcggcgcgtcggacgttcgcgggcgaccggctgatgctgcaggagtcggcggtggagatccggcgccgcttcgaggaccaccgcggcctcgccccgggctccgacgagttggcgcgcgccctcgaagacgcccgcgaggccgcgttcttcatcggccacgggatagtccaggccacacgcgggccctccggatccttcgttgtgaagcccgagagcgcacatgctggagctacactggaggttccttccgaggagatcctgtcaaagttgaaataggggaaagcactcggctttacaaggattgatacaaagaactcacacccatattcagcctagtgataataagaacaattttgcatcctctggcttgtaggatcgtattactggtgtactgaatagtttcatgcattttccctgtaaaaataaaaaaccnnnnnnnnnnnnnnnnnnnnnnnnnnnnnnnnnnnnnnnnnnnnnnnnnnnnnnnnnnnnnnnnnnnnnnnnnnnnnnnnnn

SEQ ID NO: 46169 - DNA, 409 bp, Setaria italica
  Peptide Sequence Number=SeqID_112143
aaaataaacaaataaactgaagtaaggcttaaaactagacccagttatattaatagttgttatgctcttatatgtttacattgttgttcctttaccgtccagtctgcgatcataactttcataaatggctttgcagttgtgaagcccgagagcgcacatgctggagctacactggaggttccttccgaggagatcctgtcaaagttgaaataggggaaagcactcggctttacaaggattgatacaaagaactcacacccatattcagcctagtgataataagaacaattttgcatcctctggcttgtaggatcgtattactggtgtactgaatagtttcatgcattttccctgttaccctcctattcagagcgtttttttacagcaccgagattgtggagtttctggg

SEQ ID NO: 46170 - DNA, 500 bp, Setaria italica
  Peptide Sequence Number=SeqID_112144
gggggtagtatttttagcttgtgagaaaatggaaagggaacaccatagcacaacaaaacaggtccttttgcacaccatttcttgtaacctaaggagttcaccaatcaccataattaaatttaccctaacaattagctcacttttcttttggagattgcttacaggaactagaactagacaagtcaaacacagcagaaattggaattcaggctatgactgtgatggtgggaggtggtagatgtaaaaacataaagaagaatgtgaaaactggaccgtgtcaggggtgtcaggtgtgaattggtgcccctagcaggcactaccaaccctctttagttcaattaatagggccagcttttcaaaatgtggcacaatttgaaacctagcactattaattgaaataaagagggtgggtccgtgttaacccctaggggcaccaattttcacccctaaccatgtgaaatttactggactttagcttgatttcagttttttaaataaat

SEQ ID NO: 46171 - DNA, 312 bp, Setaria italica
  Peptide Sequence Number=SeqID_112145
accacctcctcctccgccccggtcccggggtccaccctggaggcgtagaggaggtggaggaacgtgaggacggcgtccgagggcacgccgagcacgcggatggtgcactggccgccgcgccacgccctgtcgatcatcctctccagcaccggcgacgccgaggcctgcaaaccgaaacgatcagcaaccacgccagggggaaacagaagcaatccgatccgcgaaagatgagccggcggcttacgaggacgtaggagtgcgcggcgatggtctggccgtcggaggtgacgatccgcacgtcggccgccgacg

SEQ ID NO: 46172 - DNA, 801 bp, Setaria italica
  Peptide Sequence Number=SeqID_112146
cagctggaggagctccagctccagcgccgggtcgtggcgccgggcgaagcgccacccgtcggaggcctcgacggcggcgaggtccctgtcggccacgcgcgcgcatgccgcacgcagccgcggcgcgtcgcaaagccccgccagcttgagcatgtccacggcgcggtccggcgtaagccgcgccgacacgaccgcctccgccgcgcgcttcagccacccaacccggtatgcgtgcgccagcgccagcagctgcggcccgtgcgccgccaccacctcctcctccgccccggtcccggggtccaccctggaggcgtagaggaggtggaggaacgtgaggacggcgtccgagggcacgccgagcacgcggatggtgcactggccgccgcgccacgccctgtcgatcatcctctccagcaccggcgacgccgaggcgaggacgtaggagtgcgcggcgatggtctggccgtcggaggtgacgatccgcacgtcggccgccgacgcccggagcgcgtcgaggtccgcgtacagcgccatggattctcctcccctcccctgacccctgcctgagaccctgccctcctaagtaatcgatcgaggcagcaacaaaaggcgcccctgcccaagggcgaatgaaggctgacagcctggcggcgagcgcgatcttaacgaaccggcgcaagaatggatcgtctcccaagcctcgtggaacgcaacgacgaacggattcggagatggagcagcagctcgagctcagcgacagctatatagggagcgggggaggcgggaggcgatatctctgcg

SEQ ID NO: 46173 - DNA, 442 bp, Setaria italica
  Peptide Sequence Number=SeqID_112147
ttacaatgatccagctttagatcaacaagttagtagaaagcgtccaaaacttgaagtccgcagaggagagacacaaatttcacacatgggggaggttggccagactgcaaaagaggacccaaacccaaataatcttcctagtaactctgtcatgcatgaaactgtaggtgcattggaagtaataaatcagaataatgctggcacattccctggaaattctggtgccaatgagaccacagcatccggtagtgccaatccagctttgcagaatgctagacttgagttagattcattcaagagttcacggcagtgttctgcatacattgaagcaaagggaaggcagtgtggtaggtgggcaaatgatggtgatatttactgttgcgtgcaccaaagtatgcattttcttgaccattctaggaggacaaggcacttactgttgaag

SEQ ID NO: 46174 - DNA, 256 bp, Setaria italica
  misc_feature (256)..(256): n is a, c, g, or t
  Peptide Sequence Number=SeqID_112148
tgcagttccggcaccgccagcgagggcgatggtggcggcaatctgcgcttgattcattgttggctctcggctgtgggctgtggcaactcgctgctactactagcaaaggaagcgcaagcatcagaaactcagatgactagatgaggatgggctaggtgggtggggaggctattattttatagtcgagtagtataggtgaaatggtctggttgtttggctttacgcctttttccctccttccaaaaaaaaaaaaaan

SEQ ID NO: 46175 - DNA, 617 bp, Setaria italica
  Peptide Sequence Number=SeqID_112149
tcctcagcagggatgaaggatgatgaagagatgctaaagttgcacaattgtccaacatggctagtaaaagtcctgggtatagcctcatcatacaggaaagaataacacggaatgagcacctccaggtgcagataactggcataactggcatattgtaagacaggaatataggattcacaaaggaacaattctaatgccaagagtagatgtcaatttttgatatgttttgtatgccattgcagagtcagtaattggaactgagatagcatagcacacttgggcaaggacatttttcatttttaatgcctaagtatatgtggatatctgataagataattactgatatgaagattaaggagcctgttgatctggatcaactatttgactctggagagtcaatgatgcttctgcaaataatgcatctgctatcatgacatgttgtgcaacaagaaaatcctttggtgctgtgtgctttcaaccttcaggaatatttgtgcaagatataatcttctcatccattgttagagaagagagtcatttagtgagtgtattggaggaggaggaacagcatgaggcaaaggcttccacccggacctccaacatggccaatctttggt

SEQ ID NO: 46176 - DNA, 415 bp, Setaria italica
  Peptide Sequence Number=SeqID_112150
gtagccttggcattggccgcggcgaaggagctggcggcaaggaggaggaggaggagcgggagaagcataaggggcggcggcggcggcaacatcggcggctgttgcggctgtattgacgggccgtattaattgccgtcagcccgtggtgcacagcctgtacgaatacgactccaccgatcggtgatgaatacagagcctcaaatggattgaaactacggaattgcacgtcacaaattcagaagtatactattgtcgtcaattttaggtgaaaaactttgcatttcgagcatcacgtcatcgaaagtctctgatcagactctgaagtatgtgcccaacaggccaaacaccatcactcctcgagtccatgtgtccttctgaaagtgttgttttcatggctaaaaaaggggtccaagtt

SEQ ID NO: 46177 - DNA, 367 bp, Setaria italica
  Peptide Sequence Number=SeqID_112151
aagacgttacaaggaagaatttaaagtaagacaaagaccaagaaataatagaacctgtgcggtttcagagatgtcttccgccagtattgctttagtataatgcataggtggcttaaaccatgtttgaacgaattatgaagtttgagtttgaaaagtctaatgttggaagtggtgtattggacctatgatcctgtggtttaatggtactcccctgtggagaagataacggcctatcataggtccaaacaccacttccaacattacattttcaaactcaaacttcataattcgttcaaacatggtttaagccatctatgcattatactaaagcaatactggcggaagacacatctctgaaacatctctg

SEQ ID NO: 46178 - DNA, 500 bp, Setaria italica
  Peptide Sequence Number=SeqID_112152
ggggacgggagaggagggtgaaggcggaggagagggtggtggacgccatggggacttgctcggggagctcgggcctcggcagtgagcagcggcggcgggaggaggcgggggataagaagatgaggcgggccaagggcgccgtcaagttcaaggtgcgctgctccaggtacctctacaccctctgcgtccacgacgccgacaaggccaacaagctcaagcagtcgctcccgcccggcttgagcgttcaggagatttaagtagcaagccagaatatgccttgtgcggtttcagagatgtttcagagatgtgtcttccgccagtattgctttagtataatgcatagatggcttaaaccatgtttgaacgaattatgaagtttgagtttgaaaatgtaatgttggaagtggtgttttggacctatgatcctgtggtgtaatggtactccccttgttggtagtaagtattaacggtccttattctattatttgttcttaaaaaaa

SEQ ID NO: 46179 - DNA, 693 bp, Setaria italica
  misc_feature (619)..(693): n is a, c, g, or t
  Peptide Sequence Number=SeqID_112153
ccctctcttaacccgtccgccgccgccgccccgctcagttctccgcgggtttgttcgcatcagcagcgtcttccacccgagctgccaccatgccgaagcagatccacgagatcaaggacttcctgctgacggcgcggcggaaggacgcgcggtcggtgcggatcaagcgggccaagggcgccgtcaagttcaaggtgcgctgctccaggtacctctacaccctctgcgtccacgacgccgacaaggccaacaagctcaagcagtcgctcccgcccggcttgagcgttcaggagatttaagtagcaagccagaatatgccttgtgcggtttcagagatgtttcagagatgtgtcttccgccagtattgctttagtataatgcatagatggcttaaaccatgtttgaacgaattatgaagtttgagtttgaaaatgtaatgttggaagtggtgttttggacctatgatcctgtggtgtaatggtactcccctgtggagaagataacggcctatcatattgttctaagtctgaattttgtgtccccttttcagatttctgctctgttccaaattctgagttgcccatcataatttataagtgtacctgcaaaaaaaaaaaannnnnnnnnnnnnnnnnnnnnnnnnnnnnnnnnnnnnnnnnnnnnnnnnnnnnnnnnnnnnnnnnnnnnnnnnnn

SEQ ID NO: 46180 - DNA, 418 bp, Setaria italica
  Peptide Sequence Number=SeqID_112154
gtagtaaggtttggtgccattttagctagttttaggactgcaaatcgttaagcaaccaaaattgtgttatgcttatttacatgttccacgttcactattctatttgaaatttgaccagattaactctggggagaccatttatgttcccaaaggactccataacacaatatacgttctaacttttaaggaaatttgttttatataccgccaaacttttccgtacacttaagtagcagcaaatcttacctcagcaaacttgatggcatgagaatccgctgcctcaggaatcgctggcaggagaagcaatgtgtttggcgttcttgatttttcaagaagcctgctgctggaggggagccacgcgcggaggagatgcagacggaggggaggcgtgccgcggtcggagatggggccgcacgcg

SEQ ID NO: 46181 - DNA, 702 bp, Setaria italica
  Peptide Sequence Number=SeqID_112155
cccgaaatgaaactagaaattctaaaattacagtgtgtcccaactcccaaggcgacaatcaagaaatacaagcttatgttgatatgatagttctgcattgtttgaagctgagtcatcactcatcaaggtgtgtgcagttcctaaacatattcagaaatggactccaccgccggctggttggctttgcctcaatgtggatgcagtcttctcttcttcatcaagttcagcagctgttgtcgttgtgcgagaccatatggcagatttttgatgggttgccgccggtcttttcagggcattactgtgcgtgaggatgcggaagcacttgctcttcggtgtgttatggttcttgctcttgttgaaggttttcacaaagtgattatccagtcagattgcttgtcactaatccagaaaggcattgtccctaatagggactgctctgtgattagtccttttgttgctgatatcaagtctttagctaccaaatttgtttgtattactttttcttcatgtaaaccgtagtgctaatgaggtggctcatttgttggctagggagggtgagctcattgcttactcaatcttccgacattatgttcctggttgcatccaggatgttgtaaactctgaaagtttgtgttaatgtatgggctgaccttgagtattcttaaaaaaaaagtctttactttctagttacttcgtaaaaaa

SEQ ID NO: 46182 - DNA, 604 bp, Setaria italica
  Peptide Sequence Number=SeqID_112156
aaatcgcctggttttaagatgatagagttgaagaaatccgtcctgccaccatcagttgtgcagctctctagcttcccacgaaatataaatgtcatcaccttcacgggtcctccttcgtggataatgtatgtgccctcagtacaaataataaaaaataaactccaacaaatagcgtcaagtagttggtggtctattgcagagaagagtggcacctaaaatttcaatggaaagattatggtctggttcctcattcaaatatcaagtagaaatgtaaaatagatggttgccattattgcagaatatgttagcaacaaccagaataccacttacacgttgaacaagatcaaggcatagccactgttttatttttcgacgaagatcaacaggtagctgtttcaggatcgagtcctcttcaactccctgtgttgaaatccacttgtactccaagaactagcatatgcgattttgcaaatcatcagattggaccaagataataaaaaacagaggtgtcaatatgtctgaagctcaaacatgacacgcaccagcggaactggtaatgctgctgcaaggtcgatgaagaaattcgttctgatgtatctgtatg

SEQ ID NO: 46183 - DNA, 593 bp, Setaria italica
  Peptide Sequence Number=SeqID_112157
ccgagctcgcgctgcggggaagccgcgccggggagtgcgacgccgagctgcagcgcgccgccgcgctctacaacccgcagctcgtcgacatgatcaggggcctcaacgccgacctcggagccgacgtcttcgtcgccgtcaacgcccaccggatgcacatggacttcatctccgacccggcggcgtacggattcgtcacctccaaggtggcatgctgcggccaggggccctacaacggcgtggggctctgcaccgccgcatccagcgtctgcccggaccgcagcctctacgcattctgggacaacttccaccccaccgagagggccaaccggatcatcgtcagccagttcatggacggcacccaggagtacatgcacccgctcaacctgaccaccatcctcgccgtcgacgcacgcgcagccgcagcagcagatgccaccttcaactaatataatatatgtgctatatgtggatcatacatgatccatccagtagcaaatacctggtacgtgtacggcgcctgctgagaagctggaataaaaatgagcattgtgcaattgcagcaagacaccctacatatatgtgtatcactc

SEQ ID NO: 46184 - DNA, 668 bp, Setaria italica
  misc_feature (594)..(668): n is a, c, g, or t
  Peptide Sequence Number=SeqID_112158
agggcaacaacaaaaaacacaatcaaccggtaaagtcccagtccacccaagagcacgccaaaagatgacccagctaaagactgctgccctcctggctgcgacactcctcgtcctcctcgccgctgcagcagcagtttcaggccaaccatctcctcattttgacgtcccaaactgccagaatgacatcgacgcgctgtggcgcacctgcaagcagtacgtcaagaaggaggggcccaagcagaagccgtcttcggactgctgcaaaaccgtgcaggctgcagatgcccattcgtcctgcatctgcgattacctgggctccccagacgccagggagaatttaagcctggagaaagtcttctatgtcaccaagcagtgcggcgtcaccatccctgcaggctgcggatcaaagaggttctgagacaaggaactggctgaacctgaatgaaggagattggctaacacacacaaggcagctagaaaatgctcaaagtaataaataaagttggtcaactgttagtttgatgatgttggagaacaagaactgtactgatgttcacacatatataaactctaattaattacatgattatatannnnnnnnnnnnnnnnnnnnnnnnnnnnnnnnnnnnnnnnnnnnnnnnnnnnnnnnnnnnnnnnnnnnnnnnnnn

SEQ ID NO: 46185 - DNA, 312 bp, Setaria italica
  Peptide Sequence Number=SeqID_112159
cacacatggctgccggcgagacgacgacaccgccgttcagttccgtgcacgtgaacaggcgcctggccaccgccaaccgcctcatggcggccgtccacgcagcgctcgccgccgcggccatcgcccaccgcgccctgcacctgcatcagctcagcggcggcgtggcccgcaacgccgccatggtcgcggcggacctgacgctcctgttcctgtggacgctgtcgcagtcgggcctgtggcggcccgtctcgcgcgccgcgttcccggaccggctgctggagtcccggcggcgcggggacctcccggccgtgg

SEQ ID NO: 46186 - DNA, 406 bp, Setaria italica
  Peptide Sequence Number=SeqID_112160
gagcagagcagccatgagctccccgccgccgccgaaagaccacagcaaggggaggtcgccggcgctggagctgctggacgagtactggttcttcagcaacaccctcgccaacagcaacaacaagccgcccaggtcgcctaacaataaggattgggagcgaagggaggacagcaagggctcttgctcggccgggctgtcccggttgtacgcgtcggggggacggaggctcctccggactccgtcgctcccgtcgccctccaagttgtccaaggatgtcgacgacgacgacctggcgccggtggcggcacggcggcaggacgcagctggcagtggcaatcgacagcagcaacaagaggagcacgaggtggaggaggacgacctcaactggagctccatctacgagggc

SEQ ID NO: 46187 - DNA, 522 bp, Setaria italica
  misc_feature (445)..(445): n is a, c, g, or t
  Peptide Sequence Number=SeqID_112161
agaggactcgagtgagccgcggggagctgccgccgcgccacagccaccgcaggcgatgaagcgcttcttccagcccgtgcaagttcctgacgtggaacgccaacagcctgctccttcggatgaagagcgactggcccgctttctcgcagttcgtcgcccgcctcgatcccgacgtcatctgcgtgcaggaagtgcggatgccggcggctggttccaaaggggcacctaaaaatcctagtgaactgaaagatgacacaaactcatcacgggatgaaaagcaggtagttctgcgtgctttatcgagttcacctttcaaagactaccgtgtctggtggtctctttcagattcaaaatatgcaggaacagctatgtttataaagaaaaagtttgaacctaagaaggtgtcttttaacttggataaaacatcttcaaagcatgaaacggntgggcgtgttataattgtggaatttgaatcgtttctcttactgaacacttatgctccaaacaatggatggaaggagg

SEQ ID NO: 46188 - DNA, 1989 bp, Setaria italica
  Peptide Sequence Number=SeqID_112162
ctttccccaccaccgcccgatggcggccgccacgccgccgcggccaagcgaggaccggccgggcgccgggggcctgctggatggggaagtacgagctggggcgcctcctggggcacggcaccttcgcgaaggtgtacctcgcgcggcacgtcgggtcgggggagagcgttgccatcaaggtgctcgacaaggagaaggccgtgaagagcgggctcgtctcgcacatcaagcgcgagatagccgtgctccgccgcgtgcgccacccgaacatcgtgcacctgttcgaggtcatggccaccaagacgaagatctacttcgtcatggagctcgtccgcggcggcgagctcttctcccgcgtctccaagggccgcctcagggaggacaccgcccgccgctacttccagcagctcgtctccgccgtcgcgttctgccacgcccgcggcgtcttccaccgggacctcaagcccgagaacctcctcgtcggcgaggacggcaacctcaaggtatcggactttgggctctccgccgtcgccgaccagttccgccccgacggcctgctccacaccttctgcggcacgccggcctatgtggcccccgaagtcctcggccgccgcgggtacgacggcgccaaggcggacgtgtggtcctgcggcgtcatcctctttgtgctcatggccggctatctccctttccatgacaagaacctcatggccatgtacaagaagatttacaagggcgagttccgatgcgcgaggtggttctccaaagaccttaccagcttgctgatgcgcattcttgacaccaatccgaacactcggatcactttgcctgagatcatggagtcccgctggttcaagaaaggattcaagccagtcaagttctatatcgaggatgataaactgcacagcgtgatagatgatgaggatggcctgttggacatggggcctgctgatcctgttcctcattcactgccatctccaccacgacctctacctccacaaaaggttgatggagatgattcagggtcggaatcggactcatcgatctcatcctgccctgcttctgtgttatctgatgagagccagaggtcccgtgggtcactcccacgcccagcaagccttaatgcatttgatatcatatcattctcaaggggattcaacttatcagggttatttgaggagaaaggggacgaggtgaggttcgtctcggctgagcccatgtcggatatcctaatgaaattggaggaaattgcaaaattgaagagtttcaagttgcggaggaaggactggcggatatgcctggagggtactagggagggagttaaggggccactaacaattggtgcggagatatttgaactcacaccgccccttgtaatggtggaggtgaaaaagaaggcgggggataatgaggagtatgaggacttttgcaacaaggaattgaagccagggatgcagcaccttgtccaccatatggttcgaactccaagtatgcctactgatgccaagtaggtcaaaaggttttcaaggtaacaacggcacttcagttggagctaatggctagcggaggggacattcggaacggcatgaggctagagatagagttgagcgcagctgacccgaagagatcctgtagtttggacagaaaaaaaaggttgaccattttcccgctgctgtagttcggccgccgttgacgagctcctcatctcatgactgaataagtctgctcctccgcgatggagggagtggggagattgtggctgtactgtacatattccggatggttggttggtacttggtacgatggtacctgagaataggttgttgaatgtactatcgcaggttggtgtacacctgctgtgggtttaggggtgtttggatcattgagctaaagtctagtcaatgtgatatcgaattttcggaggttaattaggaggattaaaacataaagttaattataaaattaattacacggatgttcatgattgga

SEQ ID NO: 46189 - DNA, 471 bp, Setaria italica
  Peptide Sequence Number=SeqID_112163
agagttgctgatcacagagtggacagagctgagtgacttgcaagagagaatgcggcacctcacctctctcgaggagctgtctttgtatcagtgtccaagcattacagagcttccagaatggctgggcgatcttgccgctctcaaagaaattgtgatctcagactgcaggggcatcaagtatttgccaaagagcgtattcaaggtcagtaatctgaaagaaataagtatttacgactgccctgattggtgtgaattagaggaaaacaagaagaagctcgttcacatttgctggaaaggacatcaatattaagagcaaggaagtcactgctgtgccatccatccacaagaacaggaatcataaatttgaacaacgaattcaaaagtttcaccaaggctgattgagttccatgaggttgaaggaagatcatgggtatttctggtccatggcactatctgtgatgaaatattttt

SEQ ID NO: 46190 - DNA, 505 bp, Setaria italica
  Peptide Sequence Number=SeqID_112164
tggctttctatcctgttcaacttgttccttaatactgatgccagaaactggtaattgaggttgactaatatgcaccagttcaaggttattaagatatagctaggaaaccaaaaaaccaaaactatagattcattggcttttacagtgaaatcagcatgctattagtgggttcaggagagggataaataatttcctttgaaaacttagcagtatcatattttgtactagaattgatgtgttagttcttgtttcattgttaggtcatatggataattacttttttttcttctgtcagaaagaatcaactaaacttaccaccatttctctatgttaattaccttttcccttttggcaaaccatgagttagaaaatgcacaggcattatttttcaacatgaaaatgcacgggcattagcactcattgtaagtgtatcaataagatttaggcatttagctattacgtttttaatgtgtgttagctcatgccagaagcatcggtcttcatt

SEQ ID NO: 46191 - DNA, 1257 bp, Setaria italica
  Peptide Sequence Number=SeqID_112165
ctgacaatcgtagaccactgtactcggggtttggctgtaagcagtggctttcagagagttggtcctgcagattaacccagcgcacagattttgcatatgaacaatttagatggcagccagaagcatgtgagatgccagagtttgaggcctctcagttcttgaggagaatgcaggataaaaccattgcttatgtgggtgattctttagggaggcagatgtttcaatcaatgatgtgtatggtgactggtggaaaacagaggccagatgtggaagatgttggagcggaatatggctttgtgttagcaccaggtgcaaaaagaccagacggctgggcctatcggttcccgagcaccaatacaacaattttgtaccattggtcatcaacactctgtgatttggagcctctgaatccatcagatcatgcaaccagttatgccatgcaccttgaccgaccacctgcttttctaaagaacaaccttcataggttccatgtcctgattcttaataccggccaccactggaatcgagggaagctaaaggcaaacaagtgggagatgtatcttggtggtgcaccaaacaacaaccggaacattgctgtcatctggaaggccaaaaatttcaccatccacagtgtcatcaactggttggatgctcagctccctaaccacccccagctgaaggtgttctacagatcaatatcacctcgacacttctttaacggggattggaacactgggggccgatgtgataacacaaatcctttggccaaaggtagtggcattcacttgaaccattccgaagacaccgatgctgagggtgcggtgaggggaaccaggatcaacctgctggatgtcactgccctctcgcgtctgagggacgagggccatatatcacggtatagcatcaaggccacgccgggcgttcaggattgtttgcactggtgccttcctggtgtacccgatacgtggaatgagatccttgcagcccagctgtaggctgtagctaattggatgattgaaagctattatatactttgttaggctttactgaagagttcttatgctgctgacagaaaacaccaagcggcagtagctcgggattttcggaagcgtgatttgttgtaagttgtaactatatagaggcttttcttttctagtgtaactgtaagtaactgttgtatttgcttcagtgtatgtctactgttgtttggaaaattggaatggcagtcgttacttacctaaaaaaccctttttcaaa

SEQ ID NO: 46192 - DNA, 699 bp, Setaria italica
  misc_feature (1)..(55): n is a, c, g, or t
  Peptide Sequence Number=SeqID_112166
nnnnnnnnnnnnnnnnnnnnnnnnnnnnnnnnnnnnnnnnnnnnnnnnnnnnnnntttttttttagttcagcacaattgcgtcgagcctcaaaaacttcaaaacagggacttgagggtagaaccaaacaattcacagacacttgagattgagatggtgagaaatattgacaatgtggcggtccgaccaccactgtgatgagatcctgcctatttacgagcattacaaaaagagaagcacagcaacagcaacattgtctgaacttgcatccaaaaagttctagcaaagcaccgaaccaaaacgtgcatccccggcgcagagccaagctgccaaccacaagacaataaattgcttcagaaaacattggccgcaaatattgaaaaatgctggtctcgccaagacatgctggggttcagatcattctttgcaggaacagtaactcaccagttgtactgtcagcttgagatctaaattttcatcagttcctcttccttctgcttctggatggattctatctttttcatgtaaccgtctgtgactttttgtagatcagcagataaatctttcacgttatcttcagaaagcttcttttccttctgtagtttatcataagctttgattgcatctcttcttatgttccttatagcaaccttgccatcctcagctaacttagctacagtttttgctaattcctttctga

SEQ ID NO: 46193 - DNA, 447 bp, Setaria italica
  Peptide Sequence Number=SeqID_112167
cttcaagttcactggagttccatagtactcaacctcaatccggtcaagcattgccgggtttgcacgccctgtcctcacagtgttgaagttagtttggactgtttcgattgccttttccatcttttctttagcctgctcttcaataacagatttttctgcttcgatttcttcgatggtggcatgtgtcaaaactgctctgataacatgagaatcacaagctaatgaagactagtatgaaggtcaatattgggttaaatatttatatctgcaaccactcgcctcttgtccgagtgtcgaagaacaagaggcccagcctgaagtcccgcaaagtttgcggaggagtaaatggagactaattgctttgggagacaaccacagcctacaaaataagacactgtttgccaacagtttgccaaattattgatttcaagggacactgttaaactg

SEQ ID NO: 46194 - DNA, 1104 bp, Setaria italica
  misc_feature (1)..(2): n is a, c, g, or t
  misc_feature (11)..(11): n is a, c, g, or t
  Peptide Sequence Number=SeqID_112168
nnttttttttntttttttttttagtttacccaaacaattcacagacacttgagattgagatggtgagaaatattgacaatgtggcggtccgaccaccactgtgatgagatcctgcctatttacgagcattacaaaaagagaagcacagcaacagcaacattgtctgaacttgcatccaaaaagttctagcaaagcaccgaaccaaaacgtgcatccccggcgcagagccaagcagttgtactgtcagcttgagatctaaattttcatcagttcctcttccttctgcttctggatggattctatctttttcatgtaaccgtctgtgactttttgtagatcagcagataaatctttcacgttatcttcagaaagcttcttttccttctgtagtttatcataagctttgattgcatctcttcttatgttccttatagcaaccttgccatcctcagctaacttagctacagtttttgctaattcctttctgcgatcagatgtcagtggtgggacagtcactcgtatcacttctccatcattgcttggtgttacaccaagatttgcagcaactattgttttctcaataagcttgaggcttgacttgtcatatggctgaataaggagagaagttgcatctggagtgcttatctgtgcaatactcttcaagttcactggagttccatagtactcaacctcaatccggtcaagcattgccgggtttgcacgccctgtcctcacagtgttgaagttagtttggactgtttcgattgccttttccatcttttctttagcctgctcttcaataacagatttttctgcttcgatttcttcgatggtggcatgtgtcaaaactgctctcttgtccgagtgtcgaagaacaagaggcccagcctgaagtcccgcaaagtttgcggaggagtaaatggagactaattgctttgggagacaaccacagcctacaaaataagacactgggcgctgggcgaggcggtgcgcgagggcgcgcagcggggaggagaccgccgcgggggagacggcgtggagcgccatgcgcgcagctggtgagggagtgggaagggaggagtagtggccaagccgccaaaggag

SEQ ID NO: 46195 - DNA, 475 bp, Setaria italica
  Peptide Sequence Number=SeqID_112169
cataagatgtacctccaagccctaatttcagttcaagtactggggctatcaagcctccaaatatgattatcccagatatgacagagaatgatgtcatatagagttgcttcattgtctttgctgacgcatgaggcataaatggaatagttgatggaatctcaggcatttcattttcttcactactgggacctttgctttcagaagttcggattcgctgctgcactcgcaatcgtctgacctcttccattagaaggaaaattttgttgcggcggctcttgatgttgttttgaatctcatgcgattgcatctgaacaaagtcctcgattgtctctggaccttcaattatacaaaagctggagacgccgccgtcgccggccaccctggactcgccggccggggagcaccgctgcagcaccagctgccgccggccgcacccggctaccgggtcctccccctgccgttcccccgctaccgc

SEQ ID NO: 46196 - DNA, 530 bp, Setaria italica
  Peptide Sequence Number=SeqID_112170
aaaataaccggaaacaaataacaaaagggaaataacttaagaagaaactaatacctaataatagaaagtaggtagaagaacaaaaaagattttgaagccgtgattaagctcaggaatgttagcagagtggatggggaggatcaacttgtcacaaagatcagggaatacctcacaggcaaaagatacttcattctgctcgatgatatatgggacgtgcagacatggaacagcattaaggatatcttccccatgaccagctgtggcagtaaaatcatcaccactacttgtacaaatgacgtggctcaggaatgttgtcgatcatccactaatggacatatatacaatataacacctcttagtatggctgactcaacacagttattctacagaagattgttcaaccctgaagaaaaatgcccttcacaccttgaagaaatttctggacaaatattggagaaatgtgccggcttgctgttagcgatcactgctatatctggtttgtgtccagcaaggaaaaaacaaggagaaat

SEQ ID NO: 46197 - DNA, 1102 bp, Setaria italica
  Peptide Sequence Number=SeqID_112171
tcttctaggtaattgtttagtctagtagttggtattgggggtaggtattctaactttgttcacaaagattcagggaattaccttcacaggcaaaagatactttcatttctgcttcgatgatatatgggacgtgcagacatggaacagcattaaggatatcttccccatgaccagctgtggcagtaaaatcatcaccactacttgtacaaatgacgtggctcaggaatgttgtcgatcatccactaatggacatatatacaatataacacctcttagtatggctgactcaacacagttattctacagaagattgttcaaccctgaagaaaaatgcccttcacaccttgaagaaatttctggacaaatattggagaaatgtgccggcttgctgttagcgatcactgctatatctggtttgttgtccagcaagaaaaaaacaaaggagaaatgggatcgagtgaaaaaattgattggctgtggacttgaaagaaattctagcgacgaagtaatgtcaaagatactatcgctcagttactttgatcttcctctccatcttaaagcttgcctactgtacctcagtatatttccaaaatattataccattgggaagcagaatttgataaggaggtggattggtgagggattcatccatgaacagaacggaatatcagcagcatacgatttaggcgagaggtgttttaatgatctcatcaataggagcttgatccaaccagcagggagagacaaattttttgaggtgaatagctgccgggttcatgacacagtttttgatttcattgtttccaaggccattgaagagaactttgttactttaataggagtacctggtgtaaatcctattgctggaaacaaggtccgtcggctgtctatccagaatgatggtgaaatcccatcagaactagttttatctagcgtcaggtcacttaatgtttttggcggtaatatggaaattccatctctgttggagtttaggctcttgcatgtattggcctttgaagactgtaagcagttaaaagatgatcatcttgcggatgtaggcaatttgttgcacctgagacacctgaggctcaaccatgcaaat

SEQ ID NO: 46198 - DNA, 376 bp, Setaria italica
  Peptide Sequence Number=SeqID_112172
gcaacacaaacaagttcttggcctaacaaagctaacttgagagaggaagttccttcggtgaggaagagcacacgcaagaggatcggagagagatggcgagcgtcgtcgacggcaatggctgcggcggcggcggcgggcgggtggtgatggagctgagccacatcaaggacctggtgcggcagctggaggggcacctggggggcgggtcacagttacaggcgcaggaggtgtgcaggagcctggcctcgcagatctcctccctcaccgagcgctccatcaccctcatcacctcctactactgcctcgacgccggccggaagcgctcggcggcggccagcctgctcagcgacgtctccgacgcgcccttcaagacccc

SEQ ID NO: 46199 - DNA, 351 bp, Setaria italica
  Peptide Sequence Number=SeqID_112173
atctcccccaaggtcttcccgtcgcgcggcacgctggccatggtgtcggcgttcttgacgtcggcgtcggcgagggacaggacgctgaccccctggcgcgccttgaggcgcgcgcgctccgggagcggcaggcggtcccactggtcccgccactcgcacgcgagcgcgggccccgtcgcctccgtgaggcagtaggcgtgcgtgacgcggaagccgatccgctcgacgcgctccagcagcgcggccggcggcggggcgccgccggtgaggacgtggaccggggcctcgagctgccgcttgctgctggtggcgtcgtcgccctcgagaaggatgctgaagacgacgggcgcg

SEQ ID NO: 46200 - DNA, 258 bp, Setaria italica
  Peptide Sequence Number=SeqID_112174
gttgttggcgtgcgcgaccatgaagcggctgacgccgaagaggtcgccgatggccgcgaattcgagcggcacccccgcgaagccggcgcggtagagcgcgtacgcctggcacgggtacgtgctgttcctggagcagttgaacccctggacggacgccggcgccggcgcggtcgcgttctgggaccgcgccggggccgggagcgtgcacaggcacagcaggagcggcagcgcgcctagcgcgggcagcagccgcggtgg

SEQ ID NO: 46201 - DNA, 268 bp, Setaria italica
  Peptide Sequence Number=SeqID_112175
aggcatttcaagcagaaaatatgcaaggtaagaaggttgaatggctgatcaaacacacgtgaggatttatttcactttgacaggaacgtgctgtcacttaccatccctgaatcattatgtaacaagggaagattgaagaatttcccagcaagaaatctcagtttcacttttaccagcagttgtattgtacctatggaaaattgagacttaccatccctgaatcattatgtaacaagggatggtaagtgacaggaacgtgctgtcactt

SEQ ID NO: 46202 - DNA, 343 bp, Setaria italica
  Peptide Sequence Number=SeqID_112176
tgtctattttggcgtttgagataggaggagtgtattgatgttttgtttctactagagttaatcagcctatcttggtatgggaaccacgagatagaaatgactcgtacagatagcatatgtggtcagcttatctttcttcagttaaatcatatataattcttgaactgctcgtataaccaacaaattcttcagtccatgcatccaattaaatgtcctctgggtgctcctacttcaccatggagcaagatttttgcacacgtctgcaacaaactatgtgtgcagtcttcattgatgcctttgctagattaggagcaaggtatcatgcccatattaattccggcca

SEQ ID NO: 46203 - DNA, 202 bp, Setaria italica
  misc_feature (193)..(193): n is a, c, g, or t
  misc_feature (201)..(201): n is a, c, g, or t
  Peptide Sequence Number=SeqID_112177
ggtgaagcgaggtgctcaacataattcaaatataaatttatggtcccttaatttcaggatatggtcctgtttgtaatgtagtaatgcttcgttctgaaactctcaattgaccaatcatttatggtaaaaaatgaacccagccacttgtttacacttgagaggccaatgaaaaaaatccgaaccgggggggggnggggggtng

SEQ ID NO: 46204 - DNA, 499 bp, Setaria italica
  Peptide Sequence Number=SeqID_112178
tgtccgtacccttcgtcttgtaagtattcttgggtaacccgtcctttgtaacctagtacggtccttcgtccgtaactttgtacgtccgtttgtcgggtcgtagcagctcggggaagacgcagccgagcgcgccgagcatggcccagcgggagtggatgacctccagctcgcggttcttggcgaaggtctcggggtcggccgagagcccggcggtgtcccagccgtagtcaccggggaactcgccggtcaggtagctcgggggctcgccggagagcgggccgaggtacaggacgcggtcgggcccgtaccacgggctgccggacgccgcgggcttcggcttggcgccaccggtcttgcgcattgtgatgcggccctcgccgaacacgtccctggtgctggccgccggcttgccgacgagcgcacgggaggtgagagccatggtggcggcggccatctcgatcagatcactcctcttgctgtgatgctctgctctgtgttt

SEQ ID NO: 46205 - DNA, 447 bp, Setaria italica
  Peptide Sequence Number=SeqID_112179
tttctgtaatgccgataaagtgtaaaatcaaagaaatcggacctctgtggatgctaggacaagtgctatactgctataaattttggcacacaaagcaatccagtccctttgaatcaatttaattattgctttagctctatatacacatactgctgtagtttttggcatgattggaccttaatagttgcattcttatttctctaacaccaccagcaacaaaatcaacagtggtatttagtgacgatgttatcttgaggaactgatactaagctgccaaaataacatttatttttgatggtgggtaataattacttaactgctgtgtatttttctgaaacctgcattaaaattgtgaacttattgtttctctttatacttgccatgcataccattaaattattgtattccctatttttttctattactaccgttaacttttaagttctt

SEQ ID NO: 46206 - DNA, 291 bp, Setaria italica
  Peptide Sequence Number=SeqID_112180
atgaaccgggtgctctacaagctggcgctcgtgccaatgaagaattaccccttcttcctcgcccaattcgctacatttgggtatgtcctagtgtatttctctattctcttcataagatttcgtgctggtattgttactagagaaatgttagcacttccaaaggcacagttcatgctaattggcttactagaagcgctaggtgctgcttccggcatggctgctgctgctatgttgcctgggccatctattccagtattgtcgcagtcttttctggtttggcagcttatctta

SEQ ID NO: 46207 - DNA, 727 bp, Setaria italica
  Peptide Sequence Number=SeqID_112181
ccgccaacggcgtcaccaactggctgggcacgagttccatcacgccgctcgtcgccgcattcctcgccgacgccttcctcggcaggtactggaccatcgcgctcttcctcgtcatctccgtcgtggcctacgcggtgctcgcggctagcgcggcggcggcgctggagagcgcagcgttctacgcgggcctgtacctgctggcgctcggcggcgcgctgcagccggtgctcacgtcgttcggggcgggccagttcgacgaggccgacgaggcggagcgccgccggcagagctccttcttcaactggttctacatgtccatcaacgtgggatcgctcgtcggcggcaccgtgctcgtgtgggtgcagtccagcgtcagctgggggctcggctacggcatcccggcgctgctcagcgtggtgtccgtcgcggtgttcctcgccggcaccaccacgtaccagagccaccagccgccgggcggcagcccgatctcaagggtcgcgcaggtggtcgtcgccgcggtcaggaagtgccgcgtggaggcgccggacgacgcggcggagctgcacgagtacgaggccgacgacggcatgtccgcgatacaggggagccgccggctcgcgcacaccgaccagttcaggttcctggacaaggcggcggtggagacggcgggcgacaaggcgcgtccgagcccgtggcggctatgcacggtgacgcaggtggaggagca

SEQ ID NO: 46208 - DNA, 999 bp, Setaria italica
  Peptide Sequence Number=SeqID_112182
tttttttttttcctagcacgaattttagtaagatatagatcatcatttcagtacatgtaagaaactgatctcgcgaaagagatctatttggacggctcattactattatttacaattccccagcattccatactgtagaccatttcccttcctctgatgtgagatcatgtaaaacaaatgtctatcatgggctctcgcaaaactccatttcctttccacacattggacatgtatcacttctctccatccattcataaatacaaccaagatgaaaatggtgacaacattttgttataattttcggattgtccggggtatattcttccagacaagtagggcagacatcctcatcttctgaaccgacagctgcatagctgctgttataagcttttgcagacaaactcttggttgattcagaacgatggaccttatattcaccctcattttcagtgctgctccgtttcttctgagcagctaaatgctcaatacctgagctgcttgcgttgcgtctaagggctagtgactcttcctgtgcgagatttatggatttctcacgccttgataccaagccttctctttgaacacgggcatatctaggatcagtatcatatgggggtggtctagaaacaaggcgataagtttcatccagtgaattgtcatttaggctggcacttggattagtggatcccaatgaagcagccccttgggctgggttgctcggcctagactcaagcctctggaatgttgcagtatacccgccaaaaatgttgtggaaaaaatgcctcaaggatatgcattgcctatagatagggttgcttggatggacatattcctcaaaatcttcagtactgaagcaacagcagaatccacccataattcactggaaactcagaaagttatccagtagtccccctggacaaaaaaaaatggttgctactagctacggagcttgaacaaaatttccaggtggtcgtggaaaaccaagcctaccatcaacga

SEQ ID NO: 46209 - DNA, 1570 bp, Setaria italica
  Peptide Sequence Number=SeqID_112183
gttttattgttgagaatttggtatgcccatcgatctgcagcctccattttccagtatgacaatagcacaatcagtatatctcctggccacagcaatatgcaggacagattcaccttctccatctactgcattaggatcagctccagcaatcagcagctcttgcatgcactccggttgaccatgatgggcacagacgtgggcaagagtaggacccaggccttctctaagcctagaattgatacaagaagacctgcctacaagtgcacgaacacatcgaggagagccagcagccaaagcaaaaactataggagggtcttcatccttatctaatatgtctacattctcttggtaagccacaatagcttccacaagctctgctgagcctcggcggcatgctaaatgtaaggcagtgtgcccatctgtattttgtgcttctaagagagaacgaatcaaactaccatttctctctgatgcggcctttgcaagtagatccctaacaccagcagcatctccttcacatacaaaacgatgtaaggcatttggattatcatgaaccatctcctggatggaggttgttggaggttctatgccattgggcaagctttcatttgggaaatcattctcaggactagcaggcgggctccgtggtatgtccagaagatgtcggagtaaaagtttttagcatgtcctggaaggatggtcttctagaagctcggaactgcaaacaatcacctatcatcttccacaactccccaggtaagtcctacacctactactcttgaatattgaggcggtggcttcttttcttttacaacagacttacagatttcctctgcacttagcccagcccatggaacagcaccagtacacatttccacaagtgtgcaaccgaaactccatgcatctgactctggtgatatgccgtttgcactatcccaaaacatattcaatgacttcttcaatggtccccatgcctccggagctgtataattgggactaagcagtgtagcatcaatgccggcactggagtcatcaggtactttcctactagtaaggttcttcaaaattgctgaaagaccgtaatctgaaacaacagcacgtccacttgcatccaaaagaatgttcgatggctttatgctcatacaaacaatacccgctgcatggagttctgctactccacgggcaatatctgctccatacctgagaatctgctccagcgtgagccgtccaccattttgtcgcatctctgcctgcacagaccccgcatagcgatccatcacgaagcagaggtggccgccgacccttactgtaccatggaatgcgcacacgttccgacaccatgtggaggcgcgtctcagccgctccacctcctcttgaaccccctcaagcccgtcccctgcggccacgggcaccctcttcaccgccacctggtgcttgcaccgcttggccccactgccacggccaccacgggacagcgtgccggcccacacctcctgcccggcaggcccaggcgggccactcccgatgcggcgggcgagcttgaggtccgggtgcgaggcaaggtcgaacg

SEQ ID NO: 46210 - DNA, 1016 bp, Setaria italica
  misc_feature (1010)..(1010): n is a, c, g, or t
  Peptide Sequence Number=SeqID_112184
actaatcagcatgaaagcacaggacagctttacttatgtgctagtaatggtgctgataatgttttgggttctcaagatcagattggttcaggtgatatacttccagtttgcttctcttagttgccagaaatgcaattggacctttttgtgatcaaactgcatacgagcagcaccatttttcatgccatgaaatgagtgctaagaggcgccggactggcaaatttggtgagccagtagtaggcagagatggaaaatttgaatgtcctatttgtcaaaagacctttgaagaggaatcacggtactttggccatgttggatctcatgcaaggtatcaagggctgacacctgaagcattctttgataaggctacttcggcaagggtaattaatggttccttggcagaagtttcatttagccttcaggagttgactgactcacgtggacagaacaaggtttctgatggtgaagcaggctttcagcaccacaatcattcaaatggactttttactgagctttttagtacaaattgttcagacaattacattggaccaaataaagttacagatgttccaagtgtatgtaggtatccaagtgatacaggtcatgctgctgcaacaattccaaaaagagctttgaacaccagtcatcaatctctgagcaacgctaatggctttgctggagtaaatatttttaatggtcagctgggaaataaccatgttggcagacttactgcctttggaacagcaaatcattatcaggaccgaattgttgatcatggcattgctgctccaaagcatgctgacagtaacgctgtgaaagcaagagatgtcaacctcaattcatctttggataccatatctttccctattgctagtgcaaacaatgaaacatcagctgcccttaacgaagttaatcagtcatcttttactgcaaaatgttttcgtggcagttttaataacaatgatggtgcgtctagcgcttcttcctgttctggatcaagcaataaaatntcttag

SEQ ID NO: 46211 - DNA, 249 bp, Setaria italica
  Peptide Sequence Number=SeqID_112185
cggctggaactccatcaccgaaggcctcgcctgcggcgtcaggctcgtgctgctgccgctgatgttcgatcagggcatcaacgcgaggcttctggtggagaagaaggtaggcgtcgaggtggcacgagacgaggaggacggctcctttacgcccaacgacattgcagctgccttgaggagggtcgtggtggaggacgaaggtgaggtgttcgggaataaggtcaaagagctcgccaaggtgtttggaaa

SEQ ID NO: 46212 - DNA, 516 bp, Setaria italica
  Peptide Sequence Number=SeqID_112186
cggggaagcacggggcgtcgggcttacaggctgcaagcagacagcggagcgagcgatagcaggatggtgcgggacgcattgacggtgagccggaggtacggccagacaacatggccacgcaatactagagaagtggccagcttgggcgagcgcaccgcctgccgtcttgaccttggtgcgggtgacggcgcgaggcccggcctccacgcagccgtgggcacgctcgcacatggccccgtcttcacccggccacggttgaaaaggataaggaagctaggaaagagtggatcgggataagtaagaaaaaagagggaagaaaaatagagagagagaaagaaaaagtgaaatattggttaattttagttaatctataattaatttttattccataaaaatcatactagaaattgagggaaaatgtaacaattatgtctataatcaagttaaataggcaagggcatagggcatatcggacatttgagatcattcatcaatttgtaaaatactaggaagaag

SEQ ID NO: 46213 - DNA, 572 bp, Setaria italica
  Peptide Sequence Number=SeqID_112187
gctgggtatattggaactttgcaaccgcaacaccttcattcttgtgaatttgtggttttcttaaccttcagaacaggatgttggtatacttgtcaagtaaaacatcagaattatataagctaacttcagtcaaatatataaattcggttcatacttgtgatgtgtgaaaatgtgcaacacttcaggacaggacatgtatacttgcactatacattatattagattatgctagctggtcatattctttctttgctctgcacagcacactcggatgaattttgccactgccagggttgtgttggcaagtatacactactcagagatgaagaaaacccacggttggcaatctttgagaggcggcttccttgctgtggttgtgggataggatggtcttctttctttaggttcttgtgcccattgatttggtactttgcagccaccctttactgctgcaagtactacaataaggatcctcgagagcgcccaggtcttgctgcctcggctgttgcggcactcatcttcacagtcctggcaattatcacccttgccgtgacgctgataatatgcgcgct

SEQ ID NO: 46214 - DNA, 1070 bp, Setaria italica
  Peptide Sequence Number=SeqID_112188
ccagtgtctgacgcctccccttggaagggacgcaacgaacaagcaagcagcggtggtgaaaaactgcggtggagaggaggcgagcggctcccatcccatccacttcgccgagctttcagaggcttccatggtctgaatcgaaatctggccgggtctccagcaagcgaagcaagcgggcggaaaagccctcgcgctttctccgcttccttccttgcactcccaaccccagcgcggggaggaagaggaaccggacctggcggcgctgccccgcccagaatcgctctctatcccttgtggtatcagcccacccagaccgcggcgcgtgctgctgcttcttgccctccacgtgcagtatcatgagcatccttggaaacttgcatgcttgatgtaccctgctgctttcattatgaaaattattgctatcaaatttgttgaagtattcacggcagggaggaatctgttggtcagttattggtattaaggcctctggcactttccttgccgaatatctgtagaacaaatgggagaagcacactcggatgaattttgccactgccagggttgtgttggcaagtatacactactcagagatgaagaaaacccacggttggcaatctttgagaggcggcttccttgctgtggttgtgggataggatggtcttcttttcttttaggtttcttgtgcccattgatttggtactttgcagccaccctttactgctgcaagtactacaataaggatcctcgagagcgcccaggtcttgctgcctcggctgttgcggcactcatcttcacagtcctggcaattatcacccttgccgtgacgctgataatatgcgcatacaagtaacatccagatcatggaaaacagggcagttggacccgtcattggtagctaaggcattcagaaggaacttgtagtttcagtgatagcatgtcttttcagccatccttcatgtatcactttagcaagttcttgatcgaaccgtagctaccgtcacatgtggttcctctgttttcggttgacctattggctgccgttgttcatcaatgaggatgttcattacttc

SEQ ID NO: 46215 - DNA, 393 bp, Setaria italica
  Peptide Sequence Number=SeqID_112189
aaacaagcgcatgagaagcccttgtcaaaaaaaaagcgcatgcaatgcaactattggacctttattcgctagtaggtgaaagcccagaacgctgttttaagttgggcctgatcggtggcccgctgtttgttgagtcgtgtgtacttgctgcgtcgtgtgactcgtcagatcctgtgctgctatgttgttgttgcgttcgttgtgggctagtattgggtagtaggaaatcgcgttgactgttgcttagttgactctttgtaagagtgtgatcattaattgggtttatgtgactcgtttatggatcctaagcttgttcagagttccagtgcagaactattctgtactggtgacatcaaaaacagtgtaacacgcacaataagcggctaaatttgt

SEQ ID NO: 46216 - DNA, 455 bp, Setaria italica
  Peptide Sequence Number=SeqID_112190
gggaggaggtgatctgatttcctgaaaaccactttgattggaaaataaaactgcgaagttcatgtgcttctgccaatgaaatacccacaaacaattcattaatatcctggagattagaagctacagactgcacagcattcaaaacaccagctgcagtggattcctgaacaaaacttgctaactggggatgttctatctgcatatcagatcgcagaaagaaacatcccagtttctgaagcaacgagtacatattttcactccatccatcatctcttactacatttgaagcattcccaagttgcacgaccttgccatctaaaagaggtagtataggccactttgcaaaaattgaaatatcttcgcatgaatgcctcagaaaattccagagtgacatcatccattgcacacttggctgaccttgctgctctggaaaccagataactgcttagcatgtt

SEQ ID NO: 46217 - DNA, 896 bp, Setaria italica
  Peptide Sequence Number=SeqID_112191
gggccttgcggctttcataacagcaaccatcagcaaaggaacttgttgctctctctcaagattttttttttgtcgaaggggctggatcccatattcattgaaacgtggcctttacataaaacgccctggcgaagaaaaaaatacaacgcacaccacagccacaagctccagagatgcacaaatacacaaaggaccctaaataaaaacgaatttgaactgaagctcctcagatcctccaaaggcagtcccagtcgttgcacctcttcctgatccaccggagatggagaagaagcttgccgcccaggacaaaaacccggccaagccaaccgacgtgacctccagctttttgaagccgcaagacatctcccctctggcgcacatcggctgtcaccgtcgcctgcttggccaagtagaaaccggcgacgtcgacgaaatcgacgacccggagcaaatccgcagctgtcgagttcatcgacaacccggaagaaagcccccctgtagggaatcccttctccccctcttctcgaaggagaaaaacataccttccaaggtggtcgggaagcagagcctcaccggagccgtctcgaaagagcaaaagcctcgccgcaccatcagtagcagcaaggagacttatttgccggcgtagtggcagcaccgccaccccccggagaccgtacctccgccctcagcatcaacggcgaggaaaccagagacctagatactaacccatccagtctatatacagccgcacgtcgattccccggctctcctccctctccggcaccggacaggccatcaccggagaagaaagggaccggcggaatcgccgccggaaacgcgtatcgcctccttttcgccctgatgcactgtagctaggagataaggacggaaacgac

SEQ ID NO: 46218 - DNA, 253 bp, Setaria italica
  Peptide Sequence Number=SeqID_112192
tctttcccttctctcgcatcgtcttcatctcgtctccatcctcccaaaggcgcaggtgagtcggtgcaatgcacgcacgccgccatctcttctctctgctgcatttgggtttggttggttggtggtgacggtgcgctgcttgtttttatgaaggttttgcgggtgattaagccgggtggttgatcgggaggatggcgcaggcggtggtgccggcgatgcagtgccaggtcggagcgaaggcggccgtccgggc

SEQ ID NO: 46219 - DNA, 240 bp, Setaria italica
  misc_feature (14)..(14): n is a, c, g, or t
  Peptide Sequence Number=SeqID_112193
tccgttagttacanatttcaagttattataatggattagagttaaaggaaactgaacatatatccgcatcatatggtgacagggtgactggaacggagctggctgccacacaaattacagcacaaagagcatgcgtgaagatggaggctttgaattgatcaagaaagcaatcctgaacctttctctgcgccatgatttgcatattagtgcatacggagaaggaaatgaaagaagattgac

SEQ ID NO: 46220 - DNA, 391 bp, Setaria italica
  Peptide Sequence Number=SeqID_112194
ttggaaacagaagctttatcggagcatcaaaagatttagccacactgaccataactggaagtgaacgaacaacccagaaaatatcatacacaaaaagtccagccaacagaatggcccagttttaaatgatcccaaggataacatctcgatcccctgaatacagaaagcgattcccagaacattatttgctagccaatgcttcttagacgcataccacatgcaaagaaaaatcccgggactgaagcaacaatctgtgacttcgtgaactccaccgagagtgagtggataagtggagccttccaaaagaatggaatgataatctcattgtttggcaggctccacttatccactcactctcggtggagttcacgaagcaacaatctgtgacttc

SEQ ID NO: 46221 - DNA, 1252 bp, Setaria italica
  Peptide Sequence Number=SeqID_112195
tttttttttttttttttaacttaacaaacacacatactgacatggaagcataaggtagggcacaacggtaagcgttcataatctccaagtaatccccaagtttttttgagtagcaaccaagacacagcaaacaactgaacacaggtaaaagtccaggagtttcgccttgttgcatcaaggacaagagcagatcaaccctgcttccttctaagaagctctccgctatgtgcatggtaaaaggacccaacctcaacccggaatttgccctctccggctccgagcgtagatactttactcactcacggtggtacagtgaagaaaaaaaaggccgagcccataacttaaaaagaaaatgacacatattgcgatttcccccctttcatatatgtctatctctattatatataagcagtgccatcagcacctcctgtacctacaacactagtgcatcagctggcgaggcgcgcggggacgcacaggggtcttcgatgggctcacccttattggcaaggccacccagaatcacaccactgcagttgagagcagcggtagcactttcagccatcacaaactccacaaaggcgatgcgagtagaatgatggtaatcaccaagcaacctcagacgaaagacctctccacatatagactcaaagaacaatttcagatctgcctgagtgaccttcttgtcaatgtttgtgcagtaaatagtccttgcacacatttcacgttcatcatcagacctgggcagaaatgttgggtttactggcgcaatggcagtctttgatggcagaaccctcacaggataatatccaagcacagttcctgacagattaagagcagttctggcaccctcctcatcagtgaactctatgaaagcaaaaacgaagtactgaatttgggtcccccacacatgcgacagtccacaacctgtccacagtttataaatagcgctgccaggttttcttcagtgacctggtgatcgatatcggagacgtagacggtgcggcggatgacctcgtcccgctgcgccatgctggtgcggctgttggtccggcgcctgccggggtggccgtggccgccgaaccctcctgctgctccccccttcttccttccgcgtccggcgtggccgtcggcgacggctgggaagccgacgacgcccctgtggcccggcgaggcgaccgcgaagccgccgttggcggggtagtacccgtacgcggcgggggagagcggcgcgggcgcgagggcggcgggg

SEQ ID NO: 46222 - DNA, 1748 bp, Setaria italica
  Peptide Sequence Number=SeqID_112196
actagcaatgtccatcacatttcattttagttctgaaacgacccaaataatacacatagcctccgcttaatattgcagaggactgaatcactgagtcaccacagagagcatacacaaacgagagcaagttggagcacaggtttcgcgcacagaccagaccaggcagcagttccatcacacggatcttattatgtcagagctataggcgaccagaccggagacaaccatgacatgcttactaggacgacggcctgcagctgcagtaccgtctcactggaggacgaggcagccttctgcaataggcagaggggcgacggggacgggcgtgtaggttgcttcctcaccctcactgactttctcctcatcggcctgaaccagaccagcagcagtaaagatgtaggccttcacttcctcgaagcgttcctcagacagggagacctcggcgaggagcttccacgcagaggtttcagatgcctcctcatagtcattcctccgcttcagcacaatgtggccactgatctcccacacggctggattcacctgggtgtccagcagctcctggctcacttcgcccagagcctgcttctcagcatagcactgggggaagaggaagatcctcttgccacagtctgaaataagcacattgtaaggcacattgttgtcctgcagccaaatacaagcactggaaaccacatttgccaggtcattcagtgtgttccctccctcaaataccaggcctctcacaggataatttatcagcttggacacagtcaccccactcttcattgtgtcctcagaaagagggatcttgtgggtagctgccttctccacagggaaaggcactgacaagtagtatgcctgaaagtggaggtgattgatggtagcaaaggcacccaaactattgtaaccaagcctgaagtatgggctagctgcctcagctgccatctgcagtgctagcaagaagctctctggatcaatcctctgaggcaagccgtccagaacacggggaatgagaagcacgtgaccatattcaattgggctcacattgatagcaacaacatttggtgcacgatcagcaacagtgattggagcattattcaggaagtagctgtcatcgccagcaccattctcaaactggaagagcacctcttcctggccaactttggtaaagttgaacttggcagggtcaaatggctgaagcacacggtcgacacggaactcggtagggcgcttcttaaggtggcggccttcattcagttgtgcaacgaacccaaggttgccagggatgaccttggtttcacaggcagtgacatcatagcggaataagcctcgagccatcctgtcctcccactcagtaaggaggatattgacaagggacttagttgaagaagcatcctcctgtgaaggctttgccggatttgccttgaaagcgtagagggggagctttgaaacagggaggcagcagtcgccgaggcagttcctgccgcatccggcgcgcggcttgtcggcgtcctcctggtagttggagacgacggtgggcaccctcctgatggtgagcttcatctccatggttgctctcgggcgggtgctaatctctcgggtgcttgtcggggtcggggggtcagcagacgacggcggcggttgctactttacgagaagaaggaggaggaggaggggtcgagagagagggaggggcagggaggagcggcgtctcagaggtagggacgaccgccgccggcgaggaagag

SEQ ID NO: 46223 - DNA, 1729 bp, Setaria italica
  Peptide Sequence Number=SeqID_112197
ggccaaatcagaattctggtgaatccttaaaccaagagatggaagtcagtaaggaaaacagtaggtcaggacatcgcgcaagtcacataatcttttccctcatcttcaactctccgaaccaaataatccgcaaggtaaaaaacagttgtatcatgtgaaccatttctaagttcttaagtgagacagtatcagaggtcgccaagtccatttagctgccgaccaccttacacgaaaatttgtgccttgctttttctcctcatcatgaactaaatctagctagagcgctagtccacctttttgttctcttcggatttatcatcttgctcttcttcaccggcttcctccgcttcagcttttgactcgtcaaactccagtagctgttttacttctccattccacaaacagtgaacagcaacgaaaccaatcacaccaggaacaatgtatagtagagcaggctgtgcagcttgaaaccagttcattacaatgatggtcactgtcaaacccagagtgtatcccaaaaatgcgctgttgaagtaacggttcttgatacctcttgagacatcaaaacgcaaggcaagtgcaacaaatatgccaggtatcacaatgtcaccaaggccaagcatagagaatggccgtgcagcatgtgcagttggaaacagaagctttatcggagcatcaaaagatttagccacactgaccataactggagtgaagaacacccagaaaatatcatacacaaaaagtccagccaacagaatggccccagttttaaatgatcccaaggataacatctcgatcccctgaatacagaaagcgattcccagaacattatttgctagccaatgcttcttagacgcataccacatgcaaaagaaaaatcccgggactgaagcaacaatctgtgacttcgtgaactccaccgagagtgagtggataagtggagcctgccaaacaatgagattatcattccattcttttggaagaaaacgctttatagaaggaagcaatgttgctgaaagagcaacaatgccaagaatgaagaagtaagcagtgagcacagcattgaccaagtcttttgaaagaaacttgaatagaaggaacaatgacaaaagcatagcacttcccactaaggggaaacgcatagcatgctccttggacattgtctcagtgggtggagttggcttgacagaacggtaacaaccgacatagacagtaagacatgctgtcaatatcacattcacatttgggtttacattaaccacaagtggcgccaaactcaaagcagcaagagccaaattggcagctcgctcatgcgtcttcattgctagggggcaatcagggaggctagcaaggtgcccttcgttggaatatcaaagtgaccctgctaagctgatgatgatgatgatggcacaggtgcttcacaatcttatcccgaggaaggaggaaatcagtcagtcagtccggccggatctcgcgtcctcgaccccgagccccagccaaagggttttgaggggggcgacgacggtgggactggggcaggcggaaggacgtccggcccgcgggtcgtcgcgtcccgtcgccggcggtgaggccggctgtgcgggatgggaggagcgtagaatttggggcgtcaggaggaccggccgcggcacctcggggttcaaggtcatggccatcagcacagccagcaccggggtgtgccgcgcctcgagcagatgctcaacttgga

SEQ ID NO: 46224 - DNA, 1795 bp, Setaria italica
  Peptide Sequence Number=SeqID_112198
gtccgtcgttcctactggatccgaaatatttatacggcccgaccccgaaattccgagacgccctcttccctctctcgcatcgtcttcatctcgtctccatcctcccaaaggcgcaggttttgcgggtgattaagccgggtggttgatcgggaggatggcgcaggcggtggtgccggcgatgcagtgccaggtcggagcgaaggcggccgtccgggcgaggccggcggcgggcgccgggggaagggtgtggggcggtcaggaggaccggccgcggcacctcggggttcaaggtcatggccatcagcacagccagcaccggggtggtgccgcgcctcgagcagatgctcaacttggacaccaagccctacaccgacaagatcatcgccgagtacatctgggttggaggatctggaatcgacctcagaagcaaatcaaggacaattgagaagccagtggaggatccctcggaactaccaaaatggaactacgatggatcaagcacagggcaagctccaggagaagacagtgaagtcattctatacccccaggctattttcaaggacccattccgaggtggcaacaacattttggttatgtgtgatacctacacaccagctggggaacccattcctactaacaaacgccacagggctgcacaaattttcagcgacccaagggtcgttgaacaagtgccatggtttggcattgagcaagagtacactttgcttcagagagatgtgaattggcctcttggctggcctgttgggggctaccctggtccccagggtccatactactgcgccgtaggagcggagaaatcatttggccgtgacatatcagatgctcactacaaggcatgcctttacgctggaatcaacattagtggaacaaacggggaggtcatgcctggtcagtgggagtaccaagttggacctagtgttggtattgaagcaggagaccacatatggatttcaagataccttctcgagagaatcacggagcaagctggagttgtgcttacccttgatccgaaaccaattccgggtgactggaacggagctggctgccacacaaattacagcacaaagagcatgcgtgaagatggaggctttgaattgatcaagaaagcaatcctgaacctttctctgcgccatgatttgcatattagtgcatacggagaaggaaatgaaagaagattgacagggttacacgagacagctagcatcgacaccttctcatggggtgtggcaaaccgtggctgctctattcgtgtgggaagagataccgaggccaaaggaaaaggttacctggaagaccgtcgcccagcatcaaacatggacccatacatcgtgacagggctactggcagaaaccacaattctttgggagccaacccttgaggcggaggctcttgccgctaagaagttggcgctcaaggtatgaaagacttgaaggatgctccaggcgaataaaaccggtccgcaacaaatttgactgttgcccatcggtctgcatcgtgtgattctgctcggcgccagtctgtacaaatttccagtttctggacccacaggacacattgtctttgattagtctgttacagtaaccttttgcttgaacaccacgttttggacttggtctgtactcgactccatttgggattgaatgatccatttgggattgaatgatggacattgaaatgcattccgcgccatttgggactgaatgatggacattgaaatacattccgcgagtctggttctccagttgtgcctacaaaaaaaaaaaaaaaaaaaaaa

SEQ ID NO: 46225 - DNA, 479 bp, Setaria italica
  Peptide Sequence Number=SeqID_112199
gaatctattgatgaacagccatgggagaaggttcgatcaagttctcccttgaaagtaaaagaagacgatgaagttgacaagttagagataaagatcaacactccaaaaagatcaaagcgtacttatccttcaccttcaccagaagttgccatgaagattagcagatcattaagaagtctgaatgctcaaacaggattatttactaagcacatgaagattatacaccaagaccccgaattgcatgctcaaagagttgctgcaatcaagagaacaaaaggtactgctgctgcaagaaagcatgcttctgaaactcaaaaggctttcttcagtaacccgaagaatcggctcaagagaagcattgcgatgaaaggggtgaaattttactgcagcagatgtgggcaagaaggacacagaagcttctattgtccaacagtgaggaaagattcagccagagtgcagttcaaatgccggttatgtgg

SEQ ID NO: 46226 - DNA, 1183 bp, Setaria italica
  Peptide Sequence Number=SeqID_112200
agacatagaccaatacaaaagacgaattagggaatacagcacctattgcggagaaggggaaactgaggtcctgggttggtccaaatgggcagtactaccgtgagctgccttgccctagctgcaggggtagaggttacactccatgcaagcagtgcggagtagacagatcaagcttggactgccctatgtgctatggcaaggtgaaccttccagatatcttggcattaggatgtgtctacaatgtggcggagattgtgtgatatggcaggaatctattgatgaacagccatgggagaaggttcgatcaagttctcccttgaaagtaaaagaagacgatgaagttgacaagttagagataaagatcaacactccaaaaagatcaaagcgtacttatccttcaccttcaccagaagttgccatgaagattagcagatcattaagagattatttactaagcacatgaagattatacaccaagaccccgaattgcatgctcaaagagttgctgcaatcaagagaacaaaaggtactgctgctgcaagaaagcatgcttctgaaactcaaaaggctttcttcagtaacccgaagaatcggctcaagagaagcattgcgatgaaaggggtgaaattttactgcagcagatgtgggcaagaaggacacagaagcttctattgtccaacagtgaggaaagattcagccagagtgcagttcaaatgccggttatgtggcatggaagggcataatagccgaacttgtggcaagccaaagtcagagaaagagcagcggcgacaacctcggcactgcagccgatgtggtgaaagggggcacaaccgccgcaactgccctagatctactgatgcggatattggtgcttcaggcaatatggttaacaaagttactggtcctaattcaggtacttattcatgtagtttctgcttagaaaaggggcataatagacgaacatgcccaaaaagaaaggctagcgtaggaaaatgaaaactgtgagcacacaattttaactaaagataatgtaaaatgtttcaattggattttgggtcataaaagcaggaaaactttgtggaaactgatatgaatgatgcagaatattctattgaaatccaatgctatcattgtaaacaaaaaaaaaaaaaaaacaaaaaactagaagactacgaccgaaagg

SEQ ID NO: 46227 - DNA, 271 bp, Setaria italica
  Peptide Sequence Number=SeqID_112201
tatgtagctcccggtctccttgaacagctgctcgaaatgggccttgcagtatggcactccttcgaacgaggaatagttgctcagggaaagggtggacttgcagtgctggccagatctccaagcaaagctgcaagaatgttttcaggaacacaagacaagtgtgcaacttgtggcaaaaccgcgtatcctcttgagaaggtaacagtcgaagaaaaggcctaccacaagtcgtgcttcaaatgctcccatgggggctgtgccattacaccat

SEQ ID NO: 46228 - DNA, 717 bp, Setaria italica
  Peptide Sequence Number=SeqID_112202
tccaccgacggcgtcgtcttccaccgatcctgcttcaagtgccagcactgcaagtccaccctctccctgagcaactattcctcgttcgaaggagtgccatactgcaaggcccatttcgagcagctgttcaaggagaccgggagctacaacaagagcttccaatcgcaatcacgtaggcattcagtaccgaatcattgacatgaaaatacatgtttttgcgcttatgcgatctgatgcggtgatgtgctgatggttttctactttcagctgcaaagcttactccggaaaagttggcccctgagctgaccagatctccaagcaaagctgcaagaatgttttcaggaacacaagacaagtgtgcaacttgtggcaaaaccgcgtatcctcttgagaaggtaacagtcgaagaaaaggcctaccacaagtcgtgcttcaaatgctcccatgggggctgtgccattacaccatccaactacgcagccttggaggggaccctctactgcaagcaccatttctctcaacttttcaaggagaagggaagctacaatcatctgatcaagtgtgcatcggtgaagcgtgcggaagcacagcctgaacaaccagcgcaaccagctgctgattcatcttgatcgtgccatcttgaaagcgagggttcggaagcctcctgttttacttaaaaccacctgctgtatgttatgccgtctagccctgaggata

SEQ ID NO: 46229 - DNA, 1095 bp, Setaria italica
  misc_feature (1092)..(1095): n is a, c, g, or t
  Peptide Sequence Number=SeqID_112203
cttgttttgctggctttttctttccgccgcggcaaaagtgaggcgccgggggagacgaacccgtcataattccactgcttaattgcgcctcgtcgtctcctgcgtataaaaccacggccatcggagccgccgggcggacttgttcattctccctcgtttccccggcgcgcgcatgccaaggccggatcggggggctctagtcagatctcgcgcgcttctcgccggccgcggaacccgagggagtaggaagatcagaggaggaggaggaggaggatgtttagcgggacgcagcagaagtgcaaggtgtgcaccaagacggtgtacccgatggaccagctctccaccgacggcgtcgtcttccaccgatcctgcttcaagtgccagcactgcaagtccaccctctccctgagcaactattcctcgttcgaaggagtgccatactgcaaggcccatttcgagcagctgttcaaggagaccgggagctacaacaagagcttccaatcgcaatcacctgcaaagcttactccggaaaagttggcccctgagctgaccagatctccaagcaaagctgcaagaatgttttcaggaacacaagacaagtgtgcaacttgtggcaaaaccgcgtatcctcttgagaaggtaacagtcgaagaaaaggcctaccacaagtcgtgcttcaaatgctcccatgggggctgtgccattacaccatccaactacgcagccttggaggggaccctctactgcaagcaccatttctctcaacttttcaaggagaagggaagctacaatcatctgatcaagtgtgcatcggtgaagcgtgcggaagcacagcctgaacaaccagcgcaaccagctgctgattcatcttgatcgtgccatcttgaaagcgagggttcggaagcctcctgtttttacttaaaaccacctgctgtatgttatgccgtctagccctgaggatactggacttctctattttggtatcctctgctgtgctagctgactcacattggtgaaccatggaattgctgtcattttcaacgaaattgttgtgcaccgggtaccccttattgatcgaaatattgaaaaaannnn

SEQ ID NO: 46230 - DNA, 464 bp, Setaria italica
  Peptide Sequence Number=SeqID_112204
atggattctttgtgaatgagaagaaatgcaaatagaagaattgggaattgataacattacttgcagttgtatgattttttacattgaaaattgcttgagaatagatttgattgggttctctgcaattcccacttttattgccacagtgactttatcctccgtgtttctttcctatgttctagtcatagaggtttacttactatacttctaaggttccttttatggcttttcctcaacctttttcttattggaatgtcctctgtgtgtatccattgatccaggcatcaattcagatgccacctcttcaaagaagtatttgccatcctctcaaatagtttcactctttattcatttttccattaaattgttatacctccattagaacacttattacagttcattaatgtgtttattctattctgtgagcattcattgaatatctactgtgcgtgtcttgtttttgt

SEQ ID NO: 46231 - DNA, 312 bp, Setaria italica
  Peptide Sequence Number=SeqID_112205
gtcgatcgtgccccctgtgccgtgccaaaaagacggtcaggcgagcgagcgagcgcgctggcgtcctccatcctcggcgagggctctggggcagcggcggcggcgaccgggagcgcgccgatggatcgctgccggaagcggcccgactccgaccccgagggctccggggagcccgagccccccgccgataagcggccctgcacggcggaaccctcgacctccgcggccgcggccgcggctcctcccccgcgggcggagcagggcggctcggatatggacacctcgtcgtccggccacgccggcgacgctgat

SEQ ID NO: 46232 - DNA, 518 bp, Setaria italica
  Peptide Sequence Number=SeqID_112206
aaatgctacaagtggtcagccattggactctagcagtcattcaacttcaactacatatcaggatacttccttccctagatgttcagagaattttacctccttgaatctaattatgtttggatgcttcagtggccggtggttcataatctccctttgaacatgctcatcaatctatggaaaaaagaagaaacgtgtggaattaaataatgagcggaagtagataatattcaaagtttaatagagagtatattataaaggggggaatgaaagaggaaactttctaaaggaagtataggtaatcttcattcttcagaatgtgacaacagggcctggtataaagtatagacaaagaaacccggatacaactcttatattatattcacctcgagagaacagatagggcttcacaaaaagaaaaagggcaatggacagcgtagcatactatcagtagcatcaattaatgaactcagccgttttcacaggcatggatgaacagatcatacacatactagaagctt

SEQ ID NO: 46233 - DNA, 256 bp, Setaria italica
  Peptide Sequence Number=SeqID_112207
tcatctcaatgggcaggttcttgaggaaccacgggtggttcttgatttctggaatggttattctctgttcaggatttccaacaaatatccgagacaacagatgcctgcattccattgaaactcgaacatagtccggaattgagtattgtacactgagtatcctctgtggaaggcaccaaaaagttcgatatcattgtccaaatttattgctaaataattgttttctccccgaataccataaaaagcagggaactgg

SEQ ID NO: 46234 - DNA, 426 bp, Setaria italica
  Peptide Sequence Number=SeqID_112208
ctgttggaagaagaaccttgcctcatcctcactaaatctcccagcagtgcaaatcctttcaaatagctcaccgccagcagcatattccataactattgccaaatgtgtgggagttagcacgacctgaaaaactaagtgctactttaatttttcaacctaaaaatgactttcgaaaattaaacctagacaatctgttcaaagcagatgtttaatgacgagtgtaaagtaatagcagatagtacgactggtcactgaataaataaccatataagcttttcaaaatgcagtcacaagaacagcctgatatgaaattgctaccaaactactgacaatccaccaggcaaagaatgcaggagcctgatgatgacttgtgcatttatatgctcttcctgtcggggactatatcattcctgaatttctcacgtc

SEQ ID NO: 46235 - DNA, 1775 bp, Setaria italica
  Peptide Sequence Number=SeqID_112209
gttgtttgtttgtttgtttttttgaggtgaatctcaacagaactgatgggcttatattcagtacagcaccgagaacacaatgatttctgtatagatttcagcatgtaagttcacgttgtatgctatccacagcaatgtgaatttcttggttacagaagatatgtgattcagaagcaaaccaaagcataatccaaggatctacatacatcaacaaccaaaggaatctcgctgctagtctgctacttgaccggttgaaccacgcatgaacatcacattgcgcaaacaaaatcaccactgttctcgatgtcaatgtcgtcgatatcatccaaatcaatgtcatcaagatccatatccatgctccccaggcaggatacctgcccggcaagcttcatggcctcccctggcttccgcgcctcctggatgatcgccatgacttcctccaggctttgctccgagctgttcatgtctgccagctgcatgctctgttggtagtcgtctgtcatctcaatgggcaggttcttgaggaaccacgggtggttcttgatttctggaatggttattctctgttcaggatttccaacaaatatccgagacaacagatgcctgcattccattgaaactcgaacatagtccggaattgagtattgtacactgagtatcctagtgattgtcttgcggaagttccttggatcatcagggtcctcaaatggatatgcaccgaccagcatcacatagagtgttactccgcaggaccaaacatcagcaacctttccatcatattcttttctagagaggacctctggagcaatgtatgcaggtgtgccaacagttgattttggttgagagtgcaacacagaagacttggaataaccaaaatcacagatcttgagccgtggtgcaacactaccatctaacagagtattttctagtttcagatctctatggcatacttgcatggaatgacaatagctcactcccgaaatcagctgttggaagaagaaccttgcctcatcctcactaaatctcccagcagtgcaaatcctttcaaatagctcaccgccagcagcatattccataactattgccaaatgtgtgggagttagcacgacctccttgaatctaattatgtttggatgcttcagtgaccggtggttcataatctccctttgaacatgctcatcaatcttctggcctctctcgatgaacttgacggcgaagagctccttggtcgtgacgtcccgcaccagcttggcgaccccgaagttgcccgacccgatgtccctgatcacctcgtaccgctccatcgcagcacaagatcgaagagggggcggcggccagggcgagcagagcggcagcagaagacgaggaagacgagggcgtggggcggagattgggcgcctgggccaaaaactaagtgctactttaatttttcaacctaaaaatgactttcgaaaattaaacctagacaatctgttcaaagcagatgtttaatgacgagtgtaaagtaatagcagatagtacgactggtcactgaataaataaccatataagctttctaaaatgcagtcacaagaacagcctgatatgaaattgctaccaaactactgacaatccaccaggcaaagaatgcaggagccctgatgatgacttgtgcatttatatgctcttcctgcgggactatatcattcctgaatttctcacgtcaaccagttttggaagatcaaatactcccgcaccaagaggaaaatttcctactaactaagggtttattccta

SEQ ID NO: 46236 - DNA, 444 bp, Setaria italica
  Peptide Sequence Number=SeqID_112210
cggggcatttataatttcaccaaccctggcgttgtcagccacaacgagatcctggagatgtacaagcagtacatccaccccagcttcaagtggacaaacttcaaccttgaggagcaggccaaggttatcatcgcgccccggagcaacaatgaaatggatgcaagcaagctgaagaaggagttccccgagctgctgtcgatcaaggactcgttgatcaagtatgtcttcgagcctaatcagaagctgcccataaactgaagagacagcgcagtcgatactatagaaaatacagcaaccattataagcaagcatgtaggggctcattcattgcaaacgattcgttagaatgtttattcatcatacttagcagcatatctccactataggttgatccacagctgaatagaggatacatggcagtctgttgatggcaacatggtgagt

SEQ ID NO: 46237 - DNA, 481 bp, Setaria italica
  Peptide Sequence Number=SeqID_112211
caatctgtatcatcaaatgcttgctccttagccttgcgcaaactttgtgaggatgcttcttcattcatccacgaacctcagaaccttgaaattcttttctggattagtgagtgttcttgtagggcatggataaagggaacctgcggctagaggatgaggaagagatagttagtgcaattacgcatgttttgagttctgttcgtgataaagagttgaggaaaagttggctggctaggttactttattccagctactcagcagtggaaaagattattgacatagacagagatcactcactaaggcaaaatccagctacttatacacaatccttggaccttgctgtccgtggtctttacagaatgagtgctctctttggtcatttgtctacggcaataacatctggtctggtcgacgatgatataattttatgtcttcttggaatattttggccacttcttgaaaaacttttccgatcatctca

SEQ ID NO: 46238 - DNA, 216 bp, Setaria italica
  Peptide Sequence Number=SeqID_112212
caaagacgccggcgacggagagcgaggataaggtggccgtggtgaagggtggtgccggcgtctttgacgtctctggagcagtgtccttgtccttggtgctgcaaacctgcggcttggcggtgagcgcgaacgggaacctgttcttgccgacgctcttgctgcggccgagccgctcgatgtcctgccgcatggtggagcactccttctcaagctcgg

SEQ ID NO: 46239 - DNA, 2733 bp, Setaria italica
  Peptide Sequence Number=SeqID_112213
atgcaaaaatccaatgactttttttttgtaacttttgatgctgacagtgctattcattttcaccgagcaaaagtcagaaactttagcacaagatccatatttcagcaggctttcagttcatcctgggtctactatatgcatgtagaatatctaacaggttgacaggttcatcttgtgcttcctgagcttcagctgcggcgcaccctcaccgccggcaccacccttcaccacggccaccttatcctcgctctccgtcgccggcgtctttgacgtctctggagcagtgtccttgtccttggtgctgcaaacctgcggcttggcggtgagcgcgaacgggaacctgttcttgccgacgctcttgctgcggccgagccgctcgatgtcctgccgcatggtggagcactccttctcaagctcggccacccgctgcttcatgctgtccatgccttcccgcagggtctggttctccctggcggccaggggccagccagcgccgccaccgcggtggtgctcgccagagacaggcatgccgccgagctgccgcgagatgcctccatcgaggggctcggagatcatgaggcattcggcgatggagctccgcagctggagctgctcgaagaagagcacctgcacgatgatgcggagcgggaggcgctcgttctgtgccgcatgggtgcaggcctccagggacagcttctggcagtccatcacccggcagagctcttccttgtctgattcagagagatatggatgggccttgagatatatgtcgatagcacgataaagtccgtcatctattgggcgggcatagtcgggtatagcggcagccaaagaccggaattttggcagcttcaagttctcgtctggtgcaacttcagccagataaccatcaatcaacttagcaaccatagttatcggcattaaagatggtgaagctaagatttgcccatcttcaccaaggccaggggaagccccaccagtttcttggtccattgccaagaaatggtctacaatcctctgcacacagtccacatcatatagtgtttctacagactcggagatatttggtatcaaaaggtcttccaaactggccttgtctagctgcatacctatccgtctctccaagttggacaagcaggaggggctggctttcagaaagatcgctgtgcgcagaaggccaaacagtagcttgcaagatgttacacctctttggaaaggcagcagtctatcgatctcctcaagaagatacttctggtcatcttcagaagggatggatgttaaggatgtcatagaaagacagttgctgacatcactgatgcttttacgccgattcaaaccaggcaaacgccttttggcataatgattaagggatccaacgataatctcctgactgatgcccctgtattccatggctgagatgagttttttgtataacggaaggcttaagcatgagacatcatcataccaccaatctgggctgctatttctgggccttgctccagtgctaataccattccacaagaggctccctccaggactctgcatggggcctccatactgggctactggccaaccaaatagatcaggatcactgcatgatctagttgcaatggagtctacacacctctttatgatttgcaatctttcagcaatatcaaggacgtcatcacaagtttgaagtgccttgactgaatctttccagctcctgaggactgtttgggtaaggaagttctctgtctgtgcgatcaaatttccttcagacatctcttctgtcatttcaagataatcagcagcacaacgaaggtgtacgacattggaggcagtcatttcaaactttacaccatagcaaaacttagcagctagttcaaaagcctttgctccaccaggaatatcagatagatcaatgacccaactgtcttcccccttatcaattttctccctgatacacctctccaacaggtcactttttgataacaggggaaacttgtgaagatggaaagactgctccccaactaccacacttatatcactaggaagaccagatgtgcaataccattcctgcccttgcttcctgaacacatctgctctggatcccagcttctggcacgccatctcggagcggttcggctgctgcttccaaggaccagtacagactacagaggacaccacactacatcaatgagccagccgctgggttccttgagatcgaaggcagcaaggttgcagctttctttttctttaattttttttccacgcgacttgagccgaactctccagaagaacactgacgaagggcacagtcagctttcccccagccaactctccagactggaagccgcggcgaagcgaagaacgcgcggtggagcgtcagaaggcgacgctgaagatccgccagatgacgcggaacagccacacgaagttgcacatccgcaggcgggagagcttccgagttctaaaccgcagcggaatcactgttcagaccaccgccgtcccaagaaccccctcgcctcccctggcggcggcggaggcggctccaattgagccggcaagatccagactttgcgcgggaaccggaaaggcaagaagccggcgcggcgcggcgcggcgccccctctaaacccccgccagcaccgagacagaggaggaggaaggaggaaccccctgaacccgtgaggctgcgggagagtaggaggaggattaggaagaggaggactggaggagacttcttgttta

SEQ ID NO: 46240 - DNA, 431 bp, Setaria italica
  Peptide Sequence Number=SeqID_112214
aacgaataattctgcatcgagtggcggtgcggtggatcagaataaagggaacggcggaggtctttcgagtagcaaggcaggaggcagcagtggatctccagccagcagtgccgccggagacagaaccgtggcgaaggccagcgagcagagcgtagatacgtctaataagcagccgggaagtggaagcggagacccgagcaatgctactgccggacaaggcagcactgtgaaagccgaggccaaagttggaggaggtgtccccagcaataatctgccgggagtagcagctccgggaaggttgatttgagcactggatcttctaatactcaggctggaagcggaattggcattccaaccagtggttctgcttctggaaatatcagctcggtgaaggccgaggcagaaggtgctgttggagccgggagcagtgg

SEQ ID NO: 46241 - DNA, 409 bp, Setaria italica
  Peptide Sequence Number=SeqID_112215
agaccgtactgcattaggcacaaatataatgattatcatgagaattgaccaaggatagcacatattaactaatgatgctgaaaacgatccaacaagtaatgtaccttctctcgcatcctttggctccatgcatcgtttctgcttgcacgttgatcaagtgttgggacaggaacaccagtggcaggaacattttgtccatggatcaatggctgccgcaaggtagggcttcggccaattgcgatgatttcgtcatcgctgtcatactcagcaggtttgttcattgccctgacaaccagagctaagaggaaaagcactgcctgttgcatatcagtcggcaccaggtttagtgacaagggctacatacaaaactgtacttgacaaagtacagaaaggattaaggcaatacaag

SEQ ID NO: 46242 - DNA, 1070 bp, Setaria italica
  Peptide Sequence Number=SeqID_112216
acaaccagagctaagaggaaaagcactgcctcaaaaacaacaacaccaagagcaacccatcttgcaatctcccagttgtccttcagaaagtcatacataacatcgaagttatgtgtcttgtcctttggaattacatctttccagctattgtcaaagaaaatgaacgcagcagctccaccctcagcaaggatcaacaacaagaccaagaaagcgtactttctagaagtcaaaggaaacaaacatattaaagtattgatccctatgaccctatcagttactgccttggatgaaacatcatgggttgcagaaataattaaaaacataatgcctactgctactactgttttataaattggtgttcagagtagtgcagaaataaaataaaaattgttggttcagcatgttcagtgactaatagctcgtgcacaataatgatgttgaacataattccgaagtgttttttttagtattttgtgcacacaaatggcatcttcaaaaaggagaacagagtgatgtctaagaggtctagacaggatacgaagcacaagcagcaggtgttccttgtccctgctccaatgcagccaaacagagacacgaggaagacaatagcaccaacaccaatgaacaaataaataaaccatgctttgggcagcttgtcgaggaagctgtcaccgagcgcaacggccccgagcaacggcctgccgaggacgagcacctccgccggcgttcccccgccgccgcccttggatatcttcatccactcgacgagcaggtagatcccgtacccgaccatggcgaggccggcgacggtgaggacgaagttgagcagcctgagcaggcactcgaagaatccccggcacgccgccatctccccaccacctccgcctcctcctcctccctctccttcctccgcctccgatcaaccaaccgatcgatcgaccaataccaatctaccagtacaaaaaaaaaagctccgattctcaggggaattccaacgaatcccgcccgaatcgcgcagaatttccgcgcggcggatgagaaggggaaggaggaccaagaggagggtgatt

SEQ ID NO: 46243 - DNA, 1364 bp, Setaria italica
  Peptide Sequence Number=SeqID_112217
ttttaaaaaatagtgccagtttcaaatttatcccaacatctttccgcacgttaaagaatacacttagaaagatatgagttgacaaagtttaaaataacaatgctcgccaaatcgagctgctcaacaatctggaactggacttgcaagggtgaaacgggacgaaatgcaaacaagaaacaaaccctgataaggagatgtcaatggctaacagttcgtcattcacaagaaaattacagatgcgtagagcatttgcagagaagacgtatcaggcagggtacacattatggtatcgactcgccgactctatcacccgcaccactatgaccaacacggtaacaccaaactacacaacctgagatagcccgttcaagaaatccattatctcagaggacctgatgaaggatgattcttcacagtatggtgcaacgactcctttcttcagcctgaggagcaccgttctgctgatacctgcttgggtctgaagggttgtaggtgaactggctcgtgtccagaccgtacttctctcgcatcctttggctccatgcatcgtttctgcttgcacgttgatcaagtgttgggacaggaacaccagtggcaggaacattttgtccatggatcaatggctgccgcaaggtagggcttcggccaattgcgatgatttcgtcatcgctgtcatactcagcaggtttgttcattgccctgacaaccagagctaagaggaaaagcactgcctcaaaaacaacaacaccaagagcaacccatcttgcaatctcccagttgtccttcagaaagtcatacataacatcgaagttatgtgtcttgtcctttggaattacatctttccagctattgtcaaagaaaatgaacgcagcagctccaccctcagcaaggatcaacaacaagaccaagaaagcgtagaagcacaagcagcaggtgttccttgtccctgctccaatgcagccaaacagagacacgaggaagacaatagcaccaacaccaatgaacaaataaataaaccatgctttgggcagcttgtcgaggaagctgtcaccgagcgcaacggccccgagcaacggcctgccgaggacgagcacctccgccggcgttcccccgccgccgcccttggatatcttcatccactcgacgagcaggtagatcccgtacccgaccatggcgaggccggcgacggtgaggacgaagttgagcagcctgagcaggcactcgaagaatccccggcacgccgccatctccccaccacctccgcctcctcctcctccctctccttcctccgcctccgatcaaccaaccgatcgatcgaccaataccaatctggcgatgcttcgggtgcagttctaattcctttt

SEQ ID NO: 46244 - DNA, 697 bp, Setaria italica
  Peptide Sequence Number=SeqID_112218
acaggaaaagtttcttacagcgatcaattttcttgttgaaccttcggtaaaatatttggttcctgatcatgaatctttgggaaatgtttggttcctgattatgaatcttcgggcaaacatttggttcttgatcttgaatcttttggaaaacgtttggttcctgatcattttgtccgcatgactaattggttggtgaaagcaaaaggattgggatatgtactgatccttctccgtaagatacgttctaaaggtcttgcactagatgtctgtgtatttaattcattggttaggatattttgctgggaagggtactgtaagcatgagaacttctacgaagtttctcttatacttgacagtatgctggactgcctctccagccagcaaacaacataagtcggccaggatgcaaattgtgcaaaatctggtttgctgtcccatcctccctaagctattcaactagctgtccattcatatattgaacgacgaggcaaggagctgagttgtggctagcaaaccactttaatgtgacacagattcaaggagtctgaacaagattataaagatgtacataaaggttgaacaatgggaaaatttactctttaaaattaacttctgacttcagtggaaacaagtttgcaattattgaaaattttacatgaatatcatcagaatatgttttgaagcaattggatacaat

SEQ ID NO: 46245 - DNA, 480 bp, Setaria italica
  Peptide Sequence Number=SeqID_112219
gtgtgcagttatgcacaagtagctagacagaggttataaataagaatcaaactgtttagtttcttgttggttaattcattcctttcttttcaagttcttaaattttaatgaaatttttcaaatttatttctgatatcccttttgttacgtatacaattcctttgtctagttgtacacgtatacaatttgaattgcccacaattagtaacatggaatgataaaaatcattagtattatgtagctacttctgaagttaatcaagtatccctgcaactccagcgatgcttttgatttatttcctgcacaaacttaaacggagaaataatacttgaatcgacctaaccttgctgccaattcatcttccatgcatatatctgttgaatcagctagccaattttcaagaactatgattaaggtgctgtacatgcatatatgccgtcttcttctttaccccctttctttactttccttcccccccct

SEQ ID NO: 46246 - DNA, 738 bp, Setaria italica
  Peptide Sequence Number=SeqID_112220
ccgtctccgactcgatctctcctctctctccgcgacgactcttcttcctcgcctccctccagctcgtcttacctcacctcacctagggtttcgaatcccagctcgccgccatcgccatggacgacctcttcgacgaggacggcgaggcgctcatggaccccgatgcgcgggatccttcccccgagccggagccctacgtgggcctagaggacgacctgggcgacggcgacgactggaaccgcgagcgctccccgacccccgtccacggcgacgacggcggggtgggatcctcctccaagccccggaagcgtctcctcaaaaagggcggcggcggtggcgatggcatgcctggcgacgacgggctggaggactttggtttggaggacgcggacgcggaccccgcggcggaggccaagaagaggaagggctcgtcggcgctgagggacctcgccaggggcggtgctggcaaggagaagaaggagaagaagagaaggagggaggacgacgggagggggagggacagtgggatggcgagggagaagcgggggtcaggaggagcggggaggggtggcggcggggaggtccaggatgatggagagagggagatccaggagctctgggataccattgccggtggtgactcggaggatgaccaagaaggcgttagaactgtagatgatgataatttcattgatgacacgttggggttgatccagctgatcggtatggtagtgataa

SEQ ID NO: 46247 - DNA, 481 bp, Setaria italica
  Peptide Sequence Number=SeqID_112221
agttatttcgagaaagattaatataccggatagattccaatcccccaaaacttgaaggaagtcctccagaaaacaaattgttggaaacttttagaagaatgatatgctccagtttgccaatctcctccggtatttccccaattagattgttgtgggagaggtccaaacccaaagaaagaggaggacgagcaaatagttctttcggtaagaatccatcaaggctattagaggacaagtttagctgaagcagctgcaagcattgacctaaactactaggaatatttccactcaagtcgttgtcatgaagaaacagctttcccaactgagtaatgttaccaactgaggaggggatctgacctgatattgtgttattggataaattcaacataaataggctgtgcagttttccgattgcagagggtatgctccccgagagcaaattgttttccatgctaaggaagtgaggttaacaagtttgctt

SEQ ID NO: 46248 - DNA, 308 bp, Setaria italica
  Peptide Sequence Number=SeqID_112222
caaataaaattaggcaaaactaagttgcagaagaggcacctggaactctatctttactaaagctgtccttcttggaggtcaatgatttaactagccagctaaagaaccttaggaagagtctcacaataagtagatttgggaagcaggctagtactaaagcaagttctcggacttgatggcctaaacagggaaatacatgaattaatctgcaagtgaaattgcaattgaagggatgggatcatgggattctagttgtaggagccccatacggcaccttcccccttggacgatgctgcaagtcagaggag

SEQ ID NO: 46249 - DNA, 459 bp, Setaria italica
  Peptide Sequence Number=SeqID_112223
gccgctgatgatcatcttgatctgatggtgctgcatatatatttacaaaatatgggcatctctattcttttctggcacataagcatagttatggttacaaattttgttgattgacatgaccttgttcgtagcaataggaaggcaaagatgctttagcacctcatcaccaccccccaacacacacatgcttcctgggatcgccaatcgttgtgcacccgttgcttcgtgttccccagccttgctctgttgagttggcagacaatgcgctctgctcataccgtcagaatgataacaatacgaactcaaaagcaacgacacaacatgaagccatcattctcagtctttacatcacgtccgcggtgaaaagaagaagaaaaaaaatctgctcctgccggatgcgagacgcctggacctttaatccctgtaaaaatcaagcaatctggtccaggtaaaatcgag

SEQ ID NO: 46250 - DNA, 328 bp, Setaria italica
  Peptide Sequence Number=SeqID_112224
ctcgaagcccgaggctgtcctcgccttcttcgccgacagcggcctcgccaaagccgccgtcgccgctgcagtagccagggagccacgtctcctctgctctaagttggaaaaatccttgaaaccacgccttgccctgctccgcgacatcggcctctccccgccccagatctccagtctcattaccatcgcccccgatgtctttctgtgtccgacaaagataccccgcctcgcgttctacctctctttcctgggctcctacgacaaggtgtacaccgccctcaggaggagccccttactcctcggccatgacctgcagagtgtggtcaag

SEQ ID NO: 46251 - DNA, 333 bp, Setaria italica
  Peptide Sequence Number=SeqID_112225
ggccctcgtcgaacagcatcttcccgttgatgagctcggccatgacgcagcccaaagcccaggtgtcgacgagcgcgttgtagtcttccttctccagcagcaactcgggcgccatgtaccagagcgtgccggcgtccggctcgtacggcggcgcctcggacagggacatggccatcccaaagtcgcagatcttgacggtcctgccgtcgtcgctgatgaggaggttctccggcttgatgtcgcggtggaagatgtgcttctcgtgcatcgccttggcgcccgtcagcagctgccacatgacggtaagcaccgtgacgtactaaccgttagtaa

SEQ ID NO: 46252 - DNA, 313 bp, Setaria italica
  Peptide Sequence Number=SeqID_112226
taattgtacaaatgacattttgactatgcttgcaaacctaggaaaccaactagaaaccacattgagcccaaatagatcagtcctgtatgctgaaaacagccatgtgattattctagtttatttggcatacggaaaagtgataatgtcataaacttctatacatggtagtattattgagagaaaattatgtgtactctatgttttggcactttatatgggtctgaatgactaatgacagcacagataaatctagcaataatatacaaattaaggcataattctatagtatgcagtgatatgcatgatccagatt

SEQ ID NO: 46253 - DNA, 586 bp, Setaria italica
  Peptide Sequence Number=SeqID_112227
tcaatacaccaatcaagatgtacaagcagatgatgagctccggtagccgcagtctggctgcaacgctcctcctgctccttgccgccgccgccacagcccaagcagctccggcggcgggaacagcctgccataacgacattgtcgcgctgcggagcacctgctaccagtacgtccaggatgacggtcccatggtgcagccatcgccgcattgctgtgccactgtgaggggcatcgccaacgctacctgtgtctgcgactacttcagctccctcgaccgcataaacctggacagggtgttctacgttgctgggcagtgccacgtcgccatcccctggagctgcggagacaaaaatcaggtctgacagaatccgctgatggcagaggggctgctacactcaggacagcttgcaattctcaaataaacgaataaagttggtacttctagttggatgatgttagaattgtatgatgttcacttatatagaactctaatgagtttcatagtatggttctgtatcacagcatgaatcaataggcatctcatttttctctattaattttaaaaaaaacttttgtttcctttaaa

SEQ ID NO: 46254 - DNA, 409 bp, Setaria italica
  Peptide Sequence Number=SeqID_112228
actcaaggtttttctttgacatggcaaatacaccactttcaaatttcatcattagcaatgcaaaagcaaagttttcatcagaaaaattctagctgagtaaaaaatgttacatcttcaaaagaaattgcatgcgtaatatccaaaaatacatggaaggctgacatgagacttttgcctcagcccagagcaattctcctctctcatgatgctgatgaagttaatattacagccatattataactaacctgcgaatacgaaccatgagatatttcgttctatcaatgcagctagctatgacaagaaaactaaatagaaactgcctccatactcaaaagggaaattaagaaaaaaaccataaaggctagggaatacggtagttaaaacaaatgtaagcaatgtggttctttac

SEQ ID NO: 46255 - DNA, 931 bp, Setaria italica
  Peptide Sequence Number=SeqID_112229
cctctttagttttttttttttattacgctaacaacttgccgacccttcaaaacatttatccaagggagttcaattcataacaggtttatgctgtttcaaccacaatgtttacatccagaaagtattaacagctaccagttgctgaattacactgaacgacgacgatcacagaaaccaaatgcctctcacggcctacgctgaaactgcagctgcgatggctcgacaaggccttctaagacaacaagctcatcaagaagtgcaagcttttcctcctcaagtgccttgatttcctcatcttccatgcgcagttcattgtccagggcaaagttctcttcctccagcatcatgtacttcctccgtagtgcacggtactcatcggtaggaccagagtctggcagggaatctggagttcctctgtcagatggaggagtggcagggcgctcactcttcaagcttcttttgggtggcttttgggccatgcctgatgaatgcggaacgtctctccgcagcagttcgggttcacccttcagctggcctgatgaatgcggccggtacacaaccttcttcttgtgcaactttggggcagggaaatcatcaccgcttgggtcttgcatcctgtcaggcaaagccttggagtttccagtgatgggatttgctgctgccgattacgatctcgggatggctgcccgttgctgatctgccgcgcgccgcaatggcccgtcgacgtcaggggactcagcctcaggttctcagggcgaagccgcgcaggaggccaggacccccgtcgcggcgtcgggcaccaggagaacgggcggggcggcctagaccagagcggcgccgcgtagcctggagaagtagaagggatggcgcgttgggcactcaggcggctgggcggcgggcggcggtgggaggccgcgggcggcgcagacgc

SEQ ID NO: 46256 - DNA, 557 bp, Setaria italica
  Peptide Sequence Number=SeqID_112230
atcttattcccactccgtttcacagcagagatcgcaccaaatcttctcgattatcatctccaccgatgcaactgaagaacaaagcggcggcggaaaaatggatcggaaccggggaaagggagctgcggcagcttgaatcactgccggcaaaagggtgcggcagcagccgtctccgctcctcgatctgccgcaggtgttgcctccccacctgctggcacctgcagatccggccggcttgaccttctccagcgaccatggaccgtgcttcagcggcgtggtggacggagacgccgaggcagaggccgcggccggggaagtcagtggcctgcacggcggcgagcgcgacgccccgtcgtcccccgacggcttcagctgcggcctctccttgggactgcaacggctcaaggcctgcggtctgcaggtactctcaccctccgcgcaaggcagccggcttccgaggctccgagaatggcgacctcctcttctggatccagcgctccaacctccgattcgactgctcgtcaactcccggcagcatccttcttcggggatagtag

SEQ ID NO: 46257 - DNA, 612 bp, Setaria italica
  Peptide Sequence Number=SeqID_112231
gggattgattcaaagactgaggtaggatattactttgcaccaagtggcaaaccatatccagacaactggataataactgatgttatttatgagtttgaaggggccctactttcaagatcaggcaattctgtttctggaaagcccaacaattccagtggtgatggaacagtatccttcaactccctctcatggtgtaagaattggcttggaccaaaagtgaacataacaagggctccacaggcagaacatgatggatctgatttgcaaacaaccatgaatatcgatcaccatcatggccaggacatagtacctaacatgacgagggctccacatgtgaagtacataacctattatgaggatgctgaaagtcttccaggatggagaacagcagtctgggagctcgataaagcaaatcacaggaatattgttaggatgccagtactaatgcgtgagttgtggcttgaaatgtggcacgacatgcatcctgaatcaaaatcgaaatttgtgacgaaagctttccgaggtccactgagaaatgaagactgccgctgggactattcaaaggctcggtgtggcttcccagaacactgcgaatacaggttattattattt

SEQ ID NO: 46258 - DNA, 261 bp, Setaria italica
  Peptide Sequence Number=SeqID_112232
gggaaacaaatcatcagcaatcctaaaactgagtttgtcttcgtcttctggaacatagttaggtttgctcgataccatagaagtatcatctagcacaacatcctggccttgctccatggaacaatatacttcgtcagtgtaattgttgttgccgacagccgtacctgaccagagaagacaataaatatgttggtaaaaaaaatgtgacaaagctaaaatgagcaaagttggatttgatgtaacaaataagtatagatttta

SEQ ID NO: 46259 - DNA, 1234 bp, Setaria italica
  Peptide Sequence Number=SeqID_112233
cgggtggggaaacaaatcatcagcaatcctaaaactgagtttgtcttcgtcttctggaacatagttaggtttgctcgataccatagaagtatcatctagcacaacatcctggccttgctccatggaacaatatacttcgtcagtgtaattgttgttgccgacagccgtaccatccaagtcactagatgtcttgggtgaatgtttatcagaactatggataacagctgcattatcactactttgatagtgataagctttctcttggtgttgttgacaaccatagagatcttcatcggtttgtaagacagcattgacagaagctacactagatgatgagctcacatccattagatcctcatcatcaaaaggttcttcatctttgatccaatcaacatcattcaattgtcttccagattgtgaaacagagctaggaccattactggctgacactgcgggattagcagagtcacttggcaagtccatacaggtcgcttcttcagcattgcatgaactgttgaaccctggtgacgagtctattgcaggacctacttgtggggactccgcatacaatgcatcttcaccttccttgctgtcacgtaactattcaatctgttccacgttggcactgggatcaaattcagtttctatttcaggatctgcttcaccttctgggcccatgttgttaagagcgtcgatgaagttgtcttgatcactacaaatgtcatcaggcctgcagccatcagcatcttgatcagcaggaaccccagctaaaaatgtgtttctcttcatgtcctgaatgcgagctgtgattactttcaccaacctggaagtttggacaatcctgcagctttcctaagtcacggaccatgccatttttttctaaaggttcatgttgtttccccaaaatttgtttatcacctagctccaggtaagctgatccatcagtgggtgcagatataatctccatggtattggattcgtttattggaacaattttagtaagttccagtttaccagaagactgaacaatggcaccaaaattctccatttctcccgtttcactcgagtcagttgacctaaatctcacatgacattgccttccagaatatctggagaaaattttttgttgtgatgaaattacttctagcagatgctccctgcagattctgctaatagttttatggtcaggactccttggatgcctggatttcaactttgttgtcctaggtggaac

SEQ ID NO: 46260 - DNA, 170 bp, Setaria italica
  Peptide Sequence Number=SeqID_112234
cgctggtgaagatgatggagaagctgtccctgaagatgagtatgagcgccatgcagaggaggccgatgagcaggagcagcggctcggcgaagacgaagaatggcgcgatgaggaagctggaggcgatgaggatgatccaggagcgctggaggtagacgccgagcatgtcg

SEQ ID NO: 46261 - DNA, 1752 bp, Setaria italica
  Peptide Sequence Number=SeqID_112235
tttttttttctaatattaatcccgaagtagtattaccataggtactgaatcaaaatttacatgtcaactcttgctttgagccattggcatatatagcaatttgctgacacatccaagtctgaagaatttcatcagttacatacttacatacaggacttacccaccagagagtgctcatgtttattgaaaatgagccttggcaaagtgtaatgggatgggacaacaagctggtaaagaaaacaactaggtgtcttcattccaggagaggcttgttgagctgatcagtggctttgccgccccacttctgcacacggcttgcagcttgggcggcctctgctttccaatccgttctccagaccacaatgagcaagatgagcgtctggacggcaataccgcaaagcatgccggaccaaatccccccgactccaaagttgagcttgtatccgagaaggaaccccagcggcagcccgaagacgtagtagcagccgaggttgatgtaggcgacgaggccctgccatccgccgccgatggccacccccgtcaccaccggctgcacgctgttgagcaccatggtgaggcccagcaggccggcgatcttggacacggcgcgccgcaggttgtcgtcgctggtgaagatgatggagaagctgtccctgaagatgagtatgagcgccatgcagaggaggccgatgagcagcgcctcgacgacgaccaccatgacggcgttccacgctgccctggggcggccggagccgagctcgttggatacccggacgctgatggcggcgttgaggccgatgaagatcatcccctcccacccgttgatgttcatgcatatgccgagggagtccacggcgatctgcgcgtcgtcgaggtcgccggtgaggacggtgatgaggccgatgtaccatatctcgaggcagagcatgacggcggactcgagcgacagcctgacgaaggaccagatgtcgtggaaggcggcggacgaccaccctctccagccgtccctgcaccacccgacgatgtaggccacctgccccagcgcgatggccaggtgggcaacgtcgtaggcggcggcggcgccggggaggccccagccgaggaccacgacgaagaggtagttgaggaggaggttggcgaggagggccccgaggccgatccaggcgggcgccctcaccttgctctgcgcctggaggaacttgacggcggcgaagttgatggccatggcgaagacggaggggaggatgtagagcgtgaacctgccggactcgcgcgcgacgtcggggtcctggccgatgagcaggagcagcggctcggcgaagacgaagaatggcgcgatgaggaagctggaggcgatgaggatgatccaggagcgctggaggtagacgccgagcatgtcgacctggccggccccgaaggcctggccgcagagcgtctcgagcgcgctgcccatgccgaggaggaagccgagcgcgaaggtggagaagacggagaggccgatggaggcggcggcgagcggcaggttgccgaggtggccgatgaacatctgggtgatggagctgatggcgtacatgctcagcatgctcacgccgatggggagcccgatgccccacaggagcttcgtctccgcccacaccatgcgcgccgcgtcgccggcggaacgcaccggcggcgtgtcgtcggctacctgcatggtgccgggccgcgtgtcgtcggctaccttgcggtcttggttgtcttcgttgtcttggt

SEQ ID NO: 46262 - DNA, 935 bp, Setaria italica
  Peptide Sequence Number=SeqID_112236
gcgaggaggagggcggcgggtcccccggcgcggcggcgctcggcagggaaggcagcggtggcgtggggagggcgcggagcctgaccgacgacgacctggaggagctgaaggggtgcgtggatctgggcttcggcttcagctaccacgagatccccgagctctgcggcacgctgcccgcgctcgagctctgctactccatgagccagcgcttcctcgacgagcaccagccccagcccggcaagcacgaggaggcgccggcagcgacgccggcgctcgctccggcctcgccggcgcagcccgtcgccaccaactggaagatctccagccccggggacagcccggacgaggtgaaggcgaggctcaagtactgggcgcaggcggtggcgtgcaccgtcaggctctgcagctgatcaatggcgcaaaaaacatcaaatcttgccaacaaactaaacacgggagaggatgacgaacaattgaagaagagggaatccgttccactgctgaacgcatgccatcagctgaaatgaaattacaggaatcgctgaaatgaaattacaggaatcgcggcaccgggatgatcgataccatcaagaaacacaaagaggatcatatgctaccgatcaagttgcccgcagattcatcgaagcaccaccatcaaattgataattcatcagaagcacgcaatgtcaaattaaaatcttgccgacatggctcacaaattttgccgaattacgctgggggaaggagggtcaggaccccatttcccagccacagcccgatgctctgtactcgcatgaatccttgattctcgccataatttttgcccatgtaaaacaacaccacctgtaaaatagtattttcatgctgaattgaggttgatgaatattaatcgcattactttaagatgagctgccgtctttagaaaaaaaaaaaaa

SEQ ID NO: 46263 - DNA, 264 bp, Setaria italica
  Peptide Sequence Number=SeqID_112237
acgggaaataaaatagaaagaaaataatggaaacaccgcaggtcggtgcaggagcagagaggtgcaaggtaccgcgatgttatctgcgaggtgggcgaggtcggagagtccggagtcgctgtcgctgctggcgcgcgagtccccgccggcgctgccgccgttctcgaggaagtcggtgacgagcatggccaaatccatgtcgctgtcgtggctgtggctcccgaaggcgaagccgtcagcggcgggggcagcggtgcgcagccg

SEQ ID NO: 46264 - DNA, 615 bp, Setaria italica
  misc_feature (421)..(421): n is a, c, g, or t
  Peptide Sequence Number=SeqID_112238
gatggatatgaggattggcggcgtcacaggtccgacagaaatgaaaataaccgagaggcacttgtccttcaacatggtgattttcggttgaaaaagtggaaaaacatttgtgcaggggaggttgtcaaaattcatgccaatgaaaccatgccatgtgacatggttttgctgggtacaagtgatccaaatggtatcgcttatatccaaactatgaatttagatggagagtccaacctaaaaacaaggtatgctcgccaggaaactacttccatgatatgcgatgcctcatattcaggcttgatcaaatgtgagcagcccaacagaaatatctacgagtttacagctaccatggagttgaacagccagagggttccacttggacaatcaaacattgtattacgtggatgtcagcttaaaaacncagaatggattattggggtcgtcgtctatgctggtcaggagacaaaagctatgttgaacagcacgatatctccttcaaagagcagcaacctagagagttacatgaacagggaaacactttggttatcagcttttcctcttgatcatatgctcagttgtggctactgggatgggggtttgctgtttaaaaattct

SEQ ID NO: 46265 - DNA, 676 bp, Setaria italica
  Peptide Sequence Number=SeqID_112239
cgacctaaggaacttgcagaagaaccacgacggtttgagagactctcaatctcagcgataatcttctttgagtagcataggaggaggagcagacgcctccaagtaaggccatcaggaagcaccttttcaccctctgtgttcctctgacagagatgatggttctccacaagagccactggattctcaattcgaggatcattagttacctgccggatgctttgctgaattgcatgagttcgatgagtcacaaccatatcatagttcattgcggaaccactagggccttcagggggagctgctcctgagtgagtgagagtaataattgtcctggaccatattgacaggcctagcacactggtaatagctcgcaagagggataggctatttgcttcctgtcgctgggtatcaatccgatcgacatacagaataatatcaggagggcatctcttcatatacctcttaacagagttgagcactctccgatttgatttttcatccttggccgaagtcccaagtccaggggtgtcgatgacacgaaacttgacaccatcaacaactccagtaatctctttcacagatgatgttgccggtagaaaagcatttgtcttggatttatcttcgccaaaaatggaatttattcgttgcacttctttcccccacccctagttctttccct

SEQ ID NO: 46266 - DNA, 487 bp, Setaria italica
  Peptide Sequence Number=SeqID_112240
acgacgacggaaggctcggcgccgtcgcatgcgccttcgtggtagcggcggccctcgtcgtcgtctccctctgctttgtcggcgccgcgcttgtttcggatccccggaggaagacggaggaagcagcggcggtaggagcccatcccggtgctcaggcggtgaccgagtggatgcaggtgcaggagccggcggtccgctacggcggccggcggctgctgtcgggcggtccggggtcgcacccgccgcggtgcacgtccaagtgcggcagctgcagcccctgctacccggtgcacgtgtccgtgccgccgggggtgctggtcaccaccgagtactacccggaggcgtggcggtgcaagtgccggaaccagctctacatgccgtgatgagcgcggctcgccgtcacaaggcccggcccgttcggtgcgtgagcaaacaaacaaacccccaagagcgcgcgcaggagacgaggacgactggcacggctatt

SEQ ID NO: 46267 - DNA, 698 bp, Setaria italica
  Peptide Sequence Number=SeqID_112241
tcccgcgccgccgccgccgccgcgccggcgtgggcgacctcgcccaaccacggcatcgccttcgattcctcgtgggggctcctcgacgacctggagatactcgtcaagcgcctccgctcgaagcagcagcggaagggctccatcgacgggagcgtcggcggcggcgccggcaacagcaacttcgactctttctccgaggccgggtggtccagagagatctctggcgcggttgattcggcatccagcgccgcgccgtgggacgagacgagccgcgactacctcaccttcgtcaaggaactcgccgtgctacgaacgcgcgccgacgcctcgcgctcgcgcgaggaggccttcgacaaccacatggtcatcggccgggcgctttctgagcaccgcctcttccgggacgccctagccagcttccgccgcgcctgcgagctgcagcccactgacgtccgtccccacttccgcgcggggaactgcctgtacgccctcggccgccacgcagaggccaaggaggagtacctccttgcccttgaggccgcggaggcaggcggctcccagtccgcggacatcctcccacagatccatgtcaatcttggcattgccatggaagccgaggggatggtactcggtgcctgtgagcactacagagaggcagctatactgtgtccatctcatgcccgggcgctcaagctcct

SEQ ID NO: 46268 - DNA, 577 bp, Setaria italica
  Peptide Sequence Number=SeqID_112242
acgttaaataatagtttaatagtacaaaaatcggtaggtgtgatgtggaagacattcttctggagatggataggattttacggcccgagggtgcagtcatacttcgggacagtgttgatgtactgaacaaggttagaagcacagtgggggggatgcggtggaagtccaagttacttgatcacgaagatggccctcacgttcctgagaagattttaatttcagtgaaagagtattgggttggcggcgaagagaacagttgatagatacagaatccctgatgttgatgatactttatgacagcatctttcactgtgatgcgaacccctgatgctgttctgccagtgcatagatactccatacatatagtgcaacagacccagacctcgccattcgccccatagacgatcaggatttgggcatcctattcttttttgttgtgcatatttagtaccagagcattaacggaaactttggcgatttgccaatacatgttttataggtaaacgacaataacttaacacgcttcattgtgtggagattcgttttacagatgtatacagaaaattttcttttaaaa

SEQ ID NO: 46269 - DNA, 446 bp, Setaria italica
  misc_feature (426)..(446): n is a, c, g, or t
  Peptide Sequence Number=SeqID_112243
gaggccggcgaggtcccggcgtcgtcggtcgtgcggcggcgcacggcggcggagagcgaggcggacgtgatggcgtacgtggcggcgcgggtggcgtcgtacaagaagctccggctgctgcggttcgtggacgccatccccaagtcggtgtccggcaagatcctgcggaggcagctcagggacgagttcctcgagagggccaaggcggccgccgcggcagagggcaagtagccacgctcaacttaaaatccctgcttggagtatgtatacgagcgctaggcaaaatgcgagttcaaacgagtgccgctagaggtgttgtcaattatgtacttgaacatgtgctatatccggttgcagaaaccgtttgagaacaactattttatgagtgtataagcaagagaagccgatttccgtagttccgttacnnnnnnnnnnnnnnnnnnnnn

SEQ ID NO: 46270 - DNA, 321 bp, Setaria italica
  Peptide Sequence Number=SeqID_112244
caaccatttggcggagctgaaattgcaaccatttgtcattatattaagaagaaaataccgttttggtacaacgcacgcacacagcctaccagccgctctgcatttccagcattgaggaaaatgacgctacatgagttgaatgtgtttgaaagatgggaggcaggcgaaggaatttcaggcgaagaggtaacctttcctcagctcgaggagctgttaatctggtcttgtcgcagcctgagtgcactaccgaaagggccattatggctaagcaaccatttggcggagctgaaactgtgtgctgccgctctgcatttccagcac

SEQ ID NO: 46271 - DNA, 1052 bp, Setaria italica
  Peptide Sequence Number=SeqID_112245
agcttcctgcactctgggagctaccagctctgcaaattcttcacctggagggtttggagagtttacattgtttgtgcagcggtggtgctacacccgtcacatttccaaatctgaaggtgcttaccttgtttagaatggcagaatttgaggcatggtgcgagacacatgaggtacaaggagacgagccgatatttcccaaggttgaggagctggtgattgaggagtgtgaaagtttgactgcattaccaaaagcagcgtcggtgattacagaattgtctggcagagttgacaataagtgccgctctgcatttccagcattgaggaaattgacgctaggtgagttgactgtgtttgaaagatgggaggcagccgaaggacctccaggcgaaggggtaacctttcctctgctggaggatttgaaaattgatgattgcccgaagttgactgatctacctgaaacaccgaagctaagtgaattatccataataagaaaagtaggaggacttggtcaacaacaacaaataatccctagaggcagctagcagatgcattccttcattgtcccgtctgaatctggaagtgtcacccgatgaaacagaaacaacattgctgcatgtcaagaataaattgaatggtacactcgccctacgagctatgaggttagatcggtgcgacctttttttctcctcccgctcaagcgcactggcgctatggacatgttttgcacagctagtagatttggagatttggaattgcgatgctcttgtctactggccagaaaacgtgttccaggtcctggtatgcctgaggaacttattgattttcggatgcagcaaacttacaggacgcacacaagcttctgatgagcaatctgctccagctccagaaaggggtggactcctgccatgccttaagtctctacagataatagattgtagatctttggtagaggtccccaacctgccgacatctctcaagacattatttttttgggtcggcaatagaaatgtcgggtccatcgtatttggtcaccaggaggatacgagattggt

SEQ ID NO: 46272 - DNA, 473 bp, Setaria italica
  Peptide Sequence Number=SeqID_112246
ttaacatgtattgagattcgagaagaatttaaatacgaaaggcatttggtataataggggatggtgttaaatgtattgatttggcagcagcgtcatagtggttttgtttcagttttgatgctttatccaagttgtcaacagaggactgaatatgcaatggttttttttaccttttgcggcaatttagtttttttagctagtgtgaatttaacactcttggcgagttagattttctgtgcatttagtactgtgaagttatttcttcatccatagaattgtggagtttccacactaagggtgcgattggttgcctgcttttacttgggccaggctccccggatgcagaatctttttgattggttgcctgcaccgttgctcagtcctgcctctctggatgcaaaatgccatcgctcagccaggctcctgggaaacgaggatggtggccgtttcccccgggccagggtcgctgtctt

SEQ ID NO: 46273 - DNA, 320 bp, Setaria italica
  Peptide Sequence Number=SeqID_112247
accaaacatggaggtgttcctttgtatatggagccttgtaaatttaagtgctctcgaccaaaattgagcattaaggatctgtactgccaaatgtgagcaccttgaagaaataccagaatggcattctggttagatggttcaatacaagagcttgtgtggtaccaaattcaatgatttttctagattgacatgtgattattactttgctaccgctggcaattccaccaacataagttgaatatatgtttttccatgtatcctcgtcgatatcctttggcaattcaatgataagtagcagcgcttatttccatcagagatgc

SEQ ID NO: 46274 - DNA, 1919 bp, Setaria italica
  misc_feature (1885)..(1919): n is a, c, g, or t
  Peptide Sequence Number=SeqID_112248
tagtaccttgtaaggcttggcgccaatcatgatggccagtaacatcagggccaattcgggtaagagggtaggaactgtccctggagttgaaataggggatattttctatttcaggatggaactgtgtatcattggattgcatgcacctagtatgggaggcatagattacatgactactaagtttggaaatgatgaggattctgtagcgatatgtatcgtctctgcaggcggttatgagaatgaggatgatgacacagatgtgctggtgtacagtggccaagggggaaatagtaggaatactgaggagaggcatgaccagaagcttgagaggggtaacctagctcttgagaggagtttgcacaggaagaatgagataagggttgtacggggcttcaaggatccattttgcataactggaaaaatttacgtgtatgatggcctctacaagattcatgagtcctggaaggagagaacaaagtctggtatcaattgcttcaagtacaagctgctgcgtgaacctggtcagcgtgatggagctgcaatatggaaggtgactcagaaatggataactaatcctactaccagaggcaatgttctactagctgatctgtcatctaaggctgaaatgttgccggtttgtcttgtcaatgaggtagaccacgagaaaggacctggacatttcacctatactaaccaggtcaaatacttgaggcctctcagttctatgaaaaagttgcagggttgcggatgccagagtgtttgcctgcctggtgattccagttgtgcttgtggacaaagcaatggaggcgatttaccttacagttcatcaggattgttggcctgccgcaaaccaataatctatgaatgtggtgattcttgcaactgttctacaaattgccggaacagagtgacccaaaagggagccaggttacattttgaggtcttcaggaccaccaaccgaggctggggtcttcgctgctgggaccctattcgtgctggtgcatttatatgcgagtatgctggtgaggtcattgatgagctcaaagttaatctgaatgatagtgaagatgattacatctttcagaccgtatgtcctggtgataagactttaaaatggaattgtgggcctgaactgataggtgaggagagcacatacgtaacagctgatgaatttgagccaatgcccatcaagataagtgcaaaaaatatgggaaatgtctcgcgtttcatgaaccacagttgctcaccaaatgttttctggcaaccagtacaatatgaccatggagatgacaggcatccacatataatgttctttgcactgaagcatattcctcccatgacagagctgacttatgactatggtgttgctggagctgagtctagtggttcaggttctcgtagaacgaggaactgcatgtgtggctcacgaaactgccggggtttattttgattagttgggacttgctcattgtggttaatcatgcaaattactttctgctagatccttccaccggaccccaagtttgagctgcatggtgttacgcctcaaggatgatcatgcgactgatgatatcatcgtccgcgaatgtgaactgtgaaggcagtaaattatcgtcgaaccgtagaatttccattttttcctttgtcgtatgctgcactcggctcgcagtgcgtggtggccgtcgtcccatcatttgctctgatgtgttgctgctgctgctgctgctgctgctaatcctgtgtaccagttgttgcacccggtttcgtagtccgattagccctgctcgcgctggacgcctggccgttgcccgtgactcctttgatttggtgtcattgtaaagttaaatctggtttaggatcatgttgcttttgaaactaaaaacgnnnnnnnnnnnnnnnnnnnnnnnnnnnnnnnnnnn

SEQ ID NO: 46275 - DNA, 653 bp, Setaria italica
  misc_feature (1)..(5): n is a, c, g, or t
  Peptide Sequence Number=SeqID_112249
nnnnntttttaacaaactataccaaagaatatcttgcatttgttgcaattgcaatctgcgagcgtttttttccctacttttatgatctcagcataccaaagaaaaaaattgtgacaacacctcgcgagcacaggaataagtatccaaactatttacaagcagtacaagatacatccatgactacatgtccgtgcaaggatctgctccgaaggaaacagaacgtagaattttctcatcgctaaactccacatatgcattctgccctcagtgagtctccaccagcaatttcatgtctgttgcatgattatctagctcgtggcgagggtcttgctttagagtttaggctgtatatcaggggtctgaaccccgggcgactcatgaataaaacctcacaatttgtatcatctcagctctaagcttggagaaaagaaaacgcctccgaaaatgcaccaatagtgggatcttcaaacgctctgctgccttgctaaggcaagtagttctcacttcatatgaaccaattttgttgcacctaacccaaccttaccttgacctgtattgagccgagtctcgtcttctcccttcctgggtaatacctgtgcttcttacagatgaagtgtttggctctgcctaaggggttggtgacgaacccgcca

SEQ ID NO: 46276 - DNA, 718 bp, Setaria italica
  Peptide Sequence Number=SeqID_112250
ctgccttgctaaggcaagtagttctcacttcatatgaaccaatttgttgcactaaccaacctgaagaaaatggaaagagtgacaatttagttggcaattgattgaatagaaaatgttataacaagaccatgcaaatttgacaataaaggtaggttggtgccaattgagaaggaatcccaatcacaataggtagatagtattagggttggggcagggccccataattaaattgattctgatgtgctaaagaagaaagcaactactttcatgtgctatgctgctgtcagtttccaagtgtcctaattttcattagcgtacctagcaaatctaatcgtgtggatgacagagtttactggtggcttctattaccttaccttgacctgtattgagccgagtctcgtcttctcccttcctgggtaatacctgtgcttcttacagatgaagtgtttggctctgccaaggggttggtgacgaacccgccctgagctccaaacttttgcctctcccacttgtaagaagtcttgctctcctcagagtagtttggtgcatctgagacggagtacctggaagtgtatctacctccatcatgtcttctccagaattttgggctcagaatgcagcatgcattggtgtcaggttcgctgtttgggatccttcctgacgaggcagccaaatcacgggatatctcgtccaataccatctcgagcccattcaccct

SEQ ID NO: 46277 - DNA, 926 bp, Setaria italica
  Peptide Sequence Number=SeqID_112251
ttttagttttctttttcgtttttggttttcgttttagggtcttgctttagaccagtaaggtttaggctgtatatcaggggtctgaaccccggcgcgactcatgaataaaacctcacaatttgtatcatctcagctctaagcttggagaaaagaaaacgcctccgaaaatgcaccaatagtgggatcttcaaacgctctgctgccttgctaaggcaagtagttctcacttcatatgaaccaattttgttgcacctaacccaaccttgacctgtattgagccgagtctcgtcttctcccttcctgggtaatacctgtgcttcttacagatgaagtgtttggctctgccaaggggttggtgacgaacccgccctgagctccaaacttttgcctctcccacttgtaagaagtcttgctctcctcagagtagtttggtgcatctgagacggagtacctggaagtgtatctacctccatcatgtcttctccagaattttgggctcagaatgcagcatgcattggtgtcaggttcgctgtttgggatccttcctgacgaggcagccaaatcacgggatatctcgtccaataccatctcgagcccattcaccctcgtctccaaggaacgaatcccattctgagagctccccatgaatttctggagaagattgagcaaactagcctgctgattctcaatctgaaccagctgcatcctgatcttcgacaggtcctcatccttgtgagctgactgaagttcatcgggcgcatcctcggtcagggcagtctcttccaaatcaccatccccgttgtatggaacaactctagatcctgacttgggaccaaccaacttcttgtaacccttctcaccagtcttctgcaagaccgcccttactgacgttactttaccaccttaaagttaaattaaccttagta

SEQ ID NO: 46278 - DNA, 504 bp, Setaria italica
  Peptide Sequence Number=SeqID_112252
catacagggagctctcgaagaaagcacagaaagcaaacaacatctggtggaggctgagtggactgttgggcgataggaacaaaaacagccatgtccagagatatgatttgtcttccacatatggccatgtaactctggctgctcttccttctggatgcatggcagcaaatgtttgcgggttccaccaccggatagtgaacagaacaatcccaggtaaaagatgtatcaggacactaacaagtttgtcaaatgagctaaataccaagctgcagcgccacacaattagtgcccaagcatccagaaggaagagcagccagagttacatggccatatgtggaagacaaatcatatctctggacatggctgttttttgttcctctagctgcttacaccttgtggcaacttatgtattttctcatagttaatgtgctgcgtcgacagaggttattaagggaccctgtatgatgtcatgacttcagggtcccttaataacctctgtcgacg

SEQ ID NO: 46279 - DNA, 496 bp, Setaria italica
  Peptide Sequence Number=SeqID_112253
ttactcaagcctcatcgactacgcagggatgaaatggtcaagcgaggagaccttagctgtgatagtactatgtcctgtgtaaagtatcacgccatggggtcaagaatctcattccccagtgtcagctaaggggttggtaggttaattcacctggccttccttgagcccaccagcttaaattgtgtgcacgcgtcgtcgtgctttgcatggtccctccgttcctttccaaaatataagtcgttcatctgcaaagtcgcccattgcatttgcaaggcatcttccgggaatcgtcgtttcttgcacacagcaaacatgcatggattcttccagaagcatcatcataatccggccttcaacatcctgcttcaatctcccccactactggttttgctcctcggttgtgtgctcgtggtggttacccgacgtatcatcactcctattgtttgttggtagttacaatacaactactaccaacaatagttagtagtacgaagta

SEQ ID NO: 46280 - DNA, 2010 bp, Setaria italica
  Peptide Sequence Number=SeqID_112254
tctacctggccttcttgagcccaccagcttaattgtgtgcacgcgttcgtcgtgctttgcatggtccctccgttcctttccaaaaataataaagtacgttacaatactaataaaaagaccaaaagccaaaaacgacttgcattgaggcatttatttatgggcctgaaaaacgatacaataagtttaccagaccgacttggtatcagtcaacctgcaaagtcgcccattgcatttgcaaggcatcttccgggaatcgtcgtttcttgcacacagcaaacatgcatggattcttccagaagcatcatcataatccggccttcaacctgaagcaataaaatcatgcatcgccctacagacgaagaaaacaaactcgcaactggaacaggtaaagaacctccctatcggcaatactggtacatgatgcactgtttaacatctcaactagcaccatctttgcccatactatcaaacacgcgcacgcatcatatctccagatctccacccccggtgagagtctaaacctagaggccccaactcggacagtggttatatagctcccaaccaaaccaacactcacacaaagtaataacaaagactgtatcagtaaacagcaaaaatctaatcttacatcctgcttcaatctcccccactactggttttgctcctcggttgtgtgctcgtggtggttacccgacgtatcatcactctccacatgttgtgtcgagttcacctgtttgataggcttcatgttgagtttcttcttctgctgtttctgtactacctgccgaggcatcacctccaggatgaagctcccgccattccatgtcgatgcgcacaccttcagtatttggaacacaatgtgcatccggtaggacaggaatatggggacagtcaaggccatcgttgccactgtgaacagcgcctggagcagtatgtacatgacctgccggttcctatcgcccaacagtccactcagcctccaccagatgttgtttgctttctgtgctttcttcgagagctccctgtatgatgtcatgacttcagggtcccttaataacctctgtcgacgcagcacattaactatgagaaaatacataagttgccacaaggtgtaagcagctagaggaacaaaaaacagccatgtccagagatatgatttgtcttccacatatggccatgtaactctggctgctcttccttctggatgcatggcagcaaatgtttgcgggttccaccaccggatagtgaacagaacaatcccaggtaaaagatgtatcaggacactaacaagtttgtcaaatgagctaaataccaagctgcagcgccacacaattagtgcccaagcaagcggaccctctgcaaatgagaagcaaaccatgaataacttttcatcctttggatagaagagaatcattacaacgagaaaagtgttggcatagtagcagaagtccaggagatagtaatgccactttttgtagcggtagtagatccaacgaagcggaacgaatatgacatagaacaggcagtacacataaggaacatcctgtggtctggcacccaggaggtagcaaaatcccccaaatccaagaacacccagcaagtgtgtgaccttaaagatgaagcgctcgtgctcctcggccttggtggcgatcttgacggcctgcttggacagcatctccttggcctggtccctcctccggcggacgtcggcggtcccgttggcgaccagcggcgaccccgccgccgccgcctcgtcctccacctccgacgccatcccttccgaacaaggcaagaaccttcgagacgcgaccaaggcctctggaagacgtaaagctccctgccttccccctcctatcctctgcaccacctttcttttttattaatttccccctttccttaatttttccctgaaaaatgctctcaatcagtcatgaagctctctctctatatatatatattcagaaaggacatgtaatgggtgcggtaaaaaaatttgttaattaacccttt

SEQ ID NO: 46281 - DNA, 357 bp, Setaria italica
  Peptide Sequence Number=SeqID_112255
ttgttgggttgctgcgcggcccaccggcaggcagcagctcgatgtacccgacggacgcagaccttgacgagctcctcccggacgggttcctgacgaggacccaggggcgcgggctcgtgtggtcggcatgggcgccgcagaaggaggtcctggcgcacccggccgtgggcggcttcgtgacgcactgcgggtggaactcaacgctggagagcctctggttcggcgtgccgatggtgccgtggcctctgtacgccgagcagcacctgaacgcgttcgagctcgtcagggtcatgggcgtcgccgtccagctgaagaatatggaggtgagtgaggtggagccctttgtggaggcggcgg

SEQ ID NO: 46282 - DNA, 972 bp, Setaria italica
  Peptide Sequence Number=SeqID_112256
cgcggagaccgacggcatcatcgtcaacacggccgccgagctcgagcagagcgcgcttgccgccatcgccaacgggcggtgcacgcgcggcgcccgtgccccgaaggtctatccgattggcccggtgatctcgttcgcgccggcccccgagcagccgcacgagtgcgtgcggtggctcgacgcgcagtccccagcctccgtggtgctcctctgcttcgggagcggaggcttcttcgccgcgccgcaggcgcgcgagattgcccacggcttggaacgcagcggccaccgcttcctctgggtgctgcgcggccctccggcgcccggcggcgggcggcacccgacggacgcgaacctcgccgagctgctccctgacggattcctggacaggaccaaggatagaggcctggtgtggccgacgtgggcgccgcagaaggagatactcgcccacgccgccgtggggggcttcgtgacgcacggcggctggaactcgatcctggagagcctgtggcacggcgtgcccatggcgccgtggccgctgtacgccgagcagccgctcaacgtcgttcgagctcgtggcgtgctatgggtcgtcgccgtcgagcttggtgtcggcacggaagcgggacaacttcgtggaggcggtggagctggagcgagcggtgaaggagctgatgggcggcggcgaggaggggaggaaggcgagggagaaggccatggagatgaaggtcgcgtgcaggaacgccgtggaggagggtggctcatcctacgcggcgctgcagagtctatccgaggctctctacaaaggcgcagtggttgtcggcacgaattaagtgaggcagcgtcatcaatgtcgtgttctcctatgcttgcacaatggtacattgggtgatttgtttggaggcatcacattgtttttgttatttgccaaataaaaatttccgcctctcatctttcttattttacttttaaaaa

SEQ ID NO: 46283 - DNA, 1556 bp, Setaria italica
  Peptide Sequence Number=SeqID_112257
tcatgtccatgctcgagtcctgcaagcgcgtgctcctcagcggcggcggcggcggcaaggccttctccatcaccctgctcgtcgtgcgcccgcccaccgacgaggccacctccgaggtggaggcgcacgtgcgccgggaggccgcgtcggggctagacatccgcttccaccgcctccccgccgtggacccgcccgcgggcgacctcggggtcgaggagttctccgcgctctacctcagcctccacgcgccgcacgtccgggatgccatcgccggcatggagtgccccgtcgccgcgctcgtgctcgacctcttcgccgcgacgctggtcgacgtggcgcgggacctcggggtgccctcctacgtcttcatgtcgtccacgggcgccatgctcgcgctcatgctgcacctgcccgtgctccacgagcggttcaccgtggagttcgacgaggtggagggggagatcgaggtgccgggcctgccgccggtgccgccggccaacatgccgtgccccgtcgtggacaagaagagccccaactacacgtggttcgtacgcctcggcgacagcttcatggacgccacgggcatcatcgccaacaccgcggacgctctcgagccggggcccctcgcggccatcgccgagggacggtgcgtgccggggcgccccccgccgccggtgtacccggtcggccccgtgttgtcgctcggcgaccgctcgccgtcgcacgagtgcgtcaagtggctggacgcgcagccgccggcgtcggtggtgttcctctgcttcgggagcatgggctggttcgatccgccgcaggtggtggagatcaccgccgcgctggagcggagcggccagcgcttcctgtgggtcctgcgtggcccgccttcgtcggagacgggcgccggctccccggacgggtcggagcacccgacggacgcgaacctggacgagatcctcccggaggggttcctggagcggaccaagggcaggggcatggtgtggcccaagtgggcgccgcagaaggacatcctggcgcacccggccgtgggcggcttcgtgacgcacggcggctggaactcggtgctggagagcctgtggcacggcgtgccgatggcgccgtggccgctctacgcggagcagcacctgaacgcgttcgagctggtggcggacatgggcgtggccgtgccgctgaaggtggacaggaagcgggacaacttcgtggatgccgcggagctggagggaacggtgaaggagctgatgggcggcggcgaggtggggaggaaggcgagggagaaggccaagcagatgatggccgtgtgcagggaggccgcggcggagggcgggtcgtcgcatgccgcgctgcagaggctcgcccaggcgctccacgacggcgcggcgatgcccaagaagtgaaaggcccggcagcgtagccgtgtgctcgtcgatcgttcgatcatggcgcgtccatggatcacgggctcgtggtgtttcttttcaggattttaccagttgttcgcgaggtaaaggttggatgcggcagagttgatttgtgttcaatca

SEQ ID NO: 46284 - DNA, 524 bp, Setaria italica
  Peptide Sequence Number=SeqID_112258
cacttgcaggagacgtcgtgtataagaacttggggctagacaatgccaaattaacagaattatcgaaagaaatcgacataattgtaaatggagctgcaactacaaatttctatgaaagatatgatgtggctttcgacacgaatgtcatgggagccaagcacatttgcaaatttgcaaagaggtgcaataaactcaagatgctgctacatgtttcaacagcttatgtagccggtgaacaagaagggatactaccagagaagccattcctggtgggtgaaaccctgagggaaggcggagaccttgatattgaatccgaattaaatctgataaaagagatcaggatagacatggaaaccaactgttctccagaaaaggttgagaagagaaccatgaaggagctcggcctcaagagagcaagggagtttgggtggccaaacacatatgtgttcaccaaggcaatgggggagatgattctggggcatctgcgaggtgatctcccggttgttatcatccggccgagtatc

SEQ ID NO: 46285 - DNA, 542 bp, Setaria italica
  Peptide Sequence Number=SeqID_112259
ccttcttgccctcgccgccgtcctccttcttcccgtcgccgtccttcttgccgtccccgccctcctccttcttgccgtcgccttccttcttcccgtccccttccttcttcccgtccccctcttccttcttgccctcgccttccttcttctcctccttcttctcctccttcttctccggctccttggccgggccgatggagtcgatgtgcgcggcccatgacttgcgcagcttgctcaccacgtccaccgggtccaccgtgccgatcaccgtcatcttgcgcgccgccatgtccaccgagatggcgtcgatgccgacgagcacggagacggccttgatggccttctgcttgtccttgttgtcatgcaactccagcctcaccacaattttcttcgacatgcctgagagaagaagagcactgggaaggatgtggacggaatgcaggtggagcagggtggagtgaagagtggagaagccagaggaaagttgggcgaggtagtagcgagcgagcgtgccaacacgcaacgacgccgagcgcgagggc

SEQ ID NO: 46286 - DNA, 491 bp, Setaria italica
  Peptide Sequence Number=SeqID_112260
ttggtcctcgagcacaaatttctcctagttgatttggtggcagatgtttcagtgtctctacatcaacgatctttgcttcgacttgtatgacaagtgttccagttgatccaagttgacgaactttgaccctttctggattctctaaagttatgataccacatgtctcggtcataccgtacccctggacgatctcggcgtccgggaagtccttggccacggcttccatgagatccttgccgagcggcgcggcgccggagaggatgaacttgagtgagctgaggtcgtaactcccggtcctcccgtgcttggctagcgcgatcattaccggagggacgcagcacaggtacgtgacgcggtggcgctgcacggcggccatcgcgtcgtccacggcgaaccgcggcatcacgacgacggcgttcccgcgctgcagctgcccgagcgtgacgacggagagcccgaagaggtggaacatgggcaagaagcagaggaac

SEQ ID NO: 46287 - DNA, 344 bp, Setaria italica
  Peptide Sequence Number=SeqID_112261
tcgctcgcgacgccgctctcggagctcgtcccgctctcgcactacgccgccgaccggaggcgcaggtgatggacgttgccacattggtgcaacactgtgctcgtcactacattactcctttcttcttttttatccttttattactttcgaggatgtgaagccctgggattgtttttaggatatctagaaaattgtttggaaatcacaattaccttgattagattttgtaatgtagaagtagatgatggagcaggggatagtgtaaatacagatcgctggtttctctgagtacctgctggtgatttatactttgtgttactactaagaaaaaaaaaaaaaaaaac

SEQ ID NO: 46288 - DNA, 1218 bp, Setaria italica
  Peptide Sequence Number=SeqID_112262
cccgtgccgggaccgggcctgcccgcgcggcttcggctgcgtcgccgtccccggcgacggcgcgctcctcgtctgcggcggcctcgtctccgacatggactgcccgctccacctcgtgctcaggtacgacgtctacaggaacaggtggaccgtcgtgacccggatgctcgccgcccgctccttcttcgccggcggcgtcattgatggccgggtctatgtcgccggaggctacagcaccaaccagtttgagctcaattcggctgaggttcttgatccggacaagggcgtttggcagccgatcgctagtatgggcataaacatggcttcatctgattcagctgtgatcagtggtaggctgtatgtcactgaaggatgcgcatggccgttcttctcgtcgccgagagggcagatctatgacccaaagatcaaccagtgggaggcgatgccggtcgggatgagggaaggttggacagggcagagtgtggtcattgacgggcgtctgtttgtgatttcagagtatgagaggatgaaggttaagatctatgatccggagacagattcatgggactcggtcagtggtcctccgatgcccgagcggattatgaagcccttctcggtcagttgtctggacagcaggatagttgtcgtcggccgaggtctccatgtagccattgggcatgttgataagcagcctgctggtggcggcaattctggtaacaggagttcaagctactccgtttgttggcaagatgtggatgttcccaaggaattcagtgatctgacaccttcaagcagccagattctgcatgcttaattcatcttttgagccaccttctccggtactatgatcgatcaactgtttaaactgcccctctgagctgtgcaactggggtgttctgtatagtaggctctttcccagtcagatctctatgatctggagctgttgtattctatacctgtcaagaaataaatcgagtttcttcaaaaccgagggactttataagtaggtgcttgtcagttcatgaacagtaagttgttctatttctctgtgggtctttatattggtcagaattgtttgaaactgaatgcattgtgccaaatgcgttttgctttgttgacaaactgatagcataactgcacttgtaacgagtctctctctataaattacttgcagattgcagtacattgcataaatgtgcttattgcagttagcaaaaa

SEQ ID NO: 46289 - DNA, 253 bp, Setaria italica
  Peptide Sequence Number=SeqID_112263
ggccgacgaggtgaagccaattcccacgagtatgcagggtgaaacaagcgcatccagcgccaagggctttgcattcgacctcaactttccaccgccattggatgacggtgcctgtccagacgccctgatcagggccggaagaatttttgctgatgaagagtttgcgctcgtggaaataaatccaaccctactcttgttgtacataaagaagggctggccagtctggaggagctgctaaggtgagcggccttca

SEQ ID NO: 46290 - DNA, 446 bp, Setaria italica
  Peptide Sequence Number=SeqID_112264
ccagtaatccccaagcagaacaccaccaagcgtgagcttgagcgtgcccgcgcggatggcccttgacagagagacgccgagcatagcggcgtgcttgccaccgtaggactcgccaacaatgtacatagggctgtgctccagtgcgggcagctcatcgttgaggagcgattcgacaatgacggccaagtccttgacagcttgcgagtccgtcctcaccagcgcgctagggttctccgtgtagctgtacccaacgcccaccggagcgtcctacgaagatgaggtcggcaaccttgagccatgtccactggcgcggctgcaagttaacgtccagtggcccgatctccaggaagttgccgtggccgacgccagaccctcccgggccgccttgtagccaaagaacagtaggccatggtctcgccggcgtggagaccctctgcgggctccta

SEQ ID NO: 46291 - DNA, 287 bp, Setaria italica
  Peptide Sequence Number=SeqID_112265
accaccaaatattgctccagtatttttttatttctctattctgtaccactgtgcccgaacttgcttgggactgaaaggctatgttgttgttgtattctgcaccactgtgtcgtagcttgtttttcatatccatttcatcttttaccggactggaagtgtaaagttaacttttggacaatgccatgtttgcgtaattgtcaacgtttgatctttgaaaaattgggttttgcatgccataggtatcatattactgtttaaaactgtcattaaggccttgtttggatgcg

SEQ ID NO: 46292 - DNA, 461 bp, Setaria italica
  Peptide Sequence Number=SeqID_112266
tagcttgcaagcttcttccttccccgcccgcgttgcacggttcgctttcacacatcagctcatctcatcacgatctaaattcccccacagcgatggaccccgccctctcccccgccggccgccgcgccgccacaatcgcgcggcacctcgccggcgcgctcccgagtcctccgcccctcgccgccacggtcgcgctgctgggtccttccccatgcctcagctacgcgctgccggagtcgaccgagcccgcgccagcgttcccgcccgctgagctccgcgcgctcctcgacgggcaccacctctgggagcgcgactgggtattccgcgtcatggaggagagccagctcttctgcccgcgccagcgctgcagtgggagtagggtcttcgtggcgccggactacaacgacgggaaggaggcgcagcgggaggccacgatgcggcgggtcgcgcacctagcgcgg

SEQ ID NO: 46293 - DNA, 517 bp, Setaria italica
  Peptide Sequence Number=SeqID_112267
aatagggtagaagactaggaaatgtcaattactagcaagcaacgaaattactagagtcttgaaatagaaaacaccaggtttaagccatctactgtaagacccaccactggccaaaactgacgcacaaagggccatcagtcttttccaccctttctgctaccaaccaaatcaaaaaacagtagctccagattgagttttgcatcacaatcgacagatcgacaagataactggtggctaaagcagtcctcttctaacaatcagccataggttgtcgcatatgaatccaattattttattatgctaagaaataagtgacttgcaacaataataggtatattgtcatctcgttgtctcagatgaaaagtccttcataagttatacttttctagttgaaatagtcaacttgtacaaacaatgataaattttttatatgaaggaggctgtaaaattaaatgcggtataaaagtagaaaacagaaaggcaaaattctttatagatggcaccattgtcttattct

SEQ ID NO: 46294 - DNA, 279 bp, Setaria italica
  Peptide Sequence Number=SeqID_112268
ccaacaataatatacaaatatattccacgtacaactatattagctcaattaatttgtgtttaaattataattattagaattgaattcaattccaaggatcgaaacaggaccttagatcatttggtgaggacttacccgtcatgagatcaaacggcgggatctccagtggcttgtcgggcaggccgaccatgatcattttgccgtagggcttcagcatgctcatgtatggggccatggggatgttggcggacaccgtgttgatgatgccatccatggtgc

SEQ ID NO: 46295 - DNA, 338 bp, Setaria italica
  Peptide Sequence Number=SeqID_112269
gccccggccagtggttctcgaaaccctcgttgcagctatcgcaggactggcacgagttcacgatgcagcccacgccgacgcggtcgccggccttgaacttggtcacgttcttgcccacctccgtcaccactccggcgatctcgtgactttcatcatgcacaaggaacaaataattcagtattttcagaagttggaatttgataatgtgttcaaacaatggcacaactgggaaagtagtgacgaacaacgcaacaaggcattgtgcaagtcatcacgtacccagggacgacggggtacatggcgttatgccactcgttcttgatgctgtgcaggtcaga

SEQ ID NO: 46296 - DNA, 1062 bp, Setaria italica
  Peptide Sequence Number=SeqID_112270
gactgtccgccgttcacgccgtgcttcgccgccacgtcgatcatctcctgcgtgtccctcatgccgccgatgcagctccccgccagggtcttgctcccgtcatgagatcaaacggcgggatctccagtggcttgtcgggcaggccgaccatgatcattttgccgtagggcttcagcatgctcatgtatggggccatggggatgttggcggacaccgtgttgatgatgccatccatggtgccagccgcagccttcatttcgtcgtcgttcctgctgacgatgaaggcgtcagcaccatggcgctccagggcctcctgcttctttgccggcgacgagctgatcaccgtaaccttcatcccgaacgccttggcgaacttgacggcgacgtgacccagccctcccaggcccaccacaccaacatgcttcccgggcacgttcagaccgtggtgcttcatggggctgtacacggtgatgcccgcgcacagcagcggcgcgccctggtccagcggcatggcatcagggaacctgaccacgaaccgctcgtggaccaccacgttgctcgagtagccgccgtaggtgacggtgccgtcgaggtcgacggagttgtaggtgaagatcatgccccggcagtggttctcgaaaccctcgttgcagctatcgcaggactggcacgagttcacgatgcagcccacgccgacgcggtcgccggccttgaacttggtcacgttcttgcccacctccgtcaccactccggcgatctcgtgaccagggacgacggggtacatggcgttatgccactcgttcttgatgctgtgcaggtcagagtgacagatcccacagtacaaaatctttatcgctacatcatcatccccggtgctcctgcgggtgatggtgagcggcgcgaggtggccggacgcgtcgtgcgccgcgagcgccgccgccttccccgtgtgctgcggcttcgccgccgtagccgctgccctccgccgccaccgtgggagccatcgaaatgcctttcctttcaggatctggactcgtaaatgcctggagattgaggtggagg

SEQ ID NO: 46297 - DNA, 1535 bp, Setaria italica
  misc_feature (1490)..(1490): n is a, c, g, or t
  Peptide Sequence Number=SeqID_112271
caaatcactcagtacaggtgctaaaataggaattgtagcagctagcattgttattcttgtcatccttatccttattgctatcgtatgccattacaaacggatctcaaggcagtttcctagttcagagaaggtttcagataagaacctccacagggctactaaagactctgccagtacgaaaggaaaggacaacaaaggtggtttggtctcagcagatgagcttgttactcctcgaaagggctctacatctgaagcacatagccaagaagaaaaatcagctgttggggggcttttcaccataccaagggcaagccgctactcttggtcaccggattctgggagaggcgtatggtcaggaaggattggcacggttggatgttagatcacctgacaggctagcaggggagttgcatttcttggacgaaacaatcacacttacaccggaggaactttcaagggcgccagctgaagttcttggcaggagcagccatggaacttcgtacagggctacactggagaatggtgtgttcctgactgtgaaatggctgagggaaggtgttgcaaggcccaagaaagagtttgcgaaggaggccaagaaattcgcaaacatccggcatccgaatgtggttgggttgcggggttactactggggtccaacgccacatgagaaattgatattgtcagattatgttgcgccaggaagtcttgctagcttcttatatgatcgaccgagcaggagaggccctccactgacctgggcacagcggctgaagattgcggtggatgtcgcccgtggcctgaactacctgcactttgaccgcgcaatgccccatggaaaccttaaggccaccaacatcttgctggacggcctggacctcaacgcccgtgtcgccgactactgcctgcaccgcctgatgacccaggctggcgtggtggagcagatcctcgacctgggggtgctgggctaccgtgcccccgagctggcagcctccaagaaaccatccccttcattcaagtccgacgtgtacgcctttggtgtcgtgctgctggagctcttgaccggcaggtgcgctggggatgtcgtgtcggggtccgagggcggtgtcgacctcaccgattgggtccggctgcgcgtggcagaagggcggggatcggactgcttcgacccggccatggcctcggattcagagaaccagcaggctgtgaagggcatgaaggaggccctgggcattgcactgaggtgcatccggccggtctccgagaggcctgggatcaagtctgtgtatgaggatctttcgtcaatctagctaggttcattcactagcactagattaacagtctctgtgagttagccgtgtgtgcgtcgtctcagactctaagtactgctgtagcaaggaaatcccaagtgtatttggcctcgtcttgatgccagcttttcaaatggttgccatttgccaaagtgtttcgctgcttacaaaaaaacaaaaaanaaaaaaacctaaaaaagagaactagaccaaggacacacagggata

SEQ ID NO: 46298 - DNA, 460 bp, Setaria italica
  Peptide Sequence Number=SeqID_112272
gccacagcagatgctaaaagctaacctccaatatttcaatcgggccacgtcatcatattaggtccattttaaatccgtgttttgctaagcagccgttggaaccctcctgtcgccggctttttatttcccagcaccgtcacgccgccggacccgggccatcgtcactgcaagctttatttaagtgattgtaatttagtctttggaaaacataacactactgaataccgattgatgtactaatgataatctaaaccaatccgaaaagatagaagttaggcacagcctgttcagaacacacaggcaaaggaaaacagagcaacgatttcaatactgctactagcaatttgaagcacagatagcaggagcatcagtcggtcacctgtcaggcagcgagttcctcactctgtagataagcgcggacagcacctcggcctaatcttgacccaacgcactgagactg

SEQ ID NO: 46299 - DNA, 466 bp, Setaria italica
  Peptide Sequence Number=SeqID_112273
aacgtggccagttccattccatttatttcattccttttcttatccctactccgtaagagatataccagccagcggctaatcttagccatcgttgtccaatcatcatacgtgatcagagcaactccaagaggacgctaaaaaattctttcccaaaacaaggtattgggggctatgctaaaaaatttcccctccaaaaacatatcagcccacagcagaatgctaaaagctaacctcccaatatttcaaatcgggccacgtcatcatattaggtccattttaaaatccgtgtttttgctaagcagcgttggaaccctcctgtcgccggctttttatttcccagcaccgtcacgccgccggaccccgggccatcgtcactgcaagctgtcaggcagcgagttcctcactttgtagataagcgcggacagcacctcggctttgaagaagtccaagaagaaatcgttgaaga

SEQ ID NO: 46300 - DNA, 884 bp, Setaria italica
  misc_feature (1)..(8): n is a, c, g, or t
  Peptide Sequence Number=SeqID_112274
nnnnnnnntttttgttgccattgtgtattttgttccaccataatttgttcttttcttgatggaaacacaggcacctttcctgtatagtctagaaagatatgtacatgatgcatgcacaagaagcaatgcttagccggggatatggatcaaccaattctataaacatgccggggtcattgctgttatatctggttatcgtgaagtggcaactcttttatcatcagaacacgccttctcctccctacccaggtgacccaatcaggatcccttgacacaaccctgtaccctgctttggcgtagagacctcgagcaccatcgtcatcctcatatgccctgagaaccatgaatctgtgcctccattggaaccctagtgcctcgcaggccttcagcagtgcagtccctaccttcctcctcctgaatgatggtagtactgcaattccagacacgtagaggtactcatcagcgccttggaggtgcttaaggatgtcatcttcatcctgcactgtgcaatccacgaccccgacaattttctcatagggtgcctgtgatagctgggtggttggctcagcttcttcagccaccaaacaagcatatctgtcaggaggcgagttcctcactctgtagataagcgcggacagcacctcggctttgaagaagtcgaagaagaagtcgttgaagagcgcgacggggacgtggaaggccttggcctggacctgcgccacccgccgcatctcctccccgacccgccccatctgccgcaccccccacccggcctcccgcgccaggtactcgtcgtcgtcctcctcctccctcgcaacgcctgcagcagccgaccccctcatccgttgtaggaaggagagaaggccaccccccacccctcccgg

SEQ ID NO: 46301 - DNA, 631 bp, Setaria italica
  Peptide Sequence Number=SeqID_112275
ccgatgtggatgcacttcaacatctggtctcgtggagcgaggctgctcaaggatgaatccatgatctccaccagcgttcccgttgtccagtgctcccacaccaaactaaggagatcagcagattcatcggtgctgtacgagccaccatttctccttcccgtgacgatctctaggattaaaactccgaagctgaacacatcggacttgatagagtaatgcccacgcatagcgtattcaggggccatgtatccataggttccgacaacacgatttgtgacatcttgtgtttggtcattttcgaatagccttgctaagccgaaatctgagatcttaggattgaagtcatagtctaacagaacattgcttgctttgaggtcacggtggataatcttcacttgagaatcttcatgaagatactgcagtccacgagcaatcccattaactatcttaaatctcttcccccaatcaagctcaccacatctctcggaatcgaaaagaatagtgtcgaggcttttgttgggcatgtattcatagacaagcaatctttcatgatcctccaagcaaacaccgacaagcctaactaaattcttgtgttgtcagcttagcaaccaaaacaagctctattttttct

SEQ ID NO: 46302 - DNA, 290 bp, Setaria italica
  Peptide Sequence Number=SeqID_112276
tacctgaagaggtgtcagggagacattggagaggtgcaagtggtcagggacatgcatgagcgcaagtcagaaatggcgaaacacgcggacgctttcatcgccctgccaggcggttacgggacgatcgaagaactgttggagatcatagcgtgggcgcagctggggatccacaacaaaccggtggggctcctcaacgtggacggcttctacaacagcctgctctcgctgttcgacaagggtgtcgaggagggcttcatcgacgccaaggcgcgcaacatcttcgtcctcgg

SEQ ID NO: 46303 - DNA, 597 bp, Setaria italica
  Peptide Sequence Number=SeqID_112277
catcgagggaatatccaccttctctctgtctcttgctccctctccctgggtgtctcatcctttcctcctcccctccctctcgtggttcgtgactcatggaggagaatcaagagaagtttgctgatacggagagcggcggcggccgcggaggcggacggtggccggcggtgcgggcgatctgtgtcttctgcggaagcaggccggggaaccggccatctttcagcgctgccgcgctcgaccttggaaagcaactggtcgaaaggcagatcaacctggtctacggcggcggcagcggcggcctgatgggcctggtgtccaaggccgtctatgacggcggccgccacgtcctcggggtcatccctagcgcgctcctacctgaagaggtgtcaggggagacattgggagaggtgaaagtggtcagggacatgcatgagcgcaagtcagaaatggcgaaacacgcggacgctttcatcgccctgccaggcggttacgggacgatcgaagaactgttggagatcatagcgtgggcgcagctggggatccacaacaaaccggtaaccttgtcgtatttaactgccgtttgcattctataatatt

SEQ ID NO: 46304 - DNA, 368 bp, Setaria italica
  Peptide Sequence Number=SeqID_112278
agggagggcttcgcaaatctgccccaaaccaaataccttcaaagctagaaaaacttaaattatacacaagtaatgtctccagaccacaataagatgtctgacaacagatggaagatttatgacacacctaggaagtcatgatgttgcagaaaagccatacacaagaacaagtcactcgatcatttttatccaaggtacttctagcattcagatgaaaaacacaacaattgacaacaataacacagttgtgccaaacctatcccttcataaatataataatcaaagaaaatgtgggtttcagcaactgtttgctatataaaactgctcagaattttacagaatagtttgattgcaacgtagctaactgt

SEQ ID NO: 46305 - DNA, 389 bp, Setaria italica
  Peptide Sequence Number=SeqID_112279
cttcccacaggtccgaaggcaaataatgaacagtctaaggtccccaacaagttatcctctctgttctgcggaactcaagacaagtgtgctgcctgcaacaagactgtgtacccattggagaagatcacattggagggcgagccctaccacaagacctgcttcaaatgcgctcgcggcggctgcctcctgacgaccgccaggtacgcctcccacaacgggatcctctactgccagatccacttctggcaggtgttcaaggagaccggcagctacagcaacctgctcaagcctgcgcccgcgaagaacgccgctggcgagcccgaggccgcaaaggcagaggcagccaaggaagaagcgtcaccggagcaggtccccgaagccccagagga

SEQ ID NO: 46306 - DNA, 1670 bp, Setaria italica
  Peptide Sequence Number=SeqID_112280
tttttttttttgttttttcaaacagaatttgatcgctctcatggttgattggtctccgagctgagggacccttgactcggaagcacttaacagaccatattgtttgttttacaaaagatttgcaccttcaattcgatctcagagtatttttcttcataatataaccatattggcattcaaggcacatgtcggtccattcccagtaaaagaaaaaagaaaattgcagacagcatttagtttatttcaaaaacctggcacaatcgatagtgaaaactactgcctctctgggacgtgcgcactctccatgctacacactccaatcagccacaggcctcagtactctcaagctcaaggagcaaaactattcttcagtacaaatcaaggccttcccttgttttcagattatttttgtttcctttctttccgtgcctttggttaggaaatgctgtgtcgcatagaggatgaccatcattcagtcctccatcactcatgttgaaccagcctctggagctaaccaaagtttcaccttcttgtccacaccagcactccccaaaataaacgcaggcacgccaccattgagaattgttcgcggagcccaagcaatgccagttatatcaccttcatgagctttctcagctgtatccaaaactgcaccagtttccacacacaaccattgcaacgtcgatccgcttgttacagccaaaattttaccatcaggagagatgctcatgtggtcatattggcaaactgaaccttttgagtcatgcagtggaattgatagcactcttaaggtttttggatcctcatcaaggtgataccttacattaatgttccatactcgaatggaaccatctttggatgcagtgataatttgctcagaatttggggcaaagcacaagctagtaacagcgctcttgtgacccatgagttgcatgactttattaacctctttcactgaactgtcctttgagtaaactatctcccacaccttgacatcagcagtaaaagctgcagcggctatgaagcggccatttggggatatgtcagccatattattttttagctgattggtgtcaacagtacccaactcctttccactcttcccatgccaaactttgatatcggttgcttctgagcacgaaataattatagtgctcccatctccgggcccatgagttgcacgggctgctgcaaggttgagcactgattcctttccatgaatcttttggtgactccacttgatctcgggtggagacagcttgccctgctgcttgttttgggccgttggaggagcactgacatccgcatacatatagagagatgagcccagaagagcctgtgctgccacaacaacagatgaagagccctctgagaaagcaacaccagtaggatgtgctccagcaggcaagtttatcctcagaatcttgaagctcttgcttgaggtatcatcgatcctgaatacccttacagctccatccgcacacacggtggctaggttggcaccatcgttggagaagtgaagtgcagtgactgagtcagtgtgccccctcaaggtgttgacatcaagatggtggtgcttcttggcagcatccttatcggcggcgttgtgatgcgggcgggcatggcccttcttgtggtgtgcctggttggaggggcggacgtgcttcggc

SEQ ID NO: 46307 - DNA, 1636 bp, Setaria italica
  misc_feature (1)..(40): n is a, c, g, or t
  Peptide Sequence Number=SeqID_112281
nnnnnnnnnnnnnnnnnnnnnnnnnnnnnnnnnnnnnnnncttttagtcgaagtttaccgttgatgcaaaatgtaccgaggatgaaaactcagaggcaccagaagaggattttcaagttcttaacagccagctgatatatattgtctgcggctccgcgcgacgatgtacatcttaactgaccagagaattcctactaccgcataatacgcctctctagtctctactactagtccactactactcatggaaaaacggaacatcgctcgttaccagcattaggcgattcgccttccatctaacatttcaagaggatagctggggtgttctccatagatcacagcataactgcagcaaccgcaacggccagcatgaagagcaaggaggtgacacatttggccgatgggtttggactggagccgctacgagctggaagagatgttgaattcatcgtgctcatcttactgccggcagccaaatagacacaggtgtcataacttggatcttttgttgttcgtattccggcaccaccaaagtcacaagccacaacgttggctccgttttgctggtaatagctattgaatgcatatgaagcatgggaagccaaagtgtccggctgatagcagggttggcttggctgaatagcagagcaatcgacgtttcctggaccacatgcccagttgagagcattctgcagatctgtttctgatgcattagctgaagcaatacaccaggtcccatttgcacttgtaatgtttgctccagtcataacatccacattgcctcggccagtccaatcaaggctgtagatggagctctgatcagggaaaaacagtccccagttcctctccgactcaatgccaggtttccggttctcattgaacaatgagaatatgtagacatcaatttcttctcctggttttgccggtgtgccgctgtcattaacaacatgacgtatcaaattggtattgtaagtctgagcattgtctggagtggctcctgtctccttggctgcccctttgtttggccagcctgactcagtgaccatgatcttcagagtcttgaagttcagagccatgagcgcaaagaagatggaatcaacctgggcatcgaacatgttagagtaaaccagtccagtgtttgggtcaatcacatcctgagactgcggcgagaacagagcatagttgagggacacattgctgggcgagttctggtacgcatagtaggggtatagatccaccataaatggtgcctggttctccacaaggaactccagcaaaggcttcaagaagtgggcatagctgctgttgaacgcccctgctgacggcgggaaggaccgggacagtatcccgagagagtgcgtgctggagatggtgatcttcttgtgcaggccggccttcttgagtgcggtgtgcacatttcgcattgcgggcacgacgagcccggagacgttgacggggctctcggtgacctcggcgccgacggtgatgtaggtgatcatggtggccgggtagtaggggaggatgctgttcttgaggaaggtgttgacgttggactggtactgcgcgaaggcgaggaggtcggagttggggacgccgaccatgagctcgacgccggtgttggcgaaggccttgatga

SEQ ID NO: 46308 - DNA, 1319 bp, Setaria italica
  Peptide Sequence Number=SeqID_112282
acgcataagcctgttgatggcaaggtgaacccgagccttgctcagctgagcgtggacgagaaggtgttgagggaatccaacaagtacttcgacgccaggatggctgcggaggcggccttcaagtccgcgtcgttcgccgcgatggccgcccgtgctgccgtcgagctgtctcggacggagtcacaggggaaagggccgaggggcggtggctacgacaaggcgcgccccgtgcggaccacggcggcaacggagcaagggacggcgccgccgtcatggaggccgcagaagtctccgtcgccgtcgccctcctggagcgacaggagcacggcgacctcggtcgggtcggacgcggcgtacaaggggaaggaagtcttgttcgaccagagcgacgaggaattggaggacgtcgtctggccgccgccgccgcagcgccggccatcctacagtagggcggcctccacggtgggaacgggcgtcggcgccggcgctagcccgtggcacggggacgccagaacacggccgttccaggacggcgtgcccgagaacaaccacccgcagcacaggaggcacgccacggagttcgccggtggcaacgcgcgcgcgcctgccctccacgacgccctgggcggcggccagcgtgggcagtacgtggccccgccgtacagaaggaaccccgcggccaacacgggcaggagcagcgacgccggcgccggcgccggcgcgtacgagagctcggcgtacgtgcacccgccgtacgcgcggatcgtgtcggcgctggagcgcagcaacgagcacatcgcgcggcacgaggaggtgcgccggatcggcacggacgcgcgggtgctccaggagcgggtgtacggcgccgcggcgccagggcacgggcacgggccgctgaacccggaggggaggaccaactcggtgcgcacgcggagatgagctcgctctgcggttgcggcatttgcagttcgtggccagtcggcattcgtcagttcagagtccagggttgggatggcagcggaatttctggcgcaggaaatcgggtccgttgcttcgccggcagagtggcggtttcagcggtttggtgcgggatccgtggagatttcctacctctggaaatgaaatactcgtagattttgctcggactgcagcattgttcatggaactaaatagggattatgcataggtaggtggcctttttgtacagcggaagggttgggtatggagctgtgattaactgagagtttgttttttagtttgtatcgtagggtactaagctgcaaaattttctgactaaaaaccaaaaaaaaaaaaaaaaa

SEQ ID NO: 46309 - DNA, 266 bp, Setaria italica
  Peptide Sequence Number=SeqID_112283
gcatcaacaattttgctagctaataagctctgcaagttggccatgggcgatgatcttgtgctctgcctgcttgtggtatcgatgcaagtgctggttcccgtcgtcgtcgccagccgacggccgccggcgatctacgtgttcggggactcgacgctggacgtgggcaacaacaactacctgccggggaaggacgtcgccagggccaaccggtctccctacggcgtcgacttccccggagttcccaccggaaggttcagcaacggcta

SEQ ID NO: 46310 - DNA, 333 bp, Setaria italica
  Peptide Sequence Number=SeqID_112284
tggtcggtccttgtattggttgcgttctagtctaatttcagcaataataaaaatagtgtgctgaatgtgttgtaccacaatgatgtgatgcatatggaaaatgcgtaatgagctctgttttcagggcaaaagctgggtggacaagaagttgctgtgcaagctaattagaacattgaagaactgtcaagctctgtgcaaggatgcacaattggcagagatggagcttgtggggaagcactgattgccaagcttcgacactcactgcacctgaccgttggacatccagagagggcaatatctgcaacatggagctcccaggtgcaggcctcatta

SEQ ID NO: 46311 - DNA, 478 bp, Setaria italica
  Peptide Sequence Number=SeqID_112285
agttaagttattagcaggctttttataaaagtgaacctagatatatagatacttatatatattaggtcactctcttctgtaagaaaaagtcaacaagaagctgggttcatgtgaagaaaattgctgaattgatgaaaaggctcactggtccaagaagtatgccatcatgatatttggatgttttttttaatagaattggtaatatggcaagtgaacaaaaacttgcatggcgaattaaaattggtagttatcatgattcatgaatagataacgtcttatgcagtataacataggctagcaggcttcataaagtgaccctagatagtagatagatacatatataggccattctctcctgcaaggaaaagtcaacacggagctggttcagtcttagaatatactccatccgtttaaaattgcaggtcgtttaactttctagattcatagatattattatgcatctagatatatacactat

SEQ ID NO: 46312 - DNA, 390 bp, Setaria italica
  Peptide Sequence Number=SeqID_112286
ggaggagaagggcaagcatatcgtcgggaagatgcgggagaatgcgaggagcaacaacagcctgctcctgccaggcttggagcgggctaccacccctgctcctgctcctgctcctagttagcacagttagtcaagagtagacagtagagatgacaactgctactcaacaaaaatggaatgagaaatcctcatttatagcgcctggcaacagctcctacaaaatgaaatgatgtgggagactgtttgcgattgtatcattgtatgtaaaagagcctatggatgtaccataccacccagctagagctacagttttcactcaactagatagatacatgtatgcatctcgtcaactctcctcactgaacaaatataacaagcaacagttccttt

SEQ ID NO: 46313 - DNA, 438 bp, Setaria italica
  Peptide Sequence Number=SeqID_112287
acaacaaacacaagaggcaatttgtagctggatgttgaatacgttgttttgcagagatacgtctgattgggtttcaggcttcagctattaacgtgaaataggcagccagcaagacttccatatacagcaataggagacttcccttcccctaaaattcatactgaaacgtcaaagctataattaattaaggcaataatagatccacaagttttatcttctttcttatgggttattcaatccagctagatttctgtcacaatcatattacacactcaaatttatgatccccaaattgacgcgatgcaatcatacatgttcagttttttaggtgctttaatgttgcgtgcaaaatctttgctacaatacttattccttttgggcctttggtcaaggtctacaaaacgtaggagtagctttttaatcatttacaactagcaa

SEQ ID NO: 46314 - DNA, 611 bp, Setaria italica
  Peptide Sequence Number=SeqID_112288
tgtaaagtcttcgttgaaagctcgtttgagatgctccattcaacagtcgctgggcaacatgcagactgcatcctacgttttcagtctgcgtgaggccacctctggtccgcaagcaggtcgagccaatttgatgacgagggctttgaataacggtgaccaggttaccgacacaacgtgacataaaaattaaggccatcaaagcatgcctgtgtaccacctccaagtttcaacatgatcacgatggctggattgctgttcaaatatccaatcaccagagcgagagcaggatctccattttgacatcttccagctagtaatgggttctggcaatgatatcaagccacttgataaattaatactgttcccaaaccaacctggggagtgcttgggttcaccatgatctctatatgtaaacctcatttctaacagctgcttagcatccataaccccacgcatcgtatgtttagttcccgggtagttcagcatgccactcttcctaaccctatgcagattttctcacatccatatgcatcctatcatgttgtggtgccatggacaccatcgcaccttggtcctaagtctactttgtttggtctaaagtactaggtctt

SEQ ID NO: 46315 - DNA, 453 bp, Setaria italica
  Peptide Sequence Number=SeqID_112289
acctgatcattctaaggtgttatgacacattatttgatgctgcagccaaattttgactgccaaaaaactgttttcttatctgcaattcgatgctggataaatctctgaactttgtgattctagtatgatactttggcatttgtttcctgttagatattttcccagtattcttttgtattctggaatcaattttcaaaagaaaacttgtatcacttcacaagttatgtgtttgtcagggtttataggcatttatctgttgttcggtaatgttgttatattatcttattatatccttccatggagttaggatttcttccgctccagacatgttcaagtaaactgcatgtgttgcagctaaggacttgagctttatgttacccctgccagcatctttagattccagatcataagaaaataatcatgcagcatattgtttggaactttttaaattat

SEQ ID NO: 46316 - DNA, 394 bp, Setaria italica
  Peptide Sequence Number=SeqID_112290
ctacttaaaactatttattttcttatggttggacatgcttaaaagatactaccattttttgcagtcacggtctgtgtttgtcaagaatttaaatttcaagacaacagatgagtcgttgagccagcatttcagtacaaagataaagagtggcagtcttaaaagtgtaaaggtgaagaagcatgttaagaatggcaagatagtttcgatgggatttggattcgttgaatttgactcggttgaaactgcaaccagtgtgtgcaaggatctacagggaacggttctggatggacatgctttgatcttgcaactgtgtcatgggaagaaagatggtcaagccgcaaagaagaatggcaaggatcaaagttcaacaaaacttcttgtgcgtaatgtagca

SEQ ID NO: 46317 - DNA, 689 bp, Setaria italica
  Peptide Sequence Number=SeqID_112291
ttaaacgtttaaagtaaaaatttaagaaactaacggttagaaaactagacaaccagtgtgtgcaaggatctacagggaacggttctggatggacatgctttgatcttgcaactgtgtcatgggaagaaagatggtcaagccgcaaagaagaatggcaaggatcaaagttcaacaaaaacttcttgtgcgtaatgtagcatttgaagcaactgaaaaggacttgaggcagttatttagtccgtttggccagatcaaaagcctcaggttgccgatgaagtttggaagtcacagaggtttcgcttttgttgaatacgtcacaaagcaagaggcacagaatgctctgcaagccctcgcaagcactcatctctatggtcgacacctggtgattgaacgggcaaaggaaggagagactcttgaagaactgcgagcaaggactgcggcgcagttcgtggacgaacacagtggtttccagaggatgtccaaaaagaggaaacagagcagccttgtggatgaaggctctgttaaaatttcaaggatattggagtaacgttttgaggaaatatgctgaaaattttgactgctttgtgcgatgttatcaattagttacggaaaatctcatgttctcttgcttaggttgctcaaagttagtgtaattttgatcattttcaggctgtaggatctttaactag

SEQ ID NO: 46318 - DNA, 638 bp, Setaria italica
  Peptide Sequence Number=SeqID_112292
gatgacctcaaagtggaccgagagaaccaagccatggccgtccagtacctgccgttcttgcacctcggggagacgccgcggccgccggtggtggccatggaggacgccgagatgagcacgagcccgcgcggggagatcaaggcagcgtcctcggacgccagcaagaacgcctcgacgaccagcacggtcagcgacgacagggcggtctctgcttccgccggggcggtagagaagccggtcgacgaggccaccacggtcccgatgtcctgccgctcgccggacacgccgacgtcctgcagcggggagagggccgacgacgtgttcaagtcgccgctggggggcatcgacatggaggcggagcagagcgcgatgcagcggcagatcatggagatgtacgtgaagagcatgcggcagttcagcgagtcgctgcccaaggtgcagctgccgttggagcttgacggtgtcgtcgtccagaaggaggagaagcctgacgacaaggtgatccacatccagaagcagcaggtgaagaaggatggggcgagggtgttctacgggagcagagctttcttctgaacaaaatctgcagagaggaaaaatgcacgcaaagagcaatcatcgtgcccgttgataatcattaa

SEQ ID NO: 46319 - DNA, 420 bp, Setaria italica
  Peptide Sequence Number=SeqID_112293
aagaaaagaagaaagagtcatacagagacacccactagaaactaataagaccaatcacctgttacaggaaaggactacctgaccatagagagatctaaacacccaattagccaacccctctggcagtgagcaaggtgagacctttagctcctgccaaacaccaaagctcagcttcctcccaagcaaggatcaaggctgcagcaatgttgggagcagaaatatgcttcaatatccatattgagcgagtgttaattattttgtgttcctgagccaaatcacagctatgtttgttatgtgttttagccaatgccaaacaaagagaaattgtgataaagctaaacagaatgaccatagagcgttccaataaatcaaaaattttaccccgtcatttgcaaatcaagcctcaccaggtcatttgat

SEQ ID NO: 46320 - DNA, 485 bp, Setaria italica
  Peptide Sequence Number=SeqID_112294
gggacgccgccctcgtctacaaccagtgctacgtccgcgtcgccgtcacggacttcctctcctcgccaaacaacaccggcatggtgccgctcatcagcggcaccagcatccccgccggcgtcaacgtctcggcctacgacggcgccgtcacgcggctgctcaacgccaccgcggcgcacgcggtggacaggtcgtcgccatcgtcgccgaggctgtacttcgccacggggcagctggtggggctcgacccgcgggtccccaacatctggtccatggcgcagtgcgccggggacctgtcgccggcgcagtgccggggatgcctccacgatctggtgacgctgtggtggaacgggagtgggttcaagcccaacggggagggagcgaggctcgctggctcgcggtgcaacctgaggtccgagctcggggacaagttctacaccggcgctccgatggtgaagctgcagatgaacggcgaagcggccgtt

SEQ ID NO: 46321 - DNA, 611 bp, Setaria italica
  Peptide Sequence Number=SeqID_112295
ttccgtgagttccaacagccagctatctgattcctcacatacaaatgtggaagaaaagcttgcagatgagggtacactttgttggaacctcctgttctctcggttgttttttgatgctaaaatgaatggtgaggtcaccaaggccatcaaagcacgcattcagcgaacattatcaaacacgagaactccagcctacattggagaaattacacttgctggcctcagtcttggaaagcttccaccatatctacacagaatgagagtcatcccactggatttgaacgagctgtgggcttttgaagtcgattttaactattctagtggaatgcttctgcatattgaaacaagacttgagattcaggagccagagttggaaaaagacataatgaggactagtcttaaagatgattctaacggggatgtgggttcggatgtccttgatagcattgagcaatatggtaaccaattcaggtcttcagaagctttggattctgtagtgggggatgatgatgaagcagatgcattaaggaagtcaaagagcactggatggacatcaacatatatgtcgaggtggaaaagaatcttgcattcaatagctgaccaggtatcac

SEQ ID NO: 46322 - DNA, 309 bp, Setaria italica
  misc_feature (220)..(309): n is a, c, g, or t
  Peptide Sequence Number=SeqID_112296
ggctgtcaacgaaatcttgttgcgtttcttgaacatcactgagaactttttggtgattttttgcagttacttgcaattttcttggtgtgcgcatgaacattcttgaatcttgttgcttttcttgaacatcaccaagaactttttggtgatttgttgcagtgtgatgcaatttttcggtgtatggatgaacatgcttgatgatggatggtaatttaacttnnnnnnnnnnnnnnnnnnnnnnnnnnnnnnnnnnnnnnnnnnnnnnnnnnnnnnnnnnnnnnnnnnnnnnnnnnnnnnnnnnnnnnnnnn

SEQ ID NO: 46323 - DNA, 401 bp, Setaria italica
  Peptide Sequence Number=SeqID_112297
ttactaggaattctggactagtatcatgtgagtgatccataatcacttgtgtcagttcaatcgtgtacaagcacaatttatttaattgtttggtgttgtgttctttgtaatatttaaacagttatgaagagagacgggaacattgcatctctttttcagaagcatgaagcaaagagaaaggcagcagcagctgctgctacttctaatcgttcttctgatccggttgtacctatggtggaagagcaaactcgtgagagagtagttgaggaaattgaaactcatatcctagcgccaccaccaccgcccccaccgcagccgtcttctgtgccaccagtttatgacatcaatcgccttccacaagatccaggtgaaagacgtcccattcttagttatcctactaa

SEQ ID NO: 46324 - DNA, 864 bp, Setaria italica
  Peptide Sequence Number=SeqID_112298
aggttcagcaacccaagcctaccaaggtctcgctgtcctacgaggagatcctccaagctattctccctccccatggtgccgactccgaggcggcctccatcctcggagtcggcaccagtgtcctgaagaggatatgccgctcccacgggattgttaggtggccatatcgaaagcttgtttctgggaaagctggtgacgacacaaaaggtcctgaaagagagaaagccaaggaacttcttgagttgtcaaaaattgcaaaacaaaaggcttccagctcatctggttcatcaatagtgtcatcgagcacttcccaaggagctgcaaaatctcaacagggcagttcgaaggcaggacaagtttcggtttcgcccccagcaggtaaacaaaatgcatcaccaagtttggcccatggtagccaaaccaaagcgatccctggctacatggatgatttcaagtacggattcccatcatctggcttgccctgtgaaactatgaaatggtggggtgggagcagcgacacagactgcgagctcaccaaagatggaaaccgtgaagcccatggtgaggcatcaaagggcatgactgatgacgacgagttggactggggagcagatgagggggaagccgaagctgatggcgctgttacggctgaagcgtcagcacagctgtgctccctgagaaggaaagcagtagacgacgggcgcaagctattgaatggtgacacccgcaggggccaagaattttctaggctgaacaagaggcagaagctggccctggcccaggtatttggggcttcactgccagatgttgtattgcttgtgtttagcgagtgagcaaccgatagatgcggttgccctccctctt

SEQ ID NO: 46325 - DNA, 400 bp, Setaria italica
  Peptide Sequence Number=SeqID_112299
ctgcgatctcgtcatttcttgtcagcgaaacgctcggaacacggttcgcgagctttgcctacttgccttcagtgggtgccagtggcgggatccttgtggcatgtaaaggccctgaggtgtgttgcactgtcatgaactccgggcgcttctcggtgactgtcaacattgccgtcgaagcaaccaacgagcagtgggttctaaccacggtttacggaccgcagcctgacaccgataaaattaagttcctcgctgaattgcgctccatacatgctctcttaaccggccactggatcattgttggcgacttcaacctccttctccatgcatctgataaaaacacgtgaacattaaccaaaggaacttgggccggttcaggcgcttcgtcgtcgacttgcagctc

SEQ ID NO: 46326 - DNA, 1796 bp, Setaria italica
  misc_feature (1776)..(1796): n is a, c, g, or t
  Peptide Sequence Number=SeqID_112300
cctatcccctgtgtgccttcctatccccctgttgcgtgtctcagcctcctcccgtcccactccccgcgcggccgccaccgccagcccgccgcgtcctcgagcgccccctccagttctccgcctctccttcctcccctcccctgcaatggcgtcggcgggagggccctccggggtcgtagggattagtgtccgtccggactccagtgcggcctgcctctttcagaaggttggagcccgatcgaattccctccctggcgcagcccctgttcaggttcgccggtgccacaacaaggcccgcaatggccaagctatcaggtgtgcaatggcaactggaaaagagcagggtgcagtcaccactactagtagtgatcaacacaaaggtggtttgcgtggcaaattaaacaaagttgttttagcttatagtggtggcttggatacatcggttattgttccatggctcagggagaactatggttgtgaagtcgtttgtttcactgctgatgttggccagggcgccattgaattggaaggattggagaagaaggcaaaagctagtggagcatgccagcttgttgtgaaggacttgagagaagaatttgttagtgaatatatatacccctgcctgcgagctggtgcagtttatgaaagaaagtatcttcttgggacttcaatggctaggcctgttattgctaaggcaatggtcgatgttgccaaggaagttggtgcagatgcagttgctcatggatgcactgggaaaggcaatgatcaggttcgctttgagcttacattttatgctttaaatcctgaactcaaagtggttgcaccttggagggagtgggacatcacagggcgtgaagatgctattgagtacgcaaagaaacataatgtgccagttccagtttcaaagaaatcaatatacagccgagaccgaaacttgtggcaccttagccatgagggtgacatcttggaggacccagcaaatgagccaaaagaagatatgtacatgatgtctgttgctccagaaaatgcaccttcggaacctgagtatctggagattggcatcattgcaggtgttcctgtttccatcaacggacgggacctgtcgcctgcatccctccttgcggagctcaatgaaatcggtggaaagcatggaatcggacgcattgacatggtggagaaccgccttgtaggcatgaagtctcgtggtgtctacgagacccctggtggcaccatcatggcagctgcggtgcgcgagctggaggccctgaccttggacagggagaccatgcagtggaaggacatggtcgccctcaagtatgctgagctggtctacgcaggccgctggtttgacccgctccggcagtccttcgacgccttcatggagaacatcactgcgacgactactggttcggtgactctgaagctgtacaaggggtcggtgaacgttgcgtcccggaagagcccctacagcctctacagggaggacatctcctcgttcgagaatggggagatctacaaccaggctgatgccgaggggttcatcaggctctatggtctcccgaccagggtccgggcgatgctggagaagggcatctaagttcctctgtttgttctgaaaataaaagccatcattcggaaactgtcaaagcgtttccagcgattgcggaccggttgttttgtatacgttgtttgagtttcaacgaatgaactctgaatgcatttgggtgacagaatggacgttaaatacttaaaaaaaaaaaaaaaaaaaactaaagnnnnnnnnnnnnnnnnnnnnn

SEQ ID NO: 46327 - DNA, 537 bp, Setaria italica
  Peptide Sequence Number=SeqID_112301
gtgccaagtttcacgaaatcctaacatagcaaagatataaactgatatgctcaaagaactagggagttgtattgatccatcagatgatgagcgacaactcatagacaagcttagagcattcttacaagataagaggtacttcatcattgttgatgatatttggagcacacaagcctgggaacttgttaaatctgctctacctgagaacaatttaaacagcagaataattacaaccacaagaattgacattgtagctgaatcatgctgctccagtttaacaggatatgtccacaagattaaacctctaagcgaccagcaacacatcaactatttttcaagagggtttttggagatgcctctgcgtgccctcctcactttgaagaaatgtctcatggaatccttaaaaagtgtcatggtttgccattagctactatcactatagcaagcctgcttgctgggaaatccaacagggatgaatgggaacaagtgtacaattctattagttctgcttttagtcaccaaggaatgagagatata

SEQ ID NO: 46328 - DNA, 472 bp, Setaria italica
  Peptide Sequence Number=SeqID_112302
aatgaccataaggtggacttgcatgagggatgcacatttaaccaccggtatgtgaagcccaacccttacgaagtggaaaacgctacatggatgctcaccgtcttcaagtgttttgggcagcacttctgcctgcacttcgaggctttcctgctggggatggcaccagtgtacatggcgttcctgcggttcatgggggaggagagcgaggcgcagggctttgggtatagcctggaggtgggcggtggcgggaggaagctgacatggcagggcacgccgcgggagcgatcagggacagccaccggaaggtgcgggacaggcttcgacggcctgatcatccacaggaacatggcgctcttcttctcgggtggcagccggcaggagctcaagctgcggatcactggccgcatctggagggagcaagcgcaatgagccaaggcagttctgccctgccatggttgaattccattccatg

SEQ ID NO: 46329 - DNA, 380 bp, Setaria italica
  Peptide Sequence Number=SeqID_112303
ttagtactaaatgcaacagtcctgaccgatgtcacatttgggtgtcgttattgctctcaccatcccagcattgctggagaaatcgaagctatattgccacattcttctagggcgctttagtggatgttcaggcatgcgagcgaccatgcaaagagttgaacagggcactgggaaaaggagaggctctattgataatggatatgcatatgctgtaattcaccgaaatctttatcatgtgagttaactcacgactctgtttttgctctcttcctatccaaaattttgccgtgtacactaggctgtctttcgaggctaaacaattgtgatatcaaccacgatcgtggtctgtctacaagagttttaagctttaggtaaaaaag

SEQ ID NO: 46330 - DNA, 260 bp, Setaria italica
  Peptide Sequence Number=SeqID_112304
gtacgtggcgctcgggaacgccggcgtcgccgagttcgggaaggagaacgccacggggctgttcgaggtggaggtggcggtcgccggcgaggtgaggtaccaggcgcacttcaccaagtgcaagctggccgcgacgtgcccgctcaagctgcagctcgcgccgcctgggacgcccgccgtcgtgttccagaaggtcaagtgcaagctcgccaagcccgacaagaactgctagctggcggatccagcctcattgatttttt

SEQ ID NO: 46331 - DNA, 283 bp, Setaria italica
  Peptide Sequence Number=SeqID_112305
cccgtctccgttccagaacaccgacgacgagatgaaaccgtggatgaacaccacgtcctccaccgccaccccctcccgctgccggcgcccccggcggcggcgcctgcacgtggacgtagaggtgggacgccgagcgtggcgcggcgctccacgcgtggcagaccttgcagtcacagtcggaccagcacggggcctgccggggcgggcgcggggggcggtccatcttgccgcggatcatctcggcgattgcggggctgacggtgagcgccggcgcggcgggggg

SEQ ID NO: 46332 - DNA, 324 bp, Setaria italica
  Peptide Sequence Number=SeqID_112306
ccgctccttcctcgcctgccctgcggtcgctgctcgcgggaaccagcacagcagcgcccaagaccccgtcacccccgccaccccccaccgccaccggaccacacaccccacgcgcgcgcgcgcgcgcctgattggtgcttgtccgaccggctgacctgaccccgaggtcgagggaggaccggacccggagcaggctgcagctacagttgcagttgcctggcagtggaggggagggccggtgcgtgggagggggatggagagctacctggaggagcggttcgggggcgtccagcccaagaactcctccgaggaggcgctccgccg

SEQ ID NO: 46333 - DNA, 1214 bp, Setaria italica
  Peptide Sequence Number=SeqID_112307
ttaatggaaaccatgaaaccatgaatgtggaaggtgatttccggtatgttgatccggggggttttgatgagtgcatacgcttccttgagtaccttgatgaatgtgatggtaactgggaagaggtctttctcaactgggttgacgtctctgaaaggaggaagaaagaatacagggcttcgcctaacagtgactggcgtccttggaactttgtcaataagcagagagggtttgctgcaagatcatcgcttttcaagcgaggtggtccattagcttgtgaattggcacgtcatcctgttgtccttaagatcaatgactgggtattttgtcatggtggccttcttcctcatcatgttgaatacgggattgagcgtatgaacagagaagtgtcaatgtggatgaaatgttcaggtgaagacagcgatgatgagcaaacgctgaaatctgtgggagcaaaggggatggtggtagggcatactccccagattggtggtgtgaattgcaaatgcgacggcaaagtttggtgcgttgatgtgggcatgtcgtatggtgttctctactcaagaccagaggttctagaaatagtcaatgacagaccaagggttttgaaaaagcggagagactcatatgacgagatggaagtgttggactatttataaaacattgagaaacatgtgtatataatagcaaacattctttgtccggagagctacagtaccagacaatttgggtggaaatataggaaggaaagttacagcgatatatataaactcaagtgaaggttttctcgatgtggtgaatgcttgcccacacgaaggcgaaggtttgcggcctattttgccaagcaggaggaaaaaaattttggtggtgctcgcactttcatcaacatccaaggattcctccatagtggtcttcttcagagctgtaggcaatcaggtatcgtgaagtagtagaacgagcgggaggagacgtgataatgccgaaggcttctcatgtaaatgctttgtcatcttaagaaaaaaattgtcctttttcatgtcatcgatagctagaatccgcaagcattgtgaacaccaaaatacagaagaaaagcctacagaaccagtcaaccagctgacccttgattgttagtaagcaaagtgcctttgatacttttcctgcaaatttggcttagattttagtacgtagaaaaaaaaaaaaaaaaaacaaaaaaaaaa

SEQ ID NO: 46334 - DNA, 205 bp, Setaria italica
  Peptide Sequence Number=SeqID_112308
tatggcaaaggcaagcaaaacactgtgtgatgaaggtctgcgagtattctgttggaaaggatagatcacttgaaccttcaggaggtaatctgagccatgcagagaatgcaagggactcgtagacggtaacatttggtgaatgaatgtcattctgctcacaatatcctgatacacgagcaaaagttttcctgcttctttggggtaa

SEQ ID NO: 46335 - DNA, 1471 bp, Setaria italica
  misc_feature (1198)..(1198): n is a, c, g, or t
  Peptide Sequence Number=SeqID_112309
ttctgaattcttgtacacatcactgaagttgacaccagttatttgttcttgcattgtacttgtcacttccagcatccatgttgaagggttgtagccatcttttatattgctgacaccttcgatagcctcaaaatactttattacaatacatatagactgtcctaatggacctacatagatctcttcacctccacgtttcataaggaagagctcatcaaaggattcaaagatatcaatgcttggttggtgaatggtacaaacgaccgttcttcctgtgtccaccgtattccttattgccctcatgacaatggctgctgctcgtgcatcaagtccagatgtcggttcatccatgaaaatgatagaagggttagcaactagctcgactgctattgttagcctcttcctttgttctgttgataatccgctcacaccaggcaatcccaccaatgcatcttttaagggtaaaagctccacaagctccataacctcatcaataaacatctttcttgttgatgaatcaacatcagcaggtaatctgagccatgcagagaatgcaagggactcgtagacggtaacatttggtgaatgaatgtcattctgctcacaatatcctgatacacgagcaaaagtttcttgcttctttgggtaacctgatatggtaatatttccctcaatgtatccgctggtcttcctcccggccaatacatccatcagtgttgtcttgccagcaccactgacccccatcagagcagtaagcacacctggcctaaatgaaccacttatacccttcaatagttccaaccgggtctctgtgacaccttgtgctctgatttcctctggcatgtctacactgtatcttatatcttcaaatgtgatggagagaggtacaaaaggaaggaccattcctttgttgactggactagaatttactgttgcatggttggaagttgcttcatcgttgttctcatccacagtactttgagttgttactgtattgctggcaacccttcctcttgatgatgcttctaaaacttcaccagttagattcgcttgttttatctttaatgtctcctcagaaattgttggctgattgctatcaaatggcttgaggaatgtgaggcagacagtatagagggtattgaataggagcacatatccaatcaaggcgcccacaccaatccagtaccattttgcctcnggaaaaagtccacgagattccagaactagttttccaagtggttctgtggaaccagggagtatcttattccagctgtcacccaggaattcatttactgatatggcattttgtgcatacatcaggggtgatatccagtatccccatatccaccatttcttcacattctctcttgccagtaggaatccacccaagagcataaaaatcagaatgccaaatgaaccaagggtgcttgcaacaacctgatgccttgccatcccagcaatgaaacggaac

SEQ ID NO: 46336 - DNA, 902 bp, Setaria italica
  Peptide Sequence Number=SeqID_112310
ctggatcatcctgctataaaaacctctcggtaaagagaccgagggatggtatgttgtcatccacttcatatagactttgcaaggcaagaatggaagcccttctaactccagcattcttgtcatttagtgtccacccaagatacttgagatatatatcttgcaaaaaaagtgatggatacgagacaacccaaataccaagggatttgatacatgccatcctgatctcaggatcaacatcacgataacggtgcatgaataacccactgaatatcttccgcatatattcctccaagtatgtaatgtgttcatgagtaagagttaatctgttgttcagagattcaacgagtggtccatcactctgcttcttttctctgcattcaactgcctttgagtggtctcgcgttgtccactaagagtcttagcaacagatatgaatgatgttacaagctggagcccaaccaatgaagctacttgacgatatactcttggaggagtacatgataaagcaaccacataatccttgatcttttggaataagatatcatcaaacagtgggccattctgacattcaaggacaaagctatcccaaaaagaaaccaggttctccttgaagtgtttaaggtccttctgttttgtgctataattatcctccaccagaccttttcgagctagctcaacaagggacaatacaatgtcgtccacatctgactcatgaaggtagtctggataaatctcatgcttggcaccacaagcctcaaatagcatggctaatatttgaaaaatcactgaatttttgttggattcgtaatcctcaaccaactttttgacagcatggttgatcagcctgccattatgtttaataatatcgatgagtgcctgctgagacacgctgagacacgcaa

SEQ ID NO: 46337 - DNA, 3041 bp, Setaria italica
  Peptide Sequence Number=SeqID_112311
ttttttttttttaaaaaatttagagctcttgcccagatccaatttgaacatcgcaagtttcatcagacggcagctttaagttaccatttaggcttttaactatactagcctcagcaacaaatcgtgacaactgagtgtgaagttccaacagcagaattggactcagtaccaacaatcgagttcagataaagcacaccatgcactctctacaggaagcgagtgagcacctaagtacaataatctacaacgcctaaatgtctaaaacaagcagttaaccagcagatgaagactgcagcgccgcctggtctgttttcctcatgaagctgggcaagcctgaatttcgtcgtgactgctgcatctgcgttagtgcatcctctcagctattgcttcctgatggcccaggagctcctttgcggctgcttgttccctgttgcgataccttcagggatcgtagcttagcagaagaagacctgatcgtgttgatcaggggctgatttgcatcatcgtcgctgtcatcatcttcgccatggccgtggtggtcagaggcactgatagactcctcatcactagagttgtgcccatcatctttaaagagtttcttcccgcgtacatctggtatatttggtgcctctggtacgtctctgacctttctcgggcggcctcgtcgcttcacaggtttttcttcctcctcgtgcaaaacctcattctttgcatgtttttcgcgtaggtgctccacaaatgtaaaatatgggcgccaagcactttcatctccattcatatctgcatcttgagtcctcttctctacatctgccaggatatctggtatatctgccgatggaagtttagaaacaaatggtagaagagcagcctcaaggaatggcaattgatttggaaggtccgcaaaggcaaaagaaacaccatcttggataatcttgaagatctcagacttgtttttattgcgagccgcgccaacataggaccctgccagccgactagcaagatcttgacattccgaataagacttgccagtcagggtttggttttctccgtcgttaacatgggtcatgtaccgttcatatgcccttttcaatgcctcaaaaaacagagctgccatgtcgaagtctgcatttttctttagagaggtaattagatgtttgattatctcagttgtacttgttccatgagagacatagtgagaaacaatctctggaccaagatagtcctttggtactgtatcagcaagcactagctttgcagctgcaatcatgacagcatccctgtttgtgtcttcaacatactcttcatttgcatcttcatcttctgtttcatctgatatattgagctgttgttcacaaagtttccagaacttttgaaccatatctaattgtgggagataacccaaactctctagtctagtcgaagaatatttggacttcttaaacaagcaccacatctctgcagtaatgatgcagactcggcaagagagtacagtggtgctccttccctctttttgataagtaggcaggacaaccaaataataatagagttgatcgaaaagtgagctttgcttggataaaagttcatcaatagatgtttcagatgggttttcaccatcaattgcatgaaggcaccatgctacttgaaggtacatattgagtaggagaaagctcttcacctcattatccatctctcttaaatgactgaggatacgatacatatcctcaaataaactatcattttttacaggttttgaaagctgaagttcataaagccgcttcaaattaaccaacagggagtattcatcatcacctgcctcgacttccttaattgcagttttgactttcaaaaccaactcatcttcaagattcttaagtttattttcagcatagtctttaagatcagcctggcactcagtgcaacagaaagcaagtgccttgatgcaagatctcagcgcgtccttctcgccatgtttgaagaaggcatcatagatgagatctatggctgccttgaaatgcttctcttgtctcttgaatgaatacatctcaagtttcaaaagaaccatcatatcaactaggggcgatatcttagctttgtcagacatgtattttcttaaaagctgtggatacctcgtcaacaaggcaactgttatttcacgcctgctattttccaatgtttccttttggcctttattatagtacaactttctgttgtccattgcgggtattattctttccccaacagccttctttgcagaggcttgcagcattcgaactaggtttgttccatccatatcagtaagctcaattgctggattttcatccagaagcagagaaatcatacacctccagtctctcatagccttcatgtcatcccaaatatcatcaatgacatatgaactaaggaccgggtcatctgaaaattccctaaggatttgcagcattcggccaatatgaacttcagagggctcattttccccatctctacctccaggatgagatgtcttgatgttttgcgctattaggtgatcataaactaattcacctatcgcacgcctgatcattggaggctcatcaataagcaaatcatacagtggccccaaatcgtcatcactcaacagctgatgcctcagtaattgcttgatgagtcctatagctgacacagctactgaaacatcaatatcatcagcaagctggatcatcctgctataaaacctctcggtaaagagaccgagggatggtatgttgtcatccacttcatatagactttgcaaggcaagaatggaagcccttctaactccagcattcttgtcatttagtgtccacccaagatacttgagatatatatcttgcaaaaaaagtgatggatacgagacaacccaaataccaagggatttgatacatgccatcctgatctcaggatcaacatcacgataacggtgcatgaataacccactgaatatcttccgcatatattcctccaagtatgtaatattgttgtttctattgtagttaagtagtttaattcttgtttgttctagtagt

SEQ ID NO: 46338 - DNA, 525 bp, Setaria italica
  Peptide Sequence Number=SeqID_112312
ctcagtcgcactagtgtggtgctggacctgctcggcttcctctgcctcctcatccagctcggcgacggaggagaggagtagccccagtccgggccggggaagcatgatgccttgcaacttgcaagcgtacctagattagagctagctgctcgatcgtatcgatctctggaagctccgtcatggatgagctcaataaaattaagggacttgcttgctcatgaggtaccgattgtgatcagtccagtctccagtgtcgtagactcatagtacgtcgtcgtgtggagtagaataatgtgtactggtctgagattgtattcaccagtactaataagctgccatgtacagacgtactctgtatggaacctgcatttggcagcttaataagtgagtattaggctaaagatcttcgataagtacgtggagatgtgagtcgtgtcctttttgaccggcaaggcaaccaaagctactagcacgcagcggatgccgacatgcagtggtggaatggtagccgagccgtgcagggtt

SEQ ID NO: 46339 - DNA, 703 bp, Setaria italica
  misc_feature (602)..(602): n is a, c, g, or t
  Peptide Sequence Number=SeqID_112313
gagcagatcatcccggcaagtgtggccattcctataccccctgcaatagactacaaaactgcagcatctgttttactgaagggaatgactgcatatgtccttgtgcgacaagcctttaaggtccagagaggccacactgttctagttcatgctgctgctggtggagttggctctctcctctgccagtgggcaaatgcccttggcgccaccgtcattggcactgtttcaactgaagagaaggctgcccaagcaactcaagatggatgccaacatgtgatagtgtacacgatggaagatttcgttacccgggttactgagatcacgtcagggttaggtgttcatgttgtctacgatgcggtcgggaaggacacattcaaggggtcgttggcgtgcttgatgccacggggttgcatgatctcctatggccagtcttcaggcagcaggccagaccctgtccggttgagcgatctcgcaccaaaatcgttgatccttggcaggccaggactcatgcattacaccaccaaccgcaacgagctgctgctttggtctagtgaagtctttgccagtgtcatggctggggtgctgcaggtgcgcgccaaccncgtgtacctgctgtcagaggctgcccgcgcgcacacagatctcgaggcccggagaacatccggctccatcgtgctggtacctgacagccaatggttgtagg

SEQ ID NO: 46340 - DNA, 134 bp, Setaria italica
  Peptide Sequence Number=SeqID_112314
gcgagcgacttcgaaacattttcggaattcaaaattcgagttactattcacagcactattcaaattcggcgaacactatttaaattcgtggcactatttaaatatgtcaacacgatttatacgtaggggacgag

SEQ ID NO: 46341 - DNA, 737 bp, Setaria italica
  Peptide Sequence Number=SeqID_112315
tttactttattttccttttaaacttttaaagtttactttagttattcttatcctgctggacaaaactggtgaatttgagtgaatatgttagtttgccataggtagtggtaggctatgtatcttaacctgtatataactggctgcagttctgggcttctggcaggagataattgctatccttttgtagattagttgaatgtcattgtttttctacagctgtccatgtttttattttaaagtgtacaaagttgtattccttcagtagcgagatagtgctacctccagtcaattaaagatgacatttaggacaagagaaacaacttgtccttttcctattttgcacgaaatatgaagtgtttatgagaactatatatgtcagtgccaatagattacttgacggaacaatgatacagatttccaggagggcttgagtgaacactaggggcactgcaaattttgttctccagtaacattggaatattaacaaattattagttagataaatttatactgttatgtggctagaacaattttttagcttattctatcatcggacaattcaggaagaaagtggttgttgggtcctggaatcttttctcttttagaaagctgggccaggccaggcctggagattctcagaatattgcttactgaaaatggcagtccctaagaaaggcaatattattaattggatacccaaaatcttttcgcttttataaaagttgggcctggctagg

SEQ ID NO: 46342 - DNA, 409 bp, Setaria italica
  Peptide Sequence Number=SeqID_112316
ttaggacaaataagcaatatatctctgctgatctgcatcttattcttgaggacgggaaagggaaatgagaaatagtgtagccagacatcggcgcatcgccagaatgaaacgcgattccgatatggccaaatgttgaatatatgcagagtggtagcactatgcacgaacagaataatgaaactacaaaataccggtctgaaactaatattacatcaaaacgacaggcatttaagacaaacaaggtttaccgtgtcaggtaatgtcattcaaccctgaaaaagctggagggacctccagcatcaacaaaaccacgaaccgatagttcaggaacagaggcagggccctcctgccgcagctcgtgatcgatgaagacgactaccaccgtgatgtcgtcgtggaagtagcgccg

SEQ ID NO: 46343 - DNA, 234 bp, Setaria italica
  Peptide Sequence Number=SeqID_112317
aatttgtacttgtaagactagctgttccttgcagtgatgattgttgatttggttaatgtgaagaataacataaccctggaagttgtggaaatcgcatgcttttgcttgctgttggctacaaaaactagatttgtttgtaacatttgggtcaagattagaatttttgggttgtgaactactgtaagatgggattttttgggagcatagatatagatttgaacttttggggttagc

SEQ ID NO: 46344 - DNA, 619 bp, Setaria italica
  Peptide Sequence Number=SeqID_112318
ttgttcatcacatatcacaaagtattaaaagataactgtctcacaaataatagagattaacaaagctgcctccatgtcataatctcaagagataaagtagagcattgatcttaacattttcctcttgtataggttagcaatcgatgaaggagtgcttcactatcttttgttaccttcttcaagttctcaatctcggctgattgcaatttgagagttgattctgattcttccgtcttcttcttcaaggtagctaactcttgctggtcagcaacaaaccattgtcaaagttgtaccccatcttgtttgtcggtgtcaacttgctccctatcaacactgttgcacaaggatttggtagagcttcttgagtgctccgctgtctcatccggttttttttcagcaagaagcaacattgatttgagaacttccatcctggagatggacttaacaggagcgactacagatgttgaccctttggccggctcaaataggatatagtcaaacttcagttgatgcatttgttaagtataaattaagaacggacaaataaccaagcataagaacatgtggcaatggttgagatcatctgcaaactcacaagcaacaagtccaacaatggctt

SEQ ID NO: 46345 - DNA, 629 bp, Setaria italica
  Peptide Sequence Number=SeqID_112319
taattagtttagtaaaattaaagtaagtaaggtaaggttaaggtaagtaagtattaattttctttcctttttcggttgtcctaaagtcttgatgaagttgctggctgaggaaggacagagaaaatggcttgttcaaaccagacccacgatttgaggaagccaagcagcttataaggagcggtgcttttggcagctacaactacgaacccctcttggattcccttgaagggaattctggatttggtcgtggtgattatttccttgttggctatgacttcccaggctatatagatgcacaggaccgggtggatgcagcctacaaggataagaagaagtggatcaagatgtccatcttgaacacagctgggagtggcaagttcagcagcgaccgcaccatcgcccagtatgccaaggagatatgggacatcaaggctagccctgttgcttaaaagagggggaagcgatcaacacaaatcatagttccccggatgctataataaaaagaacaaaagaagttgtatttagcatgcgcttcaaaataagcacagcgcgcggtacaagacaataagaacttaaacgtaaaagaaaacgaaaaaccgttaaaaaccttaaaaaagaaaaacaaaaaa

SEQ ID NO: 46346 - DNA, 1194 bp, Setaria italica
  Peptide Sequence Number=SeqID_112320
gggctgtactgcgcgtggtaggagatgtttccggcgatgtcggcgggcttctccgccgcgggctgcgccggcttcaccttctcgccgctcgcgttcggcccgagccgagagggccccgcgcgcggccccgttggtcgcccgccgacatcgccggaaacatctcctaccacgcgcagtacagacttctcgccgctcgcgttcgggcccgaggaggccttctacgccaccgccgagagcgtccgcgaccacctcatcgagagatggaacgacacctacgtgcatttccacaagacggatccgaagcagacgtactacctgtccatggaataccttcagggccgcgcgctcaccaacgccgtcggcaacctcggcatcaccggggcctacgcggaggctgtgaagaagttcggctacgagcttgaggtcctcgcggggcaggaaaaagatgcagctctaggaaatggtggcttgggtaggcttgcatcttgctttttggattcaatggcaacattgaatttgcctgcttggggctatggcctgcgataccgatatggactgttcaaacaacacattgccaaggagggccaagaagaaaccgccgaagattggcttgataaattcagcccctgggagattcccaggcatgatgttgtgttcccagtcagattttggccatgtggagatcttgcctgatggctctcggaaatgggttggtggagaagtcctaaactagtgcgactgagtcgtgccgattcctggatacaagactgctcagcctgctgcatgctgatttcaattattccaattcaatgatgcaattcagctgctcaacttcataggagcggcggggtttcaggaaggtgatcaagatgtccatcttgaacacagctgggagtggcaagttcagcagcgaccgcaccatcgcccagtatgccaaggagatatgggacatcaaggctagccctgttgcttaaaagagggggaagcgatcaacacaaatcatagttccccggatgctataataataaggatgaataatgatccacggcgcctgacgcctgcttccgttgaagcttgaaggcaaggaacggcgcacgaagcatgctgtaccgcgcgctgtgcttattttgaagcgcatgctaaatacaacttcttttgttctttttttgttgtctgaaacaagatccttttgat

SEQ ID NO: 46347 - DNA, 624 bp, Setaria italica
  Peptide Sequence Number=SeqID_112321
catgacctgacgatcaggaggatgaacgagtacaaggcacgcctgacgaggtctcccagaaaagagaagtcccgatcggctccacaaggttctggaacacgtcaccgaggtgcactcgctgtgcgacatgctcggcgaggacttcatcgccctcgtgaacgaggtgcacccgggcctgcacgagacggccgaccccggcaagcccaccagcatcagcgacagcacgctgggcagcctcgcccaggtcgtggcgatgctcacttccgagaaggccaagcgcgcggccatgctgcgagaggccgtggcgccgctggtggagctgtgggagctgatggactcgccggaggaggagcggcggggtttcaggaaggtgacggccgttctgaaccctgaaaaggagtccctgtcatccggtgtcctgtcagtagcaaccataaagaagacggaagaggaggtggagaggctgacgcggctcaaggccggccggatgaaggagctcgtgctcaagaggcggctggagctggagaacatctgcaggaacatgcacgtggagcccgatgcaagcaccgtgccggagaaatccattgcgttgatcgattccggcctcgtgaacccttccgagct

SEQ ID NO: 46348 - DNA, 1098 bp, Setaria italica
  Peptide Sequence Number=SeqID_112322
tcgagaagatcgctgctgaaattgcagggaggagctacggctacgagggctcccccagggccagcgaggtggaggagcatgacctgacgatcaggaggatgaacgagtacaaggcacgcctgacgagtctccagaaagagaagtccgatcggctccacaaggttctggaacacgtcaccgaggtgcactcgctgtgcgacatgctcggcgaggacttcatcgccctcgtgaacgaggtgcacccgggcctgcacgagacggccgaccccggcaagcccaccagcatcagcgacagcacgctgggcagcctcgcccaggtcgtggcgatgctcacttccgagaaggccaagcgcgcggccatgctgcgagaggccgtggcgccgctggtggagctgtgggagctgatggactcgccggaggaggagcggcggggtttcaggaaggtgacggaagaggaggtggagaggctgacgcggctcaaggccggccggatgaaggagctcgtgctcaagaggcggctggagctggagaacatctgcaggaacatgcacgtggagcccgatgcaagcaccgtgccggagaaatccattgcgttgatcgattccggtatagtttagtcagagctctgtgtgtttgctactgaattgcgttctagatgaaggtgatgtcagggctatgtctaatgttgggtggcgtcttattcaggcctcgtgaacccttccgagctcatggccaacatcgacgaacagatcgcgagagccagggaagagctgcagtccaggaaagacatcatggacaggataaacaagtggctgttggcttgcgaggaggagcaatggctcgaggagtacaatcaggatgagaacaggttcagtactggcagaatcgcacgcctgaacctgaaacgcgccgagaaagcaaggctcatcatcaccaagatcccagccatcgttgacaacctgatgagccgaacactcgcgtgggagagcgagaggaagaagccgttcctgtacgacgggactagtgcgactgagtcggagaactagtgcgactgagtcgggctgaggcaggaggaggagaggaggcggctcagggagc

SEQ ID NO: 46349 - DNA, 2281 bp, Setaria italica
  Peptide Sequence Number=SeqID_112323
aacaaagaaaagaaagaaaagaacaagaaaggttaacgaccaacgacaactagtcatgttagggggaaatgatgttgtgttcccagtctagatttttttggccatgtggagatcttgcctgatggtctccggaaatgggttggtggagaagtcctaaaggctttagcatatgacgtgccgattcctggatacaagacaaaaaatgcaatcagccttcgtctttgggaagcaaaagctactgctgaggatttcaacttattccaattcaatgatggtcaatatgagtcagctgctcaacttcatgctagggcccaacagatatgtgccgttctctatcctggtgatgctacagaagaagggaagcttctcaggctaaagcagcagtttttcctttgcagcgcatcacttcaggatatgattgccagatttaaagaaaggaaagctgacagggcttcagggaagtggagtgagttccctaccaaagttgctgttcaactgaatgatacccaccctactcttgcgatccctgagctaatgaggttacttatggatgaggagggacttggttgggatgaagcttgggatatcacatacaggactgtttcttacaccaatcatacagttcttcctgaagctcttgaaaaatggtcacaaattgtaatgaggaaattgcttccacgacacatggaaattattgaggaaattgacaagcggttcagagaattggtaatctccaaacacaaggaaatggagggaaagatcgattcaatgaaagttttagatagctcaaatccccagaagccagtggtgcgcatggcaaatttgtgcgtggtgtcttctcatacggtgaatggagtggctgagttacacagcaacattttgaagcaagaactgtttgcagattatgtctccatatggcctaacaaattccaaaacaaaactaatggaatcactccgcgtagatggctcaagttttgtaaccctgagttgagtgaaatagtcacaaaatggctaaagacagatcagtggacaagtaaccttgatctacttactggacttcgcaaatttgcagatgatgaaaaacttcatgctgagtgggcagcagcaaagttagcttgcaagaagcgcctggccaaacatgtgttggatgtgacaggtgttacgattgatccaactagcctttttgatatacagattaaacgcatccatgagtataagagacagctgctaaacatattgggagctgtttacagatacaaaaagttaaaggaaatgagcgcagaagagaagcagaaggttacgccacgcactgtcatgttaggggggaaagcgtttgcaacatacacaaatgccaaaagaatagtgaaattggtaaatgatgttggtgctgtagtgaacaatgatcctgaagttaacaaatatctgaaggttgtctttattccaaattacaatgtatcagtggctgaagtgcttattcctggtagcgaattgtcacaacatattagtactgctggtatggaagcaagtggaacaagtaacatgaaattctctctgaacggttgtgttattattggcacccttgatggagctaatgttgaaataagagaggaggtaggagaagataatttcttccttttcggtgccaaagctgatgaagttgctgggctgaggaaggacagagaaaatggcttgttcaaaccagacccacgatttgaggaagccaagcagcttataaggagcggtgcttttggcagctacaactacgaacccctcttggattcccttgaagggaattctggatttggtcgtggtgattatttccttgttggctatgacttcccaggctatatagatgcacaggaccgggtggatgcagcctacaaggataagaagaagtggatcaagatgtccatcttgaacacagctgggagtggcaagttcagcagcgaccgcaccatcgcccagtatgccaaggagatatgggacatcaaggctagccctgttgcttaaaagagggggaagcgatcaacacaaatcatagttccccggatgctataataataaggatgaataatgatccacggcgcctgacgcctgcttccgttgaagcttgaaggcaaggaacggcgcacgaagcatgctgtaccgcgcgctgtgcttattttgaagcgcatgctaaatacaacttcttttgttcttttttttgttgtctgaaacaagatccttttgatccgtgttggaatactccgtcatgaaataaaaattattcaagttttattaa

SEQ ID NO: 46350 - DNA, 329 bp, Setaria italica
  Peptide Sequence Number=SeqID_112324
taccaacggacgttccacggcgtgccattgtggaggaatccgagttcggggccgtcgttgcccgccgaggtcgacacgaacacgccccgctgcatcgcggcgaatgaacctatggcgatcgggtccttgtagagggggacgccgttctggccgagggagagggagatgacgtcgacgccgtcggcgattgcctggtcaatggcggcgagtatgtcggacgggtacgtgccctcgtcccacagggccttgtacacggccaccctggctcgaggcgccatgccccgcgcggtgcccgcggcgtacccgaagaaggacgcgcccggcaccgg

SEQ ID NO: 46351 - DNA, 377 bp, Setaria italica
  Peptide Sequence Number=SeqID_112325
gagccgtctgctccatgcctggatattgttccacttcagccagctgaaccacccggtttaactcctccagaccaaagcactgcccctgacataatagatatttccgatgatgacttgccatgatactttttttcggtgatgatagcttggctcattttggatggttgccgggctgctcattggtaccaatcctgcgacaggcgatgtcgcatggatgagcaaccagcacactggacgtggacagtatgccatggtgttttggaagtgacatagtgttttttcaaaatagaaaggaagtgacataggtctggttagctctggcaatattgtctcaggagcatagtcacgtatctgtagcatgtaacgttgaactgttt

SEQ ID NO: 46352 - DNA, 1387 bp, Setaria italica
  Peptide Sequence Number=SeqID_112326
ctcacatctggcagctagcctgaagctccgcagctgaacaagcgaagcagcagcaagagcgaagaggagctccatgggaaacaccctcggcctcggcgccggcgccggccttggcctcggcctctgcttcggcgccgcggctctgatgcaggctgttggagcaaacgcagaacacctgaacaagggcagggaggcacatgccaacagagtggtgactcctcagcgtcaatacaatgttcatagcgccgaggacatcgacgagtcctctgccgagcggctgtacgacgcgatgaggtacgccaaggccaacgcgatgctgatccaggtcccggtgttaggaacagcgaagaagttctggcgattatctgacaaagcgactaggattagcagaaaacttgcattgatactgagcagccagcacaaaattggcaagtatctcactgcacctctgcagttgtccgatgtctggattggtaacaatgggagtgtcaagctgagaggggtcagtttcactgctagaggcttcagtattgagcgtgtgagagatgactacaagtacctggccaaggtcctgattgagttgattaaattctcgggtggggatatcaacaatttgcctccggactacagggaattcttgctgctcattgggaggggcaccgttacaatgagagatgaattattgattgtaaacaacgttgcgcttctgccaatggaaaaccgcactgaggtcttcctgatgctacacgatagaattgtgaattatcgtggtcgcgaagacgaagcaaagaggaagagaatactctctaagctcccctacaagaaggactggttggatactgccagggcaaatgcaagaatcaacgagtgggtcacctttccaaaaaaaggaatgaaccaaggggttgaaaatgttcgcgagtacagaaggactccgtttgatctactgcggctcaacagaaatataagatgccacttgcatcagcataacaatgacgacattgaggaaactctgtattgcgaatggcccgagctgctcatggtcatggaaaagatgttatacttggaaggtgagctcgttgccactgacatccaaaacaagttcggctaatcagtcctactgcaaaacagacgttttatgcatttcctgctgttgttaagctacagttcttcgatcttcattgcgaaagtttcttgtgatggattgatggtttatgtaataggcttgttgcttgctttcttcaattcaaacaacttttaaggtaaagctggaccaggattgtaaaactatatatgctgtaaaatgttaccttaaaactctaaaaactaactatgcttggattgcatcagtaagggacactgcaagtgctagcatactattcaaaaa

SEQ ID NO: 46353 - DNA, 541 bp, Setaria italica
  Peptide Sequence Number=SeqID_112327
tttaactaagtacctactacaattacttagaagaccagacggccacgttgggccttaccgaacaccctatccgtttgcaaaggacagcaaggacgctgcatccattcagaatgattgcttgcactggtgtgtaccgggacctattgatgcgtggaatgatctcgttatgaagatggtactggatcaatgaacactagagttagatggtgttctcttcggtcataataccacatagtagagttcagtaactggatgtggaatcagttcccgccggcagtagtacttcacagcagcaaagtggggaggacaaggcagtaaattgcttataatggtacaagtatgtacctttggtttaaaggtactggtttatttgtagcaacaaatagctagcaagttgctagccctgtatatgcttaattgcaatttgcggatgtgtattttgtttccaagctgtaaactgagcttctgatgccagttatttgcagtggccttatagaagtaatcctggtataactggttgcgcttcgattgcttaaaaaaa

SEQ ID NO: 46354 - DNA, 339 bp, Setaria italica
  misc_feature (2)..(2): n is a, c, g, or t
  Peptide Sequence Number=SeqID_112328
tnttttagttttttttttttttttgtccaaaattgccattgtcatgagcctcatacgtaacgaaggcatctggtacacttacagcttgacaaaccgagttcacacagagggtaagaaaaagggggagggaataaagaagcgtcgtaaaaaagatttgacagacgcagactccagtctgcgtgatatatacggatcatcgttcgctcctagttgtcctctcccttctcttcttgcggtggcgccggttccggcggttgctcctcggcagccacgtctggcatggtatcctgggacgtgctcttcttcttcatgtggttgtagcctccccttctccatgaa

SEQ ID NO: 46355 - DNA, 436 bp, Setaria italica
  Peptide Sequence Number=SeqID_112329
atctactatatcaatatcaaagcatcaaacttcctcaatcacaatctggatctctggattcatgaagatgcacattgctgtgacaaatgtgaaccagggatatttatagtaaacaggttgtttatagctgaagagctagactggtagcgaagaatccactttagacgacagagatgtcaattattttccggccggtgaagttctgatctgtggtggtccagtcagattctttatcgtccagcatacaattggtggtggtcagctattcgccaaaagaggtatatagattttacttttcctttaggtgcttatgtagctttaatagcaaatcaatgtcatacacgtagtggaagtagtttctgaagcatgcattggctgttctctgcatgaagctagtgatgtacttcctttgggacgtttttggtatttttaggtc

SEQ ID NO: 46356 - DNA, 428 bp, Setaria italica
  Peptide Sequence Number=SeqID_112330
ttttaataagaaaagttactatgaattctgaaaatctagacaccattagctccttagcataaaaaatttgttttgattaccaaaaattagttgtaattcatctcgtccattactacatgaatattcacaagttagtttgattcaagtttgttttagatagaactccaattttcagttcataatcttgaaaagcaaaatacttaggtttccacattggatatctgagaccctaacaagtgcccgattcatattaacaattccaatggttaacagtttagaatggttccttgactgtgtcaagtccaaatatatgctcctttagccagtgataatttacatattgatacacatgggtgtcgctcaaagaatactgaccaagagaagattagttgaagacactaaagtaaactaatgtttgtatacagctg

SEQ ID NO: 46357 - DNA, 396 bp, Setaria italica
  Peptide Sequence Number=SeqID_112331
aataatccgcagttcagtgttcttgcaagttcacttgtctcaagccgagtttcagaatgcctgaagtcatccaagttatactctaaaaagacagatgtggagacatccacagatacatatggaatgaaatggctaaaggatgctgttctgagcaaaagatcagataatgcttttcggagtattatggttggggacccaaaaattaggttatgggaaattggcattcctgaaaatttagcttcaaacttggttgtttctgagcacgttagttcttataatttagaaaatataaatttgaagtgcaacctgcaccttctagccaaggaagaactacttattcggcgaaatgggaagctaatgtttattcggaaggcaaaccagctagaagttggtgac

SEQ ID NO: 46358 - DNA, 3824 bp, Setaria italica
  Peptide Sequence Number=SeqID_112332
agaagaacatgagcagaaggcatagaagaccacagcacccaagactgtcaatgcgcatagctcatcagctatgcctccagttgaggaacatgggcagaaggcatatagaccacagcacataagactgtcaatgcgtagagctcccccagctacatctcgtcagggcagacgcacggcgtggctaattaaaacgctaaaaaacacacccaacggagaatagcacaatcacattcacgcgtgacagaatcagtgtatctccgtacgatctttcttacaagcaaataatgttttgtacatttagtccgttccagtgttacgagtgttcttacacaagctcaaatcaggaacatgaaggcaatacaacaaagctatcatatcaagcggtttaacaaaccaacctggcagcataagactgccatccaactcacaaatttaacataacctgttcgaagctcaaatgcttgtcttcagggaagaatgcttctggctacaattctcaaagcgctcaaagaaacaggataatttaagaaacacaaatctggcagcagcattagatagccatccaacaacaacaacaaaaaaatcgcattacctgtttgaagctcaatgcttgtctggaggaaagaatgctgctggctacagttctcgaaacactcaaaaaacaggatactttaagccaggttagcatgaaaaccaaggaacaacatcaaaactaccatgccaagtttaagagaccgaatgttagcatgccaggcaagacagagaaaacaataagcatcaacttctctgataataacatcactacaaatatgagaaccaactggacaaaagcaatggaattgtgctcaggcactcaaatggtcagattggttgccaatggcgcaggctaacaattctggaacagataatgatatatttggcagcttgttctgacttcagagcatcttaatgttgagtgcataattaaatagttaagactaagcaatgttctctttgtgtttgctcgaacaattgaggagaaatattcaagacccttcagttcagaacttgaatgtatcttgtgcttactattttcaagaaaaatatttccttcacatcctgatttcagatccctcatccttgccccgtaaataaaaaacaatctccatctaacccttgtttttcaaaagggcaccaaatcaaccagtcacaaggtgctgattcccacgtactgctcccctgtatccaaattcagtgatgccattgcatgtggctgatttaattattccttccatgcactattggcaatcaaacatagttttgctatctcatagcaccataaccaatttcctttattaaatcctattccagcaattacttaacatgagcaacaacaataatcggcaagtaccatcaataagcacacaaaatggctgttcctgaatactgaaatagccatctcagagctgcctcttcaattaaactaaatacaggcgtatcttccaacccagcgccaccacgggaaaaatgtaatttccaaaaaccagttcaaggccaaaaatgtctcgacctcaggatccaataatgttattgaaactagttcaatcgataaaataaactaagttggtgcatgtgattttcttgttatgacaaaaggatagaaccagctggtataagtttgcttaggtttaagctctctgcagttagctggtatccgtatctttcaagcactagttactgttgaaacacagcataccttggttaacttataaagtagactcttagcacagcaacacatcttttgatagaaacaatctatgcaaaacaattatgtaagtatcagaaatttaacctatcaaatatatcccccatcccccatattatgggctgaaagcccagcttgtttggttctgaccctgggccaggcaacctcctccaggcagcacagagagccgaaggctcatgaaatcgcgtgcctggattggctgactgaaccaagcagcttttccagggtctgaagcaacaagccctgagtgttccgagactgagggacagactaaatgctatgccgtagaccatggtaaaaaagtatgtcatagaaattaatggtgtcagataaaccaaactttttctgtaacttgatcagttagtgtgttatgcctccagcaagattcttgaagcttgcaatcatccaatgtcccactaagctcaaaatggttattaactcatgctccatatagcagttcaaagaaatttcacggatggtgggtgatcaaaccaggctggtcagtattgcactgcttgtttttttacctggtgccttgtgtaatgtgttctatatagtcaaaagcatcacagggctatactcaaatttcaaatgtccttttgctgcaaattctgttatcttaaacttagaggaagccaaagcaactgcttggtgaaagaaatgcatcagccacacaagcggtttctctcaagttttggcaaccaataaaaccatggaatccaacatggaatgggtccagaatttaggtctgaccaatcaacattctgtccaaatattgatcctctagagaacaggtgaagcatgctaagaagaggaggttttcagaaactagcagccttacaacaagcactgcttgtaaagcttcatttgtaagctgatctttggccagcacatcacaagatggaatctccaaaaaccttgaattgcagaaactacctcaaagtacactccatatctgtctcaataaggttatagaaacactggaagtaaatatgtcgaaacacttataaaataccatagctggcccttatgttcataactcttgaccaataaagcaaatccttacattacataaacaagccagaacatcctccggactactgcttcaaccaacttgatgtctctggcttctttgaacatgtcgtatttgaaaacattgcccgcacttgagtacttggcactcttttcagatctgtaagcctcaaattcagaagctccataaaatgcaggcctacaccaactcctacgatgccaaatctgttccacaaagacgatgcgatgccaaatctatgtcattaaagtaattcatggttgatccagacttccatgtctttgacacacagggaaacatttgccatccccaacaaattagcaccatgatgtggagagaaagcgaaagggggagaggtgaaaataatttatgcacaatgaaacaaacttggggaaaaagaagagatttgcaccttagtaatatgaactggaaccgctacccccatagtagccaccactgctgctacccaaattacggcccgagtaaagtgatgaatatgaactcccaccaacatcagatccacgagatgtgtagctaccactgtaacttgatgagtacattccaccagcatcaccaccgctagcagaacctccatagcccatgccatgacggctgctgccataggctgaatcatgaccagttgatcatcggctgccactatatcccacatgtgatcgtccaggccgagcactgctgccaccaacatcatagtctaaacgtgccttggactgacgaacactgatgtcttgataccgaggcgcatcatccatatcggcatatggacgctttgatccagaaatggtatcataatcacggccccgactctccctataggccggtaaaggcctgtcaaacttccctccataactatcatcaggatatgctcgcctttcagaaagacggggagcactacgtggacctaggtctgaataacctgatccacggggtgaataatcatccctgaaagagggacgtctgtcaactggaactcttggactatagtcaagt

SEQ ID NO: 46359 - DNA, 2729 bp, Setaria italica
  Peptide Sequence Number=SeqID_112333
tttttttagttaaattcttcctaaaaaacctttgtaatttgtctagtaaacttaccttctaaagttttgtaagctgatctttggccagcacatcacaagatggaatctccaaaaaccttgaattgcagaaactacctcaaagtacactccatatctgtctcaataaggttatagaaacactggaagtaaatatgtcgaaacacttataaaataccatagctggcccttatgttcataactcttgaccaaataaagcaaatccttacattacataaacaagccagaacatcctccggactactgcttcaaccaacttgatgtctctggcttctttgaacatgtcgtatttgaaaacattgcccgcacttgagtacttggcacttcttttcagatctgtaagcctcaaattcagaagctccataaaatgcaggcctacaccaactcctacgatgccaaatcttagtaatatgaactggaaccgctacccccatagtagccaccactgctgctacccaaattacggcccgagtaaagtgatgaatatgaactcccaccaacatcagatccacgagatgtgtagctaccactgtaacttgatgagtacattccaccagcatcaccaccgctagcagaacctccatagcccatgccatgacggctgctgccataggctgaatcatgaccagaaattgatcggctgccactatatcccacatgtgatcgtccaggcctctcactatatgtatctccataccgagcactgctgccaccaacatcatagtctaaacgtgccttggactgacgaacactgatgtcttgataccgaggcgcatcatccatatcggcatatggacgctttgatccagaaatggtatcataatcacggccccgactctccctataggccggtaaaggcctgtcaaacttccctccataactatcatcaggatatgctcgcctttcagaaagacggggagcactacgtggacctaggtctgaataacctgatccacggggtgaataatcatccctgaaagagggacgtctgtcaactggaactcttggactatagtcaagtgcagctctgctccttggaggaggaagttcatcacgtctcccgtattctctccttggacttttctttgggtaaactggagctgggggcctcctgtcataagatctctctggagggggcaaacgcctagctctatctggcattgacataacaggccgcctatctctaatgtcaacgggcctcttcaacggatggctcctgatgggcggtaagcggctgacagcagggcgaacaagacgtggcggaggcctgcgaggtggaggaggtcgagcatacggtaaacggccacctcgggaagcagcatgtccaactctaaaatttcctcttaatccatgcttcattctaggaggtcgttgtagtggccgcgacaatctagctcttacttttgccttgtgatcgccttccccaatctcagaattacttatcccttcagcacatgcaacagcattatcatgagtatcaaaggtaacaaacccaaaatcctttctcttggcagctggcatgtttcgagcaagctccactttctcaatagctccataccttttgagatatttcttaacacggtcttcatcccatgagggaggaaggccgtcaataaatacagttcggacctgtgccattatttcatcatcaacttgagggtaagaatcagcaaaggaaacctttgcacttcgatcaactccaaagactacatccctcttctgcaaaatcctgaaagcatccattgcttcaggtcgagtggaaaactcaagcaaagcatagccacgattcattcctggattattggtatcctcaaccaatagtaaatcatcaaaattctcaactccataactcttcagtttgtccttcaaatgttcttttgtccatgttttgcagatattgccaacaaagagtgtatcattatcatgacttggagcaacaccacactgcttaccccgcaccagtggattctttagctctgaaacagcacgccttgcttgctccacagttgcatatcgcaggaaggcaaagcctttgttcttctttgtgacagggttcatcatcagacgaacttcagtgatctcaccaacttcaccaaaaaccttcctaaggtcattttctgtagcatctttatctagcccaccaacaaaaacttcaaactccttccgcttgcggtgctctttgaccatttcattatgctcttcatcatccacgtccacatgatgttcttcatcagcattttcatatccttccccctccccatcatcaccaccttcatcaagttcctcatccaccatatcagtctccacttcaaccacgtcttcagtatactccacctcttcatcaccatcctcatattgctcttcatattgctccaaatctttctcatcatagtctacagcagcctcctcttcatattctggttcgtcctcgaactccagtcgttcgcctttgtcctcttcttcatatgtttctttcgcacctccctcttcttccgcgtgagtctcaccattagctgtggcatcggagcctttctcctccaccgcctgctgttgcgacggcggcggcgagagctgccgcttcggttcctcgaccaccctcggggcctcctccgcgatcttcacctcctcggcgggcgcctcctccgccggcggcgcctcctccgcagaagcct

SEQ ID NO: 46360 - DNA, 530 bp, Setaria italica
  Peptide Sequence Number=SeqID_112334
catcgtcggacaccatggtcgttgcattcaggaactggttcaggaagtactgcaagaaccgggtcggctgggcaaccccacagcctgaccagctgccgccgaccgctaccaaggacgcagtcttggagaggtactggtcgcacgtcgtgcagtgcacgagctgcagcgcggcactgaaggccatcagggcgctcgaggtcgccttgcaggtcgcttcggtcgctatcgtcggtttcctcgcggtcgctaaggagacgctggtcaagtcggttgctcggaagatcatggccgtgtctgcggccgcgctgtgcttcgccgcgtcccgctggctctcaaatttcatcgagaagaacttcttttttcaggattactcccatgcgtacaagtgacgcattctgaagaaaaggggatctgcaattttgttgctagagcttgtcttttctttctttctttcttttttcttgagcatttaggccaagaaaaagggaattcttatgtgtgcgttcttagcaatatttgctaaaaacttg

SEQ ID NO: 46361 - DNA, 423 bp, Setaria italica
  Peptide Sequence Number=SeqID_112335
actttttctgtttgttggcttgtgatgcattagaggaagacttttgttcattttgttatctcttctactaatagataattgattgtcatttacccttttcaattgtgaattttatcaattcaggaagtgaatgaatccttctacgaggaacttcccagcttgttgcccatactggaaaaggatagcgtgaggcgcttccttcgcttgttcagtcaagtggggctcagcatgggatggggttttatcatcaccccacaaaccttcacccagatggtcaagcaaaatgctttgaaatgtgctaaagttgccttggagggcaaggcaccggagcttacttggttccgtgccaaccccaactgcatgaaccgtcatggatatttccctctccaccaagctgctgaaatgttttctgttgacatggtc

SEQ ID NO: 46362 - DNA, 650 bp, Setaria italica
  Peptide Sequence Number=SeqID_112336
ttgttaactagttaggtattgtaatttctaattgtattgtaggtcctactaggtttctaactttgtaatttgctttgcattgttttctggtcctgaaccttgaactcggaagagcgcaagcccctcttcagaataactatcatcaataccattttcagcaataaatttcttgtatccagagctaagaccacccttaaacacttgcaagctttgaaatatcacaaagaattggatcggttctttcccctcatacaggcgcgcctggacagcctgaaacttggtggattcaaccatcttgcttgcaagtgaaactgccgttactctatcctcctcaacactctttttcccaaaccaagttccaataaggcattcctccttatcatctccaggatatgtatactgaaatatgtggcaatcaccagtgtaaaatttggattggtcagaagatgagagaagtgccttgtccttatcatttacacgccacacctgcaggttgccagtgcaatcaatataggactgaggttcttcttttgcaggagcagctttcatcaaacctttaacatttaagccctgcaactttgcctcttccatcctcagatgacaacttcaaatcaggtgtctgcggccactcttttaaattttgatttgaa

SEQ ID NO: 46363 - DNA, 779 bp, Setaria italica
  misc_feature (249)..(249): n is a, c, g, or t
  Peptide Sequence Number=SeqID_112337
agggacgaataccaaaagaaaccaagaccaagaagaccgacaaattggagatgacttggaagaagtatttgacgaatcaggcgtaagagatttcgggtaaagtttcttaactactggtggaggagtggaaagatttctgttgcttgaactttcaaagttagcagccaatgcagtgaatgctggagaccttccccctaacacggacacgctcagggctaaaggacatgcttctggagcgctgagatttancttgtgcagtactccttcctgaatacacgggtgttcgtcgtttcggtttctgataacgcatgagaatcagcacgagttctatcatttatgtaaatataagggttcagcaataatacggatcagtcatatagctaccgggaaacaagggaagctgcaaacatgcaaaaagggttggcactgcagaaatatatgtcgcattgtaaaacatacatggccaaagaaatgacaggctattctgatcaaatagtttggtgttgattaacatgagaagcaacaatggacggtaaaactttcatacacaactaaagaaacacaggcatgtgcatcaaagaacatgaagaacaggatatcacacaagaaaaagaaatactgttgtgttgtagagaaatgtttgcaagaaatgcagttaacagacatattagaatggagaactaatatgaaattattaggtttcgggcatcttacatccaatgctggagcacctccacctttttactattggtctacttagttgtcgtacttgtaagtta

SEQ ID NO: 46364 - DNA, 3428 bp, Setaria italica
  Peptide Sequence Number=SeqID_112338
cgggttggtcattttacagtgccggcactctgctgtacacacttcttgctccctcaaactgcaactcatctcaaaaccgaaaaagaacacaggaagacagagttgaaacaaaaaatgcaagcctcggaatcaaacctgtgtgacccttgaatcaatggagggcacttgacagaagggaaaaaaaagtaaaaccacaactatgaatttaaggaatagaagaaacctagcaaaacaaactcaagctaggaaaaaggggaccgatccaggacaatgtgaaaactgatgtgtcgttgcggatggtgattgcattctgcaaactatgacagtggcgaagggctattgaggcatagaacagaattcctttcaccaaacggctatttgacccgccgattaaatgagctatttgaagctttgacaaccaggctaaaaaagttgaagagcgatctttagcctgttctgcttccactttggaagcttgctgaatgcctcttttgtcatcccaaacttctctttgaattcagccaaagataagtatgtctctctcctcgtgacatcaatttcagtaacaggatcagcagctgtggtcttcagacgatcatatgggtatatcggaaggccctcgtcatcttctggctcgttttcttttacatcttcatttatggtcagagattcaactctactggtcatggtagcagcgccatctttagcatcttcctcttgttttgccctctctgactcagagccatctttcacagattctggtgtggggctttgagtagggcgatccaaagaaccagccagagccgcaattggagatgacttggaagaagtatttgacgaatcaggcgtaagagatttcgggtaaagtttcttaactactggtggaggagtggaaagatttctgttgcttgaactttcaaagttagcagccaatgcagtgaatgctggagaccttcccctaacacggacacgctcagggctaaaggacatgcttctggagcgctgagatttatcttgtgcagtactccttcctgaatacacgggtgttcgtcgtttcggtttatccaatgctggagcacctccaccttttactatggcaagcttcctctggtatgaattgccatgcatcagggatttcgctgagtcccaggtgaagaacctagtgaaaaagggaggttcactcccttccgtaacagtgaaaattggtgtttcacgggaaagcttttccataagggaatccagcacaacaaatttctccccaacatccagagcttgtaacctcactttaacatccacctgttgaccaacccaaacaaatatgctcgtgtgacagtccagaatgaaaacatcttctgtcattagatcatcttgagtaaagtggtgtatttccttgaccttcagattgcctttcaacagtatgcatgagaaaagatggggatcactttcaagttctcgcaccattttttggcttgaatactcggatttgcctcccagtaagctccaaaattggtctgtttctgacccttccttttgcgaccttgactgcgtatttggcttaataacatcaagctgcctctccattaactcttgatccaatgcagtggtcagatttccagcccaagtgaacacagtgtttccatcatgtagaatgtaacagtaggatgaattcaatgatgaggccacaggttcaacttgaattgcttgcatgttttctggtcctgaaccttgaactcggaagagcgcaagcccctcttcagaataactatcatcaataccattttcagcaataaatttcttgtatccagagctaagaccacccttaaacacttgcaagctttgaaatatcacaaagaattggatcggttctttcccctcatacaggcgcgcctggacagcctgaaacttggtggattcaaccatcttgcttgcaagtgaaactgccgttactctatcctcctcaacactctttttcccaaaccaagttccaataaggcattcctccttatcatctccaggatatgtatactgaaatatgtggcaatcaccagtgtaaaatttggattggtcagaagatgagagaagtgccttgtccttatcatttacacgccacacctgcaggttgccagtgcaatcaatataggactgaggttcttcttttgcaggagcagctttcatcaaacctttaacatttaagccctggcgtttgagaagagctgcaactttgcctcttccatcctcagatgacaacttcaaatcaggtgtctgcggccactctttaaattttgatttgaatgtaacagtctcaaatccttcaatcactttgatgatatgtgtttttgttcggtttgaatcagagagcaatttctcagcagcttcactagcaccctttctctcctgcagcgatgtagttctgcccatccaaacatacaattcagcaccacagtctaagaagtaacacttgtttgtctcaagtaattcatgtgccaaggattcgtagttgacaggctccggttttccttggtcaaaacatagcaatttgaaggcagtttcctcgtgtttctcattgccttctgcaggtgccctccttggaagaggggcaaagccaccgaaaaaaccccagaattcaccagcttccgcatcagccatcattctaccatcctcaacagatgcaatttcacacttcccctcgtgaaatgtatctttgatgtactgtacaacctcaagagcttttgctcgctcttggatggatgagtttgagccattgaactggaaaattttggacttcgtatccagaataaatatgtcatcatgattaagggacgatcgagcaaaaggaacctctttaacgtgaacaacatgctttccttggcagacatataagcgggtctcatgatcctgggcgttgacctcaacatgcttgaatccagatgccactcctcctggctgtggcatgatgcatggtctaaaataggataggaatttctctgtttcattgccttgtatttctcggtactgaacagcacgtccgccaagagcagcatcaagctctactgttaaaattgcagcagttccagcttcgtcctgactagtatctttaccaatccagtaatggatatcatggcgaagggaaccatttttcaaggctgttgtcttcaagataatgtaagaatcgcccatgaaaaacttcccaaatgaagatgcagggacaggaacgggcttgaaatcctcgacacgccatatttccaagccgtctttttgtccagagccacggaaagctgggtccaggtccttcatagaaactgacatcttcaatttcttgtaaacagcccttgcctaattcttctttcaaaggagatctaaaaggatgctgtccgatgctcgtcggcggcgaagcgcccgacgaagacctgcccgagggtggccgctcg

SEQ ID NO: 46365 - DNA, 429 bp, Setaria italica
  Peptide Sequence Number=SeqID_112339
agtagtatccatcgcgaattttagagaacaaagaacgccctactaagaacacggtttcgtggaaaacttcgaattcaaatcgaatccgtgagggatttaggcgggaatcacactaaagttgcacataaggatcctagcaacatattccccccaacaaccctcgcgagatttggctcaaacacgaaggatgaaaattcccacgaaactgctccgaaaaactcgaaaaagaaaacggaagaaacatccaagaatacgagatttagccacggatttaagagataaattcaactaaattacaaggacaacatctatacaacaatagatctagccttcacccttcatcctcccctaggatggagaaatcaagagaaagagaggctcatctcccttctctcctttcttaagcacttggttagcctctaataaaat

SEQ ID NO: 46366 - DNA, 283 bp, Setaria italica
  Peptide Sequence Number=SeqID_112340
ctcggcgtcgacgaccgacaccgagtccgcgcaccgccgccacagcggcgacccgcccccgccgcggatgtcggaggaatcagtggtcgccacggacgccgaggaggcaacgccgccaccgaagagcaaagggaagaagaagaagagcaggccgtgtttccccgtggcaagaatccgaccgagggcctcagtgccgccgtcttccgggccgcagccgccgtcgccggcgacgttcgcgtgcgccctcaaggctctgttctcctcggcgcgcctccaaaggaag

SEQ ID NO: 46367 - DNA, 484 bp, Setaria italica
  Peptide Sequence Number=SeqID_112341
atactgggatcgtgatcgccactgtatatgagagctgcgtatccttttgtggctagccttgaatgatactccactgcactctggatgtcttcagtgtaagacaatccatggttaaatcttctccattctccaattgttccctttcgaacaccaaggctctcctgaattgttgcatcatttccccatatgtcggatagaacgtactcagcttctggacatttgaacccggacagaaactctgcagactctagcatcacccgactaattccgtctgccagtgccacagtcttggtgctccacaccacatcagggcaagccggctccaggatgtgttgcccactgagatcccttgtgcaattctttatagcttggatggcctctgtgcatgcagcgttgctaggagcactatattttccaccacagttccccctagcattctcgtaaagctcatctgatacaagtcccatgccatgaagatatggaa

SEQ ID NO: 46368 - DNA, 241 bp, Setaria italica
  Peptide Sequence Number=SeqID_112342
acggacggcgccgacgagcacgagcacgtggaagatctggtggctgtggcccacgacgtcgaacaccccggggcgccaccgctccggcacgcggctgattcaacaaccgttcgaatggacgaatggagtagttgcagttgcagcataggtgtcagctctagagtttgagtgtgatcctgtgaactgatccttcgatgcttttttaagttaatgatgggatgattttatggaggttgaattt

SEQ ID NO: 46369 - DNA, 781 bp, Setaria italica
  Peptide Sequence Number=SeqID_112343
tccattcctgatgaacacggtgcatttcacgatgcaggccgtggcgtccagggcaatcgtgtgggtttcccaaggcaacccgcgggccctggagggaagggggcaagtaaaaatgacgtggaaggattacagtttacgagttgtcccaacagctttggctactgctcttgatataaatctgagcaacatttcacttgttttcattaccgtgacatttgctacaatgtgcaaatctgctgctccaattttcattcttctgtttgcttttatgttcaggctagagaaacccagttttagccttcttggaatcatgctgattgtttcatttggagttctactaacaggtaactcgtgcttacattaacatattcagggctaagaaaataatcggctttgttcttttgtgctggctgcataagcagctgcagctgcacgggacagcaggcccacaactcagactcataatgcttgcttggctgttgcagctgcagccgcagcgctgcagcagcaatctctaccgaacagactaaagcttacacatgatctgaaagttgtctcatcttctttgactgtggcctaactttgtacctcacagttgctaaggagacagaatttaatctttggggatttatatttattatgcttgctgctgttatgtctggattccgctggtccatgacccagattcttctccagaaagaggaatacggattaaagaatccttttaccttgatgagccatgttaccccagtgatggcaatagtaacagcaattatttcta

SEQ ID NO: 46370 - DNA, 2239 bp, Setaria italica
  Peptide Sequence Number=SeqID_112344
gaccgggcagctggcggttacgctcggaagtcgccgcgacgaggtgctggattttgacttgctaccaaaaatcgaagcgaaccaagctgccgcaaaaccccttgtctgcggcttcgcgtcggccgccgctgccgccgacaccaccgccgtgcctcgcgcccccacgccgccgatgcgatcagcacggcttgccagatccaggcccctgtagaagcttcacccgtcgccgtcccatgggggattgcgccgtcgaggacgggcacgggaacccgcacccgaaggaagaggagggggaggcgccggtggcagccgtggagctcgatgagcgggcgggagagcctcgcgaggaggctagcgggcagcggaagaaggcgggagggatccgcagggagccgtcgttctcgcggtggtgcagggacccatccgccgccaccccttccaatggcctcgccgctgcggcgaccagcgacggcgacgactccgaggagttcgagctgccgctcctgcccaacgctcccggcggcggcggtagcagcagcttacccatggacatcgaggcgggggcggcagcgagatctgaggacctgccgatgtcgccgtggttgattgcgaaggtcatcgggttgattgcgagttggtacacgctcagcacatgcttgacgctgtacaacaaggagatgctggggaagcacatgtggaagttcccggctccattcctgatgaacacggtgcatttcacgatgcaggccgtggcgtccagggcaatcgtgtggttccagcaccgcggcctggagggaggggcaagtaaaatgacgtggaaggattacagtttacgagttgtcccaacagctttggctactgctcttgatataaatctgagcaacatttcacttgttttcattaccgtgacatttgctacaatgtgcaaatctgctgctccaattttcattcttctgtttgcttttatgttcaggctagagaaacccagttttagccttcttggaatcatgctgattgtttcatttggagttctactaacagttgctaaggagacagaatttaatctttggggatttatatttattatgcttgctgctgttatgtctggattccgctggtccatgacccagattcttctccagaaagaggaatacggattaaagaatccttttaccttgatgagccatgttaccccagtgatggcaatagtaacagcaattatttctattgcaatggatccatggcatgacttcagagcaagtcacttcttcgatagttctgctcacataataaggagcagcttattgctgcttctaggtggtgctctggcctttttcatggttttgacagaatatgttctcgtttctgtgactagtgctgtaacagtgaccgttgctggaattgtgaaggaagctgtcactattctggtcgctgtgctattctttaatgatccatttacctggttaaagggacttgggctggcaattattatatttggcgtcagcctattcaatttgtacaagtataagaggttcaaaaaaggccatcacaatgaagaggctgggacaaatatccaatcttccaatggcacttcaaaatatgttatccttgatgatactgaagatcaagatgatacaggctgattatgtggtagaaaacaaactattatatgcactggcgtttccagataagcaagatcatctttacctgcacagggcattgctaccgtggtcttactttcacaggctaactgatttcttatctttgtgctgtacgattgctctggacagtcatgcatgggcatggcactaacaaccatgttgggaagagaacgcacttatagctagatggaacatacgacctggtatcagtacaaaggttttgttctttcaaaacagaaaatggttcatatatatgaacaaggaattgtgcagtacgtccatgtataccatcagttacagtcagaaatacaggcatacagccgatggacgtttaatttactgaaagaggagagagctcaattttggagtgtgctctgattgttgaagggaagattcagcatatagggacatagctttcccccttaagataacaataaaccatgttgatatgtagtgctgccatttatgtgaattacaatgtgtagtgtacaaacatcacacgtataagttcttccccatttttgcagactaaggttcttcttccctctttgttttgcagaatcttatatcttggtgcc

SEQ ID NO: 46371 - DNA, 791 bp, Setaria italica
  Peptide Sequence Number=SeqID_112345
aagaaaaccatacatcgtgatttggatttcttagaaaactatacatcgcgactcattcttccagtcatgaaagttcctggtgtgaagatgacaaaactgtaagcacacacgcacacaccagtttacacctcctactaacaaaattgatcggcgcttcaggcctgcatgatacaatacactgaatacagccttggttttgatctttcacacacaaagaaatatctttcagaatccatctcatcgagtaatcttccagctgcatcggccttttactcttcttttctttgcatttgctatgcctcttgttcttggaatgtatttgctttgattttgtttacaagacacctaacagtgtgttggtgttggaaggaacatttggtgtgtgaaggcgtcgtgccgatgcatatatacacatggtacatctcttctggttctaagttcatccgagaaaaattgtatcgatgccgatttctgacatgactggtgcaagctagccctaattgtatgtttcttccccttcagtctgtagacaaaaccttaacatgcacactcgcatctgacaggtgcacatctttcagcatttctgattgcttcccagacgttttttcagcttatttatgtacttcagttgctcaagaacctcatcagtatccaattcctgcggaacagcacaatcagcatggataggatcccaaacaactgaacatgaacagtcccagtcacttgagttgtttttgtggcaaatggaggagggcaccattgtttgttgttcaatcaagtgactgggactg

SEQ ID NO: 46372 - DNA, 960 bp, Setaria italica
  Peptide Sequence Number=SeqID_112346
ccaaagcagtggacttaaggaaataacacttacggacatgatacaaataatgtgcggatcatgaccacctccaatatcaaaatgatcataccttatttatgtacttcagttgctcaagaacctcatcagtatccaattcctgcggaacagcacaatcagcatggataggatcccaaacaactgaacatgaacagtcccagtcacttgattgaacaacaaacaatggtgccctcctccatttgccacaaacaactcctgcgtctagaacttctcggcactggatccaattaccaacactggttttcttatcctcaaaccgttgtaaacaacccagcattgtcgtttcattaggatcaagttcagtgggctcaggaaactgatctttgctgctagaaataggaccagaccattctggaacatccgcttgaaacttactacctatcctcacatcagttacatatgattcaggatccaccaacatatctcgaataggaccaagacctcggcgaggcctttgaatgtccttgggtaatacacgtttgggactcgtcaactttccacgctgcctcttaggtttcttttttttacagaccaggcaataccactcttcctctggtattttcttgacacgagggtcgcagcacgataaatgaaatgctccttcacaacaatcacaaattaacattttggatggatcttccatcgaaccacatctcacgcattcaaataaaggactgctttgattatcatcatggtctatggtacttgatgttctgctaagttctgaacctttagtggggaatatttcacttttgaggatggagatgcaaaggtcccttgctgatgttagttctgttattggttttgcaattggagatgcaaaggtcccctgctgatgtccattattgccattagaatgtggtcctgctggaatttctacatttggagaaaccatacgtg

SEQ ID NO: 46373 - DNA, 834 bp, Setaria italica
  Peptide Sequence Number=SeqID_112347
agaacatggctgtatagtggtgatattgatgctgtgtgtccagtgacttcaacactgtattcattagacatcctggggctgcagataaactcaccatggagggcatggtattctgatgatggtgaggttggaggctatgtggttgagtacaaaggtctggtatttgcaacggtcagaggagctggacatatggttcctacctaccaaccccaaagggcgctcaccttgttctcgtcattcctgcaagggaagatgccccctgaatgattagaactttacaaggtttccttttcctgaagaggggctactgtcaacagtcaatggcagtttggtgaaaatatttgttccatgcccacagctcaagtttggaatctacctttctacaggaaagtttcagatgaaagggcaggttgcttgaaagccacaccacaagaacaaaatagaatgtgcccacatacttgcaaggtggatcaaattattcttttgaagatacatgagatggaacatggaagtaacattcaacttgattgaagtggaaatgacaaggtgtcaactgctgatgcatcaatacagtgatggtgctgacaagatgctatcaacaagtcacctccaagtagtgggtataaatgtgcttttttgcttcaaggaaaattataatgctcaaagagagcaattttggtcgacagcattgtgattactaaaccaattgaaagcagcagtacaaaagaatcatgaatccttattaaatttcacaagtttttttatcaacaaaagttcgtagacttctaattttaagtagtaatttaacttaagtttcttaagttcctttactta

SEQ ID NO: 46374 - DNA, 752 bp, Setaria italica
  Peptide Sequence Number=SeqID_112348
cgtactaagtttgtcctagcgtggatcgatcagctgttcatccttagaaaattgaaactacggttgactatgataacgcagcatgaggtggatctcctccgagatttaccaaacctaaacactctctgtctttgtttcaaggactttgaatatggcgagctccggttcagtggaacgggatgtcgttttagactactatgggtcctcgagattgcttgcaactccaggttacagtctgttacgtttgcggacaacgcaatgcctgggcttgaggtcctgaagatccgctgctataatgtgccatcgtccttgaagttttatgggttagagaagctacaaggtctccgggaaatcctacttagcggattgtatgacgacaaagtgaagcagcacttgcaggaccaactcaaagagcatcctagggaaatgaagcctgttttgaaggaggaagctggttcatcccgatgggcgttgatcagctgagcccgtcatggccattgcctctaccattcacgtttgcaggactacattggcatatcgaatagacactgttaatcatccaaaaatattaaggatatgcatgtataaatgtctatcgtccggacaatggggttatatgcatacatgagtaacatgacagcatccagtccagttcattggtgttgtagtctttattagtaataaggatcagctcatgcattgttttttgcaggtaaaataaaaggccctcattgtctgtgtccatcgctgtt

SEQ ID NO: 46375 - DNA, 298 bp, Setaria italica
  Peptide Sequence Number=SeqID_112349
ttaattaattgttactgtccttccatttcgccgcattcctcggacattttcgggcttttcctcgtgcgctcgtggtcggacggataaaacggtgaggcgacccgcacggaggaccttggatgcggggcccacgcggctcgggcggcgcgtcgaggtgcgggcataagagcaaggagagtggctagtatgtcggatgcgatcataccagcactaaagcaccggatcccatcagaactccgaagttaagcgtgcttgggcgagagtagtactaggatgggtgacctccgtgggaagtcct

SEQ ID NO: 46376 - DNA, 366 bp, Setaria italica
  Peptide Sequence Number=SeqID_112350
ctggaccgccgcgctcgagaagctcggcgtcgtctccaggcccttcaccaagcaggagaacaccgtcatccagacctgcgtcgtcgcatgctacggcctcgccttcagcggggggtttggaagttatatgctcgcgatggatcagagaacctacgagcttatcgggccagattatcctggtaacagggccgtggatgtcaagaatccttcactaggttggatgattgggttcatgtttgtcgttagcttccttggactatttagtcttgttgcattacgcaaggtaatggtaattgattacaagctgacctatcccagcgggacagccacagctatgttgataaatagcttccacacgtccaccgg

SEQ ID NO: 46377 - DNA, 746 bp, Setaria italica
  Peptide Sequence Number=SeqID_112351
cttgtggtttcgataaattcccttctttgggacttgaagcatttaagaatacgtaagtttgctgtgactgttttttgatattccattaaagttcatgagtaaaggcttgactgctagatctgatctaatgacatgaaagtacacatggaatatcattggtacatcctccagaaaaacttaaaattccactctctgtaggttttattttgacttcagtccaacctacattggatgcggtcttatttgtccacacattgttaactgctctacacttcttggtgccatcatatcgtggggtttcctttggccatatatatcaacaaaagctggggactggtatccagctaacctaggaagcaatgacttcaaaggactttatggatacaaggtgtggtgattgaaagttttatttgttacatgccattggttaatgcttctttccatacttcattttgacggtcaactagtaatcttctttattcaattgttctagaggcaatgaatcacaaggcatgaatgataaaaggaatatttttcttctctccatgcttataaaccttaaatctaaagaaattttggctgctgatgtgatcctagagtaatcaatgtttcattggtggacatagtgttggtgagaaccgtgaaatttggttcaagactgataactcagtgctgaaaagcatagagtgtctagtcagccttacatcttaattgtattgttatgcatttatatagtgaaataactt

SEQ ID NO: 46378 - DNA, 1824 bp, Setaria italica
  Peptide Sequence Number=SeqID_112352
taagttaaccaaataacgtttaccaacaagacaagactagaatactagcttaatccctgattatcctggtaacagggccgtggatgtcaagaatccttcactaggttggatgattgggttcatgtttgtcgttagcttccttggactatttagtcttgttgcattacgcaaggtaatggtaattgattacaagctgacctatcccagcgggacagccacagctatgttgataaatagcttccacacgtccaccggagctgaacttgcagacaaacaagttaggtgtctcgggaagtatttaagcatcagttttatttggaactgctttaaatggttcttcagtggtgttggagattcttgtggtttcgataaattcccttctttgggacttgaagcatttaagaatacgttttattttgacttcagtccaacctacattggatgcggtcttatttgtccacacattgttaactgctctacacttcttggtgccatcatatcgtggggtttcctttggccatatatatcaacaaaagctggggactggtatccagctaacctaggaagcaatgacttcaaaggactttatggatacaaggtttttatatctgtatctgtgatacttggggatggtctctataatctcatcaagatcatttatgctactatcaaggaaataatgaatgcacgggcgaagcaaggaagacttccacttggccgggttcaggatgatgatgaaggttctaaattatcagctgaagaaaagtttctgaatgagacattcataaaggacagtatccctccctggttggcaggatctggttatgttggccttgcagcaatatcaactgcaactgtcccaatgatcttcccacagatcaagtggtaccttgtcctctcagcatacgttgttgctcccctactcgctttctgcaactcgtatggcactggtctaacagactggaaccttgcatcaacatatggaaagattggcctctttatttttgcttcatgggttggtcagaatggtggggtgattgctggcttagctgcctgcggtgttatgatgtccatcgtttccacagcagctgatctcatgcaggacttcaagactgggtaccttacactctcttcacctaggtccatgtttgtgtcacagttgatcgggaccgctcttggctgtgtcattgctccactcacgttttggctttactggtcggcttttgatattggcaaccctgatggtcccttcaaagctccatatgctgtgatcttccgtgagatgtcgattcttggcgtcgaagggttctctgcgctgccccaacactgcctagcaatctgctcatttttcttcatcgcgtccctagtgatcaacctcctccgggatgtaacaccaaagaatgtgtccagattcattcccatcccgatggccatggccattcccttctacattggcgcgtacttcgccatcgacatgtttgttgggacggtcatccttttcgtctgggagaggatgaaccgcaaggagtgtgaagattttgccggtgcagttgcttcaggcttgatctgtggtgatgggatctggaccgttccttctgcgattctgtcaatccttcggatcgacccaccaatctgcatgtacttcaagccatcccttgccagctaatattagaactattgtggtcctttatttgggtatcgtcatgggacatccacctgtgtatatatgttctttgtaaattacagtgcgaagaaactgcagtagccatattcaatgtgtcgatatgtcattctggaaactgaaactttaaaaaaaacaaaaaa

SEQ ID NO: 46379 - DNA, 127 bp, Setaria italica
  Peptide Sequence Number=SeqID_112353
cttcagatgctccataggccaccgaagagcatccaggacctccgttgagccagagcacgaggggcttgctggccgcatcgccgtcggcctcggtgagccagtagaagagcgcgcggccgcgctcctc

SEQ ID NO: 46380 - DNA, 224 bp, Setaria italica
  Peptide Sequence Number=SeqID_112354
ccaccttcttcccgtagaagatggtcatcttcggcttgcctgtgagttatccactcccacttctttgcttctgctgttgttcgtgtatatttatttatatgcttggtcatcttaggatttctagataagccttggtttacattgctgcggaattgttgcgttaggtgtggtagtgctgaacttgcaattggggtttagggattcagtagtcgaataaaaacccc

SEQ ID NO: 46381 - DNA, 1406 bp, Setaria italica
  Peptide Sequence Number=SeqID_112355
gcggtatcaccacgaaattgattctctagcaaggcaagtcactgaagacaaaatggctcggaggaacaaggaccaagagaagatcaaagcagccatccgttcactgcaagaggagcttgaagatgagagacgcctgaggaaacattcggaggctctccatagaaagctaggcaaagagctgtctgatatgaaatcatcattttgcaaggctgcaaaggctctggagaaagagaaaaatacaacctgcctgttggaagatctttgtgacgagtttgcaaaaggaattagaaactatgaggaggaagtcaggatgttgaagcaaaagcatgtaaaggagtacgagcacaagtttgataagtcagtagttcatatttcagaagcatggcttgatgagcgaatgcagatgcaaaagactggtacaagggaagatttgtcggggaaaacctcaatcacagaacgactgagcagtgagattgagagttttcttcatcatgctaaaaggttcggtaactgcaagaatgataacttagacattggtaatgaaaagcgagatgccagtttttgccagcagtcccttgagtctgtgcaccttaacggagccactagtgcccctcggttagcggaagatgatgatggcagttctattgccagtgatctgcattgctttgaactgaacatgcatggaggtgccattaagagccatgaccttgcaggtactcgaaggagggtcataagctccatgcattcaccgatgagaagattggaatattccaatggtgtatctgtcgaaggctcaccaatgtcaaatgcaccaacttgctcaagaaaagacaaggcaagatctagcatcggtcgacaacaatttattgcttcaacaccagaaattagctcacgcaatgatgctggccttgcttctacagacgagcaaaatgaaactgttatgacccaagtctctcgccagttacgtgatgacctgttgaaaatcaaatcagaggctcctcaacatgcatatctagggcacagatcaaaccagccccggacaaatcagtttcatgaatatactaccgcacgggatctttgtgatgtgcgcagtccagcacgacatctgaataacccagccaaatccttggagtgcgagatatctgaatccccagctcatcagctggtaggtgcaaaggagaacactctgaaggcaaaactacttcaagcaaggttggaggggcagcatgctcgaatgagctcatcggtattccccttgatcagcacaaggaggaaatgagaacccagctgacactcttgggcttccatgatttcaatctgcaacatgtatagttgcaattgtaagatatccgacttaatagccgaatatccacttgacgatgacgtgtttcgagtgctcctggatg

SEQ ID NO: 46382 - DNA, 494 bp, Setaria italica
  Peptide Sequence Number=SeqID_112356
gtttccatcatagcatgatgtaacacatctttccttgttgaacttgtgtcacttctttctccatcaaaagatgaaaagtcggtgtcttcaacgtttgataggaaatcttcaaagtattgctcggcctcttcagtaagtcgttttgacacctttgatctatcattgctcctctggaagaaaattcacatcaaatttttaatccgtgggtagtaactggaaacaacggcaaccaagcaagtttacccttctgtgccgcggctgcctttgtagatttgcagtcttcttaggagtaggtagcagttctctaactatttttgtgagctcatgaccatgttgttcttctgcggccaattgagctaacaattcctgtttccgcttctctgactcttccaatttactagtatagctccttcggagctcagtaataacttgagttggttgtgcatcactacttaatgccttttctggtaggttctgattttgtcacggcctag

SEQ ID NO: 46383 - DNA, 1484 bp, Setaria italica
  Peptide Sequence Number=SeqID_112357
tttttttttttttttctttgatcttgatcggaaaagatccagaggcaatgctttttgggaaggacagagcaattttggttgctaacacgaatctcttgcaagttcattgggatggagcgatgaagaaatttacagtcccaaggaaacataatctgttctggttgaaacatcgccgacgtacaaaaatggaagtgtatgaagttatgaactaacatggcaaccaaatgtaaacctgcacatttattggcctaactcaaacccattgcctaccaaattaggtacactactacactcatcctgccaggaccaggccgataaataattggccataatctacaatattgtcggtctactgcacaggaacaggccgccagactcgattctttgcttctgcctccacttctcaaagaggaggtcctcactctgccgcagatgcagatagtcgtcaatgtgaaatgacgaggttccagcaaaatgagggcagctgctttggcgaatcccgacctcctcaaacctggccagcagtttatctttagaggcagttgaagtggagtagtctccagggctccagctcccacggctgctcacagtctgattgctagtgctgcatgccatgctttctccctcagccttggttttgcatggggaggtttgaagatcattggcagtttcccattgcagccaaggaaggacaacgccatctgcctcagcaggtgaagcaactttcgggagagccactggagtttccatcatagcatgatgtaacacatctttccttgttgaacttgtgtcacttctttctccatcaaaagatgaaaagtcggtgtcttcaacgtttgataggaaatcttcaaagtattgctcggcctcttcagtaagtcgttttgacacctttgatctatcattgctcctccttctgtgccgcggctgcctttgtagatttgcagtcttcttaggagtaggtagcagttctctaactatttttgtgagctcatgaccatgttgttcttctgcggccaattgagctaacaattcctgtttccgcttctctgactcttccaatttactagtatagctccttcggagctcagtaataacttgagttggttgtgcatcactacttaatgccttttctggaggttctgattttgtcacggccttttcaagctgagtcctgatttcttcaacagcttgcctaacttctttacgcattacatcatacaatacatttccagcctcatcaccaatttggtggtccttgtcaagaccatatactgccttctgattcctgatatggaaagagtgagaactcctagaatcatcatcagtaagcgaagaatggctcgagctgctatctcgtgaataaaagaaatccttttgacttgtagacctcttcaaagcttgatttgctttagatggcttattgaatgaattctgcaggctattgccactactacttttagttattgttattcccccttagt

SEQ ID NO: 46384 - DNA, 375 bp, Setaria italica
  Peptide Sequence Number=SeqID_112358
gtccaccgacgcccaaacggatcttggaggccagcagggaggcacgagagactgatcgaagcagctagcatgaattgtgagtggcgaagaaatggatgatggtggttattgggtggttattgagctagctgctcatcatcagcttgttgatgacgattcggcagtcggtcgagcaagctagctctcgatcatatctcagtgcttaaccggagatgaagcaatgaagagcaagaagacgtccggaaggccacgcacgaatgtgcatttccttgttactactactctttgctgctgctgcttcattctcctcttctttttattctgggtgcatgtaaaagggatttttgatcatttgttcctcggtacgtagtcagt

SEQ ID NO: 46385 - DNA, 320 bp, Setaria italica
  Peptide Sequence Number=SeqID_112359
cagaggcgtgtgtcctgtgtccattgatgtcccagaccctgacatcaatggacacaggcacacgcctctgctctggattcgtgtcatccgtaccaggcacttgggtgtcaacaattcttgagttgcatagcttgactcccttgccaggtttgtcagagaggacaccgttgagcttaatgttgttgtcacaaggatgtagctttgcttctgatcttcttttctctgccaaccgtgaacatcacatcttcacggttggcagagaagatgtgatgttcaactcttcacggttggcagagaagagttgaacatcacatcttctc

SEQ ID NO: 46386 - DNA, 1768 bp, Setaria italica
  misc_feature (1758)..(1758): n is a, c, g, or t
  Peptide Sequence Number=SeqID_112360
aaaacctaaactaaagaaaataaaataaccaaacaattaaccggaatttaataatagaatttacaataggcaactaaattactaagtttagtactaaggtaaattgggcgcaagtaattattaccacagagaagacaatgtttaaccaaaatgactgaatatgccaatcataaggacaatactgtggattaaggaaaatacaacataataagtaaatgagtgccggtacagagtaaagtctggcagcagcctaaaactacactcttacttagactagcagcatatcctgagtgacacctacctcgcgccaagtcatgaggcctgccatcatttgagaacgggcctcatcacaataagtggcatcccgataattgtttactctatgtgacaataatattacaatacaattaaatgtcagaaatgcctaattacgtagcaacagtcaaaggccttcaacattaactatttgaccttgagtatagtcctcgctcatcagccagaagttcgatgacagattaagccttaaggcaagtgagcgaagcaatgctgacaggtcatgttcagtgaagtgcatattgatacttcagccaagctagctagttagctagtagttgcaggtccggaggagttctaatctgaacttccctgcacagtatcttccttaacatcctcaataaccttaagaaggtcaactggagtagcggcagggtccaactcatggcaacctttaggagcattattttttcttccccagtgagcaggcgagaaggaacacgatgtgagaagcggaaaagctcttcctttggtattcttctgacaacatcagggcccgtgtgcctgtggaacaccgctttgaaaccagctaccttcagcaacgggatgacattcacaccttgctcttcagtgaaatcgtcaatcacttctactatctcatacttgtatatcacatcatctggtgtaagctcattccaatcagaagaccagttccggtacacagcccatgtatcacctttctttggaataatcctgataattcctcgagggcccttagtccagctaactctgtgggaaaagatgttgactgtttcagtaatctggtatcttccaaccctaaatcaccacatgtctttgtgaaacctgaggcaatccagtttattggtgccagttcactgttggacttagaattgaggaagctcattcggatcctgaaaggtttcattgaaataactttctgtaccattgcatatagacgaggcatgccatcttcactgtcgtatgtagcccacacctgatcattgccgaaagctctttccgtgcgatctttgtcaaaatcatggaaatctgggtcagggacatctatggacacaggtacacgcttctgttccggattcaattcatcagttgcaggaatttcgacatccgcatattttgagctgtatttcttgcatttgttgattggattgtcagagaagatgccattaacctttatattgttttcaacatgcttctctcttctatctgttttccttttctctgcaaactgactagatgacaaaatattcaagccttgtaatttactactcacactgagttgtcttggctttctcgagaagaagtgctcgggtgtcaagttggaaaatctccctcaagacattagctttttcttccacttactgccagatctaaacttttcccctgaccgtaccattaacccttcctgcatcagcaatcacagtcatgcctgcagttgcagccacngtctccacat

SEQ ID NO: 46387 - DNA, 3105 bp, Setaria italica
  misc_feature (1)..(5): n is a, c, g, or t
  Peptide Sequence Number=SeqID_112361
nnnnngatatagcactaaattttctgattgcttactggagttcgatcagagtctacaattaacaggtccaacatctcggtgatgaattactataagatcaaaggaaatacaacatcataagtaaaacaggtacacgaatgcggggtacatgggcaagcctagcagctctttccctcggactcaaactcggctcggtatgccctgcataccattgccttacagaggaacaacacaaacaagtaacgccttcaccgaagtcatgaggctcctaccttcagccgactaaccacctcaccaatgccgcaagaggcgtggcctcctcccaatggccatttaatctatgtggcgtttgtgtagtgataaaatcaaatgttagaaatgcctaagaattaaagaggtcagaagtccatcacataagctgcttgtcctggcagtattgtccaagtcatcagccaaaaataagatgacacagtagagctttagagaccatcaggtgctggcacgttgtcacttaggaagtgtgaactgacgattcagatatccagctagctatcttcagttttcagagttgcccccatctatttagcagtctgcgcagccgcatcttccttaacctccgtgacaaccttaagaaggtcaaccggagtagcagcagggtccagctcatggcaacctttcggggcattgttgccttcttcaccggtcagaagacgagaaggaactcgatgtgagaagcggaacagctcttccttgggtatcctcctgacctccttgggatccatgtgtctatggaagacagctttgaaaccagcaaccttcagcaatgggatgatagtaagcccttgctcctcagtgaaatcatcaataacctctactatctcatacttgtatatcacatcatctggtgtaagctcattccaatcagaagaccagttccggtacacagcccatgtatcacctttctttggaataatcctgataattcctcgagggcccttagtccagctaactctgtgggaaaagatgttgactgtttcagtaacctggtatcttccaaccctgaaatcaccacatgtcttttggaaaccagaggcaacccagtttataggtgccagttcaatattggacttggagttgagaaaactcatgcggatccggaaaggcctcattgaaaggactttctgaaccattacatatagacgaggcatgccatcctcgctgtcgtatgtagcccatacttgatcactatcaaaagctctctctgttcgatctttgtcaaaatcatggaagtcagggtctgggacatcaatggacacaggcacacgcctctgctctggattcgtgtcatccgtaccaggcacttgggtgtcaacaattcttgagttgcatagcttgactcccttgccaggtttgtcagagaggacaccgttgagcttaatgttgttgtcacaaggatgtagctttgcttctgatcttcttttctctgccaaccgtgaagatgtgatgttcaactcttgcaatttttcacggagagctgccttggctttctcaagaagcagacctcgtgtatcgatctgggcaatctcacccagaatattagctcttcttccactcactgcagatctgaacctttccactgaagtaccattgacccgtcccacatcagtgaaagtagcagtgggttctgtgctagcagcaactgtttctttgttatcgccaccataatccatagcagtgtaaccatcataattatgccttcttcgctttgagaagcgaccgcgccttgaagcagttttctcatggacatatgtgttctcacttgcagaatagttgtagctgtagctctcatcatgcttccttctctgtttctctgaggcctgtgtactgtaaacattagtaccggctgcaggcgctgtcttggagtaatgattccactggaagctttgattgctgtaggaatcataagtattatcttgctggtaccccccattccctgtccctgggatgctagaagtcctgcttgttgagccatatgaatgcttcgtggaattgtggttctgctgtggctgctgcttggttgaccaggagaatgatgaactggttccattgcaagggaatccagtctccaccgccaagaatgcatgatggcagtttgggcacagtaggttatgattaagataaattctcaaatactcatactgcatccggcagcggttgcaagatgtccagaatgtatctgccccaacaggacgagtagtagcctcagctgcggctgcagcggcggcggcagcagctgcagcagcagcattctttctagctctcttgtttgccttcttatcgtaagtatagatgccattggttacgttgacaacagaatgatttctccgcttctcatcataaagcatcttcctgctctcatcagacaacacactccatgcctcagatatcagtttgaaggcctcctcagcaccaactgacttgttcttgtcggggtgcaacagcagagctagcttcctgtactgcttcttcacttcctcttcatctgcaaaggcacctagagacaatatccggtaccagtcactctctccatcaatcttggactcagctgcaagatgaacttcaagtgtggacaccatctgagatatgccttcaagtgacgggcagagagtctgagccttgattgcgtacttccgagcacccctgatgtcatgggcacgaaacttgttctcagcaacatctttggctttcagggcctcatccatattgtactcctcactcatctgcacctttggatttgatcagtaaacagactaatttgagtgggagcaacgaaccccgagagcaacaactggacaagagttacgaatgcacaactactcattgaaccacagagaggaacggaatcttcatttccttggcctgcgcgggatcggctccgggaggcgcgcgaattcgggcagtgcggcggccacgagcgcccccaaaattgcgaattttttgggcccccgaattttatttcgggggtggaggaggaagaagctcgaaaaaatgaaagctttttagcaaagcctccaaaatttcgcaatacacaatggcaatgtgctg

SEQ ID NO: 46388 - DNA, 466 bp, Setaria italica
  Peptide Sequence Number=SeqID_112362
atcgtcatcaacagaagagtatgcccgcacaatgctcccgtgggtgccgatgaatttgatttcgataattttgtgccagaggagaaagaatttgaggatcagaagataacagagaagggtctatcagatgcttaccaaaatgtcttagagaggcttgcccagctaaagaaacatgggaaggtcagtaaaggtgctgacaggaggaagcggtggaaaggaggactggagctggagccatggatggactctgtggatgatggttggaaaaaggacatgctgcttgaggacgtggtggatattgatattggatatgatgcacctccaccatcgtttactgctggtatggagttgaagaagcaaaggagagcccgtattgaagctgctaagctgcgaattgatgcgattaggaaggcccctgctgctccaagacttagtactaaagtaacgtaactaaaaattaactaaa

SEQ ID NO: 46389 - DNA, 485 bp, Setaria italica
  Peptide Sequence Number=SeqID_112363
agcccataaaggggttccaagagataaagcaggagactccatgtaacaatcatttggaacccctttatgggctacttccaccacctagcctggttgattgttgcatggagtctcctgtcttggaacccctttatgggctacttccaccacctagcgggttgttcctccacgaagatggtaatagagtccagttacaccatggagctcgctcaatccacccacgactcttaataatgcaggacaaggttcacgatgctggccaacggaccagcctaaagcttccctggaaatgcttaggagatttacccaaggaaaactgaaggaatcggttcctgaatcaatggtttttaaggctgtgatgtgattatccttaacagaattacttgctaggtaggtagtatgaggtgtcatcccatcgctgaaacttctttgtttcatttattttatccaccacgtgtcaactgaactttaccccctcatcatcg

SEQ ID NO: 46390 - DNA, 1857 bp, Setaria italica
  misc_feature (1820)..(1857): n is a, c, g, or t
  Peptide Sequence Number=SeqID_112364
aactcctcctccaatggcgacctcccgcctcctggtgttcctctgcttcgccgccgccgtcgcggtggcggccgccggagaagacaccctccatctgccccgcgacgccagcttcccggcggcgcaggccgagcggctcatccgcgcgctcaacctccttcccaaggaggcaggcccggccggttccggtgatgcacccagcgtggcgcctggggagctcctggagcggcgggtgaggcttcccggcgtgcccgacgggatccaggacctcggccaccacgccggttacttccgcctgccacacacgcacgacgccaggatgttctacttcttcttcgaatcgaggggaaagaaggaggacccagtggtgatctggctcacgggagggcctggttgcagcagtgagttggccgtcttctacgagaacgggcccttcaccattgcaaataacatgtcgcttgcttggaacaagttcggttgggacacgatctccaatatcatatttgttgatcaacccactggaactggctttagctacagctctgatgatcgtgatactcgtcatgatgagactggtgttagcaatgacctatatgactttctccaggtattctttaagaagcacccggaattcgcaaagaatgacttttatataactggagaatcttatgctgggcactacattccagcatttgcaagcagagttcaccaaggaaacaaagcaaacgagggcattcatataaacttgaagggtttcgctatcggtaatggtctcacagatccacaaatccaatacaaagcctacacagattatgcattggaaatgaaccttatcggaaaatcggactatgaaaggatcaacaggttcatcccaccatgtgaacttgcaattaagatgtgtggtaccgatgggaaagcatcatgcatggcagcttacatggtctgcaataatattttcaactccatcatgaagcttgttgggacaaagaattactatgacgttaggaaggaatgtgaagggaaactttgctatgacttctcaaacttggagaagttctttggtgacaaagcggtcaaagaggcccttggagttggtgacattgaattcgtctcttgcagtagtacagtttatgaagctatgctcacagactggatgaggaatttggaagttggcatcccagctctactagaggatgggatcaatgtccttatatatgctggggagtatgaccttatatgcaattggctcgggaactcgaggtgggttcactcgatggaatggtctggtcagaaagactttgtatcctctagtgagtcatcatttgtagtagatggtgctgaagctggagttttgaagagccacggaccactcagcttcctcaaggttcacgatgctggccacatggttccaatggaccagcctaaagcttccctggaaatgctgaggagatttaccgaaggaaaactgaaggaatcggttcccgaatcaatggtttttaaggctgtgatgtgattgaccttaacagaattacttgctaggtagtatgaggtgtcatcccaaggagtgtgtcgctgacacttcttgtttcatttattttatccaccacggtgtctactgaatttacccctgataataactttggcgtgcaatgtaactacagtcccagtcatgtactctgttgatggaaaaaaatcaaatacacgaaggggacaaatgttcaaagccttgtctgttgatcttgtaaagcatttcatgtatacacgctttgatccggaaagaaaaatagtaaaaaaaaaggaataggtttctgaaaaaaaannnnnnnnnnnnnnnnnnnnnnnnnnnnnnnnnnnnnn

SEQ ID NO: 46391 - DNA, 723 bp, Setaria italica
  Peptide Sequence Number=SeqID_112365
agaatagaacaagaccaacaataactaaacgttcaagaataaggcttggtactcatcagagaacacaccttcgacacgcacctctggcgcatccctgttactcctttcttccggcctaacaatcttagcaaccaagatgtactcctctcgctgtaaaccatcgcttgatgatttaaccttgaaccctttctgttccaggaaatccttgagcccagccaaagatagattccggacaattggagcagccggtaaaccattcgactcctcggaagccaaatcatctgaggggttttatgtcctcccaagttctgagtacaccataagcccacctgactgcacaacatgaaaataagtagaggtgagcgtcgacttgtaaaactaaaaggatagaagatattagcggccacaccttgcttccacaaacatgaatcacaagtcgctcttcagaagagatcacgtcttcctcgttttcaccctctttagcgacagcgtcaatgctaacttgggaaagtatttgcagaggcatggtcatgcattcggaaccacataacatagacaatgcagtggacatctgtatgtctacgccatattccatgacaatggctcgaattgacctcgcaatatgtctctcaaggcatcttgagatcatcatctccacaatagcaatgtcatgaagcaacgacttactctttaagtaaagaagaacatgctcaataaagtgcc

SEQ ID NO: 46392 - DNA, 548 bp, Setaria italica
  Peptide Sequence Number=SeqID_112366
aaccctttctgttccaggaaatccttgagcccagccaaagatagattccggacaattggagcagccggtaaaccattcgactcctcggaagccaaatcatctgaggggttgtatgtcctcccaagttctgagtacaccataagcccacctgacttgcttccacaaacatgaatcacaagtcgctcttcagaagagatcacgtcttcctcgttttcaccctctttagcgacagcgtcaatgctaacttgggaaagtatttgcagaggcatggtcatgcattcggaaccttcaaaacaaccccatgcagtggacaacattccttctacgccatattccatgacaatggctcgaattgacctcgcaatatgtctctcaaggcatcttgagatcatcatctccacaatagcaatgtcatgaagcaacgacttactctttaagtaaagaagaacatgctcaataaagtgccgagaatatttcacaacatcccagtggctgttttcccatttttattctaacgggttacgttaaaatttaagtaattaacgtaa

SEQ ID NO: 46393 - DNA, 439 bp, Setaria italica
  Peptide Sequence Number=SeqID_112367
ccgtgcgtctgccggcgcggcgagtgtgcggtgcgtcgggacgagcagggccggtggacgtacgtctgctcgtcgcagccgaagtgcaagtatgttgctctatgcgaagaagctggtcttagtcctgaatcacagcctgctgttaggagccatcctaaaccaagcaatccttgtgtgttcaacattccaagcaatcatgtgcctgaacctagaacaccagttgataatgttaatccccgaggtgctggtgctactactccaattaatgtcagcccccaggctccacttaattccactttccaaggtgctggtactgcaactccagttcatgtgcctgtacctagaacgccagttaataatgttaatctcagaggtgctggtgctacaactccagttaatgtcaacccccgggctccacttaattccactttccaaggcg

SEQ ID NO: 46394 - DNA, 493 bp, Setaria italica
  Peptide Sequence Number=SeqID_112368
aaaacatttggcagatcagggataaagccaataactggctttccatcaggcatgtatgggcgatgcccgattctgatttgcgtattctgatcaatatctagaggaacattcttcattgcaggaaagaactctcctgcacgttcccatatacacttaacaacggacttatcaacctcccgcgaaaaacctttgaactcccggctgcttcctgtaacatacagctgcaatatgttcaaccattttctgtatgtcccttaaaatggaattcttgtttctagaaccaaattgccctttgtatctaaggttgcagtcattgatatagataaagcaccgtgctcatcttcactggattctgaagccatatgtgtgctacttgacttagcaacctgatggtcaacatatcctacctccattagggcatgatttagcttaaccttgtcgaatttctccaccacaagcagatgaccctttcgtggcttcacaggaatatcca

SEQ ID NO: 46395 - DNA, 963 bp, Setaria italica
  misc_feature (933)..(933): n is a, c, g, or t
  Peptide Sequence Number=SeqID_112369
tcaggggaggaattaacttacagagggatccatggcccaacggtctcccagaatgcaaggaccttgtcaagaagatgcttgacccggatcctcgcacgcggttgacggcaaagcaagtccttgagcacccttggctaaaaaatagccgataaggcttcaaatgtgtcactcggggaggttgttcgagccaagctgaagcagttctcgtccatgaataagttcaagaagaaggcacttggagtcgtcgccatgaatttaccggtggaagagattgacaaatacactcagatgttcaatacgatggacaaggacaatgatggtaatttgtcacttgaggagctgaaggagggcttccggataaacggtcatcctgttccagaggaagagataaaaatgctgttagaagcgggtgatatacatgggaatggaacattagaatgtgaagaatttgtaacagttttacttcacattaaaaagatgaataatgatgagtatctacctaaagctttcaagttcttcgacaaagatgggaatggtttcattgaaatggaggagttgatggaggctctaggtgatggtgaactaaagcctaatgggcaagtggttaacgatattattcgtgaagttgacaaagataaggatggtcgtatcagctatccagagttcgaatcgatgatgaaaggtggatcagactggaggaatggctctaggcggtattcaagagcaaattttgatagcctcagtcataagctgtgcaaagatattttatgacaagacagtaggttccaaacagcacttattgactgacagtaccacgccctcaactaaagagcaagtatcagaagacaatgcaaaagcaggaatactgggttaaaggagaccccaatatcccagttgcatgcttgacaaacttcaatcaagcagcaaaccctntggcatttgcctttgtctggaagcagattg

SEQ ID NO: 46396 - DNA, 1252 bp, Setaria italica
  Peptide Sequence Number=SeqID_112370
gtttggtaacttggttcattattggcattattcaaaaggcggcctaacaatgctgcatactgaactatgatcacgtttccctcctaaaaaacagagcacccttggctaaaaaatgccgataaggcttcaaatgtgtcactcggggaggttgttcgagccaagctgaagcagttctcgtccatgaataagttcaagaagaaggcacttggagtaagttgcatataacttgctgttcgtacccttatttcctagaagtacggcacacttcaacgcgaagcatttgccaatgattaatgaaggtcgtcgccatgaatttaccggtggaagagattgacaaatacactcagatgttcaatacgatggacaaggacaatgatggtaatttgtcacttgaggagctgaaggagggcttccggataaacggtcatcctgaaaatctgtgcttgatggcgaaaggtgagtagtccacttttccaggattcccaagaatcatatcactgaccatttcagcagtgcctagtgccagagtaagcccgtttccttcatgtcctgtcgcaatcaaaacatttggcagatcagggataaagccaataactggctttccatcaggcatgtatgggcgatgcccgattctgatttgcgtattctgatcaatatctagaggaacattcttcattgcaggaaagaactctcctgcacgttcccatatacacttaacaacggacttatcaacctcccgcgaaaaacctttgaactcccggctgcttcctagaaccaaattgccctttgtatctaaggttgcagtcattgatatagataaagcaccgtgctcatcttcactggattctgaagccatatgtgtgctacttgacttagcaacctgatggtcaacatatcctacctccattagggcatgatttagcttaaccttgtcgaatttctccaccacaagcagatgaccctttcgtggcttcacaggaatatccaatgtcaaagctggttctaggaaactatgcaataaagatcgagtccaggcaccagaagcaattacaatagcttttctgccatacaatatgttgctggaagtttggacagcttcaactgctccagtaacctccgatcttattaatgacatggcaggatcattatagagctccatataccttccttctgaggaatatgagttattggtcttttcaatcaaagagacagcctggaacgcatcaatctgacagtcttgaggcaagaacag

SEQ ID NO: 46397 - DNA, 368 bp, Setaria italica
  Peptide Sequence Number=SeqID_112371
cctatcccctcgtgtgccttgcctatcctctgttgcgtgtctcagctgctctggaagatattcagaagacgattcgggagctgcagcttgatgagaatcggaaaagggacttggcaactgcacttcatgcccaattcaaggattggttatatgcttcgggcaatatccgccagctctactgtctacaaggcgattaaccacccaatgaattgcgcccataaatggaagtacacctgcaagactgtctatcctttgccgactccaaaacattcgacgattgtcgaagctgaccttccctggaagaactaggaagaaggaaattaaccaaacctaagaactaacaaaacccaaagaaccaaagaacctaa

SEQ ID NO: 46398 - DNA, 525 bp, Setaria italica
  Peptide Sequence Number=SeqID_112372
gatttctttgctctgttttgtttgtctacccaataaatcatgagattttattttaccacgtaaatggtaaggtcaatcaattatgtttgcttccttttcctttattaggagttggcagtactcctggactaagttttttactttggaacgaccgttgcaaatgatattgactgaaagtgatattggtcagtttcatgtgggtcttgtgtggaaaactcgatttgttttcttgtcgattaactggaaatccttctgtttcatgtcctcagcttcgggcaatatccgccagctctactgtctacaaggcgattaaccacccaatgaattgcgcccataaatggaagtacacctgcaagactgtctatcctttgccgactccaaaacattcgacgattgtcgaagctgaccttccctggagactggagaggattccacctgctcacccagccagcctgtagcatttacacaaggatagtaaaaaaagtgaacatgtactatcgccttatttttttacagtattaatcc

SEQ ID NO: 46399 - DNA, 1635 bp, Setaria italica
  Peptide Sequence Number=SeqID_112373
cccgagcaggccgcgctcgcgcttggcacgctcgcggccgtgctccccgccgaggaccccgcgctcggggacggcgccggggacgccgacatccacgacgtgctgctcttcctctacgtccagtcgtacaagcgcctcgtcccgcggagcgcgcacaaggactcgcccgctgtggcggacgtttggccctccacctccgcgttcgatgggtacctctccgcgctctccccgatccagcttgttcgcagtaacagccgtcggtttatgccttctcaagctgatgaggaaattcatcaattatcctatctgcaaaagcatatggcaaatattcttactctcttggcagattctgttgagggtgagggtgacgattctctggtattgacaatggagacttttgagcaccttggatttctagttcaattctcagaaggaagttccttaagccaggctgctacatttttcgcaaactctgatccagacatgcctgcggctcctgtccctgctgctcaggttcttgattggatgtcacagaacatagcttctgcactggaatattctgctgagaggtctgcagcaaaggaaagcaatcagcaagccatgtctgatcttgatgtaaccatggctgaggccaatacaagtcatccacggaacagcacgccaagttccaatcctgcatactacagaaatgtaacgtttgtcgagggcttttcaaaaacctctgttgtcaagcatgcatctgatatcaaagggaattcaataaaggttctgaactgccatgattctgttatctacatattagcaccgctgaaatatgctactgtgtatggttgttctgatgctacaattgttctcggtgctgttggtaaggtagtaaaggtggagcattgtgaaagagtgcatatcattgcagctgcaaaacgaatttgtattgccaactgccgtgagtgcctcttctacttgggggttaatcaccaactgccgtgagtgcctcttctacttgggggttaatcaccaacctcttgtattgggggacaaccataaattacaagttgccccattcaatacttgctacccacagctgcgggatcatttgatacaagttggtgttgatcccagtgtcaacaaatgggaccaaccttttgcgttgggagttgttgatccacacgattcattatcccatcctgctggggtttctgatgttaaagctgaatctgctacgtgtctggatcctgatctatttaccaactttttggtatgtgaaaagtacattttaggctttagatctgtaaatcaacgtgaatacagggaaaaaaagggaagaagcacagacccaataagtcttcctccttaagttcatttttcgctgttctcgatgcagtattagattttgcatatataaacattattcttgccttgttctgcttctccattgcaagtgagtattgagcccaatttgcaaccatgtcagctgcgcccactaattacaatgtggcaacttagcatcccgcatgctaaaatacttgagccagttcttgacggtaatgttttgctccactgatgattcatctagacatgttggcccaaattgatcttttccattaaccacagccacaaagggcagtttggggtaca

SEQ ID NO: 46400 - DNA, 569 bp, Setaria italica
  Peptide Sequence Number=SeqID_112374
caaggccttctttctgcagattcctagttggtttggagatgaaaggcaagggcctacaacatgcaatcctttcccattgcctgaaatttatggggcatgccaaagcaaaaagcattctgctctggaagatattcagaagacgattcgggagctgcagcttgatgagaatcggaaaagggacttggcaactgcacttcatgcccaattcaaggattggttatatgcttcgggcaatatccgccagctctactgtctacaaggcgattaaccacccaatgaattgcgcccataaatggaagtacacctgcaagactgtctatcctttgccgactccaaaacattcgacgattgtcgaagctgaccttccctggagactggagaggattccacctgctcacccagccagcctgtagcatttacacaaggatgtaaaaaaaagtgaacatgtactatcgcctatttttttttacagattaatcctttccctatttccccaaatcttctctaattctctttgctgctaagttcggtactcgattaggatgttaattctttgtttttttccccgt

SEQ ID NO: 46401 - DNA, 474 bp, Setaria italica
  Peptide Sequence Number=SeqID_112375
tttaatttttagttcgttcccttatttaaattggtaagttactaccttgcaagactgtctatcctttgccgactccaaaacattcgacgattgtcgaagctgaccttccctggagactggagaggattccacctgctcacccagccagcctgtagcatttacacaaggatgtaaaaaaaagtgaacatgtactatcgcctattttttttacagattaatcctttccctatttccccaaatcttctctaattctctttgctgctaagttcggtactcgattaggatgtaatcttgttttttccccggtgtttactcatttttggcccttcataacatccacgagtatgtaatagggattaatgaaccaacctgttaaataaagatttcatttctttttcttaaatagcttttgatttcttaatgtaaaccatgtactctccctttacagacatgtttcagaaatgaaaaaaaaaa

SEQ ID NO: 46402 - DNA, 1601 bp, Setaria italica
  misc_feature (72)..(72): n is a, c, g, or t
  Peptide Sequence Number=SeqID_112376
gaacttctgttgtatcttcaatattggagtttacaaagctgagattgtcagtgattaataacaatcagagangttttttgtaggtggccaacatcctaacacttttggcagattctgttgatggagagggcgatgattccatggtattgacaatggagacttttgagcaccttggatttttgttgcagctctctgaaggaactcctttaagccaagcagctagttttttcgcaaattctgatccagacatgcctgctgctcctgtacctgctgctctggttcatgattggatattgcagcatatagcttcgacattagaatttatggcagaaaagtcctcagcaaaagaaaacagccaacataatgcatctgatcctgatgtcacaatgtctgatgctgtcacaaatacaagaattcatagcagctcaccaactggaacttctggtccaaattatcctggacattaccgaaatacaacatttgtggagggtttctccaaaacttctgttgtcaaacaagcatctgatatgacagggcattcaatcaaggttttgaactgccatgattctgttatctacattttagctccacttaagtatgcaaccatctatggatgttctgacactacaatcgttcttggtgctattggtaaggtagtaaaggtggagcattgtgaaagagtgcatatcattgcagctgcgaaacgaatttgtattgccaactgccgtgagtgcctcttctacttgggggttaatcaccaacctcttgtattgggggacaaccataaattacaagttgccccattcaatacttgctacccacagctgcgggatcatttgatacaagttggtgttgatcctagtgtcaaccagtgggaccaacctttcgtattgggagttgttgatccacacgattcattatctcatcctgctggggtttctgatgtcaaggctgagtccgccacttgtctagacccagatctatttatgaactttttgattcctagttggttcgagccacaagggcctaccaaatacaatccatttaccttgcctgaagtttattgggcatcccaaaggaaaaagcatgcttccctggaagatattcaaaagaatattcgggaactagagattgatgataaccgaaagaaagaattggcatgtgcccttcatgctcagttcaaagattggttatacgcttcaggcaatatccgccagctctactgtttgcaaggtgaataagcacgggattcatctgtaaatgcgcatgtgcaagattgtccttcaaccattccattccgcgcatccaagagatccaggctgactggttgtggctgtgccgaagcagatggttgttcagcctgtagtgtttgtggagggaagtatgtaaaaaatgtactgtgtttattttttttctaattaattttgatcacttccctccttttgttggtcacagggttgctgtaaatctttgattttttttcctggcttcatatttatatccttcgtaagacttcctgatagcggctactcaattcatttgtgttggcctcttgggaaataatatttttttgaccaccaggtattgtcactctcactttc

SEQ ID NO: 46403 - DNA, 495 bp, Setaria italica
  Peptide Sequence Number=SeqID_112377
tctccgactcagtcgcactagtggaggaacaaactgtaatatctaaatcggtgaatattcttacaacaccatatgacaagacagggaatgatgctctataacaatacaaaagatttttcaagcaaaaatttttcaccatgctttgaatgttgaacactataagtgtggcactgaggacagctccctatcctaaggtggctgaattttacataatttttttatacagccacaacactcaaaaggtggcattttaaacacaatgattctactaaggttcccgaaaaattgctataacccagccagagcaagctggtttctaagtggctgttgaccaagattagcggatggttgagtatctgttccttatttgctatggccaataaaggacaggtacagtggtgtcacccaatcagaacgagcatagagtcacagaccttacagcagtatcacatctggtgctgtttcaactaaataatccaagtaccattcagagtt

SEQ ID NO: 46404 - DNA, 670 bp, Setaria italica
  Peptide Sequence Number=SeqID_112378
cccaagttggaaaggaagccgtcgaaatctgccctctttccatcgattaccttcctgagaagctggaattgattcgactgtctggtagcgataccaaattcggcgcctttgtgcttgcaggcatcgaaggcgtcgaacgcaatgcagaggaggagctccagctgctgcgctgcgggccggctgcagcgctccgctcccggtccctgagcggccgcgagtgtttgcctccccggcgcttaggcttggcatcgtcaccgcggaagcatctggcgagtgacctgaggggcctgtggaagaagttggtgacgacgacgtggaggtggaggaggcagtcgggattgggattggggctcctggaattggatccagggatgtggatggtgggaaggtgaaggtcggcgatggcgccgcgggcggcggcgagtaaggcctccaaggggcggtcggacgacatatgcatcagggacacaggcactactagtactaggtggtgcttccggtgcggtggcggtgggttccggcgacggcgagcggcgggaaagccatagcagcaagttgagcgaggcctcactccctcggagtgggttgcttcttctggcgccagagaagagagcagtgggggggtggaagcttacagcgagcggcgggcggtggcggaagaagccggcgg

SEQ ID NO: 46405 - DNA, 422 bp, Setaria italica
  Peptide Sequence Number=SeqID_112379
ccgatagctgtgtaggatcgagcaactaggtaggcagggcaggcaggcaggcaggaacatgactcatggccacttgcgtgcatgcaaagatttcgggaccggatcttgtcacagccggggaggattaaacatttaaacaacaggtcaacagcatcaggctaacagttcggcgtcgatggccatgataaacactgctgccagcaacagtgacggccggcacgggtcgcatgcatggcatgatgatgacgaggtgttgtgtgcaagcaataataaacgttgatccaaggctccaagcaacaatcgatgggtcactactcgatgggggcaaaatactactcgtcatcattcttttctataagaaaaacaaagtgattatccttggcggcaatcatgcacggcggagggggtacgtgatgacgacc

SEQ ID NO: 46406 - DNA, 510 bp, Setaria italica
  Peptide Sequence Number=SeqID_112380
gtggtccttatgataactgtttgaatactggagggtcaagctgtgaccagtattacgtctattacgtgtgcttggttggggttatagaattttttagttaattcatcaagatagtatcctcaaacttgactgtgatcatactgtatatatgaataaacaaatttctgttaccatgcatgcctattttttgaggcacttgtccgtctgaacacgtttgttggtgtgattcttttttttccaattgaatgcaaatatcgagatgaatccctaatcaccttcaatgtgcacctagataatactcctgtaattttgttttccgcatcagttggcttatgtgtttacttgttatttctttaatgctgttgcaggttttgcacacagcgctcatggaagaggccttatggtgttgggttccttgtcgccggactggacgagactggagctcatctctattataactgccccagtgggaattactttgagtaccaggcatttgctattggttctcgt

SEQ ID NO: 46407 - DNA, 483 bp, Setaria italica
  Peptide Sequence Number=SeqID_112381
ggcaaggtcttccgcgtcgccgaccacgcgggggtcgcgctcgcggggctcaccgccgacggccgcgtcctctcccggttcctccgcaacgagtgcatcaaccactccttagtctacgaagcgccgctcccagtgtccaggctcgcgctacgcctcgctgacaaggcgcaggtttggcacgacagcgctcatggaagaggccttatggtgttgggttccttgtcgccggactggacgagactggagctcatctctattataactgccccagtgggaattactttgagtaccaggcatttgctattggttctcgctctcaggtcgccaagactttccttgagcgcagattcaagggctacaaggactacaccccggagcaactgatcaaggatgccctctctgccataaaggaaacgcttcaaggtgagaagctgaccagctccaactgcactgttgccatcatcggccaaaaggctgatggcc

SEQ ID NO: 46408 - DNA, 220 bp, Setaria italica
  Peptide Sequence Number=SeqID_112382
taaccttatatctttgcttttaagattagcagagatgaaaaagataaacgtctatatgagtttctctccagaaacttccaggaaagctgtacaccttgttgctgtttagcgacaggagtctgtcaccgaattgtaggggaacaaggtccaatcactaagccatttggccaaacgagaacactgcaagaacacctctttgaaaactgagtgctcttgcggc

SEQ ID NO: 46409 - DNA, 277 bp, Setaria italica
  Peptide Sequence Number=SeqID_112383
taaataatctgtatactttcttcctctctttctttacatggtgttgcgtgccgtgagctacagcgaaactaggattacagcctgacccactcggtcccatcgatgaagctcaacgagatgaacggcttggcctcgtcgtcggtgagctcgcgcgaccacgccacccggccggcgtagctcgcgcccgggcccgtgcacttgtactgcccatagaacaccgtccccccgccggcgggggcgccccggttgtaccacccgcgcgggatgatgatgttgt

SEQ ID NO: 46410 - DNA, 443 bp, Setaria italica
  Peptide Sequence Number=SeqID_112384
aggcaggtgggcggcggcccagcactgcacgctttagctgctggcaacagcttcttcccgcagcagttctactccgacgacgatgacttgttggaatccaagaagcatgataatctcttcagcagtatcctgccgccgctggagagcccgaccgccgccatagccgcctgtgcccaacagagagcagcagcccatgttgttgcctccgagaatgatgatgaactcatggtccagggaggaggaggacacgctgcagctgctgccgccggcgccatcgactggaactttctcgacaccttgttgtccacgacgacgtcgcagctcctcgagccctctaccttgttgcagtgacgcggtcgtgtccgatcagtcagacatagctagctagctaaagaacattattattcaccatcatgatcattcatcattcatttgcatgctaa

SEQ ID NO: 46411 - DNA, 291 bp, Setaria italica
  Peptide Sequence Number=SeqID_112385
ccgcaacatagaaccttttgccaacaacaaactgtacaatgcttaccaatatccacttcagcaaatccccataagaaatggtccacaatgcatgcttagtaatgtactaaggaaaggtatactggggcaaaccatacgtatgaaaaatacgggaatactaaggaacaagctagagcggagaagattaagcattttggaggcctcatgtgcatcatttgaagcccctcgagtgtatggattctgaacttgtgctttcaacctcccgttgcctcccatctcaattgtatccac

SEQ ID NO: 46412 - DNA, 752 bp, Setaria italica
  Peptide Sequence Number=SeqID_112386
aaggctgcaaccactacatgcagtatgcaaaaataaaaaactaactctgtgtctcggtagacaaacagtagcggttgggctaatggacggcagccagaacatgcaggcacgccacagttgccggccagcggcaacggcgccctcttctccgcaggacgaacagagcagtgcagaccctcttggctgatcaacctctggttgatgcgtcaactcgaatcctgcttaaagaatggagcaactgcgaaatagagcttgccgttgatattgtttcagttaacatgcagggcaactcagttgcaagctgttggatatgtacaagtgtttgaccctcaaaacgcgcccaaaaaaataaagaaagaaattcactccactgttatctgcagcacggtggtgagcctcggtttcctgtacctcctcagcagcagcgaggagcaaaccacgctgacggacgagaacgccatgcacgcgccggccagccagggcggcatctggagcccggtgaaggggaacagcgcaccagcggccacggggatggccaccacgttgtacgccatggcgaagaagtaattccaccggatccggctgaacgtcttcctcgagaggtctatcgcggtgatcacgtcctccaggttgttccggaccagcacgtagtcagctgcctcgatggcaatgtcggttccagcaccgatggccaatacccaaacgtacggacaagactagaccaagggactaaggggtaagttactaattta

SEQ ID NO: 46413 - DNA, 970 bp, Setaria italica
  Peptide Sequence Number=SeqID_112387
ggtaaaatcccattcagtaattgtaaatcagcctgtcccatattactatagcaaaaggggacaggctgatttacaattactgaatgggattttaccatcgcacctctaactctaatagcccaaaaataccaaaaggatggtaaaaggaaaaaaaaaacttgagaaggctatgagaatcaacagaacccacccaaaaacctacaatttacaaagggcgccatttccgccacaggcccacaatctccacttcatttctgtaaaacggttaagggagctacggtactcacaattcacagcaattcactccactgttatctgcaacacggtggtcaacctcggtttcctgtacctcctcagcagcagcgaggagcacaccacgctgacggacgagaacgccatgcacgcgccggccagccagggcggcatctggagcccggtgaaggggaacagcgcaccagcggccacggggatggccaccacgttgtacgccatggcgaagaagtaattccaccggatccggctgaacgtcttccgggagaggtcgatcgcggtgatcacgtcctccaggttgttccggaccagcacgtagtcagctgcctcgatggcaatgtcggttccagcaccgatggccatcccaacgtcggcagctgccagggcaggggagtcattgatgccatctccgaccattgcgactacactgccgtccttttggagcgaacggatgacgtcagcttttccggctggcatgacctcagctctcacgtcctcaatccctacctcctttgcaacagcttgggcggttctccagttatcccctgtgagcatcactggatgaacgcccaactttttaagtccttccactacaacagcagcctcccttttcagtggatccgtaatgcccatcaaccccacaaaatcgccatcatatgccacaagaatgcctgtttttgcattcgattccaggtctacc

SEQ ID NO: 46414 - DNA, 578 bp, Setaria italica
  Peptide Sequence Number=SeqID_112388
tattccttctaattgtccttaccttccttttgtctaaccgtctttgttgtctagttccttcctagtttgttccccggtgaccaggaatagatgcgcacccatctttttcaggccttgtacaacaacagcagcctccctcttcagtggatccgtaatgcccatcaagcccacgaagtcgccatcatatgccacaagaatgcctgtttttgcattcgattccaggtctaccaagaaactttcggcttctgggggaatggttacaccgttttcagtaatcaaagtacggtttccgaccaaaacatgcttcccattgattgagcattgcacccctttgccaggtactgcagagaagtcttcggcttcaagcagccacttagacaatacttcgtcccttcgttgctcaatgccatcttttgatgaaggaaatttgccaaagaaatggaaatgatatgcataatccaaaacagctttggcaagaggatgctcactgcttgcctctgcagatgcaacaagtgtgaggaaatctcctaggtccattcccgagaaaacctttgcagttgttacaacagctttttctt

SEQ ID NO: 46415 - DNA, 2360 bp, Setaria italica
  Peptide Sequence Number=SeqID_112389
tttttacggttttagtttaaccttatttaacttggtattgtaactaccctattctttatcccgacgtcggctgccgccagggcaggggagtcattgatgccatctccgaccattgcgactacactcccgtccttctggaggtagcggacgacgtcggcttttccggctggcatgacctcagctctcacgtcctcaatcccaacctcctttgcaaccgcttgtgcagtcctccagttatccccggtgaccataactggatgaacacccatctttttcaggccttgtacaacaacagctgcctccctcttcaaaggatcggttatcccaatcaagccaatgaagctaccatcatatgcaacgagaataccagtttttgcactcagctccatgtctaccaagaaatgttcagcttcatcaggaatgtttaccccattttcagttatcaaagcacggttccccaccaaaattttcttcccactgatccaacattggatccctttgccaggcaaggcagaaaagtctgcagcttccaggagccattgagaaagtatctcttcttttcttttcttaatgctgtcttttcctgagggaagtttgccaaagaaatggaagtggaatgcataatccaagatagcttttgcaagtggatgctcactgcttgcctctgcagaagctaccaatgtgaggaactctcctaggtccattcccgagcaaacctttgcagttgttacaacagcctttccttgtgtcagtgttccagttttgtcaaaaataacatatttcacattctgagctctctccagtgcatctccacccttcacaagtactccatggttagccccaactccagttgctaccataaccgcagttggcgttgccagaccaagagcacatggacaagcaatcaccacaacagatatggagaacatgagggagaaaacaaagcaattgctagtttcagcagaccatgagtttggatatgctcccaaccatccacatagaaaccatgcaaagaatgtcagtaaggacaaggtgatgacaataggaacgaaaatgctggccacataatcagcaaacttctgaataggggccttagacatctgggcagtctcaacaagagagattatctggctcaaaactgtccctgatcctactttagttgcttgtatatgaagcacaccatgcaagttcattgtgcctccaattactggactggatacttccttggagataggaacagattcaccagttaccatactctcattgacatggcttgtaccccaaatgacaaaaccatcagcaggaacctttgaaccaggaagcacttttaaggcatcaccaggttgtaccaatgatgcatcaatctccttctcgcctgaatattttccttctttgtccttcagaagaagaagggctgtagcaggagcaagctctacaagcttcttaatagcatctgatgtctttccttttgcaagaacctcaagatacttcccgaatagcacaaatgtgattatcattgcgctcgtttcaaaatatattggaggatgaaatccagtgaatgccccataaagaagtgcgcaaacagagtagacatatgaagcagtggtgccaataacaactaagacatccatatttgttgagccatgtcttagggccctataagctgcaacatagaaccgtttcccaataacaaactgtaccatgctcaccagaatccacttcagcagatctcctatacgaaatggtccgaagtgcatgagtacgaatgaactaataagaggtatgtgagggcataccatgcggatgaaaaataccggaatgcttagtaataaactagagcgaagaagatgaagcatcttagaggcctcttgtgcatcatttgaagccgctcgtgaatatggattctgtacatgggctttcagtctgccattgctttccatctctatggtatctacaatctgtctcaacccaactacttcaggatcaaatacaatttcaacttctgagtttgcaaaatttacaccaaactgacgcaagccttctattttcttcaggatatcatgcaatacatctacatctccctctgtatgcaacccagtcacacttaataaaaccttgttctgctcgctactttgtaacagaacagcatcaaaaccagcatcctcaatagcctgaacaatttcatccttgctaatggcagaagggtcatactcaacttcccccaatgaagtcgctaatgcaacaactgctcctttaacaccaggtagcttttttaagataccctcaaccgagttcacacaattagcacatgtcattcctcctatcctgaactgcgctgataaagtcttctgtgatttagg

SEQ ID NO: 46416 - DNA, 455 bp, Setaria italica
  Peptide Sequence Number=SeqID_112390
aatagaaaaaataagaatctaaagagtaaatattactcttgatatatagctgatggagtgagctttgaacaaggaatcacctctgcacatgtgagcaatgaagggttgctcttgtacaccatgttaaactgcagctcgatgttttgatgcaccacaaaaggtacactcatagttagctccttgctcatcagaccaagaggcctgctgaatggaatggcttcggatatgttattggagcattcaggcgtttatgcttggcaagtgtgtatactactcttttctggactatccaaacgggcagggttgaatgaaatgacctaattggttgtatatgcttaagggagagaaactagcagataataagagtcgctcctgacttagatctatgatttcttcacaccgattgacttctaggttttgtctgttgattacaaactgtacttgtgttcatgaat

SEQ ID NO: 46417 - DNA, 1351 bp, Setaria italica
  Peptide Sequence Number=SeqID_112391
aagaaatggttttcagatcgtggcttccagaggaaattgctgttgacctcggttactacaatgccattctgatatctggacttgtgttttctctaattcatcggtcactaccctcagtaccaggtttcttgctactttctctggtgctttttggacttaagcagaggacacaagggaagcttgccgcacctattggcctgcgttctggaattatgactgctaattatctaatacaaagcagtcgtgttatattatccaaacctgaaactccattttggattattggcacctaccatctgcatcctttcgatggtgttattggcttaagtatctgctctttgcttgctatacttttcttcccccaaaagcctgttcagaaggataaatctgtgtgatgagaatctaaagagtaaatattactcttgatatatagctgatggagtgagctttgaacaaggaatcacctctgcacatgtgagcaatgaagggttgctcttgtacaccatgttaaactgcagctcgatgttttgatgcaccacaaaaggtacactcatagttagctccttgctcatcagaccaagaggcctgctgaatggaatggcttcggatatgttattggagcattcaggcgtttatgcttggcaagtgtgtatactactcttttctggactatccaaacgggtatggtttcttccctgcgttgtaaggcagggttgaatgaaatgacctaattggttgtatatgcttaagggagagaaactagcagataataagagtcgctcctgacttagatctatgatttcttcacaccgattgacttctaggttttgtctgttgattacaaactgtacttgtgttcatgaatctttgaacacgagcacaccaaagttttgagatagcaaattttgccaacatatactgtgtatagaaagtagctccggtataaggacagtgttagctgattagttggtgcatctccccgcacccctggttcagtcaatgttactgtatagctgtaatgttactccaactgtatatataactgtaaagctgaatgtagtgaggtttgcatgggaaatggccatgcgtcatacctgcaatgcttttaggtcattgctcaaaagttctgtacgaattatacaagtaatggcttagatttgcgggatcgaaggtcccgtggcatcgatttatccggaagccggcagaggagaaatctggaagaagcagctacgcaacaggcaacgcaggtttcgtcgatgcgtggcttgcagagccattggacggaccgaagtccttggctgacagcctccggcgtgatcggacgattgccacgaagacaagtggcgtcgca

SEQ ID NO: 46418 - DNA, 419 bp, Setaria italica
  Peptide Sequence Number=SeqID_112392
tttttaggtaatagacttcagtggctttagtacagatgcacaccgggcaatagaactttccagagtcttcaaatgtcactgatgaaccaaaacagctatcatgagcagataacaagcagctgctgcattgcagcagctgaccatctttaccgcattttatgcataaatcttgttcttgggagaccccaagggaatcattggcttcttgatcctgactacagaatggcattttgccagtcaatgacagcagacaagcagcagcaaatccgctgaaactatcatctgaggtatgtgcatgtgatgtttctgccacagttttcgcaacagtttgcttgtttgaatctttagcttcctctgctcgtccccatcctgtaaagagtttggaacaggtgtactgcaacttacgtttctgaatgtca

SEQ ID NO: 46419 - DNA, 953 bp, Setaria italica
  Peptide Sequence Number=SeqID_112393
gcctcccttaaagctgcttcctcctcttctgtccaacagagtttggagcgccttccagtcggcgcagcaggattcgaataacgcttgggtgggtatgcatattttcttttccttgacggtgaaggcatgtgttgatcctgctgcccaaatgcttttctagaattacttgatacagttgcctccctttcttgtgattttgctttgtgatgtttcatacaacgccaagggggcgatgatcgcttgccagtctcatttgaggatgaagcttctatttcatcagaatcttcagagtggtgggaatttgtagggccatcctctttgtcagcctcaacttccagatttgcagcaggactgcatctgttctgagatgaatttcttctctcatgagatgaatggccattaccatcatcttcacgagcttctgcatctcccacatgatggtcttcctctgcatcatgaggttgattgctattgttctggagcacagattgtttattcatggctgccacaccagaattcttaccagaagatgccttttcaatggctacctcattataagtatcacttgtaacatttattttctgtttcttcctctgcggatcagattcttcaccctgatgagcaaggtcatcagctttggtttggctgcagcttttttgcctttttgatgaatcacatccattcaattgaccctcaccgttggcagctcttggaagcactccagtttgctgctcgtcatgttgcttgagcaatggctctgtgccaaggaaagcagctagtttcttcctagcttcaatataagttttctttgctttttggtatgcttcagtggctttagtacagttgcacaccgggcaatagaactttccagagtcttcaaatgtcactgatgtactacaactatgtttccgaatgtcagttgtgtttgtttcaatattttgctcggataaaaa

SEQ ID NO: 46420 - DNA, 498 bp, Setaria italica
  Peptide Sequence Number=SeqID_112394
ttttttttttggaagaactttctttcagggatgctttttgaacgagaattcattcagtgacacaaatgcaattgaacaggacaactttttttctgacctaacaacctggaggggcagacagtacttcccttggattgctaatctctctacgacacaattctaattgtctgacgaaatgccacccatcgctgtaggctgtggccgaatgcttcagaaagctaggactgacaccaacgccaccaaaccaagtgcgaccgaaaagccatcgacaatcaccttggaacccctgctgtatcgtggcatcgggccgctcacccacggtgactgtgtcacctgtggcgtcgtcggcctctgcctcgccggcgtgagggtcgatggaacggtggaggtcgcgcttgggcgtggagggatcgccggcggtggcggtgacggtccatggggaagaagccctgcaactgcgcaggcgccagcggcggacgggaggtcgaggcggcagga

SEQ ID NO: 46421 - DNA, 571 bp, Setaria italica
  Peptide Sequence Number=SeqID_112395
tctacctcgcattcgattacgcggagcatgacctctatgagattataaggcatcacagggagaagctgaactcgcccatcaacgcctacactgtcaaatccttgctgtggcaactgctcaacggcctcaactatcttcatagcaattggattatccatcgcgatctcaagccttctaacatactggtcatgggagaaggagaagaacatggaattataaagattgctgattttgggcttgctaggatatatcaagctccgttgaaagcattatgtaacaatttggttgttgtgactatctggtatcgtgctcctgagctgttacttggggctaaacactacacaagtgctgttggtatcctttgctggagagcaaaaaccacaactcttttaccttttatttatctccatttgattcaattcagttatttccttaaatcatttctagacatgtgggcagttggttgcatttttgctgaattgctcaccctgaaaccactgttccaaggtgtcgaagccaaaaattctccgaacccattccaagtatgggcactctcactcaagtaattatg

SEQ ID NO: 46422 - DNA, 1738 bp, Setaria italica
  Peptide Sequence Number=SeqID_112396
ccgagagccaccgcggcgtcggagaagaggacgacggcgagaggaatcccagctgcggcggcaggccggtgcggcgtcggggatgggagacgggcgcgcgggcggcgccaatcgcccggcgtggctgcagcagtacgagctggtgggcaagatcggcgaggggacctacggcctcgtcttcctcgcgcgcctcaagccgtcccacccggcgcccggccggcgcgggccccccatcgccatcaagaagttcaagcagtccaaggagggggacggagtatcgcctaccgctatcagggagatcatgctcctgcgcgagattaaccacgagaatgttgtcaagctcgtcaatgtccacattaaccacgccgacatgtccctctacctcgcattcgattacgcggagcatgacctctatgagattataaggcatcacagggagaagctgaactcgcccatcaacgcctacactgtcaaatccttgctgtggcaactgctcaacggcctcaactatcttcatagcaattggattatccatcgcgatctcaagccttctaacatactggtcatgggagaaggagaagaacatggaattataaagattgctgattttgggcttgctaggatatatcaagctccgttgaaagcattatgtgacaatggggttgttgtgactatctggtatcgtgctcctgagctgttacttggggctaaacactacacaagtgctgttgacatgtgggcagttggttgcatttttgctgaattgctcaccctgaaaccactgttccaaggtgtcgaagccaaaaatactccgaacccattccaacttgatcaactggacaagatttttaaggtcttaggccaccctactgttgaaaaatggcctacccttgccaatctgccatggtggcaaaacgaccagcaacatattcagggccataagtatgagaacccaggtctccataacattgttcacttgccacagaagagtcctgcatttgatcttctctcaaaaatgcttgagtatgatcctcgaaagcgtataacggctgcacaagctctggagcacgagtactttcggatggacccactacctggaagaaacgcgcttttaccatcccagccaggagagaaaattgtgcaatatcctgttcgtccagtcgatactacaacagattttgaaggaacaacaagccttcaaccaactcagccgccttcagggaatgcagctcaaggtcaatccgtatcgagatcaatgccacgacaaatgcagcagcaacctatggtggggatgccaagagtggcagctggaacaaacatggctgccttcaatgctgcgtcgcaggctggcatggctgggctgaatcctggtaacattcctatgcagagaggcgcaggtggtcaatctcatccgcaccagttgagaaggaaggctgaccaagggatgatgcagaaccctgggtaccctcagcagaagaggcggttctgacactgacaagggacggccatctggctactgactgatgtgtaacactgtctattgttgtgtcatgtatatcaggtgtttgcaacacgtcggttgtgtaatcttcttgttgtaatttgttatcagcatttggatgcaaatgctggtacttgttaaacattaaatcaatcgagattgtagccgtcctagtgacctaagctgcttcaatcaggctgactttaggtttataaaggtcctgcttggttcgtgacc

SEQ ID NO: 46423 - DNA, 338 bp, Setaria italica
  Peptide Sequence Number=SeqID_112397
cccaaatctgaatgaaaccttaggtctggcggcctggcgagcgcggggtgcagtgagccgatgagcacaagccggcgagcttctcctggagtcctggatcacatctgcggcttgttgatgtggggcagaccgggtggggcacagcagcagcagccaagcagcacaactatgcaaggcagcagcaggcagcagcagccaagcagcacaaatatgcaaggcagcagcaggcagcaggggcgcagctcaactttgactgatgagcgacagaacatgttacatatgagcaccaattttgcagcatataactgacagtgcttttagtaaattagttgtattac

SEQ ID NO: 46424 - DNA, 466 bp, Setaria italica
  Peptide Sequence Number=SeqID_112398
gtcttaatctttacctataatcttaaggaaacaataacaaacaagttaagaatacaagttaataacaatacttagaactattaagtgataagtaaattctattgccagaaggtgggaaagcctgccgtcttcgtggatgctggaaattcccctcctctccagcacctggtttgttcgaagttcgccgcttatctccggaatccgtatttatgggcctggcaactgcattgctttttttgctcagctttaggctcgccacacacaaggattctctctggcttcggcataatcaaaaggcaccactaagaacctgaattcagattcttgaggtatcttttgattctgatgaacgtttctctcttcattgagtgaccggaaccgttgctcagtatcagagggggcaacggttccggtcactcaatgaagagagaaacgttcatctgaattcaggttcttgaggtatctt

SEQ ID NO: 46425 - DNA, 1439 bp, Setaria italica
  misc_feature (1428)..(1428): n is a, c, g, or t
  Peptide Sequence Number=SeqID_112399
tcagtttttgttttttttttttttttttttttttttagtccaaaatgacatacaatttaaaatggaggtcgaaatggagggagtacaacgcaagagcagcctcttctcgtgaatggaagttcaagaattgtctctacccccacaatattcccacatacaatgtgtgttccctttgtcttaactcttttacctataatcttggaacatcacagttgatcagttatacatcttgactattagtgataagtaaaatttctattgccagaaggtgggaaagcctgccgtcttcgtggatgctggaaattcccctcctctccagcacctggtttgttcgaagttcgccgcttatctccggaatccgtatttatgggcctggcaactgcattgtctttttttgtctcagctttaggctcgccacacacaagattctctctggcttcggcataatcaaaaggcaccactgggaatctgaattcaggttcttgaggtatcttttgattctgatgaacgtttctctcttcattgagtgaccggaaccgttgctcagtatcagagggggcatctgaaggggacttggacatttccatgactttgggttcctgatgctcatcatcattacgactttctggtggttgcggatcatctgtttcagtgtccaactgtatcacgtcttccatttgacaggctggatcactgtgttggacgctttctggttcagaatgcacttgttctttcaatggaatgctacctgatggaggtttcacactgccagagaagttatggaaaggaagtaccacagaagacgttatcttgtccaccttactcttaccctgatcacttgaaagccctgggaaaagattcggccttcttccagcagctggttttccaaacagagcaccaaaggctgtagtcctcttcgatacttgaacagtggcctttgctacttgctgctggccattgctcaatatttccttatctgccagtccagtaaaccctgacgaagtccccgagttcttttctggtgtgaagtcctctaaatgcatattaccgaatgaagcttcgcttgtaacagttcccatacagggagaagcagtaccaacatttgtaatcactgtggaaactacagcagattcatcactcggatcttcattgttatcaacatcaacagcagggatcatttcagtgtcttcactgctgttcttcacatttgccattgttaactcttccagctttcccttctttagttgttccgctacactctcaaaagcaccagaagctgatatggcatcccttatagtgttaatgacagtgctgagatggcgctcaaagttttttgatttaacaattctttttaacttcccactttagtctacctattgctacctatcttttgtcttattcttcttaagtttagtttactttcttttnttttcggtttt

SEQ ID NO: 46426 - DNA, 609 bp, Setaria italica
  Peptide Sequence Number=SeqID_112400
tacttctagcacccatttcctttcttcatctttttttagtaaagaaggaacacaaagctgtcaaatataaaagaatctattctgagtaaaaagtattccacttcatattaaagcgaggcaaaaatatttacatacaactaaatgaattcaaccatctgttgaaagttactccagtgaagcaactgcaatgtcgaaaaagacaagatggcaacaagaaaacggaaacaacaatgaatagccataccttcaaaacctgtaacctcttcatcaggagctgctcagaaaacatatgattttggactagaacctacgggaacctgctcctttgttctggtgaggagccgaaacatttccattactgctaccaaaggacacacaagagtaaattggtgcggaattgccatcctctgtattctcactcggtatcaggatatgcttcgccccggggctgagcttcactgggcctgacctcagcacaaaacggctgctagatgaagtagcattgtcaggatcagctcttgccattcgagttcctgcgtttctggatggaagggctgctgaggctctgctatcaggaactccttgaactatctggtctgggtggttcca

SEQ ID NO: 46427 - DNA, 1745 bp, Setaria italica
  Peptide Sequence Number=SeqID_112401
ccttgtctagttttcccttaaagccatgaactccagatggcacaaccagttcaaatttttgtcacacacctgagctcacttgccaattttttcaaatttttagctttttttaaaaaaagggaataaacaactgcagaactaaagggatctgtcgaagtcttccaagccacggaacaaaaccatgtaccctccatatgagatcaggtatcctccacacagtacattgtatcctctcacatcaccatcgccatcgattgcttatgccatcagcttcaattccttcaaaacctgtaacctcttcatcaggagctgctcagaaaacatatgattttggactagaacctacgggaacctgctcctttgttctggtgaggagccgaaacatttccattactgctaccaaaggacacacaagagtacattggtgcggaattgccatcctctgtattctcactcggtatcaggatatgcttcgccccggggctgagcttcactgggcctgacctcagcacaaaacggctgctagatgaagtagcattgtcaggatcagctcttgccattcgagttcctgcgtttctggatggaagggctgctgaggctctgctatcaggaactccttgaactatctggtctgggtggttccatgtaaaatttgcagagttattacggtgaactgatgagtttgcagagtacagaccatatgacataggcaaattggcatggtaatctgaagacggtgtcacatgctccatatttattggtgaaaatggtgctgagggcgaatctgtcttagtggaatgatcagagtaataacaccaaggaggtggcgaattctgaataaaggcagcactgccatgattggaaagtggtggacatccaaatagaacatttctatgagattgcaagtctgtaaagtccctccacctgtcttcacatcttggatcaccagggaacacattggcagcgggcaaagggtggctgacattatgtggggttctgtgtctaaaatgtgcctgagttgtgcttcctgaacttgctgaaatatgagctaccgtgcttgcagaacttgctgaaatgttgggaatactctgagtttgtaatgataggaaaggctgaccttgtcgtggcagttccaacaccaacctgttggtaagatggtctttagtaggatttggttgtttctgtgccgcctcagaccaattgtcgactctagtattggatactgtaagatcacgacccatcaagcgcaaggtttgtcctgcagaaggcctagaaccttgttgcgtgttcatttctgaatgaaaaatttgtttctcactgtgtgatagattatgtcctcgaaattgaaaggaagaaggttcacctccagttgagagctgagagacaccatgatgcatagtcatggagcaccaattttgcagctgaaccgaatcctgaacagtttggtttcgcagtatacacggggacttcattctgttgtccaagtcagctgcatgttgctgttcttcttgggcatatggagtgaaagacgactctttatggcttctttttccattgtcaataacttgttgatccatacactgagttccaacctgtgtatgctgaagacatgactcctctgaatttggatcataagggctgttcaagtcagcaggatctggcaattttttattcagatcaaataaaccagtggacattacagtactactgcgctcggattgataatcacgatttgtgttatcata

SEQ ID NO: 46428 - DNA, 681 bp, Setaria italica
  Peptide Sequence Number=SeqID_112402
caagccgagatgctcccgcagccgcagaccaggccgccgttggccttgtccgtggcctccgccgcgccgccgcgatcgctcctcttgtagaagtcgacggcgatgaagtttgcccaccggtccccggacttggcgtggcagacgttgagcacgtccatcagcggcgccgagttgtccttgcacgcctccgggaagtttgggaggtccctgaagtagttcaccagcaccagcgacctcgagaggtcgttcatggcggccgactcggcgcggttgtggcacgtccccttcaccatccccttggtcccgtactggttctcgacgacgtagcgccactcgtaggcgatgccctcggcggcctccttggcggacttggaggtgaagacgaggaggcggtggttgtcgcggaccatgtcgctgagcagcggccagtcgccgccgctcttgggcatgcgcgagaccgggaacatgtagcgggcgaggcccgaggcgttgagcacccgtgtgaggcccatgggcgactccacgtagtcctccacgaagatggtgaccacctcggccgggttccgcgataggaagcgctccacctcccggagcacgttcaccgccggttggaatgcggtgaagttctggcagatgccgccgaaggagtggcagagccagatgtcgttgcggaagtcgtac

SEQ ID NO: 46429 - DNA, 1940 bp, Setaria italica
  misc_feature (1)..(24): n is a, c, g, or t
  Peptide Sequence Number=SeqID_112403
nnnnnnnnnnnnnnnnnnnnnnnnggcgaggcccaagattatttcccaatgtatttttcctatttgtctgtacttgcacagctagattaattaactcacagaacttcattttaagaccgtaccagactattgggcatttcatttataccaatttcgcccaccaaacgaggaccatttcgtggatatatacagcttgttacagtcgaaataatcaaagcacatatgtacagttcggtttcatgtcgatctagcattccagccctgagtacagatcatccaacgctttgtaaagaaacttggcagcatttggcctttccacatgccccataagaatgtcgctggttgttagatacgggtcgccgtaaaaacgcagattagcatctatccgcgtggcaactagattcccttctaatgaaacaccaatgaatgcacctttgctgcagctatatgtataacaaactcctgatcctttatcaccagctctgatgtctgcttctagtactctgcccacaggtcctgctgcagcacttacacctgcccctagtgaaaaatgcattcgactgcagaatgtttggacagcttctggaccccgaagcactatgatgaaatccattagctcaccaccaacctgtgctccccatccaaaaccaccagaaagtatagcagatggtgcagaccaggacccatcagatctccgagcaactactaggccagtcccaagtttgtaagtaagaatagcaccagctttcacaactgtcaatatggcaagcccacttgctccattaaggactgcatggggaatagacttctcagggtttattcttgcaacctggctgtaactcttcaaggtattcgctgccttgtaaatctcatgctccattgttaacccgattggcaaatttaaccaccctcttgcacaagtccaatccatcacatcatgctttgcagtttgtgaggcattacttacagaattaatcaataagttctgcaatggatcaagcctatcataacaagcatcacagactctttgtggattgcgctcacggaacttgacaggcaaaagacatcgtccttttgagcacaccgtgcaaaatatccctccacagaatcgacaatgatgccttcctcgggtgacagcagtgaaaggagcagcacactgcatgcaggatctagcataactgtcaggaagccattctggtggctctgcttccaatacagccctataaatgttgtaattcagggcttcttcatcaagcactggtggagcacttggcatgtagacagaggaatgcaagaacgtattcccatcatcacttgaccccaagaaagagacgctggtcttagtctcctttggctgttcaacttcagtatttttcaaactacgaccaatgattgcaatcgcaccccccagcaggttcttaaggtttactggcttttgcgcctttgctggtgcagatccccaatactcatcagggcactgatatccatcaaggggatcagcttccccaccaaaatcaaactccttttgcccagaccactttggctcaaatgaattaataatgtttccagctgttcccaatcccctttctatatgctgaggcaacgactttggatcaaatgagttgattgcattgccaaccgtttccataacttttgactggatctcatccttgaagctgttcactgctcctggtgcaggcagcgggtggtacgagacaacctccctgcgtgctgacatggtaatcaatgtctagcacataactccctgtgaaataacaaaaccagtcaatccgagtccgggcggctctccgccctgcctggtgccggcggagggcagggacggacggcgggaggaaaaagcctggcttgtcggctcgcgccgtcggcggcgcgggagagaccacgaaatccgcggaggaagcagagaggttggagtaaca

SEQ ID NO: 46430 - DNA, 263 bp, Setaria italica
  Peptide Sequence Number=SeqID_112404
aattttacacaagatattatagatctaatatggaagaaatatgctgaaagacagtacaaaacatttcaggatatacaaaattacttcatgaggctatatcaaggtatagaaaggaatttgggaataatagttactataaatacctttcctttgcttcatcttgatgataagttaattgttaagcctcatcataaatttataatacttaaggctgatataaacctaaaataaaatgatctggagaattgcaaataaagcatcta

SEQ ID NO: 46431 - DNA, 438 bp, Setaria italica
  Peptide Sequence Number=SeqID_112405
gtctcggcagcgccacctcggcgccggagacgggaacctcggctcggttgcgcgccgccgcggaggattcataaccggatcggcgggttccgcgcgagctccctcgctcggatcgacgacgcgccggggcggaattccggtgccggttccctctttccgtgaggggggtggtgctgggagctgagagctcggagttgttggccggcggcggctaatctgcgctcccttcgtttttcatctggccgcggggtcgcaatctgcgcccgctgctcgcttgctcggctcgagcgggtttgttgaagccgaagcgggggcggtgctctccctctggtgggcagcggttgcagtccgcggtagatttgctgcggctgcggatgctccggcgcgcggcggatctcgaccggtcctgctgcacggagtgaagggagggtgcgggtt

SEQ ID NO: 46432 - DNA, 436 bp, Setaria italica
  Peptide Sequence Number=SeqID_112406
ccagcgatgacgaggggtccgaggacgggaggccccgggcgcggatcgggccagaccaggacgacgacggccagggggcacccgaggcgtacgacgacgaggtggatgaggaggacgaggaatactacgacgaggaagaggaggatgtgggagaggggttcgaggagtatgaagggcgcgcggcaccgcccacggaggacggcggcggcggcggccaggagtcacgcggggaggatggcgtggccggggaggagggactggcggaaggggaggccaagggcgagggggaggagaaggagcaggagccgttcgcagtgcccacttctggtgccttctacatgcatgatgaccggtttcaggaggagaaccgcggccggcgcaggcgaatgtttggtgggaggaagttatgggatgctaaagatgatcaagcttgggt

SEQ ID NO: 46433 - DNA, 449 bp, Setaria italica
  misc_feature (421)..(421): n is a, c, g, or t
  Peptide Sequence Number=SeqID_112407
cacaatactgatagcatcaactgttaaagatggaggtatgtggaattactctagtagtttaggtgctctagagtggtatgtggtgatgattttatatttttattgaacgaaatgttacttgattgaacttttaactttagtcctatactgcaagtctgcaactgaagaggactaaactggaagtaacaccattcatctgtgcatattttctggtgtatttcgtcccatttcacttcactttggttggtagttgacgtttgttttgatgaaatggtggtagtttgtgactgacatttatgtccagtatttatccctttcgtgttttttgggtttgctgaggatttaagcctaaatattcatggctattgtatgcaatttttgccatctaaatataccgtttgctgcagccgagcaaaaaacngtgaacgagaatctaaagatgagtgctg

SEQ ID NO: 46434 - DNA, 2807 bp, Setaria italica
  misc_feature (2788)..(2807): n is a, c, g, or t
  Peptide Sequence Number=SeqID_112408
gttacaatatacaatgcctgatttctttttcccattgtaaagctattattttttttattaatgatccttccttatgaagtcttttgataagagttgatgttatgggttttctgtagagactttcagaggaagagacagcaacaatagacaaaatatgtaaagaggaagccaattcatatgttctttttgatccaaaggttgtagatggcctttataaaagagggctagtgtacttcgatgtccctgttttcccagacgatcgtttcaaagtttccaggcttgaaaattttgtttctaacaaggagcaatcatacgaagacccaattgaagagctattgtatgctgtatttgttgtatcaagtgcgaatgctactgttgctgaactggctgcaactttacaagctgacctttatcagctgcaggcagctgcatcatttgcttgtcgattgggctgggctgaaaaactagtggatgcagattctgttcttaatgatgaaggtgcgcctgcatttcctggtagtattcttagtgatgacgaagaaggttcaaatacaagtatcaactcagaaaagtctggtcaacaactgattagcatggattctgatgggcccaggaaaatatctggaactgctcatgtgggctttgttgttgatgccaatgttacttcatacttgatgatgggctcactgtccccaggtttaaaatcgcatgctgtcacactctatgaggctggaaaactaggtgattcttgtattgcagaactttgtagtgatctggctagtttagagggaaagaaatttgaaggtgtcctagaggagtttgcaaatcatgcatttagtctgcggtacttcttggagtgtttacagtctggtggtgtttcttcaaatgaaattactaataatgctggtgaagcaaagactccgagaagctcttcgaatgacattgaaaatgctactggccaattggccaaagtaaacatagaggatggtgttgacgataaccatgatgaattgccacagcatgaccaggttacatcagagttagatgcttcaagtgacactcgagtgttgaagaacaaaaggaagtacaaagttgatattcttcgatgcgagagcttagcctcacttgccccggctacattggaacggctgtttctccgggactatgacattattgtttcaatggttcctcttccttcttcgtcagttcttccaggcccttcaggcccaattcattttggcccaccttcttattcctccatgacaccttggatgaagcttgtattgtatacagcagggaattgtggaccggtctctgctgttttcatgaaaggactacgctttagactgctacctgaaccattatctggttgtgaaaaagcactaatatggtcttgggatggttccgtggtgggtggactaggagggaagttggaagggaacttagtgaagggtaacctattgttacactgcttgaactcaatgcttaaacaatctgctgtgctggtgcaaccacttggcgttaatgatcttaatgcatcaggaaaccttgtcactgtagatatccctctacctctaaagaatgatgatcaatcaattgcatctgtggtagctcaaactaatttgccagaggaacagatcttaaatttgacatctgtattgaaagaactatccaataaatttgacatgagcacacttggctaccttcgtttactaagacttcacaggatcgaggcatcggacaaaattgacccagaaaatgtaagctatcagtgggtacctttgagcttagagttcgggattcccttattcaatccgaagttgtgtgagaggatttgtgaaagggtggtttcatcccatatgcttcagaaagatgacctcaatgagcattgtgatgtgatgcaaaatgtaaggaggcatctgagagaactttgtggtgaatatcaagcaactggtccgattgcaaagttattcaacaagcgtggaagctcaagggacttgccacgtgttttaatcaacagtattagtgggaggtggaatctcaataatgacccttcaacacctaccagcggaggagccccaagtgaaaatgagaggctgagattttctggacggcagagatgccgcacagaagttgtgagctttgatgggagcactgtcaggtcatatgcacttgctcctgagcacaatgaggccaccagcagacttacctctgaagaacaatcatccctacatgatgtaaaatcagagcaagaggacacagacagcaaggatgtagtcttaccaggagtgaatcttatatttgatggagctgaattacatccctttgatatcgctgcttgccttcaagcacgccaacctctttggcttatagctgagtcatcagcagcctcatcggcactgctatgatgtggccataactccattatagccattgtgattccagtctccaagttgatcgataagaatgcagtgtggagggctgctgttttatgcactatgtccaagcatttttgtaggaattggtcagatggtgctcatcaactggggatgcaatttttgaagccatcaactcagatcatatattcatatggtacaagtgggtattcgctggtggttttcttgctttgaaattcggatcaatttatttagatgtgttttaggttgatccaatgacgcaaattaaagaaaacttgcatcactgcatgttatattgccattttgagagggggcattttttcgtgaccatacctattttataaagcttaaattattggacgaagtaaacnnnnnnnnnnnnnnnnnnnn

SEQ ID NO: 46435 - DNA, 181 bp, Setaria italica
  misc_feature (146)..(146): n is a, c, g, or t
  Peptide Sequence Number=SeqID_112409
ttcttgtacccttcagaattcatggaagtgtgcctgcagagctgcatatggagtcagtatatgctacgaagaaagaaacatcccctttgctgtcaaatgtcatcaagtgaggtaagggctgtgtgatgcttggacagcaaaggggntgtttctttcttcgtagcatcacacagccccttta

SEQ ID NO: 46436 - DNA, 1495 bp, Setaria italica
  Peptide Sequence Number=SeqID_112410
ttggagacagatgtggacttgatgcaacaagatcttgctatgctcaaggatctctttatagcagaaggccaaggtttaccactagatgtagttgaaagggaggctaaacaagctcagcagatattggacctatatatgctgaaggctgatataattattgaaatgctgataaatgcaagtgaccaaatgtctcaccatcttgaagtttcaagtgctcgaagaagacatgtacatgatgcacatacccttcttcgagttttgtgtcataagaaggataaaattgcctctacgttcttgagaattcaataccaccttccaaggtcgtcagattatgatgaccttcctgtgaaggacgtgtcatctaaagtacctatgttttcagacatgcttaagagaggtacctcattcaattggtcagagacagggcagcaaagctttcgggttatgaagaagaaactgcaagaagctacttggcagtaagatatgtcttgctgagaaaactctgcttggtttgcagattgccccttccataaacgcaacagaagtgagctttactaccaaagtaactcttctctttcgagataaggcgtgggtttaaaagatatgtactgtacctctgctatgctaattgcaatacaagttgcatattcagtatgattttcagaagggtcaacacggtgctcactctatggtcctaaaagcatatatacttcacaaacatcctgaccctcagaattcatggaagtgtgcctgcagagctgcatatggagtcagtatatgctacgaagaaagaaacatcccctttgctgtccaagcatcacacagcccttacctcacttgatgacatttgacattgacagcagatgggtaattagcaacaggcttcaattggccacttcaagggtttacagcaatggagttgtaccacagactgtcattctactgcttaaagagctttattttttggaaagataagagctaaatttttgccccaggcaaaaataaatgaagcaccgcgaggggtttttgtttcgaggagaagttgactgttccacctgcagcctgcaggtaccaagctggtggcctatttataccaggtacttgcccccagcatgatcggcatcatttgttcagaaaagattaggttggcaaagttcatgccgaataaaaacttgcaggacctgggaaccctgggtgtgcttttcgtagtctgtctagctataagcacgttagatgtttagttcttttatcttcctgcctacattctgtatcgaaaatttgctacttccgtttgatgaaattttactaggacattaacccacatagttgccaaaatatcagttgactttagcctcagtggttgagctgtgtttttaccttctggtcttttttgtatgcgtgctatatgtgtccagtcaaacagtcatgacaaaacagatgtatgttttctgcgtctcagcaatcatgtaccaacttgatcgggcaaaaaaaaaaa

SEQ ID NO: 46437 - DNA, 526 bp, Setaria italica
  misc_feature (503)..(526): n is a, c, g, or t
  Peptide Sequence Number=SeqID_112411
gtttcatgcgtctgttagcacttttcttttttacgcttcagatatgagttcagttgagttaacatcaacttgtgatgctgtgcttcattcaaaatagatgtttgttaagatttcacacgtctgttgctcctctctttttttacacttaagatatgaattcagtcaagttaaagtgttaaaacatgacatttgttattgccaattcttgtgcataaaaactgacatttttttattgccaattcttgtgcattaaaactgacatttttttattgccaattcttgtgcattaaaactgacattttttttcgttctaatttcctacgttcttggaacacttacatttccattgagttgaagggcttcgccggtttacctcctgcaagtaattgattacttctacaagtttggattaacaagactctctcctagatgctactatatgttaccagatgctgagtcatgtcatggttcctgtcagtgatggaatggttcatttgaaattnnnnnnnnnnnnnnnnnnnnnnnn

SEQ ID NO: 46438 - DNA, 936 bp, Setaria italica
  Peptide Sequence Number=SeqID_112412
cgcagaagagatgttgtttgcattctgcacaccataacttgaactgttggacagcaaaaggggccactatccaattggtcaagtctatggtgctggagtctgggactcggtcgtacaaccgactgtaaccgagaccgttggtgagctcgtctcggaactttgcacggccggcgaagaaggcgtagatcggcagttgacccaagccgaattgtcgtgctttcatatccattgcacacatcatttccagccctttcgaaaatgtgagaagatgagagtaatgaatattaagctctcgcgatccagaacccctcacacatcataatcagctcccagtagtaatatagacttgtgtcgctggggagaataaaactgtttaggaacacaccgacttttttgtcccaatagatcattatccttataagtttcattccgtgcctgtctatgtgggttccaggacctctggtattcccaagggcgcaattcatcaagtggtggagacgacaaatcactaacaggagcccccgttcggagctgagtctcctcaacagtgggattggcagaagagtggggctccgtattgatatcagtaagctgagacttttcatagaaaagtatgtaaggctcacagctaagaacttgatccaaagaggcttctaaaacgttctcgtcgctaacataataccaagactttgagtcatcattattattcatctgacttcccatcttgttagctctaacatatgctacataatgaccttgagcgggtgttccttggtgctgcacaactccaactaatcggtacagggtgttggccacaatagatctgttttccataaatggttgcatgtcaaacatctccttaaagcggacatccactttcaacttctcactgcgagaagagcagtacgtgaatcttttcaaagtgaccactaaact

SEQ ID NO: 46439 - DNA, 667 bp, Setaria italica
  Peptide Sequence Number=SeqID_112413
actctcagactctgcgttcggatcaatgttgtcggggtccaggatgttgtagtatatcgccgggaaggcgcagaagagatgttgtttgcattctgcccaccataacttgaactgttggacagcaaaaggggccactatccaattggtcaagtctatggtgctggagtctgggactcggtcgtacaaccgactgtaaccgagaccgttggtgagctcgtctcggaactttgcacggccggcgaagaaggcgtagatcggcagttgacccaagccgaattgtcgtgctgcggcagaaggattgtaaaattcataagtaggagcatccttccccgagaagaaattcgtcggtaggatccctggcttgatcagctcatctgtaaggtcgtcatcaaatgtgttggtcattgagtcaaagcaagaggggagctccaagagtggttccgatctctgatacgggaaccagctagttgttttcctcgctgaagccgttgtagaagcatctaatgtattcggctaccttggtggcagagtactggaaaccggagaaagctgatgctgcttcgccgaaggaagtacaccgcgccgtacggtggggttttccgccgattcgatattgggaaagtcatgtgctccactcgctgctgtgagatcttgctcatgtacaaat

SEQ ID NO: 46440 - DNA, 541 bp, Setaria italica
  Peptide Sequence Number=SeqID_112414
cttcttcacccaaaggtggagaaatgacgtgcgccaagtcaaaacgcaacatagaaaccatggacttccaacatgctgcataatcgcatagcataaacggcacaggttcagtacacggcacccagacgacaataagcaacgaccctacgatcaacaacacctaacagcaagagctacagagtctgtctgatgacaccacctacaaaggctacaagtttttcgtctcctccctgagcttgcttcagtcctccatgcatcagtgcatcacgctagtaaatagagaccggtcagacggagtcgggtcactgatgccgcgtggccgcgtcgtgggtcatttccaggacaggccggagaagccccccgactgctgctgcccgtggctgccgccgccgctggccccgccgtgcggcgggctcggtgggccgccggatgactcgctcaggctcattgttccttcttgacggcgggctgctgctcgccgccggcgtgaccttcagcggcgccggcgatgggtctgacggtgacggagcaagctgctgct

SEQ ID NO: 46441 - DNA, 1106 bp, Setaria italica
  misc_feature (1066)..(1106): n is a, c, g, or t
  Peptide Sequence Number=SeqID_112415
atctcgcttccctccgatcaccggctgctcgtgctgaactcttctacgcagagcgatgaacatcttgaaccagcccatcaaccccggcggccacccggtgttcccggcggccaaggagagcggccacctcgcgccgtcgtcggtgcgcttcgacggcgcgccggcgcagccgagcacggcggccgcggggcgctccagcgccaactacccgaggtggcaggcgcagacgctgccccgggccagcagctacgtcggcatcgagcacgacggggccaccgcggcgcccgccccgttcaggccgcccacgctcgacttcctgcggtcgctcctggacaactgcagcgtcagctccgccttggcgggcggcgaggccagcgcgccgccggcgcaggcgccgcagctgctcgcgctgcgggtggtcgtgacctccgccgtggagctcgacgcgcgccagaccgagctcatcgcgcgcaagatgcgcctgctcaccggcttcgttaacctcaccgtcgtgaacgtcgtggacccgtccctgatcgccggcttcgtcatcagctacggcagcgatgactcatacgtcattgacctcagcgtcaagggccagctcgccgcgctcaagaaccgcgtggactccatcgaccagaccgcccacgcccacggacacccgcaccactgatcagcactggagaaaggtatacacacactacaagcccagcagcagcaccgccatgaccatgagactatatacagaaccgaacgccatgccaacaacagttttcctatccaatgttgttgtaaatcgcgagaaacttagctactgccttcctcctgagcctatataaatgtttgtacgatacagcaaatgttattatatatgatcgacgttgaaacaacagctttgatgctgtaatatgatgctgcaaagttgcagtttgtaagcaaggtggattgcagctctgaaatgttgagctagcagagtctaatgccatgagaacaaaagtaatgctactgtatccaggaacaagtaaatgtatttgtgagatgcagctacaagtaaaactttttnnnnnnnnnnnnnnnnnnnnnnnnnnnnnnnnnnnnnnnnn

SEQ ID NO: 46442 - DNA, 579 bp, Setaria italica
  Peptide Sequence Number=SeqID_112416
aggggatatatcaccatggaatggataagcggttgtgctgtctcccgctctgcccaggctgagagtttcacaatctcgcaagatattgtggtatgaatactcatgctataatgaggttactctaccatgttagattatttgactctagtggtagaactgaggtctcacatgaatgacaagttagctgccagctgaggttcaaagtgcaaaagctccctgtggaaacttactggcagctgacagcctctggctagaaagaaatttgatggggtaatttttaaaaagggggtaaaattttaaattcagcataaacgtgttgaacaatttaggtggaattactgaatctcatctcaagatcaagcactttgttcgtgccttgcatattactaatttgagttatctagtagaatgtcgtatatttagcagcgcattgctgaagttgaaaaaaaatcatttttctttctttttttggagattatagacattaagtggctgagcacaaaatatcaactaggccggagtaccaaccaagttgctgtagtacacacagagggaaagcatatcagaatgagaatactt

SEQ ID NO: 46443 - DNA, 456 bp, Setaria italica
  Peptide Sequence Number=SeqID_112417
atatatctgcaacgagagaaaacaatggaagaccattaggatcaggatacagagctactagtgcctgcactgctgcatcgaaaggcaaggtagcgtagtggcaagcggctacctgcagctgcaggaatccgtttacgcttgctgtttgctagcttttccatgtactgctcgagttggagatttaggggagagaacacaagataagagtcgattagcggaacaacggaagcataactggattggtgcgagaagtcaagaagagaaacgctgatccggcaggaccatgattcgggtccattggtcacggaccccaacgagtagtagccagctatggctccgtctatttggtgtttggctaaccctgcctggctaggatctagagttatgctagtctaaacatgtctaatgttatgcaatagagttgtatttggttgcttggtcatgggctctatttgg

SEQ ID NO: 46444 - DNA, 289 bp, Setaria italica
  Peptide Sequence Number=SeqID_112418
tctggccctccggtcccaggacaagcagctcatcttcaacgtccaccccgtgctcatgctcctgggccccatcgtcctcgccggagaggccatcctctgctaccgctccctcccgctcctcagccgcggcgccaggaagaaggcgcacctggcgctgcacgccgcgggcctcggcgccggcgccctcggtgtctacgccgtcttcaagttccacgtcgagagcggcatccccaacctctactcgctccactcctggattcggtcatcgccaccatctccctctacgcgc

SEQ ID NO: 46445 - DNA, 345 bp, Setaria italica
  Peptide Sequence Number=SeqID_112419
gtggcggtggtggaagaaggctgggtgtcgcgcggtcgcttggacggctcggcgccgccgccgcttgtggtgagctgctgctggcgttcgcggcgcttggcggcgggcacccaggtggacttgacgtgggtggggcagtcgaagccccggctcttgcagcaggtgcggcagcgcatgtgggcgcagtcctttttggcctggttgccgcagtcctggcagctgatggtccccgcgccggcgccggaggcggagcccctccgccacgcgaggagccggcggcggggtcatcggcgaatcggatgatgttgggcgcgtagaagtggtggtgctcctgcgccgggtggt

SEQ ID NO: 46446 - DNA, 725 bp, Setaria italica
  Peptide Sequence Number=SeqID_112420
tgctggctgccatgagttcggacaacattgggtaggcgaaattttgtgttgccaaggaacacaatgctttgcatatgttgatcatggtagggaacataacttcatttaccccctctttcagagccaatgcatgtgacagattgttgatatcttcagaggtacatccaaaatggaagaactccgatacctttgcaatctctggatttgagctgcatctctgcttcagaaagtactcaacagctttcacatcatggttggttgttttctcgattttctttactaccttcgcatcatcaatgcaaaaatcctggataatcccattcaagaagagctgggcctcctcactgaaaggaggcacctcagtgatctcaggaatttgagaaagtttcagtagccacttgacctcgatcagaacacggtatctgatgagtccgaactcgctgaagaagggcatcaggtccctgatgaagcgaccataccgcccatccagcggcgacagcgccatcaggcagaacgtatcgttgtccggcaagctgcccagctcctccagcgacctctccgcccagcccggggcagaatcgtccatctcggcggaacctccggcgacggcagcgggggctgagcactgaaggcgccgcgtcgggcgggcacaggcgctgcggagcccggtggccctcggggcggcggccgtgcggggagagaccgcggcggcggttgccgggggc

SEQ ID NO: 46447 - DNA, 1269 bp, Setaria italica
  Peptide Sequence Number=SeqID_112421
tcctcaggttacagctggcataattccatgagccgcactttacatgtaccaaaaatattttaaatgagaaccaggcaaattaacgtggctgaccatccctgaggccacaacacgtcagtgttctcgagtacccgtccattattttgcaccgccgttggcaaaataaaaaaattgagaagattatccatttctttaatggaatttcacttgatcatgaatccagattctagatcaacaaacttctcgatgtttttggccaaatcctctgctagtccagtataagaatgcggtgttagcttcgaaagttttgatcgaacctcctctggtatgtctagaccatcaatgaactgctgcatgctatccttggtgacagcttgtcctctagtcagttccttcagcttctcataaggttcaggtatcccatatctccgcatcactgtctgtattggctcagcgaggacctcccaagtttgctccaggtcttcagctaaacgtgattcattcacctgaactttgctgattccacgcattgtagctttgtaagccaatagagaatgacctaatcccacacccaagtttctcaaaacggttgagtctgtcagatcgcgctgcatcctagatatcgccaacttcatgcttatagcagataaagtaccattcgccaaaaataaattgccctcactgttttcaaagtcaatgggattgattttatgaggcatagtggaagaaccaacttcaccagcttttggtacctgcttgaagtagcctagtgatatataggaccacatatctctgtcaaaatcaatcaacacattgttgaactgggagaacagattgaaaagctttgatatgtagtcatgtggctcaatctgggtaacataggagttaaactgcaaacccaaggatctaacaaactcttctgccaccttaggccagtcaacttctggatatgcaaccacatgagcattgtaattaccaacagcgccagcaaatttccctagtatgttcacctctgaaaaactcttccctatatcagataacctggctacaaagtttgccatctcctttcccaccgttgttggtgatgctggctgcccatgagttcgggacaacattgggtaggctgaattttgtgttgccaaggaacacaatgctttgcatatgttgatcatggtagggaacataacttcatttaccccctctttcagagccaatgcatgtacctctgaagatatcaacaatctgtcacatgcattggctctgaaagag

SEQ ID NO: 46448 - DNA, 434 bp, Setaria italica
  Peptide Sequence Number=SeqID_112422
cctccccttgggcgacatcgggtagtcgggcaagctgtggtggtggtggtggtgatcgtcgtaggaggcggcgaaccccgcggcgtcgacgacgaagtagcgcgaggcggcacggcgcacggcgacgacggccgcggagaagagcacgagcccgacgaacgccgcctgaatcaccgccgagaggtcgagtcccaggcccgcgccgccgcctccgcctccacctccgcccagcatctaatatagccgggccctagggttagggttccgcgcccggcgtccggcaccgaccatccgaatgccacccggcgtgaggcgcccggacacggagaggcgcgaggacgagtccgaatcgaggtggtcgcgccgcacggccacgccacgcccccgcgccgcactccccagccggagccggaagggacacggccgcttttttt

SEQ ID NO: 46449 - DNA, 365 bp, Setaria italica
  Peptide Sequence Number=SeqID_112423
agccttcttctctgcattcttctttgggtccttcgctgcagtgacatctcgtttcaggataacatcttttggggactgagaaacttggacatttttgcacagttgtctctgaatattaagaaggcgtgtgtgcctattgcaagtgattgctctcaaaatgagttgttcaacatcaatgcaactcagatcaagagaaagattcgcctctttatcagtaaatgggtcgagcacaaatgaactatgctgacactttatctgcatgtcctgccctgcctcaattttgataaaaggagatgaatcaggttctgctgtgctagtgcttttttcatctagccagtaattaactttcaggccaggtatcttaa

SEQ ID NO: 46450 - DNA, 667 bp, Setaria italica
  Peptide Sequence Number=SeqID_112424
ttactttagtttagttactttaagtctgctgtgctagtgctactaacatctagccagtaattaactttcaggccaggtatcttaaaaccacttgaatccaattccccatcttgaacaagctgcattagagaagcatttccaatttgtccagtggcactgtcagagatgagttcagatcttatcgcatctttccaccttccctgtcgaagggcattagcctgcctaataatagtgtccatagcaagagagatgcagaactcatgaagtatagcatatagcactgtgaagggattctcagaagctgccattcttctttctatatcatcaccaagagcaaatctcctactttcatcaagcttaataggacctttcttctcgccaaccagtaactccatatgcaatatcctccataagtctacattaccacggtaacctagtgtgagaagaactttaaattctccatctacacgtaaaactgctattccatcagttacggaaacattagatacttctttaggtctaggtgtcacaagtactttgtaccgcacactagcatctaatttccgcagagcacgtttttcttcatctgggaaagtcgattttgacttcctatgtcttctatgcattttggcagcctatgataaccccctgtaagcatgacttcaat

SEQ ID NO: 46451 - DNA, 421 bp, Setaria italica
  Peptide Sequence Number=SeqID_112425
gtcctcgtttgggtcggtacgtaggaggatctggagccctcagcgtaggcgaactcctcggcgaggatgctcgcgagcgactgcggcttgtagtcggacttcgccgagctcggcctggggttgcagatggagccatcgagaggacctgatgaagttgttgggaccttcagagcctgcagctgcttgctcagaatcgtgatagtctcctggcactcggcgagtttgtcagctgctgcgagaatctccgagtcctgcagggagtgcagatgttgtgaattcagttcctgatgacacgctgaaaattgtaacctgcaattcttttactattttttctgtaaaaatgtattgcaagaacagggtaacttactgtagccaaatgactttcctcttgagctagaaacaaaaaaaaaaacaaaaaaaa

SEQ ID NO: 46452 - DNA, 1455 bp, Setaria italica
  Peptide Sequence Number=SeqID_112426
aggtccattattaattacccaaagaaaatctgttcgcggacgtcaagaagcaagtctgttcacaccatgtgccagacagccagagcatgttgccatcagccatcagcctccgaaacagaatgtacggccaatctctgggagcaggaaattcaaggaatggataaacagaacacgctcaaaaatcactgatcagaacgtagcagcactgcttggatccatggcacacttgcaggttgcagcaccagcagcagctcaccattcaccatgttgacttcaccttctgcagcttcagccttccactttctttctgaagatgatcctgcccagcaggctctggcttcgcttcttcttcctcttcggatcagcggaagcttcgtcttccttccgcgcctcggcgaacaccggatggacgactacctgtgtcgattcctcgtcgtcagcgccggcgtttttctgcccctgtgccgtgctcctcatttttgttgcataaacctcgtcttcgtctttctttaactgctcctgtttgggcgtagtaggagatctggagccctcagcgtaggcgaactcctcggcgaggatgctcgcgagcgactgcggcttgtagtcggacttcgccgagctcggcctggggttgcagatggagccatcgagaggacctgatgaagttgttgggaccttcagagcctgcagctgcttgctcagaatcgtgatagtctcctggcactcggcgagtttgtcagctgctgcgagaatctccgagtctgtagccaaatgactttcctcttgagctgcacaatgttgcacacttgcctcagcagtagtactttctatctcacaacaggctgattttctgcccggcaggatattgtcatcctgagcaagtacaactagtgcgagttcttcatccagcttctcttgatgagtggccattatatggtcttcagctggctgatttggtccttcctgtgcttctttctgaatatctggagttgctgctgcttctgcaatttggatgtcctgtttaccttctgtgttgactgtacctggtgacttatcctcatcaaaattcttttcatcaccatccgcggtgtcagatagatcttggttcgataaatattgttccacaatgtacttcaggatcaggcaaacctcgtcgatgaacttttcaagtttagctttcccatgcagtagatcatgacacacctgaaccagttgctcaaggcgactgcaaagttcagatttgccatgtaacagcggtcctgatcttgcaacattatcccctgcagatgtgccaatcatgggagtgattctctcaatcagatctctcaccgtcttctctatttcagaccggtcaaatggtacctctgaatcttctcttttgttagaaattgctttctgaatctcctcaagaatggtttcaatgctttctccacttgcttcatgcttatgcaccac

SEQ ID NO: 46453 - DNA, 256 bp, Setaria italica
  Peptide Sequence Number=SeqID_112427
ctggcccaggttcaagcagataataagcatgcaattagtaatgagctacatctcttgtcttataacttgtaagatattgtcgcctaggactcttgccttccgttaatagtatttgtatttgtatttgctcgttatcgacgttacatgacctcaaaaaaaaaaagcgttacattatctcccattgggaatatgttattatgcattgatttagacttgctgtttctttactttattttcatctagatgtggatgttga

SEQ ID NO: 46454 - DNA, 755 bp, Setaria italica
  Peptide Sequence Number=SeqID_112428
caactgataattttgaacctcctcgtgctcgtagtcgtagtgatggccaccggcggcggcggcgctagtgagacagccgtcggcgcaggggaagaaaatacaggcgcttcgagaagccccagccgtaggttcttcgtggcgctgcacgtgggcgccggcttccacgccccggcgaacgagaaggcgtaccgccgagccatgaagcgcgcctgcctcgccgccgcggccgtcctccgagagagcagtggcacaagccttgatgcggttgcagctgccattaatgttttggaggatgatcccatcacaaatgctggtcggggttcaaatttgactgagagtggtcatgtggaatgtgatgcaagcatcatggatggaagtactggttctttcggagctgttggagctattcaaggtgtaaagaatccaatccaagttgctctgcacttggctaaggaacagattgcaggatcttcattgcttggtcggataccccccatgttttggttggtgaaggagcatataaatgggcaaaatctaaaggaatggacctacttgaatctacatcagaggctaatagttggttggtgactgagaatgcaagagcgcagtgggtaaaatacacggcattgcttgttaatccaagaaattattagagcataacactggttctggttcagaacatgattcagtacagttggaagcaccaggcactgattctgagaatactgctgatggaaagaagatgttcacacagt

SEQ ID NO: 46455 - DNA, 1568 bp, Setaria italica
  Peptide Sequence Number=SeqID_112429
tggaggatctacatcacttacttccccaggacaacattatgggaaggcaaagcacatatattctgaaccatttgatatttatggtccttctgtcaaaagggatgtgatttcagtttcgaaggaactttgggttggtttgctgggaaatagagctgcagaagcattagtcagatctaagtttgaggagtttggtccattagctaattttttattctatccatccaaagatttttccttagttgaatatagaaacataatgcatgctctgcgtgcatgtggatatatgcagggttcctccatttggggcggttttcttcaaataaggtatttagacagacttataggtagcaagggatttattcatggtatagctatcggtgaaagccgtcatatttatgttgctaaagtccagaaccaaaaagacaaagatgaggtgtttgatgaattgaaggcagcagggttgaagagaccatgtggtgttactgatctctctggtgaaaatgctttgcttctggaattcgagacggcagttgatgcagctacggcaaaagtctacattaggagtcaagctcctgcagatgtttgttccagggataagaatgcacctggtcatcaactcttggtgcaaaatatagacaactcagtccctgacatggagttaatcaatgccttctctcgatttggtgaggtcataagatgccaattcaataggtctgatgggaactgctttatagtttatagatcacaagatgctgctgcctgtgcaaaatcacacttgcatggagcacgatttgggatgaagtcaattgttattgaatcaaggacatggagtgcaggatctgttcatgataaaacagtgttgcctgttgctccattgttaggccagagttttcctgacaacagcatccaccaagatatcaggcatccaagagtttcaggatatcatgcaggctatgcagcaccagggggtcgacctatttatggtccacctcctccaaatacaaatagagctccacaaggaattcttccttgccctcctgtctctacacaccgtggttctgtaataccaccaccacctattcaaacctcctttgttcgacctgtatatcatggtccagggagtccttgggagaacactacccccaatccaccacccttcagtcatgtttctcctcgcatgatgcctggaagtaacttccgtgccaatccaactcttcctttcataccctcttctgttactcctattgtgcagcttcctggtggttcagcgcagcattctgagaaaatgcctccgccaccacctctaccaaatgtagctcccccacaatttacacctccacctccactccctatttcccagccaccttcagtgccaccacccccaaattctcctcctccggttcaacctattgctgactcttctgactttcaaaatccatgtcctcatcctcgatggcagggttttcttgcaaaaagcagcatgaatttattgcagagtctatgcaaggtagagtagagttggatgcctgtagatacgaaaatgctgtttctgaaccagcagatggcct

SEQ ID NO: 46456 - DNA, 355 bp, Setaria italica
  Peptide Sequence Number=SeqID_112430
tgctgatggtggctcgggagattgtggtgctgatgccccagcaacagcaccacaatctcccgagccaccaccagcagaccagcagcaaaccccaccacaagcgcctgggccaacgcctccaccgccacggcggcggggatctccacatcgacgaccaccaggacaagcaccgccgaagcaggatccggcaccgccaaagcagggagcggaacctgcaccgccgcggctggtcgtgccaccacaggactctcctgcgccgccaccaccctcaatgatcaaccgcaccacgggctgcaccacactccttgtacttggggactcaacagtggaccctggaaacaacaaccacctgccc

SEQ ID NO: 46457 - DNA, 496 bp, Setaria italica
  Peptide Sequence Number=SeqID_112431
gaggggctttcaactgctggtcctagtggccttgcttattggggagctgcactgcgcaagaacagcaccaccaacagcagctgatgccccagcaacagcaccacaatctcccgagccaccaccagcagaccagcagcaaaccccaccacaagcgcctgggccaacgcctccaccgccacggcggcggggatctccacatcgacgaccaccaggacaagcaccgccgaagcaggatccggcaccgccaaagcagggagcggaacctgcaccgccgcggctggtcgtgccaccacaggactctcctgcgccgccaccaccctcaatgatcaaccgcaccccacctagcactcttgtcaccacactccttgtacttggggactcaacagtggaccctggaaacaacaaccacctgcccaccacagccagggcaaatttcttgccctacggcttgaacttctacgggcgcaggccgactggccgattcaccaacggccga

SEQ ID NO: 46458 - DNA, 670 bp, Setaria italica
  Peptide Sequence Number=SeqID_112432
atcagacagttagctcgacaccatcatctgatcgcacgcctgcagggcctggtttgcgtagtatcttacatccacatcagggtcctcgctgagctcaacaaggcatggtttcacggtagattgatcaaggatcggtataagtgactgcagtacttttgcaacattgaacttgatgttaggaaccctgtcctttgaggaattaatgatgactggaagcagcttttgacaagtgatttctgcacccatgacaggggccaacaatgagatagcttgcagaattgtcatgcgatacagatagtgcggattgttgatcttctccagcacctgaggaattatatgctgcattgcccactctggaccgaactcctctgcaaggcgcttcaagttgttagcggcagcatctctgattgagaagaccttatcttccaaccattgcatgttgtaaacacacaataataacgacgtgttgtctagctcaattacaacattaataacacaacgaacaagggatcaagaccgtccatttaccagcatggcagtgttgatctgttactgaggctagaaggaacttttcaatctaaaggccaaattacagatactccaaaattggaataaaaaaatcaagctctatatcagactagttagctcgacaccatcatctgatcgcacg

SEQ ID NO: 46459 - DNA, 705 bp, Setaria italica
  misc_feature (36)..(36): n is a, c, g, or t
  Peptide Sequence Number=SeqID_112433
tcgacaccatcatctgatcgcacgcctgcagggccnggtttgcgtagtatcttaccatccacagtcagggtcctcgctgagctcaacaaggcatggtttcacggtagattgatcaaggatcggtataagtgactgcagtacttttgcaacattgaacttgatgttaggaaccctgtcctttgaggaattaatgatgactggaagcagctttttgtacaagtgatttctgcacccatgacaggggccaacaatgagatagcttgcagaattgtcatgcgatacagatagtgcggattgttgatcttctccagcacctgaggaattatatgctgcattgcccactctggaccgaactcctctgcaaggcgcttcaagttgttagcggcagcatctctgattgagaagaccttatcttccaaccattgcatggtctagctcaattacaacattaataacacaacgaacaagggatcaagaccgtccatttaccagcatggcagtgttgatctgttactgaggctagaaggaacttttcaatctaaaggccaaattacagatactccaaaattggaataaaaaaaaatacaagctctatatcagactagttagctcgacaccatcatctgatcgcacgcctgccagggcctggtttgcgtagtatcttacatccacatcagggtcctcgctgagctcaacaaggcatgg

SEQ ID NO: 46460 - DNA, 375 bp, Setaria italica
  misc_feature (344)..(344): n is a, c, g, or t
  Peptide Sequence Number=SeqID_112434
tttgacaagaaatttgttactaattagacgaattacagatagtgcggattgttgatcttctccagcacctgaggaattatatgctgcattgcccactctggaccgaactcctctgcaaggcgcttcaagttgttagcggcagcatctctgattgagaagaccttatcttccaaccattgcatgcagagtgcccccagcttgtcatcaaaaaacccgacacctaactgacttgctaacaatgggatgtactcaattattgcaagccgaactctccagtgcctatcctctgcaagttctacaatggccgtagcagtgattgagagagtaagtcaattccaataccnggttaacttgatcaagtttgctgattatgtt

SEQ ID NO: 46461 - DNA, 415 bp, Setaria italica
  misc_feature (397)..(397): n is a, c, g, or t
  Peptide Sequence Number=SeqID_112435
tagtaggtacgtgctgctcttggtaaattgttggaaccgcaagattgtgtggcacatattcttgcggttccaacaatttaccaagagcagcacagccttcaacagccaacaaacgcactgaatcttgatcatcttgggttaaatcatcaaatattgacattatttctgtcttcaaatgactttgttcaactgtggctgcaaactttccaagatttgatgcagctgctcttctgaccataggcatatcatcctgacataactgaccatagatagtcctcaattctgttttcaattggtccggcgcacttggataggctatgtggaaaagaccacaggatgatacccgagctgtaaaccactcacctgctgctagcctctttactactggaatgaaccngtccacatgtcactttcc

SEQ ID NO: 46462 - DNA, 2311 bp, Setaria italica
  Peptide Sequence Number=SeqID_112436
tttttttttttgtattgttcgtaaactttattagtaaagttgggtctttgtttttttcgaagggaatcacaatgcgagggaatcattagaattgcactttccacgcgaggaaatcataatgcagcaattgacctagcagaaactaacaagacaagacatacacagctcaagcacacaaatgtccagtgtccgcctacttccccaaggtcaactaaatccaagaactaaacaaaacctaaaccaaaaacatacacgtttaatagaaactgttattacaagtgtaaaggtcattggtgctagaataatttatgaagactacagagcactttaaagtaattcaaaaaatggactatggggaataccatcatttactaaacaccagccaaagctagttaggttgacatcaccatttggtcacatgcctggagggcctggtttgcatagtaccttacatcaacatctgggtcctcactgagctcaacaaggcatggtttcactgtcttctccacaacagattgatcaaggatgggtatgagcgactgcaggactttggcaacattgaatttcatgtttggcaccctatcctttgaggatgcgatgacaacagggagcaactgttggcatgtgatgtcagcacccatgactggagcaagcaaagaaatagcttgcaaagtggtcattcggtacagataatgtgggttgtttatcttctccaaaacctgaggaattatatactgcattgcccactcaggactgaattcctctgccagacgctttaaattgttggcagcagcatccctgattgagaaaaccttatcttctaaccactgcatgcaaagtgcccccaacttgtcatcaaaaaatccaacacctaattggcttgccaacaaaggtatgtactcgattatggcaagccgaactctccaatgcctatcttcagcaagctctacaatggctggtagaagtgattgcgacagcaagtcgattccaataacctgattaacttgatcaagtttgcttattatgttgagtcgaacatcagggaactcatccttcagcaaagaaaggaaaatgggaagaagttgttcgatagtggcatcctttcccaacacaggagccattcccataataactgaagccaaagccgaacgaacatgctgagatgaatctgacgatagttccttgacacatggaagaatatgttggattgcaatttctgggcttaatatcttgcagaattttgtaacttttccagcagccgcgatccgcacttcagcctcattgtcacgaaggacgcgaacatatgcttgtaccagatcatcccttgtgggctcaggaccaacagcttcacacagttcatacaattgatttgccaccatgtagcgcacgcgccaagatttatcctgcgagaaatttacaataaccggaagaatatgtactgcacaatcttggggctccaacaacttcccaagagcagcacaaccctcaactgccaatagtcgaactgaatcttggtcatcttgtgtaagatcatcaaatattgacatgatttctgtcttcaaatgattttgttcaactgttgcagaaaactttccaagattggatgcagcagctcttctcaccataggcatgtcgtcttggcataactgaccataaatagtccttaattctgccttcagtgattcagatgcgctaggataggcgatatgaaaaaggccacatgatgacactctagctgtgaaccactcgcccgccgctaatctctttacaacagggatgaaccagtccacgatatcactttcattcatctgtgctccaatccggcacagtgattccacagccttgtctctgacgcaggtttcctccacagtacacaatgtttcgagtggtggaagcaaaacgtgtgcatgctctacacctccaacataaggaataaacacacccaactcttccgccattgcaagaagcacctcatcttcatcatcattgttttcactaaggaatggaattagttccttccttgttctttcttcacccagtgcccgggcaatcgtagaaagttttctgatggagttcaagcgcaactgaatatcttcatttttcagttcatcgatcagtacagcaatcgggtacagaggctcatctatcatagccattatcaggtttagctagaatatattttcagctcgtcaccggccgtctaccactacacacaagagctggacgagcatgaatcggaggagaggaaccgtggctgagcggctgagctcagacggagaaggcgcaaccgtggctgcggagagggagtccg

SEQ ID NO: 46463 - DNA, 2024 bp, Setaria italica
  Peptide Sequence Number=SeqID_112437
gtacaagaccgtcccattcaagcatggcactgttgttctgttactgaggctcgaaggagaacttcaatctaaaggcccaaattacagatactccaaaattaggaaaaaaaaaaaacaagctctatatcagactagttagctcgacaccatcatctgatcgcacgcctgcagggcctggtttgcgtagtatcttacatccacatcagggtcctcgctgagctcaacaaggcatggtttcacggtcttctccacaacagattgatcaaggatcggtataagtgactgcagtacttttgcaacattgaacttgatgttaggaaccctgtcctttgaggaattaatgatgactggaagcagcttttgacaagtgatttctgcacccatgacaggggccaacaatgagatagcttgcagaattgtcatgcgatacagatagtgcggattgttgatcttctccagcacctgaggaattatatgctgcattgcccactctggaccgaactcctctgcaaggcgcttcaagttgttagcggcagcatctctgattgagaagaccttatcttccaaccattgcatgcagagtgcccccagcttgtcatcaaaaaacccgacacctaactgacttgctaacaatgggatgtactcaattattgcaagccgaactctccagtgcctatcctctgcaagttctacaatggccggtagcagtgattgagagagtaagtcaattccaataacctggttaacttgatcaagtttgctgattatgttgagtcgaacatcaggaaattcatccttcaataaagaaagaaaaataggaagaagttgttcgatggtagcatcctttcccaatacaggagccattcccataatgactgaagccaaagctgaacgaacatgctgggacgaatctgatgacaattccttaacacatggaagaatatgttggatggcaagctgtggacttaatatgcgacagaacttagtaacttttccagcagctgctatccgcacttcagcctcattgtcacgaaggagacgaacatatgcaggcaccaaatcagctcttgtaggctcagggccaacagcctcacagagctcatacaattgattggcgaccatataacgaacacgccaggatttatcctgggagaaattgacaatgactgggagaatatgtgccacacaatcttgcggttccaacaatttaccaagagcagcacagccttcaacagccaacaaacgcactgaatcttgatcatcttgggttaaatcatcaaatattgacattatttctgtcttcaaatgactttgttcaactgtggctgcaaactttccaagatttgatgcagctgctcttctgaccataggcatatcatcctgacataactgaccatagatagtcctcaattctgttttcaattggtccggcgcacttggataggctatgtggaaaagaccacaggatgatacccgagctgtaaaccactcacctgctgctagcctctttactactggaatgaaccagtccacaatgtcactttccttcatctgtgcaccaatacggcacagagattcaactgccttatcgcggacacaagtttcctccaccgtacacaatgtctccaatggtggaagcaaaacatgagcatgctctacacccccaacataaggaatgaacacacccaattcctcagccattgcaagaagcacctcatcttcatcgtcattgttttcactaagaaaagggatcagttcctttctagttcgttcttccccaagcgcccgtgcaattgtggaaagtcttctgatggagtttagacgcaattgaatatcctcattcttaagctcgtcaatcagtacagcaattggatacagaggctcatcaatcatcgccatcaggtttatcaaggattccttgcctcgcggggtcggatcgggcttctgcggcggcggatgcgccggcgggggcggtcggagaggggggaggcgaaggagggcgtcgcctcccccctctccgaccg

SEQ ID NO: 46464 - DNA, 493 bp, Setaria italica
  Peptide Sequence Number=SeqID_112438
ggggaatatgcacacacctgcgaattcctcttacctgatacaacgatgccgtcgccgtgttcctttcttgaaccgtcaacttccttcctccatttgcgttggaaaatattttttattctttttaggtccgcaaaaaaaaaatttactttttaagaagaaataaaaaaggtagaaaagcttctctgatttggaccttgcctattattggcacaaaaagcaaaggtgcttggcccaatcacttcactggttaactccaacgccggggcatcgagcacgttcactggcttaaccgtgccgaatgatccccacacgttcggttaacccaagaaaacagagcactgtgctgcaagtactctcccaccgtcctgcgtcctgcctggcaaaacagacgaaacccccgacgctggtggcccccggcggcggccgcaagcgtgcgacgcagccgccgtcgtctcggacggacgcgggtcacccgcggaagcgatcatgggtc

SEQ ID NO: 46465 - DNA, 428 bp, Setaria italica
  misc_feature (414)..(414): n is a, c, g, or t
  Peptide Sequence Number=SeqID_112439
gctacctcaacaattttgctgaaattgcttccttcggattgactgtgagtcttgtttcatggtatcgatttggtgtcgtatccacctggtagtttcacctccacagtccacacctagttgcttcaaagctgatgatgatccaatttagagctatgctacctgaaccatttactgatttacagttgattcctaatatatgatacatgaatggttgccagatgataggagaagtgcatgtttgattgcaaacttgatggacggaaacctgacataatagcattgccatggattcagaatctgtagttacagtgtactgttcactaagtttagtataatgtgatttagtatcgtcttccatattcttgtctcttaaaataatcttatacaagcagaatgttctgcaagactttttgngcaactacccggag

SEQ ID NO: 46466 - DNA, 244 bp, Setaria italica
  Peptide Sequence Number=SeqID_112440
aatggtagcttacgcgggaggttggtctgctatagctgaagcacatttcatgaacaaggtggaagcattatcaaaggtaaaccataagaatcttatgaaccttgtgggttactgtgaagatgaaacaccatttattcggatgatggtgttcgaatatgtttcaaatggatcactattcgagcgcttgcatgttaaagaagccgagcacttggattggcaatcgcgcctacggatagctatggga

SEQ ID NO: 46467 - DNA, 879 bp, Setaria italica
  Peptide Sequence Number=SeqID_112441
acactgtataaaggaactctcccctgcggagcggaaatagctgtggtgtctacaatggtagcttacgcgggaggttggtctgctatagctgaaacaaattttaattgcagttaaagaagccgagcacttggattggcaatcgcgcctacggatagctatgggagtagtgtactgtctgagctacaggcaccagcagaacattcctgtaaccctaaggagtctaaacagttcgtgcatatacttgactgaagatgatgccacaaaggtttcagacatcagctttggtgctggcaagaaagaagatgaagatgaagatgaagatgaagatgatgctcctgatgagtacagcacagtgtataagttcgctttgctactacttgagacgatctctggaaggcgtccatattctgacgatgatggcctccttgttctatggtcacagagatatcttaatggtgttagccccgtgatgggtatggtcgacccaacgctaaattcagtccctgaggagcatgtcagggcattctcagagctgattcgtttatgcataaccgaggaccgaaggcggagaccgacaatggcagagctaaccaagaggatgcaagaaatcactgggatcactcaagatcaggcgattccgaggaaaagtgctctgtggtgggctgaacttgaaatcatttcggcatagagacagtcaattgtgctaacttgcagcaactctgcaattctgaccatttgctaggagaaatatagaagattgtacagtttagtacttttaggcagggcttacagttgtacagatatgcctgagtacgccattctttcattcttttttatttaccaagcattctttcatttctttgctctatgagagcagat

SEQ ID NO: 46468 - DNA, 496 bp, Setaria italica
  Peptide Sequence Number=SeqID_112442
taagaaaggggtaaaggcgagatttttaccacgctgtcgacgcgattttcgggagagtggttgtctaaggcgcccgttttgaaaagattgcaatcatcaggtagaagaccgcgaaatggaaagatatttttaatgcgtttgtttcggaagggaagttgaaagaaatttcgaagtaaagattatgttttactccgaaactggagggcatgtgttgacgccagattttgacacgtatgtaatcggcgtcaaaaaaggaaaggattagctgatgcaacgagtcgaaaaggtcacgattgggaatcgaccgattggtgcgagagttggagatcgaccgattggcgctgcagtgttttggcggatggagttggtagaaatcggccgattaagaggctgaggcaattggggccaatatgggcttaaagtgaattgcaaagagaagataaagggggattggcccacaggagcacaacgaccaactccgatgcgagttgtattt

SEQ ID NO: 46469 - DNA, 923 bp, Setaria italica
  Peptide Sequence Number=SeqID_112443
ggtttaaaaccgttaccgagcgtggaaggacgagtgggagggagttctctctctctctctctctctctctctcttccccggcgtggtgagaggtgaatccccaatccgccggtgccacagccagcggtagggttgcggggatcgcggtgccggtgcgggagcgggcgcgggcgcgggcgcgactgctgtagagtagccgccgacgacggcgcggcggaaccggatgctatgctgctgaactgcgggtcgctctcctcctgggtgcgccgcttcgtcgcctgcgtcggagggttgttttggttgtgcccagcctactcccataatagctgttgatgagccttcaaaaggtttaagaattcaagggcgctcagtaaaaaggcgccatttgtccgacgacttttggagttcaagtccgcacgaaatggagaacagtgccctgcaatcccgacatagtatgtcttcaatcagtacagcagcacaacctaatgaccagcatgctgctggaagtagcagcaatccaaatgaatttgtaaatcaaggtcttctacaatggcaccagactagacaacagtggattggaaaacgaaagcgtaattctcagggccaacaaagtcgagaaccaaaaataagtcattatgccacatatgagagcctgcttggtagcacaaaaccatttgcacaatcgatccctctcagtgaaatggtggatttcctcgtggtcagctgggagcaggaaggcctatacgattaggagacggttaatggaagtgtattgtttgaggccacgttatgaaatcgctgaaatgtacgcaaactttagttggctgccaaagcttgtgtggtgatgaatgtggattgtcttggagacaggatggcatccctctcttaagcaaatgtaaaataattctgtcttttacttgcta

SEQ ID NO: 46470 - DNA, 441 bp, Setaria italica
  Peptide Sequence Number=SeqID_112444
tgcctccattgttttagtgtacactaccataatagccattctctcaagctcaagtgatgaagatagtcgtggtaggcggcggagatcttatggttcaactatcatcattccgacagatatgttctggtacttggatgcagattattacagaaggcgtcgagtagaaaaagaaaatgggatgaactttattgaatctgtaatctaaaagggtttgacttgatttttcattctcactatgtaatgatggaatgtgtgggtagctgaaactgtctgtgatgttgattaaatcaattctgcagatattttcttttgtgtttggggatggtgatccaaatgatgggcttgaagagaagcggtggaaaatgattgtgcagtatatttcatcaaatggtggagttgttacagctgaagaactggcaccatttcttgatgttccgccac

SEQ ID NO: 46471 - DNA, 1730 bp, Setaria italica
  misc_feature (1707)..(1707): n is a, c, g, or t
  misc_feature (1728)..(1730): n is a, c, g, or t
  Peptide Sequence Number=SeqID_112445
ggctctcgccgccgacaccgagggattcctggaggtgtcgaatgatggggaggttctgtacgtcttcccaaaagattacaggacaaagctggcaggcaagtcatttaggatgaagatcgagcctctggcgaataaagctaaggaagtgggtgcttatttggtacgggtttcattcgggacggcactcattgcctccattgttttagtgtacactaccataatagccattctctcaagctcaagtgatgaagatagtcgtggtaggcggcggagatcttatggttcaactatcatcattccgacagatatgttctggtacttggatgcagattattacagaaggcgtcgagtagaaaaagaaaatgggatgaactttattgaatctatattttcttttgtgtttggggatggtgatccaaatgatgggcttgaagagaagcggtggaaaatgattgggcagtatatttcatcaaatggtggagttgttacagctgaagaactggcaccatttcttgatgttccgccaccatcagaagagtccaaggatgatgaatcattcattcttccagttcttttacgcttccagggacatccagaggttgatgagcagggaaacattctgtatcggttcccatcactgcaacgtactgcttcatcaaaaaatggtgggagtagagaatatgtgggcaccaaatggtccgcgatgtttggtggagttgaaaagtacttggaggagaaactgtggaatttcagtaaagcaaatgcatcagagaaggcaatggttgctggtttaggaggacttaatctttttggtgtcatcattcttggaaacttgttgaagcaaatgacagtgacacctggtggacttatctcatttgctgcacagttatatcctttgcttcagatatatgctggctccttttttgcaataccattatttagatggtttctgctacgcaaaaccaacaatgatattagaaagaggaataaggccagagaacaacgagctcaggaactcctgtcaccggattcttctctcagaagaaagttgatcagtgcacgcgacatggctcaacggaaagtaattacaccagaagagattgtctacactaccgaaaaggatttattagagcaggattatgaagtcaaggagtgggagaggagatttaaggagcttgagtcagagtgatgggcacgatggatatacgtgagacttgacattcacagtagctctacatggtcgatgaattttttatctgcatccgaattgaagataggtctgattgaaccattcaacaaagtgaaatgtgatggttctggacccccactgacagacatacggcataccaccagtccaccactatggggtgcaagttttgtggaagctgttggtttaattgaaatcgaccatggtttgcaatctgatgtacatagctgtgacattgatctgcacatttgtataggtaagttccattcatggggttggagatcaaattcagaattggacatgaaaagccgggacatgattttactcggtttgattggagccccatcacaacatttaaaagtaacacacctgtaaacagttgccttgggcattcatgtcaaactctgtctagagatagacatgtactgttatagccttctgggaattgattcatgattgaaagtgacaatttctagcaattaaaaaaaaaaaaaaaaaanaaaaaaaaaaacaaaaaaaannn

SEQ ID NO: 46472 - DNA, 414 bp, Setaria italica
  Peptide Sequence Number=SeqID_112446
cttagttttttttttttttttttagtctacaaatatagaccaagttataaatcttgaactctaggtgatacaaattattacaaattacaccatgttatacagaagaggtcaaattgctgaattgctgaagctatcggaaaagccatctccttcagctgcgtcagggtgtgctccatcgtgtactctaggtgaattaccagttagacagcatccggaacttcttcccttcaacctggaccgccggcagccgtggagagctcgtatcgccgctggcttcttggagaactcgaccgccagcttcttggagagcttgtccgctggtttcctctgcccgaagaatctgccggcttcctctgcctgaagaatctgccggcttccctgatgcagcggcgcaagcgaggcggaggtggaggt

SEQ ID NO: 46473 - DNA, 527 bp, Setaria italica
  misc_feature (527)..(527): n is a, c, g, or t
  Peptide Sequence Number=SeqID_112447
ctttttagaaacttacagtttttttgctatatgactatacactgcctgctattgaatgtaagctactgcaaattaattacagcatcttattaacttctaatttgatacagataaattgtgatgtttttcaggttcctaactaaaagagaaacagcaagaacatgaagagctagtgtcttggacatgacacatgtgcaattactgttcttgcgctcaaccttaggccttgtgagcaggggcagacctacgttgaagctagtgagggcacaggccctcactcaaatcctaacgccagcggaagatcacagatattcaccatgcatgtttatttattttctgtgatccaatagagtatgccctcactcagaatttagtccgagtctgcccctgcttgtgagaagatgcagatgtgtgtcgaaagtgcttgaggctgctagtggaggaagggatgcatgctagtcctatctagttattctgctggagctactgtgtcaactttttagtgtattcaaatgtatgggtcacan

SEQ ID NO: 46474 - DNA, 335 bp, Setaria italica
  Peptide Sequence Number=SeqID_112448
aactaaccgactagacgacaatttgttggatgaaaacattggtatgctccaaacggaaacagattttcaactctctggcaagatcaaataactaaatttcttgaatgtcactggaaattttagcgatcccctggcgatatcgaaattattcgctttcttttcatgggcattatttaaaatttttgttcccttacatgccactattgtcgcacgacggtatatgagactagtttatactaacctctcctcctcgctccaatacagaatacttagggcaagtacattggtgtcgtcttataggcggtctcatgctattgacacgtaatcttgagacg

SEQ ID NO: 46475 - DNA, 338 bp, Setaria italica
  Peptide Sequence Number=SeqID_112449
agacctatgggaattgggccaaatgctcgagaatcccaactacgagcagcattatcaccttcaacccagcaatgcccttctgggatcttagcgagaatcccaactacgagcagcattatcaccttcaacccagcaatgcccttctgggatcttagtaaccttaggggacccagggagctgtatccactcaccaggaagtgcaatcaatctcttcacaaacaactccttatgattgctagggcacttgaacaaaaccacatcaccatgtgagaacttgtacttctcaaggcatcttctttctgctaaaacgaaatcaccctgtaagacactgttggctg

SEQ ID NO: 46476 - DNA, 713 bp, Setaria italica
  Peptide Sequence Number=SeqID_112450
tttttgtaaactgaaccaatagccactctaagaatttttctaagagctcagaatgaacaaagttcctgtgattgcactcacaggatatttgttcattcactactaatatgtacttatgcctttacagaacatatgacacgatgcaaatggcccatgatgggagttttccacttgattgtctaaaaaaccaagccgcttacataagtacataacagcagaatggtgaacagaaggaactgtagacaaaactggtgccaaaacttgtaaggctcaaatttcgatctacacttctactatcatatcataaatggcaattgagcagtttatgttataaatgaattttcatccatgtagtagggagccaaatcaaacaggtgaaattctcccttcaggcatctttctctccacttggccaatctttgagggtggccaaatgatgtgggtcaccctcccctgaattagacctatgggaattgggccaaatgctcgagaatcccaactacgagcagcattatcaccttcaacccagcaatgcccttctgggatcttagtaaccttaggggacccagggagctgtatccactcaccaggaagtgcaatcaatctcttcacaaacaactccttatgattgctagggcacttgaacaaaaccacatcaccatgtgagaacttgtacttctcaaggcatcttctttctgctaaacgaaatcacc

SEQ ID NO: 46477 - DNA, 402 bp, Setaria italica
  Peptide Sequence Number=SeqID_112451
tagacttgctactatctagttaatatactgaggttagtgcaagagtcataaccaatcagattttaacataagtagctcagagatggtttgcagaagtcattgatgtcactagacttcgcttatttgcttgttttcactctcaacaatacggtgtgctgccaaactttataggcttgattctgtggtaagctagtaatttgaatagtttactttctgatatttaaatagtctttccaaatcacaaaatattaaatctgataaagttattaaacaggttagtaaactaagatcatgtaatcctgcagtagtctgcatttcggagacaatttttaggagcgtgtcaatttgaaggcgttacccttcttttttttacttggcaagttcacactagtgaaattagag

SEQ ID NO: 46478 - DNA, 1368 bp, Setaria italica
  Peptide Sequence Number=SeqID_112452
tttgtccactatagagatgttctagagggcagcatttcagtatcagcacgaaatgattctccaacatcgaatcagaatggcagtgctagcagagctgaagtacacagttcacccggttggacaagtgagtcaattttaccatgtcccaattcatccagtccaggatctgcagaagaagttagttcccaaactgtgaccataaacaatgaaacaaatagcacaagtagatttgatttgattcaacataaggcagccttgcggaaacttgaaatgcagctgagtctggaagacaaagaagattcatatattatagctgaggaagttccaacaaataatgagcatgttgttttccctggcattcagaatggggagccagacagttgtgggaatcttaaggatatcttcaatatacaggagtttagtggacatcataccaaagaaactggaacccatccatatcccagtgttctcgatgtgttaaaaaattcagagacatggttggaggatgatcaacttgtgggaattctgcatccagcttctatgacaccgactgaaaaccaatggttccacattcatgaggtttctccagaatcggcgttttcttctgaaattacaaaggttatcgttttaggagacttcctttgcaatccttctcatagctcatgggcaatgctgtttggtgatgttaaggtacctgtggaaattatccagcaaggtgccatccgttgccatactccatgccttaatgctggaaaagtgacaatgtgcttgattgatgggaacgggaaaccctgcagtgaaacacgagtatttgaattccatgagaagcctaccaagagcatgattgatggaaatgggaaactgtgcaatgatgcacaagctatcaaagcccatcagacacctatgaaaagtaatgatgagctgctgctgctgctcatttatatgcagatcctttttgatggtcaaggttgtgatgtatttgcaaaatttagcccgcaactcccaaatcctggctgtggattcctagttaaccaaatggatattatgaggaagacatacgagcagctggaccaagagaaaacagtgaacagtgtcatggaagtattgcttaatgacaagtttaggcaatggctgctatccaaatgtgaacaaaatagtaatggagatcatttgcttcctaagcaataccatggtgttatacatacaattgcggccttgggatatgacttggctttgaagccactgctcagttctggagtgcctataaactaccgtgatgcaaatggatggactgctctacattgggctgcaagatttggcagggaagaaagtggtggtggctcttcttactgccgatgctgcagctgg

SEQ ID NO: 46479 - DNA, 529 bp, Setaria italica
  Peptide Sequence Number=SeqID_112453
gctggaggtgatgggcgtctccaggctgccgatgaaggggtcgccgttgatgggctgcaccacctggtacgttgtctgctcaagaacaacagacagtttctatcatcagagccaaagaattttgtttgatcatacaaagatatattattgaattgctaatgttcagagcatcaaattgtatatccaatttccagtcctgtgagatagatcaaaatgaatcacacaagatgactgaactgaaatcaagattctagcagcagcacacatgcaaagaactgatcgatttggaagcattttgaatgaaattgataattcatgttgcctatagccaagagccaaatcgatcaaaaactataaaaaaagatgcatcactatttcgttgctcagtagatccactgaccttctcaggctggatggccttcacggtgaagcggggccgcctggtcagcgcagcgcctgaaaggccctgggcctcgagtgcaccaagccgctcttcatcacctggctcgccatgggagcgtacgcggta

SEQ ID NO: 46480 - DNA, 538 bp, Setaria italica
  Peptide Sequence Number=SeqID_112454
agggacgaccgtaggaacgggtacgaccctacgttagaaggaggcgacgccgtacatggtgaggcagacgctgaggatggtgacgagcccggcggcgcccagggcgcccgcctggccgtgcacgggcgtgttgcggagcgggccggtgagggcgaaggggcccacgaggaggtagccgtgcgcaagcccgacctcgatgccgcggagcagcgggctcacggcggtgcggtaggccgggaggttggagaggtaccaggcgatgagcgggctggaggtgatgggcgtctccaggctgccgatgaaggggtcgccgttgatgggctgcaccacctggtacgttgtcttctcaggctggatggccttcacggtgaagcggggccgcctggtcagcgcagcgcctgaaaggcccctgggcctcgagtgcaccaagccgctcttcatcacctggctcgccatgggagcgtacgcggtagccatctcgacctctgcctgtctctcacgaacagggctcttccttcctgcaaaatggtagaagagg

SEQ ID NO: 46481 - DNA, 1180 bp, Setaria italica
  misc_feature (1)..(55): n is a, c, g, or t
  Peptide Sequence Number=SeqID_112455
nnnnnnnnnnnnnnnnnnnnnnnnnnnnnnnnnnnnnnnnnnnnnnnnnnnnnnngtttatggtaaaactcagaaattagcagcaaaagtatgtcatagtcataggtgaggccattcaaatcagaaaaaaaaattgaaggatcagcacaagctcggacacctcagagagtcgaggacaatggtaatcatattcaacaagctggcatatactggtgcttttttccaacactccaatgctaaagaaacttctgtaaacaaaggattgccatcagacagattagtagcagtccgcattatatatattcttgccttgagtcaaaatgataaagtaatttgtcagcactggcttctgagcttttactttgtaatcgagaaggaagaaaactgactagaatcattcttgcagacagatagaattctcaatagtttacttctctcaaatagggcacggcaacgtttttcaagttatgtactgattactgttgcttcttacaccaccatcagatgaaatttccagagtggtctggctgtctgagaactaaacatgctactctacttttcagaggaaaatgtacaaagagcatattgtagacatcagattgcagtgaaatccaagctgctcatgggagggttagtgcatccgctttcttctgttacattagttctgctgtcagaggacagatcagcacaaacaataccactagacacatttgtttcattgtttctgcttccagacactgcatggctattttgtacaggattcctgttacctgaacactcactgccaggtcttccagtgttcctatttccaaggatctccagctttttagccttatgctttttccctccaatgtgggcaccaaaattgaattcagtaacacaatcaaccttgcaaattttacaccaaaaggaaggcaccacgtttggtctgggacattgctgtatgtgggaaggtggatgtggaactttcacttttttcttcaaggggtaccaattgcctggctgtctctgtacagcggaacaactgaaactagactgctgttgaggcacactgctctctggggctaactttctcttaaaagcaacagttactgaatctgtaccgacctctttctgctgttcaggggctccattgagggcagtcagcagatgagggtgagtcctatctaatctctttacg

SEQ ID NO: 46482 - DNA, 1579 bp, Setaria italica
  Peptide Sequence Number=SeqID_112456
taagaaacaaaaaaataaggtaaggtaaaaaaaactaaataagaaagacaacaagaaagagcgatttcaggaatgttgcaacattggatgaagtagaagcctcacatgagtacagtgggatagaatgtattaaaacccatggtggttttaataagcttgtagcgtcccttgattccacctatttagatatgggggataatatacgctattcaattccggagggttatgataagttagcatcatcccttaatctgcctgtttcttctgatatacgcgtcgaggaacacttcttaaagggcatgctagatttgcgcaccctagcagcaatgcttggtactgaccaaaagttcgaggcttccaatcgtggtggattatctgaacctctgccacagtttgaatctcttcaggaaagggtaaaggtgcagaaattttctcttcaagttactgaggacccctttgcaatcccagaaggagcagctgggagaatacggaggtttattatatcagaagctggcaatttgcaggttcattatgttaaagtcttggaaaaaggagatacatatgagattatcgagcgtagcttaccaaagaagcaaataataaagaaggaaccttctgtaatcgtgaaagaagaggccgaaaaaacttacaaactatggcagtctcttgctaccaaaagcatcccaaagcatcacaggaatttcaatgctttgctgaagaaacggcaagtagatgcgaagcgcttctctgatagttgccaacgggaggtaaaactcaaagtaagccgatcactgaaactgatgagatgtgctgcaatacgtacaaggaagctggctagggatatgctgatattttggaaaagagtagacaaagagcagtatgagttaaggaaaaagaagaaagagaagctgctgaagctttgaagcgtgaggaggagctacgtgaagcaaaaagacagcaacagaggctaaactttctgctttcacaaacagagctttatagtcatttcatgcaaaacaagactggtgcctcagcaccgcctgatgaggaagatgtccctgatgaagatgaggaagaagatcctgaggaggctcaattaaagcgagaggccttgagagcagctcagcatgctgtctctcaacaaaagatgaagacaaatgcatttgatagtgaaattgtgaggcttcgtcagacttccgagtctggtcttccaactgatgattcatctagcatggacccaagcaagattgatttattacacccttcaacaatgcctgagaagtcatctgtgcagacaccggagttgtttaagggtgtattaaaagagtatcagttaaagggcttacagtggctggttaattgttatgagcaggggttgaatggcattcttgctgatgagatgggtcttggcaaaaccgttcaggctatggcattcctgtctcatttggctgaggacaaaaatatatggggcccctttcttgtggtggctcctgcatctgttgtgaataattgggctgaggagttgattagattctgccctgacctaaagatacttccttactggggcccaagaagaaga

SEQ ID NO: 46483 - DNA, 685 bp, Setaria italica
  misc_feature (170)..(170): n is a, c, g, or t
  misc_feature (645)..(645): n is a, c, g, or t
  Peptide Sequence Number=SeqID_112457
gccggcgcagggtgcggcggcggggggctcgacgacgacgacgacggagcggtctcagacgtcgagcacgacggcgtcgccgccgccgcggccaggtcgatgtgcccgatcgatcgagctccaatccgatcctagccggccggcacatcgatcttatacagacaaaaacnctagctgtgtgatcgatcgataggcccaccggtgcgcgtacgtgcatgcaaaagcaaagagatgatccacctcttcttttacttcgttgccgctgcagctgctgttcatgttctcttttatctctgctcgtaattaggtaggtacttcgtgtttcgttggtgggtgaacttgttagggcataagtacggcacggcccatgtggtcttcttcgtactcttgttctctctctatcctactgtaatagtagtaggactcgacaagctagtgatctcaaccgatcacgagcatgtatgtgtcaatagcttagcttgtgctgccgtcttgcgagcatttcatcaagtagaagagctgcacacatatgttgtacaataattcctcacacctatatttcaggtccttgaaattttcgattgtttcaagtgacatatttcatactggtgatgttttctctaattgttgcggatgttgcccttnaacgttgtagatgaatggaaaatgaagcataatattgtat

SEQ ID NO: 46484 - DNA, 800 bp, Setaria italica
  Peptide Sequence Number=SeqID_112458
cacctgctagttcatgtggcaagactattgatgatatagttgaatttgaggaactgtttggtgcacaggataaggaggaaagagatgcaaagttccagccaaaggtacagacgaagctccttaaggccaccaaatctcaaaagactaaccaaaaggttgaagcttcccctgtagacgaggctacacaaaaggaaagccgtgataatattcagacaagactccattatgatcagctacaggaccctaaatgtcatggaagcgtgcagaccccagattctgaaggattattggcaaccagtaataatgatattggcaatttagctaacctcgacagtgtccttgaggtgtcagttcaagaggaaacaatagcgaagtttcgtcctaaattgcgaccgaagcctgcgatggtttcatcgaaggttgttgggactaatgataataccactgcagctactctgatggttggaatttgtgccgaaaacaatgatgtgccaacaaaacctaaagatcaagaaaccatcaccgctccagccacttggtcaccacaggatgtggatgctactgttgatttagacaaccacaatgaactaattaattctcctattgatggtactcaatcgatggttggagaagtctcagctgaagctacttgtaagtctcaacctagtgttggaagagaaaaggggaaagggaaatctgtatcttttgcgatgccagatgcttctggggtcgttactcctacagttaccaattctgagatggataacgtcagcgattcctataatgacaaattgattgat

SEQ ID NO: 46485 - DNA, 1825 bp, Setaria italica
  Peptide Sequence Number=SeqID_112459
ttattagatgatatgtatccatgacagattatcattctgtcctgttgcatataaaaattaccttatcagcttcaatcgttacgagtactgtagctgttgcaagcgaaataattaacaggtacaagctgcactacaataggaagggaaatttttcctctctaatcagggggcatccaaagcagctctaagaaaatacatgatgtttttgtatctgaagcatcagactaaaacccagtacagttcatcaagctctacttctcaagtaattaagtttgaacatgtgcaaagaactaccagattcttcccccgaaaaattgctccaaagacaaggattagttcgcaacattctgatctctgttaagcaaaaagaccggccatggaaggctacacaatgaccactgccactcattcatgctgctcatatatttgcatgtaggcttctgaaagagctaccatctgagggagagtctcagtaacatggagatcctgcatctcataccaggcctcttctgatttccgctgaacaaatactctgtagcatccttcgcctggcttgccgtcatggacaatgttcgctataaggtcatacttcgaacgtatcttatgattctctttaggcttgggtaatggaatgtaatccttcaattccaagttcttcacaggaaaatttactagagtagggtttttctcaacgaagaagttatttttggtaaaccgtcgcatgtgaaggatcagatactttggtagtctagtgactcggtacctcatccgagcaatggatggacggacaacctctgtcacagtctcaccatcaaacttcttcagtatgttaaacaatggtacctgtgggatgatatttttctccatggcgtctttgaaaagaggtggaggtggtaggtcaagaccgagcatcaagaatggcaccttagatgtttcggtgacaataccatctgttccaaccactgaacttgcatcaccattcaactcatcaccatcctccgttttttccattatatgcttcctgtgaacctctttaacaacttcaagttctccctgaaagcaatcatgtattatgcttctgtttttcttctttgagctttttagtttcgcatgcagtgtattcaaaagccatgacataaattccacaggatctgactgtacaccgatctgaaagcgcttgttactcgctttcataactgcttgcagaaactcatgagggctaacctggcccttgaagttcctagcatgccaaatcttgcgtgtcaattccccaaaacgatggaccaatggtgatttgctatgctgataattttcagggattagaaagaaatttctaagaggagtaactctcattaatgactgtattgtgacattcacaaaatcagtctccttgatgttgttaagaccaaccattccaggcagataattggagccatcaagtgctctagaccactgcttgttcttgtcaagatttagaacctgctctctcgtgaaccttgggttgagaacatgccgaatatcttctaatgatggatcatttatctcatatccatcaggaagacagtaagccctctcggtttgaagattaatgaacacatgatggcctgcttcaagactgtgagtatatgcatgagatttcaagcctcttccttggaaatactttccacagaccaagcacgcgtacacattcaaattcgacagggagattgaacagaacttctcaaaatcaaaatcaaggacctgtctgttcaccgtgtcgaggtaagggcagtcacggcgcagctccacctgcctcggcctcctctccggagccctcctcacatcg

SEQ ID NO: 46486 - DNA, 525 bp, Setaria italica
  Peptide Sequence Number=SeqID_112460
aggactgggctgaagaaatatctgaacttaaataccaataaattaataccatggggccctacgaacatgcaaaatcaccctaaaaaaacatgaaccacaagcacaaaacaagagagagaaaataaagcattctcttttcatggagctaaaaggaggctgatgcggttgaaggaactttcaataattacacaaaggggcatctaccaataagggtgtttatttcaacagacttacaaacaaatttttaagaggacccacactgtgcatgcctatcattgtttggtttcttagattgagcagagctcaggggaaaaaggtatgacaacaaaaaggaaagattcaatatcaggttattcatgcaagatgaacagatgagaatgagacctacaggcgacagtgccgattcagccatattcagaaaaaacatgttcctaccaaggcagttaaaaatgccattacaaataactaagtacctaccaaataaattgtgtaagggccaacaatatcaagctaacatgattgttt

SEQ ID NO: 46487 - DNA, 1128 bp, Setaria italica
  Peptide Sequence Number=SeqID_112461
agacgtaggacgagccccctgcatcagcctcaccacctccgccgcgtcgtcgaggtagtatttggccttgctgggcttgcggccgacggtgcacgcgaacacctccgccttggacgccagtgagtccccgcaggcggccgtggcgatgagctggaacatgtcctcgtcggacttgtcgtctccgatgcacagcacgaagtccgggcactggccccgctcctgcatcgacgccagcatgcgccgcgccaccaggcccttgctcacgccctgcgaaaaggaaggaaatgatgtcgattatttgcgccaagaacatgatgtcgatcaagatgaagatagtgaagaacgagagcgaggagtcacctgcggtttcacttcgacagagtgaggtgtggtcctcactgagacgggctcgttcgcgagcacgctctcgaggtggtcgacgagctccttggcctggcacgagccgaagtcagggtcggcgtcctcgtagttccacacgaggatcgtctccctgtcctcgatggttgaaccgtccgtcgtctccctgtagaggcacatcaccggctctgcgatctgcttccagctgcagtccgcaggggtgatgcaggtctgccattctgcgtccctcttagacctccattcagtaataacacattcagagatcagaaatcactgaactggacagtttctagtgatgtgtatgtatgtctcagcaaaaaattgagcagcttccatactttactgttgcatactatgttccattccaatgctactatgcggttgtgtcgaactaagcaggtttctgaaacatttcttcagaatactgacacaatgttcagcttggcatagtgaactagaacataatctatcagttgtccagggttatgacatcgaattaagtagcacatacctgaggaaataaccatgctccgccgctatgccaaggttctcacaagggaaccactcatggagagtgcgccgatcatacccgctgcagaggtacacctcattgttcttgtccctgcacaagctgttcagtatcctcaccgattccggcggacgggctcttgttatcgcctgtggcatcagcgtgccgtcatagtccagcagaatcgcacgcgtcttcgc

SEQ ID NO: 46488 - DNA, 1794 bp, Setaria italica
  Peptide Sequence Number=SeqID_112462
ttaaaaaaccgaaaaacggaaaaaacgggaaaaactaaaaaattaaaagttaaaaataacggacctagtaagggttatgacatcgaattaagtagaacatttgcgtccctcttagacctgaggaaataaccatgctccgccgctatgccaaggttctcacaagggaaccactcatggagagtgcgccgatcatacccgctgcagaggtacacctcattgttcttgtccctgcacaagctgttcagtatcctcaccgattccgcggacgggctcttgttaatcgcctgtggcatcagcgtgccgtcatagtccagcagaatcgcacgcgtcttcgcattccggtacgccatcagaatgctctccaaggaaagctttttgaagtgccggtctagcgataccaccctgaaccgcaggccgaagccaatgccccagcaccgccgatgagaatgatccttgcaggtcctctcgaggtcctgcaggaagctgttggcccagtaacccacatcgtgggtgctcacatagcggaagtgcttgtcgtggcgcaatttcttctcgttctcaggcagcacaagggcgctctccatggcgtcggccacggcctcgatgttccatgggttcaccctgacggcgccactcagggatggtgagcaaccgatgaattcggacaccaccagcatactcttcttctcctctggcttcccctgccgcagcatcctgtccagcttctcgttgccttgccgggacacgatgtattcataggggatcagattcatgccgtcccggaccgcggtcaccaggcacacctcggcgatgacatagtacgccacgcgctcgtagaactgcaacggctcgtcgatcagaaccaccggttcgtaccctggttcaccgtacacctcgttgatgcgctgcaccatggcgtacgtctcggcctgcacctcggcgacgtccttgccccgccctcgcgccgggttggcgacctgcaccagcaccagcttcccacgccactcggggtgctgccgcagcaactcctccatggcgagcagcttaaggctgattcccttgaagatgtccatgtcgtcgacgcccagcatgacgaccctgcccttccccatgtacatctccatcagctcagccaccttggcctcggtcttcggcaaaccgagcaccgtcttgagctgctccatgtgcacccccaccggcaggatcttgatgctcaccgtccggccgtagtactcgaggcaaatgtgccccctcttggactcgtacgagaggccgagcatgcggccgcagcaggagaggaagtggcgcgcgtagtcgaaggtgtggaagccgatgaggtcggagttgagcagggcgcgcagcagctcctcgcgcacgggcagcgtcttgtagatctccgacgaggggaacggcgagtgcagaaagaagccgagcttgatgcggttgaagcgcttgcgcaggaaggtggggagcaccatgaggtggtagtcgtgcacccacacgaagtcgtcgtccgggttgatcacctccagcaccttgtccgcaaagatcttgttcgcggagacgtaggcctgccacagcgagcggtcgaagcggccgccgaggtccggggacagcggcagcatgtagtggaagagcggccacaggtgctgcttgcagaagccgtggtagtagcgctcggcgatgtcgggcggcaggaaggccgggacgcagttgtgggtatcgaggagcgcctgcgccacggcgtcctggtcggccgccgggatgtcgtcgcggaggcagccgatgtagatg

SEQ ID NO: 46489 - DNA, 1324 bp, Setaria italica
  Peptide Sequence Number=SeqID_112463
tttttttggacaggcaatcagatggctatttattccaagaggtatacacacatacgagaaaaagaagaatggaacttcagatctgcctactccttaccactgacctggttatactggcagcatctcaaacaggccttcaaggcctccaaagaaatcagtactaggatcatcgtagtaattaactacagcatcactaggttcatgccactgacaatgcattaccctgaaaagcatacctcatttacacatctaaaactactcggcgcgcgaaagctccaagtgagccaacacaaatattacgccctgtcgccctgcacctgcaatgcaaggctgcaatcccaactgctgcaggacgctgaacactaccggctaccgctagcctgctactcccacacgtccagagacgagtcctcgtcttcatcccggtggttcgccagggccagctcctcggagacgtaggagagcccctgcatcagcctcaccacctccgccgcgtcgtcgaggtagtatttggccttgctgggcttgcggccgacggtgcacgcgaacacctccgccttggacgccagtgagtccccgcaggcggccgtggcgatgagctggaacatgtcctcgtcggacttgtcgtctccgatgcacagcacgaagtccgggcactggccccgctcctgcatcgacgccagcatgcgccgcgccaccaggcccttgctcacgccctgcggtttcacttcgacagagtgaggtgtggtcctcactgagacgggctcgttcgcgagcacgctctcgaggtggtcgacgagctccttggcctggcacgagccgaagtcagggtcggcgtcctcgtagttccacacgaggatcgtctccctgtcctcgatggttgaaccgtccgtcgtctccctgtagaggcacatcaccggctctgcgatctgcttccagctgcagtccgcaggggtgatgcaggtctgccattctgcgtccctcttagacctgaggaaataaccatgctccgccgctatgccaaggttctcacaagggaaccactcatggagagtgcgccgatcatacccgctgcagaggtacacctcattgttcttgtccctgcacaagctgttcagtatcctcaccgattccgcggacgggctcttgttaatcgcctgtggcatcagcgtgccgtcatagtccagcagaatcgcacgcgtcttcgcattccggtacgccatcagaatgttcgttcttccgtatttgttcttaacgtttaacgcggtttcattggtaagtaagttagtacgtaccgtaattactaattaacccgtacttagta

SEQ ID NO: 46490 - DNA, 339 bp, Setaria italica
  Peptide Sequence Number=SeqID_112464
acgaggcacccggcctcggtcgccgcctggaggtcgacgttgtcgatcccgaccccggcacggccgaccacgcggagccgcccgcgcgcggcctcgaacacctcccgcgtgacgcacgtcccgctgcgcaccaccagcgcgtccacgagcgagaccttggcgcggagctcctccgccgtgagctcgtaggagcagtccacgttcgcgaacgagcgcagcaggtccagccccgccgggcccagcttctccgtgacgagcaccgtcggccgcccgcccgccgcagccgccaccggcgcggtgagggacctggacctgggctccctggacggggaggcggcg

SEQ ID NO: 46491 - DNA, 1413 bp, Setaria italica
  Peptide Sequence Number=SeqID_112465
caagcatttgcagcaggcatccccctgtggattcccaatactgagcgcaaggtattcccagccaactactgttaccgggggttccttgcgaacgcggcgggattcaggactattgtgttggtgccgtttgagagtggtgttctcgaactgggctcaatgcagcacatagctgagagttctgatactatccagaacatacggtctgtgtttgctggggcaagcactaataaggctgcagttcagagacatgagggaaatgaccctactcctccagaaaggtcgcctggtttggcgaagatttttgggaaggatctgaaccttggccggccatcagcagtgccagcgattggtggtgtatctaaggtagatgaaaggtcatgggaacagaggagtgctgctgctgggacctcattgcttcccaatgtccagaaaggattgcagaatttcacttggagtcaggctcggggcctgaattctcatcagcagaagtttggcaatggtgtgctgattgtgagcaatgaagctgcacaccgcaacaatggagcggccgacagccctagtccgagtcagtttcagcttcaaaaggcgcctcagcttcagaaactgcagctccagaaattaccgcatattcagaagacaccacagcttgtgacccagcagccgctgcagccacaggttcctaggcaaattgattttagtgctgggagcagttccaagtctggtgtgttggttacaagagcagctgtcctggatggggagagtgcagaggtggatggcttgtgtaaagaagaagggccgcctcctgttatagaggaccggcggccaaggaagaggggaagaaagcctgcaaacgggagggaagaaccacttaaccatgtcgaggctgagcgacagcggagggagaagctcaaccagcggttctacgcgctcagagcagttgtgccaaacatatcaaaaatggacaaggcgtccctgctgggcgatgcgataacgtacatcactgacctccagaagaagctgaaagagatggagacggagagagaaaggcttttggagtccggtatggtggatccgagagagcgagcgcctaggccggaggtggacatccaggtggtgcaggacgaggttcttgttcgagtgatgtctcctatggagagccatccagtcaagaaagtcttccaagcgttcgaggaggcagaagtccgtgtaggtgagtcaaaggtgacgggcaacaacaacgggacagtggtgcattctttcatcatcaagtgccctggcaccgagcagcagacgagggagaaagtgatcacggcaatgtctcgcgcgatgagcagttgagcagggcgtaggatcaggtcggtgcggtagggggtggtggttttactgtgttggttgcgaacaagcagcagcacg

SEQ ID NO: 46492 - DNA, 1274 bp, Setaria italica
  Peptide Sequence Number=SeqID_112466
cgaaagcccaaaaatatcaccatggctatcctcgccgtcgcctccccgctcaaaaccctaaaccctagccccgcggacccccgccgcaggcgcctctcatattccctgctccgcctcccgccgccggtgccacgagggcgccgcctctggtgctccgcgcagtacggcgagaccgcggcaccgcccacgacgacgccgcggccggcggagataccctggagcagggagctctgcaactcggtgcggctcatcgggacggtgggcaccgaagtcgagctgcggcagctgcccagcggctccgccgtcgcgcgggggcgcctcgccgtctggaagtcggccaccgagactacatgggtgactctacagttttgggatgatctcgcccttgtggcctctgagcatgtgaagaagggtgaccggatatttgtttctggacggcttgtgtcagatactgttgatgaggggcctgagaagcggcatgtttactacaaggttgcagttcaacagttgaatttcatcgagtccatgcagccagttcggttgtatgaaccagaggcaagcgatgataacccaggtggaagccgtggtggttattttgattctacctctagttcatctgaggataagaatagggataatatcagttcgtcctctcgatcaactgaagagctgtggcaagccttctttgctaatccacttgactggtgggataacaggacaaataagaagaacccaaggtatccagacttcaagcataagcacactggagaagcactgtgggttgatgggaggaacaaccccaactgggttatatctcagctggcagttctggactcaagaatgggttctctgcaagacaatgagagaaaaccagtctcctatatgtacgctgacgacttcatgacactggatggcagccgatagtctccatggaggaggaagcctcgcacactccattctacagttcggctaactgttatgtcgaaagcgtgttatcggggtagtccatgagtgctgtcacagttttgtacttttgatgtacatatctgggctctggaaggtttatcacggatgtggacgtgcggtggtccgtagtattttgtagtagcctctagtgtagttatggcaaacatataaacagaagtcgtttggcacatcgtaaaacgtaggttggttgagtgtgatcttgtttgtgacatgatcttttacctccgacggtgaaactatactgttgcactgagaaaaaaaaaaaattgtgaccactcgtgaagaag

SEQ ID NO: 46493 - DNA, 660 bp, Setaria italica
  misc_feature (67)..(67): n is a, c, g, or t
  misc_feature (80)..(80): n is a, c, g, or t
  Peptide Sequence Number=SeqID_112467
tttcccaatcccagcttacatgcctaccatcaccattcataaatgagacccatctcagtttctctcncctttttggtacntaaagttcatcttgcttgagtcgggagacacccttagctaactgtgacacgccagtgatgttatcctggaaggatgatgcagaagtggtggtagccgtccatgaagtgctgcttgttggggtagaaacagaatatattggaagtaatgaatattcttgcaaggcttgaaccacgacctttccagcttcatatgcagacctgtagtagttgctctgtttctcgccggtggctgctggtttcctggtggggcttgttgttgaaaaaatcagttcctcagccaccaaacagcgaaccagctcatcggaggtaacagagaaggtggtgcttgcctgacatccagcagctccttgcagtcgatggtagaggacaccataatacaagcagtgttgagccacgtggagccagaactcgtctccttgctgcttgagtgtgttatggatggaggcggctgcatccactaaggcctctttaatcagcacagcccactctggctctaggagatcatgaaaaggcagggcatggtaatattcccagcttagatgaactaccatgggagaacgagtttattagtccttgttct

SEQ ID NO: 46494 - DNA, 513 bp, Setaria italica
  Peptide Sequence Number=SeqID_112468
ttaacaaagttcagatagcagattggaaaaggagatactacttcccaaaaaaaaaaagattggaaaaggagataagaaaatcaccatgtaggaggagtaatttgtatgctggacgtgtcaattgttgataggaacaacactttaagtctttggcttgtcaaggagtttggactgcatactgacattcttttagggagatcttgacctataaagagaggggggaaataaaaggcgaattaattctctccttaatcttgcatttatagcatacaggacgcctttcatgtcgctggaaattgctgattaggttatggtcatgtcacatgcttcgtgcctctgcatttggtcaaggatttcagtacagcaggtcacatatcaccgtcaaaccctgagctatggtttagcatattccatcgaaattgtaaatcactgtgaccaattacacttgcttaaagaataaatgaacttcatataccaaccaggcacccagcatagtgggtatatattatttta

SEQ ID NO: 46495 - DNA, 375 bp, Setaria italica
  Peptide Sequence Number=SeqID_112469
ggcctttagggttcacatcaatcatgtgaagtttagccaacgggggaaacaaagtgagctcatgacaccatccactgttccaccctttccaagtaatggagatgtgtgttcttgcagcgttcgtgttccctgcgccagctttccattttccaatggaggcagcagcagcagggaaagaagccacagaaggagacatgtgatgagacgagacacacattctaacatggaaagataacaatctgcaaaggaggagtgcgtccaaaagcaacagccctgcccctaacaaactcggaaaagaagggtttaggagaacaaaaattggattcttaatgagattgatagatagacaaaagcctgtatcaggcaaaaatcttt

SEQ ID NO: 46496 - DNA, 430 bp, Setaria italica
  misc_feature (408)..(408): n is a, c, g, or t
  Peptide Sequence Number=SeqID_112470
agtgtgttaatccaaatggtagatctcctcctctcctcctcctcacatcgtatccgaagaaatcctagattattcttctggataaaaggacaatccgatcgggagataataatccgatcgggaaggttgtgatcgggaagatgatgatggagaaggcgcaggaagggcagcagcagggggcggcggcgagcgcgctggtggtgcacagccaggtgcggcggatcaagcaggaggaggacgagaaagtgaaggtgcacgagacgtaccagcaccacgtctccgagatgcgcctcgtcctccgggacctcggcaggcagcgctcccgctcgccgctcggccgcgtcgtcgcgcgccccgccgccatctccatcggcggcgactcctgaatcaggacaccacctcgggganccgatcgatcgtctctccaccc

SEQ ID NO: 46497 - DNA, 453 bp, Setaria italica
  Peptide Sequence Number=SeqID_112471
tccggcgggctgcggagcctgctgatgcggcggagctggcggccggtgctggtggccatcccggaggcggaaggcggcaagatcgagctcggcaccatcgaggaataaaaggagcagcagaagtgaaccgaacgcatgttgggggattctcttcgcgtctgcttctgcctctgttcttcttgctttctctgcttcctcccctggtttcttggcttcacctccctgttggtgactgccgctgtgaatatgatgcgattgatgaatcaaccagatcacctgccatgccacgccacgtatagctcttgttactgcgattctgcgattcagtttacatgtttacagtgcaaccatgggcagatgcagcaagccagcaagcaagtcgctggatagtatcctatacactggccagtgtgccgaggatgttctacgactggatgaacaatccatgcctgg

SEQ ID NO: 46498 - DNA, 404 bp, Setaria italica
  Peptide Sequence Number=SeqID_112472
tttttttcttagttaaccttaaacgtcctattggtctaacgtctaaatctttcagaaccagatccatctctgacctggagactcacccaagtgcttgacgcccatgatgcctggcatccgcgttcccgcttccctgcacagtgatactgcacactggggcatcaggaacgcagattcctcctcgggcaagcaaccactgaaaccctgcagagagaccctctggttgtctgacaaatttgccacaattggtagagcgcaccgcgccagattcgtctgcctgactgggatgaatgggctgatcgagtggcagtcgtatcatactgtcactgcctcactgggccttcaggctcgtcaagagtctagtattccattggagctctccctattctgtctctatccgaata

SEQ ID NO: 46499 - DNA, 358 bp, Setaria italica
  misc_feature (277)..(358): n is a, c, g, or t
  Peptide Sequence Number=SeqID_112473
tttaaagtttaagctggtgatgtggggtctgttttcttgaggatcagcggaccaatcagatcctttgactgggaatttttgtactaagattagttcagttcagctgtgtaataattttggtcagttgatgtggtgctttgtttccaggcttgttaagaaatctgaccttggaatataaaagaaggaaagtattttctgaatggcgtggtgtagaaatcggtcactgaaatggtttccttcaataaagttgactgatttaaacctaaaaaaaaaaaannnnnnnnnnnnnnnnnnnnnnnnnnnnnnnnnnnnnnnnnnnnnnnnnnnnnnnnnnnnnnnnnnnnnnnnnnnnnnnnnn

SEQ ID NO: 46500 - DNA, 1276 bp, Setaria italica
  Peptide Sequence Number=SeqID_112474
acgaaccgtacctaccgtaccccaaggccaaacaagctccaagcctccaacaatggcgaggccgtccctgcttcttcctgccctgctggtcgtcgtcgtcgggggggtatgcgcggctccagcgtcagcgtgtgccgacgaccccatgctggagaggttccagcagtggatgggcaggcacggccggctgtacggcagcacgggcgagaagcggaggcggctcgaggtgtaccggaggaacgtcgagctggtcgagcagttcaactccatgggcaatggcgggtacaagctggctgacaccaagttcgctgacctgacgaacgaggagttcagggccaaggtgctggggttcggacctcacggcaggaccgggcacaccaccgcgccaagcaccacgactagtctggttgacagtgggatggctgaagattattctgatcttccgaagagtgtggattggcgggagaaaggagccgtggcgccggtgaagaaccagggggactgtggttcttgctgggctttctccgccgttgcggccatggaaggcatcaaccagatcaagaacgggaagctggtgtccctgtcggagcaggagctcgtcgactgcgacaccgaggccgtcggctgcgccggcgggtacatgagctgggcgttcgagttcgtcatgaagaaccgtggactcacgaccgagaggaactacccctaccaagggatgaacggcaactgccagacgccgaagctgaaccagagcgccgtgagcatctccgggtaccagaacgtgactgccagcagcgagccggacctcctgcgcgccgtcgcggcgcagccggtgtccgtggccgtggatgccggcagcttcgtgtggcagctctacggcggcggggtgttcacggggccctgcaccgccgagctgaaccacggcgtcacggtggtcgggtacggcgagacgcagggtgacgcggacggcgacggcggcgggacgccggggcagaagtactggatcgtcaagaactcgtggggggccgagtggggcgaggccggatacatccgcatgcagcgcgaagcagccggcggcgtcgcggacggcctctgcggcatcgcgctgctcccgagctacccgctcatgtgagccggctctggctggcgcgcacagcgtcggagctctggcttgctactggaactggatagtttaggtagtgatgcgctgatgcgtatggccaattgaccataccaccatggtgatcaagtgtaagaatacaaatatccaaaacctggc

SEQ ID NO: 46501 - DNA, 619 bp, Setaria italica
  Peptide Sequence Number=SeqID_112475
ggccgagcagcagcggttcgtcgtcgagctggaggacctcggcgcggactacctggaggagctcctcaggatctccgagagctaagtgatcacttgatgatgctctcgcagaactccaaactactctagctagcttcttctgggacaaatgcaatgtccaagcctccttggatggtgtttttgatgaggggaagtctcattttcgaaattttttgtgatttagttctgatttgaactaaatcccaaaacttttcgacgaaaaaccttcaaccggaaatcggaacctaagaaaaaaagaaagaaacttgtgacttcactttgagagcctggaatccaatgtgcactcagatcggcgcctgctatttgctgccattcatatgcacaaattgttgtacagtactacagtagccacttacatacaagtgacaactgacaagtgaccaatttgatgccccctttatatggaattcagctgtgggttttctgtgactggggactgcactgggattattggtcccgtacatgccaccctagatgcatgcatctccctgctttttgcatggattgtacaataatccctcgacctgtagaatagaatatatgaagaacaagttgtacc

SEQ ID NO: 46502 - DNA, 285 bp, Setaria italica
  Peptide Sequence Number=SeqID_112476
ccgcggccacagagtaggccctcctgcaatatcatgaacaaaaagaagtcgtcaataaaaagaaacttgacagaacacaaagagatcaaagttccaagcaaacacgcctcgcatgattcatatcatggcagagctaacagacctttgtgctagaaggctcacgcagcctgatgcaactctctccatggaagcaggactagctgaataccagctctctctctgtaatctctcgatgagaaagtcgtctcctctcctctgtttctgtttgagagattacagagagag

SEQ ID NO: 46503 - DNA, 886 bp, Setaria italica
  Peptide Sequence Number=SeqID_112477
ttttttttttttttgaatagtgaaagttttcaattatattgtagaatgaacttaacagaccaaactgaaattagccatgaaccataaaaaggaaacacaacttgccacgtttggttctgcccttctggactccgtattatagtcaattcaagaatgtgacgagccagacaagaagattgcagaaaatattacacatctccaaagctaaaccggatgttacagggaagctatatacgtatcatatatgtaaatgtggtgcgtagatggagtagtcaccgacgattcgaccatgctgcggagatacagcaccctcatgctctaggccacaaatcccagcgatcaacgagcgcggctcttaaagcaaagcaagatatgctagctcgacgactggtaacccatgctggacaaataagtgaccttgattcatcagtttgcggcctgcgtcagcagcttggcgcggagctccgccgcatccacctccttggcgccaccggccgggcgatagtacccggtcgccgggtccggcacccacgccgtcttctcctccgccactgcggccgcggtgttcacttccttcttgcccatcacgcgcttggccgccgccttcttctcgtcggccctccgcccggctcccttcgccatggccgcggccacagagtaggccctcctttgtgctagaaggctcacgcagcctgatgcaactctctccatggaagcaggactagctgaataccagctctctctctgtaatctctcgatgagaaagtcgtctcctctcctctgtttctgtttgagatgtgaggaaagatgctgcagggtgccttgttatatagagcaagagaggagacggaagggaccaaatgatgatgatggccgcgcgccgcgc

SEQ ID NO: 46504 - DNA, 295 bp, Setaria italica
  misc_feature (1)..(14): n is a, c, g, or t
  Peptide Sequence Number=SeqID_112478
nnnnnnnnnnnnnntttttttttttttttcttatgggaatcggttcagtattcgtaaattctggcatgcattgagcaagccttcccgacatccatatcaacaaacgtggttacaaacactgatacacattcagacagtaagaactggtgatgttttttatccacctctgtgaaattaccatgaaaaaaattatcaaccacacgcacacgcacactggacaagcatcaaaacaggtgagggcatcagtgaaatcaatcacccatggggagcaattcctctccaatcaagtcaaact

SEQ ID NO: 46505 - DNA, 3226 bp, Setaria italica
  Peptide Sequence Number=SeqID_112479
ttagttctttacgtttactttttgtcttgggtattattgtattctacgcacacgcacactggacaagcatcaaaacaggtgagggcatcagtgaaatcaatcacccatggggagcaattcctctccaatcaagtcaaactcctgcgctacgtatcctactaccaccaccatgtgtccatgtcattgttgccgtacccatctctgttataacgctcacttcatggagtaagaacctaccaggccaaatgatctccggtcagttcgtggggccagactgaagttcatcccaaacatctccttgagagcctgtccgggctctagaaggtcgatcagccttgcaacaagagaggcgctctctctgatatgctccatgtcagtctgtgtccagatgaggcgggagagctgtaacctccgttgtttcgtgctcagatcgatgccccatttgctgtagatgctctctttctccccattggagagcttcttcagcatctgcttgtagagcatatccctttctcggcgaagattcttcaagcttgatgcaatggcaggattaagttccccttgagccgtgggttcagcactgaatgaattcttaatgaatgatagtctcctatgctccacttccatgtatatgttatctgctggatctcccctgaataggaggaagaagtaggttctgtgcacgatggagacattgcattcgtgccacaactcgataatttgttgctgttttttctcaaaatcaactgtcggatgggaaggagattcgatggggctcagtgctatatctacaccaacgtctttgactgttttcatggctgtcgattcatctctaatggcctgcatgactagttgtgcatgaaatgccacaggttggtcttcatggcaattttttgtgttctctttcaactccgtgacacaactgatgtcattgatttgaatttcttgttcttcatcgctggtgctcatttcattcgctacttcatcattggtgcttatttccttgcctaattcatcactggtgctcattttcttggctacttcatcactggtgctcatgtccttgacaacttcatcagatgctacttcgcaggcaacaacggagcagtccaataaagggtcttcattttggcaatcatcattctcggcatacaggcttctcctgaccttaccaagccttctgggagcatacctaaagatttcatcaggtggtgtcctgctggtattatcagaatcatcaaaccaactatttggaatcaccacgaagctagccctgcagctgttacttctagccaatgcacgatctctggagctcattatgcacctcttcagactcaaacattcatgagggtaaggtttgctaatgtcgaaagaatggttagagtcacatgtatatagtttgacagcattttctctaattctgtcagattcacattgatacattttgacagaatcttcctctatctttgctatattgtcagcttgttgctcgtctttgctgggatatgatctgacatgatcttcaattttctttgttatgctttcaagcccttgctgttcatcagattgcgggactgcatctttggtgatcacctctacatcaggtgtttggatcttggtgtcctcagggagcaattcgttgaattcatggcttctgcttcttacatgctcatgtatgtctatgcattgaacttccctgcaatgctcttcagatacttcagatgcagttcttgaagctgcttccttcatatgatatggctctataccatcagagctatggttgcttggagggtgccaaggtgaaactaacttttgatcccatgtctgccgaggaagctcccgtgtttcaccgaggaatgctgagtcattatgatcactactgcagacataggatccattaaatgatgcataatcttgatcttgatgagcagccccataagcatcagcaactgaaagtgcctcttcagacacatttcgtgcaagggactctgatgaccgactatgctcatcccatggctttgcagtgtgctcgttgtgatggtcatcaccatcaccttttagtaaacagttaagttgagattgaactgtgtccctttcctccatcaattctttcagctgtttttcaagcttcttaatctgtgcatccttctctctcaaagcctcagtgtgagtagtgcaagaagctgacccaggaaacttcagctcattttctaatcttgcgagttctctctgtagatgcttcacaagtgctttgtcagacatcaccacattgacatgtgcatttgtaataacctcctttgcgcaggttgcaaacagaagagtgttcctggattgctctatatgagtatgtgcagggctcattgtgcagataatggctgttcttgcattgccaccaagagaggactgtaatatacgggtcagctttgaatctctgtaagggatatggccatttcttcccttgctgagttgacggacgacctttcccagtgtaagcagacttcggttgatatggctgccttcttttagcctcataccagccgaggcggtctgagatgcacgctcacttcctgctagatcaacaaagttcacacaagccacaagggtgcttgagttgcctcttcctaaatactgcctagtagaactttcaattatcaatctgagtatttgatgggatctggaacttgtttcattcaaagcagtttctccaatctgcctttgagcttcacatactgctagaagatccctaagatgatcgtagtccctcaaagtttcctcggtgagtctttctacagtagtccctttctctggatcatctagaagtctaagaggtgtcgagtcattggtcttctagtaaggttcaccttcggaccgaatgaactcatcccggcactcgcgggatggcggttcgggcggccgaggttgaggtcgtaagcggcgatgagttgcctcaagtccatgtagaacattctcccgccgtggaacacgacgctgacgaccccggcggtgggttgctcgaacagggagctccaggcggcgtccccaggccgccagaagaacgacttggtgccgtattggctgagagtgaggcgttgactcgcgaccgctatccaatccggcgagccgagcgggtcgccggagaggaatacttgggtgactcggctcaggcacgggagcgggacctcggagccggagacgggatcccacagaacgagccgcgtgggcgacc

SEQ ID NO: 46506 - DNA, 196 bp, Setaria italica
  Peptide Sequence Number=SeqID_112480
cgcaaattaaagaaaacttgcatcactgcatgttatattgccattttgcgtcattggatcaacctaaaacacatctaaataaattgatccaataagacgcaattaagaaacttgcatcactgcatgttatattgcctattttgaggaggggcttattttcgtgaccataccttatttttaagtacttaaattagtt

SEQ ID NO: 46507 - DNA, 242 bp, Setaria italica
  Peptide Sequence Number=SeqID_112481
cgcccacccgcatccgtcgctgcaggctcgctctcccggccatggagtcgtggcggaggcggacgctgctcaaggtcatcgtcctcggcgacagcggggtcggcaagacgtcgctgatgaaccaatatgtgaacaagaagtttagtcagcagtacaaggcgacgatcggcgctgatttcctcaccaaggaggtgctcattgaagataagcttgtcaccttgcagatttgggacacggcaggg

SEQ ID NO: 46508 - DNA, 716 bp, Setaria italica
  Peptide Sequence Number=SeqID_112482
gaacaatcactaatcagacgttgatccaagagatccaaggtatcgacctctaaataaatcggttcattgtcatctgacagcgagagtacaagcgcctgagccccaattgatgaaattcagaaactgcctatctagcaattcagaaactaccaaagaattaacaatttcacagtatccaaccattgctgcggccagatttgacatcaatgacaaacgaggtcagatactggaatctctggttgtcggctgatcatttacaatctccattcatctgaaagaagctgaacatggagttggtctgaagtcagtcaggacaatctgttctttgccacgaggatgccagatgaggacgcgctctggtcggagttgaggatgatgcttgcccagtttgatgagcggtgcactatccgtgacggaatgcggtcactgtcttcacctcctgatgcttcatacccatcgctggtcgatctcgacaactggaccccttgctgtggagtgcttcctggggcagcgagagctgtcagttgcaggtcttcagctccagatgaagagacagctgagacccggtacaggtgcagatcaggtgaatccaaactgctatccggagacgatccgcctacgtttgcggaagatgcagctctactaggatggaaggcgctccgtgcctcgagttgcaatggtgctaaactggatagtgcttcagggggcatgtcgct

SEQ ID NO: 46509 - DNA, 1243 bp, Setaria italica
  Peptide Sequence Number=SeqID_112483
aaagaaaaagaaacggtaagaacaaactaaataccgtagaacggaaataagaacggtaacaactagtacttacaacctacctgaatgcttcatacccatcgctggtcgatctcgacaactggaccccttgctgtggagtgcttcctggggcagcgagagctgtcagttgcaggtcttcagctccagatgaagagacagctgagacccggtacaggtgcagatcaggtgaatccaaactgctatccggagacgatccgcctacgtttgcggaagatgcagctctactaggatggaaggcgctccgtgcctcgagttgcaatggtgctaaactggatagtgcttcagggggcatgtcgctgccggtactatgaataacatctgcagatatcttcgcgacaggtttgagagagaggtcactgggctgtcttcctcttctgttcgttctcctcttgctatcagggcctagatcaatcctgccactgctcatacctccatagctactatctgtgtcatggcctcgcgaatagtcatcttttctgataggcactaaaacttttgacttcttccgtgcctctgcagcaactctcgaaacttcttctgcgtttagacgagccaatgcccatggacttattttcacagcccctgagcccttcttcctccttacttcatcttcctttctcttggtagcagaattatgcgaagagccagcctctgatggaatgacatcgtactgatcttcaagaaacagccttggaggagtgcaccatgaaccacgacgaagtggaccaaaggaactagcgctgctgagtccagtgtaggagcttacacgagacatctgtggactctgctgcccactagcatcttcttggtcttgctctctcagggcaatgatgtagtcatatgtactgattcccttcttgataagaagaatgtggaaaaaaagaagttgggcaatcgggagtgaagcgaccatggctaggatgctacatgatgccaccacaatcacaaaaggcactaaagagaagctgctccctagctttgagacaatttgcactgagaattccttccgctcaacaaagcatagcactagcaccaggttacttcctaattactgtaggataagcaagacaagggcagtagacattagaacaaaaaacctcctatagtttctttttccaatacaaatgtgtagatggttttgatcatcactgccggtggctcaacaattgtcacaaacttctgt

SEQ ID NO: 46510 - DNA, 610 bp, Setaria italica
  Peptide Sequence Number=SeqID_112484
gcgttccgtccggggcgccgtcccgcgcgctcctgccagctgcttccttgctccagtccgccaccgtcgcctgacaccccggctcctcctccgccgttccatttcccgcggccgatctgccgcctctgcccgccgcgctgcccacctgaaggttgctccggcaccggcggctccccataatttcacacggtcaccatgcgtgcatcaacatccaggcactttgagcttcgacacacgccgcacaacgtccaagcggagtagcgatcacgcatatggatgaacgtgcatgattggggcatgggcaggctaatcagtaatctcactacgttcacacgagtaaaataaaagcgaaggaaagtatctgaactagctggaatgtaatactctatccgttcgaaattataggtcgttttggattttatatgtgcatagttttgactgcatctaggtataatgtatgtctacatgcataataatatctttgaacttagaaaagctaaaacgacctacaatttgaaatggagcgagtaggagtgataaagaggtaatatgtatacttgaagaagaatttattttctttggaatcaagatttgactactcaagatatat

SEQ ID NO: 46511 - DNA, 264 bp, Setaria italica
  Peptide Sequence Number=SeqID_112485
cggagcggctccagccgccggtccccgcgaacgcaatcagcagcaggctgtggtgccgccgcgtgatccaatgcggcggagagggactgagggagggaggtgaaggtttccgtcgagagcgcgcaagggaaatagccccaaggagcggagcgctcgccgctcgcgaggtggtttccgcgcagttgcgtgcgcgcggccgtcggcgcgggaggcgacgcccgcggccggggggtggtggtggtgcccgtgcggagagcgtggttg

SEQ ID NO: 46512 - DNA, 447 bp, Setaria italica
  Peptide Sequence Number=SeqID_112486
ggctagcactgcttttggtcgtgcgggggctatattctttagtctcctttttactaaagcttccttggaacccgagactctccttgtgatgaaaaggagtccctagtaggtacataatctgatccaacccccttcttctcttctctcccttccatgttatctctagcacccatttcggagtacttctaatttgttagaagttttgattccgtctggagcggctccagccgccggtccccgcgaacgcaatcagcagcaggctgtggtgccgccgcgtgatccaatgcggcggagagggactgagggagggaggtgaaggtttccgtcgagagcgcgcaagggaaatagccccaaggagcggagcgctctcggctgtcttcgtcgtaggttggcagtccggtgcgcgcggccgtcggcgcgggaggcgacgcccgcggccggggggtg

SEQ ID NO: 46513 - DNA, 475 bp, Setaria italica
  Peptide Sequence Number=SeqID_112487
ggaagggtgtgaaatctacagtgtacctcttacgcattaactagtctatcacaagagaccaataagctcaacagtaagtaaggtagatcaaaaggagagtttatctaagcttttcaacataccagtaaatggtggagatggtgtcagatctgatcgagcatcacctcttttgccaaccccaatgctaacaaccctcatcctcatcttttggggtaagcgactcgcatgtcataaggtcagggcacagatgaaagcgcaggggctacctaaaaaccagcattcctcgctttctgtgatgaacgagcatgtggatgcttattgcggtacgcgcttcaatatccaattcactactgacaagatcaaaaagaaatagttaggttcttaagcatctttgctcgcgcgatctgaccagttcattcaggaaaccgaaggcaaagatagtaggaatagagaacaaagcctgggtcaagtcagg

SEQ ID NO: 46514 - DNA, 263 bp, Setaria italica
  Peptide Sequence Number=SeqID_112488
gcggcggcttggtcaccccgcacatcgctaccggcgaatgccatcgccgcctccgtccctcaatctccgctccggcagctcccacggagaagcatgcttgggatgaagactcaaacgaagaaagatggttcaagggtggatttcgattgttgtctccagagctcaacgtctcaacccagtagaatttgggggcaagtgatcgagtctcaaagccccaaaggtatcaagagttctcctgcggatatcctcaccttttgaagttt

SEQ ID NO: 46515 - DNA, 831 bp, Setaria italica
  Peptide Sequence Number=SeqID_112489
aaccgaacaaacaaataacgaactaaaccggacgaaatagaccaatacgccgcctccgtccctcaatctccgctccggcagctcccacggagaagcatgcttgggatgaagactcaaacgaagaaagatggttcaagggtggatttcgattgttgtctccagagctcaacgtctcaacccagtagaatttgggggcaagtgatcgagtctcaaagccccaaaggtatcaagagttctcctgcggatatcctcaccttttgaagtttctgagtgccaaaagatctgattcctgcagagtccagcaatagcgttgtgttatctaagccatttgctcacgcacccatggtttttacaaacagaaatgtcccttcttgctgtctgcgcagcatggtttgagtagcttgcactccaagtggcaaacatttttaagaattgatgcggtctccattccggttaactagtggcttctctattagacatattttcccttagatgtcgtgtgcaaattgtcagacatgtcaacatgctttagttttgatttaaaaatgtcacatgacaacaaacttttgaaagattggctgaagggaagctgcttggatactaccctggtctctgtccccatctttgttggcaacctatcagggacaccggacacgtatatatagtagcattggagcccctccgcttgtacccatcccacatccatttgttcaagcgacttgaggtttctagttctagttggctttgttgtaaattaagtagcacacaaatggatatgcaggaaggaaggaaagggataccatccttgctctcctcacagggggagtgcat

SEQ ID NO: 46516 - DNA, 1449 bp, Setaria italica
  Peptide Sequence Number=SeqID_112490
tattggctgtaaaggggttttaagttttctttttgtttcttttttggtttattttacttttacccttttggttttcttttctttttttttcggtctatgtccccatctttgttgccaacctatcagggacaccggacacgtatatatagtagcattggagcccctccgcttgtacccatcccacatccatttgttcaagcgacttgaggtttctagttctagttggctttgttgtaaattaagtagcacacaaatggatatgcaggaaggaaggaaagggataccatccttgctctcctcacagggggagtgcattgcatccaacattacacagttaattggttggacaccactgatagaactgaaaaatattgccaagaaggatggaataaatgctcggctcattgggaagattgagccataccagcccctttcctctgtcaaggatcgaagtgctctcagattgactgaatattgattgaagatgcagaggagaaaaacctgatctcacctggcataacaacactagtggcagcgacgagtggtaatcttggtattggggtggcacttgttgctgctcagaaaggctataagttcatcgctgtcatgccagcaaaaatcgcaatagataagcagatattattgaggtacttgggcgttgaagtgatattagttgatcctgcaattaatggattcaaggggctacttgatagagtagaacagctgaagaatgaaatggaaaatgtatatgttatagaccagttcaccaatcctgcgaatcctgatgcacacttcagatggactggacctgagatttggaaagatacagaaggcaaagtggacatatttgtcgctgcgtctggttcaggaggtaccttgacaggcacagggaggtatctgaagatgaagagtccatctgtaaagctaatgtgtgttgaaccagctgaaagtgcagtaatttcaggtggtgagccagcatatcataaaatacaagggatagggcctggttttgtcccagaaatactagacacgtcacaaatagatgaaatcataacagttactgcccaagaagccatggacgtggcgagaaggttggcaagggaagaaggattgctcgttggcatatcttcaggggcaaatgcagctgcctgtttaaaggttgcggcaagagaggagaacaagggcaagatgatcgtgacgatgttttccagcggcggggagaggtacctgaactcggaactctttgcacaggcgaaagaggaatgtgtcaacatcaacatggccttctgaatgttcaggttgaggcaatgtcagcatatggctgagcccgaagtgcaatgcggtcctaaagtctacttcgcaagatttcgcgttaattgtagtctgactcagtgggttataagatgtaaggagtaccttagtaagtgacataaaaccagacaatgtatc

SEQ ID NO: 46517 - DNA, 522 bp, Setaria italica
  misc_feature (358)..(358): n is a, c, g, or t
  Peptide Sequence Number=SeqID_112491
tttgttggtgtatctcatcgttgtcgtaagaaattccaaaaagttgttcccatctcatctgatcattgtggtaagacattccttggaaggcaaggtaagatactaatatctacaattaattatttcaaatttgtcagttggctgattgataaatgattcttttgttttcccacatgtatatgtatgaaaaatagattagtacacatgtttgttgcagattttaatgacacctcacacctctaaattgtcctataatttctgcaggtgtttcctcctgtttgttggaaggaagttgagccaaatgagatgtctaaatagtaaatacatttgtcctggaattctgatgcacgaaaaaatntatatgaaaaaacatcctctcaagtatcagtgaatgccgcattgcatcagaactgcatttttacttgctgcttgaacttcacaccctctcaacgcatcgcggctgctgtctaggtggcatgtcgctcaggtgaagaacattgagggcatgtcgctcaggtgaag

SEQ ID NO: 46518 - DNA, 229 bp, Setaria italica
  Peptide Sequence Number=SeqID_112492
aggaggcggacggggggtcgcccgctccgactcctgcgacatggcctggcgcgcccgctccgactccgactccccctccaaggccaccaccaaggactatcgccgcttcgccatcgcccgggatccccacacgtgcgcctactccgtcctctccatcggcgagtaccactccggccccaacgcccgcaagcctcgccgcgccgccaccaacgccacaatcgcccctccg

SEQ ID NO: 46519 - DNA, 930 bp, Setaria italica
  Peptide Sequence Number=SeqID_112493
atcagccgcgatgttgtttttgatgaagagcgcggttgggattggtcttcgccggagtccgggacatcggcgccaaacagcagtgagttccaggttgagtacgtctggtcggaggtggtgagtgagcctgcaacaccaccatcgcctccgcccccaaactcaccaagaacacccgtgccaggcagtccagtcggagttgaagaagtagaggatgacgatgtagtggcaaattctgttccagcagcaaccgcaacgccaccaccatccagtccccagattgagcatgccacacctctggaagatgatgatgatcgactggatgcatatcacgacgatgaacctcttcgttacagaacggtaagcaatattattggccagcagcccacaccaccacctgcaactcgcctgttcgcagaactgcatctaacgcactctggcgaaccaacttcgcatactgaagccaagagagatccagcgtggtgcgaagcaatgaaagaagaactgcgatcagtagagagaaacaagacctgggagcttgtgaagcctcctgctggtcaccgtccaatcaccctgaagtgggtgttcaaattgaagaaggacgaacatggaaatgttatcaaacacaaagccagacttgttgctcgtggctttgtccagcaagaaggcgtggattatgatgatgctttcgcccctgtcgcacgcatggaatctgttcgagtcttgttggctctggcggcacaggagggttggtctgttcatcagatggacgtcaagtccgcatttctgaatggagacctcaacgaggaggtatatgtgtatcagccgcctggctttgctgttgctggacaagaagacaaagtgtatcgcttgcgcaaagctctgtatggcctacggcaagcgccaagagcatggaatgcaaagcttgattcg

SEQ ID NO: 46520 - DNA, 351 bp, Setaria italica
  Peptide Sequence Number=SeqID_112494
cgaggccagcgccacgcgccaaccgccgtgctgacgcgcgagggaaccctcggatctgctcgcgtcgtcgcagccacgcgcgagccacaccaccgctaagctccccttgcatcacgggtaagctccttgacggagccgcgtgcgaaccgcacgcgtgctccggcaagaagctttacagcggcgcgagtttgccccggcactcatctctctcacgctgtcccagcggtggagccaaaaaaggtggaaggggaggagaagaaatggccctatcaatcgatgactggcttgggcacatcctcttgctctgttcaagctccgactggtgccggcgcggtccggtgtgggcgcgag

SEQ ID NO: 46521 - DNA, 304 bp, Setaria italica
  Peptide Sequence Number=SeqID_112495
cgcctcaggagcattgcaaatgcagaagcatgcgagggtgacccccctgagaagagcgatgactcgaatgctcctaccactgcaactaatggtagtagctgcaaagctgaggagtgttgcagcagtgcgatgagagaattgcagagttcagtatcatgctcgcctcggccttttccgtcgtcgattccgagcaacaaggtccagccgatgccgatcgtcggtgtcagcccgcaccaacagcagaagaagaaaacagccgtggtcaggctctcattcaggagaaggtcatacgagggtgacgaga

SEQ ID NO: 46522 - DNA, 452 bp, Setaria italica
  Peptide Sequence Number=SeqID_112496
gcgctggagaattcagctgccttaattggtgacacatttgcacctactggttggtcaacaccagattgagtaggagatccaatggtgttcattactgacaaaggtgaagctggatttgaagggtggaagtttggagcatttggcatagccatagctgatgaagatggagttacagggccaccaccagtcacaggaactccttgccccataggcgcctccatggaggaaacagcattaagcagagatggaaggaggttgtcccatctaaggtggcctcgagcacataagcaccgtgtagcaaagagcaagaactcagattgtggtgcgtggctactacactgcaggacaaaggagatcagaactgattctgtgactgcctgcaactggtcctggtcagggtactgcatgcgcagctgctcataatctgaaatgaactgctcatcgacggggag

SEQ ID NO: 46523 - DNA, 380 bp, Setaria italica
  Peptide Sequence Number=SeqID_112497
gcagttgagcatgctctgagtcattcatcaaacagaaattaccagaaagtggatacacactttcttcgcagaggcgcacagctcaagcccctggcacaaagaagaatttttacccctgcatttgcacctgaaagcacatatctttcttgccatactcataggaacttttcgcgctgcaaccctccgttttcttcttaggaaacatgcctcatgttcagcgataacagctgatggggacccttcgaattccccttcgtcgaaatgatggacactggaagtcagcctcctgctgtcttctttcatggactcgacaccatgtagaaagtctgttcctttccagctgctttcactctgtggttccttctccttacttctatgtg

SEQ ID NO: 46524 - DNA, 309 bp, Setaria italica
  Peptide Sequence Number=SeqID_112498
ttaatcttacctagacgaaagacttgtagtaatattgcagggacaacggcggcctgtcaaggagtttggctggcgcagctgcttgcagagctaaagagcaagctgctttcattctcaggatggactcggctattgcaccctgagtaagaatcccgtattccatgatcgtagtaaacatattgatgtgagatttcactttatccgggaatgtgttggagatgggaagctggacattgagcacttccgcactgaggagcagcttgctgacattctgacgaagccgctggcgcgtgatcgtttctgtgaact

SEQ ID NO: 46525 - DNA, 2838 bp, Setaria italica
  Peptide Sequence Number=SeqID_112499
tttgtgaaccatggagtgtttcagcaggcaatgtggcaatggtacagaaaagctggtactcttgaggattgggtaaggtctggaaagggacagagcaagcttagttcagcaatgatggttgagcagctgcggttttggagaagctgtatctcttatgggttttgcatagcgcactttgcagatttgtttcctgttctatgcctttggctcagtcctcccaataagaatctgagtgagcacaatgttcttgttgaattcagttctgttgctagagagtcatatcttgtcttaggggctctggcacaaaggttaccacttcttcattcagtggagcaacttgccaagcaagatgtgggagtttctgcatccacttacattgagacatggtcttggagccatgtagtcccaatggtagacatagcgctatcttggttacgtctgaatgatattccttatgtgtgttcacttattagcagtcagaataggaatacaaagcagatgctagaggcaagctacttgattttggtgattgcttctgtactaggcatgcttaattcaatattagaaagaatatcaccggatgccacgtctgacggtaaaatttactagcttgccttggatacctgattttgtccctaaaattggcctgggcataattggtaatggatttttcagcatctcaggcactgttgcttttggaaatctggatcatcagtctttttgcagcacatcattggtgcagggactttgttatatgagatgccatggtaacgttgatatgtcattgtcttccataagttgccttcaaagattaatgcagctatcctggtctgttgacagagtgattcagggagccacgaaaagttgcactgagcatctcattgaatctaaaactggggcagctggcaagctactgggagaaggcatctccagtttatggcatgatgacttgttacacttgctaacttcgctcttgccgatgatttcctcgcagtggtccatattacagaacatagaggtgtttggtaggggaggaccagctcctggtgttggacttggctgggggacatgtggtggagggttttggtctcttaaatgcctgcttgcacaactggattcacagttggtcctagaattgttcaaaaaatttctcttcagcaccaggaggttctgtcactctcaataacagaatgaactcagataatgtgtctaaaaccagctgtcacgtcttcagatagaatcagttcttcccttggggcgtctttgattgcaggacctggacagatctacatgatggagaaagcctttgatatcctccttgaaccatcgagtctgaagtatctcaaatcatctatacatatatttgcctctcacatggcattaccaaaactttttgagtgggacataactgaagaggaatatcagcttttcagcagcgtgctgaattcacattatagatccagatggttgtccatcaagaagaagcattcagataaggatgcaggaaataacaacagcaccaatgtacaaaaaataccagagacattggagacaattcaagaagaaacagagttaacagaagccgtgaatgaacctcacagcacattagtggtagagtgggcgcatcagagactgcctcttcctgtacattggattctaagtgcagtctgctgcattgatgacccaaaaggcatcctttcgacatcagcgaagtatattcttgatgtctcaagggctggtcttatctttcttttaggtttggaagccatttcagctgccccatgccttcatgctcctctgatctggaaaatgcatgcactttctgtctctatccgctctagcatggatttgctacaagaagacagaagtagggatattttccatgctttacaggaattgtatggccagcatttggacaggttatgccagaagtactgtagatctcactctgtcaaggaagacgatagtgccggagtggctaatttagaggaagcaaaagagatcagtagatttgaaatcctaagattccaggagaagattcatggaagctatactacttttgttgagagccttgttgagcaatttgcagctgtctcatatggagatgttacttttggtcggcaagtggccatttatctgcatagaacggttgagccggcagtacgtcttgcggcatggaatgcattgtctaatgcgtatgcgctcgagctgttaccaccactagataaatgcattggcaacacggaaggatacttggagcctcttgaggatgatgaaaaaattttggaatcttgtgccaaatcatggacatctggtgtcattgacaaagctgcacagcgtgattccatggccttcacattagtgaagcatcacctttctggctttgtcttccagtgcagtgcttctggcaaaacgctgcgatacaaggtggtcaagtcgcttctccggtgctatgcacagaagccgcaccacgaggctatgctgaagagcttcattatgcaaggcatcgcacaggatcccgagcacagtagtaatgagcttgacaggcgatttgaaatcttgaaggatgcttgtgagatgaactcctccctcttggctgaagtccagagactgaaggcatctcttggccaatgaaagccagaaactgagaatatgtcacgaactctgcaggtgttagctatagaaaaaaaatgttcatttagttgtttccaaatttgtctatagttaactaggttatttacttgcttgagatagcctgcagttccaagacgtgtcacggataagaagaccacaaactgcatttgtggtatacgtagtcaggtaagccatgcaacttgc

SEQ ID NO: 46526 - DNA, 451 bp, Setaria italica
  Peptide Sequence Number=SeqID_112500
taactttaaacttactttactgtttcgtcgggattgggcagctttgagatttgcttgaattacccttacttgctcttcggcttctgccactaagtcagggccatagatctgtctttctcctgcttgggactagttcaatggtgtccgacatctccggccatataaggcttcaaacggtgccatcttcaaactggtctggtagctgttgttgtaggagaattctgccaagggcaagcacttgtcccaatttttgtcataatggatgacacaagctctcaacatgtcttcaaggatctgattgactctttcggtttgaccatcggtttgaggatgatatgttgagctacggatgagcttggtgcccatggatgcttgtagctgttcccaaaagcgtgccacaaactgaactcctcgatcagagatgatggtcttgggtacaccgtgtagggaa

SEQ ID NO: 46527 - DNA, 438 bp, Setaria italica
  Peptide Sequence Number=SeqID_112501
gcatgctttagcgaatgcgctgctggagcatgaaacacttactgcagatgagatcaacaaagtagttcatccataccaagaagaaccccagttctccttccaagatgaggagtttgccctcacttaaaagattcttttgttgcatccagacagcactcgccaactgtgaattgtaaatccatgtacagaaaacatcagaagatgagatttgcagagggtgatgcacgcttattgataggtctttcaatggaagaccaccaaggcccctggcaaagctttgggttgcaaagcccctccatacttttagtttagctaggagagagataggtgtaacattggtgttccgaatgctaggtttctggctagggccatgtttttacattgttctttttcaccttttttgttgactatttgttgtaagaacccgtacataaatct

SEQ ID NO: 46528 - DNA, 1582 bp, Setaria italica
  Peptide Sequence Number=SeqID_112502
gtttgttggtgttggtgctcggagagtgaggtcattgtttcaagctgcaaagaagaaggcaccgtgcattgtcttcattgatgaaatagatgctgtgggttcaactagaaaacagtgggaaggacacacaaagaaaacactgcatcaacttcttgttgagatggatgggtttgaacaaaatgagggaataattgtaatggctgcaacaaacttgccagacattcttgatcctgcactcacgcgacctggtagatttgataggcatattgttgtcccaagcccagatgtgcggggtcgccaagagattctggagctctatttgcaagacaagccagtggccaatgatgtagatatcaatgcaattgcccgtagtacacccggctttaatggggctgacctagcaaaccttgtaaatattgcagcgattaaggctgcagttgaaggtgctgacaagttgactgctggacagttggagtttgccaaagatcgtattatcatgggaactgagaggaaatcaatgttcatatctgatgaatcgagaaagcttactgcctaccatgaaagtggacatgctattgttgcactcaacacccagggtgctcaccccattcacaaggctactatccttcctcgtgggtctgcccttggaatggtcacacaactcccctcacaagacgagacttctattagcaagaaacaactcttggcacgtcttgatgtttgcatgggtgggagggttgctgaagagctgatctttggggaagacaatgttacaactggggcaagaaatgatcttcatactgcaacagagcttgctcaatacatggtatcaaactgtgggatgagtgatgctattggtcctgtgcatgtgaaagagcggccaagtgtagagatgcaatcaaggattgatgctgaggtggtgaagctcctacgagaggcttatgggcgggtcaagcgtttgcttaagaagcacgagaagcaattgcatgctttagcgaatgcgctgctggagcatgaaacacttactgcagatgagatcaacaaagtagttcatccataccaagaagaaccccagttctccttccaagatgaggagtttgccctcacttaaaagattcttttgttgcatccagacagcactcgccaactgtgaattgtaaatccatgtacagtaagtggcgccaagatgaaccatggaggttctttcagatgtcccccttctgtaaaatagggcacaatacctgtggtgcattttcttcacggcaccattttcatttggtgaacaggaaaacatcagaagatgagatttgcagagggtgatgcacgcttattgataggtctttcaatggaagaccaccaaggcccctggcaaagctttgggttgcaaagcccctccatacttttagtttagctaggagagagataggtgtaacattggtgttccgaatgctaggtttctggctagggccatgtttttacattgttcttttcacctttttgtttgacatttgttgttaagaacccgtacataaatctgttgattcatggttaaacaatatatctgcaagtattcatactgcta

SEQ ID NO: 46529 - DNA, 532 bp, Setaria italica
  Peptide Sequence Number=SeqID_112503
tgcgtggccgtccaggtgcccatcacgccgcagcaggacaacaagaagatcccctatcatcgtgcccatggtggtagaggaggagtatcgtcttcgtcggcgctgatgcagaagaagaaggcggcggcgtcgtacgacgaccgctccaactacaagccgctgagctggagatgcaagtgcgggggcccctgatgttccttttatttggttatatataagctagcgctgcggcatgcacgcagtctcttcgatcgtgtgatttgctagtgagtttaatgagactgatgcttagctagtgttttgcctgcctggtgttaagttggtgatatgcatggttacgaattgaatcaacgttcctctttgctttgctagctctggccggctttccttcatcatcagtgacgaacactaacggcaactccaaatcagtacgtaggtgataaaaaaatgctagtggggaaaaaaaagaataggagttgtcttcacctaggactttcattattatccctctgttatatatccgttctctgtg

SEQ ID NO: 46530 - DNA, 490 bp, Setaria italica
  Peptide Sequence Number=SeqID_112504
ggaaattctccaggaccagctggagtttcttccttacctttgcagattccaggttgctgctacttcatgaattttggtttcttgttttaggaacgatttttattttaggaaatattcatctgattctcatctttgaaattatcttcagcaggaaatatgataccttaaatcctttattaactaatttgagatctttctgtaaaatatatttgtctttgttcaagcttatcagaagaactggtggataataatttttctgaacctggatagtaaatttcccttcattttgtatgagttacttttatctggacggtttttagttacttaaatcagcaaaaaaaatgcaagtaatctgcatagcaattgaaaatgagatcccttatgtcccggtcatgatttacttgggagggaagaggaggtggttggtggtggtgctgttgacagtggcttgagggcatggagaaggcaaagagcagaaaaacagaagggg

SEQ ID NO: 46531 - DNA, 563 bp, Setaria italica
  Peptide Sequence Number=SeqID_112505
tacttactattactaaaaagggttgtctaaagtactagtaatttcgtaaagtagtactttggtcgtagtttctttctaagtctacctagtatttgtagtactagtattccttgacagaattcgaaaagagacttggcgagttcttcaagcaccagattgagacagatccttccgtggcctacggagatgggtttcgagcaggcatgcgagccgttgagcggtatggcttgaggagtaccctcgatcatatcaagctgacggggtcttttccgtagtgaagctgggttttcccctcaagttcgaacatgggtataggtattttgagaactcttggttcatgttacgcatagcaaagggtatatatcgtctacagtacacgaagtatatacgagaagataaataaggatttagtttataccgtccattgcagaaaaaagaagtattgattttccttcacaattatataattgcacagttcacgcatgaagttaagtggtctttagcttgaccagccatgtagactgctatcaacttaaatagacaaaaagaaaagtacgaaacaa

SEQ ID NO: 46532 - DNA, 1437 bp, Setaria italica
  Peptide Sequence Number=SeqID_112506
aaacaaaaactaagttacgaacggtagtagaaagtagaactagacaaattacttaatatgaacaacttgcacgggctctgcagaaaataccagtcctactctagatgaagatgaacagcttgcacgggctctgcaagaaagtatgaatgatgaacatcctcctcgtcagcatattccaattgaagatgttcactcagaaagtgctccagcaagtagcttgcccccatatgttttccccacaaatggatcgagggtctgtgctggatgcaaaactccaattggtcagggacggtttctcagttgtatggactctgtttggcacccccagtgcttcaggtgttacggttgtgatataccaatatcagagtatgagtttgctgttcatgaagaccatgcataccacaggtcctgctacaaggagcgtttccatcctaaatgtgatgtttgcaatagctttattcccacaaataaaaatggcctcattgaataccgggcccatcctttctggatgcagaagtattgtccttcccatgaaaatgatggtacacctaggtgctgcagctgtgagcgaatggagccaaagcacagtcaatatataacattagatgatggccggagactctgcttggagtgtctgcatactgcaattatggacaccaatgagtgccagccactatacattgatattcaggagttctatgagggtatgaacatgaaagtagaacaacaagttcccttgcttttggttgagcgacaagctctaaatgaagccatggaagcagagaaaatcggacaccaccttcctgaaaccagaggtctctgcctatctgaagagcagattgtcagaactatattaagaagaccaataattggaccaggcaacagaatcatagatatgatcacaggaccatacaaactagttcgacggtgtgaagtgactgcaattcttatactgtacgggctgccaaggctgctaactggctcaattctggctcatgaaatgatgcatgcttacctccgacttaaaggataccgaaccctgagtccagaggttgaagaaggcatctgtcaggttctagctcacctgtggcttgagtcggaaatcacatcaggttctggtagcatggcaaccacctcagctgcgtcatcatcctcttcaacatcctcctcatcaaaaaagggtgcaaagacagaattcgaaaagagacttggcgagttcttcaagcaccagattgagacagatccttccgtggcctacggagatgggtttcgagcaggcatgcgagccgttgagcggtatggcttgaggagtaccctcgatcatatcaagctagtctcggggttctttttaccggtagagtactcctgttgtgcttatttattttcatttgcagcatcctcatcatacttctatgtttctagaacagaatatatacc

SEQ ID NO: 46533 - DNA, 401 bp, Setaria italica
  Peptide Sequence Number=SeqID_112507
agtggtaataagtttaacatggtctagcaacagaccacgttaatcgacgggctttttaaaacaggaaacatgctagctgcttttaaggttggtcaggagttgatggagagaaacctgtcacctgatgctgttgtctataatgtgtttatcaattgcctttgcatgcttgacaagtataacgaagcaaaatcttttttgaaagagatgagaaatatgggcatagaacctgatcaagcatcatataacactctgattgctgcactgtgcagggaaggaaagacctccaaagctctaaagctactggatgaaatgaagcggagttctataaagcctaatcttatcacatatactacacttgttgtgggtcttcttcatgctggggttgtgggagaaggcaaaat

SEQ ID NO: 46534 - DNA, 383 bp, Setaria italica
  Peptide Sequence Number=SeqID_112508
tagtttagtaaggatgggcaataaacctgtcagaacacaaaccgtaacagacaaccataagagacgaggggccagaactgtgtataaaccagttgcgaatgctgtggtagttgccacgtatgcaaaccacataagcttctttgtaaaagatctgtagtaaagcaagaactcaagatcctcccactttgctatgatgcatataaaagccacagcaagtgaagcgcacattgctaaggtgtcagagatcaagaatgcttgaaacgcaaccttcctgaccataatgggaagtccctggcttccggcatcactactgtatcctcctggcaaagtaaagcagcagcaaaggtaattgtcgcgaggaggattgccactaaggaagtgtt

SEQ ID NO: 46535 - DNA, 531 bp, Setaria italica
  Peptide Sequence Number=SeqID_112509
tttaagttaacttaaatttaggttaagtactaacgtaattggtcgccgggtatgttcagaatggcagggaggaggaagctattgagttcttccgcaggatgctacgtgaaggagttcctgcggagcagttcattctcaccagtgtagctgcagcgtgtggaaatgcagggatggttgagcaaggtaggcaagtgcatggatttgttgagaagctgggccacagatttgacgcaccattggcatctgccatgattggcatgtattcgaagtgtggtagccttgaagatgccttgaggatattccacagtgctcaggccaagaatgttgctgtctggactacaatgttgtgctcctatgcatcgtatgggcaaggaagaatggctatagagatcttcaatagaatgaaagcggaaaactattacaccgaatgaggtaacccttgtcgctgttctatcagcttgtagccatagtggattggtcagtgacggagagcactactttaagcttatgcaagaagagtatggaattgtc

SEQ ID NO: 46536 - DNA, 479 bp, Setaria italica
  Peptide Sequence Number=SeqID_112510
aggtaggttacggaggaattctcaggtttaccggacgccatcacgctccccttctctctggagggtccctctggtaaagtagtccgcgatatttgccacgaggatactcgaagccaaaggcgtgcgcggtgcgagctccggcggctgggaggagagggagggaagccagagacgtccggaactctgcggcgctccggcgagccgcggcgtgaggcggaagcagcgtccctcgcgtcccccgggggtggacctggggtaccccaggagccgtccgatccgacgtttgaggcacagatcgactgaatcgcgagcggagaggccaaaggcgctctgcctcgtcacaaacagagtcgacgccggaggccgtggcgcggtgctccgccggctccggcgaagtagagcggcaggagggctgctcactaggttgtccgccgtcgagagcgccaccggcagcgcgtgcccggacgcccgggacggcc

SEQ ID NO: 46537 - DNA, 344 bp, Setaria italica
  Peptide Sequence Number=SeqID_112511
tggtgtagtacatcttagatagttatcttgctttggcctctgagctatctaacagaactttcgagctgataactgtctttcttttggctagaatgtttaagggttacaggatgggtttctcagtcaatgtctatggattatggaaacaaaaccattagtaaatctggagagtttaataaatattcatcaatcactaacagtcacttttttgggaacctatatgtaggatacttcaattagtgactactgaacaaaatcgattgcaacctcaaatatatcaagtcatgcaagtgttttctaaaaattgcagtacaaaacataaaagaccagccttcagttttttt

SEQ ID NO: 46538 - DNA, 368 bp, Setaria italica
  Peptide Sequence Number=SeqID_112512
gcgatagtcacagagacatagaggagccgaggcggtcggtgaaagtcacgaagacatggaggagtcgagacatacggaaatatatggaagttgtaaaatatttaattaaatatatgacttagcttgattcgtggccgagtcggagagttagcatcatgcctgagcaagcagccgtcggtgaacagttattgatgaagccaatgttaagtccggggtgtcgaagtggtcggcagtgttgcctacaggagcaacgatgcatgggacgtcactgccgagtcgtgcagcttaaagccgagtcgatggagtgtcgtagttgctgccgacctcatgatccatgcacggttacagatgtgggtatcgccttaatc

SEQ ID NO: 46539 - DNA, 489 bp, Setaria italica
  misc_feature (429)..(429): n is a, c, g, or t
  misc_feature (452)..(452): n is a, c, g, or t
  misc_feature (483)..(483): n is a, c, g, or t
  Peptide Sequence Number=SeqID_112513
gcttgaaggcagtataaaccaatgcctccagattgaacctgcagcaaagaaagaaattttgccgccaaaagagagcagcaagttcggccatcaccaccgaatcaacccttactgatccaagaacctgcaaacaacaagataaagaagtagttctaagatcaatcaggacccccaatccagcaattcttgaactgcttccttccccattaggttggagagctgcatctgcataagcaaaaacaaaggctgccaagcttggaaggtataataacaggaaaagattgattaatggaatcatcagcagtagaacttgttgttgccaaatttcttgttacacctgcatgtgagttaaacaatatagaagtagcaatgtccgcctgcacttcatgagtcagtctgttgaccgaccatttgttgttgttgaacctntaatcattccttgccttcaaagntaccaaagtctagtaaagatctcctgcaagntgtcat

SEQ ID NO: 46540 - DNA, 1163 bp, Setaria italica
  Peptide Sequence Number=SeqID_112514
gtacacccgcccgaagccgccgatgccgagcagccgctcgtcgctgaacccgtcggtggcgtggtaaagatccttgtacgagaacctgtgcgggccgaacgtggcctcccactcctccttgacctccgcgtacatgcgccgccgccgcaggaacgcgaagacggcggcgcccaccgcgaatacgagcgccgcggacgctatcggcagcacgatctccagcgtcttggaccgcggcttggggaacgtgaccggcagggtgggcagggaggagatgttgagcgccggggcggcgccgtccatgttgaagctccagccgagcacgtagtgccggcagaagaggatgccggacgccgacgagaagccgacgtacgcggtgtcgccgtcgatgacggaggagaggttaacggtggtggagagcaggggcttcctgggccgggccacctccaggggcgccatgctgacgttgacctgcatggtcgggccgtcgaagtccacccacacctgcatcgccttgcggctcaccaggctcatgttgcggaacgcgccggtggcgtcgtcgtagtagccggcgttgtcggcgtcgacggagttgagcccgttcacgtcgatcccgacgtggttgccgctcatgtcgctgaactccgagttgaggatggtgtcgaactcgaccgcgaagaggtggttggtggcgttgccgttggtggcggagctgacgaggccgaggaactggcccggcagcgcggatgtgaagttgcggctcttggccaccacgaacgccatgccgtggctgctgaggtcctcgtacgcgccgatgatgccgatgacgaaggccgtggagaaggaccgcatcgccgtgccgttgggggtccggtggaaccgcagcggcgccgggtagaaggcgtggcccttgagctgcttggtggcgttggtgagcaggagcagcccgtccggcgtcaccgtggccatcccgtcgagggtgaggttcgcgcccttgaacccgtcgaagacgaactgctcgtcggccgccgtcgccgcgggcaggagcccgccgaggccgaggaagagcagcagcacgagcagcggaatggctaccagccaaccactaacctcgaacagttggggagcaagcaaaggccggccgaacggtttggctctggcttgtt

SEQ ID NO: 46541 - DNA, 338 bp, Setaria italica
  Peptide Sequence Number=SeqID_112515
cgccgaattccccaaaccccccacgcagctccctcctcccccgcctccacccatcgaccaccgagcggcggcggcggcggcatggagaccggcggcgaggagtttgcgatcggcgtggtgatctccgcaaagaccacgctcggggaggagttcgagggccagatcgtcgccttcgaccgcccatccaacctcctcgtcatccaggagggcgtggggagggcggaaagcggggagcggcggaacgtgagggtgctcaaggcgaactacatccgggagttctctgtggtcagcaagggtgacgacccacttgatccccccggctgcatgctcgacctcga

SEQ ID NO: 46542 - DNA, 771 bp, Setaria italica
  misc_feature (726)..(771): n is a, c, g, or t
  Peptide Sequence Number=SeqID_112516
gaccaatctacccaatgtcctttgcgcgagttgtttgttttgtttccatgacgcctcgtcatccaggagggcgtggggagggcggaaagcggggagcggcggaacgtgagggtgctcaaggcgaactacatccgggagttctctgtggtcagcaagggtgacgacccacttgatccccccggctgcatgctcgacctcgacgcgatttatgcccgggaggaggccgcgctcaggcaagcagagattgaagctgaaagaattggtgttggtgtcaccccagaagctcaaagtatatttgatgcactgtcgaagacgcttccagttcagtgggacaagactgacattattgtaatgaaggaggttcgtgtacgcagtccatacctgcctgaaaatgttagcggaggaacagctgcagcaaatgaacgcgttaagaaagtgattgactttgaaaggaaaagattacacgcccgtgtacctggccaattttcttaacttacaagtattgactaatttttacattaacccccctgttgtatctctaatattgcagccacttttctttattttcctcgatggacttttctaaaatatgtttcagcaaaaacccttgtcataataatcacctctacgagcgagttctgtactccttaatagatggcatgttccatttgaatggattttaacacatcgtactgtactactaagtaaaaaaaaaaaaaaaaaaannnnnnnnnnnnnnnnnnnnnnnnnnnnnnnnnnnnnnnnnnnnnn

SEQ ID NO: 46543 - DNA, 502 bp, Setaria italica
  Peptide Sequence Number=SeqID_112517
agacgctgtccctgggccccagatcgcagagcttggtgaccttgctgttggaggcggaccagaggtagacgcaagtccctaggccgacggcgagcatgttctgcgaggaccagtcgacgaggttgaggtagaagtcgtcctgcagggacggggcgtccaggaccttgtgcggcgtcttggggactttcctgggcggcttctgtggcgacgccgtgggctccccagatccggcggtgcagtcctggtgggcggcggcgaagggggaggtggcggcggagtggtctttcttgaatctgaagaggttggtgttgggcgatgcggggcccggggaggtcgcgggtgccggaccaggcgaatcggggccgaagagctccgcgcggaggaggcgggagtaggtggtttcatccttggagttggaagagggggagtcgaggagtcgtaagttctggaggcgggaggaggagcggcaggggatgaagcggtcgctgtaggtggtcttgga

SEQ ID NO: 46544 - DNA, 394 bp, Setaria italica
  misc_feature (375)..(375): n is a, c, g, or t
  Peptide Sequence Number=SeqID_112518
agatggccaggtgtttccaagtaaatggatgaagcaaatggcctcccagaatacaagccatacatttccatccccacccagtgtgtccacacattccttccaaaccaaccacaaacaactcccaataacataccgttgaacgttattggcatatttggtccagtcattgcagaacgctggaatatcaaccaagcgattaataggatcatcaaaagtccaaatgatatcctcgccgatgctattaaattgcatctgaaattcagaaaattcgagttgaaagctgacactgaacttggcatccaccaagatgtatactcccttgaagcggctgcacaagctgaagtaacagcagttatccgctggtacgagtaaatntatgttccatatccaaaac

SEQ ID NO: 46545 - DNA, 1095 bp, Setaria italica
  Peptide Sequence Number=SeqID_112519
agacaacaaacaaaattagaatgtatgcaaataaaaagaaatgacacgttgagctggcaagcttcccttcacaacatgcatgcacgcgagaaactatttacagggcttacggagaagggaaggaaagggaaacctacagattccagtcgctgagggcaatgtccttgcacaaaagggccacaaaaagaggcaatgaaattgcaggcttattaggttatgttataattcaagcttgcctggtgagaagaagttacatagcgaaatgatgtatcttgctcttgatatcagtggcgatgcacaaaggagcacaacttccacaacctgatccatctgatatctcactacaaggcaagaacagaggtttaagcatgaaagctttcctccttgctgtcctgaaatccaattcatatgtatttcacttggataacagtgggcaaaaccactccaccttcataaaataggtttgagcttacaaaatatctattgcccaggttgcctatcatgccagtaaccacaaccaatctcaatagtcaatcctcaatgttacttccactgagtatggactttatgtattgaattgcaggttctatccagtctgacagaggtgcgaatggcagcaaaccagccgagcatggcagaataagtgtcagcaaaacataaaatgtgtatcggcgagcccaatacggtagacgaacagccttggtcctgtcagtaacacaaataggaccattgagcatgcaatgtaaacgagatggccaggtgtttccaagtaaatggatgaagcaaatggcctcccagaatacaagccatacatttccatccccacccagtgtgtccacacatttccttccaaaccaaccacaaacaactcccaataacataccgttgaacgttattggcatatttggtccagtcattgcagaacgctggaatatcaaccaagcgattaataggatcatcaaaagtccaaatgatatcctcgccgatgctattaaattgcatctgaaattcagaaaattcgagttgtaaagtcttgtactacttgttaacttttggttctttattttcctttacctttaagtttattttgtttta

SEQ ID NO: 46546 - DNA, 278 bp, Setaria italica
  Peptide Sequence Number=SeqID_112520
accacggtcaggcggcgcggaccaaagcaaagcaccccccgactccgtatccgcaccgcgtagtctgatggcggcgactccagccacggcttccgcgccgtcccggtgcctgtccggcgccaagccgcgctgcgccgccctccgcagccccagctcgctcgccgtcgcggcgcctccggagggacttcggccgcgggggagccgcgccctctccgtccgtgctaaggttgccagtggcgtgcagggtgccagcgtggtggatgatggagtggaaaggg

SEQ ID NO: 46547 - DNA, 534 bp, Setaria italica
  Peptide Sequence Number=SeqID_112521
ttcaacctttttatctagcaggctagactggcaaagtggatacaacatgattacctaaaaaatttacaattttgtatgaagagtctgggcagttcaaatttactgaaggaaagcgtgaaagaagtgcagcacctctcaacaaataggcaggtcatacaacaggaaactaagtgagaggatcagtactgtatcagtcaaacaaaaatggatgatttttaacagacatgattcatatcaggcagaaaaaaaaaatcaagatgtcggaacaaacctagtgcacttatgtctacacgtccacttcggagatcacaaacagggtgattccccccatgatgaccaaacttcattttgaatgtcttcccaccaagagcctgcccaatcaattggtggcctaatcataagaaatctaagcatatgtacttccaactggcgatgcaaagaaacacttgaagagtatctgattaagaggaacattatgggaatatatgacgtggatacacgtgccataacacggagattaagagaagatggtag

SEQ ID NO: 46548 - DNA, 620 bp, Setaria italica
  Peptide Sequence Number=SeqID_112522
ccccgcgcttctgtgtggatgaatgcgcagggcaccaactaaagaaccttaatcagaaaacggaaggtaaatcgatccccctatctgaacatacaacaattccattcagaccggaggaccgggatggtggctctaaaccctagatttcaacaacttatgaaacaacatgaactccgtttttcttcttcggtatcatggcgtgtgatcagaattgagaaccccttctgggccagcttcgtctatatgtacagttaattatcaggttagcgcgctaaatcggtctgaagatcgtagacaccgacgaaatttcagccatcagtcgtctgccgggaggttgaggtcagggagcacgaagccgttcccagcatcctgctctgcctctgcctcttgagaaccaggctttggctttgctttatcctccgcggagatcatcccgttccgcttacttgagtgatctagccttgtctctagcttgccgttctccttggacagcgtcgtgcaggccctctgcaacgccttcctttcctcgcggagggcgtcgttctccaccgacagcgaccgcaccagctgttggatctccgggagcctcatcttcttccgcggccgctgcccggcgggcc

SEQ ID NO: 46549 - DNA, 816 bp, Setaria italica
  Peptide Sequence Number=SeqID_112523
tttttttttaattcttcaaacatttgtaattcgaattctacttcttaaatgaaaggcagtgctcctgccagtaatgttttcaaaaaaagaaaagaaaggaaaacactgtcgagttaaaatcaaggctggtgttgactactgtgctgtagactgaaatgggtgaatgtgtgattaccatcaccaaggaatttcttccccatcccatgcgaagaacttgccgttgtcacttttcttgacgttgtcaatgatggagaggagcttctgcacggagaactctctcgtgaagagcttatccttggggacattcttctgaaatggccgtgagaggtcagtgtccacagttcctggatgtagcagaatgcaggcaatgttgtccttccttccaaactccactgacacagtcttcgtcaactgattaagcgcagttttagaagctctgtatgcatgccagcctcctagaccattgtcccctatggaactgactctagcgctcatgtttgcaaccaatgagaatcctctcccggtctcggagcgaccaccagccttcagtaacggccacatgtgcttgatcactaagatagggccgactgcattgacctcataggccagcagcagagatgatttctgaactttgctcaatgtagtctctggttgtatcacgtttgggatggaaaggatgccagtggaattgatcagcaggtcaagagaaccgtgggtctccccaatcgaggcagcggcggcctctatggtgccctcgtcggtgacgtcgatcggcaggacggtgaggcgccccggcgcgtgctcctccttgagctt

SEQ ID NO: 46550 - DNA, 507 bp, Setaria italica
  Peptide Sequence Number=SeqID_112524
ccccaccagcggcacgcctcctccgccttcgcgttcgcgtacgccggcgacgggtcctacgtcgccgcgtggcccaagggccccgcgcccgtgctcgaggtggagcactgcgtcgcgcgccccggcgccgccgaggtgagggtccgggtggtgcagaccgtggcgctgggcaaggaggcccggctgcgcggcatcaaggtgttctccgagcagtggtacggcccgttccgcaacggcgagcagctcggcggctgcgccgtccgggagaccgcgttcgccgccggcgagaagctcgacgtctccgaggtgcttgggcagtgggagaccacggacgccgcggccgcgaggttctccggcgagctggaccccgagaccggcaagttcgcggagctgtcgcccgacgaaccaagcaagctgctgagggacgcggacggcatcgtggcgctgccgaagcagctgtggagcgcgttcaaggagctcggcgacggcgagttcctagtgcgaggg

SEQ ID NO: 46551 - DNA, 493 bp, Setaria italica
  Peptide Sequence Number=SeqID_112525
atgtattataaaaggcgcccagaactgatgtctttgcttgaggagttataccgtgcttatcgagctttagctgaaagatatgatcatgcagctggagaactccgacaggcccataaaaaaatggcagaagcatttcctgatgagtttcagttggactttgatgatgatctgccaacagaaactgcatctactgaatctgaaacagacaatcgtgacatgactccatttttcctttcattcatcaaggctggtgattcaaaaaaacgtgctaaagatgaccaagatcatgagaagctgcagaaagagatatctagcttgtcaaaggaaaatcaagacctcaagaagaagatttcatcagtattagaaaagagcaataaggctgaatctgaagtgagttctctcaaggcggcccttgcagatcaagaatcagagaaggaagctgcattttcacaatgccagcaatccagtgatcgactacagagcctcaagtctg

SEQ ID NO: 46552 - DNA, 479 bp, Setaria italica
  misc_feature (414)..(414): n is a, c, g, or t
  Peptide Sequence Number=SeqID_112526
ttggtagattcctcaataagcaatcagcacctgaatttgaaccatttttatctcacagtacaccttgaatgtcatgattattacatgtgtaaaggtttgttgcaataatgcattcgaaaggaaagaacaatttgaggttccaacctcaatctccaggcacactaacagcgcaaacactcagcctatcctgaattataatgcatctcttttggtcaaattgataaggaggtacttgttaccaatggtaaattggtaggttgtcattatctgaaatggacttcacaggacttaaaatggcaatggactctcaatcaactgcagcagcaatcaggccagcattacaaacattaaagcgattgaatgtttcagtgggttaacggaatcttagaaattgtctcttccattcgctagcanaccctcttgtagggtcagttgattagctgaagtacagttgtccttacatgtgtgcagtattcagt

SEQ ID NO: 46553 - DNA, 734 bp, Setaria italica
  Peptide Sequence Number=SeqID_112527
cacttttggtgtccacttaaatctgggtgggcactgggcagggcgattgcaaccccctctaccaactaagcaatcgctcggtccatctacaatgaagcccgacgacagaaatggaagtgcaagaatctgctcaccattccaaaaccccactatcagtctagttggtacatagcactcatgtctgctcaatccagctccatcaatgacgaactgaaggtgttaaagacaaaagttttagtaactgaacacctggttgagtttcagcacgcaacattcattcaccgaacaaatcggaatactggatgcagaccagctacatcagactcatctagcatgtcaagccaagaatataatttacggtgagaagaatctgaaatgaggatcctaacgcccttcaagatgactaaccctgagatttcagtttctcctcagattgtttagctgcacaaagacgcagttgatcagaagaggaatgggaagaagcatatcacagtgtccctccaatctcacgattgcaaggtcccaaatagcgtggggcgatcctctctcggcgccgcagaaccttgcgcctcttgtttcacctccctggatggtggcggcgtgggcaatggcatcgatgttgccgctgccgcagcggcagctgcggcggcgaacgccagcgcaggctgctgcatggcgttgagcttgagcagcctgtccttgtccctgttcgcctcggtgctcttcggggtctt

SEQ ID NO: 46554 - DNA, 873 bp, Setaria italica
  Peptide Sequence Number=SeqID_112528
aaatcgatcttcgtggagcctccatttgctttggaatgcccatcacacgatgcacaacgcctatcttatctctcccaaaaagaaacacatatatttggtcaagcaatgcagatagtacatcatatagacatacatacattcatctttatataaacatacgcactcacactatatccctacaagtacctccagaaactaggccgatgaagtaatcataggaggctctattgatgaatatgtcacctacaattgaaagtgtaaaaacgctgtaaatacgagcacccatgtggcgtaggggactcccaaagaggcatgtttcaccactagcaattgtagaaaaaatgcaaggaaaatatgaaccctgataacattaacatatttcctttctatctgatgacatatattttgagaaaataaagattaggtgagtacgtggaatatttataaaattgtaagtttgatcaactatttatgaattagtacatacggacttaccgcaaatttagcataactacgttcttcacgatggaattggcctacctgaattcaatcttctgaattatcatggtgttcatatttacataaattattctttccgtggtaagtgacgtgtccatggatataacagccctatattatgggtgtctatatacaagtgtctacatccatattatattttgaaaaaaatgcataccacttattgtcaagacttatttgaaaagggagccaaaagcatacttatattagacttttctcccatcacactgctggggaaagcgccttagtaccggttccaaacccccttttagtattagttgtgtaactggtattgctactaggtcaaataaccaatactaaaggggtattaaaaaa

SEQ ID NO: 46555 - DNA, 313 bp, Setaria italica
  Peptide Sequence Number=SeqID_112529
cggagtcggacgcgtagcggggaccctccatgtacgcctgcacgaacgccacgcagcgcacggggatggcgccccagggccccgcgttggccgtctccacggacagcctccagctgtcgcagaagagcgtgtcggcgtcgtcggaggaagccgccgtcggggcgtccgtgaccgtgcggaggacggaccaggcgccgctcgcggtcgcggcggcggacgacgccgcagcgagcgagagggcgaggacgaggggaaggagacgcatggcgccgccgcgggggacgcggatactcactggattgggcggggcggg

SEQ ID NO: 46556 - DNA, 407 bp, Setaria italica
  Peptide Sequence Number=SeqID_112530
aaaagctcaagtctgtatctacactagcatcagaagctgaactggtgcacgagcttctagcctcctcgtcagtgttggacaaggcaatggagtggtctgaaacagaggtgaagctgaatctgcatggattcagtacaatcgctgcctatgtgttgatgctgcagtgggtggatgtgattaagggccgtacgttaccgttggaggtgtctgttgtgtgtggcattgggaagcacagtgatgtccgaggtgaacccaaagtgcgggagctggcacaggaggttctgagccggatggggagcccccttcggctatccacaaggaacaaagggcgtcttgtggcaaagcgagatagggtgacgcgatggcttgccagccttccagtgcctgatgaggtttcagataaatca

SEQ ID NO: 46557 - DNA, 1154 bp, Setaria italica
  misc_feature (1106)..(1154): n is a, c, g, or t
  Peptide Sequence Number=SeqID_112531
cgtgtctcagctcagtcattgaggcgatctgtgatcgagttcctcttgtgtctccagagaatagtagcgtgagaacgagggttttcaatatggcgtccaggatcgcactcctgtgccttcttggcttgctggtagcatcacctgctattgctgactccggcatctactaccagcttgaattgatgtggccaggggcgtactgcgagcagagcagcgccggatgctgcaagccgacgaccagcgccaagccggcgcgcgacttcttcatctcgggcttcaccgtctacaacgcgacgaccgacgctccggtgaaccgctgcagcaacaaagctcctttcgaccctaacgagattacggacatcccaggcctgaagcagtactggagcaacatcaagtgccccagcaacaacggccagggcggctggaagaacgcctggaagaagtccggcgcctgctccggcctcaaggagaaggacttcttcgagaaagccctcgagttccgcagccggctcaacccgctcgttcgcctccagaaaaacggtatccagccggacttcgagctgtacagcttgaagaagatcaagaaggtgttccagtcgggcatcaacgcgacgccgctggtccagtgcagcatgggccccttcaacaagtacatgctgtacaagctctacttctgcgcgacggagcagggcacgttcatcgactgccccgtggcgcccaagtacacctgctcggcggagatcctcttccaccctttcaagaggtggatgctccagcagctccagggggaggacgccgagtttgccgccgcggccgacggcgacgaccaggacgccttcgtgctgcccggcgtggccatggatatgtaaccgatggatcgatcggaagcatatgcgtgtcgtcgaggagagaccccacctgatctccgatccatccagatcgtctttcaattcgtgagtttgcgtttcggtggcgtacgcgtgcatggaataatgtcgttgttcctgctcccccgagcaaacaacaacgcagtgtagtaatatgtgaaaataattaaacactgagacgtacgaagacaataatggtacggtgatctcctcctcttnnnnnnnnnnnnnnnnnnnnnnnnnnnnnnnnnnnnnnnnnnnnnnnnn

SEQ ID NO: 46558 - DNA, 437 bp, Setaria italica
  misc_feature (1)..(71): n is a, c, g, or t
  Peptide Sequence Number=SeqID_112532
nnnnnnnnnnnnnnnnnnnnnnnnnnnnnnnnnnnnnnnnnnnnnnnnnnnnnnnnnnnnnnnnnnnnnnngttacagtaattaccagacacccgcataatacttgttggattacagcatctgatgagttaggcttagacatacactaccaacccaatcaaagggcgtcccccattacaacaatcttacccgggattctagaataaaacagctcaattcttaagctcagggggacgcccatcgatgatcaacaagtcttattacgcggcaacaacaacagcagtagcaactacaacaggcatacaacaacacattctgcgcttaggaaaccattaagaaggcgatgatgatacattactgctgagggacatagtagtaggcaagcgggtcggtagcaggcacgccggcggcggggcgcgggatcccggcagccgcag

SEQ ID NO: 46559 - DNA, 665 bp, Setaria italica
  Peptide Sequence Number=SeqID_112533
tgcgagtggtagcatttttctttcaagtttcaattcctcaacaaaataataagtttatgtttctgttagcacagaatgaatctaagtttgacagttaaagcataggcagattaatctaagaagtgatatgaaatagttcgccatgatttggtggacaaccaaaagcgagtaagcgactgcaccctaagtggagattgcactttgcatctcaaccatttccatcaggcacattgtgcaacataacccagtaggtgacataaactttaaacattcatattctatagacccagaaaagatatgtaactttacatcaccagcaaactaaacatgtaatacgtagttgaaatgtggcacagtcaaactaaatccaaataatagtagggtagggccatgagagtaaaatgattgaataacagatatcctgtagtttttttttttaaaaaaaagaaggttcatttcttacaaataagtcctttatgaaatttccacagaaataaatatttcaaaagtgctcaataatgttacctctctccatcacagaacatgatgtcaaaaacaaacacacaaatgtcaacctgcagagtggtcaatcattaccaggctgataacaagattaattagtggactcagctttcagttaaatatatataaaaaaagagtgctaa

SEQ ID NO: 46560 - DNA, 1247 bp, Setaria italica
  Peptide Sequence Number=SeqID_112534
cgcccccggggctactccgtcctcgtcacgggagcggccgggttcgtcggctgccacgcggccgccgcgctgcgccgccgcggggacggcgtgctcggcctcgacaacttcaacgactactacgacacggccctcaagcgcggccgtgccgcgctcctcgcccgctcgggagtctacgtcgtcgacggcgacatcgcggacgccgagctgctggccaagctgttcgacgtcgtcccgttcacgcacgtcctccacctcgccgcgcaggcgggcgtgcgccacgcgctcgtggaccccatgtcctacgtgcgcgccaacgtcgctggtctcgtcgcgctgctcgaggcggcgcgctcggcgaaccctcagccggcgatcgtctgggcgtcgtcgtcttcagtgtacgggctcaactcccatgtgcctttctccgagcatgacaggacggatcgaccagcctctctctatgcagccaccaaaaaggctggcgaggagatcgctcatgtctacaaccacatctatgggctttcactcaccgctctccgattcttcactgtctatgggccttgggggcgtccagacatggcatactttttcttcacccgggacatccttgctggtcggccgatcacggtgtatgagagtgcaggtggaggctcacaccagactaccatttccagggatttcacctacattgatgatattgtgaaggggtgtgtcgcggcattggatacagctggtcggagtacaggcagtggtggcaagaagcgaggcccggcaccattcaggacatacaatttggggaacacttctcctgtgcctgttacacagctagtggatttgctggagaagctgctcaaagtgaaggctgtgaggaaggttgtcaagatgccaaggaatggagatgtgccgtatacgcatgctaatgtaagccttgcacagcgggagcttggctaccggccgtccacagatctccaaacagggctcaagaagtttgtgcggtggtatcttgagtactaccatcctgaattggctgagaagcagaagcagtatgccggtagcaagggcaagggttcacgtggtcataacggcagctcgagcagtgcaagatgactgtctattcagtgtctttgtggcctctcctgacggtgtgtatcagaattctacctccattgcttacttcatcagattgagaggctcattttgctcagcacattctgaaagtggaacagaagttaaggaacaat

SEQ ID NO: 46561 - DNA, 1260 bp, Setaria italica
  Peptide Sequence Number=SeqID_112535
gtatccgaagatcaattttgccctttctttctttcgcttctttgaggtgttggtggcggtatcgcccacattggtcgctggtgcagcaggtggggctacgggtgctgctactgctggttgaactgcaggggcaaagggtgggaaaaccatgggatgtggatgcattggtactaaaaacattccttggggcatagctgctgaggcaggcgccatagccatcattgttggtgctgctgccattggtgcagatggcaccactgtaacagtagtcactgctgcagtcgtaggtgttgacatcgatgctccattaccaacgtcttctgtggaggatggctttgaggacttagcaccttttttaccagcagaaactggactctctccaggccttttctcttttcgggactcctcaaacttgcgcattttctctttagcttctttcatcacagaaaggacgtactccatcgcatcagggtcagtagctcccatttccacaatgtcagcaaagtactggtgtccgtgcttgtagagattgtccaccttatcttcctgaacattatctggttttgtgcccttccctgtagcttttgccgcatttggtgaaatgggggtttccttaggttcctcggggcatttgtaatccttccgccatcgatcaagaatatatttgggaggtattagcatcacaagctcttgcctcaagactgcaagagcatggctacataaaatacctttaaactgaaatgacctgcagatgcaccaaacttctttctcggcactgttatacatcactctgtagtcaaacttcctctcctttccaatcactgtcacagtgtaagtcactactgaaccactcctactgacttcagtgcagttcacattcatcagctgcttcaactgatcctggaatttctggaacatatttattgtataaacatttgcaaattgctcctcaaaaagaagaccagacaggacttgtggcctctgttgaaatgaacggaaatcatcataggcttctcgatcagacctgagcttcatagcagtatcaaattgttcaatgaatgtctttattgtggtttctggggtaatatatccatcaaaaaaggcctccaatctttcgctacgccgaactgtggagataccagcccagaaagtatcctttacatatgctggtacccatttcgctctctcttcaaacaaggttgtaagccaccggttatcatgaagattgttacttgtatttgtattctatttctaacccta

SEQ ID NO: 46562 - DNA, 527 bp, Setaria italica
  Peptide Sequence Number=SeqID_112536
acagttgtttgattttacattaacttgatctcttaccatactgttgcataccagcaactgttttgatttgcagtttcacaaaaaaaaatagtttcattttgtctgaaatcaagttccgcagactgcttctcgaattactgcaggtacggtgttcataggatcagagaagaaaacttgcctctggatcggtcaggttcccggatggaaccggggtcgcgacgtggaaaaccccttggcaccgcgcgatcgcggccgccatggcgccgccgtcgaggagatcggccctgaaaagcctgaggccttggggatcagaggcgcccggcagccgcttcaggtgcgccgtcttctcgtcactgaggtcgcggacggtggcgtgcacggcgtagccgcgggagaggaggagcttgacgagccacgaggcgatgtacccgccggcgccggtcacgcacaccaccgtcctcccgctcgcggcggcggcttcagctccctcctccgcacgcgcggccatggcgttcggctcagctctg

SEQ ID NO: 46563 - DNA, 1294 bp, Setaria italica
  Peptide Sequence Number=SeqID_112537
gggtccctaatatttgacggtgcccatcttggttaatcaccacttcacccgcagtgttgttaaaaatagattccagaagaatttccaaagcagcttctgggagtttggaagaaaagttagaaggtgccggtggattgttcacttccatggtgttcccgcagatgcaggccttcacgacagacatgcgattggttgttagtgttccggtcttgtcactgcaaatgatagtggctgagcccatagtttcacaggcagctaattgtcggaccaatgccttgtcgttcatcatcttcttcattgcaaatgcaaggctcaatgtgactgctaaaggcaatccctcggggacagcaacaacaatgattgtaactgcaaccgcaaaatgttgcaatatctccagcacatcatctccagaccagcttaaaagaagacaatcaaggtatttctgggcaactaacccttgtgagaggacaacgaaagtcaagagggcaaaaaatagaccaatatttccgataatagttgcaactccatttagtttgacctgtagtggagtttcatcatccccactttcagtgatggcagccattagtttaccccactgtgttcgcatccctactgcagtaaccaacattttgcatgaaccgtctagaactttggtccctgacagaagaaaagggttatcttcatttacgaaaacaggttcactctccccagttaggctggactcattgatcaatactgaatacccagatataaagaggccatctgcaggaacctgatctccaactgctaggtggacaacatcaccaggaagaagatcatctatcaacatcctttgtctgaggctgtttcttgtaacttgaacaaaaattttccttttctctttgtccagatccctgaattgcaaagactgctgatagttacttgttgcagtaacagaaacaaccaggaggatacttgtaatgattccaatgccatcatgcgcaccttttggccatccttccgtggcaatgccaacaacaaaagatacgagggcacatgctataagaattacaagagtggtatcttgcagtgcttcccacacaaactcccataagctgcgggcttcactctctgtgaacttgttcactccgtatatgtcctgcctttgatttaggctgtactcagctgtattaatcccatacgtcaacgatgttgccaacttgtctgcaattccatccaattggccatgcacagccaactttttagtgtcacgactttcgacaattgatgccagttcatcggcagaaatctgaaa

SEQ ID NO: 46564 - DNA, 2393 bp, Setaria italica
  Peptide Sequence Number=SeqID_112538
ggcatatctatgcaaatatgaccatcaacgacaccagcctaccaccctcttttatctctctacataccaataacacatttatcttttcttcatctatcccctccctctctctacaatggcaactacacctgtactctccatccgccgccaaatgcccaaatctggtaccgccttctctccacagaaaaccaatctatcaatgggtttgatgtattgctatatgctatatgtacatgtaatggaaagccagccagccatctattctcctctctaacagccacatgcatccaaggaacatcacagggagcctttcttcaggagtggatttgtcatttaggcacaaagccaagcgatgcatgagatggaaggactgcttaagctgggtcaaatggtgggaagaaatagttgcaagaggaagagcctaaatgatccaaggactagcaacacgtggaaggtggaaatgcacaggaggttcctttgtataccaagcttgctcaacatgcctaatagagggttataccgagctggtgaaatgctgtggaggctgcaatattatataggaacaatttgttggtgaaatattggcaggtgatgctaccaggaccaaagaactgagtaccagacctcaggagctggagacagcatagtgcctcacagaatagcgcaagacctgtaagctagggcagatcatctccttcactcttgtcccatccttgtaaatcttgaaggttgggactacacgcacattctctgctcttgctaccatagggctctcatcaacatttaccttcaggaaattcactgaagggcactcggagcaaagggagtccaccgacggggtaatctgtgcgcattgctgattcattgttgccatgaagtaaagaactgatacaccaggtgaatggatagcatctcggagttgctctaagctggtaactgcctcaacctcccctccaaacttcatatttgacacctcctctccatgggtggtcttcaatgcgacttgtgcacggaataaagactcctcaacctctgtgtcaccaggaagatccttgcgcagcagctcatagtctcgcacacaatcagcccaacgctcaagctttgcataggatgctgcgcgtcttaacagagcctttgtgtagttaggttggactcttagggcctcattgcagtcctcaacagctttcgcccaccgacctaacttcgaccagcaagctgcccgattacagtacagtaccggattcgagggctcatatttgagcccttctccataggctatagatgcctcagcaaacttgccagccttaaaaagttcattcccctgggctcgagcccttgcaactaatctcacgttatttaggatcacttcaacctctgggtttccacaatcaataactctagccttctcagctaatgcaacagctgaatcaaaccttccgaatgccatgttgacctgggcttggacaacaagcacgtaagaatcagccgccatgcctgagagtttggttggcatcgaaggtagtgatgcattgtccaatttcaataaacttgtaatagttgaatcagcttcctctaacttgtgcaaccgaagaagtgcttctgacctcaaggcaagaagcaattgagaggagtcagccccattggcaattgccgcatcagcctcccgtagtgtgctcttccaatctccgattttccttgcatccatgcatctcccctgatggctttccacctcatgcagcttctgcaactcagcatgatcagactggtttacattcccagccagtgtaaagtgcatccttgccttgtcaaccatcccaagccggagagataagccggccaggcggccgcgcgcacggccgctcgccggatcgagacggacggcctcctcacactcgctgaacgcttctgccaggcggccgagtccgatgagcgcggcggcgcggttgccgcggcaggcggcgctgtccgggcatagcgccacggcacggtcgtagtgctgcagcgcctccccgtagcggcccttcttgtaccgctcgttcccggcgcgagtgatttcttgaagaccagcactgctggccggcggcggcgccgggcagctcgccggagacctcgaggagttcctgtggagtggggccgcgtcaatgctgcttctcggcgggggtcgctcctccggcacttccaccgccgccgcgcatgatgctgccgtggccatagtgccccgtgccggatccgagcacgaccgagcgagcgcgcggcggctgcggcgcggcagccgcccccgcgacgcggccggacgggcagatgttgccggtggggagcgcattggtgagtggcgagctcgcggtgctcccgccgccgccgcaccccccgacgctccccgcgctgctgctgcc

SEQ ID NO: 46565 - DNA, 497 bp, Setaria italica
  Peptide Sequence Number=SeqID_112539
tgtccctattttgtaactagttctattccatcagtactcaacagccactatgactgtaactctgtaagcccataggagcatattttgaattaaaggctaacatcatttaggaaagagcaaaactgctcggtaacattacaaggattatggactactcaatatgagattctacagggtccagcacgaatgtgctagacaagctaatagaatatgcatagatgttttttggctaaaattacatgtgaaattcttgttctctggtggcgaaacaacagctgattgtaatcctgttttatcagatttggagaagctctcagtttcgctctaggaaataacattggtgtcccaatgagaagtagccacaggccccgcatgtcaatctcattattatgtagtgatccagtcgcaaaactttgcagtgttgctgaactgatttcaaataacagacaagggacttcaatcctatcatagaattaccataatactttctcatattt

SEQ ID NO: 46566 - DNA, 346 bp, Setaria italica
  Peptide Sequence Number=SeqID_112540
ggcactagatttagaaattggtagatgataaatgtagaggtaccaaaattatagatcagaacagaatttgaagttcatttttcctgaaaaaaatactctgtaatatgtggcatttgcttttggcatcaagcttctcaatatgaatgccaaacttgtcagattccgatgatacttcataatggcatacagtacatggaattgcttattacaattcacaagttgggacttgaatccactagactgctgcatcatctaatacgaactaaccatacagcattgtacaagtgacgtcaatacactcgttctcacactactattgaaacagacttcgagaaatagaagcaaa

SEQ ID NO: 46567 - DNA, 193 bp, Setaria italica
  Peptide Sequence Number=SeqID_112541
gacgcgccctactacgacaacgagtggaacaacggcacctccttcttctacaccccggcgcgccgctcctgccgctccgccgccgtcggggtcggcatcctccgccccgactggctcctgcccggcgcggtctacctcggacggcgcgacgccggcggattcgactgccacgtctgggccaaggccgacttca

SEQ ID NO: 46568 - DNA, 713 bp, Setaria italica
  Peptide Sequence Number=SeqID_112542
aaacgaaagtaaggaaaacaaaacggaacaaacctaaccttaacttactaacaaccccggacgcgccgctcctgccgctccgccgccgtcggggtcggcatcctccgccccgactggctcctgcccggcgcggtctacctcggacggcgcgacgccggcggattcgactgccacgtctgggccaaggccgacttcatcacctactacgaggatgtcaagaccaagcggcccgtcaagtgggtcttctacacaggtaggatcgcctacgtgatgaactttgaggtgggagcagtgctggaggacgcggcatggcaagctccagagtactgcttcaacaaggatggtggcacaatcaccaaggccgctgatgggcatgatgacagcttcatccccaggaatgtgttgtgaggatttatcttccactggtgtgttcgccctggtctccggtagagctctggacattgggatgtcgtgtaacaacttgaccatacatgcttaccctgatcatgaaaataccagtggatccagtaaacgtgtatggtcgattgataccagtgtttgtgtgttgacatgaatcatcggtctcttctcttgtgcgatgtgtataaataattgtagcaatagaagtgcagatgggatggacctgtatctcgttctatcagagagtgctggggcctgtttggttacccagcactaataaactaaaaaaaaaa

SEQ ID NO: 46569 - DNA, 309 bp, Setaria italica
  Peptide Sequence Number=SeqID_112543
gcatccgcagtacttctactcccaaatcatgtgcattgccttccaagagggcgtccctcagttgctccttggaaactcccaatgcccccacaaccatcccaatgccatggcacctgggagctccgagcaaacacacctgcctcggtgccgcaactgccgccgaattgttgaggtatagctgaatcacctcatccttcatgtgcaaagagctgggcttgagcttgtccgagtgcaaaggccgacgacttgcgcacgtccttgtcatcggagtcgccatcaatctgacgaagcaactgctgctcgaggagg

SEQ ID NO: 46570 - DNA, 1387 bp, Setaria italica
  misc_feature (1)..(25): n is a, c, g, or t
  misc_feature (1378)..(1378): n is a, c, g, or t
  Peptide Sequence Number=SeqID_112544
nnnnnnnnnnnnnnnnnnnnnnnnnctagagacgacataacgataccattaccagtaaactttatacaagccagcatgttcagcatacattatatataggacgacctcgcttaacatagcataacattgttctcatctactgctaacactaggaacgataattgtccaaatagcttgatatgatattctacaaaaagagggcggctgcagatttcgccttaacagctcctgcggcttaaggcgtcattcccatgggcgcagccgtccagcttgcggttgtcgcaccaacccaactgttgccactgttctccccggcttccttgcagatccgatccagcatagctaggaactccctcactccagcaaaaattctcagcatgtgagcttcgtcattggccgaaccaccatggaagtactccaccaactccttcaccgaagacaggcatatgctctcctgggactggagcttcaggatctcctcctcagcttgcctcaggaacgtgctcatgctgttgtggaaacgccgagcgctctcggctgatgtgaccatgctgttcagcctcagcacgtcatgaaccttcccgagccccactccaagctccgacacacttctgctgagcatcactatgtcgatggacgcagctttcttcgtgttgctcagctcagatgcaagtttggagacaacctcaaggccgtgcttcctgcattcggtgtcacactgcagactgtttgtgttcgttttgtatgtggctgacccatgctgcatcaaatcatatccttcaggtttcaaaatttcctggacaacaaactgcacaagtgcagccttcccatcagcacctttcacatcaacaatcttcagaacagtgtttggctccaagccatgtgaacttggagaccctgcattgatgctcatgaagttgccgaaattcataacagcctcacggactttgtggagcagcctgctgcttctcatctcctggcaagcaccctcaagagtagcatatgacagccttagctgattgacctccaaatagaaactggcaatgtaaagcatggcatccacccttttgaacgcaaacggcacatccagtattgccttcacaaaagactcaaccgggcaaagtctggtcagcgaatcatccttgaaatatttcagcttaagctcttcttcattgctgaggaccatctgagcgagcatccgcagtacttctactcccaaatcatgtgcattgccttccaagagggcgtccctcagttgctccttggaaactcccaatgcccccacaaccatcccaatgccatggcacctgggagctccgagcaaacaacaacctagacctacggtagaccgacaaactagaccgaccgaattagttanaaggtaata

SEQ ID NO: 46571 - DNA, 347 bp, Setaria italica
  Peptide Sequence Number=SeqID_112545
tcaaacggtacaagtagagagagaaagagagcagcaccgtgcaccacctcgacccagcccatccaccagagcaagcaaacggctcctcctctcgccgcaagcgcacgcgcaccgtcggcagcgcggcccgcggcactcggcctccccgccggcctccttgttgcgcgcgcctgggggctgctcggccggatcgccctcccctacccggccgctctgatccagtgtctattttccacacgaattttgtgagaaggcctccagttccttgttcaattccaggaatttgtttttagattatacagcgagattataaaatgggtgcatcaagaccaccaagcactcctgca

SEQ ID NO: 46572 - DNA, 1408 bp, Setaria italica
  Peptide Sequence Number=SeqID_112546
aaaaccaattcgaggcatctgattccagcaaatggtaagcaaggaaatgatgtgttctaacaaagcaggcttcagcaacccaccaaaagtacacatacattcagattacgtcagggtgccaaactgcaaactagatacagctaaaattggtacatgccgtcaggaactcaacgcatggtcaacgaagtacctacatctagatttcaacaacaaactacaagccagcgtgttcatcagtttatgtttccccagatagcttgccccgaggtccccttgttgcttggccttgcagtcagttcatataggatccgagcaaaggtgtccgagtatttcccttctgttgtcaggatctcagcaaaagtgttctcatgcacaaggaggtgcatcctgttttgaggctcggagacgaggctctccagtatcattgacgtcttcctgcagacctcaggcacaggatgcggcgtcttcacaatctttagaagtctgtcgacagcccatcgctcactggcaagctttagcctgcaatccatattcacttcagctacattgtagagtgcgctaacagcagcagcctgtgcatcatatgctggcatactcaagaggtcaactagccgtttgtatatctgtggaatgacagggagaagaaatgactcattatctggatttattatcagacgcccaatcagttcagcagcggcacagtgccacggcttaactgaagatgaaagcatacccattatggcatgaactgcacctttttcagtcattttaatgaatgatggcttcgatgagctgaagattctcaagtccaacacaggtgctaaattgacaagggtttccagcatgtttgttacgagttcatcatcttctctattctggtcttctaagcactgaaatacagtctccaagcaatgcctatgttgaaccatgatagtctcattttctggcataaaagagaaattacggattatattggagactgctatagcgcactgctgcctttctgccctcccttcatcatcattgttaaacaagccatcctcatcaaaccaaaagcttgcagagcgcttcttcgtgacactggactcctcggtctttgattgatcattagaggtagtgccagtgtcagagtagactttttccatgttctcttgaccaaagccagagagcgttgtgttggcacccaaagttcttactctgggtggtttgagatggtccttaggcattgcaatatctctccattcatcaataacttgaagaagagcatctaagagcccaggaactttagcaagaggtgttgtatcacgtcggaagtcatccttctccttaaatgagagcactgtaagggcattcagtgcccacagtatctctgatttcaacccatttgcaatgcaaggacaattacttt

SEQ ID NO: 46573 - DNA, 340 bp, Setaria italica
  Peptide Sequence Number=SeqID_112547
ttcttaagagacgcgatcattgctttcttttcatcctccgagtattccacattggatttcctcttctcatcatagtgtccatctaaggcagagctcagacggtgctcatgaggtcctaatagggcttctgccattactgggtcgccctatcgtacctgctttggaggtgggcgagagaagacgacgcggaggaggaggagaaggaggaggagcccccaaaggcgaggcgagcggcggcataataagcagccgaggaagccggcgcccaaccgccgctaaccgcccctgacacgcggggccctggcacgcacagaacacacacagaacacgacgtgtgcgc

SEQ ID NO: 46574 - DNA, 280 bp, Setaria italica
  Peptide Sequence Number=SeqID_112548
tcgatgcgatagctgaatagaaaatgccagcttttgttgttacaagtgtacgctgccatgtgcttcttgcctgacctgaagtgtcctgcatcatggggatcccaaaatgtatagttgggttccacagttataatttgatttcgacctggtttgaaaagcttggttacatcttgatccttgtgtattactggactgatttcctactttaggcatttcaaatccctggaccagatcagttcctgaaaatttatggtgctagttgctggccaagaagcaaggc

SEQ ID NO: 46575 - DNA, 635 bp, Setaria italica
  Peptide Sequence Number=SeqID_112549
cttattatatatatatatatatatatatatatatatatatatatatatatatatatatttattctagagcctgttgttgcagtgtgtgggtgtccgttcatagagaaggaaggcgaaatatcaaccagcaacctgtactctgctccatcggctatcatcgttgtcgatccggtgaatgtagctgtactgattttctctgatgtaagtcaccgcagaccatattcctcgaacaagaaggatgcttgcaaacaccatgcttccaaatgtgcagaccacctcgagaagacccttcaggatccataagaatgtgaggacgagcacgccatttaccgagaactttaccagctcggctgggactgaaggcggcagcacggacctggcggcgcggcgcgcccggcgggaggccttcctgaacacggagtgcaggaatcgggccagtaggtccaggctgcggtcctcgtcttcgtcgtcgtcctcctccgcgtcgtcttcgtcctccccgccgccttcccggtaggaagcggtggcgcccgagagatcgccgacccaggggcgggcgtccgggacgacgacgacggcgtcggggtgtcggcgccgagcggcgcggaggaggcgagtcgtaggggagaggcgca

SEQ ID NO: 46576 - DNA, 397 bp, Setaria italica
  Peptide Sequence Number=SeqID_112550
atcaacaagtcactctcaactttgggacttgtcattacgaacctcattgctgtatcaaacaaaaaatcacaccacgttccctacagagattcaaaattaacattcctcctccaggattccctaggaggaaattcaaagacgactataattgcaaacataagcccatctcattgttgtgctgctgagacactaagcacattgaagtttgcgcaacgagctaaatacataaggaataatgctatcattaatgaggatgcctctggtgatgttctcagcatgcgcttacagatccagaaccttaagaaagaagttagccgtttgcaaggactagtaggttctgataaaaactgaaggccttggttctcatggatttgtctgtgagtctcctagcatgttc

SEQ ID NO: 46577 - DNA, 424 bp, Setaria italica
  Peptide Sequence Number=SeqID_112551
tattgaaaggttctgggcataaatgactcgattttgacatcattcccaggggcacaacaacatacagtactcttttcttcttcttacttcttttgcccctggcagtaggatgccattcagttgggcaggttcagggtttcccagacttggagtgaaggatcctaagccgaaaattgtcaaccaaacctgagaaaccagatagcctctgatgctataagttttcagtatctctcttttgctgataatgaagtaatggtctaattccaagcacagataatgagcaagataatactccaaccttttatgccaatctccatccatcatggtagctctctgttgcgctcccagcaatgcaaactcaaatattcaaagctatgattatggttggggcgtcaaattaatggtgcataaaacactgatcgtg

SEQ ID NO: 46578 - DNA, 400 bp, Setaria italica
  Peptide Sequence Number=SeqID_112552
atgcaggaggagctggagctaaccgaagcctggccaaacaggcccctggtctatgtatcacagtaaaatggacaaatcggcgaaccatatcagaacaaacaaaaggcaaaatgtagagatcatttcaaagatcagccatttatcaagccacgatgcgtgctaacacagatataacctgagaaaaaaaattgattgtgcaatgcatccagcttcttagcatgaaatcttgcttgtagtcgcatggatgcaaccaatagtgatacagttcacactgaaatttctatcatcaggattatattagatcttttaatattgtcgatcaattgttagaattatgttccacaatgacattattacttggaccaacaggcttgacctgcatcgagtacagcctacagaa

SEQ ID NO: 46579 - DNA, 575 bp, Setaria italica
  Peptide Sequence Number=SeqID_112553
acttagacaatacttaggtagtacttagtcccaaaggaagaaggtgtagtgtgcgaagcctgcagcggcgcggggtggctgctctgcgacttctgcaaggggaagaagaacaacgtcaagtccgagggtacccgggtgtaccgccgctgcccgacctgcaaagccgcgggtttcatcctgtgcccgagatgcagggtgtacaagtgcatcaccttcccggagagcaacgagtcgtgacgggctctgagcggctaccggggtatctgatcatgttggacattttcgctgccttacttttttcttcctgatgactgcgttgtggatcatctttcaaccttacagcattctccgtagtctgtacacacatgttctgaattctctgtagtctgtacacacatgttctgaatgtcaggccactgctgttctcctagcttggtcttttcgaattatcagtatgcagaacatgatatgatctttcgtagtagaatgatgcgtgtccatctttcgtccattgtactgctattgatttgagtccatttgactccgtctgttggaccaaaaaaaaaaaaaaaaaa

SEQ ID NO: 46580 - DNA, 395 bp, Setaria italica
  Peptide Sequence Number=SeqID_112554
acaaccacagattggtttggtttgttgctgttgccattcatttggtgttatgttcatcaaagctgtggttttgcattgcttcataaaatggtgcatgtacagaggaatatgcacagtaaaaggtgcatgagcatcaagttttagttgtttgcatacagaagcccatcggttggacagagacactagaattagtgtctgcacatgctcactagttcgtgttatgtggccagatacttccaactcagcaaagagtttccttatgaatttatgactattgaatcttgtgtcgaagattgattatttgttcctagttgcctgttagaaaaaaaagatttagcatggtgtactttctggaaaggaattagcgttgccttaaattactagtgcgactgagt

SEQ ID NO: 46581 - DNA, 513 bp, Setaria italica
  Peptide Sequence Number=SeqID_112555
aaatgctttatcatacaggaagattattgcacgtatggcttaccacaaaccttgtattctttgtgaataattctgtttcaccactagtttttttaatctctacgagatataattagtttgcccacaaagttaactgagaatttttacaacaaacagaagtaatcttattgtgtttgttgaaccacatctctatttgtttctctaaccaaatattctgtatatatgtgggattaacattatatatttgacctaatcctccatgtaggcagccatgccgattagtttcttataattatctgtggccatgtgattggatataatttagtgctttctagtgttattgtttggaaaggttttacacacagaagaaaacaaccaattggaagcactagaaacactgttgatctaagtcttattctcagaacagtaacaaccacgatcttctactccggcagcgatccagagttccatctcttgctggggagttggggacgtgaacccttgaatacccag

SEQ ID NO: 46582 - DNA, 465 bp, Setaria italica
  Peptide Sequence Number=SeqID_112556
tggccgatttctctgctgatcaccgatggaaacaagcaacctgggacttcgatggaaaacagcagaacgccggggaccggaggcagcggcgcccgcggtgccgtccatgactcgtgttgttaccggagcccttgctcgtgatggctgaagatgggctcccctctttccccttggaggcagcggccatggacggtagcatcagcataattgcagcatgccggtcgctctctcggctgcggtcgtatccggcagcagagaacccaccgtggtggtcgcttgaatgctttctccgttccaaattactatttatttcaatttttctagacttatattttttgaattttttaaaattgatttctaggacggtcatatgtagggacgggggcagacctactcctaaaaatcgatttgtagatgtgggtatgcacccacctctacaaatggtttatttttagctacgagaag

SEQ ID NO: 46583 - DNA, 462 bp, Setaria italica
  Peptide Sequence Number=SeqID_112557
caagatgtgttcgtgcttataatgcgttaggatcggatagttcttccaatgctaccaccagtatcgctgctcaatctcctggtgctgcagtgaacgttagtggtagtgtgccttccagttccagcaatggaggtttcagtaagcttagcttgactgcactcatggccaccggcattggcaacgcagtgctcatcacggtctcgctagccatctccgtggccatgttcgtctacatgaggaggaagctccggtcggcgaaggacgcctccgacgcggcactctgcttcgaggagcaagagaagagggcgaacggggacgacaagtgccagaagagcggcgggttggtctgcttcgaggcggcgaggagctgcggcgggagagcctcctcaaggcgtccgccgaggtgctcggcaagggcgtgtccgggagcgacctacaaggcggtgctcgacgacggcatcg

SEQ ID NO: 46584 - DNA, 649 bp, Setaria italica
  Peptide Sequence Number=SeqID_112558
actgttgcacctgcacctgtctgtctgtgtatacagacagtattagatatcaacaacacgtaagcttaatcgaggattcaaataagcgtttcaggtgcaggatggaaaattttcaagaaaggcaggtggtaaaaacaataagcgatcacagaaggtagtgatgatatcagtagcagctagctggtctgtgccaaacaattaaataagctcaacaagctcacaatagacctatggctccgtacatgcactgattatcgaatgtgatacactaactaataattaagtgttgctgtggcacattcctcacaagggtggaatctgactatcataatttgttaggaaaacacataacataattttacaaggaaaagtgtatggtcccaaccttatagattatttgaatgcaacatcctcagaacctctcttttctcatccactatttgttcatacttcatactagcttgccctcttactcgtataaccttttttcctagcttgctgaagcaatctaagtggaaatatcatgattatcaacatcaccattaagaaacccattgattcaccagcttttcttaagtttttctctgagtaaacctgaaaccaatgagctgatatagctgctgcaaattaattaagagtaacacacaac

SEQ ID NO: 46585 - DNA, 610 bp, Setaria italica
  misc_feature (549)..(549): n is a, c, g, or t
  misc_feature (571)..(571): n is a, c, g, or t
  Peptide Sequence Number=SeqID_112559
aagaaggactaagacaagaaacaatacaaccaatacctgaatgaaggccgttaacgccagcgccgagcaaatctacgccgccctgctgcaagggaacggcctggccgtgcagcagctggaggctctgatcaagatggcgccgaccaaggacgaggtcgagaagctggaaggctacgacggcgacgtcggcagcctggtcgccgccgagaggctcgtcaaggtggtgctcacgataccgtgcgcgttcgcgcgcgtcgaggccatgctctaccgggagaccttcgccgacgaagtcagccacatcaggaagtcgttcgcgatgctcgaggacgcgtgccgggagctgatgtcgagcaagctgttcctgaagctgctggaggccgtgctcaagaccgggaaccggatgaacgtcgggacggcgcggggcggcgccatggcgttcaagctcgacacgctgctcaagctcgccgacgtcaagggcaccgacggaaagaccacgctgctgcacttcgtggtccaagagatgatccggtcacagaagcccccggngcgcacggcggaggcgccgganatcgtgacggggctcgccgccgagctcaccaacgtcagg

SEQ ID NO: 46586 - DNA, 344 bp, Setaria italica
  Peptide Sequence Number=SeqID_112560
ttgtcgtctacttgcgcacagcttctttcgaccttgattgcactcttcagttgataccacctgagtgtttgactgttgatgttcagtaataggattctgttgtgccagtgcaggacctccgctgaattgtttccttgaaacagcatctaagggccttttctgcgatttgttgaagccaggctgtggaggtaggtgatttggagccatattttccttctgatcatcgctcttctttcaggtctttactgtatttcagcgacaacttcagaccaagtgtcctgattattcctttggtttccttctggttggtttatatgaactatctgatgatccacctaattcct

SEQ ID NO: 46587 - DNA, 437 bp, Setaria italica
  Peptide Sequence Number=SeqID_112561
tttaaggttagaagtacaggtacggtgcatgcaagctcaatattgtgtagaagaagaaatgaagtagagaccatagaaaaaggttaatgcatatatgggagacatcaatacataacaagacattttttctctcaccatcagactaactgacaaagtgataataaataacacatgcaacttaaagaagatgcagagactaccaaattaaaaattttggataaacattggcttccaggaaagaaaaggggaaaaaagtctatattaacccataactaggtgagtgcacgtgcggcacacactaaaagtaaacaagaatttatattcataaaacatagatacatgcaccatggacatattcaataacaaaaaaatacccatataaaaatagaaaatataacggaatttaaacattaactcgtatacaatgctaagtgtta

SEQ ID NO: 46588 - DNA, 1856 bp, Setaria italica
  misc_feature (1)..(1): n is a, c, g, or t
  misc_feature (1566)..(1566): n is a, c, g, or t
  Peptide Sequence Number=SeqID_112562
nttttttatctttgaggacaaatggtaaaacttgacccccaatctttgctactatggaaaagcataaccttgcgtccattacaccaccagcacagttttaatacaagaatacaagatgaaaatcaaacctgttacaaacaactatgtcaaacttaagcattgcgaatgtgtagaacttcgagagtacaattacagctgctattactgaacagatcttgctgtgaagagctgagaagagcaataatgccgtacacttgtactgggcgatttcaccacctgcagaggagatttcatgagcctcaagtggggtacaagagaactgcatcaccttggatcacacatccaggccagctgcagggtccctgtctcccaggcagtacgcttttaaccagggattgcatggaaatgatcaaagctcggaccacataaattagcaggatagtttgagctactactttagatatgtcctgccagcggtgtttgctcatccacaattgcattgcgactcgcagacatatcggaaatgctaaatttgagaccagccaaataagaatagactcgtcccagccgtttgcagggtccaatgttagccctactactatcgcaaatgcgattaccatggacagaaccgctccaaaaaccagtacagcagacaaaatgaggtaaaaccggcgatgccttgttagtctggcaaacacgaacagaaatatcgtcgctgtggagagatagaacgacatggtgtttgcaataacgaatatccagaaaccagttctcccttcgaatactggcttgccagcatccttgccttctgcaatgtagcccccaggtggagtagaagcagcagccagtgaaccaactatgataaatatagagatgtataaaatgctctgggacacattagcgtaactgcctaattccttctttccttctgagcaccacttatctgtcagatttctagcctggtggcatgggcttcctgaagcttcacagagggttaagcatgtgatgatggaagtattcatgaacgatgaaaatgtataatcactctgtatcttactgaaggcaacatctagaggtgttaaaccctcattgttcataatgtcgagattcaccctggtatccatcataagaaacgagaatatcattgtgcgtccatgctttacagccagatgtagggatgtatttccttcatcatcccttgcgttcatcatcctcacaaactttgggcttctccagatgtgccacaccacctgaaccctgccatgttcaatagcgcaatgtagaatatttctgcgtttgttgtcaagcaactcatcatagttcaggcatatttcgatgaacttgcagacaacattagcatttccctctatagcggcaatgtgcacaggatatagaccctcattatctggaaaatatgcaagggagctgtttgccaataaaagtttcactggtccaaggttttttgctactgtagcatagtgaagggcagttcttccatgaccatcgaccactctggcaagttctggtttccaactttgcagagactcaaatatttctctgaaaacngaaagaacacagcattaccatttgacaaaataaaattcagattgctcatcaaaatgagaacagagttgatgaagtagtctgtgcaacacaaatctacacaaggcgtctttaatgtatagatctatagtggtcctaaccacaccacatacattttgtagttgctagaaacataatgtttaggacctttcgtaagctctaatcttaggacctaatacaaataccaagaaaatttggatgacttggactgctggcagtggagggatcaatgtggtgtcaggcaaaaggcatta

SEQ ID NO: 46589 - DNA, 1534 bp, Setaria italica
  Peptide Sequence Number=SeqID_112563
tattactaacttcccttgtattctaattggtccttattgtcaagttcttggcaatctggagcaggccatgaggactatggcagacatggatacagcgggtcttaagccagatgtttacacatacacaactcttattgatgcactctgcaagtcaggggagcttgatagggctcacaccctcttgcaggagatgttagataaaggaattaagcctactattgtcacttataatgttttgatgaatggtttttgcatgtcaggtagggtagaaggaggaaagaagctgctcgaatggatgctagagaagaacatccgccctaatgcagcaacctacaattctctaatgaagcagtactgcattggcaataatatgaaatctgccactgagatctataaggggatgaattctctggaggtggcgccaaatgagaacacgtacaatatattggtcaaggggcactgcaaggcaagaaatatgaaagaggcactatatttccacaaggaaatgatagaaaagggtttcagacttactgcaacctcatacagttctcttataagattgctgaataaaaagaagaaatttattgaggcaagaaagctatttgatgagatgaggaaggagggtttgacagctgaaccagatgtatacaatttttatattgatttcaattttaatgaggataatttggagtcaactctagctctttgtgatgaactggtggaagccagtatcgtgaaatcaagagctgaaatggatcaagatgttaggtaaaaggaacatatacattaggaacattatttaggctggcgatgtaatgctagcttcttctagatcgtgtctaatgtgaacacacgatccagactatgtactgccccttttcaccatgctaaagctgacagttgagcaatcatgacggtcttccagaagatgttcagcagtgtagatggaaaagcacgttgtggtgctggtgcaatttgcaaggatatagattgtttggaaacaaagatggttgttaggctgtgaacgagtgagttaatcgtcgtcacagggagtaaccagggcctaagcggctacgtgtgatgccgataggtacataaactacatatcggaggaacagggaccaaactactggcagaacaggagactacagagatgtcgaggctgattttgagaaaaatatgttagtatgctcagtttgcatacaccatccctcctcaaatcctcaaagttacaggacccgcctcagctttattgttcactggcttggaccttcatttgtactttggagaaatggatcaaatgagacagggaactcagtttctctgagaagcaaaaaatgcagcaccagatgggtttagctgttagaaatcaggacaattcaatacaaagccacgtgtgggaaatatacggcttggacatgaagatacagctttagtgtaagaataaatttcattctgagaaacaatgtatgattctttcccctgtatctagaaaacgaagggaacaatacagagctttttcagcggatgtgat

SEQ ID NO: 46590 - DNA, 233 bp, Setaria italica
  Peptide Sequence Number=SeqID_112564
gatgcagtcgtctcggtattgttcactgtggtgccatgggtggttgtcatggaccgtgatccgcggccacctgggcgcaatgctgtgaaggaagggtgctatcttgtgtctctgatggcaaccgatgccacattgctcaagtgttgggaaacagttgtgtgtggcagcatggggcggctcatcatggtgacatttggtggaaaggttcttggtggatttctccatgcaattgg

SEQ ID NO: 46591 - DNA, 517 bp, Setaria italica
  Peptide Sequence Number=SeqID_112565
gagcgctgccatgctccttgcctgaacaaagaccgagaaagggtattctgaggaaggttgagatcggctgagcacgggctgggaaggggttgggcgcaggtaggaccaggccagcccaggtagaaaataattaagaaaatagttaattaatcatgggattgctttaagagcatctccaacagcatatgtatatttagacacctaaaatgagttttaggtataggagagaagattttaggaaatctttgagctcatctccaacagcatacctaaacttggatacctatatttcctttggggactagtttgtgatgagaatcttttttaaagggccaaactgtaaaaatgacttatcttcttccttcacctctcctctcccccgtcgcctcctcctcctgctctccccaagccgttgctccggccgaagtcgtgccgctcctccggctctctgctcgaatcggcgtcttccgctctttctccactggatcgaagggtggacgatgaatcagcgacggac

SEQ ID NO: 46592 - DNA, 979 bp, Setaria italica
  Peptide Sequence Number=SeqID_112566
gtaccgatgagttgatgtgaagttggggcttaatttgtgttgcatttgtagaatgtaccatcctatgataaattatacattcttgcagaaatttctgggggaaacctgaggaatcattcggcaggtacatatatgtgcaaatgtgggcttcattattgactcgaaaatgtgcagaagaaaggtacagcctgcagctctattacaaagatggtgttctctggaaacagcagcggcaacatccagcctcctggagtgtccttctttgtgaccactgactcaattaagatgctcctagcttgtgtagttagctaggagggactccatagctgcattcttggcttgcacatctctgtacttgattcgatagccatgtccaggtaaaatccactcgaattctacttctaatagcttcctgatgctgtccagttgaagggtcactgattgcttgctgtacatccgaaagagatttagatcatcagattcttctgactttgcaacatgatctccagtgaacagcacctttagcggtttgtaatacaagcagacagagccttgggtatggcctggtgtatggataagttcgaaatctgttccaatgttccatggtccatttccatcaagtttccactcaacattcgcagtaccctcctctacatctcctgaatgcatgatcctttcacattttagccgttgagcccacttcctatgatccgccacatcatcaatgtgggtcaggaacatgtagcgcgctccaccaagcctttcaatgttatctgctaattttggagtataccttgggctgtcaaccagtatgtttccctgtggatgagttaccagataagatgttgccccaaaagagtgttcagaatggtaaccacaaaggtaaacacctggaagtagactctcgtcgagaggaagaggaaacatgttttgcacttgaagaatgtctttaggaggtttgtgtgtgtggattgaggat

SEQ ID NO: 46593 - DNA, 478 bp, Setaria italica
  Peptide Sequence Number=SeqID_112567
tggagactgtggtatgccacgtcagatgctggagggcccaggtatgagctggactgtggctgttgcttagtctcaaatccggtttgggagtgtcccgtggctacctgctgtcgaaatctctgctgatgttgcatcaattgattcatggtcactgagaggactcacatgctgattcatcactgcagcttgccatgcaagcaggcatgtgagttgtgccgtcctgctgggcactgtcacatgaccaggtgactatgatgctatatctcaccggaacagtcaggtctgttccttggatcatatgatggtgtcatctctcttggaacaagttgccatcagcagcaaatctgcatctcgcatgctgtttcgcagcgtcactgctgcctcgtgtgcgtggaaggagtggttaaaatgtactagtaattgtcacttgatttgttacgaagaatctgagctgaggtaagccgtggttcgttccttg

SEQ ID NO: 46594 - DNA, 657 bp, Setaria italica
  Peptide Sequence Number=SeqID_112568
aaatggctgagctaagccatttgcctggcaggtaaacggcgagccgcctctcttcgaacgagtactcgatctcctccggcagcatcggctgctctggtttctcctggaaaagggagacaggagtggctatgaccttgttacccacagaaggcgtcatcgccagctgcatcggagccgtcaccgtcatcggcgttttgagatcaagcgctgcattaaatgtcttgggggttttgttctcttcctcggtgttgtcattgaaggttggccgtgcaggtgtcgatgagacattgtttcctggcatgatctgggcaaaaggcttgcgcggtgtttctgtctcacgcagagtacttgcattgaaagttaacttcttgatgggaagaccagcaatgtccaagcctctactactaggagataaagtgcccaattcttcagtcttcttggcagcacgagcagtctttgaatgcagtatgtctgtctttggggcttgcattgtggctccgccaagagacagccttcggtttgcaccacccatggagttcctaggcaccttctttgtactttgaggcttggatggacttggttttgatccgtagagtgcttcctgttccttgtcttcttagttctttttgtttatttttgttatttctttgttatttt

SEQ ID NO: 46595 - DNA, 411 bp, Setaria italica
  Peptide Sequence Number=SeqID_112569
tagtagtgcactctccctcaggaatttcactccacagtggtcaccagatctcctagtggggccgaacaagagatttaattggaacattgcacctccgagcaaattgaactctgtatcgacaattccgatgccagcctgcacaaggtctccaccatgcacataggatcgcagctgcaaatagtgttcatccagcgtggatggttcatacggtaagcattgaacaccatcagggatgcaaaattccgtatcaagtgcaactaagcagttcccgcttccaactaatctaaggatgtcaccaatttgagaaaatgctgcctcagatgtttctttccatatctctaatatctgcaccttgtctactcaacatgcaagctcgacagcaacaacaggaaatgatccttcggctcaaag

SEQ ID NO: 46596 - DNA, 1498 bp, Setaria italica
  Peptide Sequence Number=SeqID_112570
atgccgcccatgggtcctatgatgagggggccgccgattcaccagccgggctacccgacattctacgaccagcaccagcagtttgctgctgctcacggccatggggattatgaggctgcggcgcaaccgttcaagggactacccgggccactgcccactgatgttgctgctgagctgcaagatgtgcttaacagtcttaatggcaccaaggaatcaataaagggagcaaaaacatggtttatgcaaaggttaccatttgtccctgccctggctgaagctcttagggagagagtatttgccttggaggattcggagcgccagctgcacataattttcctggtgaacgatattctttttgaaagcttacagagacgaactaatattcgggaccttgacaacgaggctgttgcttttaaatctgtgctgggttccatgcttgcaaggatttacaataatccacagagcaaagatgacagccagactcgtgttgagaaaatccttcagttttgggattcaaaggaagtttacgaccaggaaaccatcgctaactttgaaagagagatgaaaggtggtttggcatatccttcggcaccacggcatgtttcaccagacccctcgacctttgcaggatcagcagtggtgccctcaaaatggtcatcggaacctccagagaaggaaaaaacaatccatcctatttctggtccaccccaatctgcgccttctgcacaattttcagccggtgtttttcctcccgtaggtcaaaccacttttacaggatctttgccagtgcaaccatctttgattccatctatgattcctcaaagcaccgctgctccaacaagtgattccaatccacctccttatccactcttcccacctggcctcattcccggaatggttcggaagatgcagataggtagtggagtaccatactctcccttgagcccgcttgacatccccacagtcatccctccgtcgaccgtcccagagtctgagatccttgagcgtgtatcaaagttcttcagcgagattggggaggtaaacccatcagaaggtccgatgaggcagatcgagcgtgacgattatgatgactatgagagggaacttcctgctcgaaagggaggggcgtgcattcctcccccgcctaacctgcttgtaaaccctgagacagggatgcgtgctgatggtagcgttgaaagcaaaccagggtccagcagccgcttgggtctgggagcttctgccgatccgaatgaggtgagccagtacgatgatgtctattcctcctaccgaaagcagaggagcaccacataccattcttccatcactgctcgctcaacatcaaggtgaaaggggcaacctttcccgacgttttcttttgcctcgcaatgtagttgacgatgtgatgctgtatggctatcttattatttgaactttgtgctatcactgcaaatgtgtactacagccccatataaatccaaacgtagtttgccagttgcaa

SEQ ID NO: 46597 - DNA, 419 bp, Setaria italica
  Peptide Sequence Number=SeqID_112571
ttgtcagtttgcattaatgtcttgttttctgatagcaatgtatgaatcatgggtgttgtacttattctagatgtagtacattagcaacccaattacgaatagaaggtaagctaactgaagtatactggggctgccacatgttgtcattagcagctttcagatgtgacttatttggttcggatgctagattataatacctacaatatgttctctaatgacattggctcggtgaataattatctagtttttcagcgcttgaaagtcctttattgctacatccatatctttgttgaaattctgccaacctatctatttcggtgttgggtaattccaggtatttcacctggatattaccaacatgccaacgtttaacattttggttgctttatttgtgcaattaagtttttacagtcctggtg

SEQ ID NO: 46598 - DNA, 1009 bp, Setaria italica
  Peptide Sequence Number=SeqID_112572
agaggttacaccgcttgatctcaggaatagtagagtccaccagcttatcaaattcacttctggacaatcggaagcacttccaggcccctcacgtccagcacgaccactcctttgaagagcctgcgctttcgagactgggatgatgattaatgattccattccagtcacaggattgtaagcacgagcttttaccatcccaggatcaataacatatttgatgccagttattgttacagaagtctcagcaatattggttgctagaactaccttgcgggttccagctggtgctgacttaaaagcattcatttgctgctccgacgggagagatgagtaaataggtgtagtccatatcttactactttctggtggaagtaaacgagcacgctcataaataagtctctctagtgattcaatctcctcttggccagttagaaatgcgagaatgtctccaggcccttcctccaaatgaatctgaaagatagtaactagagtggcatcaagataatccggctcaggctgatacgtatatagtatgtcgacaggatgctgccgaccttgaatatgtacagctttagcaccaccaaaataatcagaaaaacacttggcatccaaactagcagacataattatcaacttcagaggagcacatcttgtttcctggcatgccttctgagttaaattttgagaatggccccatatgtcaggcaaagtcttcccattcttactggcattggctcgggaatgttgcacttttttcaacaaacccagtaatacatcagtatggacagtcctttcatgagcctcatcaaccactataacactatatttagacaaaagtggatccaaaagtgcttccctcagaagcaaaccatcagtcatgtatttaatccttgttgcattggatgtggaatcatcaaatctgatagagtatccaacctttttgcccagctgatcgttacattcctcagctacacgcttcgctactgtcactgctgcaactcttcgaggc

SEQ ID NO: 46599 - DNA, 1444 bp, Setaria italica
  Peptide Sequence Number=SeqID_112573
ttttaagtaagaaatacaagttgtaatttgatttctaggaaaggaaagaaaaacgttaccaagaaaggagttatacagaggaaccaccgatttgatttgcatgtacggtggttgagccttgtcgtcaggctgtttcaccgtccgtactgcacaactctcgttggacgtcaggatccggaaaggtcagaactatgtccatggatgaaaatcaatcctcggtagcgtagtactgcggggctagctcagctagccacaatgggtcgatccgggtcaggtttttgacgtaattctgcgtcgtccggaccagctcgttgaagatgacacagtccggcttggtccggaatagcactgatgaaggatggatctgaacgctctggcctgttgcaagagccctgtatgatccatctggctgtcgcattgctgcattcaagaagaaggcagccgtgaggcatctccgaaacaaagccatgtcatctccacatgatgacaggttgagccccatttgttggacatggccctgaatttgactgtgaacatcaagagcatgttttagagagcggttgttgataaagttttccttgcaccatctgttcaaagccttttccattgttctctctttggcatttgcatttttgctcttctccaagcattctgcagctgctcgatagacattcaccaaggtgatatggtctccttccgagctttcaaaacccttcctagcagctcttgcctcttctaacttctcgcgtgggcagaaaaaattgattccactgaaagcatagatacaacaatcagcatttcttccaagcacttgaattcacttgacactattaatgccttggagtacattggatctaaaggcagcctagccatctgatggccaactgggtctgacagtttataatcatcggtcagagcccctagtaagattaactgctccaatgatttcaaaatagcagtccttgatggtttctccataaaatcaaaacctatgatatcatcaattccaagggccttgagttgcagaacaacgtttgagaggttacaccgcttgatctcaggaatagtagagtccaccagcttatcaaattcactttcttggaacaatcggaagcactttccaggcccctcacgtccagcacgaccactcctttgaagagcctgcgctttcgagactgggatgatgattaatgattccattccagtcacaggattgtaagcacgagcttttaccatcccaggatcaataacatatttgatgccagttattgttacagaagtctcagcaatattggttgctagaactacctagcatacgcaaataagcaaacagtaaaactttacttagcagagtctggtgcgggactttcaagggtaagcgaaacaccgaaatgactacaaaggaaaagaaaaattactgaacgagcaaaacaatagaaattag

SEQ ID NO: 46600 - DNA, 865 bp, Setaria italica
  misc_feature (824)..(865): n is a, c, g, or t
  Peptide Sequence Number=SeqID_112574
ctgcaggtcgtggccaccgagacggccagggcgcgtcttgagctcgagatggagcgcgccaggaagaaggccgccggggaggaggtggaggagggcgaggacgacaccgcctcgcgacccgccgtcaacgtggtgcggctccagtacggcgaggtcgccgaggcgtccaccgtgctgctgctgccggtggtgagggagacggacggcgtcgcggccatggagtccgcgcccaggcggaccaagacggacgtcgacctcgggatcgtggaggtggacaaggcgtgggcgcgctgggccgtcgtgcccggatggggccccgtcgccgcggccgcggaggaggcggtcgcgatcgagctggccgacgggcgcaggctgccgtggcggacggccgaggaggagccggtgctggtcattgccaaccggggccagaaggaggtggcggagcaggggagctacgtcctcgagaaggaaggccggcttgtggtggagagggggagaaagctggctgagcagggcatcaccgtcgcagccgccgaggtgttgatcgttgtccggccgcccagggatgaggacgaaatgatcagcgacgaggagtgggactaattggaggggtttaggaagttttttcttggagatggcaatttttttcatgggtagagttttcccctcttctcgtcacagttgatgaacaagaggaacgaactgccgctttgattcggtatatccgtacatgtcatataggaacattgtgtagtcccttagcctttgcattgctggctattgtttcgcctcattatatttaaataatatgatcacataaaacnnnnnnnnnnnnnnnnnnnnnnnnnnnnnnnnnnnnnnnnnn

SEQ ID NO: 46601 - DNA, 1874 bp, Setaria italica
  misc_feature (1)..(1): n is a, c, g, or t
  misc_feature (20)..(20): n is a, c, g, or t
  Peptide Sequence Number=SeqID_112575
nttttgtttttttttttttntttttttttttttttttttgttttactacagataattcaacattccaacatactgcagtcaaaaccacctcagtatcatgagatgcctgactgcacgttatctggatgattttcacataatttggacacagcacaaggcaacaagccctagttagctaggcagggatcgaaaaccagagccgcacttgaacctgaacaacccaacacgcaatatccaaaagaatcgatcataagctaacagttggatgtacatctaccagtattgttagcttctataacgttactgaagcggaatgtaaccagacgagcaaaacagcattgtacaaacccatgtcatgctagagttaaccctgtaacttaaaaggctaatgcaaacctatacaaaatctaatcaaccctgtcaagatgaatccccttgcagcatatacaaaataaggattgcaaccgactgttagaagcaatttgaaagaatgaatcatcaggttgtcttgtttgatctggtgcaatatctaaggctccacaaaagaaatcatggggaaagggaatgcctcctcatgcttgccggtggcagtgactgctatctccttccttgaatgtcatatatataccagccacttggagatatccaaatcattgcacaatcttaagcaacattactccaacattctgagcggtaatgtgaagcatgggaaggaaatggtacctaactaatccctaggtcagccctattgagaatgttatagcttaaccttgagtcaattattcttctgcttagctagtccgatcagaatatttccctaaggaaatccaaaaatagccttttccttattatagattactgctatgaggcaatttgagttgacagtcagcagaattttcaaccagagcagcagcaagcaacaaacgggggagctaagggcactcatgctgagggtttgaagtcctttgactgagtacactataaagtcactaccacctgaaagtcaatgtcatgctcagcaggaacagccttctcagaatcatccttggatggcaaaacaagagattccttgaccggaccagtttcaggtgtaacgaccaacgcctctttgccagatattctaatgttgttgaagtgttcagctagaaaatcacctgaatcttttgggattctattattctccagctcttccaagttgttatgattatcaagcttcaggctattaaaaccatcgagttccatatgacatcgtgtttcttcagcagcaaacttgctacttgcaataccatcaagctccccttgactgttatggtcattgagccctttccaattgtactgtccatctagttcgttcagataactatgattcttaagctctttgtcagttctacagctgtcaagatcgttcagattgatgtgattgttgagctctttcagacaattatcgtcaccatgctctttttcttattatagattacttattgtaggcaatttgagttgacagtcagcagaattttcaaccagagcagcagcaagcaacaaacgggggagctaagggcactcatgctgagggtttgaagtcctttgactgagtacactataaagtcactaccacctgaaagtcaatgtcatgctcagcaggaacagccttctcagaatcatccttggatggcaaaacaagagattccttgaccggaccagtttcaggtgtaacgaccaacgcctctttgccagatattctaatgttgttgaagtgttcagctagaaaatcacctgaatcttttgggattctattattctccagctcttccaagttgttatgattatcaagcttcaggctattaaaaccatcgagttccatatgacatcgtgtt

SEQ ID NO: 46602 - DNA, 1904 bp, Setaria italica
  Peptide Sequence Number=SeqID_112576
cgagctgctgtggaaatggcagaaaatgtggcccagctcattttgcagattaaagagcttgaatggaatatcaagtggactgagatactgagcactctcccttctagcctcatgaccaaggaaatgcagaaaatagcaaggctttttaagaaagttataattcgaagaaaacgcatagaaggaacaaatgttgaatatctacttgattttggaaagagagagaacattcctcctgttatttctaaacacggaacaaaatttgaggatccctctagcgagaggaacaggtactggttaagtgaaggccatgtccctctgaatctattgaaggcatatgaagccaaagcgtttgctcgcctgctgaaaaagaaggaaactgatgaacttcctaagaagactaagaaggtgcgtgactccaaacccaaaatgccaaaaaaagaccgggtttgcttacctctttgaaagagcagaaaagcaatccaccaggctttgtggtcattgtaacaaggaagtggttgcaagggaagctgtgaactgccagtattgcgcagctcttttccatagaaaacatttcaaggttcctagaggtgctgcagatactgtttatgtttgcaacaagtgcttagctgaaaaggtcttaaaggtgaagtctcctcaggaaaaggctgcaccaaagaagtcatctcccaaaagaagcaaaagaaacaaaagaagcgatcacacaagattgtgactaggagaaatcagattgttctcaaatacaagaagaaaattggcaaaaagggtaagcgtggtcggcctaggaagtacccactggatccatcaaagagtgaattacccaagatgcgtgagagtgaatcttccaatgtgcccaaaaatgaaccagtgaaacgtatatcaaaacgattgtatgataagtacatgaaaggcagctcaaacgtatccgagcatgcagctagctgtcgcaagaggaagcggactgctttgcagtattcatactggttaaatggccttcgatggacacaaaatccacatgatgaacgggcaataagtttcaggaaagaaagagtagtttttccatccgaagatgctgaaatgtctgaagtcagcccagtatgctgtttgtgtgacaaatgctacagtgaagaggatatttatattgcttgtgaaaaatgtgaagattggtttcatggggatatatactctgttaccgttgagaatgtgaacaatctcattggtttcaagtgccatagatgccgtctgagaagtttacctgtctgtccatatgcacagactgaatcagataaggatcacggcatcaagtttgtagaggatgaggagcacagcatcgacaagtttgtagaggacgaggaccccagttgttcaaaagatcttgatgctcatggtagtcagaaagatcatgatcatagtaatctgaaggaggttgacattgagagacggctcaatggtcatattgctgagaaagtgctcagtgataatagttctctagaggagctgaatgatcatagcaatctgaaagaggttgatactcatagcatcgagaaagaactggatgctaataaaagtttgaaagagctagatgcccataatgaagtgaaagagcttgacagtcctggctctgagaaagagcctggtgacgataattgtctgaaagagctcaacaatcacatcaatctgaacgatcttgacagctgtagaactgacaaagagcttaagaatcatagttatctgaacgaactagatggacagtacaattggaaagggctcaatgaccataacagtcaaggggagcttgatgggattgcaagtagcaagtttgctgctgaagaaacacgatgtcatatggaactcgatggtttaatagcctgaagcttgataatcaa

SEQ ID NO: 46603 - DNA, 353 bp, Setaria italica
  misc_feature (309)..(309): n is a, c, g, or t
  Peptide Sequence Number=SeqID_112577
actcagatcctggagcgggagcccgagttcttgaacaccttgacctacgtcctgcgccgaccgagctaccggtcgcgcacctacggcatccttctgctgaaggcgatggtggcggcgatggagccggcgcggctggcgacggtgagcgccggcctggtgcaggaggtggtgcgcgtggtctcggatcgggtgtcctccaaggcggtcaaggcggcgctgcacgtgctgtgccgactgtgcccggtggggccccggccgcgtgaaggccgtggaggccggcgcggtggcggcgctggtcgagctgctccngacgagggcggccgccgcgtcaccgagttggccgtggtggcgat

SEQ ID NO: 46604 - DNA, 891 bp, Setaria italica
  Peptide Sequence Number=SeqID_112578
ggttttggaggagatggacaaggaccaggacctggcctacaccgaccggagcgggcgccggaattacgagtacgtctcgctgggctgcgacgcgctgcccgtgctcaagggccgcacccccatccagtgctacgccgacttcatgcgcgccttccgcgaccacttcgccacctacatgggcaacaccatcgtcgagatccaggtcggcatgggccccgccggcgagctccgctacccgtcctacccggagagcaacggcacctggtccttccctggcatcggcgagttccagtgctacgacaggtacatgctgagcagcttgaaggcggcggctgaggccgtgggcaagccggagtggggcaacgccggaccgggcgactccggcagctacaaggactggccggaggacacgcccttcttccggcgcgagggcgggtggaacacggagtacgggcagttcttcatgagctggtactcgcagatgctcctggagcacggcgagcgcatcctctcggcggcgacgggcgtgttcacggcgtcgccgggggtgaagatctcggtgaaggtcgccgggatccactggcactacggcacccggtcccacgcggcggagctgacggcggggtactacaacacccggcaccacgacgggtaccagccgatcgcgcggatgctggggcgccacggcgcagtgctcaacttcacgtgcgtggagatgcgggaccacgagcagccgcaggacgcgcagtgccgtcccgaggcgctggtgcagcaggtggcgttggcggcgcgggacgccggcgtggggctcgccggggagaacgcgctgccccggtacgacgagacggcgcacgaccaggtggtggcgacggcggcggagaaggccgaggg

SEQ ID NO: 46605 - DNA, 596 bp, Setaria italica
  misc_feature (557)..(557): n is a, c, g, or t
  Peptide Sequence Number=SeqID_112579
tgggccggaacagctctggtggcccaagctgcagcagcaggtgctcgcgggtcaggctttcagcagttccaggcaagcacgcgcagtccatcaggccggcctacacgtgaggtaagctgcagggcaagctagctggtccagcacgtgtactaggaaatgagcaggttgtgatagaacagtgagcttgtcttcggtcctttgttaattccttgcattttctagttattctctgttaagtcgatctctgttaagttgattagtcttttaattagtattgtctcctgtgctaatcatgcttagtttatttagtcaattgctaatccttccatgcctacttaagtaagtggttagtagtattcttgttttgtctcatctgtgcaaacttgatagaatcgattcatgtcttgtttccgctgtgatcgttcctagggtgagctagtcacgagttgacttgcgtcatcttgacgattgaacgcaccgtgtgctttggggttgcgtttgggacataggccttgttttcattgagaatttttataagctcccattcaccccccctntggtcgccctttcggtccttcactttctctcttcagcag

SEQ ID NO: 46606 - DNA, 559 bp, Setaria italica
  Peptide Sequence Number=SeqID_112580
caagttttctctgtttttaattcttgaaattagtgagttatcttgcgtcacttgcttaagcttttaattagttgtttcttgtgctaatcatgcttagtttatttaatcaattgctaatccttccatgcctagttaagtaagtggttagtagtgttcttgttttgtctcatctgtgcaaacttgatggagtcgattcgtgctatatttccgctgtgatttgtgtgtctcttatcgttcttagagtgagcttgtcacgagttgacttgcgtcatcttgatgattgaacacggtgtgctttggggttgcgtttgggacataggccttgttcttattgagaattttgataggctcccattcacctcccctctagtcgccctttcggtccttcagtgtcatccgctactgtcaaaacacactttggaattaaattttgttgatttttgcatctaatgtgttctttctccaaattttcgtttccagctgaggataaagaagaaactggtatagaaggactgaaacaacatcgcgaacctgtgatctgtcgaagcgtcattcttct

SEQ ID NO: 46607 - DNA, 556 bp, Setaria italica
  Peptide Sequence Number=SeqID_112581
ttcttctcgcccaagccgccgccggcgtccgccccttgtaaaagcaccggagcacgggagcagcacgccaaggcagcagcggcgctccctccctggagtaggcaatccctcacctgaacctccctgcctccccgctcccccacagcgttggttggctgcccggatcggcatggagaagacgacgacgacgccgcagccggtctgcgcgcaggagtcgctggcgctgctcaactgcgtggccgcggtcccctacgaccgcgacaggtgcctcgccctcgtcgacgccctccgcgactgcatcacccagaagaaagtaaagaagttttcactggctgaaccaagctccagcaccagcactgaagctccaaagagcgattcgaagtcctgaagaaatactagcgaagaacatttccgatggtgatggtgatatgattacaaatgttacaggagtgttagatctgtcagtcattttgttgaatgaacccatgtagaactgaagactacttttgactaaatctgccgtaagctgttgatccggaaatgtgtcatgtcggca

SEQ ID NO: 46608 - DNA, 220 bp, Setaria italica
  Peptide Sequence Number=SeqID_112582
ggggaaaatgtaacaagagcacctactatatgactatatgagcctatgacattattcctccttctcccattacctgctgatctgcaagtaatcaaactacacatacgtactttcacacacagttttcaatcatctgcatcagggcttgagatgatctaggtatgggtagcaactatcggccttaaaaaatacactggacggggtggcttcaacgtagcgc

SEQ ID NO: 46609 - DNA, 346 bp, Setaria italica
  Peptide Sequence Number=SeqID_112583
gtccccaccactccccctctcccacctccgaccaccgcaccggcgaactcggcggcgccgcaagccaagctggggatggccggcgcgctcgcgagctcgccgctcgttcacctaaccacctcccgcctccgcctccccaggccccgggcctccgtgcccagtcccgctccaggctgctcgcgaggcgtgtgctcggggtggaggctgacggtggggtggagggccgcgaggcggtgcgacaggcttcggtgcttctccaacgacggggggcggcgggggaggagggggaaaagcggaccgaggaggaggcctcggcggcggcggccccagcggaggagcgtggggt

SEQ ID NO: 46610 - DNA, 400 bp, Setaria italica
  Peptide Sequence Number=SeqID_112584
cccctcaatcccagatgctgtcggatcgaacggggtcatgtgctcgcccagcaagtagttcttccgttggaccacacggtccagcaagtcggcgaggagcttctcgcagccgtcgagctcgctcgtggagctgaacgcggcagggtctggctcgaacagcctcaggcgttcctcggagatgtgcagctgctgctgcgaagagtaaatctcccgctggatctccttgattctctcgctcagtgccccggggttggctagctgcgtggccatgtcaccctcgcgcttgagccgctggagcatgctgacgaggtactgcactgaatttcgctgtgattacaagttccttgatttccactgaggttcatgtaccgaaggatcacgtcctccacccgttgcggcc

SEQ ID NO: 46611 - DNA, 435 bp, Setaria italica
  Peptide Sequence Number=SeqID_112585
aatttggaaaagtacattttctgaacttcaatgtatcatatcaggccctcacattaccctgattctatgaaccaagaaccatctttagtcactgcatcaggaacttctgcaggagtgcgaacgatttttgcaaattgttcaacacagtgcaaaccgtgctgctgccatcgtgggcaaatggaggcaggccactgggatggagacagttgcaggtggtgaaccgaaggagctgctccgaagccgtgtggatcagttggggacatccccgaacaaatcaacctagacagagccctagtgccgaagttctccgttgcccacgtcagtctggccataattgccacttgtggggaacccgccacaattatgcaagacaatctgctgttcgatgtagtcacccgcacaccattcaattatttgaaacaagtattgggaaaa

SEQ ID NO: 46612 - DNA, 883 bp, Setaria italica
  Peptide Sequence Number=SeqID_112586
ttttaaaaatacttaatactaacttcaacttttcaaacacgaaacatcaagaagttgtcctcttgtttacatgtaatttggaaaagtacattttctgaacttcaatgtatcatatcaggccctcacattaccctgattctatgaaccaagaaccatctttagtcactgcatcaggaacttctgcaggagtgcgaacgatttttgcaaattgttcaacacttcatcagggaaagcttgggattagcaatgccatgttttgcgatttgcaggttcacgcagtggcgatggtaggcggcacgtaccagtgcaaaccgtgctgctgccatcgtgggcaaatggaggcaggccactgggatggagacagttgcaggtggtgaaccgaggaaccattcggcgcccttgagaaccgtgggaagtgcatgtggccatctccgtacgaaggagctgctccaaagccgtgtggatcagttggggacatccccgaacgaatcaacctagacggagccctagcaccaaagttctccgttgcccacgtcagtctggccataattgccacccgtggggatccgccaccaatgatgcaagacaatctgctgttcgatgcagtcacccgcacaccattcaattatttgaacaagtattgggaaataatcttcacttcgggtgaacccttgccacgttgatgtaggtccatagttgtaggattatctgatagtaatatgtctgttgctgacactggatgtgaattttgaccccatgaagtggtgagtcaattaaggctgtgattggttgcctggcttatcatggcctggctagaatctggagccaggctagcttatgcctgtctaatgcagtgcaatcttgtacaaggccatgggtgaag

SEQ ID NO: 46613 - DNA, 369 bp, Setaria italica
  Peptide Sequence Number=SeqID_112587
ttggttggctgtacaatttgttaggatcaccttgtacaagccatgggtgaagtcacccaccacctccagccacaccctcctcacctccggcccttcctcctcctgttcagcttctcccgatgctagggggcgccgccagccgtgtgggccctccgccgtcggtgaggcggtgccaatggcgtgaggaggtgatgacacgaaacgttcacatgaatcaccgacagcttgtgcaagccttgagcttcctccacgctcgcgcagtcattcatgttgcccaatgaactcctgccattgttgccccatgtgaaaatgcccctctggctcggcaggagggtgggttccgagcccgtcaccggaactcccgcgccg

SEQ ID NO: 46614 - DNA, 877 bp, Setaria italica
  Peptide Sequence Number=SeqID_112588
cacagtactataatagcagactgttgccacctccatattattacaaaaaacacgacaactcaaaccccgtgtacagctccttcagccagaataccatggccctcagagctggggtagttaggacagacgaagggggtcactaactgttgaaggagaaaagcattcatatcagcctcttcattggcatcataatacatagtagatgatatctaaatcctaaaatgaagcaaagtcgttcgagaaaaaaaatgaagcaaagtggcacatcagttcaagtttaacagtaaattcaggtccggtaaaacatgaaggtggaccaccattactgaaatgcaaattcataacaaagttcactcatgtttgtgaaatgtgctgaacatggtgcttggtgcataagtagttaataaatgcacacatacttgtgaagtcacaagacagcaatgaactacaaaaaacatatatcccagatgacaagcaaagggtttgagcgcagaactggattgaaaaaaaagaataccatccagaaaatgaagacatgaaaaaaatgaaggtagctcaaaaggatcaactttacctatgcagcattaatttaggccagacctggtataaccaaggaacttcagatggtgtgcttgggggatagcggcctgctagctgaacccatagccatgagtgaaaccaatacaaagtgcagggtgcatattacaaaccctaacaaagaaagtaactttgttagcaaaagtaataagcatagctacattacgaagcatggttgaggaatacagaagatcggccaccatgatcattaaaccaaaagctaaaaataatagcagcttaagaatggcaacagtgattcccataacttgtattatggaaa

SEQ ID NO: 46615 - DNA, 1084 bp, Setaria italica
  Peptide Sequence Number=SeqID_112589
gtgtacagctccttcagccagaataccatggccctcagagctggggtagttaggacagacgaaggggtcactaactatgcagcattaatttaggccagacctggtataaccaaggaacttcagatggtgtgcttggggatagcggcctgctagctgaacccatagccatgagtgaaaccaatacaaagtgcagggtgcatattacaaacccagtgcaaaccgtgctgctgccatcgtgggcaaatggaggcaggccactgggatggagacagttgcaggtggtgaaccgaggaaccattcggcgcccttgagaaccgtgggaagtgcatgtggccatctccgtacgaaggagctgctccaaagccgtgtggatcagttggggacatccccgaacgaatcaacctagacggagccctagcaccaaagttctccgttgcccacgtcagtctggccataattgccacccgtggggatccgccacaatgatgcaagacaatctgctgttcgatgcagtcacccgcacaccattcaattcttggaaacaagtattgggaaatcatcttcacttcggtgaactccttgccacgttgatgtaggtcccacagttgtaggattatctgatagtaaagtctgctgctgacactggatgtgaattttgacccccaatgaagtggtgagtcaattgaatcccttccagctgtcgatgaccttgagcttcctccagaaaaagagcagtcattgatgttgctctccggctgttgttgcccccatgtgaaaatgcccctctggctcggcaggtgggtgggttccgagcccgtcacgggaactcccgcgccgggtgccttcatcgaagccgccgccgcccacctgcggagacacgatctcccgcgccgggcgcgggtcggtggcaggtagcgcacggggcaggtcgtagagcgcctccacctccacacgaacaagtgatgaccctcgcccgcggacgcatctccggcggccggaatggcccctcgcatcgggttccggctgccggggccggcggcggcagagaagaggggggagggagaagagaacccacctgcagcgt

SEQ ID NO: 46616 - DNA, 513 bp, Setaria italica
  Peptide Sequence Number=SeqID_112590
tggctggcactttcggtagtggcatcccatggctgagttgttgacagaagagagagagcacagctggagtcggtggcaactccggcgacacatccgcctggcgggagctcgaaggctgcggggagcaccgaagaaggccccgccaccgagccgccatggccgatgtacgcgtggttgccgtagcccgcaactgtactgcggtgtgggtgaattccctggttcccttgccactggatggtgcccggcatccggtcgcccccgggctggatcgctggccacgcatccctcacgctgctcggaacccttgggtacgagaagtccagcaggaagcttctgaacctgccaggctcttgaaatgatgcagcgagccggccatagcgtgaagtgagaggtccaggtggtggcttcctccggcgctcgttgtgaccaatgaggcgccggcggcagctgcgttttccttggtcgaattcaggtaactcgtggaacctgctgcacggctggacaagaaaagaa

SEQ ID NO: 46617 - DNA, 413 bp, Setaria italica
  Peptide Sequence Number=SeqID_112591
tttcatcttacgtgcagagaaggtctagcttgccttgataaccaatttagcgaaattctcatgtgttgctaggtgcagaagaatagaagaatccgatgaaggtaaaagaaccccgacagtgaaacacagcgttttttaccattagtcgctacatgcatggaagccacttttagcatgtgtgtaatattttctcggacaatttttttcacaaaaaaaatatgttaagaaaagatgaaacaataataatcttgaaatttcagcagtccatatcaattttttaacaacaaatatatattcaaagataaaatggatatatatttctacagggatgtatagtgtgcattttgcaataactgacaggctaatgtagaatttccatgtcggtttggtcgtaactgtaaaaaaattacctg

SEQ ID NO: 46618 - DNA, 425 bp, Setaria italica
  Peptide Sequence Number=SeqID_112592
ggagtgagttcttggtcaatgatacggaatggtcgccaagagatacttcaccaatgtcctccagcacccgaacctgaatgtaaggatccttgggagggaccatatctactgtcaaatctatatccatctccgatatgtatgacttaatggctgcagagtggttcttaaaatactctttctctgagaaatggagtttttcttgaatatcatggggaagcacaggtccaactttccatctaaaactctgaataacttctgctcggttgtacatgtaggccatgaggcatcttttattacggagcagggaaagatggtggatagctgcaccatagtggtcctcgtttctggttgtctcgatgtctaagttttgctccaccattttcctgatcaatgactgaaactgtgaattgtgctcattgcactct

SEQ ID NO: 46619 - DNA, 2359 bp, Setaria italica
  Peptide Sequence Number=SeqID_112593
tttttttttttaggtaaattaattactattctaatcaacatgcaattcccgtgcctgaaattcactatgctcgtacactgtacacgacatgattgtgttacaaggaagccttcaaagaggctaacaaacaaatcacatgtggggaagggaaccctcttgtataagatttttcacacctacaaatgtcacggtacaaaatgaggtctctaaactaactctgaagaactgcctatgctgtaccaactacccggatatggaatggggatccacggcatagtataggttcatctggtgactctgccttggcacgagcacgaagaacgtctgtggcatcaatgataacggaagaagcttgcagcgagtagtcacctggtacaaggaagtacacggaaaaaggatgtactacctcttgcaatggtagaacctccaggtgtatatcactaagaacaccagcccagaggacagttgcactattttcatcgaagcaattctcccctgcaacatctttgcatgaaatgctaaggttcattcgaataatttccttcgtgttgttgcgaatctgaacttccatatgggtcatttcatgagcagatattggatcctttgaagaatcaacattggtaacagctccattcttagcaagcttaaagctaaatgtcaagggatctggtagcagtatgtccattatagatgcttgtagtgccgcctgaatagcatctttaatattcagctcacctgagctatttctcccagagtgccatttcacttttatttttgaaatcaaattgttgatagacgcgttgagctctgccttggcattcctttctgctatggcggcagcccgggatccaagaggttcatcactaccactttccttaacaaaaaaggaagcatcaagaacaggtaatttgaagttctcaagaggtatgagaactctggcagagtagtcgcgatcaattctagttttgtgacaagccgcatcagcagcattgccttctgagattagtctttgatccaaatttgtgtcatccgaatgtacagcaacatcaacatcaaaaacaacatcagtaggattgaaaagctcaagttccagaaggcggaggccccaacttccattataaggatcaatcttcaatagattaacattagtatgctctgtgtcatttccagtgcttatatcatgtttgccactgacaggtcttaaatgcgcttcagtaaatcgagcaggtatttccatggacaacaggcgtgctcttacaagacgcatgccctgcacaacacagatattcaatggaacaaccaggcgtcttccaggtggaagagaaatatctccattctcaggattagcagcaggaccagcatagtgaatattcaagaatgggttgattccttctcttgctattctccttgaacttgcgggagatctactgccatcagcttccaaatctgccgagctaagatgccaggctcttagagtcactgcaaatgtcacttctccacctggtttaataggaagagcagatttccatgtgctatgggcaattgaaataacagaatcctgattcttccctgacaaagcaatatttgcttcttcaactggtacggttccagcatttgtcagtgttatcagaacatcacgaatttctccttcataaagaaggatggaaccatctccacccacaacattggcaactaataatggcagaggaggaacaacagaaatactaggaaagttgacactcttaaccttgctagagccacagcatctgaaaggatcagaaaggacaagtccttgtgcagctccaaggagcaagcagtcaacctctttgaataggtgttcagtaataacaccaaagcaatgaacaatgcacccaggaattgaaatttgtccgacttgtgttggaataccagataacaaaactaattttgaggtgttaggtggaagactaacactaactggaaaggcatcgaaattcccagaatggaccgagagatagatgctctcaacaactaggtcaaagctgcatgggtttgctaactcaaccatgacttgaactggctcccccacaatccaactaacctcttgcttggaagtcccagacgacgctcctgccttgctgaaaggagtataaatgaaaggtcctgaaggacctgcaccagtccaccactcctttttatgtgggttgcgctttactatatctctttgagaagggtgaagagggaaagaatgcaacctaatgaaaggaaggcatggatcagcacagcgtgtgcctgttggaagcttatcagcagagttcgcaagtgagcttgccaggccactctgaccagctggtgtgatgagtgggtaaaatgatctaag

SEQ ID NO: 46620 - DNA, 622 bp, Setaria italica
  misc_feature (41)..(41): n is a, c, g, or t
  Peptide Sequence Number=SeqID_112594
cgccgcgcttggccgccgtcgccgaggaggaggtggtgccnccggttcagaagatagaggtgccggtagccggaaaggacggcaacgaggaggaggctgaggagcaggaggatggtgagaaggcggcggtggcaacggcggccgcgccgacgaagagttgcttgaagaaggccaactgcggcgatgggaagtgtgccgtcaaaggcaatgtgcagtggctggatttgctcgggaaggatctgacagaggttaaggaatatgagcccagcgaacgtggagactttcttgacgacggagacggcatctcggcatgtgtttgcgttatccaatgagtcaaggagaatcctgtaaactctgtgagaaaaaaaacgggtggttcgcatcagccatgatgtgttctttccagtggagggccagggtgttttgttgcttcctccatgagctccatcgaagatgcccaaccagaaccaatcgtgtgtagttttcaaaaaaaagaaagggaaccagtcatgtgtaaaccagtctcatcagtacgtgccattagatgctgcgtagcctagccataggttggtgtcagtctatcaggattgtgtttgggtctgcaggctgcagcttggttttc

SEQ ID NO: 46621 - DNA, 325 bp, Setaria italica
  Peptide Sequence Number=SeqID_112595
cgaccgcgccgccgcgctgcccagcaagttgtcggcgtctccctgccctacaagatcagcaccagcgtcaactgcaacacgattaactgaggcgtcctgtgcgcgcccccgggtgaggaatgcatgccggagaataataaaatgccgctagtgtttaagctagaatggactagatcgagatggtatgcgtctctagtcgttgctggtgtttaggaatcgtctgaagttcctcatggtgtgtcgaggaaatgcatagccacaatacacggaagaacacataggtccatgactactctgctcgccgggacatccacgtactactact

SEQ ID NO: 46622 - DNA, 425 bp, Setaria italica
  Peptide Sequence Number=SeqID_112596
gtgacgagccatcactccatcgccatggagcagctctgcctctgccccccgcgccagcaataatatcatactccccaccagccgcgcctgccggccgttgccacaccaagctcccctgctgtagccagctcgccgatgcccgtcgctggacatgggcaagaagggcgcctcgtcctggctcaccgccgtcaagcgggccttccgctcgccctctaaggacgccgacagcacctcgcccgcaaggaaggcctcgcgcctccgcgacgacgcacccgcccccgctgccgacgccgacgacgacaagggcaagcgggagcgcaggagatggctgttccggagatcctcgtcgccgtccccgtcgccagcaccacctcccgcgccggaccacccgcacccgcacacgcgtccacactcccagcccgggg

SEQ ID NO: 46623 - DNA, 452 bp, Setaria italica
  Peptide Sequence Number=SeqID_112597
acttatcttcgacgctattcgtggggccatgacataagacggatcaatgtggtgcgtcgtagcccagtggtaggcggtgtcctcctggtttggactcaggccgacatataagaatcccctgctcaccgacgagtcactggacttagctggtggggtattcccatgcccgatgaccttaatctggccaagccagccaaggtctctgggcacagtgatttcggtgttggaagcctgctcatcggtagtgacccgcaaacttccggctgtttgcaactgacgacgctgcccatcagtcagggggagaatactggcgacgtcgtcgacgttgtgaaaggcccaccacgccacagaattgccagcgcggtcgtcgctagaaccgtatgtcatcggcactttacgggcaccgtgcaagtcgtcgtcgaactgcttgacgagattgccgggcaggggaa

SEQ ID NO: 46624 - DNA, 643 bp, Setaria italica
  misc_feature (617)..(643): n is a, c, g, or t
  Peptide Sequence Number=SeqID_112598
tttttagtttacttttagttttacttaatttgtctactattgtccttaggcatttccgcgacctcgggagccatgaggatggggattctcttcatgggctgttcaatcatccaaagaggattctagtcctcgatgggattcaggatcctggtaaccttggaactctgataagatcagcttgtgctttcaaatgggatggggtatttcttctcccagcttcttgtgatcctttcaatgaaaaggctcttcgtgcagcccgtggagcctcattgcagcttcctgttgtcactggtacctggcatgacctgcatgagttgatgactaaatataatatgaagatgatggcaggtcatccagaaagtagcggcgatgcgtccaaaggaatccaatcactgtccaaagaactagctgattcactcttgaatgagtctctgtgcttagtgttaggaagtgaagggaatggcctctcttcagaaacactccaagcttgtgagcttgtaaacattccaatggaaggtacttttgaatctctgaatgtttcagttgcaggtggtatatttttgttcatgttacaacccaaatatcaaatagatagcagaactttaaccccttaaaannnnnnnnnnnnnnnnnnnnnnnnnnn

SEQ ID NO: 46625 - DNA, 433 bp, Setaria italica
  misc_feature (14)..(14): n is a, c, g, or t
  Peptide Sequence Number=SeqID_112599
acagtaatataatntagggggtacaggccagctgaaccgatacacacagttgagagaaatcatgtttcacatgttcacttcaaactgaccagaacgcactacataagtagggacacacaacatcttattcaaggtgtacatagaacacactggaacagcctaacaggtaggttcagaatggcctcagcgagcttcaacagcttgattcacaccttctgccttgacaagcttgtccagatactcctgcctcgctggcagatgatcatggggacggttgtacggtgtccaaacaggctcaccaacaaagagccgcattgccttgatgtagttgtctgtgtccaatgtgaagcggtgatacatccctgcaggaagaacaatcatgcctcctttcttacaactagactacgtcgtaattcctactttattctattta

SEQ ID NO: 46626 - DNA, 461 bp, Setaria italica
  Peptide Sequence Number=SeqID_112600
tgtcctcataatttggcagcttctctgggcatacatcacaaatgtcctgcaagtagcaaagcaacaaatgcctttcttatatttcactttactaaaccctaatagtactaggctaaaacataagacaatgaatcaatcattgcaagcctaagggcacagacagaccatgtaagagtagcctcttgcttcacggattttcttgaggttctcatctttctcccagttatcagggtttaggcgccagctgatgattccagttctgaaagcttctccagaggaatgaattctttgggttcacggtgatgaggaagcctctggtcctcttgactgtcatccatgtaccatgcttcaataacctcctgcttgccatcctggaactcggtctccatgctggacggaataagaaactaccctaccttagaatagacgggacgacgactacttagttttacggttaccta

SEQ ID NO: 46627 - DNA, 558 bp, Setaria italica
  Peptide Sequence Number=SeqID_112601
ttttgtagtacgtagtctagtaggggttttgtaattctttctattctatttcattcaaagaccacattcattcataccattttacaaatatctacgaaagatttgaagcaggttttgtgcaaactactgaatggcacacgagcatgattgtggtatgagcagattgcggtagcacatcttattcggcaacacttgtaaggtgtagcacaacaagcagactcgatagcaaacatgccgatatgctagtgcacattcaacgagcttcaacagcttggtttccacctcggttgatgattctatcgacatactccttcctagccgggagatggtcatgggggcgattgtatggcgtccaaacaggctctccaacaaagagacgcattgccttgatgtagttgtccgtatccaatgtaaagcggtgatacattcctgcaggcagaacaatcatgcctcctttcttcactgctatgcggatccactgatcattttggtccctcaacgtacaaaagtaagaaccgaactaaaccctaacaaaagaaacaaaataaagaacgtaaa

SEQ ID NO: 46628 - DNA, 558 bp, Setaria italica
  Peptide Sequence Number=SeqID_112602
tggcctcagcgagcttcaacagcttgattcacaccttctgccttgacaagcttgtccagatactcctgcctcgctggcagatgatcatggggacggttgtacggtgtccaaacaggctcaccaacaaagagccgcattgcctgcaaaaacatgctcgtgatcatcgtagtggcatcttctattaatacaatgatacgcagctctcctacgtgttcgagaaaaaaatcatcatagtggcatggctccagtaacaggattatgaagctaatcatctgacgcaccaaatgaagtgtaaatcctttttttaagaaatgaagtgtaaatcatacaaaacttagagaaaagataatggaaggtttgtagcctcagctaaataatgaacacctgtatggtattaataacagcgcaaatttgcagaaactacttggtgatggtaacttctcaggaccatatataaatttatgttaataggaaccaaagtttaaagatgtgcatgtgtcttctttgcacaagatgcaggtatgattgtatgttgcacaaaaattggaaagccataca

SEQ ID NO: 46629 - DNA, 1146 bp, Setaria italica
  misc_feature (174)..(189): n is a, c, g, or t
  Peptide Sequence Number=SeqID_112603
gggtttgaatcttcatcattcatcaaagaccacatcattcataccattttacaaaatatctacgaaagatttgaagcaggttttgtgcaaactactgaatggcacacgagcatgatgtgctaccgcaatctgctcataccacaatcatgctcgtgtgccattcagtagtttgcnnnnnnnnnnnnnnnnttttttttacttttactaactaattagtatcatctttcaacatggcgcaccttcatctattgaagcacccgtttctatttattcaagatatatggacagtaatataatgtaggggtacaggccagctgaaccgatacacacagttgagagaaatcatgtttcacatgttcacttcaaactgaccagaacgcactacataagtagggacacacaacatcttattcaaggtgtacatagaacacactggaacagcctaacaggtaggttcagaatggcctcagcgagcttcaacagcttgattcacaccttctgccttgacaagcttgtccagatactcctgcctcgctggcagatgatcatggggacggttgtacggtgtccaaacaggctcaccaacaaagagccgcattgccttgatgtagttgtctgtgtccaatgtgaagcggtgatacatccctgcaggaagaacaatcatgcctcctttcttcactgctacgcgaatccacttatcattttcatccctcacatcaaagtatccactcccttcaaggcaatagcgtatctcttcatcagtatgcaagtgttcttcaaagaaattctttatcttagcctcatagtttggcaacttctctggacacacatcacaaatgtccacgtaagagtaacccctggcttcacgaatttgcttgaggttttcatcattctcccagtcatcagcatttagacgccagcttaatattcctagctctgagagtttgtcaagagggatgaactctttgggctcacgatgatgtggaagcctctggtcctcttcactctcatccatgtaccaagcttggatgacctcctccttgccatcctggaactggtcctccatatcggcagtttgtgtgcggtatcgcttgctctttgcctgccttcgtctttctcgaatcctcccgaaagcctggaatctga

SEQ ID NO: 46630 - DNA, 278 bp, Setaria italica
  misc_feature (259)..(259): n is a, c, g, or t
  Peptide Sequence Number=SeqID_112604
cacctccagctctgcgaggaactcgcggttgccggctcccgcggcgccgtcgccggagagccgcttgaccgacgaccgcggtgccgctcgggagcacggcgcgatagacgaacccgaagctcccgtcgccgatgatgttgtccggtgagaaccctcccgtggcggcggcgaggtcggcgagggagagcttctcgaggcaggcgtcggcggcggagccgtagaaggaccacgacgaggagtccggcgcggagacggggancgccggccccgaggggacg

SEQ ID NO: 46631 - DNA, 384 bp, Setaria italica
  misc_feature (1)..(23): n is a, c, g, or t
  Peptide Sequence Number=SeqID_112605
nnnnnnnnnnnnnnnnnnnnnnnaacctttagtccaaacgcaaagtatatctatcgactattcatctccatgatgcagccagtttttctccatttcatgtacagtatattctctatgtttcccaaatgctaaacatacatgactataatctctaggcccagaaatgcaattgttccagttgacaaattaacatcacccttgttgtagacggtagacctcactcatgtacatagtatattctggatcatacaatgccaacaaaaataacgattgagcaattgagcggtcaagctggtagagtgagcttaacgttgttcttccaactgttgaggtaataataaaagaaatctgcatacaataatgtctgcacaaatcctgatatcc

SEQ ID NO: 46632 - DNA, 489 bp, Setaria italica
  Peptide Sequence Number=SeqID_112606
acaattaatagttaagtatttcggattgacttgcttacccctttctcatgctagttttatgttttaattcttccctagatctgcaataatatattacttgtaaagtataaaaaatgagcatggtaatatgctttttcttgtttgggtcatctagtggaacaagattattatgctatgagctatcttggctctatctaatggtgatgctgtatactcttggcacctcggttcatgtttcagcagtgtgtcagaattgatttggttccagtcagatgaaatcctaaaattcagcactattgtatcaatatggtacaatggctctatcaataacgattgagcaattgagcggtcaagctggtagagtgagcttaacgttgttcttccaactgttgaggtaataataaaagaaatctgcatacaataatgtctgcacaaatcctgatatccaagttatccaatgtacataatgtggttcagtgaagtagcggt

SEQ ID NO: 46633 - DNA, 308 bp, Setaria italica
  Peptide Sequence Number=SeqID_112607
aggtaagctgcgtcctgctctgtcgtagtcgttgggcggatctcctcctctcttcttcctcggccgttctgtctgatctgacggctgcagcctgctcgtcaggcctggaggaggctctgaaagccgcaccctgctcgtcaatggtgcgctgcaagatttccacaagctctgtcggcgacactggcccctccacctgttgtaggactgcgatgctttcgtcggagacgggggcacgacggcgcagaaggggaagctgccgggctgcagcgacgccaccatgcccggcccctccccatgccggcgaccgg

SEQ ID NO: 46634 - DNA, 268 bp, Setaria italica
  Peptide Sequence Number=SeqID_112608
tgtttgggtagttgggtattggagagttgggaaaggcaactcagaggaatctttttgcaaaaaatgagtagtgtgttggagatactcttactgccaagtgggaagtagttcctctgcagtactgagttgggttattgacatgtggaaccggacccacacgtaagtgacacaagagcagcccagctactgcagaggagctcatccgccaagtgacaagcaaggagacacctaaaacaaaacagaaatggcccaaagaaaccccgaggag

SEQ ID NO: 46635 - DNA, 249 bp, Setaria italica
  Peptide Sequence Number=SeqID_112609
ttggagccagtttggcaaacccaaagtcagcaacctttgctcgaaaattgttcattagaagaatgtttgaggatttgatgtccctgtggatgactggatgatctgcgttgatggaacaaatgagacggcatttaattgctaatgatccagtggttagatgttcacagatgatttgtttcgagttcagttctttatatgaaagtaaagctatgcgacagaagaagtcttcagtcccctggcccccgcgcc

SEQ ID NO: 46636 - DNA, 1422 bp, Setaria italica
  Peptide Sequence Number=SeqID_112610
tcagtcgcactagtaaagcaaactggaacgcatcttttgttcacttgattgctccagatgagctacttcagtgcatggccgaggtgggtacaactaactccctgtaatctttacgtatgctccatagaatctccgcgcatcgcctcatgctcggtcggttcctctttgttggagctaagcattgcagagcgagctcgaacatcttctcgactgccagattgatcgcgttgtttgcttccagattcgaatccagtgtttgaatagcattgccctccacaaatttctccattgcccattttgcggtaacacgctcaatgattgacctctttggctctatagggcgccttccagtaaccaactccaccagtaggactccaaaggagtagacatcactcttctcattgagctggtatgttctgagatattctggatcaagatagcctgctgtacctttgacttgagtagagacatggctagagtcagttggagccagtttggcaaacccaaagtcagcaacctttgctcgaaaattgttcattagaagaatgtttgaggatttgatgtccctgtggatgactggatgatctgagtatgtatgaagatatgtaatagcatgagccacatcaattgcaatttccaatctcattgagaattctaatactttaccatttacacagtcaaggtgctctcgaagattcccattgggaacatactccacaattatcaactgctcgccaccaaactctaggtacccatgaaacctaaccaaattcaggtgctcaatgcgttgcaatgtctcaatctcgttccagaactcacgacccatatgcttgtcataaacattctttttggcccgtttgacggcgacgagagtaccatcagcaagctggcccttgtatacagtcccagaaccaccctgcccaatcttcaagtttggtgagaagttcttggttgctttctggatctgcgccaaggagaattttgtgctgccaggcatctccctttctaaagaattcctgtgcatgggactatacattcctttaattgatcgcttgctcccaaaagtgctcccactgttagaaccttgtgagctcaccgactgtgaaagttggtgggaggggtggaagtcgtcggacatggaggtctccggcgagcgcgcctccgggggcacgaagcaggagcggaaggcgtcgaggaaggagagcccgcgcccgccaccgctcacggaaccctcgggggcggaggatgccgtggttgcgacggagacgcgggacagctcgccgctgccgccggggtcgctccgcctccagggcgatgcacccccgctggcgctcctcatcttggccctcgggtcggcactgcacgagctagcgaggctgcggcgcgtgcggactgcggagaggaaagggaggaggtgtccct

SEQ ID NO: 46637 - DNA, 1251 bp, Setaria italica
  Peptide Sequence Number=SeqID_112611
atctgatagaaattcattaattcagttgaagctcaggtatattgaagcaattttgtagttcacaacaaagccctagtaactgaaagcttaggctaaagtactcagacagatcagggaactaaagcaccgatcttgcgcccttgaaacagaagttaacactgagaaatacacagatgtgaacatccaaagcctgattttattatcacatcacagggctgtttatggaaccttcagatacttccacagcaaacttactccacattatttgttttccagaaactggaatgaactcttacatttaggtaaaacaggagcagcccatctcctagtacccttttaatatgatgggcaattcaaacccctctaccggtccaagctcatatctgaagagcatccgcaatcgagccagcaaggctcagcacctcaaatggaggtctttggccaatggctttcactgtgtgagggcatgagtccgtgatccagaagtaagcaaactgatcgcctggcccagcagaattagacgtcatgaaacgttcatatgattgcttagggaacacagcatgagtcacataagcgctaacttttgcagcaccatgtgaagccagagctttctggcattctctaagagttcccccagattgcactagatcatcaacaataacaacatggcgcccttcaggatttccttcctttattcgaactattctcttgtcgccttcacgaaccttattacagactatcattggaaagtgttgcaacatcttgtggaaccgcttccaagccccatcatctgggaaggcaatggtgatattgtctgcgtccgggagctggcggaggcgctgcagcaggagcgggatccctgtctcgaagcacggcaagacgtcgtccccaaagtagaacctctcctggagcgcgtggatgtcgtagatgacgacactagtcggtccaccgcgcgacttggggatcatggagaggatgcgcgcgagggtgaacgcggtggcgacgtccccttcctcctcaacgcgctcaaaggagcccgtggggaagaagggcagcacgagggtgaaggaggcgatgaagagcttgggcagcgcgaatatgacggagatctgctcgaagattaccgccggcgagctgaaggaggccaggaacgccacgtgctgcccccggatgtcgtgcgccttgttgatgaacaggttcgggaaaccgtcatcgaagctccgccagttgatggactggagctcgatggcg

SEQ ID NO: 46638 - DNA, 320 bp, Setaria italica
  misc_feature (299)..(320): n is a, c, g, or t
  Peptide Sequence Number=SeqID_112612
ccgcgccggcgagcctggcaaggtggtgctcaccgtcgagaacacctcgcacaagaagaagaaggtgctgttcaggtacaaggccaagagtccctgcgccaagaagtgctgagctcgatcgcaaccgaattctttggaggctgagagatgtgctgagaattgatcgtgtggaattctttgtgtgtgtaagagagaggagtacattgtttgtgttcatgtgctgattatttgaggggtggttgttgcggcatggcattcattacctgagaatagaaagaagagttggtatcacaaaaaannnnnnnnnnnnnnnnnnnnnn

SEQ ID NO: 46639 - DNA, 368 bp, Setaria italica
  Peptide Sequence Number=SeqID_112613
cggacacgacgctgaccaaggtgtttgtgggcggcctggcgtgggagacgccgtccgacgggctgcgccagcacttcgaggcctacggcgagatactcgaggccgtcgtcatcaccgatcgcgagaccggccgctccaagggctacggcttcgtgatcttccggcaccctgactcggcggcgcgggctgtgcagaacccgaacccggtgatcgccgggcggcgcgccaactgcaacattgcggcgttcggcccgccgcggcccgccgcgcaggcgagaggtagaggaggaggaggaggaggagcccgggggccccacatgcaggatcagccgcagcttggtccgccctacagggtgccgtcgcagacg

SEQ ID NO: 46640 - DNA, 528 bp, Setaria italica
  Peptide Sequence Number=SeqID_112614
aaaaggaccataacaaactaaaagcatgatatcccaccatcaatattatattggaatccattcctacccagtttgactatatctgtgtacaaaagtagttaggatacacttgaaaagaacaactccatgatcatgtgtgtataattgacccatggcctctcggttagtcattttcacagagcacctaatatagatttcttttagagaaatatttcaaaaattgtggcgagtgtatatgacgagcttacattttaataatataaccattataggattccgtagtatgaactcttttccggagaatcgaaaaggtttttagaatcagctgcatatacaaataattggtgttgggaacaaaaactgcgagtgtacaattgttttatatatatgtttcttaattaggaaattattgttggaaatatttgaaacaagaagaagattttttatttttaaaactaaaacacacattattgtattgtagaaacataaaaactagacgaaataaactaagaaaacaaactaacttaa

SEQ ID NO: 46641 - DNA, 428 bp, Setaria italica
  Peptide Sequence Number=SeqID_112615
agcagggggcactgaggttaacgttgatgcaacaccagtgcagagtcaagaaacagcaaagcaggtatcgacatatttcatcatgatggttttgtgcattgaattatagctaacattgttccaagaaattataatccagattgagccaagaagcattgtcacaatagaaaaaggaaatgtgccacctaattgcaatgctaaatcttccgacatttcaaagagtctgttcactgacaagagttcgaaaagtggagcacacaaatacattagtacacagcagctgctatctgttgctaaaacgcgaaaaaaagaacaataggtaagaactggaattgtgctttcataatgccattaccattttctagtgtcaattcaaagtttgcttcagtattcattcctgtacaagctgtaactctctcattacactt

SEQ ID NO: 46642 - DNA, 216 bp, Setaria italica
  Peptide Sequence Number=SeqID_112616
ccgccttgcaattctgtgagcacgaagaaatgcagcacagatgtaacatcctgactccaatctttcaactgtgaagtatgtgacaagctttcgtggcaacctgctcatctgaaggaacctatagtaattcgggaactggacattggactttaaaactttccagacaaccattatgtgattggaaagttttaaagtccaatcacataatggttgtct

SEQ ID NO: 46643 - DNA, 1980 bp, Setaria italica
  Peptide Sequence Number=SeqID_112617
aagctcactaactcttggcattttcactagcggtggattcctcttcaacttcttcaagtccgtctgcaaagcatcatctaaatggaccatttccttctcttccagcaacccaatcttctggaggttttgaatatactcactcaagtgtgtcaatacggaatatgtgacttgccgtgtctttagcacacgcagcacctgtggaaatgtaactcgaacatcttccaagaattttttagcttcctctccctcagcattactttcatcaataacaattcttgcaacctcactatcaccaagaaaatcatgtaactgccgccttgcaattctgtgagcacgaagaaatgcagcacagatgtaacatcctgactccaatctttcaactgtgaagtatgtgacaagctttcgtggcaacctgctcatctgaaggaacctatagtaattcgggaactggacattggactttaaacctttccaatcacataatggttgtctggaaacaagatccatagcttcatcaaccgatctcatcagaatatttgccgtagcttgagttattcgtccctcttcaagcattccccagtaagcggcttgcacaccattcaaaagcctctctcgaatatctcttaaattcatggtatgcatgtggtcatctttgtcaccaacatcatggggatgctctggatcatcgtccaagtcattcaaacatgtgatatgtttctttacagtagcccagtcagcaggtcctagttcctcatcttccctaagctcaccaaaagcctctaatgctttgtttagcatttcatatcttgtatacttcaatacgcgaagctttgtggctgacagtttgtccatgccaagcatacgtaacaaaaattgtgtggttgaaccattaaaaatcaatgttagaaacacgatgccaccagtgaagaacacaaacatcattccaacttccggtttaatataaggttgaactgcatcactggtacgcttaacagataacgatagtgacagagcaacagctcctcgcagccctgaccaaacaagaatcatggcctctttcaagtccaacccatacccaaagtgacgcaacaatgggtacaaagcactaacaactataagtcgggatatttgcacaaagacatagagcagaagaaggaagccccacgaagtgccatgcgtctcaaaaatggacattattttgtagaacaccatctgcaataacaaccccactcagtataaaataagtgtgtttgcaatgtaagcaaccatttcccagaaatggtgtaaactttgctgactttcgcccttaaaagcagtttttgcaaaagctgcatagaacattcccagtgtcatgacagtcaaaacaccagagacctccagtgaatcttgtgcagtgaagaaagctatatagctgacagcaagagtaagcgcaatctctatgattgtatcattaaaaataaatcccaaccacagtactgatacgattccgaatgcaaggcccagagcaacagctccaagtgaaacttctgacaggaactttattattgcgccagcatcaaaggttcttccaagcaccattcgatagaacagctgatagacaacaatagcagtcccatcattcattaaggattcaccctcaatgattgtactgagctttttacttgctccaagttcttttagcagtgcaaccacagcaacaggatcagttgcactaagcagtccaccaagtaacaatgatattttccagctccagttgtaaggaaaagtgagctttacagcagcgccaagtaaaaatgttgatattagaacgccgggtccagcaagtaacaccatttgtgccatacatctctttatttggtgtatttccatggagaaggagctttcaaagaggagtgcaggtagaaaaacagccagcagaaggtcagggtttatgttggcccagatacgaattccagctccaagtttgcctagaccatggtg

SEQ ID NO: 46644 - DNA, 2141 bp, Setaria italica
  Peptide Sequence Number=SeqID_112618
tttttttttttttttgtaaatgctgaacatttcattttataaatgttgatgaatgtacatcaacaaggcattgacatggatcagcataacattagtaaccagggaactctaattgttgtgaaaatgtggcccaattggggcacaaatcagaaacaaaagggcatatctttacagtgtccgtgttcttcagaacatccctacagttgatcatcggccacaagcttcagcctcgaagtctgggaagacgacgaatgcaatggtcagaggagcaacgtagatcggtgagttgaccgaaacttccactggatacaatggagggatgtcgccatcttcagtgagttctagaggaactccattcaggagcatggtccgggcaaaggggttcccatcttttgctgagagatggtactcttccctcttggaatacccgtctgaagctttgctcccgacccaagaaaccgtccttttaaggccatggacaaagatattgtcccttctgatcccttgcccctctgcaagattgacattgaggtcgttcctgactgaaaccatgaatcccatgcttcggtgcaggttcagcaagaggattgtgacgccccccttttgcttcccgcaatgcacataggcacgcaagtatgaagagccactgatgtctgtagaaagaactcctgtacccatgagccgatgccacagcaaggcactgtagtaatccgggtttggcacgaaagtttcagtgtcaagaagcccatagttgccaccaatcagcgtctgtctgcagtacaccttggtgtcatactttgctgactgcccaagttgatcaagataccagaagctattcaggaaagtattggacacaagacggctgccgctgttatatgcaccaccagcttccccaacccatggagcagaccatggtccatggcgttgtattgtgagttggagacttctgaatgtgtcagaagcacggctcaaatattgtgggttcaaaattctatttggaacttgtggatcgttaccagcaccaaggttgtaaatatgatgagtcattgcattgagaacatttggcccagacacctcaagaagctcagcaaaccatttttggtcaaaaaatcctcctggggctacgaccagtggtcttctggaatctccatataactcattgatgatggtttggagttcaactaagtcctttccatattgttcagctcccacgctcgctccgattccacttccactcaattcattaccaaattcccaagaatctataggatagtcctttgaaactgtgtactccatgaactctcgagcattgcttgaattccaagggcctccccaaacacctctgcgtatctgctgtcgtccttgaagcgcgttaagaccaaatgtaataactgcacctgtattcacgaatagatcattaatagcatcccatctttccaaggttatgcatccttgagaaaacccaaacagaccgcctgaaacctttgtaaatggatcgcatggagattctaaatttggtgttccatataacacctgatcttgtaaagagcctccgactctgatacgcaatgggctaaaggcttgaatagctttagccaacaaagggttagtcaggtccaaatttaagacagaagcccttccccatgggcattggtcgtagttacacttctccgggggccaccaatcaatggtggcgcaaacaaattcatcactggtcgaagcaatcgtctcagagcctcgaacaattacagtcacatctgagtaatcctctgctcgaacccatgcaggcagacagagtagaggcaagagaaagataaaccataagctcatgcttccagaacctggacaaccgcacccaacccaagaacggccgcgactcggctccggcgctcaagaacagggaccccctcttctcccaatgcaggcggcggcgcaaatcaagaaaagctcgagcctttcgtcagccggaaccaggaccggggagtggattctatgattgcgcgcagctcgtgctcatggataaagagtggggtggggaagaagagacgggacgggagattcttgaggaaaatctcggcggtggttgccgcttcgctttatactacggaacaatctctcccttccaagctactccctcttgc

SEQ ID NO: 46645 - DNA, 485 bp, Setaria italica
  misc_feature (460)..(485): n is a, c, g, or t
  Peptide Sequence Number=SeqID_112619
cttagcgtaatttggtcataaagtatgttgtgctcttttacttgcgtagtatcctgcaataagagaaatggagcagcctctttacacgattctcatgtggaatctttgcatccggttcaggcacatagatgtagttttaaatgtagttttaaatgtttgggtgaaatttgtctactgaaactctatggatgctacaagggacatgctgggttccagtctaggcaagagtagggctggttactggcgacatggtgcaggcaaattgttagggtggctgcttgagctgttgttggttactcttgttgccaattgcctacgccacatagatgtgttcaagatatgtggagcctttctcagtagtcatccttgctttctgctggctcgtgttgaagctagagtgcgtgaatgtaaatgaacaagtgattaaagtatggattccatttattggtcaaaaaaaaannnnnnnnnnnnnnnnnnnnnnnnnn

SEQ ID NO: 46646 - DNA, 773 bp, Setaria italica
  Peptide Sequence Number=SeqID_112620
cgcaaccaaaccttcctttccattccaagttccatccccccgccgagcgaagtctccgagtcaacaacaacatccggcaccggcagcaccgcagcacctaccccagccaggatcgctcgcggccgcggcgaaccctaatggtggcgatggggttcgcggaggccctgcaggcctacacgggcctcacacctggggccgccgccaccatcctcgccctcatgctcgcgacctacctcctcgtctcctccctcttcgtcgcccccgccgctccctcccccgcggcgcctcccaagcagcgggaggagaaggagcaggagggggagaaggatccgatgccgttcgtgtatcccgaccccgtcgaggtcggcgaggtcacgctcgagcagctcagggcgtacgacggcaaggaccccgccaagcagatcctcatcgccatccggggccaggtctacgacgtctcgcgcgggaggctcttttatggccctcagggaccatactccttgtttgccgggagggatgcaacccgggccctggcattgatgtcatttgaccctaatgacctcactggggatttggacggcctaagccccgatgagctggaggtgttgcaagattgggaggaaaaattcaaggagaggtacccgagggtgggtcaccttgccggtcaagacgcagccggcagtgaccgcatcgccgcccagcctgaccatggggaagaggacgcctaactccatcgccggtttgtcgtcctctgtttctcttactggatccca

SEQ ID NO: 46647 - DNA, 240 bp, Setaria italica
  Peptide Sequence Number=SeqID_112621
gtggctgcatctgcagacgagcatcgatcgatcagtagccagagggcgtagccatccaaccatcagctgatcagcctctgatctttctgtgcccgccgcagatcctttatcctcttcctcaggcagcacgcaaatcagtcgaatgcgatgaaggtaagcgaggaaccatgtcaatcttcagctcgcgcccctagctctgttccgcgctgtgccgcgaagatgaacccatactcaattgat

SEQ ID NO: 46648 - DNA, 603 bp, Setaria italica
  misc_feature (31)..(31): n is a, c, g, or t
  Peptide Sequence Number=SeqID_112622
gaagaggaacgtgagattggagagagtgatngaggatgaggatagtggaagggatgaccgtgcccgaaagaacaggaggttgaggccaatcactatggcaaatggaaatgtggcaggttttggggctgtgaatgtgaatagcagagggaaatttgattttgagaagggaaaggatgcgtatccatacctttgggagactgttgaggatctgtcaaaggagcacccgcatggggtggcattcaagaaggcctttgagttgattgaaggtcccaaagctcgtgggatggaggaaaagctgcggaagttcaggttgacagagatcagacaccagctgcgccggatggaactgatgaaggagacagtgaagatggtgcttgatgcattggagggttgactaaggagtaatgggtgatctttggtgggtgagtagtgcactgttaaaaggagcaatcggtatcttcttttgtttctagatagagtttctgtggatgaattacttaacttttgtggtcaaggtgcacttgcctcagtgagaatctagttgcagagcaaggagtaatactgctcttcttgttcttggtggatcttgtattttgtgtcgct

SEQ ID NO: 46649 - DNA, 546 bp, Setaria italica
  Peptide Sequence Number=SeqID_112623
tctgtcacacacattcaacccactgctaaagtttcacactcagaatcattgtagattttgagatgaaaatggttaagtacatgctaccttagggtaatgaaaccattttaattgtttttgtactagtccaatggatcccaaatttttacaataacttagtgataacatggttgagttactgctaaattctcagtgtcatatgtttctgtttgtatatggaaacaaaatttggaatatgaaccagtttaaaggaataaaagaaaacattaagtaatagtaaggttaaaatggtaaattggaagacgtatagaaaaacattcagaaataggataacttcccaatctaaggataacaaacttaactcacacaatatatgtgtacacaatcaccatcaaagtcaacccagagttttataccacaacacaccttactttatgaagataatgaaagtttagaaccttatttacatgaatgtggtcgaaatgcaattttcacttcaacaataattcatgttttgcatcctgcatgtgaaagcattggaaaatt

SEQ ID NO: 46650 - DNA, 1174 bp, Setaria italica
  Peptide Sequence Number=SeqID_112624
aaaattaaaataaatagtaatttggaacggaggtagtataaaccaatctctccgccaatcgttgtcttaagcttcgccactgacccggcagccgtgccggcgaggcgtggcgagttctgatcaaacagcgttctgccggggcaccttacaagcagtgaaagtaatatacatccatcacgaactgcattgtccagccggcaccaacatgaaaatgttgtggagaacgacaggcgctattaacttcaggtacaacgacaatgaggtatcacaaattcagaaagctcagtaatggagtacactctggtactgctgagttcagatatacatgaattccccacccctaacagcattcgccgctcccctcctgtcttcctcctcttccttttcgcgctccttcctgctctcgtacacatggtcatccgtcctcagctcatgccggcagatcgggcacgagttgttctcgtccagccatggcttcaggcacggaggatggaaaagatgcttgcacggcagctcctgcattttgtcgccgacaaccaagttttcacggcaaacagcacactccgtctcactacccaatctggcaatgacttcttcagtaactgttaggacaggtaaattggcaacaacttcctttgaagctgggggtgccctgggtggatgctcaatgataccctgcagtgattcttccaaggcagtttctagatccctgtctcctgatatggtttctaagaagttcattatagcaggtgcaatatcctcggctctagactccctcctattgttgttcccatcttgatccccagaggattcagttagtatgctcaattcccgtgctaaattatcagcaacaagccatgctggaggtggaggttcctgtcctacagtaaggtgcccttcaaaaagaaatctggtgtctgcttccctgttgcttggcatagaatcctcattttctttttcatcaagatgctcccgagccctcgaaatacagctcttcaactgctccttttcagcaggattagttaccagcttctctgctccgacaaagaggttcagaccagcacgccaaaatccaggagctgtatatctagtctggagcactgttgcaacacggcaaacagtggagtacatcgatttgcggtagggcgggggtaggcgtccggtcgttagtcgg

SEQ ID NO: 46651 - DNA, 272 bp, Setaria italica
  Peptide Sequence Number=SeqID_112625
cgacccacctcctgcgccccgcctccgccggcggcgaaccccgctcgaagcgggagaggttggcgacaatgacggggcggagcgcctcggaggcgtcgttggcccagacgaagtcggcgccgacctgcgcgaggtagcggagcgcgcggacgccacagccgcacatcgcgtcgaggcagaggaatggggcggaggggtcgaggcggccgtggcggcggtggagggtggccgcgaggacggcgaggtcgcggcccgcggcgctgtcgctgcgg

SEQ ID NO: 46652 - DNA, 588 bp, Setaria italica
  Peptide Sequence Number=SeqID_112626
gaggatgttatcacctggagatgggagccctcgggtgtttattcggcaagatctgcgtacagagcattcttcattggatcacaaacctctcctgcaggtaagttgatctggaaagcctgggcgccaatgaaggtacgcttcttcatgtggctagtctgcagagatcgcctgtggacagctgccagacgccatcgttgtggtttacaggacagcactgcacgcgccttatgtgatcaggaattagaagacgctgaccacctgttcgcccgttgctcgtacacacaacagctatggtaccttgtcagttccatcctgcacattcccagtccggcgccaaatcgagacacgagtttaactgaatggtggcttcagatgagacacggcctaaacgctacacggaggaaaggacttgactccagcttaatgcttatatcctggaagatttggaaagagcgcaacaacagggtgtttagcagagcgcctcctatgcagccagcgcagctgttacaacagatcatcgaggaagccattctttggtcagcagctggcgccaaacatcttgccacctcggctggccggcaccagcag

SEQ ID NO: 46653 - DNA, 438 bp, Setaria italica
  Peptide Sequence Number=SeqID_112627
tgccggcaccccctgcggccgccgcaagcaccaacgccaacgacccgaacgcgaacggcggcgtcaactgaccagcgagctcgctgctcgcctctatatgatcggcgcgccgcggtggacggtgctagagctcaccgttccttctcggttcttatcactactcgtgtctcgcctactaccaccgagttcacccctactaaggcctagtcgtgcctcgtgtgtgttcgcttcgaatgttgggctgtgaacttgattgttaccatgttgttggccgcatgaacttgtgttgccttcaacgagggcgtgccatttgttctgctgctctaacttacacgagtgagatagacaaacctgccgtgactctactgctacaaatataggttcttgtagcatgaaaaaaagttctgtgctgatatgttgtcaatatacacggatctt

SEQ ID NO: 46654 - DNA, 393 bp, Setaria italica
  Peptide Sequence Number=SeqID_112628
ctcagtcgcactagtagcagcaaaagaatttgattggataagctgcagccttggggcacggtctcgcgtgcgcaaagcgatgttccggggtggtggttgtttttaatcccgttgccttttggctcgcgaccgaccagggcagaacagagcacgcctcgagcgccgcggcaggcatccatctatgcatgatgcatccatgcctcccgtgtcccctctgctcgcacgaaccatcatgaaaaaacggcgcacggattcaccttgcttgcttttctcgcttcacccacttctgttactactaattgcatttctttttatcattatgaacacctagtactggaggagcactgttaattacttgtacagctaaaaaaagactaatatcttgtacaacct

SEQ ID NO: 46655 - DNA, 356 bp, Setaria italica
  Peptide Sequence Number=SeqID_112629
tgcacacctcctcggctcgccgccattagcgcgccccgacctcgcctctctccatctagggtttctctccctctctcccctccccccacctgtcatccccatcgactcggagcttgccatggagtcatcgcggtctcggaagcgaacgcgccaagcgtatgacgaccacgccgcgccgccgccggagcgggaagtggtaccgaggggcggcgcgtcgccgccatggagagaggacgaccgcgacggccactacgtcttcgatctcggcgagaacttgacccgccgatataaaattttgagcaaaatgggagaaggttcgggttttctgcaaactgtcgcctcctcttctgctgggt

SEQ ID NO: 46656 - DNA, 709 bp, Setaria italica
  Peptide Sequence Number=SeqID_112630
ttgctgtcgtacctgaagttgcaattgatccagaggatcctgcctccatcagcgttctcgaaagcccccatgtagtccgcaactatcccggcgaggcagcgccggcactgcgccggcgtctggtccggcgtgcactgcgccacggcgtacaccgtggggacctcctggtcgaacccggcctccccggtggcgaaccgccgcgtggagttgagcgcggcgcggtcggcggtggcgttgatgagggcggccacggcgcggttgaactgggccgggttcgccgtgacattcgtaggtatcgcgtaccaggctaactggcccgacaggtcggcgtcggcggcggagaggacgctcgtgttggagtagcggagcatgcaggggtcgtagtagattgtggcgtccttgttgtaggagcagtcgttgggcaggtcgtggaaggcctgcgcgaggcaggcgaagcagttgctggcgttaacgtcgccgcggcacaaccgcggcccagacccggtcccggccggcgccggcggcggccgtggcgaaaaggttgctcggggacgtggaggcgttccccggcagcgtggcggcgaggaggttgaggttggcctggtacctgctgttggccctgaagttgtccgtgccgcataacggccaagggtagcttgcggcgccggggaggagggcgatggcgacgacggcggcgatgacggtgagg

SEQ ID NO: 46657 - DNA, 520 bp, Setaria italica
  Peptide Sequence Number=SeqID_112631
tgtcgtagtcttgcactgtttgcttggggaaatttccaaaggtaaatattgtgaggtcagaataaatttcaaaagacatgaatatccttgtttaaattggattttagtgcggctgcattagtttttgcccacatgctaattaaagtgactttcctattttaggaagtgaacatcaacctcatctgtaccatgcgcactactagagacccttctccaatttcctcgtgcaaaatttgtatttttaacccttggggtaattggctgcacaatgcttgagaggagcaaaggtggtcaatattggttttcccaggatgaatttaacaacagctaggatccagtaatgggcacatgtttgctttgagacttcaatttatttacctgatgttgtatattaaataggtgatgattctggaataggtgcatcagatatagaaaaggttgcagagtccctaaagatggaagtacaaaaagagatggcatcctgccgacttgtctgtttttcaagttcttgagtttttct

SEQ ID NO: 46658 - DNA, 198 bp, Setaria italica
  Peptide Sequence Number=SeqID_112632
gtcacagacgcgcacccgaactccctcccggaagcccctcgccggacgctctctctctctctctctctctcgccgccggcggcaactaaatcaggcgctcaggatggcccgctacgaccgcgcgatcaccgtcttcctcccccgacggccacctcttccaggtcgagtacgccctcgaggccgtccgcaagggcaacg

SEQ ID NO: 46659 - DNA, 689 bp, Setaria italica
  Peptide Sequence Number=SeqID_112633
aacgaaaccaaaccaaaccgaaccggaaccgggaaaagaacaaaagactacaaaaccctaaaccgccggccgggaagcaagctcaaaaccctaaccgccggcgacgccagcacgatggcccgctacgaccgcgcgatcaccgtcttctcccccgacggccacctctttcaggtcgagtacgccctcgaggccgtccgcaagggcaacgccgccgtcggcgtccgcggcaccgacacagtcgtcctcggcgtcgagaagaagtccacccccaagctccaggactccaggtccgtgcgcaagatcgctagcctcgacacccacatcgcgctggcgtgcgcggggctcaaggccgacgcgcgcgttctcatcaaccgcgcccgcgtcgagtgccagagccaccgcctcaccgtcgaggaccccgtcaccgtcgagtacatcacgcgatacatcgccggcctgcagcaaaagtacacgcagagcggaggggtccgacccttcggcctctccaccctcatcgtcggcttcgaccccctacacccagaagccccgccctgtaccagacccgacccctccggggaaccgttctccgcagtggaaggccaacgccaccggcctgcagcaaaagtcacgcagagcggaggggtccgacccttcggcctctccaccctcatcgtcggcttcgaccccta

SEQ ID NO: 46660 - DNA, 553 bp, Setaria italica
  misc_feature (491)..(553): n is a, c, g, or t
  Peptide Sequence Number=SeqID_112634
ccacggggaggaactcgaactccatgcgggaattcctcgagaagaactacaaggagacctccggcaaggagactatcaagctcgccatccgtgcacttctagaggttgttgaaagtggtgggaagaacatcgaggttgcagtgatgacaaagaaggatggtctccgtgaacttgaggaggctgaggttgatgaatatgttgccgagattgaggcagagaaggctgcagctgaggctgcaaagaagggtgccccgaaggacacctaattcttggcttctgctgtaccttcaatcaacactttgtttgtctttatcatattccatgcactatattaactgttttagaggaacgctagattgttaggtgaaactgtatgcttctatgcctgtagagtcgcatgctgtgcaatgtgcttatccacatgccttcctcggaatgcttcaatttcatctactgtatccgctggacagttgaaagttcaaaacttgttnnnnnnnnnnnnnnnnnnnnnnnnnnnnnnnnnnnnnnnnnnnnnnnnnnnnnnnnnnnnnnn

SEQ ID NO: 46661 - DNA, 1189 bp, Setaria italica
  Peptide Sequence Number=SeqID_112635
tagactacaaaaccctaaaccgaccggacgaacgaccaagacaacgaatagccctcttcttcgcagacgcccctggagtcctgaacccagaaaggcacgaccaccaccgccggccgggaagcaagctcaaaccctaaccgccggccgggaagcaagctcaaaccctaaccgccggcgacgccagcacgatggcccgctacgaccgcgcgatcaccgtcttctcccccgacggccacctctttcaggtcgagtacgccctcgaggccgtccgcaagggcaacgccgccgtcggcgtccgcggcaccgacacagtcgtcctcggcgtcgagaagaagtccacccccaagctccaggactccaggtccgtgcgcaagatcgctagcctggacacccacatcgcgctggcgtgcgcggggctcaaggctgatgcgcgcgttctcatcaaccgcgcgagggtcgagtgccagagccaccgactcaccgtcgaggaccccgtcaccgtcgagtacatcacccgatacatcgccggcctgcagcagaagtacacacagagtggtggtgttcgacccttcggcctctccaccctcatcgtcggcttcgacccctacaccgacaagccggccctgtaccagaccgacccatccgggaccttctccgcatggaaggccaacgccaccggccgcaactccaactccatgcgcgagttcctcgaaaagaattacaaggagacgtcaggcaaggagaccatcaagctcgccatcagagcactccttgaggttgttgagagtggtggcaagaacatcgaggttgcagtgatgacacacaaggatggccttcgtgagcttgaagaggcagagattgatgaatatgtcgctgagattgaggcagagaaggccgccgccgaggctgcaaagaagggcgcgccgaaggaaacatgatttggaacagcaactctagataaactcttgttccacagcatgtcttatgatccacatcttttagacggatgcatgtttgtttcggtaaagtgtttttttatttctgatgaagctgcttggatggaaattctcgtgctagtgactttgtgattgttgtcccggtgacctgttggtctgtcgggtatatttctgagttctgacaatggttacaaaaagaaaaaaaaaaatagagtcgtgttgcactgaaaaaa

SEQ ID NO: 46662 - DNA, 422 bp, Setaria italica
  Peptide Sequence Number=SeqID_112636
aactactagttaggaaatagactaagaccaatgaactaacttattttggctctgttgatcctgttatcctcccccatgctatgtgctgctggttgctttgtctatttaagaacatataaattcttaaatttgccaagtctggttatatctgttttcatgtttaatatttatctccaccacggcagagcctcacacacaagagacttgactacccactatgtttgcaatctttgaacatggaagtttcattacaaaagttggttgttgtgggcagtagccagtaggtgagtaggagcctcactgttgcactgctggagcctaggtactgcataatctgctaggcttgtttgtatttttggtgtatttttcctttgcttgtggtgcgcatattctaaattattcagggttgtggactttgggtt

SEQ ID NO: 46663 - DNA, 523 bp, Setaria italica
  Peptide Sequence Number=SeqID_112637
tctatccaccagcgtaccacggcgcgcgtctgcgtgcagcgacaatggcggccgctcatcgcctagttcttctcgtcctcgcgcttctcgccgtcgccaccattgccgccgctgcctctggcgcccggcgagctgcggtagtagggaagagcgccgtggtctcgctgctggagttggatggccgaggtgcagcgagggagacccggagcggcagctgctacgccgacgcgaagcgtgctgaaatgctaggagagagcaggaaatcgaggggcggcaagaacggccaccgtgctagagctcaagcatcactcgctcaccaccatcccccgacgacccccgcggcccgcgaccagtacctccgccgcctcctcgccgccgacgaagcgcgcgccaactcactgcagatcaagaacaacaggggcgcagctgcgtccacgcagtccggctcctcagccgaggtcccactgacctccggcatccggttccagactctcaacttacgttacctacctattcggttctt

SEQ ID NO: 46664 - DNA, 321 bp, Setaria italica
  Peptide Sequence Number=SeqID_112638
ggggaggcgtgggttctcgtgccgcgctggatccgccgcgtcggctgcccagagaacaaaggagaaaaaacgtacaaagccttcaaaggatagagtgcaactccgggtttgtctagatcaccaggtcaagtttggcgagcatgttggcattattggttcgacaaaagaggttggctcatggaagagtcaggttgagatggagtggacacctgatggctgggtctgtcagcttgacctccctggggaaacactcatggagttcaagtttgtgatattttgaaagaagggaaggaaaagtatgggaaggatggtgacaaccgt

SEQ ID NO: 46665 - DNA, 443 bp, Setaria italica
  Peptide Sequence Number=SeqID_112639
aatcaataggagcgggacaggtaattattgatcagttgaagaccttcccacaatttgatttttatctgttcgaacacatgggtgcagatcaaatgaaaactatcattaaaaaggaagttctaattacagttcagggctcaggacaagctattgtacctcagtcatggatattttgagattttttattaataccttttggttgcttattttgatgcttgcatttttccagacattttactaagtgaataaatttcgggatttgcaacctatgttattttttcttactgtttccttttgtatgtgaagtagggaagaagcacataccttggggcagcatccattgtaaattgcttggaaaactataagccaaacgttgtcattacttctcgggttgctgatgctgcacttttcctagcacctatgatctatgaattagtaaagaa

SEQ ID NO: 46666 - DNA, 452 bp, Setaria italica
  Peptide Sequence Number=SeqID_112640
tttaaaagtttaaactttaaactttaactcttggagcacagaaagaagtactgaacctggcatctattttgggactggagataacagtagctgtagcttatgaatcatcctttgaaactcaaggaagccctctatcgtcctttcaatcaataggagcgggacagggaagaagcacataccttggggcagcatccattgtaaattgcttggaaaactataagccaaacgttgtcattacttctcgggttgctgatgctgcacttttcctagcacctatgatctatgaattaggctggaactggaatgacacggaggagttggcacaagggacattagctagccatcttctggaatgtggctgccaactcacgggaggatatttcatgcaccctggagatgcatatagggtatttttcttttgagtcaacttgtggtatttgtctcttccatac

SEQ ID NO: 46667 - DNA, 1959 bp, Setaria italica
  Peptide Sequence Number=SeqID_112641
cagatagtcaaggagatcaccaatatagtgatgggtaacagaggtacagaggaacgttaacgggttaaacttttgcctaaatcaccaacttttatggggaaacagaagttcatcaacttataactacatgtttagcagcaaaagatgatggatttgactgatccatggcacgacctgttacattctggtatctcatggcaagataccagaagatctataggctaactgttcctctcttctatgataaaacaagatcgttgtcgccaaggtgcgggggcctcatgcacacctgaacttcatgctcctctggtccaacccggtgctttggaaccatgatttctagtccagttcctgtctcatcataatacgcctcaatctttgcatcttctggaatccgggtggccagaggtatctccctcacaaactcgccgggagggcagtgctcggggaaagggtctgtcagcttgaatgtcctgtcatgcctcttgataacgggcatacgggcggtgctcacgcatgttatcttcacaatgccatgagtcagcgtgttcctccaagtcaccctgacactgtgtgggtcggagaagagcatgctcaccacgattaagtaaccttcatcatcctcatatatcgtcttggcagcagtgacaggcccgcttgcatgttttgcaacaccagtgaactcatgcatccatgatggctcgccagtatgagcttctacctcttgctctctgtcagaacacgaattgtttgccatcacacagtcctcctccacaccatggccaaagaaatccttgcgccgtttggcacatttgggtgaaaggtccatcccatcatctgatgatggtggagttgataggttgagacctgaaccattcagtcccttcttgtgactatgagatccatgtgcggcactctttgatgccggtggatgtggcctgtcaagttcaaaatcagtgctcggaagattcctccatgactcaaagtcactggcttcagatggtattgagaaattaagttccctgcctgtaagttcagcccacctcttcaattcggcttcaggaactgctgataaatttggtgagaccacaatttcaatcccatgaaggcactgcgggtttgacagccctcggtaatgctttctctgcatgcggtgtgaccttgcaaagcccttgtcagcactgaatgggaaagagggctccccatgcttggaatgcccattcatgaaactccggagctgcatcttgccaagggcattgtcaggccgctccttgaaaacccacatgtacatgttctccatgtcgtgctgcaccaggaagacatcgaggcggaggtcagacttgtcgaagcccgagatgcacccggacgcgtctcgtgtcaccttgccctttggcttctccacaagcgcaggcctgaagtagtgattgaagaagaaccatgcaccccaaatgctgtctcctcgcttagcacacttcctcgcgccgacaccgacagtggcactgccattgccagtcgactttggaagtgtaagcacaacctcagattcatagttatgtgttccaagagtgacatcaagtatctcgaacgcgtcaaggctccacgatggaggtggctgggagggatctgcagaaagcgggaggttgatgtctggcgcaccagggcgcgccgactcacgcagaggaatgacgaagggttccctgtcaccaccactaccaaccccattggtggcaccgccgccaccggaggacccagtggaggccgggtgcgagcctgcagggtccatggagaggcgcgtgcaggggtggctgttgctgttctccatggagagggaggtgaggaggggctcccccatggagagctccctcctctccttctccttcgtccttcctattgttgcctacttctcagctacctcttcttcttgctctgtcacctcctgctggctgctgccccttctcg

SEQ ID NO: 46668 - DNA, 437 bp, Setaria italica
  Peptide Sequence Number=SeqID_112642
cagatgcatgaacaaatttacatagaagaaagaagctagcaattgtctgtatattgatcaatgatccgatgcaacccatagcatccacgagaaaattataatttgtcactatactactatctttaacagaattttatatgttttataacccaaataattcttctaagatttgaagaaataagaaagaactgtcagataaatccagaagaaataaggcaaggccacaatggaaagttggtcttgatgtgtctttgtttctgtctgattctttttctctcagcatagaacttgaatctttctccatcgcagtttccggaaactgggatggataaagataggagaaagataagagcagatgaagaaagggcaaaaggtggggagaaagtggagaattcaggaaagttccaactaccatctttctgaattacgatatgacg

SEQ ID NO: 46669 - DNA, 1074 bp, Setaria italica
  Peptide Sequence Number=SeqID_112643
ggcaagaatccagcagagcgcctagctcgccaaaagaaaaatcttcggcgccgtttaggactggatgtatgtgagcagtttatggatgtcaatgatgttatcaaagacgaggatcttcttgcccaaaaaattattggggttcacatgtacagaataatggattccattcatccaatacaggtcgtaatattcagcaattggtttccaccatggttcctaggtatcacaagcagcctaactttcgctctaggcgattaagtgccagggagctcaatatgctgaagcgcaaagcaaaaagtagtgcaaaagatcatacaaagactgtatctgaggaggatgaggttacactaaaaagttctgcaccatccaatggagctacttctgaccaaattggtgcccaaaatgatgcatctgatataactatggatgaagacaatctggagtacagtgaaaatgggagatggccttttcaacaatttgtggatcagcttattcatgatatgtttgaccctatttgggaagttcgccatggcaccattatggctttaagggaaattttgacacatcaaggtgcttgtgctggagtatattttcctgatctgagcctgccttcttctattttggatggtaaaaccaactttgattctctcaaaagggcgcatggtattgatctaaatgaagatgttcatgtggaacacctcgaaccagcatcgaagaggcataagaaagaggcaaatccttctgaatttatgtatatggactatgataaggagatcgttaatggtggttattcaaaaacagaggcagatctgagcaatgtgcctatagtatcaactggtgaactaagttctgctcatgtaaaagtagagcctgagttctgtgttgatgactcaactgacccctgtaaaggggattcatcatgtaaaccagtacatgaaaaactcaactccatttcaaatccaagttctcatatgcatgctttagttcattcaaaattcatgaaactgatgaaattagccaaatactcatatatgaagaactgggaatttcttcaggattgtgcaattcgcttcc

SEQ ID NO: 46670 - DNA, 262 bp, Setaria italica
  Peptide Sequence Number=SeqID_112644
cgccgagggcagcagtggcacaaataaagatcactgatcggcttacaaagtctgaaaaactggatctcggtgccggcaccactaccaaccgggcggctccgggctccagttcaggaaggggagtagagccgagcctttcttgggaggttgccggaggaggagctgaggaaggatggggcgcggcaagatcgaaatcaagcggatcctcaagaaggcgcgggagatcagcgtgctctgcgacgccgaggtcggctacgtacaa

SEQ ID NO: 46671 - DNA, 428 bp, Setaria italica
  Peptide Sequence Number=SeqID_112645
atctgaaggtgctatcatagaggacactttgtcaatgattgctcgtctgatgtgtgaaattcttcccaataccaatgggaatgccaccgttttcagcaaggagtttcttgtcagcttcagtctcatagtagtcagcacccattagcaaagtgtcctctatgatagcaccttcagatatgcaagatcggagtccaacaacagaatggtgtatcttgcagtttttaataacacatccttcaccaataacactgtcagtgacatcagcatcaagaatcttagaaggtggcaggtgtcgaggttgtgtataaattggagcagaacggtcatagaagctgaaatctgggattggcttcttggttattcccaagtttgcattatagaatgcctcaatggtaccaatatcttcccagttaaccattctattacta

SEQ ID NO: 46672 - DNA, 339 bp, Setaria italica
  misc_feature (1)..(1): n is a, c, g, or t
  Peptide Sequence Number=SeqID_112646
ngtttcaccaaagaggactccgacttcttgattgacgtgatggacgttgcactctcgaagctgtgaggcagacagcgcgaagataatgccataaacggagatacagcttgatacatgcagtacccacatgggaatggagaggactcatacgggagacaggcaacggttatggatatcaacaagccatcacgagaatgtcattgatcatctgcagcaatgacgctccaccatctctagtaaaaatacgcacgccccaaccgcgaaattaaccaaagtaaccaatacgcgaaccgaccagatatacatcaaatttacaccaacccaaaccatactcgcgac

SEQ ID NO: 46673 - DNA, 374 bp, Setaria italica
  Peptide Sequence Number=SeqID_112647
tgtatccgaatcacactagctaatttgaacacatgaaaatggaataagctatgtctagcactgtagcaaaggttggcttgacattgaccgtccatcatttgtgcgctccactcaaactctatattgctcctcatcaccagattcgtcaatggtcggacccctgtttcgctcaccagcatcctcatcatcccagttttcaaaatatcatcagcatcactatcctcagcagcttgagggaaatagccagaagcagaaccgttatccacagagggatcatttccatttcctggtaggttagaagaagttcaaccaatgactaccattatccccgttatccttcatggccttcagaaccatctcctccaggaaaccca

SEQ ID NO: 46674 - DNA, 390 bp, Setaria italica
  misc_feature (331)..(331): n is a, c, g, or t
  misc_feature (348)..(348): n is a, c, g, or t
  Peptide Sequence Number=SeqID_112648
gaaagagccaccttatggtcgagtccatttctgagttacagaagaaggtaatcaaagctgaaaacttccctgcaacaggacactgcaggccaataaaactgcactgcactggagtagccaattacctgattacttgtggagagatcactgcaggaggagaacaaggctctacagaaggaacttgccgagaggcagaaggcggccgccagcaggcagcagcagcaggtgcagtgggaccagcagacccagcaggcccaggcccagacaagctcatcatcttcctccttcctgatgaggcaggatccacaggcgctgccgcctccacaaaacntccggttcccaccggtnacgatagggagagaggcgaagaggccgcgtgcaggcggcgac

SEQ ID NO: 46675 - DNA, 391 bp, Setaria italica
  Peptide Sequence Number=SeqID_112649
actgatgccaaactcccaaagctgacatacaacaccgatttcgaaggtcgcgtttccagccactcgatgcaaccatagtcttggttcagtaagctgctccctacgctcttggaagaaagcttgtagagagggcctacagggagaaccatagggatgttgagctcatcacggatcctctcgagctcggttttctccagagcatcagatgtgttgataactaaaccggatgaattctttactgcttgcgtggctcgagtgagcaatttggtcaccagttcattgtcaacccttcttgagtagtagaggtcctttacccgcagtggtggcaactccttcactggcatgtctagatctgactacttgtgaagtgaccttgcggaggcagataacc

SEQ ID NO: 46676 - DNA, 321 bp, Setaria italica
  misc_feature (98)..(98): n is a, c, g, or t
  Peptide Sequence Number=SeqID_112650
cgtctattatttcattataccctgccagttgatgtggagcttggtgatttgtaacatggaaagaaaacatggtcctggaaaggatggaaacgcttaanctgcattggtgatcaccatctgctgcaaactaactgcaaacagattcaaacgactacccagctgcgcaccacatggtcgcactaagcagtgcatccagttacagtatcatgtgttggtaaaagcttatgtacacggtgatggttgactctatatgactgttccactaggaatcaaggcatccttaatcaccgtgactatgccacttttgatgaagtatccttc

SEQ ID NO: 46677 - DNA, 274 bp, Setaria italica
  Peptide Sequence Number=SeqID_112651
tacaactatatggattccttcttgtacctgccgctgtggttagctacaagttgtgtttgtggtgggctgctatcttggttttcattttcttcacccatgtttgttgtagcagcaacctctacaatttgtcccccatctttgttagcctgcatttcaattttggtcagaaaaatcatgaatggagtttgaaagtacaaaaatgatgctgtttacgcgttcaaattttcgtacaagcacttaacctggaaaagttccgcaataaaagtagtattca

SEQ ID NO: 46678 - DNA, 132 bp, Setaria italica
  Peptide Sequence Number=SeqID_112652
ctgtttgtggaccttgacccatttggcaagccaaaaccaaccatcggcttttgggtagtaggtcatcggctcatcattactaccatctaagggccctctacttccttgtgcttgactttcctaaaccttctt

SEQ ID NO: 46679 - DNA, 416 bp, Setaria italica
  Peptide Sequence Number=SeqID_112653
ttgatgttcaggtagttggcagcctgaaacacaatcaccatatatatgtcagtaaagtacataaatgttagccacatctcagacaatatgtcaactattatatgttaagactatattcagatgacataggcaataaataactgtgcaatgctgcattcaaattatctgtctgctagctacagttcattgcatacggcagaataagagtgatctggtgttgtgcacatacttcattgctgatttgctagccagtaccatgcagtcacatcatggctaatccaatgtgttgtggtaaccaaaataatcagcactaacaaacagctacatggtcacagggatgtgcgtacaagtctgaagcacaagggctatgtggataacagacataatctcagcgtgagcactatcatgtagctaac

SEQ ID NO: 46680 - DNA, 376 bp, Setaria italica
  Peptide Sequence Number=SeqID_112654
taagtctactattaagtattctaactaaggtactactagtctactattggtttgtattctaacttaacggtaactttctagtagtaaaggaacaaatgttttctgaagcaaataagtgtcttcgcagaaaactggaggagagcaaccaggttatctggcagcaagcatgggagcatgggggagccacagccagaagtccagcagcagcagcatcagctgcaaggtggcaatggattcttccatccccctcgatgctgctcgtggggaacccacccttcagatagggttccctcctgaggcactgactagtagctcatgcatgaccaccttcctgccccccatggttgccatgagatcaaactactgtgattctgaa

SEQ ID NO: 46681 - DNA, 167 bp, Setaria italica
  Peptide Sequence Number=SeqID_112655
actcactcgatgtatacttctttgtgtgttgggatatgtgtcatatgtaagattcaggtgttcctttgtatattcaaattatactcaaagtgtacagctatatttcttatacatcgagtgagtatacttctttgtgtgttgggatatgtgtcatatgtaagattcag

SEQ ID NO: 46682 - DNA, 330 bp, Setaria italica
  misc_feature (269)..(269): n is a, c, g, or t
  Peptide Sequence Number=SeqID_112656
tttttttttttttaagtaacctacaaacaactacgttgcattgcatgtccttgcttattcttattcaccaaattacaacgccgtccagccatatcccccaacaaaaactgtgcataaataagcatcgaccacaacccaccacgacggagaaagaatggcatcggcaccacaagggcaaagtcctcccttggctgcgcatgttttttgtctcggacccaaacagaagatcgaaaactgacagaataataagaatatcccgactaaaaagngctccagcttcttgtctcatgaatataaaacaggcccagccatggcaggcatggtatcgag

SEQ ID NO: 46683 - DNA, 247 bp, Setaria italica
  Peptide Sequence Number=SeqID_112657
agcctgtttaatttgtatgtcatagttgagtaccgagtacattttatctgcctggagcgtgtttcattacctgcataataggccacagaatgttcttatgagttatgcagatagtatgacgcaagatggaatatcaatatcttggtagttggacaggggatagtgtctaccatgccaacacggctgtgcacaaagtgtagtacatgcaattcaagctgaacattgatggtatttaaacttcgctgcc

SEQ ID NO: 46684 - DNA, 235 bp, Setaria italica
  misc_feature (211)..(211): n is a, c, g, or t
  Peptide Sequence Number=SeqID_112658
atgacgagctccgggcgcatgacacccatggacgccactccgacgccactcttggccgtcccgtacgccgcccccatgcctgcaagaggcacacagagatagatctcgtcattgaccatcagaaatttcgccctcacagagtcccagacacacacacacatggatccaccgaaaattctatctgtttctcttctcctgttctcaaagcagnttgaaaactcaatttgcaggcgtg

SEQ ID NO: 46685 - DNA, 294 bp, Setaria italica
  Peptide Sequence Number=SeqID_112659
ctggctgcggcttgggttcaggtttcggttgcggcttaggttcgggtttcggcttcggcggtatgggcttcttcttgtggaagtggtcgaggaagtgcttcttgatagggccgcagatggtgaccgacgcgcattctgccgatgggttgtttgtcttgccagggacccaccccccaacaccaacgtatggatcaccaatgcccaaatatggatccccaactccgatctaccatcctccagcaaggcagttgttcgacaagaagcacttgtttgatcacttccacaagaaccacg

SEQ ID NO: 46686 - DNA, 471 bp, Setaria italica
  Peptide Sequence Number=SeqID_112660
ggcctgtgatataatccatccttttttccactgtatatatttttcaaggttgaaggatttcatgaacgagtatgtgctcagagtcatccaggacacaaccaaaatccctaatccaccctaatccaggaccaaagttaaacccctgacaatgccccaccaaatatactaacctcaaacacttgacacacacacaagggctccgtgcatctaagctaatagaatctggattataaaaggaatatagtactcacccaactcctttagaacgtcgtgagtttcggtccataataaggcgaacatcacgaacctttccagcccttgagaagaactcataaacatctctttcgtctgccttcagtgatagctggaaggcaaatacagtcctctggtcccttttctggatcaacttctggctcagcaccatcatctttcctccgtctgacatcacggtcacggtagtggccacgctcg

SEQ ID NO: 46687 - DNA, 509 bp, Setaria italica
  Peptide Sequence Number=SeqID_112661
tctaaagaactccaacaactaagaagacaagcagctggagagctcattgaagcacatcagatcaagaaagagccaccttatgggggggggggggggggggggggggggggggtcagtccatttctgagttacagaagaaggagagatcactgcaggaggagaacaaggctctttcttgatctgatgtgcttcaatgagctctccagctgctgctctagttgttggagttctttgagattcagagactctagatcctctcccatcaggtgcttgtggcatttttgtatggtctcaattttggccttcagcttcctgtattcatggcaccaatttccctcactttcagattcagctgaaataagagccttttcagcataggaatagcgctcataacgttcaagaattttgtccatgcgggagtcggtggcgtactcgtagagcttccccttgggggagaagacgatgacggcgacctcggcatcgcagaggacggagatctcgtgcgcctt

SEQ ID NO: 46688 - DNA, 288 bp, Setaria italica
  misc_feature (184)..(184): n is a, c, g, or t
  Peptide Sequence Number=SeqID_112662
gaagaattcacacatcagacgagcaatcattgacaagaatgccaccgttttcagcaaggagtttcttgtcagcttcagtctcatagtagtcagcacccattagcaaagtgtcctctatgatagcaccttcagatatgcaagatcggagtccaacaacagaatggtgtatcttgcagtttttaanaacacatccttcaccaataacactgtcagtgacacctgccaccttctaagattcttgatgctgatgtcactgacagtgtttttaataacacatccttcaccaat

SEQ ID NO: 46689 - DNA, 481 bp, Setaria italica
  misc_feature (411)..(411): n is a, c, g, or t
  misc_feature (471)..(471): n is a, c, g, or t
  Peptide Sequence Number=SeqID_112663
ccactgccacaatcaaccttcgaattgtaagggagacaaatggaatagacaaattatcccagtacacatcgcgaggttctggagcccattcagtcaaccaaacagttggattactggtttgttgtgtctgagcacaaactgccgcaccccaacgtgatcggaaggaaacaaatgctgctgggacgactgatttaggatcctttacaatcttttcacgctcttctgcttcctaaatatcatttacacgaggtggtaaatctgacagtttgtgaaagttatcattgttttaaaagaaaaggaactgtaacattgtggaatacaaatatataactgatagtcctatcaaaatttgattttccattgcatgcaaaatacctaccttaaaaaatccacttcagtagcacatttcgntcactaaaaaacctagactctacttaagataagtatagttggctgtgcatatctttttcncttaatgagc

SEQ ID NO: 46690 - DNA, 472 bp, Setaria italica
  Peptide Sequence Number=SeqID_112664
acgtacgtttgaagctgttatctgcagctagttagttaatataatactatgtgtcgagtggattatgacccgataatagtacaactagcactagtaagtagcattgcagtgcacacttgtttcttccaagcaacacggccaccaccaaagatttcaatcactcgaaagcccactggttctccctgcggatctcctcctcctcctcaggggtgaagtcgttcttgatgttgaatgtcttgcggatctcctccggagtcttgcccttgatcatgtcagcaaccgtctggcaggtcaggtccagcaatcccttgatgttcaggtagttggcagccaggatgaggtcgaagagcgtggcctggtcgaccttgacgaactcggcgtcccagttcttgaggtcctctgcgccggcggaggcgtcggcggcagcgggtgcggcgtcatctgcgggcttggcggcgtggacgtgcttgtt

SEQ ID NO: 46691 - DNA, 451 bp, Setaria italica
  Peptide Sequence Number=SeqID_112665
cagactgtggaattaaagtcttcccagctctgtgtatcatgccaacagcaaaaattgttctgaacttggtttatcaggcagcaacaacaaaggaaaagaaattagcagtgatatcttggatgttgatcaaattggagaggctaatctgagaaggatttctctaagtgctgctggaacttattctgttgtaaacaacaacagtcctaatatggatgaggagcaaggttggaaaacaacgcataaccacacaagtaaattacccatttcattgatgggtaagcttagttgcaattctgaacgagaatctggatcttccgcaccatctagtcaggatcatggatctggagcacccataatggcctctagtagggtgcggaataaaccaataatgattggtagaggaagaagcaaatatgcctcaacttcatcccatcccgatgaaagctctagt

SEQ ID NO: 46692 - DNA, 390 bp, Setaria italica
  Peptide Sequence Number=SeqID_112666
taaattaccttacaaactaaagttacttggccggagggtggtagatcggagtcggggacccatacgtgggcgtgggtgaactgtatttaggcgttggggggtggtattctggctgaggtttgggctccggctttggcttaggaggcactggtttcttgtgatttgaagctaagcaaagttcttcagtttccacagaataaaagtacagctatatttcttatacatcgagtgagtatacttctttgtgtgttgggatatgtgtcacatgtaagattcaggtgttcctttgtatattcaaattatactataatgtaattgtacactttgagtgcgaagtaaaaagtgtacagtgtatttctaacttttcttggaattgaacaattgcaatgc

SEQ ID NO: 46693 - DNA, 401 bp, Setaria italica
  Peptide Sequence Number=SeqID_112667
gactcatggaggcggagaaggagaaaaacaatgctttaatgaatacacacctccgggagcagcaaaatggagcatcaaaaagctcgccatcaccaccaccgtcaacagttccagattccttgccgactctagatattgggccatgccaacctagaggaacaggaggggagtctgaacctgaaccgattcctgctcaagtaaacagcggcaagctgccaccatggatgctccgcagtgtcaataacagatgagctctttctgatgcggttttgcggctgaactcgaaggcaatatactggtgcagaggtgctccagacttcattcaccctgtaaagcatttgatgagacctgatcttattagtgactatgccggtatccatcactggatcgagatggatcgc

SEQ ID NO: 46694 - DNA, 592 bp, Setaria italica
  Peptide Sequence Number=SeqID_112668
ctatccttcattagcttccttacggccttctcaatttttcctctttctagcacgccttcaagctcaaaccctacaccccatgtttgccccacatacgggtctcctacaccaatctaccaccctccagctaggcacttgtttgccaagttgcttggtcacttccacaaggaccacgaccaccatcaactcttcgaccacttccacaagaagcctgttccgccgaagccagagcccaagccgcagccagagtaccaccccccaacacctacatatgggtctcctactccaatctaccatcctcctgctaaagacttgtttgacaagaagcactggcttgaccacttccacaaggaccacgaccaccaccacttcttcgaccacttccacaagaagcccataccgccaaagccgaagtcggaacctaagccgcagcccaaaccagagcccaagcctcagccagagtaccaccccccaacaccaacgtatggatcaccaatgcccaaatatggatccccaactccgatctaccatcctccagcaaggcagttgttcgacaagaagcacttgtttgatcacttccacaagaaccacg

SEQ ID NO: 46695 - DNA, 482 bp, Setaria italica
  Peptide Sequence Number=SeqID_112669
cccaagccgcagccagagtaccaccccccaacacctacatatgggtctcctactccaatctaccatcctcctgctaaagacttgtttgacaagaagcactggcttgaccacttccacaaggatcatgagcaccaccacttctttgaccacttccacaagaaaccagtgcctccgcagcccaaaccagagcccaagcctcagccagagtaccatcccccaacaccaacatatggatcgccaacgcccacatacgggtctcctacaccaatctaccaccctccagctaggcactttgtttgccaagttgcttggtcacttccacaaggaccacgaccaccaccacttcttcgaccacttccacaagaagcccataccgccaaagccgaagtcggaacctaagccgcagcccaaaccagagcccaagcctcagccagagtaccatcccccaacaccaacatatggatcgccaacgcccacatacg

SEQ ID NO: 46696 - DNA, 406 bp, Setaria italica
  Peptide Sequence Number=SeqID_112670
aatagtaaggcgaacagtaaccggtatgcattagcacagccacaagatctgaatcatttgtgtatatatctgttccccaaagctgagcaccctttacttgacgattagtagaagtaacaaattccgcaggtatccgaatttcaagagtaggaccattttgtagactttcagcatttttagcatcctgagttacttcaaactctttccatgatttcagcagctcctgcatgcactctccagctttataaacaatggcaggcacctcagatttacctgcaatcaagaggagactgagataacaaaacaaaacctaagtttacagagccacccataaatcattttgtgaacattgcaacatggtgctcatcgtttctacattgtacctgctatgggaaacatgcatgca

SEQ ID NO: 46697 - DNA, 265 bp, Setaria italica
  Peptide Sequence Number=SeqID_112671
tcatcaggcacttcaaactgatatttagattttgcgaattccttaatactagaccaaattccatcagatgttagatgggaatatgttgataagccctttcttgaagcagcagaattgtttagtttcgggcccttcgtagacttttgagtttggctattttcatgacccttcttcgaccacttccacaagaagcccataccgccaaagccgaagtcggaacctaagccgcagcccaaaccagagcccaagcctcagccagagtacc

SEQ ID NO: 46698 - DNA, 322 bp, Setaria italica
  Peptide Sequence Number=SeqID_112672
atccgataatagtacaactagcactagtaagtagcattgcagtgcacacttgtttcttccaagcaacacgaccaccaccacttcttcgaccacttccacaagaagcccataccgccaaagccgaagtcggaacctaagccgcagcccaaaccagagcccaagcttcagccagagtaccatcccccaacaccaacatatggatcgccaacgcccacatacgggtctcctacaccaatctaccaccctccagctaggcacttgtggaggttcatgatgtaccgagtagtgatgaggaggaagatggtgttgaggaggatgagga

SEQ ID NO: 46699 - DNA, 549 bp, Setaria italica
  misc_feature (200)..(200): n is a, c, g, or t
  Peptide Sequence Number=SeqID_112673
tcccatcaacatggcagggcaccacggggcttctcctcggcgtttgcgctgcgctgatggcagtggccgtcgcaagcgctgcctctggcggcgcagcgtcggtcgtcgtcggcctggccaagtgcgccgactgcacgaggaggaacatgaaggccgaggcggctttcaagggtcttcaagtggcgatcaagtgcaagacngtaaaggcgactacgagagcaaggccgtggccagctggatggctctggcgccttcagcgttccactcaccaccgacctccacggcgccgactgccttagcacagcttcacagcgcggcgggcactccttgccccggtcaggagccttccatgattattccgcagtccgagagcgacttcgtcgtggtccctggcaagacaaacaacccatcggcagaatgcgcgtcggtcaccatctgcggccctatcaagaagcacttcctcgaccacttccacaagaagcccataccgccaaagccgaagtcggaacctaagccgcagcccaaacagacgccccaagcctcagccaa

SEQ ID NO: 46700 - DNA, 487 bp, Setaria italica
  Peptide Sequence Number=SeqID_112674
accttatggtcgagtccatttctgagttacagaagaaggtaatcaaagactgaaaactccctgcaacaggacactgcaggccaataaaactgcactgcactggagtagccaattacctgattacttgtggttaaaaggccccgcatatcttgaacagccatcactgtaaactgctgatagagaaatatgactgatgaatgtttactgctgttttgtgcaggagagatcactgcaggaggagaacaaggctctacagaaggaagtaagctgccaaatactgtggcattgcattgagaaaagaagtgttgatgtgctcctcttttgtgcagcttgccgagaggcagaaggcggccgccagcaggcagcagcagcaggtgcagtgggaccagcagacccagcaggcccaggcccagacaagctcatcatcttcctccttcctgatgaggcaggatccacaggcgctgccgcctccacaaacatccggtac

SEQ ID NO: 46701 - DNA, 718 bp, Setaria italica
  Peptide Sequence Number=SeqID_112675
gggtatcacagctagagcagaagtgcaaagacaagataaggacattgtaatatcagtcacaaacttatcaggaattatggcaccaatatgggtgacaccaaaagcatgaaacttcagaaattcgaagtatcaccataatcaagaataagtagctgtctacaaagatgataggcaaagtaaccaagaaatgcaatgacctaccaacaaggataatgaatttatgtccagatggtgacaagcaatcatcgaaccaagagttgatcacgaaacatgtgatctccaaagatcattctttgtaaccgtaatctctataaaaagggagtttttcgataggacaataatacattcaacaatctaaatccaatttacatgcaggaagtattatgatgttacaatcgagggataacaacaacctagtccccacaatccacacaggtaaagacagctttcagccagagacaaattaatccagatctatatggatacatctgaaccctaacaatcacagatccaaatttcaccagggaggcgtagacggccgggggagggagggggaagacggagacttttaccaagatgaggtcgaagagggtggcctggtcgaccttgacgaagtcggcgtcccagttcttgaggtcctcgcctgaggccgcggtgctgttggcggcggtggcccccgcgtcctcggagccggccttggacgcggcggccgcggcgg

SEQ ID NO: 46702 - DNA, 420 bp, Setaria italica
  Peptide Sequence Number=SeqID_112676
aagttcaaccaatgactaccattatccccgttatccttcatggccttcagaaccatctcctccaggaaacccatatccacatatgtgcttctggagattatctgctgagaagccaatctcatcgagcaaaacatggtagtgggtgggtcttgaggtaccaattggtccagcatgagcacacatgtaaaaatcatactgccttggatgaacaataccagagtctacgacagtcccaggtggaacgttgtctggcgaatcagcttggaagagttttgtgtggtgattcttttgagcaatgatcactgtgaacttcggaagatccccctgtcccatactctgataagcctttatgatttgattaagctcaatattcagtatttggctaaattgagactcgctcacaccatccctgacgaaggt

SEQ ID NO: 46703 - DNA, 916 bp, Setaria italica
  Peptide Sequence Number=SeqID_112677
ttaattccaaatatgctttgctcgtacaaaccattaatgaaaccatccaatgtctaatttagttgataacacacgcacaactaaaacatataagatatctgactcacactagctagtttgaacacatcaaaatgtaataagctatgtctagcactgtagcaaagcttagcttgacattggccatcccatcacttgtgcgctccactcaaactctatcttcctccaaccagctgccgctgtggtagctacgagttgtgtttgtggcgggctgctatcttggttttcctgctgatgtgatatttcttcactttctgtagttacattttcttcacccatgtttgttgtagcagcaacctctgcaatttgtcccccatctttgttagcctgcatttcaattttggtcagaaaaatcatgagtggagtttgaaagtacaaaaatgatgctgtttacaagttcaaatttccatacaagcacttaacctggaaaagttccacaataagagtagtactccgatcattgaccaattttcacaaagagccaacccggaatccaattagccaagtcaatcttctactgaataactaaatttgaaatttctcacacggtcatatatattctcgttacatatatagtaacaagtgacaaaggctgaccacacatagacaatatccaataacaggagtggagaaggcaaagcaacacttactagatgcaactccaggattcagagttgcagctccaggattcagctccatcagcaactacacttacacaccaaaacttaagaaagaacagagtcacagtcagagatgagtagatcataaatgagcttgccatcaaagcaaacacaggtcaaaaagtccatgataataaacatgcaaacattacacagactaaagttagtcagagcattgc

SEQ ID NO: 46704 - DNA, 804 bp, Setaria italica
  Peptide Sequence Number=SeqID_112678
atcaaccgccaggtgaccttctccaacgacgcccggccaaaccgggcctcccgtccaagaaggcctacgagctctcccgtgctctgcgacgccgaggtggcgctcatcgtcttctccagccgcggcaagctctacgagttcggcagcgctggagtaaacaatacactggaaaagtatcacaattgttgttacaatgctcaaggttccaacagtgaatttgggggtgaacctcagggttggtaccaagaaatgtcaagactcaaggcaaagcttgattcgctccaacgttctcagaggcacatgcttggtgaggaccttggaccactgagcataaaggaactgcagcaactggaaaaacaacttgaatatgcactgtcacaggctcgacagcggaagactcaaatgatgatggagcaggtggatgagcttcgccgaaaggagcgccaacttggggagcttaacaagcaactgaaaaacaagctggaagcagaaggttccagcaactacaggaccgtccaaacctcctgggctattgaagctgccgtgggtaccgatggcggttcactctccgcgccaaattctcagacaccagcagctgctatggattgcgagcccactctgcaaattgggtatcaccagttcgtttctcctgaggcagctgcaaccatgcctagaagcagcactactgaaggaggggagcagaacagccacttcttgctcggctgggccctttgatcgagctgctctcgatctatggaagcaaataattgtcacgtacgtatgttacgtcgttaattaggttaa

SEQ ID NO: 46705 - DNA, 752 bp, Setaria italica
  Peptide Sequence Number=SeqID_112679
agtaataactattcgatggtgatttggaatttgaataatgtgaaactgttatagtcgtgttattttcctcaagaaaccctatcatcttgtgtagtatgcattgcagtgtatatatggtgcacgccaaatgatctatgtgtcttgcattgcaggcacctgatgggagaggatctagagtctctgaatctcaaagaactccaacaactagagcagcagctggagagctcattgaagcacatcagatcaagaaagagccaccttatggtcgagtccatttctgagttacagaagaaggtaatcaaagctgaaaacttccctgcaacaggacactgcaggccaataaaactgcactgcactggagtagccaattacctgattacttgtggttaaaaggccccgcatatcttgaacagccatcactgtaaactgctgatagagaaatatgactgatgaatgtttactgctgttttgtgcaggagagatcactgcaggaggagaacaaggctctacagaaggaacttgccgagaggcagaaggcggccgccagcaggcagcagcagcaggtgcagtgggaccagcagacccagcaggcccaggcccagacaagctcatcatcttcctccttcctgatgaggcaggatccacaggcgctgccgcctccacaaaacatccggttcccaccggtgaccgatacggggagagaggcgaagaggccgcgtgcagcggcacagcagcagcagcagcagccaggg

SEQ ID NO: 46706 - DNA, 507 bp, Setaria italica
  Peptide Sequence Number=SeqID_112680
tttttttatgatgaaagaagcatttagacatccattaatccaaaacatgctttgtccgtacaaatcattaatgaaaccatccaatgtcaaacttagtcgataacacacgcacaactattgaaacacataaggtatccgaatcacactagctaatttgaacacatgaaaatggaataagctatgtctagcactgtagcaaaggttggcttgacattgaccgtccatcatttgtgcgctccactcaaactctatattgctcctgaaaaaatcactcatcaccagattcgtcaatggtcggacccctgtttcgctcaccagcatcctcatcatcccagttttctaaaatatcatcagcatcactatcctcagcagcttgagggaaatagccagaagcagaaccgttatccacagagggatcatttcctatttccttggttaaggtttaagtaaagtaaagtttactaaacctaaattagtaacttaacctaatttaatacccgttaatta

SEQ ID NO: 46707 - DNA, 494 bp, Setaria italica
  Peptide Sequence Number=SeqID_112681
taggggtctattacttatcaatcaatctaggtataatctagggcataatcaatcaattaatctgagcgcaacctatgacagatagatctaattagtaggcaagggtacatgattcgtagaggggacttaagttgggggatgaggacggggtaggagtaccaggatgaggtcgaagagcgtggcctggtcgaccttgacgaactcggcgtcccagttcttgaggtcctctgcgccggcggaggcgtcggcggcagcgggtgcggcgtcatctgcgggcttggcggcgtggacgtgcttgttgcagtactcgatgaccttggagaggatcttggcgttgacgttggggagagggatgccgttgtcggcgcagtcgtcctcgatcatgtggcggatggtctgcgactccatcgcgaccgcctcctcgacctcgaactcctcgccgtcggagctcctgagcgtgatcattctttctttcttcggtccttcggttcgtt

SEQ ID NO: 46708 - DNA, 341 bp, Setaria italica
  Peptide Sequence Number=SeqID_112682
gccgatgtgatatttcttcactttctatagttacattttcttcacccatgtttgttgtagcagcaacctctgcaatttgtcccccatctttgttagccttcaaagggtgtgcctttagttccttcaagaacatagtgccactccaatatatcgttgggcagcgggtgagccacgatctgcagcggcggctccttgcagagcgcgtggtactccttctagagctgcttgagttagccacgccgacttcttgcgatgcgctgggcgccccccacgcctgtgccgccggcgctcgcgccgggaggccagggcttaggtcctacccgtctagtctagtattccgt

SEQ ID NO: 46709 - DNA, 582 bp, Setaria italica
  Peptide Sequence Number=SeqID_112683
gatcccttccatgggccttcctttctttctgcctccatagaagtcctcatggtcagaagaattgccacagtaaccatcccctgctgtctgtgaagcatagatcgaatcaaccaatacagaaatagatgcatcctgccctgagtagaattaaaccacaagccacagtagatggcgtgaggtgcatgatcagtgaacagggtatttgaagtatactgtatgcataacaagtaataaactctaaagataagttaaactaaaatagagacaagtacagaatctgtgagtggtacaaaaatggttttattcagcaaagcattaaaagattctgcctctggaagtaaattgttgcttgtctgctttgaaggaacatccggacgcttgcgcatctagtaatagccatggtggcctcatcttccggaaaccccattttcactaaggaatcaactttctcatccttctgtgacatctcgtttaagaaatcctcatcaccggattcgtcaatggtaggacccctgtttctctcaccagcatcctcatcatcccagttttctaaaatatcatcagcatcactatcctcagcag

SEQ ID NO: 46710 - DNA, 1136 bp, Setaria italica
  Peptide Sequence Number=SeqID_112684
tgtagtaaggttgtcccgttgttttcccgttttaaaatgcttcttagggctgaattggcgacaacaaacaggatggtttcccatttgcagaatattgctccagtaactttcagatcggtaatctttttccctttgcccttttcatttattacctgtgaagtattattgatatattggcgcctatgtaaagaaaagtttctggttttgtttagactttagacaaaccagcatgctattagacttccttgccattcaaatcgactcactgtcacatagaatgtcgagatattataagacataattatacagatttctttttagttttccagttgtattactatttaatagattattaatggacattggaatatgattggataaatactggatcgtttgtatgttcatctacggccaacagaggtactatcatatcttggcttgtacttctacttttctggcagatgctttggacttctaacttaccactggggcattctcaactgctccttgaactatgttgtgatggtagtcttcattgagtgaaaagtttttaattgctttactgaaatgatcctcaaagataattaacagcttctactgtgctactttcagggacctgctttagcaagatatcctgctgcttcgcgcattcaacctaacattgatttaaatgactatgacgcgctacttgcactggatgaaaataaccaccagcacactggtgcttcagaaagccagatctgaaagttactggagcaatattctgcaaatgggaaaccatcctgtttgttgtcgccaattcagccctaagagcatttaaacgggaaacacgggcacctctagtattgtttggggaccgccttacaggcctagatgtgtgatgtgtgtcttcttcatgttgaagtgacattgctacgattgcatcaatctcttctgtaggtgcaaaaacaaggagattcattgtaaagctgctcctgaagttggcgagccagtaactcatctgactctaattgtgcttgtagggtaggatcaacggaggctccattactgtatccactcgaactagatgtagcttcaggggtatgtcattaatggttattacaggaatatcatgtcgaaggctggtatgatttctg

SEQ ID NO: 46711 - DNA, 728 bp, Setaria italica
  Peptide Sequence Number=SeqID_112685
cagcatcgaggggatggaagaatccattgccaccttgcagctgatgctgctgctgctggacttctggctgtggctccccatgctcccatgcttgctgccagataacctggttgctctcctccagtttttctgcgaagacacttatttgcttcagaaacatttgttcctttctctgaagttccgttagttgatcaaccatgtgctgtgtccttgttgatcttatgtgcttcaaggatgaatcaagttgcttctcgaggtgctccaactcctttatgtctaatgaatcaagatcttcaccgagcaaattcctttgagttcgctgttaaattttcaacacgtgccttcagtttgaggtactcattacggctgtcttttcaattgctcactctctctattttgcagtgctgtttcaggccctgcataactgcacttttgatacttttcaagtgtctttggcatgctctgcgtgctgcagaactcgtagagcttgccgcggttggagaagatgatgagcgcgacctcggcgtcgcagagcacggagagctcgtacgccttcttgagcaggccgtaatgagtacctcaaactgaaggcacgtgttgaaaatttacagcgaactcaaaggaatttgctcggtgaagatcttgattcattagacataaaggagttggagcacctcgagaagcaacttgattcatccttgaagcacataagatcaacaaggacacag

SEQ ID NO: 46712 - DNA, 903 bp, Setaria italica
  Peptide Sequence Number=SeqID_112686
taacaaaaattaactaaaactaacaaattaagaacaagtaagacaatccagccagacattagtgcttcattgcgaagtagcatcacactactcaagtgcatcttgtacaagaaaccttataacatgccaagatctctatgtgcgctagaaattatgattgaaattagatattcttttttggtaaggctaacccataaaggcctgcaaggaacaacttaccatgaatgacaggagcccagtaagaatgcttgctacagaccacattggattccaagactcaggatgaactgcaaagcatagtaataatgagcattatttcatacctaatgtgatgcaaaagcaactataatccagaaacagttcagaacttatagtcactcattgacaggcatattcttttgtgttggcgcaaacctaccgctaggggttgtcatgctgatacttggaggtttaaaaggataatctggtggaaatttaagtttcccatagtaatatccaccttcaaagggtgtgcctttacttccttcaagaacatagtctggcatacaaagtaaagaaagcacataagttggtaccaatatatagccttgaaagtaagcaaaaagattggcattgcattaggaacaagcatgataaatacaatctgaggcaccatatggatttggactatactaaaaactgcacataagcatcagcagttgtaatctatgagttgtcaatggtgctcaactagtcattagtaaatttaaccaagaacatatctcatctattactatttgacaggttggtgcacataattagcaggaacctttttcagcatgtatagcgctggccattactattgcaactagataattgcagttatgtcaatgcaaatcctgacgctgaccaatatataaatat

SEQ ID NO: 46713 - DNA, 1114 bp, Setaria italica
  Peptide Sequence Number=SeqID_112687
ctacccagctgcgcaccacatggtcgcactaagcagtgcatccagttacagtatcatgtgttggtaaaagctgcaaaaatgtttgttttgatttatagggacttccatgtagcaccaacataagaaactttggtttcaaagggagacataaccttatgtacacggtgatggttgactctatatgactgttccactaggaatcaaggcatccttaatcaccgtgactatgccacttttgatgaagtatccttctgtctcccttactgcttcttggacattgtcaaaaattgattatcttcacattttctccaatacgagcgttcttgtcgattattgcttttctgatatgtgcattcctcccaataccaatgggaataccaccagcctctgaaaggactttcttatcatcttcagtctcgtagtagtctgcacccattagcaaagagtcctctataactgcaccttcagaaattgctaggttaacggtagttcctaacctacggtaattggttgattgtgcaatgtttaataacacaaccttcaccaatgacgctgtctgttacatcagcatcaagaacctttgaaggaggcaggtatctaggttgcgtataaattggagcagaacggtcatagaagctgaaatctggtacaggcttcttggttattcccaagtttgcattataaaatgcctcaatagtgccaatatcttcccagtaaccatcatataagtaagcttgtacccttcattccaatttctgttgctccaggaataacctcacttccaaagtcatttgctgcaggaaagttttctcgtagaagccgaagcatcacatctttgctaaaaacatagattcccatactagcaatgtatggtagttctttggccctctcaggatcaaggcccagtatagtggtgtcaaccatcattgatttcaacttctctcctttcggtttgcagagaaaccgaaaggagagaagttgaaatcaattttcataaggccaaatgcagttgcacgttgttcatccattggtagtgcagcaacagttatatcagcatctgtttctctatgggcttgaatgaacttttggtagtccattgcggttactaggttgt

SEQ ID NO: 46714 - DNA, 892 bp, Setaria italica
  Peptide Sequence Number=SeqID_112688
aaaataaataagaaaacaaattaactaacaacaataacaatagacaaacatatagctcgaggtccagttcctgcactcaaatggcaaataccttgacagcacaggcaattcttagaggaaaccacatcatgcctgaggtgaattttaaacttagcgcacgtgcaagtcgatgtcttccgaacctgagttgtttttgggaacaaacactggatgtatcacaacatcaatggcatgttactgtccgaacctgttcaggaatcagaaccactgtctgagtcagaatacagttcatatggcctattcctgttcgtgtttgcttctagcggtggcagatcgtcatcttcatcagaatccggttcctcatctatctgggcagtctgtgcttgtgttccagtctctgaaccttcgttaggagttgacttgaaaataactggccaattaccagacttctgcagagcccgaacttgttcgtggaagaggacttgcgagacaacacacgcaatcttgctccctgactccagagcctgttccctcccactagcatccacaactacgaaactcccgctcttgatccagaagctcttctggaacttggctgggaacagggccagggacttgacgccctcgccgtccatcacctcgatgacgttggagccccgcagcgtgaggacctgcatgatgctctcgccctcggcgagcgtgacggcggcgccctcgtcgcacgcccgccggaggttcttcctccccgccttcatatgctcctctccgttctccgacggagcaagggaggcggctttgcttcccggggatcgaggcacgggggtcggggggagacgcgacgggcggcggcggcggtcggtcgtacgtacgtacgtacgtaggggtatttcgt

SEQ ID NO: 46715 - DNA, 1080 bp, Setaria italica
  Peptide Sequence Number=SeqID_112689
actaccggacaataaaagaataccccccgcaaatttcagcagaaagctcacggggaggaggaagaagaagggagtggtgccggctggtgtcgcttcttcgttgagctgagcccttgctgcgtgcggatccctctggtagcggaggagctgaggatggggcgcggcaagatcgagatcaagaggatcgagaactccaccaaccgccaggtgaccttctccaagcgccgggccgggctagtcaagaaggcccgcgagatcggcgtgctctgcgacgccgaggtcggcgtcgtcatcttctccagcggcggcaagctctacgactactgctcccccaggacctcgctgtcaaggatcttggagaagtaccagaccaactccgggaagatactgtgggatgagaagcacaagagcctgagtgcagagatcgacagggtcaagaaggagaacgacaacatgcagattgagctcaggcatctgaaaggcgaggatctgaactccctgcagcccagggagctgatcgccatcgaggaggcgctccagaacgggcagaccaacctgcgcgacaaacagatggagcactggaagatgcacaagaggaatgggaagatgctggaggacgagcacaagctgctgtcttttaggatggcctaccagcaccaacaggatgtggagctgagcggcggcatgagggagctggagatcgggtaccaccaggtccagcacgacagggacttcacttcccagatgccgttcaccttccgggtgcagcccagccaccccaacctgcaggaagacgagtagcgaggcttctgaatcctcctactatgccgctctgaactgaagctctacacctgcatcttctagcttgtgtttcatcgttcagcgttggctctgtatctttcttttcatgtcagtctggatgaacaatgttgtctttcagttactccgatgcggtcgtgtccgtctcttttaactttggtaggctaatgccggtccatgtcataatgatgccagcattaggactgaaatgtgcgattaacttggtaccttatgcttgtttgatctctgttctggctggtg

SEQ ID NO: 46716 - DNA, 479 bp, Setaria italica
  Peptide Sequence Number=SeqID_112690
ccccatccaaacatgggcaggggcaccacgggggcttctcctcggcgtttgcgctgcgctgatggcagtggccgtcgcaagcgctgcctctggcggcgcagcgtcggtcgtcgtcggcctggccaagtgcgccgactgcacgaggaggaacatgaaggccgaggcggctttcaagggtcttcaagtggcgatcaagtgcaagaacagtaaaggcgactgccttgcacagcttcacagcgcggcgggcactccgtgccccggtcaggagccttccatgattattccgcagtccgagagcgacttcgtcgtggtccctggcaagacaaacaacccatcggcagaatgcgcgtcggtcaccatctgcggccctatcaagaagcacttcctcgaccacttccacaagaagaagcccataccgccgaagccgaaacccgaacctaagccgcaaccgaaacctgaaccctaagtccgtctagtct

SEQ ID NO: 46717 - DNA, 998 bp, Setaria italica
  Peptide Sequence Number=SeqID_112691
ttttttttatgatgaaagaagcatttagacatccattaatccaaaacatgctttgtccgtacaaatcattaatgaaaccatccaatgtcaaacttagtcgataacacacgcacaactattgaaacacataaggtatccgaatcacactagctaatttgaacacatgaaaatggaataagctatgtctagcactgtagcaaaggttggcttgacattgaccgtccatcatttgtgcgctccactcaaactctatattgctcctgaaaaaatcactaacattggtatatgcatcaggtaaactgaaattgtattattttagcaacaacagcatggactgaaccattttgaaggtaagcaatttggaatcataaattaaagactaatgggtttgaaatttgctgatgcattcaaagtaaaattatccatcaaatgactaaatagaagctatgtaaatagaatgtcattacgagtttcttacaaaatccaggtttctagtttcatgggaacatgtcgttttgccaatttgcctaaacgaacacaattctcccaaggcaaataaccaaccagattagattacagctacacctgtttgaaaacaaaagaacaggagcaagtaaaagtaaggaaccttatggttttgaggtaagtagtctatttactggattataacatgaaaccagtttatgcagaagaatttatgttttgagttaaagtagatgcatgacatgtttctcaaaaggaaaagtaaatgcatatagtcaccaagggggagcatgaaaatacctcatcaccagattcgtcaatggtcggacccctgtttcgctcaccagcatcctcatcatcccagttttctaaaatatcatcagcatcactatcctcagcagcttgagggaaatagccagaagcagaaccgttatccacagagggatcatttcctatttcctggtaggtttagaagaagtttctaacctaattgtacttacctatttattccccct

SEQ ID NO: 46718 - DNA, 820 bp, Setaria italica
  Peptide Sequence Number=SeqID_112692
cttcacatacactcaatgtatagctcaaggcccagttcatccactcacatcacaaatatcttgacagagcaggcaatttttttataggaaaacgaatgccagcagaatatgagcatttggtgcaagtggatgtcatccgaacctgagttgttttggaaactaacactggacatcacaacatcaatggcatgctactatctaaacttgtttaggaatcagaaccactgtctgaatcagaatacagttcatatagtctattcctgttcgtgtttgcttctagcggtggcagatcatcatcttcatcagaatcttgttcctcatcaacctgggtagtttgtacttgtgttcccgcctgtgaaccttcatttgcagttgacttgaaaatagctggccagttaccagacttctgcagagcccgaacttgttcgtggaagaggacttgcgagacaacgcacgcaatcttgctccctgattccagagcctgatccctcccactagcatcgacaaccacgtaaactccgctcttgatccagaagctcctctggaacttggccgggaacaaggccagggatttgacgccctcgccgtccatcacctcgatgacgttggagccccgcagcgtgaggacctgcatgatgctctcgccctcggcgagcgtgacggcggctccctcgtcgcacgcccgccgcaggttcttccttcccgccttcatctgctcctctcccttcttcgacggagcaaggggagcggctttgctctcgcggggatggaagctcgagggtggagggtagacacggcggcggcggctgcagaggaagag

SEQ ID NO: 46719 - DNA, 1028 bp, Setaria italica
  Peptide Sequence Number=SeqID_112693
taaagtaactattggaactgaacaagaacaatacaagcaatgaagccgcggcaattctgggattgctgctgctgatgacgaattgacaccactgcctgatgaggtatcagcgaactcttcgaatttcatgaactggcccacctgagctgctgctaggtgggcgtaacagataggtgccacaacagaaattgcagtggtgctcctctgatacacatatgaaagtgaaagaactagcttctggagattatctgctgagaagccaatctcatcgagcaacacatggtagtgggtgggtcttgaggtaccaattggtccagcttgagcacacatgtaaaaatcatactgccttggatgaacaataccagagtctacgacagtcccaggtggaacgttgtctggcgaatcaacttggaagagttttgtgtggtgattcttttgagcaatgatcactgtgaacttcggaaggtccccctgtcccatactctgataagcctttatgatttgattaagctcaacattcagtacttggctaaattgagactcgctcacaccatccctgaagataattatctgcttaggtctttctttgttgactggtctggtagaagtccagtagaagttccctcattatgccatcatccttcccatcatacagcggcttaaatagagaatcgatcatctctacctttggagattgggtccggacagatgctctgtaccgtgatatcagtggccagcatctagacccaacaaccgcggcaattgatggtatatctgctcgacctggagaaccatgtgaaacatccattccaagaattaatgtcggtatctgagtcacaactggtatcatctggcgatgttccaatgccaatttagaattcattccaccgagcttagcattaatttttagaagaacattggtgaaatactgatcattcatcttattactgggagcaatgcattgagtgacaatacccatttcatgaagattttcttcttccatggccataatatcacactactcacac

SEQ ID NO: 46720 - DNA, 674 bp, Setaria italica
  Peptide Sequence Number=SeqID_112694
ttagttacttttactttacgttttaggtttaacttaattttaagtagtaaattttctagtctaagaggacaagaaattatccaactccgaggcttttctgcgcagatcagagacacagcgaaaggctgagcaaaggttcgtgaggaaagtgaaaggttgcgacagcaggagcgagagcaaattgcagagaagcgtaagcgtgacatgatgcttcgagctcgtgtagctgctaaggcagaagaaaagaggctggagctcttgtacatgcagtggactgagcatcataaaaagctgtccaattttttaaggacaaaagctgaaccacctatttactacatgccagctaaaccgatcattgatgatcctattattgttgagcagaacaaggaaaaggtatttgaagaatggaaatctgtgcgcagggctgagctgactcagtttcaaaagcaagttgaggagcaatatctctccaatgttgagaggcagttggagagaatccagaatgcccggaacgctcggagggcaaacggtcctgctaacatgcaagaaatggacaaggagctggacacgcacagagcggagcatggtccgaagactcggcgagttcccgaggagggggtgcaatgatgaggacgaggatgtggaggacatggcagcagaagacgagctgatgg

SEQ ID NO: 46721 - DNA, 1331 bp, Setaria italica
  Peptide Sequence Number=SeqID_112695
catcaactggagcaacaactagacagttctctgaagcatataagatcaagaaagaatcagctcatgttcaattcaatttctgagctccagaaaaaggttagttacaatcctttagattcccttctaccttgcacgctgcatgtgtaacatagccactagggaaagttgttgctatgagcacaccttgctagaattcgaggaaggagagcaaactttcagcctcataatcatacacatgtttcagtaagattaatgtattttgatttagttcaacattcacaatctgctgttacctctcatttgttgtgcttaaatatatcttacttgatcagcattcacaatttgctgttacctctcatttgttgtgcttaaatcttacttgaacatctgatttttcagcgttcataattataaacattaggtaatgcaactgctgcagaatgctctaaaccagaatcaagttttgtctataggagtctcatttttaatcaatggaagatttgaatctgtgtatcaggtgggatcagcctaagatattttcaggaaatgcaaattggttttgaagtgagaggcaagcgaatgataaccattgcattaaggaagagaatgggatgtattagtaaggggtttgggtttgactgtgaaactgatctccagtgcatgctttaggagcttagtattcgctactccttaccatgaaatagtgaaaaagagtctggaaaggacaatgcaaaagaaagcactaatctgtcagcatttcagcagactagtggtggtagttgtatctagtctggcagcaaaacctgtatcaaattcctgaatgctgataatatttctggtgacagcatctacaatcaactatcttcctttgtgcaggagaaatcgcttacggatcaaaaatggtgtcctgcaaaagctcatggaggcggagaaggagaaaaacaatgctttaatgaatacacacctccgggagcagcaaaatggagcatcaaaaagctcgccatcaccaccaccgtcaacagttccagattccttgccgactctagatattgggtatcatacttccatcgacttcactcttctgcacaccttcattatttttagtaaagttctttctcctgaggccatagtacgttagctgatggactatgctgttagtccattaagcatacctgaaaccaactttctggtttcaccttgctatttctacctaaacctgtcatggtactgatattacacgcttaccagtactgcataattactctgtaccactcatccttgccatttaggccatgccaacctaagaggaacaggaggggaagtactagaaa

SEQ ID NO: 46722 - DNA, 1310 bp, Setaria italica
  Peptide Sequence Number=SeqID_112696
ttgtgtatgtggtgggctgctaccttgcttttcctgccgatgtgatatttcttcactttctatagttacattttcttcacccatgtttgttgtagcagcaacctctgcaatttgtcccccatctttgttagcctgcatttcaattttggtcagaaaaattatgagtggagtttggaagtacaaaaatgatgttgtttacgcgttcaaatttccgtacaagcacttaacctagaaaagtcccacaataaaagtagtactcagatcattgaccaattttcacaaagagccaaaccggaatccaattagccaagtcagtcttctactgaataactaaaatttgaaatttctcacacggtaatatatattctcattacatatatagtaacaagtgacaaaggctgaccacacatagacaatatccaataacaggagtgaaagaaaatgcatacagtttgaactgaaaaacataggtgaatcatagtgaaaagtgatctgggacagcagacttaaacctcagatttaccatttcaagttcccccatctcatggcaaaaagagttgaaaataattacaaattaccacagagcacatttgaatagcagtaattaaagagtttgtacactgtacactagctgaaacatgaaaagcatgctctgggttccttgctaaaaagctagttatcagtatgtgcgtacgttgctacagaccacattggattccaagactcaggatgcaaagcatagtaataatgagcattatttcatatctaatgtgatgcaaaagcaactataatccagaaacaattcaagtcactcattgacaggcatattcttttgtttggcgtaaacctgctactaggggttgtcatgttgtacagtattgcatgatctctaccttcaaagggtgtgcctttagttccttcaagaacatagtctagcatacaaagtaaagaaagcacataagttggtaccaatatatagccttgaaagtaagcaaaaagattggcgttgcattaagaacaaggatgataaatacaatctgaggcaccaaatggatttggactatacaaaaaagcttttaacgttgccatgaacacatatagcaaacatgttcactataattcttttccttgatgcatgcaaggtaaaatgacaggttggtgctgttgtaatctatgagttgtcaatggtgctcaactactcattagtaaatttaaccaagaacatatctcatctattactatttgacaggttggtgcacataattagcaggaacctttttcagcatgtatagcgctggccattactgttg

SEQ ID NO: 46723 - DNA, 1166 bp, Setaria italica
  Peptide Sequence Number=SeqID_112697
cacaaatcctcttcctcctctctcctgctagctaaagggtgagggagaacatgcatatccaagaagagcaggccacgccatccacggacatcatgtggggtttctctggccagtctaccttgacttcgacgacggggctcaagctgaaggagccggcgccggcggtgtcgtctccgggctccggctcggtcggcgctgctgctgcttcagagaagaacgggagaggcaagattgagatcaagcgcatcgagaacacgaccaaccgccaggtcaccttctgcaagcgccgcaacggcctcctcaagaaggcgtacgaactctccgtgctctgcgacgccgaggtcgcgctcatcgtcttctccagccgcggccgcctctacgagtactccaacaacagcgtcaaggcaaccattgagaggtacaagaagacaaccagcgacaactccaactcagctggtacggttgcggaggtcaccatccagcactacaagcaggaatctgctaggctgaggcagcagatcaccaacttgcagaactccaacaggaccctgataggtgattctatcgcaaccatgagccacaaggaccttaagcaggctggaggctaggttggacaaaggcctggtgaagattagagcaagaaagaacgaagtgctgtgttctgaactcgagtacatgcagagaagggaaatggagttgcagaatgacaacctgtacttaaggagcagggttgacgagaatgagagggctcagcagacagtgaacatgatgggggcgccgtcgacgagtgagtaccagcaaggtttcattccttatgacccgataagaagcttcctgcagttcaacatcatgcagcagcagccccaattttactcccagcaggaggaccggaaagacttcaaccttggtggaagataaatggaactatggagcttcggttatctgtcacgtgcttgcaagtgaggaaatggagcgctatattgctgtggtctgtggaactatttataaaaacgagtactactgctttatgtgtacgcatgcacaatttcttcatcccaccattaaggcttaatttagcaccacctatgtgatgtaaattaatctctatttgcaactcggatcctgcatatcgttcgtgtttctatatgtaatatcggtgatgctgt

SEQ ID NO: 46724 - DNA, 1162 bp, Setaria italica
  Peptide Sequence Number=SeqID_112698
aaaatatgctttgttcatacaaatcattaaatatgctttgttcatacaaatcattaatgaaaccatccaatgtcaaacttagtcgataacacacacacaactgaaacacacaaggtatccgactcacactagctaatttgaacacatcaaaatgtcataagctatgtctagcactatagcaaaggttggcttgacatggaccgtccatcacttgtgcgctccgctccactcaaactctatcttgctcccaatctgaagggtgtactcagggccaacttccaggggatggaagaatctgttgccaacatgtgatagcgcctgctggggggacgtgccgctcgtagccaaccaagttggcactgtgctcccacacctgcccgtgcacttggctgctggtctcctccagctttcttctaaggcacttatttgcttcgcacagcatttgctcccttctctgaagatcagtgagctgatcaagcatatgctgtgtctgcaagaacaaaactttgatcagctagcattttattaggtatatgatactgtatcattcagtcttaaagctatatgtacatacaaaattccaggatgacgtaattaaggaacatttaagtgcagaaaatacaaagctcaatcaggaatgtatccacctatgccgtatcccagagtcgagaccccaaaatcgtatatgagttggaatgttaaccagctccttcacttctgcaagctggcctgcagtttttctgccactcatgcttcacttgctctgaacttctgatttatgcttgtgataagctatcaggtaactccctttcgaaagaaatattagctcaggcaactctgaactttctgtcatcacttttaatcctcaccaacgatggccatccagagtgctgctgaagcattcaggtaacaatggccaggagcagcaatgtgactgaagcttgagcaactgaaggctgaactgctgaagcttgcgttgcatcaggagaagggccgtgccggcgtggatgaagaagaagctaaacacttacaataacagaaataagtttatgagattaggaacatacatgatcaaacagtagattagtaacagacatgtaaggaattagtagtgtaaacataactagtatcaaattaaaaatggtagctttatctttaatta

SEQ ID NO: 46725 - DNA, 1215 bp, Setaria italica
  Peptide Sequence Number=SeqID_112699
cgcattggactgaactaggttcttttcagcctcagatggcttaaccatcactgcttgcccaagaagcggttgaccagacagagcaattgccatgggaacagacatcacgtcataaaactcaatgtacctgcaaatttagatatatgcttagtacaaacatcaaagcatcaagggaaagacatttcctgtcaaaaaaggaaagaaggtcaataagttggtcatcatatgttatgatatttcatattttcacagaaaacttcaggcattttgatcaaaatttgtgtaggaggttttcgaacttggttcttggttgccccctttattgcctagaaacctgcaccaagtgtttgtcaaatacactggaatcaaactgtcctcgactgctgactgacatcagaatgatctaatattccatcttacttgtaaattgccgataatcccagcaggaagaccaaattataaaatttcagtgtgcaatcccaactcctttagaacgtcgtgagtttcggtccataataaggcgaacatcacgaacctttccagcccttgagaagaactcataaacatctctttcgcctgccttcagtgatagctgtggtaacgcttataatgtataaactagcaaagtaaggcatcttattaaaaatcaacctgggaggcaaatacagtcctctggtccctttctggatcaacttctggctcagcgtcatcatctttcctacgttagatgcaactccaggattcagagttgcagctccaggattcagctccaccagcaactacacctttccggcatttggtcgaacaggttgccggcatcgcggatggactccttgtcgctggagcgagggaagcgccaagcccttgtcggtgtagggcacgaggcgctgcatgaaccgctgggcctcctcgtcgcagccatctccggcgaggtcgtcgacggcgacgccctaggcctcggcctcgaggacctcggccccttgtcgccctcgacggcgagcgcgccgccggtgtcctggcagatgcggccggcgagcgggtagaagacgcggagcgcgtcggcgagcgcggccgtcatgtgcgcaacagccccgacggcactcgccccggcctggtgcagattgggatccggcggtgccagccccggcctggcgcagattcgctcgcagatctgaagaggggaggccacgagcatgtcggcgatgagcggcacgg

SEQ ID NO: 46726 - DNA, 939 bp, Setaria italica
  Peptide Sequence Number=SeqID_112700
ttcgacatgatattcctgtaataaccattaatgacataccccctgaagctacatctagttcgagtggatacagtaatggagcctccgttgatcctaccctacaagcacaattagagtcagatgagttactggctcgccaacttcaggagcagctttacaatgaatctccttgttttgcacctacagaagagattgatgcaatcgtagcaatgtcacttcaacatgaagaagacacacatcacacatctaggcctgtaaggcggtccccaaacaatactagaggtgcccgtgtttcccgtttaaatgctcttagggctgaattggcgacaacaaacaggatggtttcccatttgcagaatattgctccagtaactttcagatcgggacctgctttagcaagatatcctgctgcttcgcgcattcaacctaacattgatttaaatgactatgacgcgctacttgcactggatgaaaataaccaccagcacactggtgcttcagaaagccagatcaataatttgccacagtcagtagttcagtcgaatagcatccaagagccctgtgctgtctgccttgaaaatccctctgtgggagatatcatccgccatctaccatgctttcacaagttccataaagagtgtatcgacgagtggctgagaaggaagaaactgtgcccaatctgcaagtctgggattaggtgaagctagccagtttttcagttggtagtggtagggacgagaagctagtttcttgtaccggccgctcctgtgccaattccggtccgtgcgtttttgccccgggtgtatcgttgccagtgtcgttgttggcttaatcggtcattctgtacgccgtatccctttttgttgctatattgattcaccgatatgcataaaggatgaaagttaaaaactaaaaaaaaaaaaaaaaactaagagacac

SEQ ID NO: 46727 - DNA, 798 bp, Setaria italica
  Peptide Sequence Number=SeqID_112701
gtcctttgtttggtcttgtcaaacatcaagcttcaattagagaggaagtgcacccgggcgagggggtactccttcccagctacccaaacgccagtctgtgaccactgcacgtcctcccattctaggttatcctgcaacacctcaagttggtctgctggtagcgggataccgatggaacgcatggcactttcaggcatggccttcttgcaacgagaccatcggaacacatcccggagttcatggtccacagagcctctgtccccattttgcgaatggtgactactgttctggtgtttctccggttccgcatcagatgcattggaatttgatccaatacttcgaggcttctctccactgaagcagagctcgtacctgtggaaactattaaagtgtgtttccaagtatattacttctcctttcttcagtctagcagaagtataaagagactttttcaatcccttatctgccacaatgcttatactatattttaaccacggctcattgcagagattgtactgtattgtcacttcacgaacaaatctttgttgacgcaatgcattagaagctgcagctcttgttgtcattgtacgctccactgcaactggagcaagtgtaggttccacagctgacgtgtggctaaggcgcggctcaagatcaatggtgccgccaccttcttaacaatgcagcagcgttctatgcgaaagctacagccaatcccagcaccccaagcacgtgaacgtcattgttcctcaatgttgaagtataactctcttgtggtggtagaactcgaacagttgc

SEQ ID NO: 46728 - DNA, 1578 bp, Setaria italica
  Peptide Sequence Number=SeqID_112702
ttagtaggaaaataaaaggttacaacaggaagaacaaggagcactggtgttgactggccagcgccttttgtgctaagtaatccaaggagaagcagttgcgatatgatcaatgctgtgattatacgtccatgaacacttggccaaaatgctgctgcactctcatattcttgattgtacacatttattatctggtggcggtatacaatatatgcaaacccaaagaatatcaatatgaaagggagcaaaaaatggtgtcaccgcagcatagacaagaccaagtaagaaatagagctgaatttgaggttcacttgagtcaaaaccaatacttccagggtccattgcctcttccctatctttctcagtcttgaccaagaaaagttttcaagtgaaagattaccagtggcttcaatcttaatatttcaccagcgaccccagcccaaccatcaaccattacatatgttataaaaaaggttgccttcattggaattgcttcaccaactgtccttggtattctgcaaaagaggcaaattagatattaggaataaaagcatacacagtttaacaggagaaaatatggaatgaaaggggttcaaatacaaccttttaatatcaagatgttcaaactaataccaggtaacaaaggagaatacactgaaaaatagcatgccaataaaataatttcataacggaggaaagtgaatatatgaatagttttaggggtattctctccatccaaagtccttaccatgagcattaaaagtacaagtatatatggcaaacatattaaaccatagatcctgcagcatcgtgcaacatttgtagtacaggcatatccaacatacacagtcaaacataccgtaattttgctgtcacagctccggaaagatactttcacctatgtgctatgtccaaaggcaaacacattgttttaatagctacttcaggtaagggttgaccactgtttcatatgttattgatgaacacatatttctagcttaagcacaattatttcaatagtacgatcatttcatcaagccaaactgtaaatgatgaattttttgtcaacatgtaattactctctccattccttctttttttggtaaggcgctcacaacccaagattcaaactatttaatctttgaccaacatttagtcttagaatttgtagattataccatacaaatttggcatcattagattcatatttgaaaatatttttatatgatgtaaattccatggttatgaacaatataatgtagagttactaatggtcagagtgtggtgttggagaccgcactgggtcaaaccacgccttacaaaaagaaaaggagggagtatgttattgcatctatatcagtacatacaaagacgacaatgataaatggtgcagcataaaggattaacaatatgagaaggacatactcatttgctgattgatgtatataggtttttagctgctctaaagcagatcctgcaataatgcttgccagaaacacattgaagaatatgaagatatagtatttggatgcagatcttctctccagtgaagatcttccttatattactcccaagcatatt

SEQ ID NO: 46729 - DNA, 835 bp, Setaria italica
  Peptide Sequence Number=SeqID_112703
cttccttgcaaataaaatccccaacgctaccagattaagcccggccggctggcactcccctcgattcgccgctacctgcgtcgtacggcagatccatcacccttccatggtgaccacggcggcggcgcccgacggagacgtcgaccagcggcagcagatcctgccggcggaagccagcaaaaagaagggccgccgcggccgacgcgagatgcgccggatcgaggacaccaccagccgccaggtcaccttctccaagcgccggagcggcctcctcaagaaggcgtacgagctctccgtcctgtgcgacgccgaggtcgcgctcatcgtcttctccccgcgcggccgcctctaccagttcgcctccgccaccgacttgcagaatacaattgatcgctacctgaaccacaccaaaggcacacctacaaatgaaaaagttcacgaaccaggtgtagagaagtggaaatatgaggttacaacgttgggacagaagatagacgcaattgaggcatacaggaggaagctgcttggggagagccttggatcttgttcaattcaggagctacaggaactggagttgcagttggagaagagcctaagcagcatcaggcaaaggaagcaaaagaagctgatggatcagattttggagttgagggagaaggagcagaaactctcgaaggagaatgcgatgctccgcgatcagcagtgtaaagccctgcctctgctggagctgaatgataagggccgtgtggatgctgctgctggtggcggcgaagaagaagaggatgatgtgcgcatggaggacgtggagacggagttggccatcggaatcggaagg

SEQ ID NO: 46730 - DNA, 844 bp, Setaria italica
  Peptide Sequence Number=SeqID_112704
agtagtaataccctacctactacaaaaggaatggagcagcaagcaccttgtagttgcggccatgataggaaccctggtcgtggtcgccatcgccgcagtcatcatcgtcgacctcactccgcctcaagtcttcttctccatcgaagatgcaagcctccagaatgggtcgtacaaacagcaaaaattctacaacttcactctctctgccaacaacaccagccggcgcatggaggtgctttataccaccctcaacactgagatatggataaccccgtctgattggtattcagccgagttgagcatgagcgggttcacgcagcagccaccggacaacgtgaccaagttcgccgggtgggccgagttgtatcagctggatagcatgatggcgtcggcgcagggcagcggcgcggggaattggccaaactgcaccgtggtggtgatagccaaggtgttgttcaaggtcgggctggcacgcacacggccgtaccacatcagggtgtcctgcttccccgtcaacttccgcgataagactcggtacgccaattgtacctactgatctctccagtttaggaaggggagaagagccgaggctttcttgggaggttgccggaggaggagctgaggaaggatggggcgcggcaagatcgaaatcaagcggatcgagaactctaccaaccgccaagtgaccttctccaagcgccgcaacgggatcctcaagaaggcgcgggagatcagcgtgctctgcgatgccaaggtcggcatcgtcatcttcttcgcgatttgctgggcgctcgatctgccccgccctccgccctcccagccttgcgtcgcccctctcacccct

SEQ ID NO: 46731 - DNA, 937 bp, Setaria italica
  Peptide Sequence Number=SeqID_112705
tatttcataacttttctccctatatatagtgtgcaagacagtaggagggtactcatttatgcggatactatgtttgtgggtgcgaaatgtatcaccgaacaagaaataaccatacgtatacaaaattaatttgcttgtactttaaaaattagtttgcttgtgcttcaaaaaccaaatcatgtgtatatacatagaaaaattagattaagtatttcaattcatatgcttatacttcaaaaacaaattcatgtgtatttacatagaaaaattagattaagtatttcaattcatatgcttatacttcaaaaaagtttcaattgttcaacaaatttagattaagtatttctaattcatttgccaatgacatagatgatgaacaggaaggaaaaactcctcaacaccgaagttttcagggcaatacaagatcaactatatggattccttcttgtacctgccgctgtggtagctacaagttgtgtttgtggtgggctgctatcttggttttcattttcttcacccatgtttgttgtagcagcaacctctacaatttgtcccccatctttgttagccttgctacagaccacattggattccaagactccggatgaaagtcactcattaacaggcgtattgttttgtgtggcgcaaacctgccgctaggggttgtcatgttgtacagtattgcatgatctctaccttcaaagggtatgcctttacttccttcaagaacatagtgccactccaatatatcgttgggaagcgggcgagccacgatctgcagcagcggctccttgcatagcgtgtgccactccttctggaggtgcttgagttagccacgtcgccgtcgtgcgatgcgccgggcgcccccatgcctatgctgccggcgcccgcgccaggaggtcgagcctaggccacccgcagcggattcgccactacc

SEQ ID NO: 46732 - DNA, 708 bp, Setaria italica
  Peptide Sequence Number=SeqID_112706
atcactgcttgcccaagaagcggttgaccagacagagcaattgccatgggaacagacatcacgtcataaaactcaatgtacttgtaaattgccgataatcccagcaggaagaccaaattataaaatttcagtgtgcaatcccaactcctttagaacgtcgtgagtttcggtccataataaggcgaacatcacgaacctttccagcccttgagaagaactcataaacatctctttcgtctgccttcagtgatagctggaaggcaaatacagtcctctggtccctttctggatcaacttctggctcagcaccatcatctttcctccgtctgacatcacggtcacggtagtggccacgctcgctgcgctcgcgctcccgctccagctccctcaccatctcctcctcctcggcgcggcgccgctccgaacggctccgactcctccgctcccgttccacctccttatctctgggccggtgcctgtcacccctctccttctcccggtccctcccctccctgtccctgtccttcccgcggctgtcgcggctcttctccttatccttgccgtcatcccggtcccggtcccggtcgcggtgctcgcggccgctgcggtgccggtcgcggtcgctgtcgcggtcctccccggagcgggagcgcttcgacgcgcggtcctcgccgccctcgcggcggcgcgagccgcggtccttctcgc

SEQ ID NO: 46733 - DNA, 909 bp, Setaria italica
  Peptide Sequence Number=SeqID_112707
ttcttttggttttttcctttgtcaaatacagaagatggagggaaaattaggccccatactaaggactatcacatgacaacattaaacactcttcagttctcaaactagctgttgatgtgatatttcttcactttctgtagttacattttcttcacccatgtttgttgtagcagcaacctctacaatttgtcccccatctttgttagcctgcatttcaattttggtcagaaaaatcatgaatggagtttgaaagtacaaaaatgatgctgtttacgcgttcaaattttcgtacaagcacttaacctggaaaagttccgcaataaaagtagtattcagatcattaatcaattttcacaaagagccaaactggaatccaattagccaagtcaatcttctactgaataactaaaatttgaaatttctcacatgataatatatattctcattacatatatagtaacaagtgacaaaggctgaccacacatagacaatatccagaaagaaaatgcaaacagtttgaactgaaaaccatagatgactcatagtgaaaagtgataagggatagcagaactaaacctcgatgtaccatttcaaatttccccatctcatggcaaaaagaagttgaaataattacagactaccacagagcacatttgaatagcagtaattaaagagtttgtacactgtacagtagctgaaacatgaaaagcagggttccttgctaaatagctagttatcaatatgtgcgtaccttgctacagaccacattggattccaagactccggatgaaagtcactcattaacaggcgtattgttttgtgtggcgcaaacctgccgctaggggttgtcatgttgtacagtattgcatgatctctaccttcaaagggtatgcctttacttccttcaag

SEQ ID NO: 46734 - DNA, 1058 bp, Setaria italica
  Peptide Sequence Number=SeqID_112708
cctccaaccagctgccgctgtggtagctacgagttgtgtttgtggcgggctgctatcttggttttcctgctgatgtgatatttcttcactttctgtagttacattttcttcacccatgtttgttgtagcagcaacctctgcaatttgtcccccatctttgttagcctggaaaagttccacaataagagtagtactccgatcattgaccaattttcacaaagagccaacccggaatccaattagccaagtcaatcttctactgaataactaaaatttgaaatttctcacacggtcatatatattctcgttacatatatagtaacaagtgacaaaggctgaccacacatagacaatatccaataacaggagtggagaaggcaaagcaacacttactagatgcaactccaggattcagagttgcagctccaggattcagctccatcagcaactacacttacacaccaaaacttaagaaagaacagagtcacagtcagagatgagtagatcataaatgagcttgccatcaagcaacacaggtcaaaagtccatgataataaacatgcaacattacacagactaaagttagtcagagcattgcagttcggagtttgcattacaagtacagactaaagactttcagagcaccattacacagcaccagcagttagcaaaaaaaatctcaacactatacctttccggcatttggtcaaacaggttgccggcatcgcggatggactccttgtcgctggagcgagggaagcgccaagccctagttagtgtagggcacgaggtgttgcatgaaccgctaggcctcctcgttgcagtcatctcctgcgaggttgtcgatgacgacaccctaggccttggcctcgaggaccttgccaccttgttgccctcgacagcgagcacgccgccggtgtccatgaatgacaggagcccagtaagaatgcttgctacagaccacattggattccaagactcaggatgaattatagtcactcattgacaggcatattcttttgtgtggcgcaaacctgccgctaggggttgtcatgctg

SEQ ID NO: 46735 - DNA, 1241 bp, Setaria italica
  Peptide Sequence Number=SeqID_112709
taaggtccatagcaattggccactacatacagctgctcctaactgcatcacctcacataccttccccttcctctcttctcccatcacctctctctctctttaataccccatccctcttcttcctctccccctgctcctcctctcacatcctcttgtttccctctctggatctcttcctccagagagagcccaaagaggcactgccacaccatccatgctcaacatgatgactgatctgagctgcgggccgtccacggtgactgagcagccgccggcgccgaccggctccggcgacaagccggggaggggcaagatcgagatcaagcgcatcgagaacacgaccaaccggcaggtcaccttctgcaagcgccgcaacggcctcctcaagaaggcgtacgagctctccgtgctctgcgacgccgaggtcgcgctcatcgtcttctccagccgcggccgcctctacgagtacgccaacaacagtgtgaaggccaccattgagaggtacaagaaggctaacagcgacacctccaactctggcacggttgcagaagtcaatgcccagcattaccagcaggagtccgccaagctgcgcgggactatcagtagcttgcaaaactcaaacagtaggaccataatgggtgatgcaattcacaccatgagcctcagggatcttaagcagctggagggcaggctggagaaaggaatatgcaagattagagctagaaagaatgagctgttatacgctgaagttgagtacatgcagaaaagggagatggatctacagagtgacaacatgtacttgaggagcaaggtcgctgagaacaacgaaaggggacagccgcccatgaacatgatgggagcgccatcaacaagcgaatatgatcacatggccccgtacgactcgagaaactttcatcaagtgaacattatgcagcagcctcagcattactcccatcagctgcaaccaacaacccttcagctcggatgaaattaactacccgaaggcgccggtgtcgacgcacgcgcgctgctgttatcatgtgtccaaccgagatcaaagtaaactttatttacgtttgtggaactaataatcgtgactcgtcgatggaacgcatgcaggagacctgctgccagcagtatgcatatgttcgtgtcaattaatcgaactgctgtgtatctatatagtacatgtggcgtatcaaacgctttaatatactctgtatgtgttgtataacataaaa

SEQ ID NO: 46736 - DNA, 881 bp, Setaria italica
  Peptide Sequence Number=SeqID_112710
accgactcatgtatggacaaattcttgaacgatatgagcgctactcctatgcagagaaggttctcatttcagcagaatctgaaactcagggcaactggtgccacgaatataggaaactaaaggcgaaggttgagacgatacagaaatgtcaaaagcatctcatgggagaggatcttgaaactttgaatctcaaggagcttcagcaactagagcagcagctggagagttcactgaaacatatcagatccagaaagagccagcttatgatggagtcaatttcagagcttcaaaggaaggagaagtcactgcaggaggagaacaaggtcctgcagaaggagctcgtggagaagcagaaaggccagcggcagcaaccgcaatgggaccaaactccacagcaaaccagctcgtcttcctcgtccttcatgatgagggaagctcccccagcaacaaatatcagcagctaccctgtccctgtggcagcaggcggcgggagggtggagggggcggcaccgcagccgcagccgcaagctcgcattggactgccaccatggatgctcagccacctcagcagttgaactggaaggcttcctctcacccgtctcggtgtgcggccaagattcaggaacggtagcatgctcacccggctgcctcgctgcctccacctggtgcgttattatcgtcgatcttgtcgtgatcgcgagcggcgagtagcagcagcagtaggggtttaccataatttgagcagcatataagtagcaatctacaatgtgtatattttgcctttgttcatcaccgtttccggcgaggctacagtaccattgagtaatttacccatgtaatatttatgcgcagcatgagcgtcaaaattccatttccatggc

SEQ ID NO: 46737 - DNA, 1468 bp, Setaria italica
  Peptide Sequence Number=SeqID_112711
gcaatcgtagcaatgtcacttcaacatgaagaagacacacatcacacatctaggcctgtaaggcggtccccaaacaatactagaggtgcccgtgtttcccgtttaaatgctcttagggctgaattggcgacaacaaacaggatggtttcccatttgcagaatattgctccagtaactttcagatcggcttgtagcttggtcggggagagttccaggattggggccggttccgttccgggagcggctagcgaagggatcgatcggccaggatggtgcgggggaagacggagatgaagcggatagagaacgcgacgagccggcaggtgaccttctccaagcgccgcaacgggctgctcaagaaggcgttcgagctctctgtgctctgcgacgccgaggtcggcctcatcgtcttctccccgcgcggcaagctctacgagttcgccagcgcctccagcctccagaaaacgattgaccgctataaggcatatacaagggaaaatgtcaataacaagtctgtacaacaggatatacaggtgaagttctacagtataatattatgaccctccttttttatcaagaaaaggcatgaattgcacctactgcttatatgaatatccgatgccaagtgatatagatgattatttttcttaacttttatattaagttgttttttatttagaagatactcaatttgctcgtttcagattctattagtttgcatgttcatgtggctggtgtatctactgaacacatctttgactactgcatcttcagttaatacagctaagctaaaattaaatctacatataaactaacccaataaagatgcttcgttggaaaaatttcaatatttttcctagatgatgatttacctccaaggcattgaagtgcattaacagcatcacttagaaacatgagtagaataaatatcttttagaggttagtccagtgtttttcaatataaaataggacttcaatgatatgaactgcagcaagtcaaagcagatgccttaagcttggcaaatcgacttgaagcccttgaaaagtccaagcggaagtttttgggtgaaaatttagaaggttgttctgttgaagaactgcatagtttggaggttaaactggagaagagtctccacgtcatcagaggaaagaagacccaactgctggagctgcagatagcgaagctgaaggagaaggagaggaccctgcttaaagacaacaaagagttacgtgaaaagcaacgcaacgttcagccgcagccggtggctcccgccctgaacccccgctgcctccctccgtggccgcgtaatttgccggcgccgtgcaacgacaacgctgacgttgagacggagctgtacattggattacccggcagggagcgcacctccaaccgggactcagggtgaagtacaatccggtgcagccgccggcgacgccagcggccagccggtgggtttctgaccatagg

SEQ ID NO: 46738 - DNA, 1171 bp, Setaria italica
  Peptide Sequence Number=SeqID_112712
agggtggagctgaagcggatcgagaacaagatcaaccgccaggtgaccttctccaagcgccgcaacggcctcctcaagaaggcctacgagctctccgtgctctgcgacgccgaggtggcgctcatcgtcttctccagccgcggcaagctctacgagttcggcagcgctggagtaaacaatacactggaaaagtatcacaattgttgttacaatgctcaaggttccaacagtgaatttgggggtgaacctcagggttggtaccaagaaatgtcaagactcaaggcaaagcttgattcgctccaacgttctcagaggcacatgcttggtgaggaccttggaccactgagcataaaggaactgcagcaactggaaaaacaacttgaatatgcactgtcacaggctcgacagcggaaggttcaccatactcaaatgatgatggagcaggtggatgagcttcgccgaaaggagcgccaacttggggagcttaacaagcaactgaaaaacaagctggaagcagaaggttccagcaactacaggaccgtccaaacctcctgggctattgaagctgccgtgggtaccgatggcggttcactctccgcgccaaattctcagacaccagcagctgctatggattgcgagcccactctgcaaattgggtatcaccagttcgtttctcctgaggcagctgcaaccatgcctagaagcagcactactgaaggaggggagcagaacagccacttcttgctcggctgggccctttgatcgagctgctctcgatctatggaagcaaataattgtcacgtacgtatgtacgcgtatggtataacaagcgatcgatcagacgtatatggtcactaccataatttgcatgcaggtcctagcagctatatatggtattccctagctataagcatgcactgtactctctacccaactatatgatggctccctgctagagttcagaactgtgctagctagccttctgcttgtccttgattcttggattaaaatcagcccttgagttgaaggcccgttagttatagggattgtactctatctgttcatagtgcgccttcatctcagccggccaactgtggattggattgtcaaggatatgaaggtaggaaaggcatgcttgagccaaattgaactgaaaggcatggacccaaat

SEQ ID NO: 46739 - DNA, 1199 bp, Setaria italica
  Peptide Sequence Number=SeqID_112713
tgcggacgcaaagcatacagagcacttgccgtttccggcgcgcgcctctgaacgaacccgaaagccccctcatcaccattcctcttccagccatggcgatcccctttactactcctctcccaccaccaccgcccctcccaaccacaccacaccggcaccactaccaaccgggcggctccaggctccagttcaggaaggggagaagagccgagcttttcttgggaggttgccggaggaggagctgaggaaggatggggcgcggcaagatcgaaatcaagcggatcgagaactctaccaaccgccaggtgaccttctccaagcgccgcaacgggatcctcaagaaggcgcgggagatcagcgtgctctgcgacgccgaggtcggcgtcgtcatcttctccagcgccggcaagctctacgacttctgctcccccaagacatcgctatcaaaaatacttggagaagtaccagaccaactctggaaagatactgtgggatgagaaacacaagagccttagtgctgagattgatcgcataaagaaagagaacgataccatgcagattgagctcaggcatctgaaaggtgaagatctaaactcgctgcaacccaaagaactgatcatgattgaggaggcacttgataatgggctgacaaacctaaatgagaaacttatggagcactgggaattgcatatgagacacaataagatgctggaagatgagaacaagctgctgtcctttaagctgcaccagcaagatattgcgctaagcggcagcatgagagatctcgagctggggtaccatcctgaccgggactttgcggcccagatgccaataaccttccgcgtgcagcccagccacccaacttgcaggagaacaattaggctgctgaattccccactccacttgccgtttcatttgaagatttcacccaccaccatggcttgtatgttctaaacttctagtgcattgccaactgtatctcttctttccattatgtttggaggagcatataatgtgtcagttgcatgatgtgctgatgtcatcgatctagcacacggttaacttggtattgtatggttgtgtaatcagttaattactctatttgtcggacagtgaacagttccgtttgcaatcaaaacactgtgatgataaaccatgatgtaatatttgcgtcgatagaacaaaaaaaaaaaaaaact

SEQ ID NO: 46740 - DNA, 430 bp, Setaria italica
  Peptide Sequence Number=SeqID_112714
ggctttctaagggtcttcaagtggcgatcaagtgcaagaacagtaaaggcgactacgagagcaaggccgtcggccagctggatggctctggcgccttcagcgttccactcaccaccgacctccacggcgccgactgccttgcacagcttcacagcgcggcgggcactccgtgccccggtcaggagccttccatgattattccgcagtccgagagcgacttcgtcgtggtccctggcaagacaaacaacccatcggcagaatgcgcgtcggtcaccatctgcggccctatcaagaagcacttcctcgaccacttccacaagaagaagcccataccgccgaagccgaaacccgaacctaagccgcaaccgaaacctgaacccaagccgcagccagagtaccaccccccaacgcctaaatacagttcacccac

SEQ ID NO: 46741 - DNA, 1300 bp, Setaria italica
  Peptide Sequence Number=SeqID_112715
gaccagcagccaagtgaacggggcaggtgtgggagcacagtgccaacttgcttggctacgagcggcagtcccccacagcaggcgccatcacatgttggcaacggattcttccatccctggaagttggccctgagccaaccctgcagattgggttcgctcctgagcatatgaacaacttcatgcctacatggctaccctgaagaaatggatggggaagtaattaaggaaataaaaacgcgacggccgccgtcgcgttacattctactgcaagatcgtgaatgtgtttcagtcacagacattgttttccacacatcgacacacagacagacatagacatatagtatgtgactgaaacacattcacgatcttgcagtagaatgtaacgcgacggcggccgtcgcgttttttatttccttaattacttccccatccatttcttcagggtagccatgtaggcatgaagttgttcatatgctcaggagcgaacccaatctgcagggttggctcagggccaacttccaggggatggaagaatccgttgccaacatgtgatggcgcctgctgtggggactgccgctcgtagccaagcaagttggcactgtgctcccacacctgcccgttcacttggctgctggtctcctccagctttcttctaaggcacttatttgcttcgcacagcatttgctcccttctctgaagatcagtgagttgatcaagcatatgctgtgtccttgtggatcttatgtgcctcaaggatgaatcaagttgcttctcaagctgctcaagatccttgatgccaagtgacccaagatcttcaccgagcaaattcctaactgagtcctctgtaaattttccaccctcgctttcagtttgaggtactcattgcgactgctttggactaactcgttctccttgttctgtactgcagtatctggtccaccataactagatttttggtacctctcaagtgttttcgtgatgctttgcccgctgcagaactcgaagagcttgccgcggttggagaagatgatgagcgcgacctcggcatcgcagagcacggagagctcgtacgccttcttgagcaggccgttgcggcgcttggcgaaggtgacctggcggttgatcttgttctcgatccgcttcagctccacccgccccctccccatggctcccaaccctgcttccagctagctagcccccagctggcagctacctcctccgcagcacccttccacaccaccggagccgagaggagctgctgccgctgctagctgctctccttcctagtcttcgtattcgt

SEQ ID NO: 46742 - DNA, 1326 bp, Setaria italica
  Peptide Sequence Number=SeqID_112716
ttttttttttttttttgaggtttcattgttctatgtggaatttaaatataatacggctaagaacaaaacttacacccttcagttacaaggttgcctaataaattgtagtaagttcacaatgtttctcgaaaaaagggttcacgtagcaagtaagtagttcaccaacttgtcaatggcaatctgagaagacccaccaattttcaagcagtcctccactttgttctttagttccttagctctttccctcatctcatcaccttctctatccttcattagcttccttacggccttctcaatttttcctctttctagcacgccttcaagctcaaaccctacaccccatgtttgctccacatacctcgtgttcatcggctgatctgcgaattgaggcctacacatcatcggaacaccctcacaaatactctccaatgtcgagttccatccattgtgggtccaaaacccacccacagcacggtgcgccaacacctcctcttgtggggcccactgaatcagcttgcccctgtcctgaactgcggcctcaaagccgtttgggaaattgggatcatccaaatcttgcaatatatctggccgaaccacccataggaaaggaacgccactgtttgccaaaccccaagccacctccaagaactccttggagcccactgatgccaaactcccaaagctgacatacaacaccgatttcgaaggtcgcgtttccagccactcgatgcaaccatagtcttggttcagtaagctgctccctacgctcttggaagaaagcttgtggagagggcctacagggagaaccatagggatgttgagctcatcacggatcctctcgagctcggttttctccagagcatcagatgtgttgataactaaaccggatgaattctttacattgtttgtatagttgacatctttgttattgttattgttagtgtgtgatctaacatacatgttttcttgtagagtcagatctagacatgccagtgaaggagttgccaccactgcgggtaaaggacctctactactcaagaagggttgacaatgaactggtgaccaaattgctcactcgagccacgcaagcagtaaagaattcatccggtttagttatcaacacatctgatgctctggagaaaaccgagctcgagaggatccgtgatgagctcaacatccctatggttctccctgtaggccctctccacaagctttcttccaagagcgtagggagcagcttactgaaccaagactatggttgcatcgagtggctggaaacgcgacctcgaaatcggtgttgtatgtcagcttgggagtttggcatca

SEQ ID NO: 46743 - DNA, 1175 bp, Setaria italica
  Peptide Sequence Number=SeqID_112717
tgcaaaatgtatgctttcctttttatatgcatgattaggaaagctcaagtccttgcaatataatacatatagccacacactcaatagcacagcaccaccacagacagatagctaaacacacataaccttgtactgcaaatagcgaaatgtacagccgttacaccgtacttgtgtgtaggttgtgacgtacggcatttataccggatacatttggacaccaataatcaaacagctagtctttgcgcgctagcttcaacgtacgcgcgcgcttacatatcacaaaatcacagacattgttttccacacatcgacacacagacagacatagacatatagtatgtgactgaaacacattcacgatcttgcagtagaatgtaacgcgacggcggccgtcgcgtttttatttccttaattacttccccatccatttcttcagggtagccatgtaggcatgaagttgttcatatgctcaggagcgaacccaatctgcagggttggctcagggccaacttccaggggatggaagaatccgttgccaacatgtgatggcgcctgctgtggggactgccgctcgtagccaagcaagttggcactgtgcctcccacacctgcccgttcacttggctgctggtctcctccagctttcttctaaggcacttatttgcttcgcacagcatttgctcccttctctgaagatcagtgagttgatcaagcatatgctgtgtccttgtggatcttatgtgcctcaaggatgaatcaagttgcttctcaagctgctcaagatccttgatgccaagtgacccaagatcttcaccgagcaaattcctctgagtcctctgtaaattttccaccctcgctttcagtttgaggtactcattgcgactgctttggactaactcgttctccttgttctgtactgcagtatctggtccaccataactagatttttggtacctctcaagtgttttcgtgatgctgctttgcccgctgcagaactcgaagagcttgccgcggttggagaagatgatgagcgcgacctcggcatcgcagagcacggagagctcgtacgccttcttgagcaggccgttgcggcgcttggcgaaggtgacctggcggttgatcttgttctcgatccgcttcagctccacccgccccctccccatggctcccaaccct

SEQ ID NO: 46744 - DNA, 1711 bp, Setaria italica
  Peptide Sequence Number=SeqID_112718
catccttatctttctccatatctccttcggtgccattatcatctgattctttgtcattatatttgcttctttgctcatgcctgtctcctgcatccacatccttctctcttttcttgtccttaggatccctatcatgagttttccatgcatcatccttaatcaccttagattctgttgttgtattctcatgctcagcactcttaacaactccatcagatgaagctttctccagtattgtgttatccttttcaattactacagatgaatctttcttagaagaatccttctccctatcgtttacttccttgtccctcagggaatcttttctttccctgtcgcatttttcagcatccctccttcctctccgcttcctccccggcagatgcgcgagcatctcgtctcccatcggcaggagcaccgaggagcccccggcacctagcctagctacgacccatccaccgaccaccaccaccaccaccgatcgaatcgggtgctgctcgcctgctctgttcgtctcttctccggccgctttataacccagcctcagccctgcctgctccatcgcctcgccaccgcccctccgcgctcctgcgcctcctccctctcgacctcgccgccgccgaatcccaagcccaagccgcgggctggttgctccgattgggagtgccaatcggagcccaaagcaggggaagcacatgctgccgttcgtcctagagttcctcattgatgtcgcctgtgatcagtgagatcctcctctcggggtttatgatcaactccacactccggcgacgcacccacctcgtccagtctttctccgtcgtcttcctctactggttctatgtcttctcataaactactcgcccccgtcaccaagcccctcctccctcccgtcttcttcttcttcgtcgcctcctcgtcgccttccctttgatttctctctagtagcatcgatcgtccgtcctcatctgtcgtctctgtcttcttcgtcgtcgtcttcttctctatttcggttcaactactagtagcttcctgaagctttagctttgcatgcacttccctacttctgctgctaccaaagatcttcagtagtagtgtaagaaggaaatcgaggccagcaagaagaagagctccgattcctctgctagttctgctggtgtggtgttgtgtaataaggaagaagaagaagaaatcaagaagcagggacctgcgacaatggcttcctccgacgcctacctcgccttcgacggcgccgccgccatcgacgacctcctcagatcctgcccggagatgttcccgctctgctagcccaacactggactcaccatggcagcacaaagcatcaacgaggcgaaaacaatcatccctttttgcttttggtgtttcaccaggttagtagtttgctagtgagatggaactgaaatcagatcagaggtggtgagccatggaattcactgtcaccgtactgtgttgggggtaagcaactgagcactgcacctaattaactaagctagctgctgagattaaggttaatgaaccactactaattaccatatgtaactctgaggtctgctctggtcactcttctcatgtactgtgccactccactatgtaagaatcagagcagtaaccctactagtatttctccttcaacaaaggaagtgcaatatatattttacagttactctaaaaaaaactagtgcgactgagtcga

SEQ ID NO: 46745 - DNA, 993 bp, Setaria italica
  Peptide Sequence Number=SeqID_112719
ttttttttttttttttttattttgatgaaagaaacatttaggcatccattaatccaaattatgctttgttcgtacaattcattaatgaaaccatccaatgtcaaacttagtcaataacacacgcacaactgaaacacataaggtatccgactcacactggctagtttgaacacatcaaaatgtaataagctatgtctagcactgtagcaaaggtgggcttgacattgaccgtcccatcacttgtgcgctccactcaaactctatcttgctccgaccagtacttgtaccttccgctgtggtagctacgagttgtgtatgtggtgggctgctaccttgcttttcctgccgatgtgatatttcttcactttctatagttacattttcttcacccatgtttgttgtagcagcaacctctgcaatttgtcccccatctttgttagcgccactccaatatatcgttgggcagcgggtgagccacgatctgcagcggcggctccttgcagagcgcgtggtactccttctagagctgcttgagttagccacgccgacttcttgcgatgcgctgggcgccccccacgcctgtgccgccggcgctcgcgccgggaggccagggctaggccacccgcagcagatccgccgctacccgcgctgggagggagggggtgccggcgggatacggagggaggagagggggctgttgcgcctcctcatccgcgggaaaagtcgatggtgcggagggatctggggagggaggcgcggtcggaggtagaggagggaggcgcggtcggtttggctaggatttggctgacggaggaggggttgtgtccgcggagacagtcggtggagggaggagatgagggcgcggcggtcggcggaggagtaggagatgggagtgcgatggcagcggaggatatgcggtctatggtggagggaggtgctctacagtgagatgtgcgaatgtggtgttggcacgaatgaggagacacatgtact

SEQ ID NO: 46746 - DNA, 1007 bp, Setaria italica
  Peptide Sequence Number=SeqID_112720
ggaggctggcatacggtgagcctggctcacaccggtgcaggacaccaaacagccccttagcacaccacaaaggaaaaacaagaggggcaagtcaatgcaaagcaaccagagaaagcgaaactgggaacgaggaatagccagcaatgcttgataaccaaccggcctcttaacgatccagagagcatccaccaatgcaccaaaattactggagtcagcaaaatagtctgctcacaaccaaccgaacctacatacaccttctaagcgatttgttaaacccgcgacagtctatagctgctccaaactcatgacatcctgagttcctgacgaagcacattcccgctggcctggttattggaggttgctgttgttagagcctcagcctcagcctcattcgaaggcccactggttctccctcctcacttcctcctcttcctcaggtgtgaagtcgttcttgatgttgaaggtcttgcggatctcctccggagtcttccccttgatcatgtccgcgacggtctggcaggtcaggtccagcagccccttgatgtccaggtagtttgcagccaggatgaggtcgaagagggtgccctggtcgaccttgacgaagtcggcatcgaaggttttgagctcatcctcggaggccttgttggtcgctgcggtcggctcggcggcgtccccatcgccatcggcgccgcggcgcgcctcgacgtgcttcttgcagtactcgatgaccttggcgaggatcttgccgttgacgttggggatcgggatgccgttgtcggtgcagccgtcctcgatcatgtgcaagatggtgcgcgactccctcgccaccgactcctccacctcgaagttttccttgtcgcagctgaccagcatcagcatcttgtccttacccgccgccgccgccgccgccatcgatccgatcgccgggttgaagaggtgtcggagtgggggggcgattgggtgtggagtggaagctgcaaggcaaaaccctaggcggcggaagcgaa

SEQ ID NO: 46747 - DNA, 756 bp, Setaria italica
  Peptide Sequence Number=SeqID_112721
ccattttcctatcactagcatgaggcgctgttctaaatgtactgttgagtggaatttagatattttcatatgtgtaatgtatccttttgcgttctcagacttaaaatagcatatttaatcctcattccctgggcaatgcagggagcatactttataggtgacaaagagtcttaagcatatgatattttaagtctgagaacgcaaaaggatacattacacatatgaaaatatctaaattccactcaacagtacatttagaacagcgcctcatgctagtgataggaaaatggcgccttcgaataacttcgtctattatttcattataccctcgccagttgatgtggagcttggtgattttgtaacatggaaagaaaacatggtctggaaaggatggaaacgacttaatctgcattggtgatcaccatctgctgcaaactaaccttatgtacacggtgatggttgactctatatgactgttccactaggaatcaaggcatccttaatcaccgtgactatgccacttttgatgaagtatccttctgtctcccttactgcttcttggacattgtcaaaattgattatcttcacattttctccaatacgagcgttcttgtcgattattgcttttctgatatgtgcattcctcccaataccaatggaataccaccagcctctgaaaggactttcttatcatcttcagtctcgtagtagtctgcagatgatatgtgcattcctcccaataccaatgggaatacc

SEQ ID NO: 46748 - DNA, 1132 bp, Setaria italica
  Peptide Sequence Number=SeqID_112722
caaaattgagaccatacaaaaatgccacaagcacctgatgggagaggatctagagtctctgaatctcaaagaactccaacaactagagcagcagctggagagctcattgaagcacatcagatcaagaaaggtagtaacagttttgcttattttttcatctggaatctcttctttcgtttactgtgttgtaatgcttgtagtactgctacacattgtttgctgttctaaaatttggcatgcttagttttttggcaactaacaacataatcccttgtttggatgtgcagagccaccttatggtcgagtccatttctgagttacagaagaaggagagatcactgcaggaggagaacaaggctctacagaaggaacttgccgagaggcagaaggcggccgccagcaggcagcagcagcaggtgcagtgggaccagcagacccagcaggcccaggcccagacaagctcatcatcttcctccttcctgatgaggcaggatccacaggcgctgccgcctccacaaaacatccggttcccaccggtgacgataggggagagaggcgaagaggccgctgcagcggcacagcagcagcagcagcagccagggcaggcacagccggcaacttcgcatcggtggcctgccgccatggatgatcagccacctcaatgcttgagcaggcgacaacacgtcgacctcgaccaccacaaccaccaccaccacaccatgattaattgccgtgcctatccatcgattgcgagcatcctcacctgcaaaagtggttgctcaccgttggttgaatcctagcataagttcatggcagcgattaagctaaactattgttatgtttgcaagaagaagggtaaccactgtataatctcttgtccagcatgtacgtaccaactgatgcatgcccctatatgcctgtattatcggccaagttaccccatgaatctagtgcttttgttgaaactaaagggtgcagatcaaacatggtttatgtaaatagttttaattattattaggattattactactgctgctacctctgccagtaagtaagtaagtaagtaaaattaatgggacaatgaataaaagccgtccttaattgcgctgctgattcatatgaaaaaaaaaaa

SEQ ID NO: 46749 - DNA, 2617 bp, Setaria italica
  Peptide Sequence Number=SeqID_112723
gctgatgtgatatttcttcactttctgtagttacattttcttcacccatgtttgttgtagcagcaacctctgcaatttgtcccccatctttgttagcctggaaaagttccacaataagagtagtactccgatcattgaccaattttcacaaagagccaacccggaatccaattagccaagtcaatcttctactgaataatagatgcaactccaggattcagagttgcagctccaggattcagctccatcagcaactacacttacacaccaaaactttccggcatttggtcaaacaggttgccggcatcgcggatggactccttgtcgctggagcgagggaagcgccaagccctagttagtgtagggcacgaggtgttgcatgaaccgctaggcctcctcgttgcagtcatctcctgcgaggttgtcgatgacgacaccctaggccttggcctcgaggaccttgccaccttgttgccctcgacagcgagcacgccgccggtgtcctgccagatgcagctaaaatctgtactagaatgatctaagaagcaataacacagtcaatgttcatgttgccttcactatttttggaagttcatgtagacactcagttgacaagtcagaaaatgacatacattatttttctgctccaataatcccttctgttctgaaactccaaaataaacctagactaatatctacattaaggagcataacactagatccagtgagtaagaccatctaggtaataaaataagtaacttgtcaaattctaactcattgcagtagcatccagccagacattagtgcttcattgcgaagtagcatcacactactcaagtgcatcttgtacaagaaaccttataacatgccaagatctctatgtgcgctagaaattatgattgaaattagatattctttttggtaaggctaacccataaaggcctgcaaggaacaacttaccatgaatgacaggagcccagtaagaatgctgcagcacaaagttttacatgtcagatcaacaaaggaaagaaaatgcaaacagtttgaactgaaaaacatagatgactcgtagtgaaaagtgatctgggacaacataactaaacctcgatttaccatctcaagttcccccatctcatggcaaaaagaagttgaaataattacagactaccacagagcacatttgaatagcagtaattaaagagtttgtacattgtacagtaggtaaaacatgaaaagcacgctctgggttccatgctaaaaagctagttatcagtatgtgtgtaccttgctacagaccacattggattccaagactcaggatgaactgcaaagcatagtaataatgagcattatttcatacctaatgtgatgcaaaagcaactataatccagaaacagttcagaacttatagtcactcattgacaggcatattcttttgtgtggcgcaaacctgccgctaggggttgtcatgctgaacaatgaaatgagttagaaacaaaaacagaataattaacatttgcattaattatatatctctccactagcctatatctctctccaatcttctgtctaagagcttatcttcatcgtgctaacataacagcttaacttctatcctatacttctctgcaggaaggcaaactgagatattaagacaacaggttgcagaaattacgaaatactcttcagaagataacttggcctctccaatagtcttacagtaaacatctccattgctataaacacagcttaattatcagcttaatcctctgatttgacattcctggttgtgcactggctttcaggtgttccaactttctggtatgtagtacagagctgataattcaaatattgaagaaaaaagagcagataattcaatctatagaactttcagaactgtaaaagtaaagtaagatctttctaaactagggtaagcacaaatcgagtttagcaatttgtcccaacttttcaaatgttttctatattgggtcaccacaaaatgctaattgctaactgtctgaatgcaaactttgcacattgacacaggaccatatagatccaatatctgaatctcaattataaagctcttatctcacaacaagtcacctacaagcatttttacaaactccacagttcaccaaaatgtcaaaaacttcagtccctggctttgcagtgggcagtagtcttcagggattcaacttttctactgaaccacagtttccagaaatattaaaggcaagaatgatcagtgtacacttaaatcaggtatagcaatttattccaacttacaaatgttcatcctatgctgggacacttcatactagtgaagtgtagcatcccaataagtgaatagctaatggatcactgtctccacccaaaatttactctttgcacaataatacagggtcatacagatccaatcccaaatttctcaaggcaactagcaatcttcagtcaacaccaaccgtcagaaattaaacatattactagggtcatacttacgccactccaatatatcgttgggcagcgggcgcgccacgatctgcagcagcggctccttgcagagcgcgtggtactcctggagccgcttgagtcagccacgccgacttcctgcgat

SEQ ID NO: 46750 - DNA, 1124 bp, Setaria italica
  Peptide Sequence Number=SeqID_112724
acggacaagaagactagaagaagaagaagactaagcggctgtgcgagagcgagagcaaagctcggagaggggaggaggaaggagagatcgtcatggggaggggacgggttgagctgaagcggatcgagaacaagatcaaccgccaggtgaccttctccaagcgccgcaacggcctgctcaagaaggcttacgagctctccgtgctctgcgacgccgaggtcgcgctcatcatcttctccagccgcggcaagctctacgagttcggcagcgccggaataactaagacattagaaaggtaccaacattgctgttacaatgctcaagattctaacggtgcactctctgaaactcagggctggtaccaggaaatgtcaaaactgagggcaaaatttgaggctttgcaacgcacgcaaaggcacttgcttggcgaggaccttggcccactgagcgtgaaagaactgcagcagctagagaaacagctagaatgtgctttgtcccaggcgagacagagaaagacacaacttatgatggagcaagtagaggagcttcgcaggaaggagcgtcacctgggagaaatgaacaggcaactcaagcacaagctcgaagctgaaggttgcagcaactacagaaacttgcagcatgccgcctggccagctcccggcggcaccatcgtggagcatgacggcgctacatatcatgtgcatccgcctgctcactcagctgctatggactgtgaacccactctgcaaatcgggtatcctcatcatcagtttctgccttccgaggcagccaataatattccacgcagcgccccccggaggcgagaacaacttcatgctgggatgggttctttgagttcccctattgcatccatcagatgaaagtggcaacaaataaaaggcatattcagcgctatatgtgcatatccatgctcagtgctggatttgccgccatcttttaaatttgctgttctggtgtgtaagatctaattaagaactgcacctttattctatgtgattgtattgtggcacttttatatttttgtgcaaggccaagaatcttgtaaaaatacttctgtgctgccggtgcatgcaatccaaaattatctctaaccggtaaaaacg

SEQ ID NO: 46751 - DNA, 1627 bp, Setaria italica
  Peptide Sequence Number=SeqID_112725
agacaactagtaactacctagacgacaagtacaataaaatgttgctgtaatcattttgccggcaaaccatcttccatgaagtgcttgttgggcctttgctgctgcagtcacactatcaaagtgcagatacacaaaacctgcagtatttttgtcaacaaaaatgtgcttcactgcaccaaacttggaacattcatcttggacatcatctctgatatccaaatcaaaatcaggatctgtctccactgtggggtcaaacatgttcttaagcaataagaattctgtaggtgctgacatgatcatagattgactggtgacaggaagcataggtgccccaggaactgatccaacagcaggaatagttggtggtagaagagaagtagctgctggggccccaagaactgatgaagctggtcctggtatagccaccccagcagtgccaataccaccagttaagcttgttgcagtgccactcctgtccaatttgagcataagagcagctctggagcttgcatttaatgccaagcctccaccttcatcatcatctaaatctccagtagttgctccaccaacttgtactcccacatgatcagtaacagctgaaaccttaataactctgccagcgatatcaagctgcccattcaagctctgcgcagcttttgcatcttcaagccgtgcaaactgaatgaaaccataacctttgcaaagtccagtcattggatctacaggcagctgaacaagctccacttgtccaaatggttcgaatacctgtctcaattggtcttcagttatattagagtgaagattgccaacatacaactttcttgctccacctgaagccgcaccaccagatgtcgcattggactgaactaggttcttttcagcctcagatggcttaaccatcactgcttgcccaagaagcggttgaccagacagagcaattgccatgggaacagacatcacgtcataaaactcaatgtacctgcaaatttagatatatgcttagtacaaacatcaaagcatcaagggaaagacatttcctgtcaaaaaaggaaagaaggtcaataagttggtcatcatatgttatgatatttcatattttcacagaaaacttcaggcattttgatcaaaatttgtgtaggaggttttcgaacttggttcttggttgccccctttattgcctagaaacttgtaaattgccgataatcccagcaggaagaccaaattataaaatttcagtgtgcaatcccaactcctttagaacgtcgtgagtttcggtccataataaggcgaacatcacgaacctttccagcccttgagaagaactcataaacatctctttcgtctgccttcagtgatagctggaaggcaaatacagtcctctggtccctttctggatcaacttctggctcagcaccatcatctttcctccgtctgcacatcaacaagaaaagaaaagaaatttagcacagcagaataagcaatgcataaaacagtaggaaatagaactgtgactgcagatggcataatgttttattaatttgcaaccctgataagaacaaaccatgaaatgccttcaagcaccccaaccgtgccaacccaaccccttttgttaatttgcaagtgacaa

SEQ ID NO: 46752 - DNA, 2257 bp, Setaria italica
  Peptide Sequence Number=SeqID_112726
gaagagagtgtggggggagagagagaccccgaagcgggagagagagggataaatcggagagggccgttgggagcaggtggctatcgcggccgccgcctccctaatccggagcccctcctccggatcgccccagattcgcacgatttggggatcccgcgcctcgccatcagatcgggaggacaatcaaggtgaaggggaaagttttctgcaacttaaataactagagtgttatatatggctgagatgaattctgatcaaattcttgaggttcctgacactcctgaccgaattcaacagtcaacatgccctgcatccagctctgttgttaggagggacgttacagtggcagctgctaatccattaccatgccgcagaattagatttataaccaggaataaccccatgcatggttcaacaagtcaagataatgcttgtagtgtcctgcctgcaccttcagatactgaccatattttcaaacaagctgaactggcacggattctggcactatcagaaaagcttgaggcaaaattttccatacagaaatctgacaggactgaaatatctgttgagaatgaaaagagggctgaaaaacgtgtcttggatcagagcagcagcatttctgaccacatcagttgtagtgtgactggaggaaggagccctagctgcagagttatagatgggaaggttagtgagcaagaagcaaatcataggaatgcgggctttcttggtgtaggatcaggtcttcctactatcccagtgggaaaaccacgaaacagaacatgtactagcaccaacaataggctgaaaggtgtagcaggtattgatatttgtcgaggatcaaattctgggaaggtcaaaggggagttggtcactaacaaggccatcgcaggaccttcaagccctccatgtggtgttcctcaaaggcatgtgggtccaaaaaagctggtccgcaatggatgtatttctccctctaacatagccaaaaatagtgcaaatgctgatgaaaagcaggaaatgtgctctcaaagtggacatttgcaccatccacatcctcagcttgatgcaattggcaaaggcaatgtgattgatctcactgataattcaccaataatgacaaggcagagatatgcagtgaaggataaattgatctctggatacagtatggacacaagggcagacaaaaaagttgagaacagacagagctgggaagactttaattccacagtctgtgtatcatgccaacagcaaaaattgttctgaacttggtttatcaggcagcaacaacaaaggaaaagaaattagcagtgatatcttggatgttgatcaaattggagaggctaatctgagaaggatttctctaagtgctgctggaacttattctgttgtaaacaacaacagtcctaatatggatgaggagcaaggttggaaaacaacgcataaccacacaagtaaattacccatttcattgatgggtaagctgagttgcaattctgaacgagaatctggatcttccgcaccatctagtcaggatcatggatctggagcacccataatggcctctagtagggtgcggaataaaccaataatgattggtagaggaagaagcaaatatgcctcaacttcatcccatcccgatgaaagctctagtgctcgtgacgaacctgaagcttcttttatttcatcatcaaaaataacagctggcagaaatcataccagccttcgacatgatattcctgtaataaccattaatgacataccccctgaagctacatctagttcgagtggatacagtaatggagcctccgttgatcctaccctacaagcacaattagagtcagatgagttactggctcgccaacttcaggagcagctttacaatgaatctccttgttttgcacctacagaagagattgatgcaatcgtagcaatgtcacttcaacatgaagaagacacacatcacacatctaggcctgtaaggcggtccccaaacaatactgtgagagcactgaactcaattttgatgttttaactagctcatatgtgaccagtatctctacaagcttttcttgcaattaggtgaacatgaagttaagatttttttctatattatattaaaataaatatgctaatagatcttgcagaaaaaattgttccccctttgctgtgttgtctctattgaaattgacacattttatcactttttgcttagagaggtgcccgtgtttcccgtttaaatgctcttagggctgaattggcg

SEQ ID NO: 46753 - DNA, 1233 bp, Setaria italica
  Peptide Sequence Number=SeqID_112727
cgccggggcgggcaagcgctagaaaggaaagccgaggcgggcgggcgaggggcagccaagcccaccacgaccgcctgccttgcctctttcgctttgccatttttggcttgtagcttggtcggggagagttccaggattggggccggttccgttccgggagcggctagcgaagggatcgatcggccaggatggtgcgggggaagacggagatgaagcggatagagaacgcgacgagccggcaggtgaccttctccaagcgccgcaacgggctgctcaagaaggcgttcgagctctctgtgctctgcgacgccgaggtcggcctcatcgtcttctccccgcgcggcaaggctctacgagttcgccagcgcctccagcctccagaaaacgattgaccgctataaggcatatacaagggaaaatgtcaataacaagtctgtacaacaggatatacagcaagtcaaagcagatgccttaagcttggcaaatcgacttgaagcccttgaaaagtccaagcggaagtttttgggtgaaaatttagaaggttgttctgttgaagaactgcatagtttggaggttaaactggagaagagtctccacgtcatcagaggaaagaagacccaactgctggagctgcagatagcgaagctgaaggagaaggagaggaccctgcttaaagacaacaaagagttacgtgaaaagcaacgcaacgttcagccgcagccggtggctcccgccctgaacccccgctgcctccctccgtggccgcgtaatttgccggcgccgtgcaacgacaacgctgacgttgagacggagctgtacattggattacccggcagggagcgcacctccaaccgggactcagggtgaagtacatccggtgcagccgccggcgacgccagcggccagccggtggggtttcttgaacccataggaataagctctgtgtaagcaccaacaaacccagtcagatcagctcagagggttttacttccgtctatatacaagttgtgtctggaaaagaaaatgaagcagtatgtgtattgcaaaggtggatggaaccaattaacctgcgaacctgtaagccttccgagacctgaaaatccatacagcatagaccgagtatctggttgcctcgtatgaaactagaaacacaagcgtggccttgccgcgccctctttggagagcctgtttaattagtatgccatagttgaagtaaaaaaaaaaaaaaaaaaa

SEQ ID NO: 46754 - DNA, 1716 bp, Setaria italica
  Peptide Sequence Number=SeqID_112728
tgcaatcaaagcaattgacaaccaggatcaaggtattcatattgcttgttaacagcagcagtagtagcaacaactgcagcagcagtggctgcagctgcaactggcacatctaacttaatatcgctgttagatttagctgcagcaacaaccattgaagacgcgaccacggcagctgtcgcaacagcagcagctgtaacaggcatttgctttatgagttgcaatggattttcctggggaggtgcagatggctcatacagaggtatagagggagcagcattatcccgggaatcaaacggatggtaaacacccaatccctggacaggcttaaggtcaagaggcatccgataaggaacaatcttgagctcatgtccaggatgatgtggcaatgaaggaccatggccaccagaaccatcatgtgctgtggattcaagctcattcattgtccttatcatttcatctttcgtttgaaatacagatgtgtcgtaaacaatcaggtcttttggttgttccttagattcttctgaaaacaaatcaggtggtggcacaactccactttcaagtaatacagcatggatcttttctgctaactggggttctcctttgcggcactaatcatatactccgagacatctttcactttcttcctgcgtacagttggagtactgcccatctcagaagatggaggcgaacttgatgacgaaatatttgatgcgatcgacttatcttttccttctgaagtaatgttatgatctgcattagattcatgaataattggcacattttcacttgcatatgtgctaactgatagctcctcaaatgaactcgataccccagatccagatacgtcattgtcagtctgggcatttattgctccatgtggaccagaatgcccagcattggtaggtgtcaatcctttttcaagtgattcattttcaaatgaaccatgaatggaacttgaagcttcactgaaagaagaaaccaactgagtgttactgtcatggtgatcatcgacgaataagctgtcttccacttctctacccaggtcggcaccatctgatggaacaagagtgccaggatctatcatgagatcaacaatgcattcccttccattattaaatttcacaatgttcaaagctccttcatctgatccagtatactgccttcctttaactagtcgacaaggaacagcaaggctgtctgccaacaccttaaaaagcagagcacggtgccgagccaaaccaacttttagctgcccaagcggtataactgcacttcttataccagctctcaatgcgctgctcatattacggtacttcaacagcatgctttctggatcaacaaatggtccacccatgtggtcggaaactaaattagctagagtcggaacctaagccgcagcccaaaccagagcccaagcctcagccagagtaccatcccccaacaccaacatatggatcgccaacgcccacatacgggtctcctacaccaatctaccaccctccagctaggcacttgtttgccaagttgcttggtcacttccacaaggaccacgaccaccatcaactcttcgaccacttccacaagaagcccataccgccgaagccgaaacccgaacctaagccgcaaccgaaacctgaacccaagccgcagccagagtaccaccccccaacaccaacgtatggatcaccaatgcccaaatatggatccccaactccg

SEQ ID NO: 46755 - DNA, 1563 bp, Setaria italica
  Peptide Sequence Number=SeqID_112729
gtttagcaatgttcatgtggctggtgtatctactgaacacatctttgactactgcatcttcagttaatacagctaagctaaaattaaatctacatataaactaacccaataaagatgcttcgttggaaaaatttcaatatttttcctagatgatgatttacctccaaggcattgaagtgcattaacagcatcacttagaaacatgagtagaataaatatcttttagaggttagtccagtgtttttcaatataaaataggacttcaatgatatgaactgcagcaagtcaaagcagatgccttaagcttggcaaatcgacttgaagcccttgaaaagtccaagcggtaagcagtcagtatattctactgaagatcaaccatattcttcatacagcaaaaaggttagcagtcatttccattacatgagttgcaggaagtttttgggtgaaaatttagaaggttgttctgttgaagaactgcatagtttggaggttaaactggagaagagtctccacgtcatcagaggaaagaagacccaactgctggagctgcagatagcgaagctgaaggagaaggagaggaccctgcttaaagacaacaaagagttacgtgaaaagcaacgcaacgttcagccgcagccggtggctcccgccctgaacccccgctgcctccctccgtggccgcgtaatttgccggcgccgtgcaacgacaacgctgacgttgagacggagctgtacattggattacccgggcagggagcgcacctccaaccgggactcagggtgaagtacatccggtgcagccgccggcgacgccagcggccagccggtggggttttcttgaacccataggaataagctctgtgtaagcaccaacaaacccagtcagatcagctcagagggttttacttccgtctatatacaagttgtgtctggaaaagaaaatgaagcagtatgtgtattgcaaaggtggatggaaccaattaacctgcgaacctgtaagccttccgagacctgaaaatccatacagcatagaccgagtatctggttgcctcgtatgaaactagaaacacaagcgtggccttgccgcgccctctttggagagcctgtttaattagtatgccatagttgagtacgtgtgcctggagctcgtttcattacctgcataatagaccacagaatgttcttatgagttatgtagatagtatgacgcaagatggaatatcaataccttggagttggacaggggatagtatctaccatgctagcacggctgtgcacaaagtctagtgcatgcaattcaagctgaactattttggtgtaatactacggcatggcaaacaaaagggctatgtttttgttagtagacaaatcagtgatttcagatgatgacttctccaattcagagatagaagtttagagcttcagatatgttattaaagataatatatttagtttacactgtgttccataatgagctgctaaatttcagatgtactccctccgtcccaaattgtaagtcattccaaaaatcttggagagttaaagcatctcaagtttgaccaa

SEQ ID NO: 46756 - DNA, 2544 bp, Setaria italica
  misc_feature (2515)..(2515): n is a, c, g, or t
  Peptide Sequence Number=SeqID_112730
tactaagacaaacaataatacaaaagaatactaatagtgctgacgcagttcaactccgcttctctcaatcgtcacctctcaagagcctatgggagcaacattggagggtacaagaatgaaggatttgttgaagtcttagctgcacagcagaagacccaagaataacccaaactggtttcagggtactgcagacgctgtaaggcagtatttgtggctatttgaggagcataatgtgatggaatttataattcttgctggtgatcacctgtaccggatggactatgaaaagttcatccaggctcacagagaaacagatgctgatattactgttgctgccctaccaatggatgagaaacgtgcaactgcattcggcctgatgaaaatcgacgaagaaggaaggatcattgaatttgccgagaagccaaaaggagatcagttgaaagcaatgatggttgataccaccatacttggccttgatgatgttagggcaaaggaaatgccttatatcgctagcatgggtatctatgtttttagcaaagatgtaatgcttcagctcctccgtgaacaatttcctggagccaatgactttggaagtgaggttattccaggtgcaacaagcattggaaagagggtgcaagcttatctgtatgatggttaactagggaaagaataattaggtaaccaattgaggcattctataatgcaaacttgggaataaccaagaagccaatcccagatttcagcttctatgaccgttctgctccaatttatacacaacctcgacacctgccaccttctaagattcttgatgctgatgtcactgacagtgttattggtgaaggatgtgttattaaaaactagcaagatacaccattctgttgttggactccgatcttgcatatctgaaggtgctatcatagaggacactttgctaatgggtgctgactactatgagactgaagctgacaagaaactccttgctgaaaacggtggcattcccattggtattgggaagaattcacacatcagacgagcaatcattgacaagaatgctcgaattggagacaattgttgtaagtataatcaatgctgacaatgttcaagaagctgcaagggagacggatggatacttcatcaaaggtggaatcgtcactgtgatcaaggatgctttgctccctagcggaacagttatatgaagtagatgtgagacatgcgcctgagtgccatcgacgatcatcagcgctgttacttgcttgatccgctgaccagcgtgttggagatcatggaaacaataaaagaagtgctattcaaggcactcttgttttttcttagtgctcttttgtcctcgttaatgttgtaggatataatgttgtagcggcaaatgttctacatatgtcgtgggaatcaaaattgcatgcctgaatttgggatacctctttgatgttgtgtaattatcagtttaattatcatgcttgctgctgttgattcccacgacatatgtagaacatttgccgctacaacattatatcctacaacattaacgaggacaaaagagcactaagaaaaacaaagagtgccttgaatagcacttcttttattgtttccatgatctccaacacgctggtcagcggatcaagcaagtaacagcgctgatgatcgtcgatggcactcaggcgcatgtctcacatctacttcatataactgttccgctagggagcaaagcatccttgatcacagtgacgattccacctttgatgaagtatccatccgtctcccttgcagcttcttgaacattgtcagcattgattatcttcacattgtctccaattcgagcattcttgtcaatgattgctcgtctgatgtgtgaattcttcccaataccaatgggaatgccaccgttttcagcaaggagtttcttgtcagcttcagtctcatagtagtcagcacccattagcaaagtgtcctctatgatagcaccttcagatatgcaagatcggagtccaacaacagaatggtgtatcttgtagtttttaataacacatccttcaccaataacactgtcagtgacatcagcatcaagaatcttagaaggtggcaggtgtcgaggttgtgtataaattggagcagaacggtcatagaagctgaaatctgggattggcttcttggttattcccaagtttgcattatagaatgcctcaatggtaccaatatcttcccagtaaccatcatacagataagcttgcacctgcagacaacaataacaaatctcaagtactgctctaaaaggcggctgcaagcctgcataggagctacgtatcatcctatttcctagcacctaattgcttcctagctcgcctatttgatgaccaagcattaggtgccaaccccacctgcctagcatctgtgctttctagcacactgctcttaagcaggacttaatgcatatgaactgcaaatatgtatgtactccaatgtatctacatgctagaatgctgcttcaaaaataaaagattancggttacaacttatggcataatggcattt

SEQ ID NO: 46757 - DNA, 2188 bp, Setaria italica
  Peptide Sequence Number=SeqID_112731
aaaaagtagtttaaaatttataatgacatgaaattacaccagtcaaccttcgtatcattcactagttcgacaaaaagaaaaatactagaattctgaaacaagacaacaaagatacactaaatactacagtcgctccattagtttgtactttcacggagtcaagaatcctaaaataatggtagaacaaagctgaatgttcgccctccaaaccatctctgtggtgacggttgctcccagccagattgttgcatggactacccccaattaccagatcaaacccaccaattcttctaatatatgattcaattttctccgaagttaatgtctgcacatcactaatctcaatgagtgtgcctgtttgcgtctgatcccaccagctctttagaatggtcctgttcacctcggatttctcgactgaaatcacattgttcatgcgaataccaagtctatggagagcaacctcggctcctccaataccagagaacaaggacagcacattcataccatgtggaaacatgtccttgagtaccgagaggtgatatgcaacagtgtccacttggaaagaattcccaagggacctatatctctctgtcctgctgattcctctcgtgtgatcctttgggaagccaagtaggaactccatctcatccggctctagaggagcaaccttgttgagaccaacccataccaaattccattttctgcattcatcaagtacgtacttttgaactctttggggaggtggatcttcactgtttgttagggccacacgaatcctctctgtcaacttagcactagccacacaagtctgaaggcaattaaattgccgtcttgggtcccacgagggccaccacttcttggtacgagggaaggcctcagatattgtctttgggggtaagggaagtagagttgacctgttcacaagaggcaggttatgtatgtagcctctcttcctggcagcggcacagaagaactttgagtccacaaattctggttgaatatcataaaggaatcttgaaatagttgtccacacgccttttggagcaagtgccacattttcataatagaagtagggtggtccaatagcctgtccaggtaaagatctgtttgtggaccttgacccatttggcaagccaaaaccaaccatcggctttgggagaggcatcggctcatcattactaccatctaagggccctctacttccttgtgcttgacttccaaacctcttcctctttctcttgatcccttccatgggccttcctttctttctgcctccatagaagtcctcatggtcagaagaattgccacagtaaccatcccctgctgtctgtgaagcatagatcgaatcaaccaatacagaaatagatgcatcctgcccgcatctagtaatagccatggtggcctcatcttccggaaaccccattttcactaaggaatcaactttctcatccttctgtgacatctcgtttaagaaatcctcatcaccggattcgtcaatggtaggacccctgtttctctcaccagcatcctcatcatcccagttttctaaaatatcatcagcatcactatcctcagcagcttgagagacacagccagaagcagaaccgttatccacagagggattatttcctatttcctggtaggttagaagaagttcaactaatgactctgcaccattatccccgttatccttcatggccttcataaccatctcctccgggaaacccatatccacatatttctgaactgaagaggcagatggcccagccctcccattaccattggcaacccttgtggatgggcctggagcatcaatattcctggaggccagagcctgaagaactggcaccagcagcgttgaagctggccgcctcctcctcatcactttcccactcaaatttatcactatcctcattgtcgctaacccagtgcaccattttggaaacttcgcgaggcgtctcggactacctctcccctcgatccctctgtcgtcccttggccccggtgcggtgagatgctgcgctgacggagtgggagaccgcgacggcgtggcccgggtccgcctctctcctacccccgtctcaagaatctccccacggccgacctcccgcctctccctctcgcccgccctcggcctcggcgcggttggggggcggtggcagaggaggagcaggaggccgcgacggcg

SEQ ID NO: 46758 - DNA, 1217 bp, Setaria italica
  Peptide Sequence Number=SeqID_112732
tttgctgctgctgctagtgcgagctggtgcttcgggcgaggtcgtcgatctggcggcggaggcggagggttcaggggccgcggggaaggcgggggcggcggccatggggagggggcgggtggagctgaagcggatcgagaacaagatcaaccgccaggtcaccttcgccaagcgccgcaacggcctgctcaagaaggcgtacgagctctccgtgctctgcgacgccgaggtcgcgctcatcatcttctccaaccgcggcaagctctacgagttctgcagcacgcagagcatgccaaagacacttgaaaagtatcaaaagtgcagttatgcagggcctgaaacagcactgcaaaatagagagagtgagcaattgaaaagcagccgtaatgagtacctcaaactgaaggcacgtgttgaaaatttacagcgaactcaaaggaatttgctcggtgaagatcttgattcattagacataaaggagttggagcacctcgagaagcaacttgattcatccttgaagcacataagatcaacaaggacacagcacatggttgatcaactaacggaacttcagagaaaggaacaaatgttttctgaagcaaataagtgtcttcgcagaaaactggaggagagcaaccaggttatctggcagcaagcatgggagcatgggggagccacagccagaagtccagcagcagcagcatcagctgcaaggtggcaatggattcttccatcccctcgatgctgctcgtggggaacccacccttcagatagggttccctcctgaggcactgactagtagctcatgcatgaccaccttcctgccccccatggttgccatgagatcaaactactgtgattctgaaataataaggatgcggcggctggccacgctgccatatgttgtgcttcgagtgatagtttaatattcttgtatggcttgtatgtgtaacaacctgtgtgatgaacttggaaattatccatttcattctcgaataatgtattgggtataaggtcgggactgctttatattgcctcaaatataatgttgtagcgtatgtgtgtgcgcgcgcgcgctcgcgtgtgaatgttgtgagcttgtagctgcactatatttatgttgtaattgtgacgaaccttttgtcaaaataaccaatgttcatagaaattggctacgttgtgatagaaaaaaaaaaaactaaagagaactgccaagg

SEQ ID NO: 46759 - DNA, 2628 bp, Setaria italica
  Peptide Sequence Number=SeqID_112733
ggcgggggaggagggggaggggcaaaggtctgtttttgtgctccagaagacattggtggccccataggcatggaactcgaagaaaattaggtggaggtggaggtggtggtggaggcggtggagcttcgcttcttgatgcaatgtgtgcacccagtaatgaggattgttgtgtaggtgatcgagcagacaacgtagatattgactcttctgttaaccgactgttatatggttccatcagcgatactagaggtgcatcgttcacagcattgattttgccatctgtagacaaggatcgtatagccagtgcagctggtgaactatagtatctggatggtggatgagatggcctatgcacagaggtagcatcagattccttcttcggtgagatccatctacgtattgtttttggtttggcaagctttggttcttctgtctgggctgcattgcctgctgccatcttcttcaacactgaggacacagctttatcagggatttgccctcggtcatcacttccaaacctcgggctgcttgcccttgcttctgttcgactttgaggaagagctatgccaagatcctgtttgccaccaggaccctctctcttggtttttatttcagttgctacttcagtggctggtaacacaataattctgtcatgcacattggtgtcctttgtcggtatggtttcttcaaggccagcctctaatttgctccgatccaatttgccatcagctctatcagaaggtttggcagctttaatattgccacaactgttatcttgtgcattcctactcttaatagttgttctgcctatcttaggcacggcactcatctcattgacaacattttttacttcctgtataatgttaccattctcaactatagttttctcttcatagatcactagctcattgtccacaattactgtgttctcagtaataatcttgatatcaccattttgcagtcctccttctgttgtagttctcaagtgcgtatccccatctgtgcatgacaaacttctaggagcatcaaaagtagtgtagtccgaatcagggtatttcaagatttttgttggcttgtcggcctggcattgaatttcatcgctgcaatttggatcaactgttgtgactaaagtttgtgcaattacatctttcgtgtcctcctcctgacagatagatccgaatttgtgtccttctgaatcaacagatgtagcaaccacctgtatgtcctgcacatcactgttctcttggccacctgtgtggtttaatttagactttgcaggatcctgttgggcctgctgcaaaccttctgggttctcaaagcttgaggtaggagcacttgaccctttctcattcatgctaccagaattctgggagataacagtcttcacatcctcatcaatgccgtgcttctctaggctgctcctttcttcatttgctactgcgccatccaattctgcaacgccatctaatgataatctaccatcaactgactgagtttctggatcccttctagcatcatgccaatactcctctgcttcataaaattcatctcccgtatctaccgaagcaacatcagtctcatccccatcatcagctacctccactgtggtgacagcaggcttgaatgaatcagggtccgaaaaaagtacctcagctcggaagtctcttgggaactgattattcacattccaagaaacatcgatatcatcacgattcaatccaaggatgtttgattgaatgaatgcagtgttgaacatgacccggaactattgtttccttatgctctaggttatcgcccatatgaatgcattcaagaaccacatctccttgaacacggcagcatgcactgatttttatcggtacttctgcctgtccataacgctgaagatgtttctttgtctttggcatttcaaaaaggacctttgcactcttattaccaggactagagtcttgcccatgtacatgcaaatatggcctgcaacctccttcggcgtcaaaccgcggaacaacatggagaactactgaatctaagataagggtgcggctaataggaggccattctgaaccacttccttgtcttgttatatagtgcagatatctcaaatgtgaaggctgaggattcaacggaaagaactgctgtataaagtccctgcgagcctgcttgtagaccatctctagtgtcttctgctcaccagtgtatgttttccgatacaaaagcagtccagccaacatgaatgcaagaactggccatccccctctctcacaatgcatcaaaagcatgttatgttgtccttccactgatagccaattttcacatgatttcaagaaatggtggatcatctcaagctgaagcaatgggcatccttcatattgttgcgggtagtccattactgtcatgtcatactcggataatatatctgaaatccggctcctcttgtccccagaccagaaattggataccatgaatgatgcgtccggaaaaaattcctgcaactgcgcaacaatgccgctcaagtaatcccggtactcatcctcacccatggaatcggttgagaagcagcagtcaaacacgtagacgcgctcggagatctcgagcagccggtccggggtcttcttgaggaagaacttg

SEQ ID NO: 46760 - DNA, 852 bp, Setaria italica
  Peptide Sequence Number=SeqID_112734
tggtcgaagaagtggtggtggtcgtggtccttgtggaagtgcccaagcctcagccagagtaccatcccccaacaccaacatatggatcgccaacgcccacatacgggtctcctacaccaatctaccaccctccagctaggcacttgtttgccaagttgcttggtcacttccacaaggaccacgaccaccatcaactcttcgaccacttccacaagaagcctgttccgccgaagccagagcccaagccgcagccagagtaccaccccccaaccacctacatatgggtctcctactccaatctaccatcctcctgctaaagacttgtttgacaagaagcactggcttgaccacttccacaaggatcatgagcaccaccacttctttgaccacttccacaagaaaccagtgcctcctaagccaaagccggagccccaaacctcagccagaataccaccccccaacgcctaaatacagttcacccacgcccacgtatgggtccccgactccgatctaccaccctccggccaagaactgagttgaaggatgtgctaagtgatggacattcctacgagtttggatgcatggttttgcgtgatttgaagctaagcaaagttcttcagtttccacagaataaaagtacagctatatttcttatacatcgagtgagtatacttctttgtgtgttgggatatgtgtcatatgtaagattcaggtgttcctttgtatattcaaattatactataatgtaattgtacactttgagtgcgaagtaaaaagtgtacagtgtatttctaacttttcttggaattgaacaattgcaatgcaaacatctacggttgataaaaaaaaaaa

SEQ ID NO: 46761 - DNA, 1761 bp, Setaria italica
  Peptide Sequence Number=SeqID_112735
cacgaccccaatccctgcgcagccaaacccaaaccctcctcccctacggccatggccgccgcgacggagaagacggcggaggacatccgccgcgagctacaggagctccagcgccagcaccgcgagatcaccgagcgcctgcgggatccccgcggccttcgccgcggagtccccggcgctggtcctgtacctggagggccccgcccgctccgcggcttcgtgagacctgccgtggttgcggaatcgggggatcagcccgcgcagaagcggcggctgctatcagccgtggttaaggtcgatggcgctgaaactaatgaggaaggtgaaaaggctgctgaggcggaggggcgtgaggagggttcaggtgccgctgaagctggtgacaggaggggtgtcagcaatggtgggttcaggagagatgggggcctgcgtatgccgaggagggtggactataattcactgccagagcctgctccaagggagctccccaagaatgatgatccaaatatggtgagaaggaataagaggatgttgggccagcttctcgttggtacattagagaaatttcagcaagaggacaagaaattatccaactccgaggcttttctgcgcagatcagagacacagcgaaaggctgagcaaaaggttcgtgaggaaagtgaaaggttgcgacagcaggagcgagagcaaattgcagagaagcgtaagcgtgacatgatgcttcgagctcgtgtagctgctaaggcagaagaaaagaggctggagctcttgtacatgcagtggactgagcatcataaaaagctgtccaattttttaaggttatttttatttctggtccaaaagtgtccatattgacaattaaattgagggaagatacattctaattgtatgcagacttgatgtttgatgaccattagtgcatttgtttacattacattgaaaatatccgttcgatgtttgactcttatctgattatccccatgtttggcaggacaaaagctgaaccacctatttactacatgccagctaaaccgatcattgatgatcctattattgttgagcagaacaaggaaaaggtatttgaagaatggaaatctgtgcgcagggctgagctgactcagtttcaaaagcaagttgaggagcaatatctctccaatgttgagaggcagttggagagaatccagaatgcccggaacgctcggagggcaaacggtcctgctaacatgcaagaaatggacaaggagctggacacgcacagagcggagcatggtccgaagactcggcgagttcccgaggaggggggtgggcaatgatgaggacgaggatgtggaggacatggcagcagaagacgagctgatggatgaagttctgggcatcaacgaggacccgtccaagccatctgaagaagctgccactgatggtggcgagccgcatgcacctgaggaggcacaataggcatggctgttacgagctaggcactttaggcgttctgcatttggtatcagattagttgccatcttgggactctgggactgtttgtacgtgtagcgcttttgagattccctcctgttctcttagccttgtgttttcatactgttgtttcggctgtttgacgttggggcctacacttgactgtcgattattatcatatcattgtataatcgtttgtaaacattatgttgttgccgccatggctagcggcactggacgttaaatactatacgcatctgctatgcttcggtggaaaaaaaaaaaaaaaaa

SEQ ID NO: 46762 - DNA, 1365 bp, Setaria italica
  Peptide Sequence Number=SeqID_112736
tcgagtcgagagccacctgatccttccttccccgtcttcctcccgcccgacacgtcgccctcgccattgccgcgccgcgtgcgatcgggagagggtaggcggcggagatggggcgcgggccggtgcagctgcggcggatcgagaacaagatcaaccgccaggtgaccttctccaagcgccggaacgggctgctgaagaaggcgcacgagatctccgtgctctgcgacgccgaggtcgcgctcatcgtcttctccaccaaggggaagctctacgagtactccagccatgaaagcatggaaggcattcttgagcgttatcagcgttactcatttgaagaaagagcagtacttgatccaaatattggagaccaggcaaattggggagatgaatatggcaggttaaaatccaaacttgatgcacttcagaagagtcaaaggcaactgttaggagaacaactagactcactgaccataaaagaactccatcaactggagcaacaactagacagttctctgaagcatataagatcaagaaagaatcagctcatgttcaattcaatttctgagctccagaaaaaggagaaatcgcttacggatcaaaatggtgtcctgcaaaagctcatggaggcggagaaggagaaaaacaatgctttaatgaatacacacctccgggagcagcaaaatggagcatcaaaagactcgccatcaccaccaccgtcaacagttccagattccttgccgactctagatattgggccatgccaacctagaggaacaggaggggagtctgaacctgaaccgattcctgctcaagtaaacagcggcaagctgccaccatggatgctccgcagtgtcaataacagatgagctctttctgatgcggttttgcggctgaactcgaaggcaacacactgcaccaacaaacacccttcggtgacccaggcatccaccgcagagcgatccatctcgatccagtgatggataccggcatagtcactaataagatcaggtctcatcaaaatgctttacagggtgaatgaagtctggagcacctctgcaccagtatattgcgttttgttcttgcgtctactgtctcactccttttttttctctgatcaacaagctcggtgtacatctaaaaagagaagctcggtgtagcttgtggttggagattctaccgctatgtttgtttcctctgtcctgtgtaggctttaacggagatgtatgttgtatcagttgtgatgtttcttgcgtttttccaaaacagaaggctcttgtccccgaaagtgtggagtcccggtcaaagtgttaaattgctattaatttttaaggttaaactttaacctttaacgttttaacttaaaaa

SEQ ID NO: 46763 - DNA, 916 bp, Setaria italica
  Peptide Sequence Number=SeqID_112737
ataataaccacctagtaggttattatggtttagatggaggttaaactgagtggtacgtacgtttgaagctgttatctgcagctagttagttaatataatccactcgacacatagtattatattaactaactagctgcagataacagcttcaaacgtacgtaccactcagtttaacctccatctaaaccataataaccacctagtaggttcaccaaaagtaattacaaccattatgacccgataatagtacaactagcactagtaagtagcattgcagtgcacacttgtttcttccaagcaacacggccaccaccaaagatttcaatcactcgaaagcccactggttctccctgcggatctcctcctcctcctcaggggtgaagtcgttcttgatgttgaatgtcttgcggatctcctccggagtcttgcccttgatcatgtcagcaaccgtctggcaggtcaggtccagcaatcccttgatgttcaggtagttggcagccaggatgaggtcgaagagcgtggcctggtcgaccttgacgaactcggcgtcccagttcttgaggtcctctgcgccggcggaggcgtcggcggcagcgggtgcggcgtcatctgcgggcttggcggcgtggacgtgcttgttgcagtactcgatgaccttggagaggatcttggcgttgacgttggggagagggatgccgttgtcggcgcagtcgtcctcgatcatgtggcggatggtctgcgactccatcgcgaccgcctcctcgacctcgaactcctcgccgtcggagctcctgagcgtgatcatcttcttctcggcctcggcggacgccatcaaatcgaaaccctagatgcggctgcggatcggatccaaggggatggatatggggagtttggggggcggccgtggcttgttgtt

SEQ ID NO: 46764 - DNA, 1607 bp, Setaria italica
  Peptide Sequence Number=SeqID_112738
acaaaccagttgactattgtgttgtgacatgtagccttgccaatcaataagcgtatttcatcgaaataactacaaccaccagaaataaatatgaatcttgcatacaccatatcacaccataatacaagcaatattattaaagctgtatccacttcaattagtctaagatcacatataatttcatctcccgttacgaaagattgtatgcatggtgatcccaagcttgaagatactatcaagctctgccagcgttgctcacatgatgcgactactatttttgtcactgtcatggaatcatggtataggtacctggagcaagatgcttactgaacatggtttcagctgactatgttcagtataagtagggtgtgcaccataattattgtggtcgtgtcctgctgtgctccgcggctctgacttggaggaagtagggatgtgccatagcttcacgtgcagtaaacctttcttggtgatcgtagcgtaggagatggtcgagaaaatctatggcctcaggtgatactagatgttggttatcagcattaatgaactttgaccagggttttctactatgccttccaacaagagcttcaagttgagggtcaagctcgatatgatacttgttcaaataagcattcagcccatctgttccaagcacctttgcgatcttcacaagttggtcatgattgtcatgtccatagaagaatggttccttgcgaaatatcattccagcaaacatgcaaccaagactccacatgtccaaagaataatcatagtcttgtaaatcaacaagaagttcaggtcccttgaaataccttgatgcaactcggacattatattccttgcctggatgatagaactcagccaggccccagtctatcaagcgaagttttcgaagttcatgatcaatcattacattgtggggcttgacatctcgatgcataatgccttgagaatggcagtaatctagagccttgagtagctcatatatgtagtagcggatgtcataatccgtcaatgtggggtacaaaactttgaagtctgtgttgttgacgtattcaaagatcaagctgggggtctttgaatgctgatctctgacaatatcgagcagcttaataatgtttggacctccacagagattctgaagtattttgatctcccttttgatcttctttttcttgacaggcttaaggatcttaatgatgcatttctcattattgttaacattgatgccttcaaagacctcactatatttacctcttccaacttttctgacaacttcatagtcatcctgttcaccccattgcacggtgagcgcctcgtagtcccaatactccttggggcgctggacgttgatgtcggtgtagaccctcgccttcgacatgacgacggatcccgcggcgaccgaggcggcgcgcggacgcgggacggcgaggaaggaggacgcgagcgccgctacgacgacggccgcggcggccgcgggcttggcgatgccggtgggcaggcggttccaaggcagcgcaccgatcatgcggcggccatcgtcggcggcgaggcgggacgggctagggtttcggcgggcggaagcgaagggggaagacgaatctctc

SEQ ID NO: 46765 - DNA, 908 bp, Setaria italica
  Peptide Sequence Number=SeqID_112739
ttttttaaactatgatgccacagcaaatcgaggttaacttcttagggcagcagccacttagtcttctcatgatatttaactgataattggttcagaataacatcaatgaccacatcagtttttacccatgatcaacacttgttctcaaaccaaccccatagagacccaaaatacttacaaccattacgacaacacataaaagcagagcattgcaaggtaatagatatgacgaaacctaggcatcaagggatcaggggctcaagcacctctctactcgaaggcccactggttctctctgcggatctcctcttcctcctcaggggtgaagtcgttcttgatgttgaaggtcttccggatctcctcaggagtcttgcccttgatcatgtcagcaacagtctgacaggtcaggtccagcagacccttgatgttgagatagtttgcagccaagatgaggtcgaagagggtggcctggtcgaccttgacgaagtcggcgtcccagttcttgaggtcctcgcctgaggccgcggtgctgttggcggcggtggcccccgcgtcctcggagccggccttggacgcggcggccgcggcggccgctgcgtggacgtgcttgttgcagtactcgatgaccttggagaggatcttggagttgacgttggggagcgggatgccgttgtcggcgcagtcgtcctcgatcatgtggcggatggtctgcgactccattgcgactgcctcctccacctcgaactcctcgccgtcggagctcttgagcgtgatcatcttcttttcgccctcggccgccatcgatcggggtggggaggggtggactcggcggatcggatcggaggcgaaaccctagcttttcgagctgcggcgcagagggtcagggaaggcgagagattggggaaggc

SEQ ID NO: 46766 - DNA, 1241 bp, Setaria italica
  Peptide Sequence Number=SeqID_112740
ttttttttttttttttagtaaagaaaatgagcgaccttctgatgctgcttgtcaagagtgagaatacggttctacagatttaccatcacatgttcaccgacatgactccaagaggacaattgagtcacacaaaccaatggaaaactatacaaaattatgccccggttatcacacttttctcatagtcctttattattgtcaaagttgcattaggggcaaggccatcacggcaccaaaaactgaaaacatgaccagcaccatccagaagggcactgccttcttctggttcttctcgcggtgcgcctctgccactggctgtgctctattggcaacaactggagcttgctggactgcaggagatggagcaggtgcagcaggattctcccggggctccgattctgcagctgtattctccaattgttgctgttggttgtacttctcaacgtactctgggaacagcttcctgaagtgtgggcagtttttgctctcgcaattgtatgcaagggaagcttttgctaagcgcctcttttctgcatctgaagtcttgatgcttccagttgtcagagcatcatccatcatgaatgacaggagcccagtaagaatgcttgctacagaccacattggattccaagactcaggatgaaagtcactcattgacaggcatattcttttgtgtggcgcaaacctaccgctaggggttgtcatgctgatacttggaggtttaaaaggataatctggtggaaatttaagtttcccatagtaatatccaccttcaaagggtgtgcctttacttccttcaagaacatagtgccactccaatatgtcgttgggcagcgggcgagccacgatctgcggcggcggctccttgcagagcgcgtggtactccttctggagccgcttgaggcagcccttctccgccatggcaaaaccctacccgcccgcccgcccacacggagaccgcgcccgcgcccgccgaaaccctagcgcaatcctcccgcccgcacgcggctgctcaattggggatccacagctccgcacggggatccaatcaaaccagaaacagcctgtgccgcggctgatcgggaggggccaatcgagctaggtaatcgaatcgggggcagcgcgggagcggatttggtgggatcgggcggcgggaagggggaggggatcgggagcggatcggcggccgcgttccccggtgcgaggggagaaagcaaagcaaatccaagccaagggtggtg

SEQ ID NO: 46767 - DNA, 1000 bp, Setaria italica
  Peptide Sequence Number=SeqID_112741
cgctagcatgggtatctatgtttttagcaaagatgtaatgcatttcctttgccctcacatcatcaaggccaagtatggtggtatcaaccatcattgctttcaactgatctccttttggcttctcggcaaattcaatgatccttccttcttcgtcgattttcatcaggccgaatgcagttgcacgtttctcatccattggtagggcagcaacagtaatatcagcatctgtttctctgtgagcctggatgaacttttcatagtccatccggtacaggtgatcaccagcaagaattataaattccatcacattatgctcctcaaatagccacaaatactgccttacagcgtctgcagtaccctgaaaccagtttgggttatctgggctctgctgtgcagctaagacttcaacaaatccttcattcttgtaccctccaatgttgctcccataggctcttgagaggtgacgattgagagaagcggagttgaactgcgtcagcacatagatctttgatatgttgctgttgagacaattgctgacagggatatcaataagcctgtagttggcacccaatggaacagcaggcttggcacgcttcttcgtcagggggtacaatctcgtcccagcaccaccaccaagaatgatcccaagaacactcgtgctggcatcggggtcgaggcaggtctgggagctcttggagtcggacacggcgcgcggggtgaagacgaacgggcgccgccgcgccggtgccgttgagacgggcaccccgcggcctcgcctgccgtggcgcggctgcgcgcttaggaggcggagcgaggagtcgccggaggtggacggcgcggcgccgtggtggcgcgcggggatcagggtcatggacgacggggaggccatggcggccatcgccattgctcctgcggtgaggaaggacgagggagggcaggcgccgagcggcggagctcacgggtagcctgtggcctgggatcggggagtgaggccacaccc

SEQ ID NO: 46768 - DNA, 3261 bp, Setaria italica
  Peptide Sequence Number=SeqID_112742
ttttttatcagtatagaaatatactcaattagattaattggtctgctaccttgaaataatatttaatgataattttaagttacaaaccaccaattatttaatcagtacctaaaaccaacaaacgggcaggcgcacacaaccctaccaagtatggttaatgtcaagactagtagcctaccacaaacagcctacaacagttgagcatcctttatacacatgtcacggtgcatcatacaatgtacggtagaaaaaaaatggaatgcttgtaacaagctcctgccttgttggctgcaacatcaagcttcaattagagaggaagtgcacccgggcgagggggtactccttcccagctacccaaacgccagtctgtgaccactgcacgtcctcccattctaggttatcctgcaacacctcaagttggtctgctggtagcgggataccgatggaacgcatggcactttcaggcatggccttcttgcaacgagaccatcggaacacatcccggagttcatggtccacagagcctctgtccccattttgcgaatggtgactactgttctggtgtttctccggttccgcatcagatgcattggaatttgatccaatacttcgaggcttctctccactgaagcagagctcgtacctattaaagtgtgtttccaagtatattacttctcctttcttcagtctagcagaagtataaagagactttttcaatcccttatctgccacaatgcttatactatattttaaccacggctcattgcagagattgtactgtattgtcacttcacgaacaaatctttgttgacgcaatgcattagaagctgcagctcttgttgtcattgtacgctccactgcaactggagcaagtgtaggttccacagcttgtacgttgttggtcttaaggcgcggctcaagatcaatggtgccgccacctttcttaacaatgcagcagcgttctatgcgaaagctacagccaatcccagcaccccaagcacgtgaacgtacattgttcctcaatgttgaagtataactctcttgtggtggtagaactcgaacagttgcacgaagctcttggatggcagatggtggaggggaggatgtaggcgaacagtaaccggtatgcattagcacagccacaagatctgaatcatttgtgtatatatctgttccccaaagctgagcaccctttacttgacgattagtagaagtaacaaattccgcaggtatccgaatttcaagagtaggaccattttgtagactttcagcatttttagcatcctgagttacttcaaactctttccatgatttcagcagctcctgcatgcactctccagctttataaacaatggcaggcacctcagatttaccttgagtcccttcgccatcacgcattcgggatcgaaatcgaggttcacgctgcgatgcttgactaccaaccctcggtcgcaccatcctcctgcgttggacacttccaaaaacatccttatctttctccatatctccttcggtgccattatcatctgattctttgtcattatatttgcttctttgctcatgcctgtctcctgcatccacatccttctctcttttcttgtccttaggatccctatcatgagttttccatgcatcatccttaatcaccttagattctgttgttgtattctcatgctcagcactcttaacaactccatcagatgaagctttctccagtattgtgttatccttttcaattactacagatgaatctttcttagaagaatccttctccctatcgtttacttccttgtccctcagggaatcttttctttccctgtcgcatttttcagcatccctatcttccctttgcatttctcttcgctcaacaccactacctccaagctgtataccagtcctacgatcatttttatcactttctcttgcaccaaagtccctatgtttctcatccttcttttttctgtccttgtctctgaacttatcttcactttttggttcagctttgttgtcaccagcagattcatgtgcgtcttttgaattacgttcttccatggaagttggacctttgggagcttcatcggtgccttgcaaaccaggacgggacacacgccaatccacattatcagatggctgttcaaaataccttttacccctatgttccttgttgtctttccagcctaagtttgatggaacagtagaatgactatccttgtcaaatttggtatcacctttataatcagcatgacccctcctgtcagtccttatttcactttcatctgctctattgtctacctttgcatcactctcaactttattagccggaaattcaattctgggatcactatagacatcacgtccatcagctttcgtctcacgatcatccatcttagtgtcccatgcatctttgttttgctttgattctaatctgctgtcagatgagatggggtgttcagcaaagttggtggagctaccaggcatccgatgggccaggggtggcctcttatcatcacggggctcaacacgttgaattttggcaaatctaccatcatgttcaaaagaaccatggaaatcactgctgctcgatggaatagctttcccaggactcgaatacaagctgctgtcatccaaaggccgttttgtaggtgtagagtggctaccctcctcatgcaacctctttggagcaccactcatgtttcctccagaatgcaaattaatacttcaagaataacccagatacaaaaggaaggagctcaatgcctttaatgcaattcactctgtcggatgcccgtcgccggcgaagcgcccgccgcccgacgaagaactggcgggcagcgcaactcgccctgtcgtcaccggtaggaaacgaaggccgagaccgagaaaggggagaagaaagtgggagaaggagcgtccctatctctctctatatatatcttccgtgcgatgggaatggtgggaatcgcaggcccagtgcggcccgagaagcgaccgcgcccgcgcccgcgcccgccgaaaccctagcgcaatcctcccgcccgcacgcggcagctcagttggggatccacagctccgcacggggatccaatcaaaccagaaacagcctgtgccgcggctgatcgggaggggccaatcgagctaggtaatcgaatcggggacagcgcgggagcggatttggtgggatcgggcggcgggaagggggaggggatcgggagcggatcggcggccgcgttccccggtgcgaggggagaaagcaaagcaaat

SEQ ID NO: 46769 - DNA, 1715 bp, Setaria italica
  Peptide Sequence Number=SeqID_112743
ttaaatacctacaattaccctgggcaatgcagggagcatactttataggtgacaaagagtcttaagcatatgatattttaagtctgagaacgcaaaaggatacattacacatatgaaaatatctaaattccactcaacagtacatttagaacagcgcctcatgctagtgataggaaaatggcgccttcgaataacttcgtctattatttcattataccctcgccagttgatgtggagcttggtgattttgtaacatggaaagaaaacatggtctggaaaggatggaaacgacttaatctgcattggtgatcaccatctgctgcaaactaaccttatgtacacggtgatggttgactctatatgactgttccactaggaatcaaggcatccttaatcaccgtgactatgccacttttgatgaagtatccttctgtctcccttactgcttcttggacattgtcaaaattgattatcttcacattttctccaatacgagcgttcttgtcgattattgcttttctgatatgtgcattcctcccaataccaatgggaataccaccagcctctgaaaggactttcttatcatcttcagtctcgtagtagtctgcacccattagcaaagagtcctctataactgcaccttcagaaatgcaggaacggagtccaaccacggaatggttgattgtgcaatgtttaataacacaaccttcaccaatgacgctgtctgttacatcagcatcaagaacctttgaaggaggcaggtatctaggttgcgtataaattggagcagaacggtcatagaagctgaaatctggtacaggcttcttggttattcccaagtttgcattataaaatgcctcaatagtgccaatatcttcccagtaaccatcatataagtaagcttgtaccctcattccaatttctgttgctccaggaataacctcacttccaaagtcatttgctgcaggaaagttttctcgtagaagccgaagcatcacatctttgctaaaaacatagattcccatactagcaatgtatggtagttctttggccctctcaggatcaaggcccagtatagtggtgtcaaccatcattgatttcaacttctctcctttcggtttctctgcaaactcaactatcctcccttcatcatcaattttcataaggccaaatgcagttgcacgttgttcatccattggtagtgcagcaacagttatatcagcatctgtttctctatgggcttgaatgaacttttggtagtccatgcggtacaggtgatctccagcaagaataaggaactccatgacattgtgctcctcaaatagccacatgtattggcgtacagcatctgcagtaccctgaaaccagttaggattctctgggctctgctgtgctgcaaggacctcaacaaatccctcgttcttgtacccaccaatattgttcccataggccctcgagaggtggcggttgagcgaagcagagttgaactgcgtcagcacatagatctttgacacattgctgttcagacagttgctgacagggatatctatgagcctgtagttggcacccagcggtactgccggctttgccctcttcttcgtcagtggatacagccttgtcccagcaccacctccaaggatgatcccaagaacactcgtgctggcatccggatcgaggcacgtctgcgagcttcttgtcgtagttccgtactacgt

SEQ ID NO: 46770 - DNA, 767 bp, Setaria italica
  Peptide Sequence Number=SeqID_112744
ttccttaatttaccccttaatttaccttaaacttatttggttcttaggggttcttaccttacgggggttctttcttccttcggtcgtttgcgctgcgctgatggcagtggccgtcgcaagcgctgcctctggcggcgcagcgtcggtcgtcgtcggcctggccaagtgcgccgactgcacgaggaggaacatgaaggccgaggcggctttcaagggtcttcaagtggcgatcaagtgcaagaacagtaaaggcgactacgagagcaaggccgtcggccagctggatggctctggcgccttcagcgttccactcaccaccgacctccacggcgccgactgccttgcacagcttcacagcgcggcgggcactccgtgcccccggtcaggagccttccatgattattccgcagtccgagagcgacttcgtcgtggtccctggcaagacaaacaacccatcggcagaatgcgcgtcggtcaccatctgcggccctatcaagaagcacttcctcgaccacttccacaagaagaagcccataccgccgaagccgaaacccgaacctaagccgcaaccgaaacctgaacccaagccgcagccagagtaccaccccccaacaccaacgtatggatcaccaatgcccaaatatggatccccaactccgatctaccatcctccagcaaggcagttgttcgacaagaaagacaacttagtttagaatacaacttaccaacaaagaaaccaacgaataagtaataagaactagaagtta

SEQ ID NO: 46771 - DNA, 1775 bp, Setaria italica
  Peptide Sequence Number=SeqID_112745
tttgatatgttcaacacaaacgagcttaataacctgattcaacagtttgcatgagcattttcaacatttcctacagtagtcacatgttcaactgaagtgaacatgccgcccgcgtaagtcctccacatgctgtgccagtttccgctgatgaccgaccgatcattcgatcggcacgttcttcgaacgtctacggagaggagacccgtggcggtcgacgtttgggaggcgtcaggaccaatcagtaagataacacaaacagcacgctttcacaacgatgccacgatgccgaaggatgcccacgccgttcagacagactttccagttcagttcatttcgacataaatcaccctgtcgatcacgcatgctgtatactaggattctcgttcagaggcccaagaagaaaaaaaggaaagagggctggtcaccatgtgacaccctacagtacatcaaacattggaactgacgccaagttgcaactatcctgccgtacagttaccacggtgttcgtctaacttccaacaatacagcacttgctccgaccaaatatttgccagctcttccccgcataagctgttcacaagtttgggaacttcgcactgtactcctgcgcagtcataaatgttgctgtaatcattttgccggcaaaccatcttccatgaagtgcttgttgggcctttgctgctgcagtcacactatcaaagtgcagatacacaaaacctgcagtatttttgtcaacaaaaatgtgcttcactgcaccaaacttggaacattcatcttggacatcatctctgatatccaaatcaaaatcaggatctgtctccactgtggggtcaaacatgttcttaagcaataagaattctgtaggtgctgacatgatcatagattgactggtgacaggaagcataggtgccccaggaactgatccaacagcaggaatagttggtggtagaagagaagtagctgctggggccccaagaactgatgaagctggtcctggtatagccaccccagcagtgccaataccaccagttaagcttgttgcagtgccactcctgtccaatttgagcataagagcagctctggagcttgcatttaatgccaagcctccaccttcatcatcatctaaatctccagtagttgctccaccaacttgtactcccacatgatcagtaacagctgaaaccttaataactctgccagcgatatcaagctgcccattcaagctctgcgcagcttttgcatcttcaagccgtgcaaactgaatgaaaccataacctttgcaaagtccagtcattggatctacaggcagctgaacaagctccacttgtccaaatggttcgaatacctgtctcaattggtcttcagttatattagagtgaagattgccaacatacaactttcttgctccacctgaagccgcaccaccagatgtcgcattggactgaactaggttcttttcagcctcagatggcttaaccatcactgcttgcccaagaagcggttgaccagacagagcaattgccatgggaacagacatcacgtcataaaactcaatgtacccaactcctttagaacgtcgtgagtttcggtccataataaggcgaacatcacgaacctttccagcccttgagaagaactcataaacatctctttcgtctgccttcagtgatagctggaaggcaaatacagtcctctggtccctttctggatcaacttctggctcagcaccatcatctttcctccgtctgacatcacggtcacggtagtggccacgc

SEQ ID NO: 46772 - DNA, 1561 bp, Setaria italica
  Peptide Sequence Number=SeqID_112746
tttttttttaacagaacgtttccccttctttattctcacctccatgggtaccaatcactgaaataacttacagttgcaggaataacaagaacaaaaaggcgtacatgacatagttacagctcaaacagaaactgcaaaaaacacctcaatgaacatcacaaaggaaacaaaagaatgaacaccccataatcaactgaacattcaaacagcacgatccatgcaccaccaccgaatgcgcctgcaaatgcagaccatgcatgtagccatgtatccaccggtatcccaatgagatggattcccgcctagtgcttgttgacgatggcgcagtgcttcctgatctcgccctcggacccggtcttgacctcgatggcgcccatcttcaccatggagcgcgcgaacacctgggagaaaaactcgggcggcgagttcaccgcggtgaggatgtcggccttggccgccgcgtcggtgatgagcgcggcgtcggactggaacaggcccccggcgcttgagcacgccacggtagtagctgaggtcgaaggtccggaagctccccggggtccatctcgacgatggtggtgttgtccgtcggcgtcttgcacttggtccggcggaggttcgccgcgtacagcgggtccagcgacgggtccgcgtcgccggggccaccgcgcccggtgaagttgtagagccgctccgtgaaggagttgcagtgcgcgatgccgatggtgtgagcccctgagagccagacgaggtcggcgaggtcgaggctcttgttctggaacgactggaggagctcggtgaagttcatggtgggcgcggggatctggtccagcgcctcctgcttgatggacaccgtgccgtcgcgccgccccgtcggcacgctccaggacggcccgccggtggcgacgacggagtcgcgggcggtgagggcgaggatgtcggcgcaggagacgacgccggggcactccttctcgacgagcgccttgacgcggtcgatgaagccgttgccgcgcagcgtctggttgggcgccgcgtccctctccgcctcgttcccgcccgtcgcgttcagcagcaccgacgcgtcgcagcccctgacgaagcagtcgtggaagtgcgtgcggaggagggtggcggcgatggatggcacgtgggggatgtgctccatcacgtagtccttgatgatcttctccgcctggcgggcagctgtgctcgtagaacccctccctcagctgcgcccgcgcgccgccggcgagcacggctgccaccaccaccaccaccgccaccaccgccattctcgccatctcgctccgatcactcgccggcgctacctgtcctctgctcccgagtctctactagttagctcgtgtgtgtctgccgagtggtaccggtacaagattccgagccgggctccgggctatatatacacacggtaacagcaaggcacgctgcgggcggcggcacaagaccacgagtggttagtggggtttggttgccgcgcgcatttgatatccccggcgagtcggtagcgaggaggacgacgacgcggtcgccggacagcgccggg

SEQ ID NO: 46773 - DNA, 1699 bp, Setaria italica
  Peptide Sequence Number=SeqID_112747
ttgtaggatataagagcactaagaaaaaacaaagagtgccttgaatagcacttcttttattgtttccatgatctccaacacgctggtcagcggatcaagcaagtaacagcgctgatgatcgtcgatggcactcaggcgcatgtctcacatctacttcatataactgttccgctagggagcaaagcatccttgatcacagtgacgattccacctttgatgaagtatccatccgtctcccttgcagcttcttgaacattgtcagcattgattatcttcacattgtctccaattcgagcattcttgtcaatgattgctcgtctgatgtgtgaattcttcccaataccaatgggaatgccaccgtttttctagtctaaggagtttcttgtcagcttcagtctcatagtagtcagcacccattagcaaagtgtcctctatgatagcaccttcagatatgcaagatcggagtcctaactaactagtaattggtgtatcttgcagttttttaattaacacatccttcaccaataacactgtcagtgacatcagcatcaagaatcttagaaggtggcaggtgtcgaggttgtgtataaattggagcagaacggtcatagaagctgaaatctgggattggcttcttggttattcccaagtttgcattatagaatgcctcaatggtaccaatatcttcccagtaaccatcatacagataagcttgcaccctctttccaatgcttgttgcacctggaataacctcacttccaaagtcattggctccaggaaattgttcacggaggagctgaagcattacatctttgctaaaaacatagatacccatgctagcgatataaggcatttcctttgccctcacatcatcaaggccaagtatggtggtatcaaccatcattgctttcaactgatctccttttggcttctcggcaaattcaatgatccttccttcttcgtcgattttcatcaggccgaatgcagttgcacgtttctcatccattggtagggcagcaacagtaatatcagcatctgtttctctgtgagcctggatgaacttttcatagtccatccggtacaggtgatcaccagcaagaattataaaattccatcacattatgctcctcaaatagccacaaatactgccttacagcgtctgcagtaccctgaaaccagtttgggttatctgggctctgctgtgcagctaagacttcaacaaatccttcattcttgtaccctccaatgttgctcccataggctcttgagaggtgacgattgagagaagcggagttgaactgcgtcagcacatagatctttgatatgttgctgttgagacaattgctgacagggatatcaataagcctgtagttggcacccaatggaacagcaggcttggcacgcttcttcgtcagggggtacaatctcgtcccagcaccaccaccaagaatgatcccaagaacactatcgttagcattaggatccaggtatgtatgcttggaggcggaggagtcatttgcaacggctttgtcacgctttgaaattggttgctccatggtagcatttgagggtgaagggaagcctttagatgccaatgccacatccatcgatgcagcttgagaagaagtaagattaaggaaatatgagaatggaatttgtaggtgtgtcttgtgtattcattgaggcatcttctctaatt

SEQ ID NO: 46774 - DNA, 1019 bp, Setaria italica
  Peptide Sequence Number=SeqID_112748
ttttttttttaagtacctacaaacactcgttgcattgcatgtccttgcttattcttattcaccaaattacaacgccgtccagccatatcccccaacaaaaactgtgcataaataagcatcgaccacaacccaccacgacggagaaagaatggcatcggcaccacaagggcaaagtcctcccttggctgcgcatgttttttgttctcggacccaaacagaagatcgaaaactagacagaataataagaatatcccgctaaaagagctccagcttcttgtctcatgaatataaaacaaggcccagccatggcaggcatggtatcgagacctggatggcgcctagtctgcacgcgactggccagcgcgggatgaaaggatgatgccgacgatgagaccgtagagcgcgagcgcctcggcaaagatgaggatgaggatcatgcccacgaacagcttcggttgctgagcgtttgccctgacaccagcatcaccgacaatgccaatggccatgccagcggcaagcccagcaagaccacaggcaaggccagatgacaggtgagcatatccatcaaagaggtagtacggcttggccttgggggttgatcccagtactgatgatgacagcaatgatgagcccgtagataccgagcacaccagccatgaccacgggcacgatggacttcatgacgagctccgggcgcatgacacccatggacgccactccgacgccactcttggccgtcccgtacgccgcccccatgcatgagaagacgagcgccgcggcggcgccgaggaagccgaagaagggggcggtctcatcgccgctgaacgcaaccatcttccttccttctgccgctgccgctgatgctgcgaagataaacggaaccctgggaagctctcgtgccgcagtcggagtcgccggcacgagcgctcgagatttcgctcctccgcttgggatttggcctcgccgatctgatctgaggagcgcgtgggagggggggcgggggaagaagacgagagggc

SEQ ID NO: 46775 - DNA, 4621 bp, Setaria italica
  Peptide Sequence Number=SeqID_112749
cacgtacacacgctaagtcaatagaaaccagaaattgtaacgccactgttggttaacaatttttgtgtaacaaccttgggacaaaatgtgtatcgactacaaacttattagttgcatggattagccattacatcagtggtctatcaatgacgaaacaattgtgttgtttctcgtaaagattattgaacccctaggaacctcgccaaaaataaataaactcactctttgccaccatgtggacgtgacaatccctatggaagtaaaaactgaaatcaccctagaagcccaaaactgttacaaaaaaagaacttctctagcccctatgacttctgttttgacttctgcttcttcgactccaatgtcgtccccaatccaaccggcgtgttgccagttgacttgacagatggcccgttggtatctgcagccttcacttctgaagcagttccgttttgagcaggtccgttagatgcctgaccttgcgatgctgattcttgagtgtttgcagtggcagaggcggtagacgctgctgcagctgagttgataagtttgagaatctgagcaagttcatcggatgcattgtttgcaacaggcccactgcgcacattaaggcctcttgcaacagctttcttccgagcttctgcagttgctcgagcagctcgctcatcaacccctctcaatcgtggtagaccttctcccacaactgcagcattaagtgatctgttgacatttgctgatccatcacctgattggatagcagcagccttcattgcttgtaaaaatgcaggatttgccttcaagaatttaatagcattatcagatgcatcagttccctggcccttttgcttctgggcgttaacctgctcttctcgaaccttaaatgtacccaaccaattttctgagtccttagtccgagagtcattttcccctaattgttttgccagtatatcataagtcttcttttcatgctgaattgaaagcttgtataactgcatacaactgaatgcaattgcaagggcatgatagcaaacggctgtttgaacatgatcagggccaagaagccgctcattcttcataagtgcttcttggagatacctaagagcagtattcatattactggcatcctggtacatcattgcaacatttatgagtgttgctgcaacatccgggtgatcaggacctgacgccaaacttagaagaagcagtgtgcgggacatgtgtcgcagtgcgagttcagtttgattgagcccatgatagaataaagccatgttaccataactgtgggctgtgtccggatgatcaagaccaagacatcgctcgtttataatgagttctctatgctgctgcacaattgctccagctgtatcaccagcatggtacaaaaccatagcaaggtaccggcaacagttcgcagcatccttgtgcatgggaccagttatctgttgaagcagtgaaaaggcttcagaaaacaatgcataggcctcattcagggttccctcagccatcctgactttccctgcttccataagattctttgcgtcagtacaggtaggaactgaatgcttgacaactggttggagatttaatatatctgaagcttcgaatggagttgaagcatccagattgtatttgcgggctgcaatagttatccctaccttttggcaaagattgcggagaacagaaacccttttggctgaaagccttgcatcatcaggcacttcaaactgatatttagattttgcgaattccttaatactagaccaaattccatcagatgttagatgggaatatgttgataagccctttcttgaagcagcagaattgtttagtttcgggcccttcgtagacttttgagtttggctattttcatgacccttctttgactgggcattgccaaggctaccctttgtagatgcacccaaaactttcccaacaaaacagttcaagaaatgagcaatagctggtccaatatcatgatccgggctttggcctcaatatttccttgatcacatgctttgcagacctaactattatctcagcagaaaacaaatcccacagatgtggtaaatgtttgatcatgcctgcaattttgcccaggtacctaacatttatcccatggagatgcagtgcatcggttaaagtttgtccatccataggagagatatcaagggagcaaaggtcctgaacaaacttcgggatcactatttctaaaagatatgtaccagccctttttaccaactcttcatctgcagaaatttcctctggactgccagcaagcttgtactctgtaaacacattcggattgaaaaagatctcggcacttgagttgtcattttcctcacgtgtaggagcagaactttcttcagacttgtcatcatcttcaacagaggaagcctttgcatcagaagtactcgcaacttggtcattggattcttccaaagcatctggaactttctgcctggtggattgcttggtcgattcagcctcaacaaatgaggctacaagttcaggtctcaacacgcagaagcgatgctcttgcccaatgtagttagaatctcgcggagtcactctcatcaaatctaaaatgtaatgcctgtcgtcacttccaacaatgcccttacattcgactgtagcagctaactttacagggttgccagaaccatccaaaaccacatgctctttcaaatggagccgctttgcagcctcgactacctttgaatggaaagattcattccaagatatcttcttgccattatcaacagaaccatacagaagggaatcagacttgtctccttggagaataccaggaatgatactctgagctacaaccctgtgacctctgtaatcaattattgccatggcaagattgtaaaggccagaaatatcagcttcttgataagccttagttccttttaaatcattgtttgcagaagcataggtcgcctgctcactatctgcaatttgtgcctctgcagatgcatccgaactaatgtctgaaacactgttggatacctccatggatccaccatggttcataccaggcttagcccccacatccggtgaagaaactttagtgcttttgctgggcccattttggcagtctggcttttgatcctttgaaatgtgttcatagtcagaatcgacagcaaaactaaagaaaatgttgttgtgaacatacatatgaaaacattctggatcagttggattaattgggggtatgcatctattaatgacaccaactgcccctttcacagcagcatcaacaaaatcgcatgttactttgtagagagctctgccacgcaatatcctttcttgaggattcccgtgcggaaactcccgacaggactgcaattcttcattccagtctctctgcatgccaatcagctcagtgccatatgataacaccacagactcctcagccctggcggcatcccttctatgctctggaacaggatgagcacctaaccaagaagtcactggaagcaaagactgaacattctcaaatggatgagccgatgccctacgatccaagatttcacgaaaacctttcttaaacttggcactgattttctgtagtaaacctacaagagtgctggcctccagaccttgttttgtaggttttgggtccaatatacttccattgctacagttcacgtaaaaagatttggagtttcctgtaatgcagtacttgtttccttctaatgtgacaacatcaatataaatgagatctccatgcaacctccggtaacttggtggaggattgaaagacgaaaaaactatgctttcaacgcattttatctctgcttgtgcagatgccaataaattagtgagagcaccagcagtatcctccataaaatttaaaccatcaagctcctgaataacggttttctcagaatctgcagattttccctgagcagactcctgctgcagagctaaggatgtggacagagaaacatgaagacttgagagtgatagtagctccctcacacgtcggagatgcgacctaatagacctctcatcatatattgccgcaaccatctctaatgaacagccaccggaagttatatctgcaatttcagatatttcattgtagtcctctaactgatgagttgaaccatctttagtatgcaagatcaaatcgtagcatgtatagaagcaagtttcaggagcatccaagaggaattgtttgacatcaatgacagaatctcctgggcttagctgcaactcaagcttttcaccggattgtgtcctgacaggaacagagtatagataaagctctccttcagcttgcttttttgcaggctgtgcagccactggcgcatccccctccgtcttctcggcatctgcaacaccgccctctgcagcaggggattcagttacttccccattctctggattgaccacttcgccgccgtcagtcaccgtcagctctggctcggccggaacggactgacccgtgccctgtgccttccccttgttcttcccacccttggacttccccgccatattcctgccgctgccgccgccgccgccggcacggaagcttcggctccgcgaggatgagaggcggcgcgagggcgaggcgctgagggaatgattgggcgaggggctgtttgggtaaagc

SEQ ID NO: 46776 - DNA, 1826 bp, Setaria italica
  misc_feature (1640)..(1640): n is a, c, g, or t
  Peptide Sequence Number=SeqID_112750
cctccgtgaacaatttcctggagccaatgactttggaagtgaggtattccaggtgcaacaagcattggaaagagggtgcaagcttatctgtatgatggttactgggaagatattggtaccattgaggcattctataatgcaaacttgggaataaccagaagccaatcccagatttcagcttctatgaccgttctgctccaatttatacacaacctcgacacctgccaccttctaagattcttgatgctgatgtcactgacagtgttattggtgaaggatgtgttattaaaaactgataattacacaacatcaaagaggtatcccaaattcaggcatgcaattttgattcccacgacatatgtagaacatttgccgctacaacattatatcctacaacattaacgaggacaaaagagcactaagaaaaaacaaagagtgccttgaatagcacttcttttattgtttccatgatctccaacacgctggtcagcggatcaagcaagtaacagcgctgatgatcgtcgatggcactcaggcgcatgtctcacatctacttcatataactgttccgctagggagcaaagcatccttgatcacagtgacgattccacctttgatgaagtatccatccgtctcccttgcagcttcttgaacattgtcagcattgattatcttcacattgtctccaattcgagcattcttgtcaatgattgctcgtctgatgtgtgaattcttcccaataccaatgggaatgccaccgttttcagcaaggagtttcttgtcagcttcagtctcatagtagtcagcacccattagcaaaagtgtcctctatgatagcaccttcagatatgcaagatcggagtccaacaacagaatggtgtatcttgcagtttttaataacacatccttcaccaataacactgtcagtgacatcagcatcaagaatcttagaaggtggcaggtgtcgaggttgtgtataaattggagcagaacggtcatagaagctgaaatctgggattggcttcttggttattcccaagtttgcattatagaatgcctcaatggtaccaatatcttcccagtaaccatcatacagataagcttgcaccctctttccaatgcttgttgcacctggaataacctcacttccaaagtcattggctccaggaaattgttcacggaggagctgaagcattacatctttgctaaaaacatagatacccatgctagcgatataaggcatttcctttgccctcacatcatcaaggccaagtatggtggtatcaaccatcattgctttcaactgatctccttttggcttctcggcaaattcaatgatccttccttcttcgtcgattttcatcaggccgaatgcagttgcacgtttctcatccattggtagggcagcaacagtaatatcagcatctgtttctctgtgagcctggatgaacttttcatagtccatccggtacaggtgatcaccagcaagaattataaattccatcacattatgctcctcaaatagccacaaatactgccttacagcgtctgcagtaccctgaaaccagtttgggttatctgggctctgctgtgcagctaagacttcacaaatccttcattcttgtaccctccaatgttgntcccataggctcttgagaggtgacgattgagagaagcggagttgaactgcgttcggcctgatgaaaatcgacgaagaaggaaggatcattgaatttgccgagaagccaaaaggagatcagttgaaagcaatgatggttgataccaccatacttggccttgatgatataaggcatttccttttgccc

SEQ ID NO: 46777 - DNA, 536 bp, Setaria italica
  Peptide Sequence Number=SeqID_112751
aacaaggaaaaaaatagaagtaatagactttaataaaggaagactacgaggcagaacgaagtgcttcagcagttgcagcaagcgaagcaatggctatgatcaacaggttgcaagaggaaaaggccggaatgcacatggaagcattgcagtatctccggatgatggaagagcaagctgatcatgaccaggaagcaattgagaagttaaacgacttgcttacagaaagggagaaagaattacttgatctggaagctgaacttgagtgttatcggagcaggcttcatgataagccatttgacgttggaaatttcaatgctattgatggagctatagcatttggagtcctggatggctcagatttcatgaggcatatcatgtttgattttgaagatgagaaggcaaagattttggattccttacacagtttggaggaaacactcggcatgtcttccataaatagatttgatttgcatggcacaaatgatactctacagaatgggccattgggagattcaccttagttgtagtctagtcct

SEQ ID NO: 46778 - DNA, 1072 bp, Setaria italica
  Peptide Sequence Number=SeqID_112752
ttactggatctagcgctacttgtgggcatgcgattctacatcaggtaccagctttcgtggtgttttcttcttctgcctgtacttggcgtaggagtaccagacacctcccaatgtgttgatcaccagtccagtaacattaagagcatgtacttccacacctcccaacagaataaaacccagggttgtagaaccaacacccttgaggactcctactattgttgttgtcagggcagaattcacgattgtgcaccaaaacatggtgaaattgagaacgattcccatcaccagtgaaatgacaagaataacactgaatgatggagaggctgtctttgcagataatactgtaagagaattggggaattctcctgttgctataatgaggaaaaacagaaatggaagtgacaatatactgttgtagaacatcaaatccactgaggaaagaccatcctcagcacctgatttctccaccagaaccaaatacattgtctggaagaatactgatgttagagccatgcagtatccatataggtcaaaggaaaaatctccaagtgctgcaataaggacacctgcagcggtgcagataactgaaagagtgacctgtgttggtggctttccctttccccgtacacacccactcaccaacacggcaaggggagtgattctcttgattgcaatatacatagggatgttaacccctttcaagcttgctagagcaaatcccacatttgcattgtaaaatattgatatcggaagaagcttctttgcagttatcaagctgaagtcttttcgtctagacattcctagaacttgaccaaaatgtatcagtagcgctgtggctatttgctgtaaagtgagcagggtcatggagtgaacatactgcataagaactgctttgttcacgaaaaccattgccatggatgcgactccataggaaacggctgccgctaagctgaggatggagctgggctcgccggcctccgccagccccatctcccgacaagccgcggggtcgcgcgcgggtgctccgtgtccgggcgcgggctacatggaccggccgtgcctggccgacgcg

SEQ ID NO: 46779 - DNA, 333 bp, Setaria italica
  misc_feature (1)..(1): n is a, c, g, or t
  Peptide Sequence Number=SeqID_112753
ngtttctgatttgggccaaacgtgggacgaaaactgagaaggggcaaacaggggacaaagctggagatactaggaagagaatggagatgactcttcaactgaaatctggcttgtgggctttagttcccagttgagtagattgctatctgtcaactcggactttgatatgtacagggccttgttgtggaacttgtgaagtgttttccggtgaccgacgcttatgtaagtaatgcctgcagcctcaatttgactgtatagatgagcctcatttgcttcatctagtgcacttgttgactcatctagtaagaaccaaaagtagggttttaagtacta

SEQ ID NO: 46780 - DNA, 870 bp, Setaria italica
  Peptide Sequence Number=SeqID_112754
tatatttaatactcataattagtatcaaatatccgatgtgatgtgtactaaataggtactaaattgaggagagtttatcaaacaccccctaatttaaatattaaaattgcagaaatgcgtcgcgtatctttttcaaattaaactaaatccaattcggaaatttcttacacaaaatcacgaaacatattaatcatcgattaataggtgtgacaagatgcaacatatagcttccgaaaaatagatgaaacattatgtattgactgttgcaacagtcgcaacattccaagtaagctattgcaacatctaaaaatcaagaaaagaagctttatgtaaattgcaaaaagctgaaatgagtggttgaaacatttcaaatcaccgaatgccacatttgaaatgactagatgaaacatcatgtaatcagttgcaacagttaaaaatggaaacattcaaatggcctgtgtttctccagatttgaccctccaagtatgagtccagccatttgcacgtccttgggaggagctcactggagaccaacgagtccatgttctccaacaattttccaattaagacttatttgcaacataaaaataaaagcattgtagcatctaccgtcatgagctacaacaaaaagtgggtcaaccaattggtatcaggagaagaggggcaaacacaagcctaacaaactccaagacgataccaatgtactcatcacagcttgccgtacacagagatgaagagcgacgagctcaatcgagacggcaacaacatgatagtgctccagattgacggtccccatcgattgtcgccatgtcgcgtacaccgccaaaagaagtggatgaagaagggccgtccctcctcgacctccgtaga

SEQ ID NO: 46781 - DNA, 497 bp, Setaria italica
  Peptide Sequence Number=SeqID_112755
tgtcttgtaattcagacgctgatcaacctttcaatgcgaagtttttagttgatgagttgaagatcgcggtaagagttcagacaagtgatagaaccattaggggtttggtcacaagcgaggaggtttccaaggtggtgagggtgctgatgctgggtgaggaaggggtggaagtggcgaagaatgtggcggagctgtcagccagtgctaaggaggccatggcagaaggagggccatcatgtaaagcactgaaagacatgatcagtgagttgtgcgtgaagaaggtgaacgggaatttagaggaaagccaggacgagaaggtggatgcttagcgtgcgtttttatgttcttttgttgtttttaatcatcttgagaaatagttgggtggtgtgcaaccacatgcatcttgaattataaagtcggaagaaaataacttcagcatgtcagttttattttgttgttatttaatcatcttgcactatgaactaagaagctgaatg

SEQ ID NO: 46782 - DNA, 836 bp, Setaria italica
  misc_feature (289)..(289): n is a, c, g, or t
  Peptide Sequence Number=SeqID_112756
taatctgtgctcctttacacctttacgtttttactacctcatctctatacttaattttcctgcatagttatttagttatttgctataggcaccactgtttcctcattcttagttattttatttcaatgtttgttactactatctggagctcagaagccaaatttttgaaaataaaagttaaagaaataagcaatataatatactacttcattgattcctcgttcttcagttttttaatctgctttctattgaaactatcaaactaacatccaggtagtgcctgtttgtnttttaatattttactctcttgttaattataaaaacatgctgttcacacatggaaaatttcatggtcaggatgagcctgtggcaaggatacttgagctctgcattctccatattgctatggcagagatgacatcaaaaggaacacctcacaaagttgtcattaacgaggttcttatttacccctatctacttttgcagtatataaaagaagaatggtgctttcttgtagctatattggggtactagtagaatgaatgtctcttcatacgccttatttttcaggcagtagatctggcaaaacgattttgtgacggtggtgcccctcgggtaattaatggatgccttcgaacatttgtaaaggatcacgtcgacattacaggtactaatcaagcagctgaaccaaaagcgtgaagttttgcaaataccatgtatggtacatcagaatggtgactgaaatagagaagtatggagaaaacatggctcttcttggagttcaggcgaagtcttttcgtcctgaagaaaccaaacatgctgggctcatcaaggag

SEQ ID NO: 46783 - DNA, 1457 bp, Setaria italica
  misc_feature (1381)..(1457): n is a, c, g, or t
  Peptide Sequence Number=SeqID_112757
aatctgtgctcctttacacctttacgtttttactacctcatctctatacttaattttcctgcatagttatttagttatttgctataggcaccactgtttcctcattcttagttattttatttcaatgtttgttactactatctggagctcagaagccaaattttttgaaaataaaagttaaagaaataagcaatataatatactacttcattgattcctcgttcttcagtttttaatctgctttctattgaaactatcaaactaacatcaggtagtgcctgtttgtattttaatattttactctcttggttaaattataaaaacaatgctgttcacacatggatgatttcctacgccgcgtgcctggagggcgctgacgtcgtccggctcttcgaccgcaggatcagcgcgagacgagagcccgggtatgttttcgacaaggcatgcctattgagttacaaccatatgagcttcggcgggggacctctcgaggttgggacggaggaggaggctgagaagctgaccagccagaacgagaaggattcggccaacgaagcagaagttctttcagctcctccaaagctggtttacaacaactttgtcttaaggttgtccagggaacttttagtggctgttgccagtggatgggataaacatgttgatatcatcgacaaaataattccccagacttggaaggatgagcctgtggcaaggatacttgagctctgcattctccatattgctatggcagagatgacatcaaaaggaacacctcacaaagttgtcattaacgaggcagtagatctggcaaaacgattttgtgacggtggtgcccctcgggtaattaatggatgccttcgaacatttgtaaaggatcacgtcgacattacaggtactaatcaagcagctgaaccaaaagcgtgaagttttgcaaataccatgtatggtacatcagaatggtgactgaaatagagaagtatggagaaaacatggctcttcttggagttcaggcgaagtcttttcgtcctgaagaaaccaaacatgctgggctcatcaaggagccggaaatatttcagtcttaccgaatattggatcattaggtgaagtatacagagtcagagcaactggtgatgcacattcatgatccatctgagacaaccggagggtactacttctgatagcctatagtcctgctgattaatgtggtcagatactaagatgaattacaagttctgtaaaacttgatgtatatgtagaaggttatgcttggcactagctcatgctcggagagactgggatgtttcaattttcataatgtgatgcaatgaacgtacactcattttaggaatataaaaaaaaaaaagtgtgcttatacctaagnnnnnnnnnnnnnnnnnnnnnnnnnnnnnnnnnnnnnnnnnnnnnnnnnnnnnnnnnnnnnnnnnnnnnnnnnnnnn

SEQ ID NO: 46784 - DNA, 777 bp, Setaria italica
  Peptide Sequence Number=SeqID_112758
caagagcagttcttctgttgttagttctaatggatcactaacacaatctgatccatgcatggttctagagatcctcaatttgacattgataacgccgaggagcggaaatgttcttattactgacctcaatttggaactaaaagacaaggaccacctactggtgatgggtcctagtggaagtgggaaaacctcgctgttgcgtgctctggctggcctctggactagtggtactggggacatcatataccatgtgagaggttctatgcagtttgaaaattcaaatgtaagttctgatgagccatccaatatgaagttagagggtgaagaagtactacaaagttccaagcaaagaagagacaatggcatattctttgtcccgcaaagaccatatatggttctgggcacacttcgtcaacaattactctatcctacatggagtgaagatgttcatcattcaccaaataatgatgctgaaagtacagatcctcttccatttctatctgaagtttccacatcagagggagttggtgccaagccggagatgccctcaactgctgaactggtcagagtgcttgaggttgtgaggctgggctatatattgcctcgtttcaatggcttggactccatgcatgattgggccagtgttctttcgctaggggagcagcagcgacttgcatttgctcggttgttacttgctaaacccactttggtcttactagatgagtcaacaagtgcactagatgaagcaaatgaggtaataattctcgtcctgctgct

SEQ ID NO: 46785 - DNA, 579 bp, Setaria italica
  Peptide Sequence Number=SeqID_112759
gcgcctcaagttcttctctccgtttctccagctcatgcagatccttgactgcttgctcccgtgatgttgctttctgctgcctagaacgttttagcacaccaatgcacaatatccccgagataacatagacagctccacatgaaagaagcatatagctggcaatctcctggagcaaaatcagatcattcctttcaatacttgggtatgccttcgtcatgacagcaacactgccaggaaccaaaagtaaaaggacatcaagagaggaacaggcatgtaattcaaatcagcatgtgcaagaataattaataggattcttcccacgtgtccctgggcactgcttgaaggaaagaaatttaaaaatttaaatgctcatgatatcagcacttagtgcttgcatgtaattgacacaagcttttacttttcagagcctgtaatgtgaacctgaagagatcaatctgctcaataccagctggataacaagagtattactctgaattaatggtacaaactcttaaatggacaaaatttccatccagtattctcaaacatcgaaaccaaatatgtacatgtaacattatt

SEQ ID NO: 46786 - DNA, 358 bp, Setaria italica
  Peptide Sequence Number=SeqID_112760
tgtgtatagagatgttggattccaataacacgtcgatcaatcatgcccacagcattgcagccaggccctatatcacccctcaccccacatttcaccttaaaatgcttaaaagtggtgtctggatatatgacctcatattcccagtctggcacatacatgccatacaaaaccgtcatgtaggtgaccgtgagaaccaaacccacaaacagctgatgacggtatcttctgatcaacgcatagccaccagctccaatgtcacttgcaccacctcgtagccatatttcgcaaagcgccaccgctaagtacgctattgcaattctctgaagtacgcccattaaccgtatctcacgaatatcaa

SEQ ID NO: 46787 - DNA, 492 bp, Setaria italica
  Peptide Sequence Number=SeqID_112761
gaggacgaaacgacggaggaacggccggagcacgtcgttcatcagagcctggaatgttgccggcgcgttgcacaggccgaacgccatcaccagaaactcgtataggccgtcgtgggtacggaacgccgtcttgtggatgtcttccgggcgcatgcgcacctgatggtaccccgagcgcagatccagcttggtgaaaaacttggcgccgtgcagttcgtcgaggagctcatcgaccaccgggatcgggaaggcgtccttgacggtgagggcattcagcgccctgtagtcgacacagaagcgccaggacccatctggcttcttgacgaggaggacgggcgacgaaaaaggggagtcactgcggcggacgatgccttggtcgatcatggcagcacactgccgttccagttcatccttgtgcgccgcagggtacctgtatggccgtacggcgaccggctgggcgtcgggcttgaggaggatgcgatgatcatgggt

SEQ ID NO: 46788 - DNA, 221 bp, Setaria italica
  Peptide Sequence Number=SeqID_112762
ttagaattttggtcaaacgacaatatagttatcagaataatttggttcttcgtagaaatgaaaatttgtaggtgaaatactctatttaacattgatataccaggaccagatctgacaaagtaagaatcccagcagtttatggcaatacccaatacgatggtccaggataaaagcaaatatgtggcgattatgttctcaattagctgatagatgcagcacct

SEQ ID NO: 46789 - DNA, 456 bp, Setaria italica
  Peptide Sequence Number=SeqID_112763
ttgagctgttcagtacacgcttttgcaaatagcacctatcagcaatttttccaatttcaccaccaagggcatctacctcatggacaagttgagactttgcaggcccacccacagctgggttacaaggctgccatgcaatcctatcaatgttgagcgtaagaagaagggtgcgtgcgccgaggcgagccgacgcaagcgcggcctcacatccggcatggccacctccgacaacaatgacgtcgtaccgctccgaatccaatcggcctctagaatccttcgcgacggcggcggcggcggcggtggagaggcggcgccggggaggggtccgccaggatgttaagggaaggaggtcgcggaatgaaggggaggggaggaaggacgagagtctcgcagcagcagctgcagccgcggtggccggctgcggcggcgggcggaggcggagcagcatggccgccg

SEQ ID NO: 46790 - DNA, 258 bp, Setaria italica
  Peptide Sequence Number=SeqID_112764
aaccagtagcctattttgatatacagtgagcaatgtcataggaacacttattcagaggcatgctagatgaatgcatgtaggtgtactaaatatggcattaataacttcttgcttcatatataacttcatatatagctagagatggacagagacagacagcccataagcctttctgcgcatataaggcaaactgttaagatagacagacatcctgttgcagtgtaatttaaacattgtaatactattctagtagacatg

SEQ ID NO: 46791 - DNA, 361 bp, Setaria italica
  Peptide Sequence Number=SeqID_112765
catgtggaggtgtagtcagtgttgtgttaactggagatggtgtggatatactggtcagtggtgatggtggtgtgaccattttgttgtttaggtgcagatttagtggcacatagtgacatagtcttcgatagagcatacagtatgtggtgttgctgatgagtagtgactaggggcggaggatactggcatatgggggcatagcatgcagtggccgacttttgactggctggagattgatgtagcaggcagttatgtttatccgttctcagttctaatctatttgtgtcaatgtactagatgcataactgctattttcaaacatcatgatcaatgcagatatgaaatgggaatttatagtttt

SEQ ID NO: 46792 - DNA, 424 bp, Setaria italica
  Peptide Sequence Number=SeqID_112766
atggctcaatggcatatgctatattttgattagcttgtatattggtactcgctagatgatactgcactcttttcttgtgacttccttgcaaaatgctttgaatttgtcatttgcttctgcagtaaaccaacttcaccacttatggtgctcaaatttaaactttattggcatacatgatacatttcatgttatagtagcttaaacatgatgaattgactatttttcctttgaattataacatacaatcatacatatagttcattgatttctgatcttatatttaattactgccatgtaactttttgttctgtagaataaaactgtacagggatctgttgatgttgaaggcttcttagaaggagcacttgatttatattgtggaaaagtaaagcaaaacctagaacaaggaatacaaaggactaca

SEQ ID NO: 46793 - DNA, 724 bp, Setaria italica
  Peptide Sequence Number=SeqID_112767
aaaggcagcgtgtagaactcttcgttcctactgtcgcctcggaacgtcctgaatcgtgcccaccatggcattcctctgtcccttgccgcgtctctgacgtcgagtgtgttgtcaaggagtaccgccacgaagagggctacggttggcggtgatgagaagatggtgttgatgtagtcattgaaccatccagcctttgtgtgcgctgggccctgtcgagaactcgtggaataccgagagaagtactctggtatagataaaccaaggaagagtgaaacaccaatgatgaagaggttgcgcattgagttcatgttggtgaactgcataaaggagagccccacggcagcgacaattccaaacataacacagtaaatggcagcaaatattgtgaagggaatggaggcaaaaagtgctccaaatttacctagcatggagaagaagatcatgaaacctgcagaaatttgtatcactcttctgctaccgactcttgttgatccaaggagtccgacattctcaacagaaacagtagaaccagttccagtgccaaataggccatctagtagggtgccaatgccctgccacccaatgcctctgctcaggacatatgctggtgggggtgtcgcactagccaaccgggcagcagctttgaatgctcctgttgtctcgattaaagagaccaccacagcagccatcataccgaaagcatggtctgcactgaatgttggtg

SEQ ID NO: 46794 - DNA, 455 bp, Setaria italica
  Peptide Sequence Number=SeqID_112768
aacggtggtggacggaccggacctggcggcctggaaggcggccatgcagcccaacactaaggcgctcctattggagagcccggccaacccgctgctggagatcatcgacgtgcagggcgtggccgacctcgcccacgccaatggcgcctatctcgtggtggacaacgtcttcgccacccccatcttccagaagcccatgaagctgggcgccgacgtggtggtctactccaccaccaagcatatcgacggccagggccgggtgctgggcggggccatcctcgcctccagccagatgatcgaagagaagtaccgcgacatcctgcgccacaccggcccgtgcatgtcgccgttcaacgcctggctgatgctgaaggggctggagacgctggacctgcgcgtgcgggccatgagcggcgcggccgaacgcctggccaacaccgcggccgcccacccga

SEQ ID NO: 46795 - DNA, 602 bp, Setaria italica
  misc_feature (531)..(602): n is a, c, g, or t
  Peptide Sequence Number=SeqID_112769
agaagggcgaccggcatcacccagccgaagcccgtctcgccggcgctgcaggcaatcgtgggcgtcccggaaatcccccgcaccgaggctctcaagcgcctctgggcctacatcaagcagcacaaccttcaggatcccgcagacaagaaggtggtggtttgtgatgagaagctgaaggccctgtttgctgagcgggagcgtgttggattccttgagatcgccaagcttctcaacccccactttgtgaagtgagaggcctcttccgtggagttgagttaccgtagtgacctagacttctagagagttggtttttgttggttctgagttagctcgacttagtaggagactctagctcgtcgcagacaatgtttgtgtgcccctggaacctggtggtggtggctatctgaaatctgaattactggccatgttctgaacaaccttcagctcttttgcttgtagcttgcgtgtgttaacaagctaagctctcgagtttaagaattgccgagtgcatctcagcttcgctatgaaaannnnnnnnnnnnnnnnnnnnnnnnnnnnnnnnnnnnnnnnnnnnnnnnnnnnnnnnnnnnnnnnnnnnnnnn

SEQ ID NO: 46796 - DNA, 239 bp, Setaria italica
  Peptide Sequence Number=SeqID_112770
caatttatcaggtgggaattctctatcaaggctctagcaaccaaagctatggatcccaaagcagttcctcgaattgtgtgtggcctcagaaatctccagcaggaatccttgaggtctgacagagtctttgataaaggagctggtccagcagcatcagcttgagagaatgtccgcacggagtcgcggcggcgttcgcgggcggcgctgcagggcgcgcgaggggcgcgggggaagcagcc

SEQ ID NO: 46797 - DNA, 369 bp, Setaria italica
  Peptide Sequence Number=SeqID_112771
agacaaatagacaaagcaagccttgcatcgatgatctgcaatgcaatcagctactctttatatgtatcggaagatgttatactctactcacaacatgcatgcatatatgtactaaacgagaaggggggaaatagaattagggcggcattacgtgtgattctctcgaggtctttgttattagcatgttcatgcgggttttatatttgatgacaaaaagaaaaaggaaacaagtacatgtacgatggtacactggtggattggatccatgtgtgcttgcttgtactactctgaatcgcctgattgtttggcactcatacatgtatccatgcaaatgctttcaataaaagcagaggagtaatctccattttt

SEQ ID NO: 46798 - DNA, 382 bp, Setaria italica
  Peptide Sequence Number=SeqID_112772
agacaatgcattaagtgttcaaatttagtctgggacaaacagtgttagattgagaaagtgtacgtatagtgcacattacatgtgtatcttagtcttttgacatacatgtatattttatttcattcattatattattacatcattctctctacactttgcatctaggacaattgctgatattgaagaatcagaaaaccgagctcacagtcaggttgaatatttgaggagtagtctagaggagcatagtcttgagcttcgagtaaaagcagcaagtgaagctgaagctgcatgccagcaaaggctttccttgctgaagcagaactggaagagttaagggctaaagtagatgcatctgaaagagatgttgtggaactcaaggagg

SEQ ID NO: 46799 - DNA, 608 bp, Setaria italica
  misc_feature (49)..(49): n is a, c, g, or t
  Peptide Sequence Number=SeqID_112773
tgagccaggttatggttttaagcaccttgttaatattaaattttattanctttatttttgtggcacatgtttggttatctagtgtgctatctttgaatagtgacctagtcaaacatcgatcaagctgttgaggaaaagcaatgactggtaatttgacttgcaagttgcaatgaggtggactcgtaatagtcctccaaatgttgttgctaactgcacaaagaaaaatatagttcagaaatttacgatgtaattagaaattagaaggtaatggtcatggtactgcatatttagtttcaatttgtctgggacaaacagtgttagattgagaaagtgtacgtatagtgcacattacatgtgtatcttagtcttttgacatacatgtatattttatttcattcattatattattacatcattctctctacactttgcatctaggacaattgctgatattgaagaatcagaaaaccgagctcacagtcaggttgaatatttgaggagtagtctagaggagcatagtcttgagcttcgagtaaagcagacaaagtaagaaagaaactaaagaaaagaaaactaaaagaaaaacaaaaataaaaagaaaaacaaaa

SEQ ID NO: 46800 - DNA, 1728 bp, Setaria italica
  misc_feature (1692)..(1728): n is a, c, g, or t
  Peptide Sequence Number=SeqID_112774
ttagtttagttaaaaaatttagttaaaattttaattttagttaagttctttgttacgttcttgttagtacttgtaagtagtacctacttattcctagtaaacttcctaggtattgtaaattattaagatattcatgtctgaaaagaatgatcttgagaccaaggttgaggaagctttgcaagattcaggcaagaaagacttcaagaatgagattcatgttatggctgcagcactctccaatgagctgcgaatgatggagaatcagttgagtagatcaaaggatgcggcttctgaagcacttgcattacgtgagaaagcggagtcattaacatcattggtagctaagaagattgaggagcaaaaggagatatctgataaatacaactcacaactaattgagatcaagtccctcaaagcattggttgaggagttggagaaggaaaagcaggagttgcaatttattgcagatatgtacacaaaagaatgttctgagtcaaggacaattgctgatattgaagaatcagaaaaccgagctcacagtcaggttgaatatttgaggagtagtctagaggagcatagtcttgagcttcgagtaaaagcagcaagtgaagctgaagctgcatgccagcaaaggctttcctttgctgaagcagaactggaagagttaagggctaaagtagatgcatctgaaagagatgttgtggaactcaaggaggcaataagaattaaggaggctgaaggagatgcctatatttctgatattgagactatcggtcaagcatatgaagacatgcaaacacaaaatcaacatcttcttgaacagcttgcagatagagaggactttaacataaagctggtatcggatagtgtgaagatgaaacaagcttgtagttcccttttctctgaaaagcttatgttagagaagcaactccagcaagttaatacttcactggagtcatccaaactgaaaatttcccgtggtgaagagcagatgaagacttgcgtagcacaagctataaaaacttcagctgaaaatagacatcttacgattagcctggaaaggactgcgctggacatgtccaacacagagaaggaactcaagtggcttcggtcctctgttggatcctctgagaaagaacatgaccagactcagcaaaagatatctgagctgagaatactgctagagcatgagaggagtgagaggcggcggcttgaggaacaatatgaagaggtgaaaaatgaaattatggagctgacgtctgagactgaagagaccactatccagaaactccaggatgaaataaaagaatgcaaggctattctcaagtgtggcgtctgctttgaccggcctaaagaggttgtgattaccaaatgttttcacctattctgctcaccatgcatccagaggaaccttgagattcgccaccggaaatgtcctggctgtggaaccccatttggacaaaatgatgttcgggaggtgaagatatgaagcttctccgaagtgggactgacttggtgtttgaatagcactgacctgtggatgcttctcccttgtgaatattgtcatgttctcttgcaaacatctagatctaactcccatagtgtgctacagatgcttcgtgacccccaaggaaataataggaagaacggaagttcttgaacttaattgcagtcatgtataagttaaagaannnnnnnnnnnnnnnnnnnnnnnnnnnnnnnnnnnnn

SEQ ID NO: 46801 - DNA, 723 bp, Setaria italica
  Peptide Sequence Number=SeqID_112775
tggtacttactaacggctcacacacattattctatccaaatcaatacacccaaatcaccctcaccaggtgatcaatctcttcaccgcgaatcacatacagagtacgcagtctccctctctctcgctactaccagacatacggcacaagagctctgaccctcgccgggaactcctcgaacttggccgcgtaccacttcctggtggtgtaactccggccggcgaggtacgccgcggtgccgacggccacgacgagcgcgtacgccgtctgcgagatcatggcgaacccgaagaacccgatgatctcgaagaggtagtgcgggcaggtgacgagctcgaacaagccgccccgggggatcttgtagtgccccttgtcgccgccgtcggctcggagcctcgagaggaggtggtggtggtagaagttgccggcgatgccgacggcgaaggcgagtacgccggggtacagcaggtcgacggcgggctccggcagaccgtggctgaggtgctgcacgtagatcatggccatgccgttgaacaggtagcaggaggagatcagcagggccgtgcccagcggcatgctcccgctgtaccggtgcacgaacagcacctcgagcacccgtttgaggaagtgcacggcgacggcggcggcgaggatccgcgcgcgggcgccttcgacggcgcccggcacgaagaaggacgcgagcgcggcggcgagcgccggggcgt

SEQ ID NO: 46802 - DNA, 448 bp, Setaria italica
  Peptide Sequence Number=SeqID_112776
ttaaaccttaagacctaacgtaggacaagtaggaagtaggaagaataaagttggcaacatagaagcttccaaaacacaatgatgtactaatacatttttagcaagcttattctgcacactgaaagctaacattggtagacacctgtttctttgtcaaaaatggttatgcaagggtcttcctcatcaagctttttctcaatttgagattgccatagttcaattacagcgcgtgatttacaagccggcatgttctgtgatacaaggtatatagctaacagtaacttgaggggcctgggcctggtaggattctgcagttcatagggtaaaaccactgcccaaatcattcttttcatgaaataacaaggagcatacttctccctcatccatccttgaaaaagagaaacccgtccgagattcacatggccatttgtctcgccatttcaagtgg

SEQ ID NO: 46803 - DNA, 235 bp, Setaria italica
  Peptide Sequence Number=SeqID_112777
agtccataatcaggtggatggtatgtgatgggatttggtacgggtggtggtacttgtgacataggtccactttgcattacagcagggtagccatcttgcagtttagctgctgcagccagcttcttcctcttcattctctcttcgttgcgaacctagattagttcaaaggaaaattgtgagcaacagaatgatacaatatattacatcagccgaaacaattctaatgtcacatctg

SEQ ID NO: 46804 - DNA, 443 bp, Setaria italica
  Peptide Sequence Number=SeqID_112778
taactcagtgtgagtagtaaaggtgctttgatcatttcattgatctccatttttatacgctgaaaccgatcagccttctccagtttagcagatagacctgattctaccatttctttcatgtttctcataaaaaacaatctccacccttctagagctgtccagcggttctccttaatcctgtaccaccacgacttagctgtgcataccggagcctcctcatgaaggcctgaaccgcttctactccgcgccatcgcctcctccgccgcatggctggtgccgaatatcccaacacctgcgccgccggttccgcggtggggtgactactccgcctcctcctctgcttccctctctggctcgctgctatacatgccgtccgagctcaagccatggccaattcaaaggtagaagaagccaagaggttcaaatcaggaccaatggaagcc

SEQ ID NO: 46805 - DNA, 841 bp, Setaria italica
  Peptide Sequence Number=SeqID_112779
gtggtatttgagtacttgaattaccagatgatgatcacttacctcggatcagtaaactttcgcagcataaaagaagtaacacagataaacatttaagggcatgtgctggcatgctcgaaaagtattcttttttaattacttgttctctttcacatttgatgaaaaataacaaattgagaagctttgccaaaatatgccccaaaaaaaatccaccccacccaaacattttcaaatgcacatcctcttggatttgtctaacttaaccagtaacacatatacaggtattagaagtgatcatttctcaaatatacaattagtttaccccaaaaaactgatcttcatgatatattgtcattttggctaacatatattaagatgaacatagggcaacgttacaaattgaagataatttcagtttttgaaacatctttttgaactgaataggtaaccttttcaattttgaaacaaaaagaatgatgaatcaaacgtaaaaaagacaacccactagtgccccacggtccacggtacaaagaagtcaagccaagataagttcattagcttccatcactaaccttcagtgtcctgcgctgcacaaggtgtccaactatgcccatgaggcgatccatcaactcatgttcttggatctttccttgatttgccgataaccttgcaaccttggcaagcttttgcttcacttcttgaggcaaccgtcttttaactgctgcatggccatttggatctacctcattaatatcgattgttggtggtctatctgcaaggagaatttcaagcatattcagcaacaatcttctggagatcccgaatagctcgctcaagcctg

SEQ ID NO: 46806 - DNA, 2481 bp, Setaria italica
  misc_feature (1)..(12): n is a, c, g, or t
  misc_feature (2466)..(2466): n is a, c, g, or t
  Peptide Sequence Number=SeqID_112780
nnnnnnnnnnnnttccatagagagcaaccgcagctgcatttaatagcactatgaacaatacatgtcatgacgagcagcgatagaaacgattcgtaattacaaccaatattgtggtgaaaacctgcacccgaattacaaatggtcaataatatcctctccactcggatacatgttagtttagacaatcggtgctgaacacatggaaagaccagattttgttacagcagctgaaaagggcctataatggaattaaatatcctgtaaggcaaaataatcagctaggttgttggttatgaccaatcacggttgggaggccaagcacggtttgagtgagctggctaccggcatttgtctcgtcggaaggcttggagggcctttgcctctcattcccatgctgcaagggagcctttggttggttagcttgtgtatctacaggatcatattcaggttttctttttttcttcttcatctcgccagcatttcttttgctgtcatcagggattgcccttgagcttatttcgcgaaccctttcgtaacttttcactccttggttcagtccataatcaggtggatggtatgtgatgggatttggtacgggtggtggtacttgtgacataggtccactttgcattacagcagggtagccatcttgcagtttagctgctgcagccagcttcttcctcttcattctctcttcgttgcgaaccttttgctggttgtgcaataatctttttcgctccttcgatctagaaatggcatctttgattccaacattatccatgtagccttgcggccatagctctgcaagctcaacatataacttcctgctttgagggcccttgtcttcatccataccctcaacataaagatcatagagatcacatattctatcctccaatgcagaatccattacagacttcccttttatagctcttctttcatcattagcaacctgaaaatcatcagccgaaccatcctgttgttcattgacctttgactttgcagccacacgtgctttgatcatttcattgatctccatttttatacgctgaaaccgatcagccttctccagtttagcagatagacctgattctaccatttctttcatgtttctcttcagtgtcctgcgctgcacaaggtgtccaactatgcccatgaggcgatccatcaactcatgttcttggatctttccttgatttgccgataaccttgcaaccttggcaagcttttgcttcacttcttgaggcaaccgtcttttaactgctgcatggccatttggatctacctcattaatatcgattgttggtggtctatattcagcaacaatcttctggagatcccgaatagctcgctcaagcctggtgcctttgggtttagtacctgaaccctccctaccaacaattgggttcactgtttgtgtagaatagacagcagtacccatagccacaacaggatattcacttgttccacatttccctttgcgatagattctatttgatgaatcatgattttccctgcttgcctttctttgttggaaatcaagttgcactgaagtgcctttatccctgtaagctgaaccataatcgtaggtctcgctggtttttgacttatgtgcataatcaagaggtagtaacatgtcgctgctttttgacttatgtgcataatcaagaggtagtaacaactctttatctccataatcaagaggtagtaatacatctttataatcttccaggtcacttagctccacaggagcatttgaggcatccttactgatcttagcacgcgctgtagcatcagcaaccgcagagaaatcagattttcttttaagggctcctccaggaccactggttttgttcttcaccactctgttgtcctcagggtattgaccataagaacctacgctgctactggctaattgcttccctgcctgcacagtgcctcttccagaggattttccaggcacatcaccaatacttaaataatcaactggagcattggtctcaagataagtactcgagtcctttcttctcctttttttggagcgatatttgtcgatgtgccagggtcaatctgttccagctttcctttgttcacaaaatacccatcgtgcttagttttcaaattatcgacttcaaaatattcatccaattcagcatcatcaataaaagaatcctcagtgtcatactgatcatcatctggtacatcgtcaagatcttcttcgtcactactatgtttgcccatgtaaaggcgctcaattttttcaatgactgcattaaaccgatttggctgtgttggatcctttgggtcactttctgcaggatgtgccgcaccggatgggcccgcgtgtgcggggaacgccggctccgccgccaccaccggcgccgcggccgcgttcccggcctccctgaggagcttcttccatgacacgatggtggtctccccggggccgcagctccaccgtgaacngctgcctccggcacc

SEQ ID NO: 46807 - DNA, 418 bp, Setaria italica
  Peptide Sequence Number=SeqID_112781
atctagctagatcaatacagaagtggataccatgaaggtgtacattcaactatgaaaactactagagctgtaaatatcattaattttcatgtccagttggaagtgaaaagtgataacagttaaaaacacacaaaaaatggacgttcataactcttctcgcgtgttagatcaattattactcttcctcctattaggtgctcctcaagtcattgattgcaattataactggaatcagtcactccagccaaagctaaacatggggcatgaaatctggataacagaagcctcaactggatcacatatttgcttcaaattcatcaaaacaacaataatttttgatgaccatgcattcttaaagtgatatgttgctgatcatgacaaaaacaatgatgagtcaatacaagatgattatctcatt

SEQ ID NO: 46808 - DNA, 460 bp, Setaria italica
  Peptide Sequence Number=SeqID_112782
gcagagcctgtgtcttgcattgcagagaatgatgaacttggacaggagacacctggtgattctacaggtactgctttggagggaggcgaggatgggtcttattttccttggagggaggagcttgagagcttggttcgtggaggagtgccaatggctcttagaggagagatatggcaagcatttgtgggtgttggtgctcggaaaattactgggtactacaacaaattgcttgaaggcaccgtggaatcggatgaaaaggaccttgtggatccagtgctcaatgaacagataagtgcaccaagaaaagttgcacaacctgagaagtggaaaggacagatagagaaggatttgccacgaacatttccaggacaccctgcattagatgaggatgggaggaatgctttgaggcggttattaaccgcatatgccaggcataatccatcagttgggtactagtaca

SEQ ID NO: 46809 - DNA, 411 bp, Setaria italica
  Peptide Sequence Number=SeqID_112783
aaagtaagttcaccacgtgcagaccatgttcctggcaagacgaatcaagagccaaatcatgatgcacctaacaggagaatgggcctgctttctaggggacttggatggctagacaagagtaaggtacacccataaagtcaaaagtttgccaaaataatgctgggttaataatgacgtatggcaccaggagctacttgtcattctcagtctttgtttattgctagctttgatttttattgctatgttgtcattttgctaaaatatttgatgtgctaggaataagcttaggtgcatctgctcaaccaacagccttttttaataatatttaaaaatggaaactcaaaagaaggaatatagttcgtccttataagaaaggggacacagctatatcacgtttgcatggccaggata

SEQ ID NO: 46810 - DNA, 490 bp, Setaria italica
  Peptide Sequence Number=SeqID_112784
gtggtcaggttttatactagtgtctttggttctttcattatgatatgtgctatcacaaatatttttgctgatagttaactgctgtaagattgctaaaccccttttggcttactaacatttaaatctcactaccaggatatggaaaattctcttgtttttttgttggttgcatattctgtgtaccatgtatgtgttaatgatatctaagtgcagactttacctctcttgtagtacttcgcgtttgggatgttatcctttttgaaggaaatcgtacaatgttgttcaggacgactcttgctttgctggatttatatgggcctgcactggtgaccacaaaagatgccggagatgcaattacactacttcaatctcttgctggctctacttttgacagcagccagttagtattgacagcttgcatgggctttcaatcaattagagaaatggggttagttaaatgtgggttggtaaaaaagtactaactaaggta

SEQ ID NO: 46811 - DNA, 987 bp, Setaria italica
  Peptide Sequence Number=SeqID_112785
gaggaagtatgccatggttgacaagtctagtgtttctatacacttgatttctcttttcattacaggatttgccacgaacatttccaggacaccctgcattagatgaggatgggaggaatgctttgaggcggttattaaccgcatatgccaggcataatccatcagttgggtactgtcaggccatgaacttttttgccgggttatttttgttgttcatgcctgaagaaaatgcattttgggctctagtaggggttattgatgattactttgatggttactacactgaagaaatgattgaatctcaggttgaccagctcgttcttgaggaggttgtacgagaaagattccctaaattggctaaacatatgaatttcttgggagttcaagtgggatgggtgactggaccatggtttctttcaattttcatcaatatgcttccatgggaaagtggtcttcgcgtttgggatgttatcctttttgaaggaaatcgtacaatgttgttcaggacgactcttgctttgctggatttatatgggcctgcactggtgaccacaaaagatgccggagatgcaattacactacttcaatctcttgctggctctacttttgacagcagccagttagtattgacagcttgcatgggctttcaatcaattagagaaatgggattgcaagagttaaggaaaaagcacaggcctgaaattttaactgcaatggaggaaagatcgaaagaccgtaattcctggaaagataagaaggggttagcgaccaaactatatagctttaaacatgacccttcatttgtgtgctcaccggttaagtccaaggaaggggcagatggtttgaaattgaatggagacactggatcagcaaatcttgagacctaccttagtactagttctatgctagagaatgatttggatcagggtgttgatcttcaagatcaggtgtcatggttaaaggttgaactatgcaagctgcttgagg

SEQ ID NO: 46812 - DNA, 1294 bp, Setaria italica
  Peptide Sequence Number=SeqID_112786
ttttgttttcttttagttttattttggtttttgtttaaattttgttaatttggttagtactacttggatcagcaaatcttgagacctaccttagtactagttctatgctagagaatgatttggatcagggtgttgatcttcaagatcaggtgtcatggttaaaggttgaactatgcaagctgcttgaggagaaaagatcagctgatctcaggggtgaggagttggaaactgctttaatggagatggttgagcatgacaacagacgaatgttgagtgctaaggttgagaaattggaggcagaggtatctgaactgcgaaaagcctttgcaggcaagcaagagcaagagcaagcaatgcttcagatcttattaagaatggagcaagaacagaaagtgacagaagatgcccgcatagctgctgaacgagatgctgctgaaaaaaaacacgcagctcacttgctccaggagaagtatgaagaagcaatggcagcactttcacaaatggagaagagagctgtaatggcagaaacaatgctggaggctacaaagcagtatcaggctgggcagtttaaagccaatcaatctttcacttcaagttcaccacgtgcagaccatgttcctggcaagacgaatcaagagccaaatcatgatgcacctaacaggagaatgggcctgctttctaggggacttggatggctagacaagagtaaggcaaggcagaattccactgaaacaactggaagctaaactcgtagaatattggaggaagtcgtagctcccaacaagatctggagtgttcattaatggttggattgcctgattgctataacaatgtgttgaaaagagcagtgatgttttctccatgggaaaatccagctggtattttccaagttttgcaggaagtgtaccttgtatcatattgagctcagttgtcagataaagtttttttggtaggtctggaaaactgttgtaagtcatcggtgtaaattttcttctattagtttcattaagattgtcaatagttagtgttccaagtaggagaaagaaaaggatgcaacttccaatacacatgaaaaaggggaaatttgtgttagattagtttatgacagtatcatggaggaattgtaccggagaagagcatgttttatttctcttcagaccactgtgaagaaatgatctctttgtacttctgttctttcggtacagttggcttgcaacacactcttgaaatatgttatgtacgaagattacgtactatgtgccactgtattcgaaaataaaaaaaaaaaaaaaaa

SEQ ID NO: 46813 - DNA, 1531 bp, Setaria italica
  Peptide Sequence Number=SeqID_112787
accgcgccgactggcgagcggcgccgccaccgtccccttcgccggcgacaaccatccgccagaagcaaggaagggatgctggattggcttctagttgcttagcagcgaagcaaaagaggaaggacatcggagatacaagggcttgttctcgccatgtcccggtcaccgcacctcccgccgcgctgcccacccctgggtcctcagatcactcgaagggatgacagcttgttcacccagagctgcaggtttccatctggggatccattctatggtgagccgccgtgctggctcgatgatctccttgcagattctgggaaggcttccaaccttcctcctctcagaagggcttgtagcgattccgatgctatcttggacgccctgtcggtgttccagagcccgattcatccgattgaggaaggggatctaagcccaggtggtgaagccaaggacctgttggatgctgtcgaaggtggggaaagcagttctctggttgaggccagctgtgtttatgggccgaattcgccaagacagaagagtagtctgacaacttcagagagttccatggtaaatgctgtgcttgagaacgtccccagcaaccccttgcagtacctgaccatcgacacctccagtggcgtgaatggtaatgtggccaatggaactgctgatgccactgatgcttttggtcatcctgatcaagacaagtcatttaaaaggcgtccggggcagagatctagggtccggaaacttcagtacattgctgaacttgagagaactgttgactcacttcagaacatgggagctgatttagctgtcagagtggcttcacttttccagcttcataatgctctatcaatggaaaatgagcaactgaggatacagatttctaatcttcagcatgcaaaactaattaaagatggtcagacgcaggccctaaagaatgaagctgagaggttgaagcagatgtctgcccgtcaccgcaggagcagaagcgtcacttcctgttataacatgagcccttatggagatgcaccagcagtcaattggcagatgcctgacatggcgaagctcagcctgaatgacagctcagtctccccaagaggcggcggctatggtctgtgacagcagccggcccgatacctcttagaagaaaaatcgaggcataacttttcgctaaccttaccggagcatagatttgagttgaggtcctatcgttgactaggagagtagggtgcatctgtcctcgttgtggggaattacagaggttatcagcttagttttacctggtagagtgctgcagtttgactcccagatttgagaactgacgaagtgaagcaagcttggttggcttgccgtttagcagttgctatctgctcgtttgatgctcttgcgtgtgctagtgaagttgcagcgctctgacgatctcctgaggcctgagccatgcgttgagctatggtcgctctttgttgctggtttcgtctggttgttatttcttcgccattcgtaggttttaacgtgtgctcatgtcatttac

SEQ ID NO: 46814 - DNA, 411 bp, Setaria italica
  Peptide Sequence Number=SeqID_112788
cccagtcacaggtgcttggcggcatccatgggccatggccgccgaaattgagagcggagaccaggaggatgccgccaaggccgccagcccacgcgccctcccatcttccacttgcacgagcacggccgcacgagacgcacccccccggcgcggcatcccgtcgagcacgggccatggcaatgggatcgccccgccgccgtgctccgcggccgatgcccctgccgctcctcctcctgctgttcttcctcgtcgccggcagcggcgaggccaatgccgccgtgaggggggcgacgacggcgcccggcccagccccataaagaacgtggtggtgctggcgctggagaaccggtcgttcgaccacatgctggggtgaacgcgccgcctgcttggccctccccgtgacgggctccg

SEQ ID NO: 46815 - DNA, 272 bp, Setaria italica
  Peptide Sequence Number=SeqID_112789
cacctgccgctgccggccgcgcacggccgcccccccgcccacccactaggccactgcagcctcccaccgccgcagccgctgacgacggcgaggatgagcggggcggcgctgtgcgcggcgctgacggagctggggttcgatggggaggacccgctggacgcggacgcgctggagtggccgttccagtacgaggaggcgcgcccgctgctcgcctggatctgctcctgcctccgcccctccaacgtcctctccccatcccacctcgcgcagta

SEQ ID NO: 46816 - DNA, 393 bp, Setaria italica
  Peptide Sequence Number=SeqID_112790
gagagaaagagagagagagagagagagttgccactactgagccgcagaagagaaggataattagtgaggagaccgatcgacaaggagcggaggaggggcgtggcggtagccatggacaactcggcgccggggaagctggacgagatcgagggagggggaggggcggccggggactgggcctacctctcgtcggacgggatggcctccggctccttcccgctcttccccttccccagggacgccctctccacgccgacgcccgcctcgctgctcctctccatggaccccgcggcgctcttcgacctccacggcgccttcgccccgccctcctcctccacccccggcggtggcggcggctccgcgctgcctgccttccacgacttcacctccaac

SEQ ID NO: 46817 - DNA, 727 bp, Setaria italica
  Peptide Sequence Number=SeqID_112791
gccctcgcgatgccttcgcccaccacggccacggccgcgtcggcgcccctccacctccgctcgtgcgcgcgtcagcacctccctccggcctcccgctgcttcctcccctcccgcgtgctcctcaattccgcacgcctcacagccccggccccgctgcccgtgcgcgtgccgagcctgcctccgacggcggcaagggcggccggccccgacgctacgagcacgagatcgcccacatccggcggacagatgctggtgttcgtcccgccgcacccgctgataaagcattgggtctccgttctgcgcaatgagcagacaccctgcgccatcttcaagagtgctatgtccgagcttggtcggctgctcatatatgaagcatccagagattggttgcctacaatcacaggagagattgaaacacctgtagctgtagctagtgttgaatttattgatccaagagagcctgttctggttattccaatactgagagctggcttgcactagctgaacaagcttcatcagttctgccagccaccaagacctatcaccttggccttcgtagagatgaagaaacacttgaaccttcaatatatctgaacaacctgccagacaagattccagaggggactcgtgtgctagttgttgacccaatgctggccactggtgggtacgattgttgcttgtcttattgacttgtttaattcgtaacgttggtagttacctagtctaa

SEQ ID NO: 46818 - DNA, 479 bp, Setaria italica
  Peptide Sequence Number=SeqID_112792
ccatgtagctcggcacgagcagcgggtggtcagcggcgggcttgtccgcggcgccttcgtcatcgtggtggtggtggtggtgcctcgacggcgtgtggcggtacgggctggcccgcgcggtagcgaaggagaagtcgtcgtaccggccgctgtacgtgcgcgcgctggcgtcggtgagggcggacggcgtcggcgagaccttctggtacagctcgttcttggacggcgtgcggcacagcggcgtggcgtagcagctgctgcgccgggacgtccgcggcgtgccgtgcacctcgccggcgccgccgctggtgtccacctccacgatcttgacgttctcctccgggtcctggtggtgccggaaccgggggtggtgcggcgagctgcggcgggtcggcgtcgtccgcggcgtccggaagggcttctcgtcgtcgagcatccggaggcgcgccgcgcgcgcccgttgctgcgcggcgacgagc

SEQ ID NO: 46819 - DNA, 367 bp, Setaria italica
  Peptide Sequence Number=SeqID_112793
aataaacggtaaaccctagaacaagactaaggtccgtgactggcacctacagtttcggcgagatcaggatgaaaggcgacagaggtcacctcgtcagaatcccagtggtagctatgggattcaaataggtagaagacgactgtgacaggcgctagagagtagagaataggaagagcggagttgtgcctctgaagtccgaggtcttgagctgcagaggaatgctgtaattttttcatagcttgtagagaataagagttagcaaaatgctgtacttgttatgcatgtcccccaggttgtaaaatatatgtgggtgcttaagcctatttgacatgatcagggtatctcttgtatggggcttgtagccacg

SEQ ID NO: 46820 - DNA, 675 bp, Setaria italica
  Peptide Sequence Number=SeqID_112794
gtgcacgcagcagcagtgatgagatgctgacagcaggtagtagagtggatgataatttgagcatggatgctaggtcccttcaaaatggtgaggatggctacaagcctcgaggcgcaatatcattacccagcaaccaagttcaggctgaatggatcgaacagtacgaacctggtgtgtacataacactcacaaccctccgtgatgggactcgggatctaaagagggttcgtttcagtcgaagacgatttggtgagcatcaggcagaaaattggtggaatgagaaccgtgaaaggtttatgagcgatacaatgtgaagagctctgagcgtgtgtcatcagcggcctcaacccggtccgcatattgacttgaggatggcctgtggcatcatggaactttgccccaccgcacaaaacagaagaactccaagatcatttgccaccagtaaattatgagatccgagggcttatatactggggtgtgccaaaagcctgcggcaattattttggttagcacgataatgctttatagaacgatagttgatttttgtttgtttgagtcacccaaggctatgtcaccagcctgttttggcataatgtacatagacgatgcaagtacatcagggaagggaatcttgttgttaaggtcacaaccattcatcagtatggaatgcaggaa

SEQ ID NO: 46821 - DNA, 410 bp, Setaria italica
  Peptide Sequence Number=SeqID_112795
accgcgagctaatgggcaccggcgggtacagccgcatcgcctcggtgatcgccgcgtgcaggtagtgcatccccttcagctcttcgtcgccggcgccgtggtcgtcgtctccgtggcgcgccgccgctgccacctcctcgtacacgcgccgctcgcagcggggattggcggcgaggagccagaagaaccatgtcagagcggaagacgtggagtccttgccggcgagcacgaagctgaccacgatgtcgcgaaggaaccggcgtttggcctccggcgactcgaacatggcgccgagctcgctgccgttgtcttcctccatcgccgccgtgaaccgtgacagcagatgctgctcgtcgtcgtccgccccgcgcagccgctcctccgactccacaatcgccatgacgtactcg

SEQ ID NO: 46822 - DNA, 1108 bp, Setaria italica
  Peptide Sequence Number=SeqID_112796
ccgcgcctaaccccgctcccccgtcctccgcctccgacctcaccgccggtcagtctcagcccgtatggaccccgccgaccagtcgccggaggaggtgtactctgtgtgggcaatcccgccggctcccgtccgcgaccgcctccgccgcatcatggagggcctccgcgccgcgcacggcggcccggccttcgagccgcacgcgaccgtcgtcggagacttccgcagccgccgctcggcagccgtcgaggttctacgcgccgccgccgccggcgtccaaccctacaccgcccgcgtcacgggggtcgcccgcggcaccttcttctaccagtgtgtctacctcctcctggagcccacccccgaggtggtggcagcgagtgatcactgctgtggacacttcggttaccagagaaagactccatacatgccgcatgttagcctcttatatggagacctgacagatgaggagaaggaggaggcaaggaagatggtagaggagctggacaaggatatctgtggattggagtttgagatctctgatcttgctctctatagaacagacactgcagataaaagcttggagtcatgggagttggtggaggtgtgccatcttgaaaagaattgattagtttcctctccatggtgattctgctgcaagtcaagttgagaattcgtaaggctttctaagcaccttactgtttacttttctaagctcctggttcgtatcaccagtaccactttcaattggaataagtgtacttcggattgaagtacggaataatgtaaaaacctgttatgttatgtatatttggttttccttgaaatatactttggatggtttagattgtgctgggtatgttaacacctgttgaaacaagcaggtactcttgtgagaacctgaaactgtattggtatcacgttagagaataccttctgattaaaaccatgaaatatactagtaattgggctatattccataaagagactaagctctcaaccctttgagtcaatacaatcatagtgtacgatacataccatgcagcctatagaggtggtacattttccgttcaatatagggcacattattgatgatatttctttattgtgacca

SEQ ID NO: 46823 - DNA, 1027 bp, Setaria italica
  Peptide Sequence Number=SeqID_112797
gatcccttggccggacccagccgcccgccctatcccatcccctccctgcctggcgatccttggccgggtcctcttctcgtccagattctgatcgctgacagagtcccaatctcggcggcgcgccctcgcctccctcgcccgtgcgctaatttagacaggggtttcgaggcgggcttcggacttggagttcgagtttccccaggtgcgcgccgagagaccagagcctccttcccgagcggaaggaagttgaggagcagccaacaatggagagccgagggcggcggccgcggaccccggagcggcagagaccggcggcgcggaaggtgccggtggtgtactacctcacgcggagccgccacctcgagcacccgcacttcgtcgaggtgccggtcgcctcgccggaggggctctacctcagggatgtcatcaaccacctcaacacggtgcgcggcaagggcatggccgcgatgtactcgtggtcctgcaagaggagctacaagaatgggttcgtgtggcacgaccttgccgaggacgacctcgtcctcccggccaccgatggcgagtacgtgctcaagggctctgagctcgtggaccaatcttctccaggtcaattataccctgtcagtaacggcaaccacaagcaacagagcaggctgaaagagggtgcacggcagccattgccaagagagcattcctacccatcctcccctcctagcgtgatagtaagagaagccaagccccggcgttcaccgtctgtgccttcacaagaagaggacgacaccccctcgccgtgcagggaccgctcctttgggaccatgtcgccggagttggagccccggaggaatgagagggctcaactatcagcgagtgggtctgcaagcccagcagagttcagagtttacaagcccactggttgcatggatgctgcaactcaaactgatgatcttggcagaagatccggtcggagagcacccgagatgcgcaagaagagtctgagcacagatcatgatgctgtagttcgtgaaat

SEQ ID NO: 46824 - DNA, 374 bp, Setaria italica
  Peptide Sequence Number=SeqID_112798
ggtctagggatacggcagccctaggccctggaggcctcgcggagtcgcggggcggctctcgccttccctcacacacgactcgccgcgaggcgtttcccctttcctccgcgtgcacctcgcccccctcgcgagagagctcgaaaacctagccgccaaatccatggctcgccgcggccgcgacgacgacgacgacgaggtggaggaggaggaggacgaggaggaggcctacgacctggacgacgaggaggaggatgaggaggaagactacgaggaggaggcgaggcgcgggaaggcctcccgcggcggcggcggcggcaaggccggcggcggcgggcggaagcggtcgcgcgaggacaacttcatcgacgactcgg

SEQ ID NO: 46825 - DNA, 1596 bp, Setaria italica
  misc_feature (1)..(42): n is a, c, g, or t
  Peptide Sequence Number=SeqID_112799
nnnnnnnnnnnnnnnnnnnnnnnnnnnnnnnnnnnnnnnnnnttttttttaattttttgcactgtaacatctataaacttgatatgcccagcatgtcttgaaagagtagtgtaatattgtgcattctagttacaaatgccatttcttgttctccatttgtacagatttgcacgtccacggtgatcagcggcaaaaggtgtagtatgtggtagcatttatacagcaaaagaaactgaatttttcacccggactcctacgccgcggaggcaatctgaagctcggcccaccagagcgggttgtccctcggggtggcctgctccggcgacaaggcggtgacgcctctcatcagcctcgccacctcgcccatggccgctctcttctcccctctcagggtttatgcacaccctcacaacatcgcacagcgccgctaaatcttcgccaggcaccgacgacctcagcatgggatcagccatgccattcagcggcctcttgccgtccaggtagctggaagcccagagcacgagcaggccgtggtcctccgagaatggcagccggccggagatcagctccagcagcaggatgccgaacctgtacacgacgctctgttcatctcgcagctctgcatctttgtcgtggtccgtgcagaagtcgatgtcggcgatcttagccgcgtagtcctcggtgaggtagatggacgaggagctcagggttgccggcatcacaggtggctccagctggctcatgtgctccaggcagtatgctactcccatcatgatgcgcagccgtgtaggccagtccagatcttctgcttctcgaatatgcaaatgctcaaagagggaaccacacggagcatactcgaacaccatcatccttgtgaatggctcttcacttgtgcagtaacccagtaggttcatcaagttcttgtggttcactctggacaaaacagatatcttgttcttaaatttctcctcagacctgtctgaccaatccttggcagagtcagctgaagtggagactactgctatttcaactccacttgacagagttcccttatacagtgtgcattcagacgaagagccaatcacattgatgaagtcctcacaagctgtctgaagctctgcccttccaagagaagggacacctgccacgaaggctttccggagtggtccactgagtccagtagaccatggcatgacagtggtatccttcttccgacgatagaagagcagatacgtagtggcagcagctgcagccacaaagacaagtgctcctccactgatggctattgtgtagattgcccagtgaggtagcttttttcgttcaggttcagggtcagtagacttgagcagggtttctcctgatgtatggatagaagattccgggccttggcggtcctgtggacgtaggagtcgtctctggatggagcatccaggtgttaaggctaccaccttgccatcatctgagcagcccactccccgattggacaaagatccagttgggtcatcttctgtgctctctccaaatctcaatagaggtctcccttgtcgattgatgaaggcacaagacccaagcctctgaggcacgagcaagaagaag

SEQ ID NO: 46826 - DNA, 366 bp, Setaria italica
  Peptide Sequence Number=SeqID_112800
caatggtggggttcctgtggagtttgatgggtacatgcgcgaggttgttgatagggaggtcttcctcagggggaagaagaaggcggaggtgctccggtgatttgttttttctccctaatagataagttgttgtttgttgatacgtcctagataagttgttggatatcacaaggcgtgcttttgtcaagcaagccttgtaaatgtcattttgtctcaatttagtactcagacttgtccgtagatgtttgtatttagctagccattatcacttccgtggaaattttggcaaccatcaatgtatatagttttggacttccggcagcactggttccacccaactgatcagttccttaactaaattctagt

SEQ ID NO: 46827 - DNA, 640 bp, Setaria italica
  Peptide Sequence Number=SeqID_112801
aaagacaagcagatgaccgacctagtgtcttcatcaaccaaagaacatgtaaatataaaggaaatgatcaacaaaggcatcgatgcatttcgcaagaaagatggatccgggcatcctggtgttggtgtggtagcaattctggagaagaacaggctcagctacatcgccaccggaatcgtggttgtcccgaccatagtcatcgcagctaccgtcccaaattcattctccatagctactgacatcgcgggaggatactgcatgaccatcctgtatggtgttctccctccactgatggcctgggctattggctccaaactgtctggcaaaagtgccggacttgcagacggagagctgttggaagataacagggagagagtggacttgaccagtgcaaagcctgttctcgttgggatgggtgtgttctctgtactcatggtcctcgagcagatgtcgcaggacttcttcagtttcaaagctgctctcgttccataggctagatcaagattcaggaagcttagtttgtgccgccaatgttgatctcgcgttaactagggattgatgcaagactgttaggctggccatgtaaatagcagtagtatgcaatacatgaagggattagtcaatgtgttagcagactgcc

SEQ ID NO: 46828 - DNA, 488 bp, Setaria italica
  Peptide Sequence Number=SeqID_112802
ctataaatatatgtagtttttctaataatcttggtcaaacttaaaaagttttgacttaggacaatcctaaaatgacttgcttttgggatggagggagtagtcagcaaccaaaataacttagaatattgtctttgttgtctctgacttgggccagtctaatagaagccttttatgctcgctaggcttggaagctttgtgatcctgatgctgaaaatgtatttaaagctttaaggaaagctggtgttaaaactgccgtagtctccaattttgatacccgcctacggccacttctgcagaccctgaaatgtgaccactggtttgatgcagttgctgtctctgcagaggttgcagcagagaagccaaatccaacaatattcttgaaggcctgtgagtttttacgtgtgaagcctgaagaagctgtgcatgttggcgacgatcgcagaaatgatatatggggagctagagatgcaggctgtgatgcctggctc

SEQ ID NO: 46829 - DNA, 284 bp, Setaria italica
  Peptide Sequence Number=SeqID_112803
ttggtggaccttctcgtggggagcggaacggggacgtgggggcgcaccgggatcgtttgccgaaagcgcatctgccggacgaccggtatgggaggccgccgggcccggagattctgtcctaggatttccggtaggggcgttttgccggctgtctgcctgcgaccgctggccaggccccatgccagagggctgccgggcccgtccggggccggacagggacatgccctgcctgccgcgtctacgtggttctacgtagtggctctgagtagcactgcgaatatcgg

SEQ ID NO: 46830 - DNA, 346 bp, Setaria italica
  Peptide Sequence Number=SeqID_112804
atgcgcgagttcgaggtcgagcctaacacggcctcatacaacctcgtgctcaagagcatggtcaccgcgctggaggccgaggggcgccgagaagctcgttgaacgacaacagataagaacaaagtcttgtgtccacaatgggcctggtgcattgacatagcagaagctgcatttgatgctaacaatagcaaattagctctttttgctttggaatttcttgcaagatggattgttcttgaagtccctgcgccagaagagggcacccactccagagacatatcttgccaagatttatgctcattcatcaattggccagcttcaacgggtcttttgggacacttcgtag

SEQ ID NO: 46831 - DNA, 2068 bp, Setaria italica
  Peptide Sequence Number=SeqID_112805
cggagctctccccggacccgaccgccgccgcccccgaccccgccccgctcccccgaaccccagcacggggagccccttctacggcgagaactggcgcaacccctcagccgccaacctgccctcctcgctcctccccgccgtcgtcgggggcagccccttcggggcgccccaccgcacggcaggcttctccgacgccgcggggctcaaggagaccttcgccgtgtggatggcggagcagcggtgggaggacatgaagcagctcttcgaatcatgggtgcgctcgctcgacgccgctacggggaagcccaaccgccccgacgtcgatctcttcaaccactacctccgcgcaaacctcatggcgggggccctgccgcacgagatgctcgatctcgccgaccacatgcgcgagttcgaggtcgagcctaacacggcctcatacaacctcgtgctcaagagcatggtcaccgcgctggaggccgagggcgccgagaagctcgttgaacggatgctgcaaacaggaactgtaccagatgatgaaacctacaatttggttataagcctgctgattagacagaacctttttgactcagctctgaagtacttggatctgatgcttaaatcaggccacacactatcgctaactattttcaatgattatgtccgagcatgtgtgagatctgggagattggacacactggcatcaattatagagaagtgcaagacaacagataagaacaaagtcttgtgtccacaatgggcctggtgcattgacatagcagaagctgcatttgatgctaacaatagcaaattagctctttttgctttggaatttcttgcaagatggattgttcttggtgagaatgctaaacttcagctgtcagttaatgaaggtcttgtaatatcagctctaagtgctgctggcagaacttacagtactgacctcttgaatgctgcttggtcgctactaaagaagtccctgcgccagaagagggcacccactccagagacatatcttgccaagatttatgctcattcatcaattggccagcttcaacgggcttttgggacacttcgtgaatttgaaaatgcctatgggaactctgaggacattgatttagagctcttctcgccattcacttccttgcatccacttgtcgttgcttgttgcaaagatggctttagcacactggattcggtgtatgttcaattggagaatctgagtcgcgcggacacaccatacaaatctgttgctgctcttaactgtgttatattaggctgcgcaaacatttgggacattgaccgagcatatgaaacttttgttgccattaaggacaagtttgaactcacaccagacatacattcatacaatgcccttctgtgtgcatttggaaagaagaaaaggaccgacgaagcatgtaatgtgtttgagcatatatcaactcttggtgttaagccaaatgcaacaacgtactccctacttgtcgacgcccatcttgcaaataaagatccaaaagctgctcttgccataattgataagatggttgatgctggattcacaccttcaaaggataccctcaagaaggttcgaaggcgctgctctcgtgaatcagactttgacagtgacgagaaggtgcaatccctggctaagcagttcaactaccgaatgggtggtgaaaaccggagagagatgctttataacatagaatacaatcctgtgtactgaagcagcagctcgtgctcagtttgctggcagttggagagcacagacattgtagcttgtaaattacttcgcggtacctcctaagcggttttcagttacccaacccatcgtttttgctggaaggattgatgttaggacatgataataaggctgtcatactatttgtttgttcggaaatggaaaatgtcagttcttttttcataattgtagtagcattttgcatggcgctgatatcgctcttttcaatgtttccggaagtttgttttgggccatgtttacacttggaatgcaactaacgaagaagtccttgaaagatgctattcgcttgtgaaattttaattgtccaaa

SEQ ID NO: 46832 - DNA, 794 bp, Setaria italica
  Peptide Sequence Number=SeqID_112806
tttcgtttccctttaacctttacttacgaccccaaaccgaccttagttcgacggctagagctaatatctccatctctttctcagcttctaataaaaagtgtagcattgcaagaagggtacggtggtgagtgactgcaagagaccgatcaggtaagtatatgggagggaggtcgttcttctgcatcttcagcttctcacgcaagtcgaggcgctaccgcggcgtcgacgacgacgacgaggcggcgagcgactgggagggaccgccggcgaggctgcgcaaggtgcggtccagcgacgacgacgacggctggtgggtcggcgagcgcgacgtcgaccagaaggcctccgacttcatcgccaccttccaccggaggcgcctcgtcgtctagctgctaagctgatagatgctgcggcccgggcgtatatgcatgcatgccgcctgcttcaatataatccgacgacgtcgagctgaggtctatctgcaccaatgcaagatttatatatagcaagatcaagggccgagcaaattaagcatatatctaaattaaatatagtgttatgtatattgctcacgtgcttaattatatatgctcggtggtggtcgactgaataatgtagccatatgtgtatgtgtgtgtaagagatcaggggcgtgcatgcataggatcataaaagtgaataaatcggtgttgtactctagtctagtaatatatggagttatttgaggtgtactctagaaataatcaatatattttgtgttctataattgcaaacgttaaaaaaaatttacttac

SEQ ID NO: 46833 - DNA, 432 bp, Setaria italica
  Peptide Sequence Number=SeqID_112807
tgattgcacaacaactagctgaactagtgtggccctctcactctatgttgctccaagatcctaattaacgtggggtccttgtgccgcttcccatccagaccactcagcatgactgcactggttgtgccaatacaagcaccaaagctgcagtattgactggccctggcacacaccaaacatttggccccttcaatatctgagctaaaatatatgcacatccgtgctcatggccttgtcccctgccaatcatcccacttgactggtctccctgctctttctttcagctatatattcagggtcagatctcctcccaaacaccatcactagtagcttcacaaacaaagcattgcaagatcaaataagagctcctcagtttccagccacagagaagaaaggaagaaccgaccatgatcagtgccaagagggttgtcc

SEQ ID NO: 46834 - DNA, 1000 bp, Setaria italica
  Peptide Sequence Number=SeqID_112808
cgactcattcatccaacatgggtgccaacacggacagggccaagaaggccttggatgccatgaagctgcttggcttctccaggaagcaggctacccccgtgctcaggcaactcctcaaaatcttcaacaacaactgggagcccatcgaggacgagtgctaccgcgccctcgcggatgccatcctcgatgcgcaagacaacaaacaaacccccgcatcctcacaggggacgcaagcagcctatgaggactcggagcctcatggcacaacaagggatgatcggcacagctatgcttctgcaggcgaagatgataatgaaacccccttggtcaagaggcccaggatgggagtggctgactttggacaagaactgcagcctggaccacggcaatccactgtttccacccaaggtgctctgcctacttcaccacaaaccagccataggcagactaggtctttgactctagcgcagcaagctgccgaccatggagatccctcagctatcagcgatgctcccatattgaaagaacccaagcctgagccagaaattaatgcggctggggtaggatctacagttcaaaatactcatgagccacaacaggtggtcccaatgtgcaacaatggggttgggtcttcagttcaaaatactcaggaggcatcttttatggaggttgatgtggcttcttccaccaatggtgaggtgaagatgtctctgaaatgcaacttggatccttcaaaattcagcattagtatggaggaggttttcaaaatggtggaggagaagtgccttcactcatacaaggtgctacctccagatttttctattggcaagctgatgagtgaggtatgccagtctgttgcacagttgggtactatgcattctgatgttcacagcaacgatggcagcttgcataaagaggctgttgctcctttggtgaagccaattgcttgcaaggctgctgtgagtaaaaaatggtaaatggtgctgcaggatcattagtg

SEQ ID NO: 46835 - DNA, 714 bp, Setaria italica
  Peptide Sequence Number=SeqID_112809
catcagaattcatagttgcttcttcatgctttgttgcaagaagtggaacaagatgggtctctaggttaggcttgaagccatcagaattcactgtgcggttaagatgtatggccagtgtgggtacacgtatcaatggtctggtgagcttgacaagcttatgcttgaaggaaccgtctgcagccttgaggatgactctcccagccaaagttagatctctgtcaaaccatgtatgccacagcccactcccgtacgtctgcacattcaccatttggtggccagatttgaaggttgcagacctcggtttgagcttgagacaaggactatcagtgtgggcagcaattatattgaaaccgttcccaaccctgtacttttccccaatgtcaaaggcgaccaagcaggacatgttgcgcgtgaagaagtagcggccaccgggctgcaggtcccagtcatcactctcgctgagcagcttgaagcccgcgtcgagcagctgccgcttggcctcagctgtggcgtggaagtgcgtccatgactcgttgaggtagtcgaggaggccggcaacgatggagggcggggcggcggaagaggaggcgtcgaggggcgaggccgggtggctggagcagaggaggcgtgaggaggcggcgggaaggcgggcgcgccacaaccacgaagaggtggagggggaggagagaggagaagggtgagggcgggcgggca

SEQ ID NO: 46836 - DNA, 497 bp, Setaria italica
  misc_feature (468)..(497): n is a, c, g, or t
  Peptide Sequence Number=SeqID_112810
aaaactaaactaacaataaagaatctattggacgaggagaaggagctggcgaagcagcagcaggaagcacttgatggcaactggcagaattacgaaaggcctgcaagtgtgatgaagaatggagccataaaaagccttgctcgtcattacggagtggacctgggtgactgacgggacaaattcaaggaacagctgtacagtcagcacttttgccctggggtgttggtaaatgctgcgatgcattggattagttgtgattcagtagctggatcctgcagtgtaacagttagcccgacttagtgtacacgctgttgctgcgttagaatcctatagaaaatggcagccttagtgttcaaccttttgtttcttgggctgtaacatggcgccgaaactgaagcatccactgccgtgtgatgggtctcgtgtgtatattgctacatgaaagtatgaaactggagtgaacctttnnnnnnnnnnnnnnnnnnnnnnnnnnnnnn

SEQ ID NO: 46837 - DNA, 433 bp, Setaria italica
  Peptide Sequence Number=SeqID_112811
cttagaagctatacgcttgtatgataagatgcaagaaaatggatataagcctaatgatgttacctatgtggtgttgctctcagcatgtagccactctggtttggttgatgatgggcttaagatctttgaatccatggttaaagataggtcagttgcagtgcgtgatgaacattatactagtttgattgatctttgtagtcgagcaggacggcttgatgatgctaaaaggttaattcactgtcttaagattaagcctgcatcaggttctgtctggagtgcccttctaggtgggtgtaatgcacatggaaatgtgagcattggcaattttggccgctagaagtcttttagaagcagaacctgataatgctggcacctatactctcctgtctaacatctatgcttctgctggtaagtggaaagagcagcacaaatt

SEQ ID NO: 46838 - DNA, 307 bp, Setaria italica
  Peptide Sequence Number=SeqID_112812
ttctacacaccgatccgcaggatcctcgaaaaccccgaccaattcggagtcgtcagcgacgttctgaaggcgtgctgcggaaccggcggcgactacaactggaacgccagcgccgtgtgcggcatgcccggggtggcggcgtgccgggacccgtcggcgtacgtgagctgggacggggtgcacttcacggaggccgtgaaccagtacgtcgccgagggctggctccaggggccctacgctgatccgcccattctgagagctactatcaagcactagcttccagccgggccggaaccattcaagaaag

SEQ ID NO: 46839 - DNA, 910 bp, Setaria italica
  Peptide Sequence Number=SeqID_112813
gtctacgaggtcgtgctgcggcaggcggcgctcgtgcaggagggcagcggcagggtcgttaaggagggggcggcggcgcggcgccggcagcgcccgcggtgggcggaggagaaggaggaggaggggatcgtcggctggggcctcctcggcgacgcctacgaccgctgcggcgaggtctgcgccgagtacgccaagaccttctacctcggcacacagcttatgactcctgaaaggcgcaaagcagtctgggcaatctacgtatggtgcagaagaactgatgaactagtggatggtcctaacgcgtcctacatcacaccgactgctcttgatcggtgggataagcggttagaagatctctttgaaggccgcccgtacgatatgtacgatgcagccctctcagacacggtgtccaagtttccggtagatatccagccattcaaagatatgattgaaggaatgaggcttgacttgtggaagtcgaggtacatgacctttgacgagctctacctctactgctactacgtcgccggcacagttggcctcatgacagttcctgtgatgggcatcgccccggactcaaaggcctcaactgagagcgtgtacaatgctgcgctagctcttggcatcgctaaccagctgacgaatattctcagagatgtaggcgaagatgcaaggagagggagaatataccttccactggacgagcttgcacaggcaggtctgacagaagatgacatattcagagggaaagtgaccgataagtggagggggttcatgaagggccagattaaacgtgccaggttgttcttcgacgaggctgagaagggcgtggcccatctagactctgcgagcagatggccggttctcgcgtctctgtggctgtacaggcagatcctcgacgccattgagg

SEQ ID NO: 46840 - DNA, 2307 bp, Setaria italica
  Peptide Sequence Number=SeqID_112814
ggaaaagaagaagtgctcgaggttcttgctccgctcacactttcctccaacttgctcatcccgaatccgcccaccgaaatcctcgaatccgcagccgccgtcgccgcctcggcgatcccggtttcctcccgcctcgccccgcagcctgcgccgtctccgcctgaccacggctccgggcacggggggcgcggccaccggcccccctatccacttgtgctaggccgctggtgtggattggagtgggggatccagccggaggtgggtctcagcaagatgagaaagctgggatttgctgtgctgatcctggtggtatctttgccgtgcttctctgcatccgatcgccaaggggatgctttatatgatatgaaacaaaaactgaatgctaccggtggccaactttctgattggaaccaaaatcaagttaacccttgcacatggaattctgtgatttgtgacagtagcaacaatgttgttcaagtaacattggctgcacggggatttactggtgtattgtcaccaagaattggagaactccaatatttgagtgtcctgtcactagctggtaacaggattaccggtagcatacctgaggagtttggtaacctttctagtttgacaagcttagatttagaagacaaccttttagctggagaaataccagcttctcttggcaacctttctaagctacagctgttgatattgagtcaaaatggttttaatgggccaattcctgatagcatagcaaacatttcaagcttgacagacatccgcctggcatataataatttaactggtcagatacctgattcgctgtttcaagtagcacgttacaatttttctgggaatcacttaaattgtggacccaatttcccccaatcttgtgcttccagcatgtcctatcagagtgggtctcatagctcaaaagttggcttgatacttggaacagttggtggagtaataggccttcttattgtgggagttctgtttctaatctgtaatgcaaggaggagaagccatctgcgggaagtttttgtggatgtagcaggcgaggatgatcgacgaattgcgtttggccagctgaaaagatttgcatggagagaactgcagattgcaactgataatttcaatgaaagaaatgttcttggacagggaggtttcggtaaagtctacaagggtgttcttccagacgccacaaagattgctgtaaaacgattgactgactatgagagtcctggtggggaagctgccttcttgcgtgaggtcgagctgattagtgttgcagttcaccgtaatctcctaaggttgattggcttctgcacgacgcaaacagagcgtctgctggtctatccatttatgcagaatttgagtgttgcataccgcttaagagaatttaagcctggagaacccatcctagactggcctgaaaggaaacaggtggctataggcacagctcgtggactggagtatctgcatgaacactgcaaccccaagatcatacaccgtgatgtaaaagctgcgaatgtattgcttgacgaggattttgagcctgttgttggtgattttggcctcgcaaagttagtagatgtgcagaagacatctgtgacaacacaagtccgtggaacgatgggtcacatagcgcctgagtacctgtccacagggaagtcgtctgagcggactgatgtttttggctatgggatcatgcttcttgaacttgtgactggtcagcgggccatagacttctcacggttggaagaggaagatgatgtgctattgcttgatcacgtaaagaagctgcagagagaagggcagctagactcaattgtggatggcaacctgaatcagaattatgacaacgaggagcttgaaatgattatacagatagcacttctgtgcacacaggcatcaccagaggaccggccatccatgtcagaagtggttaggatgctggaaggtgagggcttggcagagcggtgggaggagtggcagcaggtggaggtgacaagaaggcaggattacgagcgaatgcagcggaggtttgactggggagaggactctgtctataatcaggaagcgatagagctgtctgcaggtagatgacaatctgtgacaatggatgggcgtaaatgcaatgcaacccatgtctgtactgtatgtaactgctgttatccgtagagtagatatcagataggtttgttcataagattattctaacaaacttgttgagtaatatcatgaaaatggatgaatttggatggataattggcagtagatagaggtggtaactgtaattattttgttaggaaccgt

SEQ ID NO: 46841 - DNA, 338 bp, Setaria italica
  Peptide Sequence Number=SeqID_112815
aactattccagctgaagggagcatccctgttttcaccacatccaccgacatgtccgagagaaccgacctcagctgctccccacgaactcctccggcacagcatggaccccctggacgccgacggtgttctgcgccgtgacagcagtgatgacggaggagcagtatgcgccgagcgccgcgcacgccttgatgtcggcctggatgcccgcccctgcgccggagtcggagccggccaccgtcagaacgtgcggccacggcatcgcgcgcgccgccacagcgagcctccgaggccggattctgggagaaggcgagacccgcgatgaggaggtgggggaggg

SEQ ID NO: 46842 - DNA, 743 bp, Setaria italica
  Peptide Sequence Number=SeqID_112816
gaatctttggaacaatccaaatgagctctctgaggagatggtccgctgcatgagaaacattttcctacgtttgtctgaatcatcgaagatatggccaaaggcatcttctgattgttcgtcttcctcagcagagcgtctatcaggctctacactagcatctttctcagattcatccataataccatcaatgctacggagtccttcagtcgattcgaaccacaacgacgagacaatgaaggaagtcagaaactttgatccgtataaagttaatggaaaggaaacccgaagagatattggaaactatcgttcagcagctgaagtatcttggatgtctgttggaaaggatcaacttgaatatgcatctgaagctctgaagatgttcagatttcttgtagaacagttgtcaaaggttaaccctagctccatgaatcgtgatcagcggctagccttttggattaacttatacaatgctttgataatgcatgcgtatttagcatatggagttcctcgaaatgacatcaagcttttttctctaatgcaaaaggcctgttacacggttggtggccagtccatcagtgcagcagaaatagagtttgtgattctaaagatgaagaccccagtgcatcggccccaactttctttgatgttggctctgaataagttcaagattaccgaggatcacaagaagtactcaatcgatgaatttgaaccccttgtcttgtttggacttagctgtggaatgt

SEQ ID NO: 46843 - DNA, 494 bp, Setaria italica
  Peptide Sequence Number=SeqID_112817
tttatgatgtcactccttatgtggaggaacatccaggcggagatgctattctaaataatgctggtggtgattccacagaaggcttttttgggccacaacacggcaccagggtcttcgacatcatcgacgatttctgcatcggtcagttgaaggcttcatgatgataagagcctcaggttgtattgaattcatggaattttcctgagaccaatttatgagaagctatggatatggtagccatgtttcagccttgcaatggtcagccgttgagatgtctgagtggaatttgttctgcatttgtgatcagggctgctctcagctagctttgtgatgtaacctcatatcttgtgctggaacaatgccagcatcactgacaactgattgtcgtgtttgtatttctgttcttattgaacagagattctgaaacggttgcaattgtttagactaatcaggacccagctctcgtaattattttggttgatacaaaaaaaaaa

SEQ ID NO: 46844 - DNA, 392 bp, Setaria italica
  Peptide Sequence Number=SeqID_112818
caaacatccgatgtgacaggtgctaaaatttagcacctgctatccaaacacccccttactttatgttggatcgcatgatgccatgatggttcatgtttgccgatagattgttggttcgatttatctaggtggtagtatgcagaggagtacagctcgattgctgtttaatcttggtagctttacctagaccattgacttttttataatagccgaaacgttgattgttgtggaattaatcaattctgttgatctagatgtgcaattagttatttcattattgatagtatggctcatttagatgttgctgcacaatttcttaattggttcctcactatctagctcagaataaactgtgttactgcttatctgtctctgtttctgatggattgttg

SEQ ID NO: 46845 - DNA, 402 bp, Setaria italica
  Peptide Sequence Number=SeqID_112819
cgcgtacgtggacgcgctccgggccagcgggtggggcgggcgggcgcggctctacgtcacgcccggcgagggccactgctacttcctcaacaacatcgcctcgcccaaggccgccgcgcacatggccacgctcgccgccttcatcaacggtagctgagtagctgaccggccggctcccgtcggcggcgtggtggtggtactccgatcgatcagagacctgtagctatcactggtgacagccatacacatagcataaacgtacgtatagtcgtatactactgtattttgtcagtgcccgatgagtgatgaatgaccagagccatgtactgcgtgacttgttcttttttttttctttttgctcacttgtgacttgtttactgcggcggccggggaatgtacacg

SEQ ID NO: 46846 - DNA, 489 bp, Setaria italica
  Peptide Sequence Number=SeqID_112820
tgctaagtagaactgccctctgcttgtccagtacatttgtcaacagtccgtttagcataatgtcaacaaaacgaacaccaactagtaggaacaagcatgtgaacacctttgtgaagttagtacaagggactatgtcaccgtatcctattgtgcacaaactaatgatggtgaagtaaagggcatccactagcttgaatgtggattttcccttgaagccttcaacatttgtcatgtacacaaggacccctattgagatgtacaagatgacactgacaatagcctgccttgcaattgatggtgtatattgtgcagtagtagcatgactttggtaatcaatctcatctgcatagggtgtctctttgcttgatgtgaatatagaaggtgaagagtgcacacgctggatatttgatggggataccatattggtattttcattagtgggcggcaaatgattgggagtattgaagttagctttgcaattacttttgg

SEQ ID NO: 46847 - DNA, 1146 bp, Setaria italica
  Peptide Sequence Number=SeqID_112821
cactgactgtctgacacatcaatcgtacacgtaatagttcgctggcgcagcaatcagcggctgttgaccaccctgcagttggccctgatctggccggcgctcccggtgagcgggcggatgcttcccatctttatcatggcggtgacgaagtcggcggcgaagagggccgggttggcgctgtactgctgcaccagcgcgtcctgcgacccgccgttgaaaagctcctggtccgagtgcagcaggccgcgcctgacgaggaggttcccgtagtaggcgttgtcgaagagcagctgcgtcgtcacgtcgagcggcgccaggttgccgtcgccgctgcccgccgccgcggggcaggtgcgccggcgcagcgccgcgaacgccgggttgatgtcggtgtcgttgtagatgtggtcgcggaagttctggcactgcgagaagccgatggtgtgcgcgccggagagcgccgtcatatcgcgtgcgctcaggcccttgttgccgaacgccgtgatgagggtggcgaggtcggaggccggcgacgggaggtcgctgttcgccaggctctggctcgccgtcgtcgagtcgcgccggccgagcggcaccgcccaggttggccctccgagcaggaaggtgctgtctcgggcggcgagggcgacgatgtcggcgcaggagacgacgccggggcagaggagctcgacgttggccttgatctggtcgatgacctcgtagccgcggacggagttgacgttggggccggcgcccttctcgccgacgaagctgccgacgtcgtccaggagaatcgaggcgtcgcagccctggacgaagcagtcgtggaagaagagcctgacgagggaggcgcccatccggcgctcgagtaggagggccttgatcatggtggcgcgcacgatgagacccagcgtcgggcaggtcgtcgcgtagaacgacggcgagagctgcccctgcgccaccgaagcgagcatgagcaaggcgaccaagcaatgccaggtccggaacgaagccgccatgcttgctccgcaactaggtaactaactgatcaggtgatttcttcccaactaatcaccagatcgaggaccactagctgctagctcagtagcttgcttgcttgcttatctgggagtgacacgagctgtc

SEQ ID NO: 46848 - DNA, 389 bp, Setaria italica
  Peptide Sequence Number=SeqID_112822
gtcctgccagtctggtggcttccccccacccattggccagtgctatggccatgatagctgcagcctccatgacccacgacagtggattccacatgaaccccaaaaacttgagaaatttgctctcctccttctcttcgagcttgttgggaccaaatatttgcaggcgttgctgcgcctgctcggaagtgagccccccatggctgcatctcagattctcaaacacttcctcaagtgggatgttctccaggtcgacggcctccttgaggacggcgtccaggttcccctccttgtcggccatggcggcacccctctgatctcctccggcccgcacgaagccccctctgttctccgccgctcggctaacttccccctttttggtaattttatta

SEQ ID NO: 46849 - DNA, 488 bp, Setaria italica
  Peptide Sequence Number=SeqID_112823
ttggtattgttaggttagttcttcgttcttattagtttctaaatttcttggtagttgtactactaagtcttactattctagttatgaggagcttcgcatagttcaaattctggagtgacacaagctacatcagtttactagtttcgactacctcctactcccagcatgtgattagtattgttcaaacttgatcaactgtgccacaacgaacgagccttaattgacacaggcggagctactctttcaatccatgtcatatccttaaccaaatcctctccgtccattctctcactttaccatgtgaactatttatccatagaacaagtataagcatccagagaccttatctctcgcgagtgacaaacaatcacctaatttctaccgaacttaattagcatggtggaggtagcgacctacacatactagtataaccatgggaaactatggatcatgcatctattgtttcattcaacttgaaaacgtaaatg

SEQ ID NO: 46850 - DNA, 633 bp, Setaria italica
  Peptide Sequence Number=SeqID_112824
gcccagccggtggaaaacaacaaaccaaacgccagcgccgagcaacgaaggagcgtccgaattccaggccggccggctctcgctccactcgcaggccgttcaataattccactccgtgctgcgctctctcgcccatcgatcggcggccgtccgtcatggcgccgccgcttctgccgctgctgcctctggtggcagcagtagcgctcgcgttggcggcttcgacggaggcgacggcggcgttcgcggtggcgtccaacgcgacggcgccggcgacggtggcgggcaagctgaacgtgcacctggtggcgcactcgcacgacgacgtcgggtggctcaagacagtcgaccagtactacgtcggctccaacaacagcatccagggcgcctgcgtcctcaacacgctcgactccgtcgtcgacgcgctcgccagggaccccgcccgcaagttcgtcgtcgtcgagcaggctttcttccaaaggtggtgggcagagaaaagcccggcaatacaagacatagtccacaagctggttgactcgggtcagctggagttcataaatggtgggtggtgtatgcatgatgaagctgctgtgcattacattgacatgattgatcagaccacacttggtcaccgga

SEQ ID NO: 46851 - DNA, 487 bp, Setaria italica
  Peptide Sequence Number=SeqID_112825
gcgtggaggcgaaggtccgcagcacgaagggcacgtgcagcgactgcatcacgtccaccacgtgcgctaggaacacgaagtccggcacctcgtccacccctgcgctcgtctgcttctgcatctcccacgactggtcgtcgagcgtgccacccagcagatcaaacagcggcatgaacaggcagaaattggcctccctcttggtgtggtggatcgtgtggtatgtaggggtgtagataaggtatctgaggaccgggatcgcttggaagagggagctggggaagacctcgacgttgcagtgtcccatggcgcggagggagtcgaacgcgagcacgtaggcgaaggccagcgcgacggagccgcaacccgcggcgcacgcgcccgcgaggggcagcgccatggccgcggccaggacgatgccctccagcggggtcgcggacccggccgtgaacggctggggcaccctgctcgagtggtgcagcgagtggta

SEQ ID NO: 46852 - DNA, 443 bp, Setaria italica
  Peptide Sequence Number=SeqID_112826
gtatctacgttcttgttgttgtttttattctgaaaccttataaaattttagtcattcatttcacttttttgcagttctgatattcattcatgacagaattttctgtccaccagaagagaaggtgcagtacatctccaactaagatcagcttatccactccctcttcatttggagtagtcttggacccttggaggatagtttttcctagaagttgtcagctccttaaatgtgtgtcatttactgcaagaagatagtactgtaccaagtagcacgatatataaaacaagtcgctgttgtatttttctttgcgttaggtcttgctaagctggcatatctatttgctccttagacttaattgttagaatgtgtatgtgtgctgcctgtattgcgtgtgtgggcctgtcacttgagtcactagccaggcccaggccggcccttgtggg

SEQ ID NO: 46853 - DNA, 864 bp, Setaria italica
  Peptide Sequence Number=SeqID_112827
tgaatacaaccactcatgattctacgctttacaaccaccccttctcatttacaggttgaacgacttaaattccgacaagcaagggcttttccgtgttcgcaaaaataatttgacaaacattaatagttggatcaagctgagatatatgaaccttagttcaatttcatgtctttgtctgatctggtaactgtgacttccattgttgtatggcggcgcgcaacgaatggttcgggattatggacgagtttgggaacttgctcctcgtcacaggagatgtcttgtgcctcttgagccaagctctgattgcatagtgctcgtaggtatgaccatcggcagcgacatgcggatcctccattaactcctgtgttatagggcagatgaagtggcttggaacacttaacttcgggtttctcaaattgacagaagaagtaatcctgtgcagaatctcatcgagcttcagcagcacctctgactcaagatctggccgatccctgcatttcagggccgtgcatttcaacccgagattcgcaaacatctctgcctcatcaatcggccaatcactctgagatttgtcgaggatgtcatgaagcctcccgttttttatagcattttctgcgctcacaatgagcccatttgggtgccctgccggtcaggagctgcagcatgatgactcccagcgcaaacacgtccgatttcggcctaaccgtcccggtctgctggtactcagggtccatgtagtacagtgtgccggcgacgatcgtctccttgtactccgtttgccagtccggaacaagatcggagatgagctttggcgaagccgacgttcgtccgtattttttgtccctaccttgtagttactttgtt

SEQ ID NO: 46854 - DNA, 294 bp, Setaria italica
  Peptide Sequence Number=SeqID_112828
agttgctctgagagaaaaataaacttaaccctgtaaacacagaaaccatttttaccaattaagagcttgaagacagctattaacaagaaatactcggcctctgaactcaaaatattgcaggcaatcgaacgtttaaagtttaggcagaaaaagtagtgtacaattaagaacttgaagacagctcattagcaagaaatactcggcctctgaattcaaaatcttgcaggcaattgaacgtgtaaagtttagacattaaaatagtgtatctacaagcaaatttacatcaaacagcag

SEQ ID NO: 46855 - DNA, 532 bp, Setaria italica
  Peptide Sequence Number=SeqID_112829
ggcgcagcagctgctgctcctcctgccagcgccttccagagccttctcgaagcccctcccctccccgacccccgcgttctcctcgctctatcgtcaccaccgcgtctccttctctgccgcctctcggcgcgacctgctccgatgcgggatgaagcgttcaggcttggtggcggagctggagattgccaaggataagcaaccgcagagcaggcgcgccaatggcatcttctggatcttgctgctcaatttcggcgtctacttggccgaccacttgttccagattcggcaaataaaagcactgtacctgtatcatgcatgccctacatggtaccaattcgtgacatcaacattttgccatgccaactggaatcatctttcaagcaatctgttctttgtgtatatctttggaaagcttgttgaggaggacgaaggtaactttgctttgtggatgtcttacattttgactggtgctggggcaaacttgatttcatggttggttcttccaacatcctctgtgtcacttggagcatca

SEQ ID NO: 46856 - DNA, 542 bp, Setaria italica
  misc_feature (7)..(7): n is a, c, g, or t
  Peptide Sequence Number=SeqID_112830
tagttcngttaaaggacgcctagtgctgatctaaatatacaggaaagcttgttgaggaggacgaaggtaactttgctttgtggatgtcttacatttggactggtgctggggcaaacttgatttcatggttggttcttccaacatcctctgtgtcacttggagcatctggtgctgtttttggccttttcaccattagtgttctagttaagatgtcatgggactggagaaagattcttgaggtgcttatcctgggacaatttgttgttgacaaggtcatggaagcagcacgagcaacaacaatcacaggccaatcatttcaagtaaacaacatagctcatgtttcaggtgctttgataggtgcagcattggtgttcctggttagcagaatcgccttttcatcaaatggtgatagccccaagacaacaaaagagagcaataaatagggaaaaaataatttatcaacgacatggtcatcctgacatagtattatcattcattactatttcattatatatgataacattgttccaaaagttcagtta

SEQ ID NO: 46857 - DNA, 725 bp, Setaria italica
  Peptide Sequence Number=SeqID_112831
cttcacttcacagagctcagcccatcgccagcatcaatccggtagcagcaatggcgtcttcagccgcctccttcgtcgccattgccgtggctttgatggcgttcctgcaacccgctgccaccagtccgccagcaccaccagcgacgggcgtgccgacgacctgctcgtacaccctaatcacccttttcgattgcttaccgtttctctctctcagcactagcctctccggcccgtcggcgacctgctgcactcggttgaggtctgttctcgcctctccggggtccatttgcttgtgccacctcatcggtggcggggtcagtgacttcgcacgcaccaacattgaccccgtcaggctggcgttactcccttttgtctgcttggccatagtgccacctcaattgcccgctaggtgcttggttggacctgtgcctccgatccgtaacgacacaagttcgccggctctccctcctccatcgcatctttattgccgtgtggcaaagatacatgcaaggccggtgcaagctgtggctaagttccacagaatgcatgtatgcaacaagtctcgttgtttcttttcttctttcttttttatctttaattaaagagtgtaaggaggcatgatgtatgaatcaaattatcggtgttcatgttcaaccaacgaatcaagtcgagatcttactatcagttgttacatgctctaccataataaggtgttggacaaaaaa

SEQ ID NO: 46858 - DNA, 765 bp, Setaria italica
  Peptide Sequence Number=SeqID_112832
gaatcctattaccaagcctctattacatagccccgtgcagtttcatcttcttgtttattccatggtatttgctggaaaagccagaaatggacgtctcacaaattcaattcaactactcaatattttttctgaatgcactttctgcattcgcattgaacatatccatattcctagttattggaagaactggagctgtcaccattcgagttgctggtgttctgaaggactggatacttattgccctctcaaccatcatctttcctgaatctgttatcacaagcctcaacataattggatacgcagttgctctctctggtgttgtcctgtacaattatttgaagatgaaagatgtcaaagcaaaccagcttccagcagataacaatcctgatagatctacaaaggacaagaaggccttaaatacatacaggcctgacaattccatggacagcaatgatgggactgtcatagggggcctggcatcagagggagcagcggctgacgaggaagcccctttgatcccttctgcccgcctctcgtatgttacacggacccaaacaggcagcttcagtaacagatgacaatggtttgcctatttgtttgggttggccatcgcatattttttgttggggggaatcagaaagaggtgcataagctgatacacgtgaaaggctgttttaggaagctcgggggagtagtctttcacgcgcttcttctcataccatgttgcctggatttctcctcttggtgtacccttttttctaggcg

SEQ ID NO: 46859 - DNA, 504 bp, Setaria italica
  Peptide Sequence Number=SeqID_112833
ggagctcatcgacgaggtggtggacccgcggcggccggtgagccggagcaccgtgtactacaggtacaccggctccttcaccacgccgccgtgcacggagggcgtcacctgggtggtcgcccaccaggtacggcgcgtgacgcggcgccagatccggctcctgcggaacgccgtcaatgacggcgcgaggaggaacgcgcggccgcttcaggaggcgaacggcaggagcgtcgccttctactacgcatcgccggcgcacggccgacgggcgacgggggactagcgaggagacggccggccggcgacatctcggcgtacgtcgtcccttggcgtgcgctgcttcttgcgtacacgtggccaagcagttcatgcatgtccctataaccggtgttcccccaaatcaattcattgcaacgtagcacaattgaactgatgtaaaaaaaaaaaaaagaggaaacattttagccatagaaattgagtatgagtttatttggaggactattt

SEQ ID NO: 46860 - DNA, 480 bp, Setaria italica
  Peptide Sequence Number=SeqID_112834
ggcagggtaatgaaagcttttatatttctactgcacttcaaaataagaatctatggaacattaccgcattactttcatgaaatagctagttgatgttgatatatgcgcttgatgagtagtaaatttaggttagacacatggcaagtaacatgcagagatattgttacttcatctagaagaactaattcagcctagaaatccatcatcaagaaatattcacaaagaaaagaggcaagggggttgcaggttaaaattttaaaatgaagcttctgtcatttttaatatgtcattgcagagtcatagatgtagtcaaacttctgtctgaagcacatatttgttcctaaccaccaaacatgatatatttgaaatctattacaatattgtgtttactatcatgcaactaaaaggcaccttttatatttttcttctgtaaatcaagaggtcacaggtcagagagtggcatacagctctgtggatcat

SEQ ID NO: 46861 - DNA, 3317 bp, Setaria italica
  Peptide Sequence Number=SeqID_112835
cacgaggaagagacgtcctgcagataattaaaaagtttttcaacatgcacatgagctgaaccgaaaggggtgcgtcccttttcctttttggaaacctcggggcatttacaacttaaaggaagtaataaaagttatccaggtgagatttgagaaggcaaaggaagaggtaaattcagatttggcagtatttgcaggagacttggttagtgtaatggaaaagtatgcagagtctcatcctgagtggaaagaaaccttggaggatttgttaatacttgcacgtagctgctgtgtcatgacacctggggaattttggcttcagtgtgaaggaattgtgcaagatttggatgatcatcgtcaggagctcccaatgggtgtgctgaagaaactgtacacccggatgctttttatccttacaagatgtacaaggcttctccagttccacaaggaaaatggctttgatgagggtgaagttgttattgatcatcgcgataagattatacagtctgcggataggcagattttatctcaatcaggtgtggatgacgcaacatccagagccagtaaaagcgaagcaagaaaatcatacagtcaggagcagcataatatgaaatggaagcgcagccaggagataaagcctgttaagctcattccgccccttgatacagatattaagaaagaagctgattctccaaccaaagaacggatgtcttcctggaaaccttttccatcacctgttataaaggccccaaaagaatctactcctactaaatccgaatcgcctaataagaaaaccgatgcacactctacagttagtaaccatgttgaattaagcagcccagtcgaatctgtaccacaacagcagcttccttccaagcatcaacataaaacttcatggggacactggtctgaccagccaaatatttctgaagagggttcaataatgtgccgcatatgtgaagaatatgttccaacacattatgtagaagatcattcaagggtctgtgcggttgctgacagatgcgatcaaaaaggtgttagtgttgatgaacgtttaatcagagttgcagaaacattagaaaagttggtagaatcttattcgcagaaagatcttccaaatgctgcgggcagcccagatgttgcaaaagtttcaaattcaagcatcaatgaagaatctgatggtccctctccaaaactctccgattggtctagaagaggatctgctgatatgcttgactatctccaagaggctgacaacactatttcattggatgactttaaaaatcttccttcaatgacatgcaagactcgttttggaccaaaatctgatcatgggatggccacatcatccgcaggaagtatgactcctagatctccattaacgactccaagatcaaatcatatagacatgcttttagctggtaaaaatgcaattaatgagagtgatgatcttccgcagattgttgaacttgctgatattgcacgatgcatcgcgaatactcctctggatgaagaaagtgcattatcccaaatggttacctgcatagaagatcttcaagaaattgtcaaccgcaggaagcatgaggccctcacagtgcagacatttggaacacgtatagaaaaactacaccgggagaagtacctgcagctatgtgattcagtcgatatggacaaggttgattcagcaagcactataatggatgaagaagatgatgttgttcgtagcttgcgtgcaagtcctgtccatccagtcaaggatcgcacgtcaattgatgactttgaaatcatgaaacctatcagtcgtggagcatttggacgtgttttcttggccaagaaaagaactacaggagacctctttgctataaaggttcttaggaaggcagatatgattcgtaaaaatgctgtcgagagtatattggctgaacgtgatatcttgattacagtcagaaatccttttgtggtacgctttttctattcatttacctcgagagagaatttgtatctggtcatggagtacctaaatggaggagacctttactcattactgaggaatttaggatgcctggatgaagatgttgctcgcgtatatcttgcagaagttgttctagctttggaatatttgcactccatgcagatagttcatagggatctaaaacctgacaatttgttgatagcgcatgatggacatattaagttgacagattttgggttgtccaaggttggtttgatcaacagcacagatgatctgtctggtcctgctgttagtggggcttcactgtatggagatgatgagcctcagatgagtgaacttgagcaaatggatcaccgagcacggagacaaaatcgttctgccgttggaactcctgattatttagcaccagagatccttttggggacaggacatggttgcagtgcagattggtggtctgttggtgtcattctttttgagctcattgttggcatacctccattcaacgcagaacacccccagacaatctttgacaatattctgaatcgcaaaataccttggccacatgtcccagaagagatgagtgtggaggcacgagatttaattgccaaattattgacagaagatcctcaccaacgactaggggcaaatggtgcctcagaggttaaacgacatccttttttcaaggacattagctgggatacccttgctaggcagaaggctgcctttgttccctcctcggatagtgcatttgatactagctacttcactagtcgctattcttggaatccgtccgatgaaaacatatatgaagcatacgagtctgaggattccagtgataatggaagccttagtggaagcagtagttgtgtgagcaatcgccaagatgacatgggggaggacagtagtggcctcaatgagtttgaatctagtgcaaatgtcaattattctttcagcaacttctcattcaagaatctgtcacaacttgcttccatcaattacgacatgctgaccaaaggattgaaggatgacccgccgccgagatcagaaacgtagcagtcaatctaaatctggattgactcatttggagtaatccaacagtttacaaggtgctcgtgtgacgtaggtcttgtacatatcaaagtgtgaggcagggtctgttcttgttgaggctgttcctacctctcgcggagctgagtacagttttgctgttaccttgttttcatgacaattgccatgccatcgtcagtgaatcatccttgaccaaatttggcatgagacctaggagcgcttgggttagtgtccttttcccccccttccattatcagtccttgggttcgtgaagattggt

SEQ ID NO: 46862 - DNA, 575 bp, Setaria italica
  Peptide Sequence Number=SeqID_112836
cggatttcaagctcttgcaggttcctgagtttgttcaatgcaaacaatctttcatctagctttctgaatatattcgtttccttcgatttgcacacctatcccatttgatatgcaggatggttttagccgaagtccgccaaatcctggttgatgatcacaacgcagatctatatctgctaaagaatcaatgactatgagctcaagtagcgggatggtactcagaatgaagtcatttttaatctgaagcctgtgaagactaagaaacttgtgctcgctggaagacatgaatatctgagatagaaactcattcagtttaggacaaccctccacttcgagcacctgcagattagcatgtgactgttccttgtcaaaaaatgtgaactgcctcagattttgcaacctgcgtagttccaggatcttgagaggaccaacctctatttttctaacacgagacaggttaatcaaatgcatctcctggagaacaggcaactgctggggatgtggaattgttcccaaaataagcaattaaccagatgaattgaccgcaatgaggtgagatggacaccgactaccat

SEQ ID NO: 46863 - DNA, 456 bp, Setaria italica
  Peptide Sequence Number=SeqID_112837
gaacctaatgtagacaatgacaaattgatatagcatgctaattctcacctgtgcagaacatttcgctgatgtatatagagcaaaccattcaaaatctgccttgtgtatgctgagttttgtgaatcttgtagatggtattttgatataaagctgccaacgatccttgagtaacaagttcaagaaaaatatatagtttcccaccttccttatctgttccaaaatactgtactatattttcatgctccaaacgactcaagagagttatctcctatctacattgagtcgaagtttgttacccatctatatcatctgcgataccatctgcatgtaaaattaaaatcgcttaagtacattcattgcggtcatcttctttccagtaccctgccaaaaaaaatctggaatctaagacaagtaataccaatttagttagaataaacccccttacaataaaaagac

SEQ ID NO: 46864 - DNA, 765 bp, Setaria italica
  Peptide Sequence Number=SeqID_112838
ctcttctcaccctgcgccgccgcccgcgccgcctcctgcgtcgcgacgccatctcaaacaccgcgccgcacctctggtccgtgccgacgttgcctcgcgaatcccaagccgcctcttctcgccctgcgcgccgacgccatcacacccttcgtctggcacgcgaccccgcctactgcgcgccgcccgcgccgtctccttcacgcagcaggtcgcgccgcccctgcctggccctcacgccttgaacgcccgagccgtccctgctcagtcctcagtcgaaatcgccttgagccgttgaccttcattgacgcctctccgccgtggtcaatccccgccccgccaccgtcctcattcgccatcgcctccaaggtttgatctttttcctcggtcgtagtttaccttcctccatgttaatgttgtgtagcaggttcagctgaattgtttttgcttccttcttactggaccatagtgtcctgtgcagaacatttcgctgatgtatatagagcaaaccattcaaaatctgccttgtgtatgctgagttttgtgaatcttgtagatggtatttttgatattaagctgccaacgatccttgagtaacaagttcaagaaaactatatagtttctaagtaacttccttatctgttccaaaatactgtactatattttcatgctccaaacgactcaagagagttatctcttcgatttcagtgacaaaaagcagttggaacatttaacagcaggagccccaaaaggatacatcaacaatgt

SEQ ID NO: 46865 - DNA, 951 bp, Setaria italica
  Peptide Sequence Number=SeqID_112839
gggtttggatcaggctgcggttgggaggcgggcgcaggccaaggtgcggcggcgcaggatgggaagcgaggagaaccaaccagatgagggccttttcatcgaacggtgggaatgtaattaaccgcggggacaaaagtgagcggatggtaagacgtacgaagatttgttgccgtttcacttttttaggagtactaggatcgtatccgtgcgttgctacggggctacatttaataataaaataataatagtttgaaaataaacacaaacattcactcaaagttagttacctatctacattgagtcgaagtttgttacccatctatatcatctgcgataccatctgcatgtaaaattaaaatcgcttaagtacattcattgcggtcatcttctttccagtaccctgccaaaaaaatctggatctagcagtatccatttgttgataacccccttcataaaagcatatacacacccgtggtgatagggacgcaagaatacttgtttgaatcatgaaggcaaaacaaaggaacaacagatgaaggcaaatcggcagagagaaagaaagatgaattagaaattagaatctaaggtgcaaatttaccatcaatggtagataaataagttgagcgagacctcagaaacttaagcaagcatataagtagtgatctcaccattacagtgacatgcaccttattttttttttatcaaaatatattaggacaaaaaagcacattgagcaggcaaactatgtgataagtggtagttcacttacttcgatttcagtgacaaaaagacagttggaacatttaacagcaggagccccaaaaggatacatcaacaatgtatcacacggtccacaatacaacttaccaacttgatgtgctggcaaggaagggaaaaaaaggtaacaacaatatttgaatgataagaaagcgcatagataactttaacgtg

SEQ ID NO: 46866 - DNA, 839 bp, Setaria italica
  Peptide Sequence Number=SeqID_112840
tgcatcaactaggatattggcacatttgatatctctgtgcagaacattccgctgatgtagatagagcaaaccattcaaaatctgccttgtgtatgctgagacttgtgaatcttgtagatggtatttttgatataaagctgccaacgatccttgagtaacaagttcaagaaaaatatatagtttcccaccttccttatctgttccaaaatactgtactatattttcatgctccaaacgactcaagagagttatctcctgaaacagtggaaaaataattgactattatcagtgtaactcaagagtggtgtagctagcagggtggccgggtgggccttggctcaccctaagttttgcagctgcccaaggtatacaaataagaattgttcatctataaatccaacatgcatgtaactttcagacatatattatcaggcgtttttatgaattctatacttgtattgtatgatatatatgttgcaatgaaaatttatgtcaagttggaccaccctaacccaaaatccgccactgattctcaagcgcataatccatatagaatgctaagaattctatattaatagaatgctaagcattggaccaaaatccaactgcaactgcaacttggatgatcagatttttcactttgaaatgctggtcacgacctatctttccaaacttcatttctgttctctgagaaagctaaccagtttgtattattgagacaatcataagcttggttggatctacttttacactatatagaagtactcttaacacaatttgagcactggaccagttcgtcgacctcgagcaagcaaggtactccgatcacagcttattct

SEQ ID NO: 46867 - DNA, 1057 bp, Setaria italica
  Peptide Sequence Number=SeqID_112841
accaaggaccgcagaacactttggaaccttcaacgcacattagtgagaagggctctcactgagtacaggaaacgtatcatctgaaagcaccataccggcacccgtcttatgtcttaccccgctccagatgcagtcgagtgtaaacagttcatcttccctatggacaagctaagcagtatgaccgcaggatgtgatcttttcatttcacagttaattctggagatactatctaggatttccctttcgtccacccacgctacaggctgcatctgaagctatccacagtgccatttgtggttacactgccaaagacttgcaagtttcccatgggccatggcggcatctgaagcttctggcattacagggagcatccaggctacatgactgaacatggttaagcctgactagctctggtgagctacttcttgtgggtgaggtgacacactctgttccgttgatatccgaggacgaacattgcgctctccgatttcagtgacaaaaagacagttggaacatttaacagcaggagccccaaaaggatacatcaacaatgtatcacactccccacaatacaccttaccaacttgatgttcttccaatacaaggtttattgtccaacaaccaaaacactgaacatgaacagcacccttgggatatgcaagaagctgacgacaacatccacataccatttgacccatttcaaacttcatgctaagaggcggtggcagtggtagctgttccgaggagtccagattttcataacctgggggtgcaacctctggcgaacaattagtattcttcacaggagggagaagatggatgctgctctggctgtggcagtgacctctcttcgctcttcaatggcgactgctgccgggttgcactttccatgtctgcatctgtagcctgcaatggagataacggcagattcgttttgtttgacttcacaatcgcaggcatagtagctgatgaatgtgcggagggatctattgtctcagctagacaaggagaggtctgttgaaaggactccgaattctcaaaacttgtaggagctatc

SEQ ID NO: 46868 - DNA, 418 bp, Setaria italica
  Peptide Sequence Number=SeqID_112842
cacatgggagcgttcagctcagtagcaattttgacttcagcctgtcaatttaaaatccaaaatggaatatcctcatccaatgagtgttgaggacgttaagtactcaagtttgttctgggcgcagctaattgcttcttgcaatttacatcaacaaaacctgctacactcatataatatataagaaatacaggatgcacagaaagacgaagaagggggagaagatgcacataccatgcatggcctggccgaggccaagagtatcaaagacatgaacgccaaggcaaaagttctcatttccaatattcaaaagttgagaaattaaatgaaaagaatatccatgttataaacaatggacctctttgatgcatggggaatagaaatttgttaagaaacaaaagtttcaactgggaataacaaa

SEQ ID NO: 46869 - DNA, 624 bp, Setaria italica
  Peptide Sequence Number=SeqID_112843
gcagtattattgaaaacatcctggtggatttgatgttgttcttggagctgatatttgcttccagcagtctagcatttcctccctcttcgataccgtagagaggattattcgtactcaagctggtaactgcagattcatattggcttatgtatcacgagctaaagtcatggacgggctagtattcaaggaagccgaaaagcatggaatgtgtgttagggaagtggatggaacaagaacaaccatctcaaatcttgaaggggtcatatttgacattaccctgaaatgacaccctgcccttcgactctccattgtcgaaatgcttgagtggtcattagtcatgaagatccgtagaagttccttgtagcaggaaaatcaaagttcggcgtgtatgatgagctggagatgtggcagttgcatctctgcagaagataaagcagtaccatgtcgttacagcaccatcattatagatgatgggcttcaacgcatacgctgatttggctatctaccagtgagatgaccacactctggaagttcttgtgacaaaagagttgctgaaagcagtgccatcatatatgagtttcaggtgctggtctgaattctgaaaaagctctggatcaccatgag

SEQ ID NO: 46870 - DNA, 310 bp, Setaria italica
  Peptide Sequence Number=SeqID_112844
tgcggttgcaagctgaccagttaagccacttgatcccaagcaaatgattgagcacatttaacacaggcagcaacagaagctgcttactgagaacgatgctacatatttgtgtgctacctctgtgtccaaaaaagatcactaaatcgagacacattaaagcaagcatgtggttgatccacctcgtaggcattaggacccatgtatacttaatgaatgcaacacgtcagctgccaatcaagcacaccagctattccaagaccatgatagaactatagcaacagggacatagaaaagacatgagttgctttcg

SEQ ID NO: 46871 - DNA, 398 bp, Setaria italica
  Peptide Sequence Number=SeqID_112845
ctctgattaattacactacaatatcctagcttaatggctagaacggagtagtaataagaaacagttcttgaagcgagtcgtcaagcgactgatcaccagccaaactacaaataaagcacctatggcttaccaaaacctagttagcgatgagaacaagtgtatgtgatcatggatcatccagcaactgaaaactagtaactatatcatgggctcggcatcagcaggtagaggccaggtcacagccggatcacggatccagggctcgccggtccgcgcaccggcacttccagttgaggggcttgtagtcggtgtagctctcctggaccctgtcgccaccggcggcggcggccctgctgaacaggcgggcgcggccgggctcggcctcgcccctgccgccg

SEQ ID NO: 46872 - DNA, 598 bp, Setaria italica
  Peptide Sequence Number=SeqID_112846
aagagggacgacgcggcatcttcggccggtacccggtacccgggttaccggtaacggtaccgtaaccgggttacggtaaccggtaaccgtaaacgggttacggtacccgggtaccggtccgacagacgacggtgcggagggcgccaacggagagaaaggctacatgagctcgccggtcacagacgccttcgaggcggtcgtgccgagcgagtcgaggaataacaacgacggcccggtcgtcaaggagggcaacaagactagtgatgaggaggaagcgaggagcaatgccgttgccgatggtgacgatggcaagaaggggagcccggaggttgagttgctgagggcgaagcttatggccaaggacatggaggtctacgagctgagggcgaggctgatggtgatagacacggaggtcgacgatctgaagaggaaggtgatgtccaagggcacggagcttgaggagatgaaggcgaagctgatgctgaacgatgagctggtcgacaagctcacagcaaaacctgatggtcaaggacgcggagatcgccgccctcgaggccgacaacgccgacctcacaaaggtggccgaggacggccgccg

SEQ ID NO: 46873 - DNA, 754 bp, Setaria italica
  misc_feature (704)..(754): n is a, c, g, or t
  Peptide Sequence Number=SeqID_112847
ccttcgcctaccggccaaccgtgctcctctccacagccacagccgcgccgccttctccgtccgagctcctcttctccgccgattcgtgcgcgtccagctctggtgggtagtggtagcggccggcgacgaggtgccagtgtatttgcaaacagtgaccaaaaagttgtgctttgctctgccgtggagtcatggcagcaaagatacgtgtcgtgatgaagtcttttacgagccaaagcaacaaagtctcagggcttttgccatacacaaagaaggttggattgcctgaatcccgagccttatttactgtgttgcggtcacctcatattgacaagaagtccagggagcaattttccatgcatatcaagaaacagtttgtggaacagaaagctgaaatgcatgagctgcacaagaagttgttctggttaaaacgtctgcgtatacctggggctcagtatgaagtccaaatttctttcaagacacggctggataaggggagcctaaagtccctagcttcttgatggctcctaaatctttcttaccatcccttcagtttgaagtggactgctattatgtgtttcgttgtggagattgtcaagcagaacttgcatccatcaacatttcatatgaagaactgctgtatttgatgaatttccagaaatgcagctgctatttattcagtgcttagaaatcatgaaactgcaacnnnnnnnnnnnnnnnnnnnnnnnnnnnnnnnnnnnnnnnnnnnnnnnnnnn

SEQ ID NO: 46874 - DNA, 572 bp, Setaria italica
  Peptide Sequence Number=SeqID_112848
aggtcgttggtgacgccggtggcggtctcgttgtggacggattgggtcggtatttgggtccttttggtattggttgttgggtccgtgtcctgcggagcttggcctcgaggacgtcgaggtccggcgccccggcccccagtcgctctccaccacgtccacgttgaagcccaggcgctgctgctggtcgatccatagcaggctgaactggccgatcaggaacgacacgatgcggtcacccggtgacagcgtgttcgtcagcgcactctcccacgcgcccgtcccggtggtcgggatgatgaagggggtgccggtggtggtcttgaagatcttttttacgtcctcgaggaggatcttggtgaggacgggcacggccggcgagcggtagtcctcgttctggcggttcatggcgcggatgacggggtccgggatgttcaccgggcccgggacgaacaggtgggtccgcccagggccgtacacgtagtccgccatctttgtttgctgtgctgttctgctgtggcttgctcgcagaccgcagggaggaggaaaaggagccgcgcacgtatgtgaaatac

SEQ ID NO: 46875 - DNA, 1396 bp, Setaria italica
  Peptide Sequence Number=SeqID_112849
gggttcaatatgatttgtgagaactatgtttggaaatacccgagttacacgcagacagttccttaattaaaagctgcagttcacaaagttatactccttagcacagccgagtgtgaaaactaactttacatacacagagagtatagccaatagttactgcacgcggctgctctgccagtgccaggcggcagaggcagacagagctgcccggttccgtttgttctggccgtcgctggccttgctttgccttgtgtgactgtcgtgtcggtgcgcggagctcagatcctggacgggatcagaggcgtggaattcgacaggtacgccgccgcggccgccacgccgctgccgagcttcaccgggtagcccacgtccttgagcaccatctccaccccgctcaggcaccccagcagttgcagctcgttgaggttgccgagatggccaatcctgaacaccttcccggcgaccttgttgaggccgagcccgaggctgaggttgtaccgcttccaggcgtgcttgacgatctcgccgctgtcgatatagggcggcacgacgacggcggtgaccgtgtcgctgaaccactcctccttctgggtgcagttcttgagcccccacgcctccactgccagcctggtggcggtgccgaggcgtttgtgcctcttgaagacgttgtcgagcccttccaagaagaggaggtcgagcgcggcgcgcaggccgtagaggagctggatggagggcgtgtagggccagtaggagccaatcttgtaggacttgaggtagtcgttccagtcgaagaagacgcgcacggacttggccgtcttgctcgcctccagcgccttggggctggcgcacacgatgcccagccccgtcggcatcgacagcgccttctgcgaccccgtcagcgccacgtccacgccccactcgtccatgcggaagtccagcgcgcagatggacgacacgccgtccaccagaatcagcgccgggtgccggtacgtgtcgaggagcttgcggacggtggcgaggtcgttggtgacgccggtggcggtctcgttgtggacgatggcgatggccttgatggtgtgggccgtgtcctggcggagcttggcctcgaggacgtcgaggtcggcgccccggccccagtcgctctccaccacgtccacgttgaagcccaggcgctgctgctggtcgatccatagcaggctgaactggccgatcaggaacgacacgatgcggtcacccggtgacagcgtgttcgtcagcgcactctcccacgcgcccgtcccggtggtcgggatgatgaagggggtgccggtggtggtctagttcgtaagtaaagtaacgtacgtactaacggtaactttaggttaccgtttacttttagttactttacgtttactta

SEQ ID NO: 46876 - DNA, 227 bp, Setaria italica
  Peptide Sequence Number=SeqID_112850
caacatgatcaaccaagaccatcagtccaacggttcatagagattttgagcttgtgacctggatggtctttttgtttgctcagaagtttaaacaggccgttacaaataatacacagtttgtttcaaattttcaacgatctaattcagtgagtatacagcacactctggaaacgcagaaggggatttactagaatcaggtgaactaacattcgcagtttattaattca

SEQ ID NO: 46877 - DNA, 487 bp, Setaria italica
  Peptide Sequence Number=SeqID_112851
ccaccctggtcacaccatacagcgtggtccgtccactacacaggcagtcagggggttgtgccctatgagtgcccaacgcacgttcttgcttttccgcacagttccgactgctttgtggcttgtccatctctcttaacgattgctaatgtactcgagtagcacacgccttaatccgtgaagcctggccctcatgcatcgcttcctgctaagcatgctcaagcccgctctcggcaacaccccggcagggtcaggtgcttaaacgtaacgggctaactactcgaggaaattacatggcctacaagagcaaaacgcacaagaacttacttttacgcagaataaaaccctaagttattcaattattaaatgttctacattatgcaacataatctttgtattgtccttttacagctccgaaactactcggcgtgcctcttgcaacccagccaacctccgaggtttggggctgggtgcaggaggtgacttggca

SEQ ID NO: 46878 - DNA, 1884 bp, Setaria italica
  misc_feature (1855)..(1884): n is a, c, g, or t
  Peptide Sequence Number=SeqID_112852
cgtacggcccggggcgccgcgccagcgtgcgccggcgcggccgcctctcggtggtggccgtgcagacgggcccgcagaagccgtccccgtcgtcgtcccgggccgccgcggcggaggacgaggcggacgcgctgcagaagctgctgaagcgggagtacaagtacgggttcgtctccgacttcgagtccttctccatccccaagggcctctcggaggccaccgtccgccgcatctccgagctcaaggcggagcccgcgtggatgctcgacttccgcctcgccgcctaccgccgattcctcaccatggtcgagcccacctggagcgacaacgagtacgcgcccgtcgacctgcaatccctctgctactactccgcgcccaagaccaagcccaagctcaacagcctcgacgaggtcgacccggagctgctcaagaccttcgaccgcctcggcatcccgctcaccgagcagaagcgcctcaccaacgtcgccgtcgacgccgtcatcgactccacctccatcgctaccacccaccgcgaggcgctcatggccaagggcgtcatcttctgctccatctcagaggccatccgcgagtaccccgacctggttaaacgctacctcggcagcatcgttccccccggcgacaactactatgccgccctcaattctgcggtgttcagcgacgggtccttctgctacgtgcccaaggacacggtctgccccatggaaatctcgacctacttcaggatcaacgacaaggagaccgggcagtttgagaggactctgatcgtagccgatgagaggagcacagttagctatttggaaggctgtactgcaccggcatatgactcaaatcagctccatgctgcagttgtggagcttgtgtgtgaggagggggcagagattaagtactccacggtgcagaattggtactctggtgatgaggaggggaaaggaggcatttataattttgtgacgaagaggggacggtgcaaggggcggggttcgaagatctcatggacacaggttgagacgggttccgctatcacatggaagtacccaagtgtggagcttgttggggatgacactgttggcgagttctactctgttgcgcttacaaaggattgccaacaagcagacacagggacgaaaatgatccataagggtaagaattcacgcagccggattatatccaagggcatctctgcagggaaatcaagaaattgctaccgtggcctggtccagatgaacgctggtgcagagaatgcttataattcttcacagtgtgattcattgctgattggtgataatgctgctgcaaatacctatcccaccattcaggttggttgcactagtggccgtgttgagcatgaggcaagcacttccaaaatcggagaggaccagctgttttatttccagcaaagaggggtagatcacgaaaaggctgttgctgccatgattggtggattctgccgagctgtttttgagcatcttccctacgagttcgcgcaggaggtggacgcactcatgaacctgaaactcgagggatcggttggctaatttgtcggctcagcgtgactctgtgtgtaataccgcatcataaccaagttacctagaaaaatccgtgtgtacagcagtacgagaagaataaattgcatgataaaccgacatctcctagcttgttgtaatactgaatcagaatgttggcggtgcccacggcagcgaagatagcagttatgcctgcttctcttctgtctgcccatttttgctgctgtaaacgagctcttgttggctggcctatacaagaaatggaaattttcgtgttcgcgtaatgcaaaatatcttctgttacgtaaccnnnnnnnnnnnnnnnnnnnnnnnnnnnnnn

SEQ ID NO: 46879 - DNA, 595 bp, Setaria italica
  Peptide Sequence Number=SeqID_112853
gtccggcgctggcaccgcgcgttccagcggcggccggcgcgctgctgctgctaggggcgccgcaggtagcttcggcggcggcgggagctcggcgagcgagtcgtccatgatacgggacacccactccagctcctctgcgtcatgcgctggcagcgagaggtctatcactggcggcggcagcgccatgagctcgtacgacaccaccgacgacccgtgcgagtcactggacagcttgtcctcctccacggccgccggcgccggcgtcgcctcgcccagctcggcgcagtccttgtccacctcgcagaggtcctcgaggtccagcaggtcctcgacggagaacccgtccccaaaaaggcccgcgcccctgtcggcggccccacacgccgccggcgcgacgtccacctcctccgccgcctcgcacggcctgaggctactcctcagcgcggccatcctcccctccctctccaccagggagccgtggtggtgcgcgacgaacgacgccatggcgggagcggctgcagcagcagaaggggagcaggaggaggaagacggggaggagcgggtgaaaaggagaggcgtggaggcgtggagggag

SEQ ID NO: 46880 - DNA, 484 bp, Setaria italica
  Peptide Sequence Number=SeqID_112854
ggctgttgaaagatgtatagaatgttccaagcattaataataaaacaaattatcatctaataagaatgactaactgcagaacacattgtaattgcaatgagacgaaatgagatctaatctcagacccaaaattcaatagacataaacaagtgaccaggctaagaatacaaaatcattttagtgctaaaccaaaattttggtagaccatctacaacaggtcaacagcaggtagtcacactggttatgtatgacctaaacaaaacagaaggcaccactgatgaactcaggactatactaacagaaggaaatgtccttggctcatagaaataaactaaccgagaaagaccaaacgcatttatcaagtggttcagtaacaatgaagcttttttcccttgaaaaggcctccctgcttaattctgaaaaaagacaataagtgaatctttaggcaaagaaaacgtatttgcagtccacctaacaatatcga

SEQ ID NO: 46881 - DNA, 433 bp, Setaria italica
  Peptide Sequence Number=SeqID_112855
accacatcatccccggcggcggcgtcccgccgggctccgtcgccggtgacgacgacggcggacaccgcgaggagttgttcgtccccgtgctcatagcggctcacctcgtgtccggtgcccctatcatctttctcttctgcctcgagctgataatcaacatccgaggcgacggcgacgaggcgtactccggcgacgctgccgtcccggtgaagtccgagctcgccgacctcgtccatgccgacgccgtgaagctgccccgcggtgatatctgagcgccgtgctgctgcttaattgtttctagtaattctggtgttgattgcattgttagtttgcatgctcgtcgtcgtgtgctctctcgttatcgcccatgccttctcatcgtacgagctcgtaagtgtagtggtgcctgcgcacactacatatcttttcaaac

SEQ ID NO: 46882 - DNA, 318 bp, Setaria italica
  Peptide Sequence Number=SeqID_112856
cgctcacaacacaaagctagcacgcgcaaacaaccgtcatggcctccaagatcttgtacgtcgccgtcgtcgcggccgtcgccgtgtcctccttcgccggcgtcgccttcgccgccgacgccccagcgccgagccccacctccggcgcggcggccgtctcctcgtcgctcgtggccgccgtcctctgcccggccgtggcgctcctcctcggcaacctgcgccactgagcctgcgcagtggagccgagctcgcggcggatcgtcgtagatgaaagctgcttgccgaaaacatgcttgacatgcgtcgcgtgatatcttt

SEQ ID NO: 46883 - DNA, 1350 bp, Setaria italica
  Peptide Sequence Number=SeqID_112857
ccaagtcagacattcgcgccaccaccaagatgacccacgttccaggccgcttctgtcaacgaagccacgtatgaccttcgttgacagaactggccggtgcacggattcaatgaacggcccatccatcagccacattgttggacgctgacgaccggactagctagcaactagcatcatggaagaattcaactcacaatctcaatcaccggacgaactgcttcgtgccaatgtcacctgcgctgcgtagcttgtcaaaacacgcgcatggtattccgcgtattggcagcccataaatgacagcttcccagacacgagctgacacggaaaaccaatcgggctgcgccctaggggctctcctgcagagtcaccaggacaccaggtgcgacctccatcaggtgtaaagagattcattccataaatgtctggcgagggtacatccgtttactgttccatatgactgccaagctgttcagatttatcaacacctgcacgcatccttttgctgatgttaggttttatcttccaaagataactcatggttgctcttcgtatcatgatgtttgagttttttctcaaaaatctttcctcgattcctttcttgtcccagattgccagacaccaccaaaattaggtagccaactagaatcagatgtttctggaacaatttcacctcgcttctccatttccatttcagctcttcttctttctgcccatgcagcaccaacccgctttgggttgagtttcctcaattttccttttaaaggaggaccacagcttctgagtaagaaattctttggatcatgctcgtttgcttttaaccagggaggaggagcacccgtatgcacatttgcttttgggccactgctcagatttcctcctgagtgactttgttgaacatgtgcagcataagaaatcgatgggcttggtccatttccaaggatagtagattgatgacctttcatttcaggacccgtactgtggaaacagtttgtagacagcacaccctgctgctcgtgtgtttcggacgatccccaagctgtgatgggcagcccaacagttccatatggagcggaataagaaacacttccagagctgaaagctccatgacacgctgcactaatagggtgatatgccccattgctttcatcggccccagagaaggtccaatcagcccttcagtccccgtctttgctcctttgctcaaggattcacagcttttctcccacttagcaacctcatcctctgaaatcctaagcgaatccacctgatccatccctcccccgtgcttccgcaggaaatccttcacagccttcaggtgctcaccacttgccagatggtaaatggcattgc

SEQ ID NO: 46884 - DNA, 437 bp, Setaria italica
  Peptide Sequence Number=SeqID_112858
agtacagctcattctggtatgcaaagaagttatgccttcagatggtttgttttgttgcttgagggatgtataagctaaatttcccatatagtatgtataagtcacatgttatgttttcacttgaatagacatacctttaaatgtcttgctttataccaagtgttgattttccttgcaatgtcttgggagaccacatatcctggtccatgagcccaaggtgggtatttctcttcaggccattcctgcaaaacacatcagaaatgttggcatttacatttacatcagaagtgtttctgttacaacggcagtatgtttcatcaaatcaacctgcataaatgccctagggcaactaaattatttcactgagtctgaacttaacattgaaatggattacaataattgttttattttacttttcagtactaagggtaaggtaa

SEQ ID NO: 46885 - DNA, 442 bp, Setaria italica
  Peptide Sequence Number=SeqID_112859
agaataaaaggaaaatagggggaaattgaatgagaaggcattcaaggctgcttgtctcgcaaagttacctcctgaagaagttggcacagcatctcatgagttatactcatcatggcagcagcaacttggtgatctgagctggtatcctttcaagactgtcacagttgatggcaatcagcaggagattgtgaacgttgatgacgaaaagttgcaagagctgaagagggcatggggctctggtgcccataatgctgtggttaacgcactggtggagatgaaagggtatggtcgtctgagcgacagaagcattgcctatgagctatggaactacaaggaggggaggagggctaccgacaacggagtgtgtcagctacatgtccaatcaggtgaagcagctttcggttacgaagcgcaggaagattcgcaggtcgagcggcagggc

SEQ ID NO: 46886 - DNA, 337 bp, Setaria italica
  Peptide Sequence Number=SeqID_112860
ggagtattctgaaacaagtcatgccacaagacaaagatcagatttctcggaaaaaacaagacggagatcgtcaggaggcagtgcaaagcacaggggagggaagcttggagaagaagcacctagcagcacacgttatgaacacattaaagcgagctgtgccattcgtcggagggcacaaacagcaaggcattgatgggagctctgatgaaaagcagatgaagattgaaacaatgtacggtgatgaactcgtcaacgaagtgaaagggcacctcaacgaaaagaggtacatttaaaagattgtttcttgtttattgattactagatctgttcactggtt

SEQ ID NO: 46887 - DNA, 577 bp, Setaria italica
  Peptide Sequence Number=SeqID_112861
taaagttgtaggtacgtactattagtttactaagttactattcctacgcaagagaaaaataaggagggaatgaaagcactccgtgtactgtcagggattgagattgttggggaatcaacagctgtcgatggccttcatcagatgatagggctaaaaaagcttgccatttacaagctcaatataaagaaagatggtaaaatcttcacacaactactttccgctattacgtaccttttcagctgtggtctgcaaactctggcaatcaatgatgaaggttctgattttatcaactcactggactccatgtccgcacctccaaggtacctcatcgacccttagaaactagtactaggacaaagttggaaaagcccccaatgtggatatccggactctacaccctctgcaagttaacgctgtctctgacagttctccggactgatacattcaagctcctccaggtcaggcgggcccacttggaaggctcaaacgaaaaccaatcggtcttcccttcccggcctccgttccctcctcttggccgccggcccaccgcccttatctccggcgcccctaactccgg

SEQ ID NO: 46888 - DNA, 1342 bp, Setaria italica
  Peptide Sequence Number=SeqID_112862
aaccccaccttcgtcctgcgcggctgcatgcgccgcgagctgttcccccttgtacctcgacgcttgccgtccgcccccctcggtttccagctacgggggctttcgtcaagcagaatttgaagttgtcaaccgatccacatagtctccaagatcttcaaccgagggaagtctttgcttctgaacctgctgtgaacaccgtatatagaacaaacaagatggagttggttgtgggtgcttcagaagccaccatgaagtctttgcttggcaagctgggtggccttctcgcccaggagtatgctctggtcaggggcgtccgtggtgacgtccagtacatatacaacgagctggccaccatgcaggccttcctccgcgacctcagctctgccccggaggagcagggccatcggatgaaggactggatgaagcagatccgtgacatggcctacgactgcgaggactgcatagatgactatgcccaccgcctccctaacgactccatcactgatgtcagatgtgccttcatagtcagaaccatatatgaagtctggacatggtggcctcgccgtgaaattgcttccaacattgctgacctcaagatccgggcacaacagattgccgaacgacgcggcagatatggagttgacaacccaagcaactgcaatggcaacagttccagagcccgtgccgctacgtatgacattgcggagcatcaggtcgccagccgtcagctcatcggtatgaaggagcctgtgggtgtgacggctgacatggagaagcttgaggagtgggtagacaaacctgataaggagcatggtgttctgtccataatcggattcggcggtgtggggaagaccaccattgccatagcattttaccggaaagtcagtaataaatttgactgccgtgcttgggttaatgtgtcccagaactacgacaaagaggcagtcctaaggagtattctgaaacaagtcatgccacaagacaaagatcagatttctcggaaaaaaaatttccaagacggagatcaggaggcagtccaaagcacaggggagggaagctcggagaagaagcacacattaaagctgccattcgtcagagggcacaagcagcaaggcaatgatgggagctctgatgaaaagcagatgaagattgaaacaatgtccggtgatgtactcgtcaacgaagtgaaaaggcacctgaaggaaaagaggtacctgctcttaattgatgacatatggtctgcaaaaacatgggtggatatcagaaattgtttgcctgtagagaacaaaaaacgcagtagaataatagtgacttcaagatttcaagctgttggcgcagcgtg

SEQ ID NO: 46889 - DNA, 603 bp, Setaria italica
  Peptide Sequence Number=SeqID_112863
cgagaagaataagttagattctgatggggagatcattgttccagcaggattctcgagtcttaagctgctacgcttctttgcaccccttgtgccaaagctgggatttggtgacaatgcaatgccagcattagagatgattcaggtacggtttgaagcctttgaaggtttatttggcatcgacacattagaaaacctccgggaggtgcacctcagagttaatggcctagcggcggaattaaaagaaagtgatgaagtaggaacacatgaaacagaaacccctgaaataataaaagaaaaagaaaggaaggaagccgctgaaatcactaggttcttggtcgaagatttgaagaactacactactgataagctgaaggtaatcgttgattatatcatcaatgcttgaaattgcaaaataatttggtggttgtttgctaaataaatagggatggcttgcatatccatctcccatggcactgtgtaattttatttcattgtcaattgattagtgtttcgttctgtcatgtatggctggagctgctatagcagatacaccgttgcagtgtttgttggggttgtaataaaaggggatatcccaaaggagta

SEQ ID NO: 46890 - DNA, 824 bp, Setaria italica
  misc_feature (719)..(719): n is a, c, g, or t
  Peptide Sequence Number=SeqID_112864
aagaaaataaaaattatttaaggaaagggaaggtatgaaggaacacaagagacagaagccgctgaaatcaccaacttcttggtcgaaaatttgaagaactacactactgataagctgaaggtaatcgtggactataccatcaatgcttgaaattgcaaaataatttggttgttgtttgctaaataaatagggacggcaggtatatccatcccatggcactgtgtatttttatttcattgtcaatttattagtgtttcgttctgtcatgtatggctggagctgctacagcaggtacaccgttccagtgtttgttggggttgtaataaaaggggatatcccaaaggaactattgtaatctttatgttgtgttgtacactatttcctattgctactattgcttggcttggcttggctattataagtaagtaaatgaagtagtagctgtatgactgcataattgaacactggagcgtccattacgccgccccttgtacaaggatagcaacattgccagtttggcagtttaaataatttgtgtgaataaagtctcaaactggtgtatgtagctgtgtacatgagttaattattacgtgccagccattataaatccttttattgccctttgaaaaaattggttgcgcaccttacttttttactaccctgttccattttcgtcacttccgttactgtaacttgccgttagaactcagattttttangaaaaatgccaaagtacccctcttacaggcgggcccacttggaaggctcaacgaaaaccatcggtcttcccttccggcctccgttccctcctcttggccgcccgg

SEQ ID NO: 46891 - DNA, 2700 bp, Setaria italica
  Peptide Sequence Number=SeqID_112865
ttatttgttaaggttaacttacttaagttaggttacttagttaagttgtcagagggcacaagcagcaaggcaatgatgggagctctgatgaaaaccagatgaagattgaaacaatgtccggtgatgtactcgtcaacgaagtgaaaaggcacctgaaggaaaagaggtacctgctcttaattgatgacatatggtctgcaaaaacatgggtggatatcagaaattgtttgcctgtagagaacaaaaaacgcagtagaataatagtgacttcaagatttcaagctgttggcgcagcgtgctcaccagttggcgcaactaatcgtctgcatccagttgatattctcgatgctgctgagtccaagaatttgttcaaccaaagtgtccatgaatccaaaagcagcaaagaaagcgaaaaggtacaggacaaagtcctagaggagatattgaaaatatgtggacggctgccattggccatagtcagcatggctggtcttgtagcctgcaacccaagcaagaccagtgatcactgggataaagtttgcaaatcattgtttccagagagtgtgactactctctccttggatggggttacaaggatactcgatttctgttacaatgatttgccaggagatctcaagacatgtgcactgtacttgagcatgtttccaaaaggttccaaaattagtatgaagcgcttgactcggcgattgacagctgaaggttttgttagtgagaagcaagggctcacggaggaggaagttgcagagacatactttaatcagctcatgagaaggaagttaatacgtcctgtggagcacaacagcaatggaaaagtaaaaacatttctagttcatgacatggttcttgaatacatcgtttccaagtcaagtgaagagaactttattactgtggttggcggccactggatgatgccaccacccagcaacaaagtacgtcgactctctatgcaaagcagtggttccaagcatgaaaatatgacaaaaaacataaacttgtctcaagtgcggtcagtgactgtttttggaagcctgaagcaattgcctttccattcattcaataatggaataatacaagtgctagatcttgagggttggaagggtttgaaagagaaacatctgaagaatcatatatgcaaaatgcttatgttgaagtatctaagcctccgaagaacagagattgcaaaaatccccaagaagattgcgaaattggagtatcttgaaactcttgacataagggagacacatgttgaggagctaccaaaatctgtagagaagctaaaacggatcagtagcatacttggtggcaataaaaacccacggaagggcttgaggttgcctcaagaaaaaattaaggaaccaaaggaaagtacatcggctcaggaaaaaagtgaggacgacatagttacaagtacatccacgcaagagaaaaataaggagggaatgaaagcactccgtgtactgtcagggattgagattgttggggaatcaacagctgtcgatggccttcatcagatgatagggctaaaaaagcttgccatttacaagctcaatataaagaaagatggtaaaatcttcacacaactactttccgctattacgtaccttttcagctgtggtctgcaaactctggcaatcaatgatgaaggttctgattttatcaactcactggactccatgtccgcacctccaaggtacctcatcgcccttgaactgtctggcaagttggaaaggcccccaatgtggatatccggactctacaccctctgcaagttaacgctgtctctgacagttctccggactgatacattcaagctcctccaggtcctgccaacactgttttctctcacattttcacttagtgcagcaaagcagaatcaggacataataaaggacatcctcgagaagaataaatcagattctgatggggagatcgttgttccagcaggattcccgagtcttaagctgctacgcttctttgcaccccttgtgccaaagctgggatttcgtgacaatgcaatgccagaattagagatgattcagctacggtttgaaacctttgaaggtttatttggcatcgacacattagaaaacctccgggaggtgcacctcagagttaatggcgtagcagcagaaataaaattattaggaaggtatgaaggaacacaagagacagaagccgctgaaatcaccaacttcttggtcgaaaatttgaagaactacactactgataagctgaaggtaatcgtggactataccatcaatgcttgaaattgcaaaataatttggttgttgtttgctaaataaatagggacggcaggtatatccatcccatggcactgtgtatttttatttcattgtcaatttattagtgtttcgttctgtcatgtatggctggagctgctacagcaggtacaccgttccagtgtttgttggggttgtaataaaaggggatatcccaaaggaactattgtaatctttatgttgtgttgtacactatttcctattgctactattgaactcaggtaggactagtagaaaataattaaaaattaagtagtttacgttactagtacaatagtaataccttggcttggcttggctattataagtaagtaaatgaagtagtagctgtatgactgcataattgaacactggagcgtccattacgccgccccttgta

SEQ ID NO: 46892 - DNA, 428 bp, Setaria italica
  misc_feature (382)..(382): n is a, c, g, or t
  misc_feature (390)..(390): n is a, c, g, or t
  Peptide Sequence Number=SeqID_112866
atcgcgtcggccgtggcggtggcgctgggcgcggcggctctgctcgcctagatcccggatgccggatgctctgtccctgaccacagggattgctgctgctgttgctgctattcattccgttccgccccactggccgtgccaccctttttcccgcttttcctttttgtgtattttgtgaaagggggtgctgggccgctgggtggctgtgcctttcttgtgtgtagtagcctagtagggcctcagatcgcattgattcacttgtgcggatgcattcttttgtgctttaggtcagagaagatgatggtagaggggacactgcctgtgtaatgttcagatttatttatatctacatatcattgctattgcttcaattaaaaaaaanaaaaaaanaaaaaaaaactaaaagaagaactagaccaaggacacac

SEQ ID NO: 46893 - DNA, 501 bp, Setaria italica
  Peptide Sequence Number=SeqID_112867
ctctctctggttttcgtctcgtcttcctctcttccccaccgagtcgccgtcccctcgctttcaccccacgcggaagcaagaattcatcgtcaaaatctcaccttgcgcgtgtttctgtggatttttttttgccgcttcgttgctgctatgggcctctgatccggggcttcgtggatcttgctgagaggaggtggggcggccggccggcggcgatctggcggggaggagatggccggcgggaaggagccgatcgaggtcaggttccggctcttcgacggcacggacatcgggcccaccaagtacgacccctcgaccacagtctccgcgctcaaggagttcatcctcgctcggtggccgcaaggtgaggcctattgatttggtagcgtacacggcctattgatttggtagcgtacacgcgtgagccgccccgatctgctgtcaagataaggatgcttttgtaattttaggtgcagaagtattcgccgtgtcatgagtttcttt

SEQ ID NO: 46894 - DNA, 442 bp, Setaria italica
  Peptide Sequence Number=SeqID_112868
gagaattggaaaagccagggcttgtttgttttagctttagaattgtggatgctggttccaaaaggcaaacctcatacaaaggggttgttaccttgtaaaagtgattcttagaacctaactcctctctagagcacagtccataattgtagccagattttatgaatccaaagcttaaacaaacatgccccatccaactgaagaaagcttgcttgtttgatacgtaaaaagtggcacataatttactacatcaaataagctgtgcaaataaacaaagaagcctaaaactccagtaatgcttctttcagcagttacctgttttccagttgaattgtacagaaggtaatactctatcagaaatacagggtcctgaagctgctgtgacatctgctcaggtgaatgtatgccgaaattgtattacatatttgaaattgatgaagtttaa

SEQ ID NO: 46895 - DNA, 793 bp, Setaria italica
  Peptide Sequence Number=SeqID_112869
ggtgtatctagaaaactaacatgaataggtatttgggatggacggagtatacgtgtaacagtacgttgctaatctccaggatttagacaaacgatgccatctccgtgcggtcgaagtaagccccggtcacgccgccccgctcggcgagagcgaccgcgacggagacgctggcgccttccgcggccgtcaggttgcccgtgttacagttcatctcggtctcgacgtagcccgggtggacgcagttgacccgcagcccggcgttctccctcgcgaggatcctcgtgtaggcgcacacgagcgccttggacgcctggtacgccgcgtacacccggtcggccggccacccgcggcgccccagctccccgcgcttcaagtcctccacgaacagcgccgacagctcgtccagccgccgcttggtcaacgtgtcgatgccgctcagctcccgccggagctcctcgccgctgaaaaacctgagcagcccaaacgctgacgtgacattgatgatccttccatcggcggaggataggacgagtgggagcagcgcctcggtgacctttttggtgccgtggtagttgattctcaggcactcctctccctgctgagtgctctgcgtggtccgctgcttcagccattctgcaatctcgttctggtccttgcctgaactcattatttccttgacggccgcctcgccaacctccatcgtgacccccatggttcctgcgttgttgaccaatacgtcgagcttgccgaacttgttcctgacgaaatcagccaggcgagcggcgctggcggg

SEQ ID NO: 46896 - DNA, 391 bp, Setaria italica
  Peptide Sequence Number=SeqID_112870
ggaggaggaactgctgcttcctaagctgcagatcattgcagctcccctgccgccacctcagccagaggagaacctgggcgagtgtcagctgaaccgtgcgctggtgttcgacgactcccctgagaagtccagcgcgtccaatgggtcggccgtcttgttccaggagagcagtactggcagctgcaatggcaagtcgtcatcacctgaggacgacagctcctcggcctggtccattcaggtccatgccagctccgagaagggcgacgaagaagagcttggcgtggaggacctaggagagtacactgaagaagaggaggagtgggaagaagacagcgacgacgaagactgcttcgatgacctgtgcgaggagatgagcaggatgaccgtggtc

SEQ ID NO: 46897 - DNA, 292 bp, Setaria italica
  Peptide Sequence Number=SeqID_112871
tttttttttttctttaccgaaatcattcacatctgcgctctttattaattactgcggcaagcaagtacaaggttacaatgcatcaatacacacaagacacaaaagctgcaggcaagctttgagctacaagaaaggtaacaagaaggcatgcatgcactcataagagcgaagctctgcgaagaaaagaagcaaacctctcacagtaatgccgctgaaaaacaaaaaggaaacacttatctgacatggtcagtcgcctgaggaatagtcaattaagttaaaaaaacacaccaat

SEQ ID NO: 46898 - DNA, 407 bp, Setaria italica
  Peptide Sequence Number=SeqID_112872
tgcgccgctgctacccttaaacaacaaacgccaggcaaagctgcggcgcacgcgtctcctccactctacctccaccccatctcaaaaccctagagcacccgcgcctccatccctacccaaatcccaatccccgacccgatccccggcggcgaggaaccccccgcgccgattcgtccccgcagatcggcggccgggccggattcagattcgggttcgggccgggcgcgcctcgttggggtcccaacaccgcgtgcggtaggggagcatggtgggcggggggaggcggggtggagcggcggacgaggtgaagctcaacaccggcaacgtgttcgcggcgctcgagtccctcaagaagaagaagaagggcgacaagggcaaggcggccgggtcgtcgtcctcctccaagg

SEQ ID NO: 46899 - DNA, 144 bp, Setaria italica
  Peptide Sequence Number=SeqID_112873
gtatagggagcagaggaacttatattcaggtggccccagaattgttagggcaaaaaatagacatggagagccactaaatcaggtcaggcatcaggctcaagatcttccttccagccatgctgttcgtacaaggcagacaggatt

SEQ ID NO: 46900 - DNA, 333 bp, Setaria italica
  Peptide Sequence Number=SeqID_112874
aggtggaaccacctgtcccgcctcctgaacgccgccgccgtggccgcgggcgccgacgcgtgcgggcgcggcgaccgcacggcgaggatagcgtgcagcgtcttatgcaggaactgcggcaccatcagctccgcgcccgcgcggccccctccgcttccgcccgcacccgccgaatccgacaggctcgccattgccgatcccgataccgatccctccccaaccccgtagttgcagcagcagcagcagtagtcaaactcgaccgcgagccgccgccgccgccgctctgcatggcttcataaatctggcccgcgcgggtgaccgggaggcgcgcga

SEQ ID NO: 46901 - DNA, 321 bp, Setaria italica
  Peptide Sequence Number=SeqID_112875
catactctccccgtcgtccccctccgcctcccgcctctcccggtccctcgcctccggctccgcttccgcctcctcatctccggcgacacccgccgctccgccgccccccgtcaagatctacatgtacgacctgccgcccaagttcacgtacggcgtcgtgcgcagctacatggccgcgcgcgcgccctcgggctcggcggacgcagccgcggtgctccccgacgagcagctgcggtacccggggcaccagcactcggcggagtggtggctcttcaaggacctgctccgccgcgggccgcgcgaccgccccgtagcacgcgt

SEQ ID NO: 46902 - DNA, 277 bp, Setaria italica
  Peptide Sequence Number=SeqID_112876
taagaacgaagaacgttacggacagcatcatcaacagcctgccggccaagtgcggcctcccaccagtcagctgccgctagtgatgtccagtagtgcgccaccgttcaccagatgaaggtgaagaccgccgcaagggcaaagagaagaagaagaagaataaaagatcgtctctgatggatggtcatctagagattctagattgagctgctgctatcgggcgcagggctcttgttgacatcaaccgtttttccttctccttctttcttttttttttttt

SEQ ID NO: 46903 - DNA, 403 bp, Setaria italica
  Peptide Sequence Number=SeqID_112877
gggagagcctctcccggctcgccgtcgaggtcgacgacgccgcggccgacgaggtccccgtgccgtcggccccggcggacgcgaggggaggggacctctccgccacgccgccgtcgtcggggaggcgccggcggtactcccgccccggccccagtcctggccccggctccgactcttccgctgagcccgacgagatttctaaactcagggaggatatccaaaagcttcaagcttcggaggccgaaataaaggcattatcattcaattatgctgcaatgcttaaaggaaaaagaggaacaactgggaaaacttcgtgaagaaaatggatctcttaagagaaatttggagagctggtactttcgaaagatcacccagagctcaaaggaattcagttcaggtaaaa

SEQ ID NO: 46904 - DNA, 770 bp, Setaria italica
  Peptide Sequence Number=SeqID_112878
ttttttttttgttggtttcaagaacaccgtatacttgtgttattaaccatcgcgctgtcacagagtagacagtcgtacatgagaggagatctcaattctcaactggtaccaaaacatttcgctattaccatcacagtgtcccatactgtgtcacggtcaccctgcctcgcgtagcctccattcatctgcagtgctcgcgctcgtagctatctgactcccgaggggacagatccctggcgagcttgaattcgtctcgctgtatctggtcgtcttcgagcatatgaaccacatgtgccatggtgggtctctggctgccctccgggtcgacgcaccggagcgcggcaaggatcgcccgcttcagggccttggacggcggcggctccggcagcctggggtccagcacctcctccaccctccgctcggcgaccatgtgcttcagccactccaccaggttcacctcatcggctggtcttgtgtagtccaccggagtccggccggttatgacctccatgaccagcactccgaagctgtaaacgtcgctcctctcggtcagcattccggttttcgcgtactccggtgccacataccccgaacgttcccatgacccgcgtgtttacgtaggatctctcagaacagagaaccttggcgagcccgaaatccgacaccttggcgttccactgctggtcgagaagaatgttgctggatttgatgtcgcggtgaactatcttgggctcagcccttcgtgaaggtggccaacccctttgggcccg

SEQ ID NO: 46905 - DNA, 352 bp, Setaria italica
  Peptide Sequence Number=SeqID_112879
acgaacgaacggaagaaagacccaagttacggtagcgccgtataaatcctaaccaatcgccacccccaaatcccaccaccctctcccccttccaccgctcgcgatctctcctcccagccccgccatggaggtgttctactatctcgtgttcggcgcgctcgccgccgtcgtggcggcgctggagctcggcaagtccggcaaggaccgcgtcgccacctccccagccttcaactccttcaagaacaactacatcctcgtctactccctcatgatgtctggggactggctgcaggggccctacgtgtactacctctacagccagtacggcttcgacaagggcgacatcggcccg

SEQ ID NO: 46906 - DNA, 417 bp, Setaria italica
  Peptide Sequence Number=SeqID_112880
caccttgacctcgtcgaagaagtggatctcgcagaggcaggttgcgatgtgccagaccagaatgatgtgggtgtctaccttgaggttgcatgtccacttgagcttgagcaccttctcattcgatttgaaggcgttcgagaagtagtcatccaacgctagccttttctccttcaaattaacaagcgaattcaacagtgcattcttcgtgtaatccttgaggccggttgttccaagcactacccctcgacggtatactgtcttcatcgtaagtggaggtagggcacctggcttgatcaaaccgaatgtgaccagaaggttctgctgacggaccatctgatgattccacttggctttgctgccgaaacagagcaagagcctcatcacgctctccaccgctggacgccgcaagccctgatg

SEQ ID NO: 46907 - DNA, 406 bp, Setaria italica
  Peptide Sequence Number=SeqID_112881
aaatacaaccttaaatcaccttgattttgccacaacgtctagctagaaagcaaacagttgttccagaattgttccagaaaggtgtccaaaggaaatgccattcatattacacggtcaaaagtatactgaatataagggataagaaaatgaagatttttttttggcaaaatgcaaatcagttgcacacgcaggcttgaggagccacctccctgttcttcttgtgcattgttgccctcaagaagtgaaagtgggcagcaagatggttcaacatatcggcttcacaaactttcagtatctttattcatcatcttcatcttcctcgtctgaatcaaacattctatgaccggtcattggttcaccttcttcttcttcatcaaacctgattagccaatcttttgcacagatc

SEQ ID NO: 46908 - DNA, 1092 bp, Setaria italica
  Peptide Sequence Number=SeqID_112882
tcttgtagttcaagttccaggagaaaacattacacctacactggactgtaacgagacatgaacaatttccataaaaaattcatggagacctactgtgttaccgaaaaatgttatagacatactccaatattccctccggtgtttataccgacaaattacaccttccaccggataccgacaaaaaaatgctctgtcagaccgaaaaaaaaatcaacttattacaccaatgtacagcaatgtaatttccaaagtcctaggagtccaggattttgttatctcacgtctgagcccgggtctttctggatagaaccgaacccatcatagggaacagtgatttcttcctctgcaacttttgatttggaacaatgctctcgtagctacttcctgacatctgtagcttggactcctgctcgttgtggtatggatccttctgttcaacaaataccctagatggaccattcaaaggattcactgcacgtttcgcagcttccagagctctgcgacgctgctcatgatcagctctccatttcctcagttcctgctccgcagctagtttcccttcattcgccctcccagctctctccaatgcgatttcaagagcttccttcttctcatccatttcctcacatgcttcctttagcctctctaggctccttgattctgattcctttgttgacaccacctgtgacaatgcttctgccaccttctcattggcttgttcttcagcttcatgtgctcgcttgctgagttcatagtactcgcttaaaggaagcgtcacttgtcgcggggaatccttaacgtcccttgcctctttgctttcttgcaatgcttgaactgcagcgagcgctagcctctcggatgctatggatgcttctgcttctttcgcaacagcagatagcctggtctctgctgtagctgccgcagccttggtttgcttgaagtccccccttggccttcctcagctcctcttgagctaagtgagcggctaccttggcgtcctcagcctcttgagtcgcttgctgtaaaaccatgggaagctccaccatcttttcttgggcctctgcttcctttgcaccttgtactagtatttct

SEQ ID NO: 46909 - DNA, 479 bp, Setaria italica
  Peptide Sequence Number=SeqID_112883
tttagttagtttagtatttactagtattattcttctaattgtcttctccactgctcctagtcaatggatggctcttggagaccttgtgttgattacagatatctcaatgcacttaccatttgtggccaattccctatacctgtctttgatgaactggttgatgaacttgctggagccagttggttttcttctctggatcttaattctggatttcatcaaatcagaatgaaagctggggaagaattcaagacagcctttcaaactcattttggccattttgaattcatggtgatgtcttttagttatgtggggctcctgccacatttcaaggtgctatgaactctaccctcaagtctttactcagaaaatatgtcctagtattctttgatgacatcctagtttacagcaaaacctttgaggatcaccttatgcatcttagagtttgtccttcaactactggctgatgacaagtggcaagt

SEQ ID NO: 46910 - DNA, 345 bp, Setaria italica
  Peptide Sequence Number=SeqID_112884
ttgcatgtaaaatgcacaatattaacagattgagcagaaaaacacaacagcatatccgaaagtaatctattgattcctctttcttatgaaagaaggggttcaattctcacacggtgttccagaagcaatattaacaaaatctggaagattcactttctcacaagatgtttcagcagcaagggctacagcttcccgtctatccagtgaatccggcgactgaccagcatgctttgttggtatgcaccccatcactcacatccagtggctccggtgcagaaaaattaagaagagtgcaaacctcaagcaaatccgggggagagggagatcgagcgcacgatccctggc

SEQ ID NO: 46911 - DNA, 1212 bp, Setaria italica
  Peptide Sequence Number=SeqID_112885
taaattagtacttagttacctaatttactttctttgatcgatcctcccatcaccttttgtgtcagcctggtcaaatgtcctatcaacaatcatctcgacagcatcacttgtaatatccaattctgattcgtccagcagagcacacaccatctcctttaactcattccgttcaataaagcctgtctgccttaagtcatacaacttaaatgcaactgcaataacaaataaaaaaattagctaacaaaaatctaaatttttctgaacattctgagtttcggtagaataacttcatcaagagaccttacatgcagctttttgttcttcaggtgcacctggatgaaacacactaagagatcgaacaaattcaccaaattcaattacaccatttcctttttgatcaaacaagtcaaataactgcaatttatttttgatttttgttattataaattttataaacacacaactgatttaagaacacacagcactaacatatttgaactaattcttcaactaaacacaaatcatcagaatcaacaatatgcttagccttgtatatcctactttgtcaatctgagatttaaaacagcacagaagctacaactatgacacttaagcagaaaagctattagagagtctaacagatgagtactgatggtttctggtaaatgcaaccagtcaatacaacggcaaacaatcatcaggtatttgttatgggaagaaaccttagagaagctgttctttttacagtaaatgaagtcatgagcaacattttgaaactacaagaactttgacacaactgatactcttaccctatcaacaaaaagattttgcttcttcttgttcctaaagagagcgacatggaattcttccttgtgaattagattatctttgacaactgtattacttattttcctgaagaggtcatgtagtgcctcaacttcacttactgtaaaagatgtttcagcagcaagggctacagcttcccgtctatccagtgaatccggcgactgaccagcatgctttgttggtatgcaccccatcactcacatccagtggctccggtgcagaaaaattaagaagagtgcaaacctcaagcaaatccgggggagagggagatcgagcgcacgatccctggccgccgctgttccagcccctgttggctgtggctcctgctgaccttgctcctggtggtcagttcgcagtcgtatatca

SEQ ID NO: 46912 - DNA, 1009 bp, Setaria italica
  Peptide Sequence Number=SeqID_112886
cttattctcgatgttattgtacatcttttttcttttgaatgacctttgaatcgaaactgctgcacttgatctacgagcttacaacttccttcgccttaagcattctccaacataaaagctgaaataataaaaagatcagccaacaatggacaattgctgtgtgattatacacttatatacatgtctaaacatttggtcagtgatgctggagttggatgctacattgctcctttgcttgttggtaatacaacaaaactcgtttcctacttccaccatttacacgtagtccacaatactacgcacaacgggtgtttgaacgacgtgttgcaaaccttttcttgaggaaaaagctttcagcatgccctttcactaatatttagatcaggatgtacagagatgtgttgcaagcttgcagttacatttcaggtttggcagccatgtctgcctcactgatttctgagtgaaccacaaagcttgggaataccatggtgatgtccttaaggtatggaagggtcatattccttagaacatatggattatctttagcaaatgctgtccattcttcttgatcgatcctcccatcaccttttgtgtcagcctggtcaaatgtcctatcaacaatcatctcgacagcatcacttgtaatatccaattctgattcgtccagcagagcacacaccatctcctttaactcattccgttcaataaagcctgtctgccttaagtcatacaacttaaatgcaaatgcagctttttgttcttcaggtgcacctggatgaaacacactaagagatcgaacaaattcaccaaattcaattacaccatttcctttttgatcaaacaagtcaaataacctatcaacaaaaagattttgcttcttcttgttcctaaagagagcgacatggaattcttccttgtgaattagattatctttgacaactgtattacttattttcctgaagaggtcatgtagtgcctcaacttcacttactgtaaaagatgtttcagc

SEQ ID NO: 46913 - DNA, 412 bp, Setaria italica
  Peptide Sequence Number=SeqID_112887
ctgcccaaggacgtgcagggcctgggcacctgcgagtactcgctggagcgaggggtggtgcacgcgtgccacgccggcggggtcgtgcacttcctcgaggggtacacgcaccacgaggtgggtgccatcgacgtcgaccgcatcgacgtcgtctgggaggccgcgctcaggcacggactccggcccgcatgatgatccaatttctttccttctggacgggcctgaccgaaacggccttgctttactactctttccccctcctttgtgttccacaaagtccatcgtgatcatcgatcgggtgtgtggtttattggtttcctggccattcaatttgctgtttcaattttccttttcttttctttcagaagaaaaatatgtatactgtaaactatatacatactacaatacatga

SEQ ID NO: 46914 - DNA, 328 bp, Setaria italica
  Peptide Sequence Number=SeqID_112888
cctacggcgatctcgccgccatgcgcctgccggacgacgtgcagggcctcggcgtctgcgagtacaccctgggccgcggcgtcgtgcacgcgtgccacgccggcggcgtcgtgcacttcctcgaggggtacgagggccacgaggtcggcgccatcgacgtcgaccgcatcgacgtcgtctgggaggccgcgctgcgccacggcctgcgccccgcctgatccatccatcgatcgatagcaagcaatgtcatcatcgatcaatttcgcatgccaacggcagaatgtcacttttgatttcagtgaacagccattcataaataaggacacca

SEQ ID NO: 46915 - DNA, 1341 bp, Setaria italica
  Peptide Sequence Number=SeqID_112889
taagtaaagttgaagtaagaggagagacgaaggcagtggccaagcgcaactacacataccctcctctgtttctctctctcccgggcctccctcctgtacttcagacacagagcactgtttctccttcggcactgatctctcaaggccagaatccatggcgccgcccctctcttcctggccgtgggcaagcctcggccaatacaagtacatgctgttcgggcctctggtgtggaaggtggtgcaggaatggcgggagcaagggggcctgccgctgggctcgtggtggctgcacctgctggtgctcttcgccgtgcgtgggctcatctaccagttctggttcacctacggcaacatgctcttcttcacccgccgccgccgcgtcgtcgccgatggcgtcgacttccgccagatcgacgccgagtgggactgggacaactttctgattctacaaacgctgattggggccacggtggtcaacagcccactgctcccgggcctgcggcagctctgcctgtgggacccgcgcggctgggccgtggccctgctgctgcatgtgggcttctcagagccggtcttctacctggcccaccgggccctccaccgggccccgctcttcgcccgctaccacgccgcgcaccactcctccggcgtcacccaggcgctaacagccgggttcggcacgccgctggagagcctgctcctgacgctggcgatgggggccccgctggcaggcgccttcctgctgggcgccggctccatcggcctggtctacgcgcacgccttcgtcttcgactacctccgcgccatgggctacagcaacgtggaggtcgtgtcgcccagggtgttcgacgccttccccccgctccgatacatcctctacacgccctcgtacctgagcctccaccacctcgagaagcgcggcaacttctgcctgttcatgcctgcgctggacgcggcgttcggcaccctggacgagcggtcgtggccgctgcagcgcgcggcgtacgacggcgcgggcggcggcggcgcgctgggcacgccggagttcgtgttcctggcgcacgtggtggacatcatgtcgtcgatgcacgtgccgttcgcgctccggtcgctgagctccaccccgttcgcaaaccacttcatcctgctccccttctggcccgtcgccttcggattcatgctcctcatgtggtgctgctccaagaccttcgtcgtcagcttctactacctccgcggacacctccaccagacctggtccgtgccccgctacggcttccagtacttcttgccggcggcgaagaagggcatcaaccaccagatcgagctggcgatcctccgggc

SEQ ID NO: 46916 - DNA, 797 bp, Setaria italica
  Peptide Sequence Number=SeqID_112890
cggcggcacgctgttcgtgaacaagcacccggacctgcgcgtgcgcgtggtccacggcaacacgctgacggcggcggtgatcctgaacgagatccccaagggcacgtcggaggtgttcatgaccggcgccacctccaagctcggccgcgccatcgcgctctacctctgcaggaagcgggtccgcgtgatgatgatgacgctgtcgtcggagcggttccagcggatccagaaggaggcgccgccggagttccagcagtacctggtgcaggtgaccaagtaccggtcggcgcagcactgccggacgtggatcgtcggcaagtggctgtcgccgcgggagcagcggtgggcgccggcgggcacccacttccaccagttcgtggtgccccccatcatcggcttccggcgtgactgcacctacggcaagctcgccgccatgaggctccccaaggacgtcgagggcctcggctgctgcgagtacaccatggagcgcggggtggtgcacgcgtgccacgccggcggcgtcgtgcactgcctggaagggtgggagcaccacgaggtgggcgccatcgacgtcgaccggatcgacgtcgtctggaaggccgcgctcaagcacggcctcacgccggcgtgatccagcgcccgcctccggccggccggaataacgcgtcacgcctctagttctcgctcttgtcatgtaccagttgcaacagagttgatagactggttcactcgtatatactactagtatatgtacgtaaggtataccgcagtattgaaaaaaatttcaaggcactggc

SEQ ID NO: 46917 - DNA, 1573 bp, Setaria italica
  Peptide Sequence Number=SeqID_112891
agaaggaagaaagacggagagacgaaggcagtggccaagcgcaactacacataccctcctctgtttctctctctcccgggcctccctcctgtacttcagacacagagcactgtttccccttcggcactgatctctcaaggccagaatccatggcgccgcccctctcttcctggccgtgggcaagcctcggccaatacaagtacatgctgttcgggcctctggtgtggaaggtggtgcaggaatggcgggagcaagggggcctgccgctgggctcgtggtggctgctggcagacgagcgcaggggtggacgaggtgccggacttcgtgttcctagcgcacgtggtggacgtgatgcagtcgctgcacgtgcccttcgtgctgcggaccttcgcctccacgcccttctgcgtgcagctcttcctgctgcccatgtggcccttcgccttcctcgtcatgctcgccatgtgggtctggtccaagaccttcgtcatctcctgctacaacctccgcggacggctgcaccagatatgggccgtcccgagatacggcttccagtacttcttgccggcggcgaagaagggcatcaaccaccagatcgagctggcgatcctccgggccgacaggatgggcgtcaaggtgctcagcctcgccgccctcaacaagaacgaggcgctgaacggtggcggcaccctgttcgtgagcaagcacccggacctgcgggtgcgggtggtgcacggcaacacgctgacggcggcggtgatcctgaacgagatccccagcaacgtgaaggaggtgttcctcaccggcgcgacgtccaagctcggcagggccatcgcgctctacctctgcaggaagaagatcagagtcctgatgttcacgatgtcgtccgagaggttcgtcaagatccagcgggaggcgccgccggagttccagcagtacctcgtgcaggtcaccaagtaccaggccgcgcagaactgcaagacgtggatcgtgggcaagtggctgtcgccgcgggagcagcggtgggcgccggcggggacgcacttccaccagttcgtggtgccgccgatcatcgggttccggcgggactgcacctacgggaagctcgccgcgatgcggctccccaaggacgtgcgcgggctcagctcctgcgagtacaccatggagcgcggggtggtgcacgcctgccacgccggcggcgtcgtgcacttcctcgagggctgggaccaccacgaggtcggcgccatcgacgtcgaccgcatcgacgtcgtctggagggcggcgctcaagcacggcctcgcgccggtctgactgaccatcgatctgtcccgccggccaccgcgttcattcgccgtggccattcgtgtactgtcaagtggacgccggataaatgtcatgtactacgcgcgtgttcacgatttgatggcaggacgatctcaagacagttatggcaatgagttcttggtcggatcggatcacctgtttttgtgtcggatactgatgtaaatcgaatcagaacaaataagaaatcggaatggcccattataattaagttaaaaaaaaaaaaaaaaac

SEQ ID NO: 46918 - DNA, 876 bp, Setaria italica
  misc_feature (823)..(876): n is a, c, g, or t
  Peptide Sequence Number=SeqID_112892
gagtccgcctacacgcgcgtcccggacccgcgcatcggcctcaccgccaagggccggcgcgacgccgaggactgcggccgccgcctccgcgacctcttctcctccgacgccgacgacgactggaaggtctacttctacgtgtccccgtaccggcgcaccctcgagacgctgcgcggcatcggtcacgccttcgagcgccaccgcatcgccggcgtacgggaggagccgcggctccgcgagcaggacttcggcaacttccaggaccgggagcagatgcgcgtggagaaggagctccgcctccggtacgggcgcttcttctaccggttccccaacggcgagtcggcggcggacgtgtatgaccgcatcaccggcttccgcgagaccctccgcgccgacatcgacatcggccgcttccagccgccggggcgccgcacaccgaacatgaacatcgtgctcgtctcccacggcctcaccctccgcgtcttcctcatgcggtggtacaagtggaccgtccgccagttcgagggcctcaacaacctcggcaacggaggcacgatcgtcatgcagacggggcgcggcggcaggtacagcctcctcgtccaccactccgccgacgagctcagggagttcgggctcaccgacgagatgctccaggaccagatgtggcaggagacggccaagccgggggacctcaactacaggttcatgaccaacggacagtacttcttcgaccgattcgattcctctccttcacacttcacaccttgattcgattcgattcgcatataataagaatataattaaattaaaaaaaaaaaaaaannnnnnnnnnnnnnnnnnnnnnnnnnnnnnnnnnnnnnnnnnnnnnnnnnnnnn

SEQ ID NO: 46919 - DNA, 263 bp, Setaria italica
  Peptide Sequence Number=SeqID_112893
agcggactcaagcagtcaagcagtggcagcgccggcgcaggtcacccaaccccgtgagaagctcgtagcagcgggactcgctccgctcgcgtgggcgggcgctgaagtaagcaaagcggataggatcgagacggaagccggccggaggagcaacgccgcgttctcacgcactcccagactcctccgcttcgccctgaacctcaaccgccttccattttcctacttattggcttcctggaaagaatcaaagaagagccttttcg

SEQ ID NO: 46920 - DNA, 529 bp, Setaria italica
  Peptide Sequence Number=SeqID_112894
atctcttttgtctctttaaattcgcttttgccagtatctgcatacatggacttgcatgcattttttagttgtttcataattttttttggggaaccgtgtggctaaccagtaaccatttgcctgccttgcataagaggtattgcgcgttgcgcctttcgtgctgttgcaccagttaggtcatgcggaaatcactcggcagatcaagcaagagaagtagtgcacggctgcacggcgcattacgaccagctagcatgtatgcatgttcagttcatgcagctcttcagatgcatcacgggcgtagttgaaacacgcccgaataattgaatgcattgtgcttttggcgcatgtccttcttccacgctttctatatttgcagtgtgcatgtaatatatagttgattttccatctcacaagtttccagattatttgttgctcatcagccaagctattatattccatggaatatatgaaacagtacttgaagcagattgaaggcacattgatcgcacttctcgacggttcttttcag

SEQ ID NO: 46921 - DNA, 437 bp, Setaria italica
  Peptide Sequence Number=SeqID_112895
tatgaagtcgataagtcagtcttgaaaccaaaaataacactaatcactggtaaacacgcagaatgtagcactaactgttacatgaaaggttttgcattaatgaatttaagctataatggaagaatcacaaagaagcataggcactcgtgtcacttttcacactccactattcacaattaaagcaaaaaaaaaaattctgaaagttaaaggaatccttcaatttattcaaattgcttccaaatgcagcctctattcgatgccacatatgccacatcacgtctaattgaccgtaggaccttaaatgcatgctttcgttagataacttttgtttgaaacagtggaagtttcaaaacccaactatttttttcatgaaatggcactgataaacaaaaccaacagtttcacaacctctcaaaattataaataggacctagaat

SEQ ID NO: 46922 - DNA, 1631 bp, Setaria italica
  Peptide Sequence Number=SeqID_112896
tttttgcctttcatatccaaaagtaataattcatgtagagggaggattcttccaacattcgttttgggtggaggcttcgatctccaaacagtatcttaactatcctagacggtggcatcggccccgaaaacatttgtcgtcatcatttttcttcatttaagcaccgcccgagccgtacttcttcccgaagaagaggatctgaagctggtcatagccagaaaagcacaccagcaccagcaatggcacggaggatgttggcaccagcccccttgaacaatgacttagggccctccttcttcaggatctgctggaaggcatccatggagctcttgtacttgacagcctcaccagacgtcatcatcatccttctgcggacagtgtcaatggggtaagatgcaagaccagcgccgttggtgatcagccaacccagggcaaagctggcaaagaattgtcctggagattgccggtaaggacaactggcttgatagaatcgtacagcccgaagtacagaccacggtacacaatgattccaacacaagagatagttgaacccacggtaaagcccagcaataccatcggactttagagtcttgcggtagacatccacaagaccattgaattgcctatcacctcctcccttggctgcctttgcgtcattggccagccttgtcctcgcatagtccagggagtacacaaaaaacagggaggacgcaccagcagcaccaccagaggcaaggttgccagcaaaccacttccagtaaccatccttgtccttcttaaagttgaacagcctcttgaagtagtccttgaatgcaaagttcaatgcctgagtagggaagtagcggataacgttagcagtgttacccctccacaaggaggagaaacccttctattcctttgtattggttacgttttgaagcagtcaccaatacccttgtatggctcagacagcctaccagccttgatcatctcatcctggttctgaataagcagcttgagatgatcaaggctggtaggctgtctgagccatacaagggtattggtgactgcttcaaacgtaccatcaaggatgagggtttctcctccttgtggaggggtaacactgctaacgttatccgctacttccctactcaggcattgaactttgcattcaaggactacttcaagaggctgttcaactttaagaaggacaaggatggttactggaagtggtttgctggcaaccttgcctctggtggtgctgctggtgcgtcctccctgttttttgtgtactccctggactatgcgaggacaaggctggccaatgacgcaaaggcagccaagggaggaggtgataggcaattcaatggtcttgtggatgtctaccgcaagactctaaagtccgatggtattgctgggctttaccgtgggttcaacatctcttgtgttggaatcattgtgtaccgtggtctgtacttcgggctgtacgattctatcaagccagttgtccttaccggcaatctccaggacaatttctttgccagctttgccctggttggctgatcaccaacggcgctggtcttgcatcttacccattgacactgtccgcagaaggatgatgatgacgtctggtgaggtctgtcaagtacaag

SEQ ID NO: 46923 - DNA, 1558 bp, Setaria italica
  Peptide Sequence Number=SeqID_112897
gaaagatcggagccgccgcccagtctgccctccctccccccgcctccggtgccgaagggaaattgttttgaggtggtgatggcggaccaggtcaaccaaccaactgtccttcataagctcggtggccagttccacctgagctccagcttctcagaaggtgtacgggcccgtaacatctgcccttctgtctcctcttatgagaggagatttcccacaaggaactacatgacccagagcctttggggcccttcaatgtctgtcagtggtggcatcaatgtcccagcggtgtcatcctctccgctttttgctaatgctccagctgagaaaggaggcaaaaacttcatggttgatttcctcatgggtggtgtttcagctgctgtttcaaagactgctgctgctcccattgagcgtgtcaagctgcttattcagaaccaggatgagatgatcaaggctggtaggctgtctgagccatacaagggtattggtgactgcttcaaacgtaccatcaaggatgagggtttctcctccttgtggaggggtaacactgctaacgttatccgctacttccctactcaggcattgaactttgcattcaaggactacttcaagaggctgttcaactttaagaaggacaaggatggttactggaagtggtttgctggcaaccttgcctctggtggtgctgctggtgcgtcctccctgtttttgtgtactccctggactatgcgaggacaaggctggccaatgacgcaaaggcagccaagggaggaggtgataggcaattcaatggtcttgtggatgtctaccgcaagactctaaagtccgatggtattgctgggctttaccgtgggttcaacatctcttgtgttggaatcattgtgtaccgtggtctgtacttcgggctgtacgattctatcaagccagttgtccttaccggcaatctccaggacaatttctttgccagctttgccctgggttggctgatcaccaacggcgctggtcttgcatcttaccccattgacactgtccgcagaaggatgatgatgacgtctggtgaggctgtcaagtacaagagctccatggatgccttccagcagatcctgaagaaggagggccctaagtcattgttcaagggggctggtgccaacatcctccgtgccattgctggtgctggtgtgctttctggctatgaccagcttcagatcctcttcttcgggaagaagtacggctcgggcggtgcttaaatgaagaaaaatgatgacgaacaagagcagtttgttcccggtcctgcccaatcaggatctggtgaagtttttgcctttcatatccaaaagtaataattcatgtagagggaggattcttccaacattcgttttgggtggaggcttcgatctccaaacagtatcttaactatcctagacggtggcatcggccccgaaaacatttgtcgtcataggttgagtcgagtctgcccaacttttatcagtcgggcaattttccttcatacattattaccttcgatcaagtatcggatgagagtcaagttgctagaacggtt

SEQ ID NO: 46924 - DNA, 571 bp, Setaria italica
  Peptide Sequence Number=SeqID_112898
aacctcatccttgatggacgtttgaagcagtcaccaatacccttgtatggctcagacagcctaccagccttgatcatctcatcctggttctgaataagcagcttgacacgctcaatgggagcagcagcagtctttgaaacagcagctgaaacaccacccatgaggaaatcaaccatgaagtttttgcctcctttctcagctggagcattagcaaaaagcggagaggatgacaccgctgggacattgatgccaccactgacagacattgaagggccccaaaggctctgggtcatgtagttccttgtgggaaatctcctctcataagaggagacagaagggcagatgttacgggcccgtacaccttctgagaagctggagctcaggtggaactggccaccgagcttatgaaggacagttggttggttgacctggtccgccatcaccacctcaaaacaatttcccttcggcaccggagggcggggggaggagggcagactgggcggcggctccgatctttcagaggcgcgtcgagttgggaggggaattgttttgaggtggtgatggcggacca

SEQ ID NO: 46925 - DNA, 188 bp, Setaria italica
  Peptide Sequence Number=SeqID_112899
taatggtatggaacctgttgagaggttaccctcacttgcatccatgttttctgataatattgacttggcatggactggatctagtgatttacagtatgatcttccacaagctttcaccaaaattgatgaaaatggatcctttaatttggacagtccaaactacaagaatgtagtaacccctgttagaa

SEQ ID NO: 46926 - DNA, 454 bp, Setaria italica
  Peptide Sequence Number=SeqID_112900
ccagttcgttctctctggacgcaaacccagacgtagaactaaacgagtgaattctaacagggttactacattcttgtagtttggactgtcaaataaggatccattttcatcaattttggtgaaagcttgtggaagatcatactgtaaatcactagatccagtccatgccaagtcaatattatcagaaaacatggatgcaagtgagggtaacctctcaacaggttccataccattagtaggttcagtaacagaccttttttctcgtccattgaatttgctgtaaactttgtcaagatcctctgcaccatccactggatgacccaccaaacaagtctgcaaatttgtatcagcaacactgcattcattatcattcaagtggacctctctggatagcaatgattttcttggacttcctaaagattttccaatctcaatatccccacgaagaaaattg

SEQ ID NO: 46927 - DNA, 1155 bp, Setaria italica
  Peptide Sequence Number=SeqID_112901
actttgtcaagatcctctgcaccatccactggatgacccaccaaacaagtctgcaaatttgtatcagcaacactgcattcattatcattcaagtggacctctctggatagcaatgattttcttggacttcctaaagattttccaatctcaatatccccacgaagaaaattggctttccattctttcagtctggtgtataggagaatatcaagattatcagaactggtctttgaaacatgaccgtgtgttttaagaagtgagtctaaatgacacagcctccgatcccaaatgtaggcatcaagaagaagaccacgcctcaagcggttgagctccagaatatcaattgatgtctgcatggggtgactgctctcccttatgactggtaaaagcaaaatctcatattcatttctttccattttaagaaaatccttcatctcaataatctgcctttgaacaccttccttcactggttcatcctcagtttcaatattcttttcagtacggtgaagaaattcggatacctccacatgcaaggattccattttgccaaatatctcaattgccacccttttcagccactcctgtggactgtgacaattgaaatccagtactgatgggggaagattaactgaaagaatgtcaacaggagaatatctgaagaatgccaccatgtttccatacccatagaaacgaaggcagtccctctggagtgaatgcccacagcttgcaactcggttagcagtagcatggttcgagaaacttagctccaggaatttcccaaacgacagaccccaggcagcatctgacatgattatccttcgtgtggcaggtggcacaccatccttaggttcgcacttgaggcacctgtgccacatccatatccttccatcacgttcaccaggcaactttcgagatcgaagcctactaacactgattgttaagctaccatgctggtgagtatagcacctgatatgtgattccgatggctctttgcatgcctggcaacgatatgcctgatcaaataagtcttcccgaagatatctcccaagtggcttatcaaaactaccataaaacttgatgcggaaaagctgggaacgctcacataccaagccttttgggatacaagtacttgacagagaaactaagatgctctga

SEQ ID NO: 46928 - DNA, 1742 bp, Setaria italica
  misc_feature (1717)..(1742): n is a, c, g, or t
  Peptide Sequence Number=SeqID_112902
cctgggtttgctacattcttgtagtttggactgtccaaattacaagaatgtagtaacccctgttagaattcactcgtttagttctacgctgggtttgcgccagagagaacgaactggattagctccaacttctttgcatctatcgtcattcaaatctgctgagttctttggagatatgacaagcatcctgaaagacccaatgccaaatatgcgaagggcctgttctcaaaggtctcctggggtcatagagaaattaaatgttgttcttgctcgtacacccacatatatctcatccgcttcaaatataatcgatgatggggcacggctgctgttaccccagattggatatgaagacaatgttgttattgcagtatatgatgatgagcccaccagtattgtatcatatgccatgacatcagaagagtatgtacgacaagtcacacgcagactgaattccaatttgagtttttctcatctgcaaagcactactgagttcagcagccatggacttgaggggttctcaccctcacaagaagaccatttggattctaagggaactcattttaagttttcctttgatgatgaatctccgatttctccagataaaacaaagttttctgtggtttgctattttgaaaggcattttgctgcgctcagaaagaaatgttgtcctaacgatactgattacatacgttctctaagtcgctgcaagagatggaatgcacaaggtggaaaaagcaatgtttactttgcaaagacgatggatgagaggttcataatcaaacaagttaccaggacagagctagagtcttttgtagaattcgctcctcagtacttcaagtatttgatggaatccttgacttctggtagcccaacttgcctggccaaaatagtcgggttatatcaggttagtgttaagagcttgaaagctgggaaagaagtaaagatggatcttatggtgatggagaatattttcttcgaaaggaagatatctagggtgtatgacttaaagggttcattacgctcacgctatacatccggggacagcaaagtccttttggattcaaacctcatagaggcattgcatactaagcctatatttttggggagcaaggcaaagcgaagattggaaagagctgtctggaatgatacttcatttcttgcgctggcggatgtcatggattactcgcttcttgttgggattgatgaggaaaagaaagagctcgtcattggcatcatcgactacttgcgccaatacacctgggacaaacagctggagacatgggtgaaggcctcaggcattcttggtggccccaagaacgaatcccctaccgtcatatctccaatgcagtacaagaagagattcaggaaagccatgtccaagtacttcctgaccgtccccgaccagtggtcctcttgacaactaacataacgattgttcgccgaaataaacagaccatcagaatcatcatcgcccccttagtacatgtccaaaattctttctgtgcctagtgtgagagggttagtcaaattcaatttgtacccagcaccatctgtagacatagatgttggaccatcctccccctggataccaagcattgtcactgcagtgtccagcaacagacagaggcttggtccatgtacattacatctgacatagttgaaaaaaaggtaaattcgtcgacgaaatgcagaaaattctttgacgaccaaaaannnnnnnnnnnnnnnnnnnnnnnnnn

SEQ ID NO: 46929 - DNA, 129 bp, Setaria italica
  Peptide Sequence Number=SeqID_112903
tttcttcgtatgaaggttctttgttggactttttatgccatgcctctgcaggtaaagatagtccatctctgaactgagtaatattgtatttggtcactgcttgatggtcttgaacaaaagggtgaccag

SEQ ID NO: 46930 - DNA, 339 bp, Setaria italica
  Peptide Sequence Number=SeqID_112904
cgcgggtgggactcatgcagtaggtcccgctgcggccgtggtggcggcggttcccgggcggattcggggtcaggttggaccctgcttgtttatgccttagctagtagtagtagcggtggcagtgatggatgatgggttgtgtgattgttcctgatgagtcgccgttgtgatctgtgttattgcttattcttttgtaccataccgcattgttggatgtatatctctcctgttgaggcgtgtgttctatgaataaagacgatggacctcgttcgctcgtaaaaaaaaaaaaaaaaaaaaaaaaaaaactaaaaagagactgcctaggcacacagggagtag

SEQ ID NO: 46931 - DNA, 2234 bp, Setaria italica
  Peptide Sequence Number=SeqID_112905
aattccacaacttgcatgggacacactgctgagttttacaaagtttctaagcttaaagaaaaagaaaaagaaaaagaaaaagaaagaggtgaagaaattaacattcggcgtttgttgacattccaaggtccaactgaaaaaagagggtgaaacaaaatattttgctaggaggaactaagagcctaaagttggatgaagtgtatagttagtgacatgggctgatccttttccaacgacacaagcttcgtcgtcttccgatggcaagcagcaaaattgcccaatgtccttttatgttagtatttgcacattctttcttcagtatatctgatcatctagtgagctgaatctggaaccctacatatagaacatttgaccaacctcctaaccttacatcatgctataagtcaactcagtaaaactttatttctctgtagctctgagaatgcggcaagagctcttccacctcaattctagaactgaaatagcccatgtttctcctcctctggtgtacaatgtcaacctctgccaagaaaatactgtacaccggcctatggtcggagaaacgagattctccacgaacataagacagctgattgaggccgttaccataccagagaatccgatcacaccatgctggtgttctcctcttttctttggggtgcatgccctctccagcataccgatctgagttgaatgaatatttgtatgtgggaggaaaatatatccttccttctttccaaccttggaaaactcgtccatacctttgttgcatgcggagctgatctttctccaataattgcttccagttatgcatttccacaagagcttttgccgaacagtacgacagggcaatccgataattcaaatccccaagccatataatacgatcatgctcaagaattgtttcaggtgacttaacatcaccagaaccacgaacccgagggaatctggtcttccttaaaatttccagaacatcggaattcctgcgcagttcatcaccttccttttcccctgaggtcaaatgacaacagatgaagcagaagcttgtctggtgcaaagacatgcttattgaaattgaacccttattcccaagatagcccatcaatcctctgccgacacaagaaactttcaagtttctcacatcgtctcttatttcattgcgtacccaaactgtgagaaatatgccaaccatttgtttgctggcaactaagcaatacctagagctgtttgattgctcatcattctgttcagaaggtgcagatgcagtgtagctatgagggaatggtgaaaattgcgcagcatcgctcacttccatatctataatctcctcatcaggtgatccagggcatctcaaatttccatcaaaatcgctaggtctgcctcccaagttgactggatcgcaaacgctaaacctgcgatccagtcttggctgtgggaacatgtagtccccatccattcttaaactacggctgaggttgtggaacgaccgccggtggaagaaaggaaaattctcctgccttctcgcagacccctcaaaatcagcatctaattctacaactggatccaggaccggtgaaggggtatgatagccaccacaaccactagctccaggattcttgttcagtgtacgcctgataagggacacccatttcttggctggaaggttatcttcagtgccaagaacgtttccagcattcaagggaacaatctcctgaaaccctagtacatagatatcggcaggaggagaggtatggagccattcatctaaattcagcccccttggtggtgacttaccaccgacattccacgtcgcagcaaagatcctgtaatcttggacttcagtcaggcgtgctacatcgaaattattcttccctcggcgagcgcgttcagcactccgcttggatgatgaccggtcagttctgcttttcttggccgtgcttgcacttgcttcgctcgcggagcacctgggcctccatgatccaccacctccatcccttccctggccggcgtcggaatcagcatggaagtcctgcgccttgggccggatgttgaaccacttcctcacgaggggacttggaccacgaaagcttgctcttcttggtgctctcctctgtcattgtctcatagctcctgcctcctgctctgcaggccgcggacagcaagagggatctgtcaccccgccgccgccgcagcaagccgtgatcctagcggccggaacctcaaatccaggatcc

SEQ ID NO: 46932 - DNA, 2507 bp, Setaria italica
  Peptide Sequence Number=SeqID_112906
acttgagagcactctcatatcttccaagccttaaatcaatcgtgtatctcatgatagcaggaggaaggcattcaagactcttgagaaaaggaaggaactcttttggatctttttgagaatttaaagcaacaattgcagcaagattcagatcatacagccccaaagcagcaccaaaaacagcttcagtgtccgttaaccaaagcaagtgcttcagagactcttcagcagaagggtaaagctttctcttggcatcatcaaggccacgaagttccagttctcgaattacttttattctgttcagtgcttcctccaataatggaggttcactacgggctaaagtggtcaatacacaaagttctcttgatgagctctcctctatttgttcttcaagggcttttcgaactgccatcaggacagaagtgactttgttgcctaagaaaccaggtgtgcactcaatatcaaccattgggaccgcactctgatcaggaaaagatatataggcttcatacaatttgctgctgacattgtcgttcttcattgagcaaacaaattcagttatgtggctaaggttattaacttgtttgacaaagtctgctgctaactttataaaaacatcacaaccacaatagtcaacaatgatattgaaatctatccgatgccgcctcaccatatccattgcatctttgaaacgcctctgagccagtgcctgaacaattgaaacgagaaccaactttctagggtaggtacactctaagttaccacgtattgtttgcattatgaccgctgcttcatcaccatggagaacaccaaccaactttgcccccttttcccacacagtgatgtgttctttgctttgctttcctcgaggatgactactggcatggctgtcaattgtcacctcgttgtctttaagaaagatcttattgacatccacaatgtacaaaagatcttgcttagtagtcacaagcaagtggctcatgacccgctcagtggttccataagcactagagtagaatgtgaagctgctgcagttgtcactcagtaaccttttgcccatataaagcttgctgttatcatcgagtccaaagagaaagggttgagctataccattttcatggcacagaactgcagtcatccaaggacatgatgctggaaaaccatggtccgaatcaacctcactgatttgtgctggtacgcacattttcgacagatttaaacttgaacagtactcaacaatccttcctccgctaatttgaatgaaggctgaacctttttttgctggatttggagagattccaatgactgaactctgcaatggcactttctttgatactctagcttgccaaccagatgaactcactgaacctggcacaaaatcctctgaacatacaagtccaatctcattgatggaaaatagtgaatcatgtttgtctaccaggttactagcttcaatggacccaataggtgttgaacagtagtgttcactatagcaacagataccaagcaaggtgtgtgtatctatccaagctaggtgcatacagttgtccaaagtgaagtcagaagagcaagggtcaacacttatcctgctgccttcaaattcttcccaagtatctggtgctggaagctccacagcacacaaattgccatttgagagataagcagccaattgggtctttgagttactggacacaaaagaaacctcattcactgcacaaggaaatgcaagctggaacagagacatgggaggtggcatgaggcccaaatgaagaggagtaacaagaatatgggaaccatcaataacaagtgcaactgaagtctcactgactgcggtagtccaagcaaacctgtgaataacaacctggccacccagtgtccagcaaatcagatgcattggtttcgttggatcccaaaagaacttcaccctctcttcctttgtgtaccgcagttcatgtttcaagtaccagtgattgttcctgcaggaccatattttaataacatcatgctgtccagaagaaactagagcagctaggatctcggaattgcagttccactttaaagcgtgaatggcaacctctgctggctcatcaatagaaaagtggctcctctctaagccattcttctcatagaatacaatgagagggcattttccctctgtcctccgatcatggattgtggcaaccttggctccactaggcatccaatctaacgatgttcccataaaagttttggcatctgaagatgaatgaacctttcctgattcacgttcccatatagtaagctttgtggggccataagcgccatcaggggccccaagtgtagcaaaatacttcccatccccccgccaagaaattgagcttcggatctgacaaccggtactgtctatgtcgcctaaggtagcatcctgaggatcaagagaagtctcaaacagcacttcccaatcctgtgtgatgacaagcagttgcccaagtccagtggttacagaaagaagggccccatcggggctagag

SEQ ID NO: 46933 - DNA, 626 bp, Setaria italica
  Peptide Sequence Number=SeqID_112907
gccgcggccgccgaccccgacgtcctcttcaccgaccggtccgggcaccgccgcgaggggtgcctctccttcgccgtcgacgagctcccggtgctcctcggcaagtcgccgctcgaggcctacgaggccttcttccgcagcttcgccgacgagttacaaacgaacctacttggggtcaaccattacggatgtgaccgtgagcctgggtcccaacggcgagctccggtacccgtcgtacccgccgaggaacaacagcgctaccgacggctactccggcgcgggcgagttccagtgctacgacatgtacatgctggcgcggctgaagcgtcacgccgagtcgtccgggtagccgctgtggggcctgttaggcccgcacgacgggccgcggtacgacgagtcgccggagtcatctgtcttcttccgggagcggggggctcgtggaacaccgcgtacgggctgtctgccaaggtgccgctcctgtgcgggtcgcgccccgcggcggaggccaccgcggggctccacagcgggtacgtccccgtcgccgagatgttcgcgcggcacgggtgcacggtgatcgcgtgcggcgtggatgcgcggctcgacgcccgggcggaggagcacccggg

SEQ ID NO: 46934 - DNA, 564 bp, Setaria italica
  Peptide Sequence Number=SeqID_112908
ccacgcttcacgctcggccatccgatgttcccctcgctcgcctactcctcctcactcgccctgcatcgccgccgccgcccgccatcctcctttcctcggcgcggtctccctgcgccgccgccgccgacaccgcccctaccaccaccgccactcctcgaggtcttccgcccgataaatctaccaccgatccatctccttgcgtccattcccttccgtccgattcccctccacccctctttttccggcggaaccccatcgcgccgccgccgatccagctccatgctcgtccaagccggcgacaccgccctgctaggcctcgtcccacgtcggcggccccaagcaggcgtcccccggtactggaagatccaaatcaacaccaacatgctccccagtgctggtgtggtgctgcagctcctcgatgcgacctttgatcggcctgctgcaagctcaacaccgcgcgagaaaacggccgcacgtggtcgctgcagcaacgctctcgctcgtgtgaccccggcagatcgcctgaaccagtcaagatatttttcaagaggtaaagagcaagcg

SEQ ID NO: 46935 - DNA, 635 bp, Setaria italica
  misc_feature (1)..(26): n is a, c, g, or t
  Peptide Sequence Number=SeqID_112909
nnnnnnnnnnnnnnnnnnnnnnnnnnttttttgaagaaaaagccacttgtttcagatgatttattccagttgaaatcccaaataaaacctgaatcagctgtcaagtgtcagttgagtaattaacgtatagtatttcaggataaacgacgacttgtattacagtcttggaggttggagccctagtagtatgcatgtagcatggcaaaaacatgtacagcgacaaaaagaaagggcaaaatggaaagaatcgatcctgtccccagcaccaaatggactgatcgtctctgatgcatgtttgttcctctagttgtaggcgctgttgaggtagaagtagaggccgaccagggcaattacaccgacggcaatggcgatcggcaaggcttgcccgattgcttcgtccttctttagctgctccttcctcgccttgcgggcatcggtggcattcgcgttcttggacaccgccggctggtatgctctgaacctcctcttcggagctccacaaacggggcagaagtagctgtcggacagcttgtcaaacggggtcctgtcgttgtagatgtacccgcagtcgcggcagatgtaggcctgcttggacgcgacccgcatggtgatccgcgcggccgtggcggccctgg

SEQ ID NO: 46936 - DNA, 785 bp, Setaria italica
  Peptide Sequence Number=SeqID_112910
caatgtctcaatcctctccgttcttctccatcgcccgagcacacgctggagcaggagggcgggctgcggcagccgctctcctgctccgtcagcccgttgctcagctgccaaccaacattcacagcctgaggtgtttcccttcggccagagtgacacatgccaagacgctgcgatcgcacctgaacctccctcgtgccacgctgtcctcctttgccgatgctgatgatggctccaaaacgaaacccgatgaggcagaggctggggaggagcagaacggggaatgcgagatgtcggagatggccaaggcattccatatctcaccaaggatggcgatgttgatctccatgacaactgcattcgctgccctcaccgtgccactggcgatgcgctcactcgtctgtcgtggtccactcaagatgagtgtattggcatatctgacacttttgtcagggttctacatggcatggaatattggggccaatgatgtggcaaacgccatggggacatcagtgggatctggggctttgacactccggcaggcggtgctgactgcagcggtgctagagttctctggtgcattccttatgggcacccatgtcaccagcaccatgcagaagggcatactggttgcatctgtcttccaaggaaaggactctctgctcttcgctggattgctatcctcccttgctgccgctggcacatggctgcaggttgcttcatcatatggctggcctgtctacaaactaacaacaattagtaactaactacaacaactagaagtacga

SEQ ID NO: 46937 - DNA, 588 bp, Setaria italica
  Peptide Sequence Number=SeqID_112911
gggccaatgatgtggcaaacgccatggggacatcagtgggatctggggctttgacactccggcaggcggtgctgactgcagcggtgctagagttctctggtgcattccttatgggcacccatgtcaccagcaccatgcagaagggcatactggttgcatctgtcttccaaggaaaggactctctgctcttcgctggattgctatcctcccttgctgccgctggcacatggctgcaggttgcttcatcatatggctggcctgtctcaactacacattgtattgttggggccatggttggtttcgggcttgtatatggaggggtgaatgcagttttctggagctccttggctagagtatcttcatcttgggtcatttcccctttgatgggtgcagcagtctcttttcttgtttacaagtgcatacgcaggtttgtatacagtgcgccaaatccaggccaggctgcagctgctgctgcaccaattgcagtgtttactggtgtcactgcaatctcgtttgctgcttttcctctcagtaaagtctttcccattgctctcctgcaagcattatcatgtggggcaataggagcca

SEQ ID NO: 46938 - DNA, 584 bp, Setaria italica
  Peptide Sequence Number=SeqID_112912
gaatcatcagttggctcagtgttgcagccaatgcttatggatccacaggttcctcaacataccagagatgagcagtttgtctggccctggatgggcatcctagtcaatatgccaaatgaattctttggcaaaagtgcgaataggctgaaggagcatttctcatctttccatccagttaaggtccatccggtctataacagaggtagacccacgcgtgatgctattgttgagtttgggaaggactggagtggttttaggaacgcacgggcctttgagaatcactttacgatgaaagggtacagcaaaagatgctggaaggaaatgaagtgcggaggtacagagcctattgggtggatggcaagggctgatgattacaattctctaggggcaataggtgagctactgagaaaaaatggtgatcttaaaactctcaatgatattgtgaaggacgggacaaataaaactgacaaactgatggctaatttggcttgtcaagttaaagaaaaggagatgcatttagagaaacttgagtctgagtacaacaagagatctgcatcacttgacatactgatgcagaagagggg

SEQ ID NO: 46939 - DNA, 430 bp, Setaria italica
  Peptide Sequence Number=SeqID_112913
tgttattacttcttggtattgtctgaatgttcatctgcaggctgagttgggaaaaccaagccttgttcatcccaacaaagggaaagtctccatttctgttgactgtagcccaactgctgtgccatcgttccaggtaggcgagcagtaccttgtggatgctacctcggaggaagaggaagatggactctgcagtttcagtacgtgtcagttaacaagcatggccagatgtgtgggttgacattgaccaagaggggagccatctctcatggtgtccgtcccaagcatgccagtaagcagctcctgctgccctgctggctgccccctgcatttttggcttcagtttgtttggccctccttctttttcatagataaatgtgtttggctttacatcattacatgtgttgtggcaaacatggtagttcaattgccg

SEQ ID NO: 46940 - DNA, 258 bp, Setaria italica
  Peptide Sequence Number=SeqID_112914
ctttgctatttcagctggccggcgcggcccctggctttgcaaagaactgcctgctgttgcatcgctggttgccgccgccagcccgttccgcatcggcgccctcgcgctcctcatatggctcatctaccggccccggacgatccaggtcgccgccgcctcgttcacctcggtgctgccctacaacctcaccgccgtgctgtggaagtctcgaaccccaaccggcgcgtgtccgtctactacgcaaaaggtccaggcggg

SEQ ID NO: 46941 - DNA, 256 bp, Setaria italica
  Peptide Sequence Number=SeqID_112915
agcaaaaataagcagcgaccacggcgagaggcaatggtggagtccatgtcctgtttgtgactgattgcttcccgatcccaaatctcttctcttgcaagaacctagtgaaacgtgaaggcaatgcttggctgtacaaacctgacgtgaaggctctaaaggagaagctcaggctgcctgttggttcctgtgagcttgccgttccactgaacgcaaaaggtaagttgactgatgtctaaattttgtaatagcttcccat

SEQ ID NO: 46942 - DNA, 231 bp, Setaria italica
  Peptide Sequence Number=SeqID_112916
gagatcaagcgcatgggttccttggaggcccggtaccggccggccggggcagcgtaagatctccctcccgatctattccaaatctttccccctctcacgctcaccttgcctgcttgccttgcttttgagctggttccgctcgatgatagcgtgctaatccagccgtgtcagatgcgcgctttgctttgccatgtgcggtcatgtgcctcatgctggattgactcgcatctg

SEQ ID NO: 46943 - DNA, 315 bp, Setaria italica
  Peptide Sequence Number=SeqID_112917
catatctataatttttccctaagtgtaattctccattttatcaccataaatgatctgaacctacattgaccttccaatttgcgttgactacacaaattgtcataatataatacaagtttatttttcaacttttttttgtgatgactaggattactaattgctgttcaaatacttccatggaagagtttgctgtccttgacactttttatttattattttttcagtgaggacacagctaagagaaggactcagaaaagcaaaagtttcaaagaggtggaaaaatttgatgtttttgtactggagaaaagctctgga

SEQ ID NO: 46944 - DNA, 438 bp, Setaria italica
  misc_feature (431)..(438): n is a, c, g, or t
  Peptide Sequence Number=SeqID_112918
tttagtttaattttagtttaactttaactttaaattttagttttagtgatgacacaatgtgttcatgtgcaacattcatggttctgctatgggttccaggagagttgtcaattctgcaacaaggatggtctgcagcctgcaggtaaacatgatcttttcattcgtgagttaatgcaagcgaatacttgtgtttccttgggtcatgagcatttattcgaccactggatgtgatatatacctggactcatgtagcctgctgcagttagtcagtttatggctagctggaaatagttcgtcgttggctggtggtactgttagggtctttttatatgaactcagcatcaaaatgcaagcacacgaaaatacaactttgttagtaaatatgataagttatgggatgaacattcaagtaatctaaaaaaaaaaaaaannnnnnnn

SEQ ID NO: 46945 - DNA, 259 bp, Setaria italica
  Peptide Sequence Number=SeqID_112919
gctagaagcatccttcaacagcttgaatcggcaaatccagcgcctctctcttgctcttccaatcccacacctctccctccagccaccgccactgttcttgatccatcggtggtggtcggttgccgagtagccatcagtgaccatgacgaagcacggcgtggtgctcggccccgaggacgccgtcgtcgcggcggcggcgcggcatttctcgttcccgccgccgaggacggggggcgactcgtgccggaagctggcggcg

SEQ ID NO: 46946 - DNA, 1315 bp, Setaria italica
  Peptide Sequence Number=SeqID_112920
caatcaataagtcattgttaatgcttaaaaaagtagacatcgatgccctacatgtctcaactctcaaacaacaatgactggtatactgaaatatatcgttctatgcgggcatatagctttgattatatttcagtataccaggacaaaatcttggacagtgacatagtccgtaccaccaaaaaagttgaaaaacacagctatactttcttagcaagggtccgctgttttgtgccatgctccacaactttctcttcaacatgcagtcccttcctccgcctaacagaattcataagctttttagcaaggtttggcccaatgcttgaaccatctccaaattcttcaagctcatcctgcgttcttgggataaagagagggtcctcagcaatggcttcccagtggctaagaacaagcagagcactagctgcacctgcagttaaactcctaagttcattcgaaaacccaacgctctcagcgactggcaagtaagcatgcactgtgaacaatgaggttccttcttgcatctcatctttcagaatccttgctcgcctcttattaagaactccataagttgaacctgattgatcatatggcgcggtcaactcacagaagtacattgcctcaacaatccttggtttgttttgaagaacagctgctcggcatgcttctttaaccgcagtgattacttgaccactggaaatgttgtattgatcaaagtgattagcagcatcagagccgtctgcaaataggtaaggctcaacaataaacgccagaccccacataggttcatcacataaaggcccagcatttgccgcaatctggaaacctgagacaatgttgttccttagtgccagagactctagatgcaatgattcaggagcatctgctgctgattcaccattgtcaagattgctgttatctttggtatcagattccttcacaaaccccaatctctcagagacatgagaactaccactcacaagtataccttgccttccatcttggatggttatcgcacgatcacttgattttgcatcaggcgagaggaggagatttggaccaacctgccacggacctagtgaccagattctttctaggtatccaagccatgtctttctgtacctctcaagtttttctttatccacttgattggaaattgcttctaattcactgtctatggcatcgatcatacgctgcctaagcgtcgcagcagaattaccatcatcttgagaaagccttggatccaagacaccatccccttttgctgttttcccctcaatttattttgtacctaagttcttaatttttgtttttcttt

SEQ ID NO: 46947 - DNA, 623 bp, Setaria italica
  misc_feature (7)..(7): n is a, c, g, or t
  Peptide Sequence Number=SeqID_112921
tccagancttctgacagtatgttgcaatgtctttggccctctctttgttaagttcacaagctataatactcccctctccattcatgagggcagcaaggtggacagttttgttccctggagccgcacacgcatcaataaccttccagcctggcttagggttcagtgcaaccgctaccatacaactagctttgccctgcaaaaacactttcccattcgtgaccaatggatggctatgcaagtcagttccaggaggaagcaccaacatgtctggaaccatatcatctttataaaccatgtgtattttgctcaactcttcaatcacagactcagcagtggtcttgagtgtgttaacacgaagaaacctgggcttggtttgactgctgttttctggcctaccaagtcttcaacactgctgaccttcctttttgcacaaattctatcaagagcactactaagaatgtctttgtttgccaagattaactgctcagctgatccagaaactgcaccctgaccaaagagaatgtcataggcagtcacaacaaccaattcctcctgtttcttccatttgctatttagccctccactcgatcctaaaacctccttaagaatcggaagatacttga

SEQ ID NO: 46948 - DNA, 783 bp, Setaria italica
  Peptide Sequence Number=SeqID_112922
ctagaacaccttcaccagagaacccggttagagcagagtgtttgttccgaggtcctggatgagctgaacgtcctaagcccgtgtcgccttctactcacttttcttggcacttctactgcaacatcttcactaggttcttctacaccaccgtttgcggcttttctgacgaacaaggcaatgaagaagccctccagatcgtcctctgggtccgtccgaagcaaatgttcagatccttcaaagacggggaggccgcgacggtgccattgtggaaatggagtggcaagctcaaacccgagtgatgtggctaagggcaggacggcgttcacgacatcctcattctctgcctggtgaatcgagcaggtgctgtagaccaccctcgccactgagggaaatgatagagcatgtgaaagagctttcttctggaaagcggagagcttcatgacccttgagcttgtactcgcatcatcctgatcatctctagaatgtgaaggaagcaagtagtcaagtctctctgtagatattccagaaccagagcaagagggatccaacagaattgcacggacctcagcatatgatggatccttgctatctatatccagaaaatcaccattaactgtttgaatattatttgctccagatcttctgacagtatgttgcaatgtcttggccctctctttgttaagttcacaagctataatactcccctctccattcatgagggcagcaaggtggacagttttggttccttccagcctggcttagggttcagtgcaaccgctacca

SEQ ID NO: 46949 - DNA, 410 bp, Setaria italica
  Peptide Sequence Number=SeqID_112923
ctgggcaaacgggttcatcatttatctcatgaagggatgccaggtacgggtgggcatagagcctcatcaacagtaatccttttgctcggatcaaacacaagcatcctctcaagcaaatccatggcaccactagacatagtggggaaccgcgcacggaagtgttgcttggggtattgaggaagggacctcacatatctgcgggcgttatcgcttcggaggaacccaaggcttgtgtcatcaggtgagcctaccagctcggttattagcctcagctgatgaacataatcttttccaggaaacagaggctctcttgtaacaatctcgccaaggatgcagcctactgaccacatatcaatagcctgagtgtattctgagcagttcagcaggagttcgggcgctctgtaccaccg

SEQ ID NO: 46950 - DNA, 523 bp, Setaria italica
  misc_feature (500)..(500): n is a, c, g, or t
  Peptide Sequence Number=SeqID_112924
tccctctcttttcctcagtccgagcgctgccgccggcgctgtccaccaccagaaggccgagcaggagcgggaggagcgccacctcgacgacgaagagcgcgagcaagaggatccggacgtgaagccactgccgagcctagagaaccgcgagctcgccgcgacgccggcctgctgcccctgcactgagccggccctgcctcacctcgccacggccgcaccgactccctgcatcgccttgacctctgacgagccccacggactcggaagatcccgaagacccaagctacatcaagaggaggaggttcagtgaaggacactctaggtcgcttcagcatgctctctgagctgaattgagaactggatatgttgggcctagcatcccttcgcttcactgctttccgctcccatgcctccgcctccacctgcggtggaaacacctcgcttgcagatggaggtcggctctcttttcctgtgccggtggttcatcttatgtgaaaagntttcttgtcttgcttggattggc

SEQ ID NO: 46951 - DNA, 779 bp, Setaria italica
  Peptide Sequence Number=SeqID_112925
ggaccaaattatatgtgccagcgtcagggaacactccgttgaaggccatgtcgtcgagatactccactgtcacctcagcatgcccaagactgccctgcagcatgatcattgtgttgtacatctccaaatccgggacgagcccccgatgtccaacaaagtcatcccaaagcgccattgcatcacgcaatttgcgtgcctcaaggtgtgcaacaagagcggcatggaagaacttctctcctggcgagcacccgcgccggctcaagactgccagataatccatcgcttccggtagcgccgtggaggagtcacttgaaacaagtgtagtaaggaaggaatcataggcaggcacgttgttaggatcaaagccgacgtcacgcaccatttcgtcgaacacctcgcgcgcaacccgcggatcagcggctgcctcgcagccctcgagaaggatggcgtaggagtcggcgtccgggcgcgtgccggcctcggcgcgagccacgggaatcgcggcgcgggcgtcgtcgaggcggttggcgcggcaaagcgcggagaggagagagttgagcgccgtcgtgtcgcgggccatgccgtagcgtggcatgtccacgaacgccttgagcgggttgccaccggggctggccgccaaggaggagaacacgaaggcaaaggtggccagcgagagcaggcgctgggagtgcatggacctgacggtttcccacatgggctcgaagattcggttcttgccgaggatgtcgacgacaaggttccacgagtaaggggagtgc

SEQ ID NO: 46952 - DNA, 499 bp, Setaria italica
  misc_feature (499)..(499): n is a, c, g, or t
  Peptide Sequence Number=SeqID_112926
ttcttaaacttatttcttagtttttcttttgtttagttcttatttgctcgtagcatgcaccctggcatacccgaactccgaaacccttgatgagctccacttgttcaacacaatcttagggaatttgtccaagttgaaacctcctgctccaacaatggcatgaactggtgcggtatagttgctgttgtcataagtatcaattccacttgcatccttctttggcatgcctttgcaattgttcttatatactgcacaagtcctctcgtagttgtgtacgtggccgaagaaaaccaaatccacctggtatttgagcaatagtggctccacagaggttacaaagcttagatccacattaactggtataccgatataggaggaatacattggtctgtgtccaatgaaaatcacccatggtgtcctcgatctattgactgatgacaaatcttggttcatccatttgtactgctccgacttctctgccagtcatgctcagtcgacn

SEQ ID NO: 46953 - DNA, 366 bp, Setaria italica
  misc_feature (288)..(366): n is a, c, g, or t
  Peptide Sequence Number=SeqID_112927
attctagtctttcctagcctgcttccgcaaaatttgtcctagttcgtgcagatttggttcttgactgcattttaaattgcctatttctccaaatcgccgttagaatttaagcctaggtcctacttcttggggtttctgtgactgaacaatcaatcaggcagtcatggagactgggattgggaggggtttgactgttgtgatgtgttcgttcttggctgctgcctgagcaggcaaaagattgtggtgattaatctggtattagtatcattgggcatgcgtgctattacnnnnnnnnnnnnnnnnnnnnnnnnnnnnnnnnnnnnnnnnnnnnnnnnnnnnnnnnnnnnnnnnnnnnnnnnnnnnnnn

SEQ ID NO: 46954 - DNA, 450 bp, Setaria italica
  Peptide Sequence Number=SeqID_112928
aaacttcaacaaagtgtgtctaccaatatcctagtgaatagtgattgtttattgtttaagcatgtaaattttcttcaatgaatgctatttttatgtaagcttcaatgatgccagtgttgatccaattatagtttagacttttagcaccaaactttgttagagtagggtgttgtccatgaacaaatgatgaaaacccacacatttgattatcacatagatgatcagctggatgctgcccaggatgaagcctatcccattggggatcccgaggaagatgtctcgatcaaggagaagcatccaacatgtttcatgtgcggtatgcagtatgctggagtggaagcctggttagaaaaaccttcaaacttcacaagtgtgtctaccaatatcctagtgaatagtgattgtttattgtttaagcatgtaaattttcttcaatgaatgctattttta

SEQ ID NO: 46955 - DNA, 462 bp, Setaria italica
  Peptide Sequence Number=SeqID_112929
tccgttgaggaagaggaagaaggagaggaagaagggcatgaactccacgctcttggtggtgatcaccgttttcatggcagcaaggggagacccgtacatgagcacattgaggcaggcgcatatcattccaatcaccatggttctcaagtctaattcactgatggcgaatgtggtggccgcgaacacgactccaaatccaccaatgtccaacgctgctgccagctttgcggccttaatatgccgcggagaggtaataagctgttggatgcctcacccttgtggcatgatcggcggcgtagacgatgaagaggacgacgtagatggcctccatgactgccccgaagccattgacggtggcgatgaggaggccatcgggcttggtaaggccgtagtagagccacagcagcgcgttgagcagcgtgaacacgtacggcgccgcctcgaacttcctccgttgacccg

SEQ ID NO: 46956 - DNA, 485 bp, Setaria italica
  Peptide Sequence Number=SeqID_112930
gtttcatgtgcggtatgcagtatgctggagtggaagcctggttagaaaaaccttcaaacttcacaagtgtgtcctaccaatatcctagtgaatagtgattgttttattgtttaagcatgtaaattttcttcaatgaatgcttattctgatcatctatgtgatctacatgaacagcaaggcctcccagagcagcaatgaaacaggggaagatggatggcaagcttcggatcctcttctggcctccaacgcttgatatatatgatcagggagaagcatccaacatgtttcatgtgcggtatgcagtatgctggagtggaagcctggttagaaaaaccttcaaacttcacaagtgtgtctaccaatatcctagtgaatagtgattgtttattgtttaagcatgtaaattttcttcaatgaatgctatttttatgtaagcttcaatgatgccagtgttgatccaattatagtttagacttttagcacca

SEQ ID NO: 46957 - DNA, 939 bp, Setaria italica
  Peptide Sequence Number=SeqID_112931
gtttttctaaccaggcttccactccagcatactgcataccgcacatgaaacatgttggatgcttctccctgatcatatatatcaagcgttggaggccagaagaggatccgaagcttgccatccatcttcccctgtttcattgctgctctgggaggccttgctgttcatgtagatcacatagatgatcagctggatgctgcccaggatgaagcctatcccattggggatcccgaggaagatgtctcgatcaagcacagcgtacgttgcccagatgcctccgttgaggaagaggaagaaggagaggaagaagggcatgaactccacgctcttggtggtgatcaccgttttcatggcagcaaggggagacccgtacatgagcacattgaggcaggcgcatatcattccaatcaccatggttctcaagtctaattcactgatggcgaatgtggtggccgcgaacacgactccaaatccaccaatgtccaacgctgctgccagctttgcggccttaatccttgtggcatgatcggcggcgtagacgatgaagaggacgacgtagatggcctccatgactgccccgaagccattgacggtggcgatgaggaggccatcgggcttggtaaggccgtagtagagccacagcagcgcgttgagcagcgtgaacacgtacggcgccgcctcgaactcctccgttgacccgctcctcacgatcctccagaacgtcttgatgggagatatgaagagtagaactgagatgatgttgcctatgatgccgatgatgaagaggatggagtccatggaagaagctggctgataggcaggcagagggtagccacaggttcaaatgctcaatggagaagcaaaatggtggatccaatcaagcaggaggtacgacgacgatcctgtcagctgtgtcccctgctgcctatgggagcgaga

SEQ ID NO: 46958 - DNA, 328 bp, Setaria italica
  Peptide Sequence Number=SeqID_112932
ggcggcgtccgcggggccgccgatgacggccgcgcacccggccgccgggaacgcggccgacgacgggtgcggcagcagcacccccgggatgctctccaggtatccgaacttccggcgcagcatcaccacgtagctcaggtcctccgccaccttcttcatggagccaagctgcacgacgccttctctgacggcgatgagggcaatggtcttgataccagactggaactgcgcctcccatgtcctcggatgagaatcggcagggttgctccaggatgagacgaggttgatctcgttctcctgctgctgctgggcctcctggaacacccat

SEQ ID NO: 46959 - DNA, 431 bp, Setaria italica
  Peptide Sequence Number=SeqID_112933
accgcatcctaaaaactaaattaataccttctgtaaaagcatacaaaagatgtctaaactctaaggtaatgccagctcagaggcttagcctgatatcagctacttcgaataaaaagagccactggatggttctctagaatgaggatgatgcagctgcttacatgtgtttatcgtttattaatctaatataataagagtcaactgttttgtgcctactgccagggttatgggtaaggggatacactaactcaatgatctgtgggtgaggaggctcttgatcttgctgtcaatacaaagttctaagccaagcctacaagaaactaatacaggctgggatggaatccatggatgtattcggtaggtatgataatggcaacagagacaaaggtttgactaacaacaggtaaaacagggaaacaacgacaaaacgt

SEQ ID NO: 46960 - DNA, 371 bp, Setaria italica
  Peptide Sequence Number=SeqID_112934
aaaaaactccggcgaatcatgcagcgtatcaagtatcaacactgggaatgaaacgccaggaccaattcaagcacggacagcggcacagagcagaggctctccgacgagcctcgagtttgagcacttgccacttacggagtagctagctaccgaatcagaacaatttaacataggaattggtaacgaaacgcaggtcaaaaggggaacaaaacgccatcagacacagccgggactgaattgcacaagaatttttccggcgactcgaacaaggaaaccaagctagccgaagaaatcacagcttcaacaagctcagcggcagccatgtctctccgatccaaccggcggaagaactctagttccagaattcgccg

SEQ ID NO: 46961 - DNA, 468 bp, Setaria italica
  Peptide Sequence Number=SeqID_112935
tgattgaagaggaaacattggagaaccagaaaaaatcgtcccctgaatccaaagtctccgtaactgaacgttcagctgaggaggttcagaatgttgctgtcacccgcgcggcaaagatttttgaaactccagttttctgcatcgaggaaagaaactctgacatccttgtgcatgatagtcaccgtgatgaggagaatgtgatatatatgtctgccgatactgttctttctgcagaaacttctgtacttagcaagaacgaagttattgtggaaagagaagagtatgtcaaggaattctgcgaggaggtggagctgaaacaatttgagagcaccactactgaaaggtgtcactatgaagtgaacaatcagtatcagtttggtgaactcatgagcgcatgttgggaacctgttatgaggcaggaaccttgttcggattctgaatctgatcttagcgatagttcttctgatg

SEQ ID NO: 46962 - DNA, 242 bp, Setaria italica
  misc_feature (170)..(170): n is a, c, g, or t
  Peptide Sequence Number=SeqID_112936
gcagaaggagaagaggaataaaaaacagaaggatcagtataagaaggatcataagttacaggtgaatgaccagtataataaggatcataagttacaggtgaatgaccaggataataaggatctagatctagctcataacaaaaagaaggataatctagtggtcaaaaagngtgccaaataaaaaggtatattctccagctactaaagatataataagaaataaggacgaaatagatgaaaag

SEQ ID NO: 46963 - DNA, 249 bp, Setaria italica
  Peptide Sequence Number=SeqID_112937
agcgcattatccaagttaagttggcatccacaacttgacttggatagaagaaccttgcgagcaacagcaggtgcatgagattgcttcaatcctccggcaccatgaatcacgagcgcggagactaccaaggcggcggcgaggagagcacagccgccgccgcagctgcccagacctccccctcctcctcctcttcctcctccgagcctccccatgtccctgccagcttgcctcctccccgcaccacggtcc

SEQ ID NO: 46964 - DNA, 562 bp, Setaria italica
  misc_feature (559)..(559): n is a, c, g, or t
  Peptide Sequence Number=SeqID_112938
ccaggctaaaggctttggcagatcctttgtatgccaccaagcttgagctgaaggacggggaagccgaaataggtctactttctaacctgttcccggccatcgcagaaccaggaccttcatttccaatgcaaccatttaagggaaagaataatagaatcagcatctcgtattaatgattttgtaaagctgataactgcaagtcttatgatttctcaagtgcccttgtaaacttagaataggataagatatttgtgcactggtttgcagcatctaaggcaagggaaatgtaaaaggtgaactcttgttgttctctaacacataactattaagatttattaccatctgctgccacatggttcatgtttccacagaaaaagggcaacttatgtttctagaagaaaagaggctcactaagctgcattttcaaaggagtcacatcgaaatgtacagagtaaaggtaataataatccacagacagaatgtcttgctacctgcaggttttgttggcacaagtgatgcttcagttaaatggctgtggtttctaagcttgaaataaacncca

SEQ ID NO: 46965 - DNA, 2616 bp, Setaria italica
  Peptide Sequence Number=SeqID_112939
cgtgttcacttgagctgcctgttgacagtccctctctttattatgtccagctctcctactcttagaggacctgaacttgaatatcttcgaaaagaacccgaggcatctatagcatcataacgtgctgatgaagtgaagagctcggcagatagcgctggatcaacgtccatatccatacttgctctgctcatgatctcaacatcctggatatgcaaatcttggctaaagcttgtggatccgttgaactcacttccttcattgcataccaacttcagagcttgaaccacttcccccatgaatgggcgctgatccacctcaggctgaacgcacatagaagcaatggctgctacttttgcgatactgtcaaatgcaatgctgctcccaagtgaaggatctatgattgattccagaccatccctgcttgtgagaagagaactagcccatgcgactaagttctcttgtccaggaggtcttgacatatctaccggtttcctccctgtaagaagctcaagaagaacaacaccgtagctgtaaacatcactctttactagaagatgcccggtcatcgcatattcaggagcaacatacccaaaagtacccataacacgagttgaaatatgctcatttccctcacccaaagctgtcctcgctaggccaaaatctgacacctttggggtgaagtcatgctccaataagatgttacttgacttgaagtcgcggtgtatgacacgtggacttgaatcttcatgcaaatacgcaagtgcacgtgctgcaccaagtgcaattttgagtctagcgtcccaatcaagccgagaagcccccttatcatgcaagtgagattcgacactgccattcggaacaagctcatataccaaacatcggctatgcccctctgtgcatatgcctatcagcttaaccaagttcctatggtgcaatcggctaagcatctcaacctcagccaaaaattcccgggtaccttgctggtcatcccgcttaagaaccttgatagcaacccgttctccatcctcaagaataccttcatagacacgcccaaaaccaccctcaccaataattctggactcatcaaatacctgtgtagctctctccatctcaaccaggctaaaggctttggcagatcctttgtatgccaccaagcttgagctgaaggacggggaagccgaaataggtctactttctaacctgttcccggccatcgcagaaccaggacctgcaggttttgttggcacaagtgatgcttcagttaaatggctgtggtttctaagcttgaaataaaccaccagtgcagctccagcacataaaataaaagcaaaaacacttgatagaataattataacaattatgcccctgccttttctttctccatgatttaccacatcagcagcaagcggatgaaacgtttgaccatttacattgctaagaccgttgttcatgcttgctggtggtgatgggggaagaccttcgtattgaacatacaacacgtcatactttccaaaatgcatagggtttatgatgaccttcttatgccaaaacctttcaaatactaaaagtgctgtcgtattgtcaaattttggttccagtggcacaagatcaataaagacaattgtcttctcagggtcatcaggtgcagcatttgctcccataacacgaacttgactttgattcatgagcactccagatgcaatatcttgtgcaaactctgcaaccagtgtgaagaacgtgtacagtgctataccaaagcgaagctcaacttttattggcaacacacagaggcatgttgttcctggaggactattggtcagaggatcttgacaggaagccgtgcaatataaatttgttggtggagatagaagcggttgattaggcgttggtgccaaagccttgggcttcttaaacacaggagtttcaggtggatgcacaggcggtagagcaggtcctggagaatatgatggcgaatggtattgatggggatggtgtggagcataagcgtaattgcctggtccccttccttttgatggaggcaaatgcacaggtgcaggtgcaggactatgatgtaaaccagaatttccatggccatgtctattcctatgggcgatgggagactttgagggagaaataccaggtccttccccatttgcaggcgcatggtgatgctttctctttgctggtgccaccactggaggtccatgggtttttccatgtgtattgttcacaggcatggaatggtgatgacctccttttgaaggcgctgcaactggaattccatggttcttaccatggttagctggatgaactgctgtttctgtagaaactgccgatcttttcatttgtttcccaataggcaatggtggtgaagccgttgatactgggggaacagcaggtcctacgcgttcgaatctttgatcttgtactggagatggatgaagcgcattatccaagttattttgtggatgccaactcgttatggatagaagaaccttgcaccggcaccatgaatcacgagcgcggagactaccaaggcggcggcgaggagagcacagccgccgccgcagctgcccagaccctccccctcctcctcctcttcctcctccgagccct

SEQ ID NO: 46966 - DNA, 401 bp, Setaria italica
  Peptide Sequence Number=SeqID_112940
taaagaaactaaaccgctcctcgacggcgacttgaggggcgcggtggactgccggatcgccggcgaggcggacgtcgccgaggtggagagggcatgcaaggtggcgtgctggtgcgtgcaggacgccgagagcctgcggccgagcatggggatggtggtgcaggtcctggaggggctcgtcgacgtcgacgtcccgcccatcccgaagtcgctcaaggtgctcgccgatccggccaagtacgtcgagttcttctcagggttgccgtcgacctgagattcactgctagcggcacgaacttagcagtagtgtgtgtgtgtgtgtgtgtgtgtcaagaggctgtactcctgacacgaagcttgtagtagaatactagtactgcacagagaccaaagaaaatttt

SEQ ID NO: 46967 - DNA, 373 bp, Setaria italica
  Peptide Sequence Number=SeqID_112941
ggcaaaagcaagaccgtgcattcttcatcattgcaacagtttactcttccgcggtcctctgtacaaggctgtttttctggcttctaagtgtctggaggaaagaaaaaagaagaaaaataaacacaatagaggagcctgagaacatggatgaagtacttaggctatggaggaccgaagacactagttcagagttctcattgtatgatttctctcagattgctgatgctacagacaacttctcacccaaaagtaaactaggagagggtggatttggcccagtttacaagggagtatttcctgatggacaagagctagcaataaaagactgtctagctcggtcacagcaaggtctactagaattcaagaatgagat

SEQ ID NO: 46968 - DNA, 139 bp, Setaria italica
  misc_feature (134)..(134): n is a, c, g, or t
  Peptide Sequence Number=SeqID_112942
ggctgggttccctcatcatgcctctacttcgaagaaatccggtggtaggaatccaaggcaactgccgtgaatctccaaacagcagcaacaatcatgtcaagtgcgatgacattcgagaagaggatagtgataanaagat

SEQ ID NO: 46969 - DNA, 498 bp, Setaria italica
  Peptide Sequence Number=SeqID_112943
agaccgcctggtcattctcgaaaaagaatacaatagattagaaaatgggttaaattcgaaatttccaattttgcaatgggaccttatccttatgctatttgcaactttagaacatatactaactcatatttctaaaccatttcaattgtgattatgattcatttgataaccttattagtttgtgaacttaggggattacgtgatttgtcagaaaaaggaatgataactacttttttctctataataggattcttagttcttcgttgggtttcttcgggacattttccattaagtaatttactcggcactagctcggtagtgccagccgtgctagcgggccgggccggcacgataaaaggccatagtgccggacttgggccaacagttcggcacgtagtgttggcccggcctggtacgaaaaagtcatcgggcctaatagtgccggatttagtcagaccgggccaaatcgggctagtgccgggcggtccatctggccat

SEQ ID NO: 46970 - DNA, 569 bp, Setaria italica
  misc_feature (521)..(569): n is a, c, g, or t
  Peptide Sequence Number=SeqID_112944
ggtggcgggtcccgcgactctggttcgggataccgtggtgggtctggaggtttcagacgaccttccaatgactttggcaggtctagtttcggtcgctccgatagatttggcgactttggagaaggcgatttcagcaggcgtggcagccctgactttgggcgctcccggagctccgatgattcaggatcctcgcgctatggcagaggatccagtggtgttggcactcctggtttcggcaacttcggtggctacggggattccaagcgatgagtggaatgtctttcttcttgtacagttctgaacttttttctagcacctgttgtttcttccatgcctgagagaactaggcgcgctttgttgcgcttttggcctaatcactagtagtttggttgtgtagtgctgtttcagaacttatgttgtatttgtaatttgtgtatgtgcctactggcccctgtatgttctgattccgttactaacattaataatctgataaaaagtaaaaaaaaaaaaaaactaaaatnnnnnnnnnnnnnnnnnnnnnnnnnnnnnnnnnnnnnnnnnnnnnnnnn

SEQ ID NO: 46971 - DNA, 212 bp, Setaria italica
  Peptide Sequence Number=SeqID_112945
aagaggtttctacaactggatctggatgaggtagaccaagtgatagcttcggaggcctatagtcagtgaaagtttctccaactgtgccaccttcgtcttcttcacgctcaacatcaatagcaacctcattgatctcctcaggctcaacagcaggcagcaccataggaatcgtcacaccagccaccggttgcagcggctgccgccacgccagg

SEQ ID NO: 46972 - DNA, 442 bp, Setaria italica
  Peptide Sequence Number=SeqID_112946
tagtaggtaatgtggtattgatttctgtgctgtttaattaagattttgagtaagtattaaattcgtgatacttttatggatgctgcagcatgtttgaaattattggattggtgcatcagacagtttagcttattgcttgatgctttgatgcctctgctgtacttgctgaatgggtatacattgtaggactggcacacatcattgatttgaggtgctctggaaacttggttgtttaaacttaccatcgttcattcatgttgctatatagtgcatatatgatcctttcttgatgtcaccatgtgcaatattgcaagtagattagaactgagtatgtttatcttcactgttgattgttttccttgagatgtatgattttttagacatgttcggctgttttcaatgtttaggttgttcttctatttgcttgatctgtatatttttt

SEQ ID NO: 46973 - DNA, 242 bp, Setaria italica
  Peptide Sequence Number=SeqID_112947
ctctaccatgggtgcaagtgcaacatacactgctgaatgctgaagaccacatatggcattttaaagcttaagagttaaagctgtagaggaaggtgcctaaaaataagcttcagaacacaatatgagctactgctatcatgctaacctgtcacgacgtttctcaaggaagcgttgaagagagtgcctcctggcaattgggagatcagcctgaagcttgcacattgagctagggtcagccacaa

SEQ ID NO: 46974 - DNA, 990 bp, Setaria italica
  Peptide Sequence Number=SeqID_112948
ttcggtcgtagtacgttgtctctttatttttttttttaggttttttttagtttttttttggaggataacatagatggtatttcattactagatgatcattgtgacatacatagtcagacagacgaccggcatgatgtacaacgactgaacgacacatcatatcatagcagttcggtatgcgggtaaacgaattgacggccgaataaaccaacctagcacatgacaacagaacagcgataatagaggttccggtccaattattagtacggtcctgagcttcaacatacgacaacgacacatccctgccctttccacaacgtcagccttcaccgtttcgagcgtcacggctccctatctttcaagttactgggccttgccctcagctgccacttccatcccaggtgactccatgccctcagatgacttcgcagggctgtatggagccttgttcacaatcctgtcacgacgtttctcaaggaagcgttgaagagagtgcctcctggcaattgggagatcagcctgaagcttgcacattgagctagggtcagccacaacctgaggctgcccatttgctacagaagtgctctgcagtgacagagaccgtgtgagcgcgggagaaactgctgctggggcaacagtggctgcagctacaggcatcataggaggcttaacggcagtggttttggtggctgctgcagccgctgcagcaataagcatgatcgcttgagccttttctggtggcactgagtcatatacacatactgatccgccatagaaaattgtaagctgttgaggatttgctgaaggattcgacatcggcaacattccagacctggcgctgccgttggcgagtgagaggctgaggccttggccttgctgcggctcctgggtcttctcctcctccttcctcccctcttccttgcgcgcctcctcctcctcttcccccttcttaatgttcctctccaacagatccatctcaaacttgagtcg

SEQ ID NO: 46975 - DNA, 285 bp, Setaria italica
  Peptide Sequence Number=SeqID_112949
ttcgccagctcgccgagctccgtcgggatagagccggtaaggttgttgctgaagagatacaagattcgcagcttcgtcgccttgccgagcgccggtgggatcttgcccgtaagcgagcaactctcctacgggcacgttatgagctccggccagcccgtgaacagcgcccctgggatctcgccggtgaggttgttgaacgatacgccgaactcccgcatcttccgcatcccaacgaaggacgccggcaggctcccggagaggtggttaccggagaggtcgacgaag

SEQ ID NO: 46976 - DNA, 714 bp, Setaria italica
  Peptide Sequence Number=SeqID_112950
ggtcacatcactctgcaaattaggcatgctcaatcttcaatcaatacaaatccaaagttatcataggtgttcccttgatttcttacaggattcttggtccctcctgttatggaccaattctttggtgccaagttcaggcacaggaagcagaagaatccagcgccaggtgtctgatagagttcagccggtttggttagttttcttaggaattaagttagcccttagagattgagtttgttagcgataagattggttagtttgttacagccgggctcttctataaagcacggctgtttatctgtaaaagggcaagcaagaagtagaggaatcaatctcagagcctccagcgtgagggcgagatctccatctacctcaagctacccggtttatatatctcagcaattgagccatatcataatatatctcagcaattgagccatatcacctcctcctcgccacctccagaaatttgatatgtccatagattactattttcccagaatcccgaactggatggagtcactggagtacctcacttacctagacatatatcttagtccagtggatgaggaatcatttcggacgtttggggacttgcccagtctgttatttctctggatatcctcaagttcagtaaagcctaaagaaggggtcattacaggcagtaacggattctgttgtctgaaggagttctacttctcatgttgggaaatt

SEQ ID NO: 46977 - DNA, 529 bp, Setaria italica
  Peptide Sequence Number=SeqID_112951
acaaccaagacaaacaaaccagccagcagcagctcaggatgggcgacgccgccatcgccgttgtgcgtgaggacgaggaggagcacatcttccggagccggttcccgccagtgtcggtgccggacgacgtgacggtgcccgagttcgtgctggagggcgccgaggcttacgctgacaaggtggcgctggtggaggccgcgccgggggggccggtcccacacctacggcgaggtggcccgtgacgtggcccggttgcccgggcgctccggtccgtcggcgtccgcaagggccacgtcgtggtggtggctctcccgaacctcgccgtgtaccccgtcgtctcgctggggatcatgtctgccggcgcggtgttctccggcgtgaacccgcgcgccatcgccgccgagatcaggaagcaggtggaggactcggaggccaagctcgtggtcgccaacgaggtggccttcgacaaggtgaaggacgccggcgtgccggtgatcggcatcggcgacgcggagcgtatgcccggcgc

SEQ ID NO: 46978 - DNA, 483 bp, Setaria italica
  Peptide Sequence Number=SeqID_112952
gtctcgatgtagtccggcgccgcgtacccgtgcgtcccaaccaccgcggtggagacgtgcgttttcccttcggttggcccctcccttgccaggccaaaatccgacagttttggcttgaattcggcgtcgagaagaatgttggatgctttaaaatccctgtagatcacctgaacttccggcactccttcatggagataatccaggccccatgcggcacctatcatgatctgcagcctcaatctccacgaaaggggaggatgagatcggttgaacagatggtcatccaagctcttgttgggcatgaactcgtagaccagcagcctgtgcttgcctgcttctgaatccactgcgcagtagccgatcagctttacgagattcgggtgctctagaacacccaggaattggacttcagccagccactgcttgtgcccctgcaggctgcgctggttgaggcgcttgacggcgaggacgacgcggccgccg

SEQ ID NO: 46979 - DNA, 332 bp, Setaria italica
  Peptide Sequence Number=SeqID_112953
cggggcggctccgctccagcgaccgccgccccgtcaggatctcgtacagcaccaccccgaagctccacacgtcgctcttcgccgtcaggtgccccgtctcgatgtagtccggcgccgcgtacccgtgcgtcccaaccaccgcggtggagacgtgcgttttcccttcggttggcccctcccttgccaggccaaaatccgacagttttggcttgaattcggcgtcgagaagaatgttggatgctttaaaatccctgtagatcacctgccactcacaccaaaaggccgtggatcagatactgatcaattactagtctatgtgttcttaaaaattt

SEQ ID NO: 46980 - DNA, 430 bp, Setaria italica
  Peptide Sequence Number=SeqID_112954
agaccggaccaaggcgctggtccatgatgcagcggagccggcggctgccgccgctgaggtagggccgggtccagtcgacgagcttcacctgctgctcggcgtgggcgctccggccgcggacgtgctccatggcgcggcggcccgtgaggagctccaggagcacgacgccgaagctgtacacgtcgctcttcacgttgaggtggcccgtctgcacgtactccggcgccgcgtagccgtgggtgcccatcacgcgcgtcgtcacgtgcgtgtcctcgccctcgggccccatcttggcgagcccgaagtcggacagcttcgccgtgaagtccgaggtcgtgctcctggagctcctcacgggccgccgcgccatggagcacgtccgcggccggagcgcccacgccgagcagcaggtgaagctcgtcgactggac

SEQ ID NO: 46981 - DNA, 1145 bp, Setaria italica
  misc_feature (172)..(172): n is a, c, g, or t
  Peptide Sequence Number=SeqID_112955
gcaagtccaagctggactttcatcacactattcttgcataccctgtactttcctaacacctaacatccactatcgctatcaagaagaaaaagaaacaagaatcgcaatctccgaactaatccaagccaatgtgacattgtgtcacatctctagtagtatgtacacacacacnccctttttaaaaaaatcctactcgtcacttcccgctcctgcctcctacgcccccctctcctggcggtggctggacgccctcctctgccgccggatcgcgccagtgtaatcgtcaccgccgaccatcccatcccggctgtggagcacaatgccggcgtggatcgacgagttggggtacttctggcggtgcctgtcctggtggctctggtgctgctgtggccggtgcggcttcttctcctcgacctccaccttgacgcccaccaccttgtcatcctccacgctgatggtgaacacgaacgggccggcggggagaagtcgtccatgccgagcacgggctccagggccttgaccacctcccgcatcgttggccgggacttggggttctggctgaggcacttgtaggccacgatggcggccacctcggcgcccctgcacgagtactggcactccagggccgggtccatgaccctgtacagcctgtcggggtgcttgaggtacggcctggcccagtccaccaggttctgctcccgcggccgccgcgcccggtccaccgactgccggcccgagagcagctccagcagcaccacgccgaagctgtacacgtcactcttggcggtgaggtgccccgtcaggatgtactcgggcgccgcgtacccgtgggtccccatgacacgcgtcgtcacgtgcgtctcgtcgccctgcggcccgtccttggccagcccgaagtcggacagcttggtgttgtagtcctggaatcacatcagtatggaggaagatacagttaggtgaaagatcaccaactttccgaaaaaaaagaaagatcacttggatatgcagatgtatactcgtatacgatgcatcgagatattagtggtctctgctaggactgttcacgtactaatagaccgtggggtacttgtgtgggataagctgacagttatggttcggatatttggttaggtggatgatgtgaa

SEQ ID NO: 46982 - DNA, 500 bp, Setaria italica
  Peptide Sequence Number=SeqID_112956
gcccgatcaaattgatggatgagacgacagactatattactcctggtaagacggagggagacataccgcggttgagacgtgagtgtttgctccagttggtccctccctggctagcccgaagtctgacagctttgctctgaagtccttgtccagtaaaatgttcgaggtcttgaagtcccggtagattacctagccaaaatcaaaattgacggatcaagataaggtactagcttttctgaaacaatgactcaccaccaaacaagaaagagtactgtagtgcacgctacagaacaggtcatgataaagtgttatcatcaatgacagcctactaaatgtgatattttgatctttcttgatggctcatgacaatcagctggggaactctctttactaagtatttgatgctagacaaggctggaatgtttcatacaacagcacagctagaagagaaatcttatacgttggctgcatgtaggagccttgaacattgaactgtgctt

SEQ ID NO: 46983 - DNA, 993 bp, Setaria italica
  Peptide Sequence Number=SeqID_112957
cccatcacgcgcgtcgtcacgtgtgtcgcgtccccctcgcgggccctccttcgccagcccgaaatcggacagcttcgcggtgtagtcctgaagagtgaaggtcatcatgacaaaaacttgctgtcagaattcagcaacatctgcgttcatctcatctataatgtcaagatcagcaacagttttataaggagaactactgtgcttttgtacacttgactccgtcaatgatgtgcaacgcaacagtggttggggatgcacacgtcaaggatggttacactttgcaactgctacagactacagagcattaggtttccaaactaaccaaattattgtactcaaattagattatccctaacagccggcacctagaataaaaagccgaggcgttttgctgcgaatttgtcggtagttgcagaacaaatcagatttgagcacgagtgtcacaaattcttaacgaagcgaagcttcgacacggatcgttgacaacgtgcgcgagcaattagcatggttggcgtgtaggtaagaaacattaacaaaagggatccggttccaacggtaataaacaatctgcaacttgacagcgactaggcacaggcacctaatcatgcagttctttatcgtcctaaatggctcgtcagtaaaaaactaaagaggtcagctcgttgatttttgcggcgaatgtgctgtgcgctagctgttgatgctaagaagaaagagaaacttaccgagtcgaggagaatattcgatgccttgaagtcgcggtagatcaccggcgtctccgcctcgtgcaggaacgccagccccttggccgcgccgacagcgatcttgagccgcgtcgaccatggcagcgatgcgaggagattcttgaagaggtggttctcgaggctgcccctgggcatgtactcgtagaccagcatcctctgatcgtcctcgttgcagaatcccaccagcttgaccagatgcggattggtcttctagtctattcccgtaggt

SEQ ID NO: 46984 - DNA, 316 bp, Setaria italica
  Peptide Sequence Number=SeqID_112958
gaagacctcggcgagccactccctgtgcccctgcgtgccgcagtcggggtcgaggtacttgacggcgacctcccgctcggcgtcgagcccggggcggaggccggcgccgaggcggcccctgtagaccgggccgaacccgccgcagccgaggtagttggcgcgcgcgaaccccgccgtggcggcgcgcagctccgcgcgggtgaaggcgtgcaggtcggaccccgagacggagagcgtcaccgagaggtcctccggcgtgagcgggccggacgagtcgaggcccgacagcgacacccgggacgcggatgacggagga

SEQ ID NO: 46985 - DNA, 422 bp, Setaria italica
  Peptide Sequence Number=SeqID_112959
ccattgaaaagctcttgtgttgtttactgctagatactagtccaacaacgtatgacgcacggcctgacaccgtgtacgcaaaagtagttcatcaaagatgacatgtcaagttgcacaaacaactcaccgaatcgagcaagatgttggaggccttgaagtcacggtagatcaccggcttctctgcgtcgtggaggaacgccaaacccttcgcggcgcctactgcaatgtttagtcgggttgaccatggcagtcaatccatgggagggcgccgttgatgcctgcagcgaaaaggacgttccggatgagtttcctccccggcattgaccaatataggcaagcaggaaataatcctgatattttttgttcccgacatgagatctggcatctaatttaataaagaagtagttgttcctctggaaggc

SEQ ID NO: 46986 - DNA, 352 bp, Setaria italica
  Peptide Sequence Number=SeqID_112960
acctcggcgagccactcccggtggccctggaaccccgcggcgttgagctgcttcacggcgacgggctgcgcgccgagccccggacgcatgccggcgtccacgaagcccttgtacacggcgccgaagccgccctcccccagcaggaagctgctggagaagtcgtgcgtcacgccgcggagctcgccgaggccgaacgagtgcagctgcagcgggcccgccatctcccccgccgcctcgccgccgcacgccttgccgctgccgccgtctgacgacgccatggtggccgaggccgggctgttggccagggacgacaggcgccggaacgacgccaggcggcgcgagagctccgact

SEQ ID NO: 46987 - DNA, 1065 bp, Setaria italica
  Peptide Sequence Number=SeqID_112961
ttttttttaagaagaccaagtagcaaaattctttcaaaattctcactttcgaaagggaaaggaaaacttcaatccgccaaagccgtctctatgtacacaagttatctaagtaatgtgcccaaaaaatatttgtaagcccccgccactaacccacaccatacaccccaaaactaacactcttttgtgtgctgtgctgtcacgtccgatgacagcatatcagtctcccctccctgtctaactttggctctgccaaccagagccttcgcgcgccgacgactctgtagcaatcacctcctggacggcgcggccgcgtcggctctcttccccttgacggcgccggcaccgggtgcccggccatccggctcggccgcctgcacggcccgcctgagcacctcgaccacctcgctcatggtgggccgctccttggcgttcttgagcaggcagctgtcggccagcttggcgatctcccgcgcggccttcaccgagtactcgccgcggagcctggggtccatgatcatccggaagttgcggctgtccggcgggaactgggccacccactccagcaacttctgctccgccaccggcttgttccggtccagcgaccgccgccccgtcaggatctcgtacagcaccacgccgaagctccacacgtcgctcttcgccgtcaggtgccccgaatcgatgtactccggcgccgcgtacccgtgcgtcccgacgaccgcggttgagacgtgagtgtttgctccagttggtccctccctggctagcccgaagtctgacagctttgctctgaagtccttgtccagtaaaatgttcgaggtcttgaagtcccggtagattacctgaacttctacgccttcatgaaggtaagccaatccttctgcagcacccaggataacctgaagccttccgttccacgacagaggaggattagctcgcctgaacaaatggtcttccaagctcttgttcggcataactcgtacaccaacaattctttgtggccctctttcactatcaacagcgcaatatccaagtagcctttacaagtattgggtgctccagaac

SEQ ID NO: 46988 - DNA, 1443 bp, Setaria italica
  Peptide Sequence Number=SeqID_112962
cacgccttctgctcggccggcaggtgccacacccagaactcctccttctggccggcgccgccgcgcttcctggggctcgccttcggcgacatgggcctgcgccggcggacgtccttcctcggcgtccgctccttcttctcctccgccgccgccggcgtctccgtcgccgccacgaacagcaccaccgggccaactggtcccactggccccaggggcacgtcgtccttgaggctgagcagtggctccagggcctcgacgacggcggacatgtccggccggttcttggggctgccgctgaggcaccggtacgcgacgagggccgcgctctgggccgcctgcgccgagtactggccctccatggccgggtccatgatccgggccagcttgagcgggtccttgaggcacggccgcgcgtagtccaccaggttctgctcccggctgggccgcgtcttgtccaccgaccgccggcccgtcaggatctccagcagcaccacgccgaagctgtacacgtcgctcttcgccgtcaggtggcccgtcatgatgtactccggcgccgcgtagccgtgcgtgcccatcacgcgcgtcgacacgtgggtgtcgtcgccctccgggccatccttcgcgagcccaaagtcggacagcttggtggtgtagtccgagtcaagcaggatgttggacgccttgaagtcgcggtagatcaccggcgtgtcggcgtcgtggaggaaggcgaggcccttggccgcgccgacggcgatctccatcctcctcatccacggcagcgatgcgaggagattcttgaagaggtggttctcgaggctgcccctgggcatgtactcgtagaccagcatcctctgatcgtcctcgttgcagaatcccaccagcttgaccagatgcggatggctcagcatcccgaggtacaccacctccgccagccactcgcggtgtccctggacgccgccgctctcgaggtcgaggtacttgacggcgacgtgctgcgggtcgaggcccgggcggaggcgggcgtcgacgaatcccttgtagacggggccgaagccgccctcgccgaggaagttggcggtggagaagttcttggtggccgccttgagctcgtccagcgtgaaggcgtgcagcttggtggtctccagcttccgcgacaggtcctgcagcgacagcgaccgcaggttcgccgtgctcagccgccgcagcgtcggcttcgtccccgcccgcctcccgcccgccggccgggccgccgcctcctccttctgctcctgatccgccccctcctcgccgccgtacccgaagcaccgcagcaggcgcttcctcagccccatgatcaatcaattcacgtcgtcgctgctctgcaccctcaccgctggcgctcgcggctctggggactggctagtggtggtgttcaagaaccgggtgtcgctggtgggtagcgga

SEQ ID NO: 46989 - DNA, 1213 bp, Setaria italica
  Peptide Sequence Number=SeqID_112963
ggtccttagttcccgttaagtttctttgtactagtctttcgtccccgcttcggccccgccgccgccgaccgtgtacacgaagggccccataggcacgtcgtcgtcgagcgcgagcagcggctccagcgcgcccacgacgtcgcgcatggagggccgcgccttgggcacgctctgcaggcactggtgcgccaccttggccgccttctcggccgcgcgcgccgagtactgcatctccaggctcgggtccatgacccggtgcagccggtcggcgcggcggaggtagggccgggcccagtcgacgaggttctgctcgcgcccgcggcggcgcttgtcgacggagcggcggcccgtgaggagctccaggagcacgacgccgaagctgtacacgtcgctcttcgccgtgaggtggcccgtcaggatgtactccggcgccgcgtacccgtgggtgcccatcacgcgcgtcgtcacgtgggtcgcgtcgccctgcgggccctccttcgccagcccgaagtcggacagcttcgcggtgtagtccgagtcgagcaggatgttggaggccttgaagtcgcggtagatcaccggcgtctcggcgtcgtggaggaacgccagccccttggccgcgccgacggcgatcttgagccgggtggaccatggcagcgtggccgggatcttcttgaagaggtggttctcgaggctgccccgcggcatgtactcgtagacgagcaggcgctgctcgtcctcgcagcagtagccgaccagcttgaccaggtgcgggtggcggagctgccccaggaagatcacctccgccagccactccctgtggccctgcgcgccctcggggtcccagagcttgacggcgatggcctgcgccttgagccccttcttgacgccgtcggcgacgaagcccttgtagaccgggccgaagccgccctcgccgaggaagttgccggagacgaagccgcgcgtggcgtccttgagctcggcgacgctgaacacgtggaggttggaccccaccagcgacaccgacaggtcctggtccgccgcgccactcaggtccgtgaacgacagccgcccgccgcccggccgcaccttccgctgctgcctgctgctgtcccccttcgctcctcctccgccgccgaggcagccgcccagcagcgacctccacgccgacgccttctctttcctcgtcgtcctcatcgaccaaccgccgaag

SEQ ID NO: 46990 - DNA, 891 bp, Setaria italica
  Peptide Sequence Number=SeqID_112964
ttctcttacctaagccgccagtgtctggcgcctcggcaagcgctgcgccgccgtggaggggctcgccggcagcgcggattctgacggtgcgggcaattgccgtggggggtgtcgtgtgcgccgtttgtgggtcgaagattcaggccctgaagagaggccgccgtgttgcggagcgcacccactcggattcctcgaacggctaccctgacaagccgatctcgaggtcgttggctgctgaattcgagcaggaggctgacaaggatgaagaggataatgcaggcgaaagcagcgattcagatgaaggcaatgtgcagtatctgaggaggaggctcaaggaggagaggctgctgaaggaggttgcgctcgaagagctagagaaggagaggctggcggcggcatctgccgccgatgaggccatggccaagattgcctgcctgcgtagcgagaaggcgctggtggagagggaggcgaggcagttacaggagatggcaaagcagaagcagctgtatgatcgacaggtgattgagtcgctccaatgggtgatcatgaaatctggaatgcaaggctgggagcctgaagccgcatctgatccagctgcgtcggaaacaagcgaggatgacagagataggaagtagctagccccgggttcttagtagttggatgtaacagtgaggaaggcactgtgctggggaagtcattgcctgcttgagttctttgtcctctgatcagttttcagcagccaaacatggcataatggcaagttttgataaatcagggaggatgctctatgccaaactcttgagagatctgtaatatctacctgtatatataccatcttttacaagttgtttagcttacttaatatgaataaaaaccagtactagatcgttc

SEQ ID NO: 46991 - DNA, 403 bp, Setaria italica
  Peptide Sequence Number=SeqID_112965
tagttaatggaggagctagcctcgggcttgaagaggatctgcttgcttgaccaacagccctgcgctaggtgtgatgccatggacgatactcagtctccatcacggaacagatggagattcccggttgaggaagaggagaaggaagtaatgaggcatcagcttgtagatggcttatcctcttcttctgttgaaataagcatcggatgacatgggtctccatcatcccaacagataattgtaattccagctctagctttttcctggagcactgttattagatcatggcttgcattgtaatcgtgtagtataatagcaaataattgttattttccaggtcaaccataacttattgtgcttaattgttgattgcaatgacatgtcaggcagtgcctcatttgtgaag

SEQ ID NO: 46992 - DNA, 324 bp, Setaria italica
  Peptide Sequence Number=SeqID_112966
aaggtaaagggagactgttgaagcactattttcttatcaagtctcccaatatggtagttggattggaaaaaggagaccgttgaagatgggtaaaaaggaagtggctgaaatggctcctctggcgaggtcctaggctatgatccagcgatttgatctgtattgagttgaatgcaccaactattcgggacaaaagagggctctctttagtcccggatcattcacccgagactaaagacacctttagccctggatggtaataccaacacgaactaaaaatgttaccaaaaaaataaaaagtgggccacccgtgccggccgcccgccg

SEQ ID NO: 46993 - DNA, 1326 bp, Setaria italica
  misc_feature (1299)..(1326): n is a, c, g, or t
  Peptide Sequence Number=SeqID_112967
gttttcggtttttggttttcgtttttccgttttacgttttccgtttccgtttcggttcggcggcggcggcggcggcgaaggaggaggacggcaaggtggcgctgggagggtcaggcgtcaccgtgaccaagctcggcatcggggcgtggtcctggggcgacaccacctactggaacgagttccagtgggacgataggaaactgaaagcagcgaaaggagcatttgatgctagcatcgattgtggaataaccttcttcgatactgctgaagtatacggagcaggggtatcaggagctataaattcagaaagtttgctgggaagattcatcaaggaaaggcaacaaaaagaaccggtagaagtggccattgcaacaaagtttgcggctctaccatggaggtttggccgtggaagtgtcatttctgcactgaaggcctcattagatcgccttggcgtctcttcagttgagctctaccaacttcattggccagggatatggggcaatgaaggttacctggatggccttggagatgctgttgagcaaggtcttgtaaaagctgttggagtctcaaactacagcgaaaaacgtctccgagacgcttacgagcggctcaagaagagggggattccgctcgcttcgaatcaagtaaattacagtctgatatacaggaaccccgaggaaaatggtgtgaaggcagcttgcgatgagcttggaattactttgattgcgtattccccgatcgcgcaaggtgctctgacagggaaatacacaccggacaatcccccgaaagggcctcgaggacggatatacactccagagttcctgaccaagctccaaccgcttattaaccggatcaaggagattggagggaactacgggaggaccccaacccaggtggtgctgaactggctggtgtgccagggcaacgtggtgccgattcccggggcgaagaacgcggagcaggcgcgggagttcgcgggcgcgctggggtggagcctgacgggggaggaggtggaggagctccgctccatggcgcgccaggtcaagcccgtcatcggcttccccgtggagaagctgtgacgaattttggatcgatggccatcagtggcatcacaaagacctcatgacaaacgaagtagtagtagtacagcatctatagtactgtagtatgatacagaattacagataggtcgacaagcataccatttcgcaatgaaaacgagaacatgcattggaaaaacagaagaagattactaagggggtggtttgggatcctgagaactaaaaaaaaaaaaaaaannnnnnnnnnnnnnnnnnnnnnnnnnnn

SEQ ID NO: 46994 - DNA, 530 bp, Setaria italica
  Peptide Sequence Number=SeqID_112968
gtgggaggtgattgaccgaattttacatgagcaatcgtccaggtccaaatcctccaaagagtggcatactgacctaacatgcttcacgaaatgattatccagaattacatggcagagatgcagccttttgagacaccaagagccggagctcaatcccacatgctgactggcacgatcggggcaaaatatttcatcgtgcaacggagccatcctgctgcctgtctatctccaaactcaggtgctctgctcccaataatatgcagccggaatgaatccaactgtgcaatgttacaacgaagcatcaggtttgcagtgaaatcctcaaaatcctcccagtccttgtccttccccttgtgcctgtgattgtcgtcgtcaacgttagcatcagagctgccaagattggagcctgagcagtcaccatcggaatcactgtcagaatcaggggtgtcatcatcagagtcagagttatcatccccgtgcgagtcagagttgtcgtcagagcaatcactgtattgaacacattgcggtcg

SEQ ID NO: 46995 - DNA, 612 bp, Setaria italica
  Peptide Sequence Number=SeqID_112969
ggcatttgaggtggtggcttgatgagagtgagcggtgctgtggcagagatagtgttagcataatgcaaggttagcagtgcctgttttgttgtcaacttgcacgggggcatccatgaagggagaaactgacaagaggtagcggccagcagttcgatcagcagtgaggaggacgttggtggtctggcctggagtaatgagcagagttgcagtcttacgtaataagaactagacaatatcaacctcaaccacagtgaatttgtgcccggcaatcttgaagaataggtcatcattcagagcagcgttgatgatccggagcatgtatgtcttgccattttcaacgtttagcttgaatccatcttgcgaggaggcacaatcggacagtggaccagggtgaccgttgatggtgtgtgaatcggaaacattaggtcctactccttgttgcatggcctggttgatcaccacttctgtgtctgctttccaccattctcctagcacaacaacaacctccttgtggagagtgggaaagggatagggcacaccgagcttggggaggatgacaatggcgccatggacggtagccctcagccagttgatgtgggcatgccagaggag

SEQ ID NO: 46996 - DNA, 407 bp, Setaria italica
  Peptide Sequence Number=SeqID_112970
tgtagaaccaatgtgcttacctaccaccactagtcacaatacaagatgcagaaacctgagctaaggccctgcctattaagaccatgcgcgactaatgcatgacacctcgcaacacactggattggccgtgaaaatacatgagatgctctaaaaaaggcaggcattataccgatgagctcgcctgccacaattgtagggtggaatctacaacctttcacatgcctcaaatacgcacatgcatctaaaatatccaacgggtacatgtttgcatttttttttgaagacaagtagaataatccagtgacaaagcaaaggacttttcaactgtcatctttatttagtcatgtcaaacaactgtcattggatagtcctaaagacaacatgatttatatgatttacaaaccaag

SEQ ID NO: 46997 - DNA, 458 bp, Setaria italica
  Peptide Sequence Number=SeqID_112971
gacatggaagctacagcgttatcgctgcatctttgcatggtagctacaaaagctgtgaagttggcttccagagtcatggacaatgcaactttaagacatgataagcaagctgaaacttatttacatacaacaaagcagaccctcacgatgtatgtgtccatctttgttaaattggcagaggacacatatcataggaaatttgatgatgactctgtattctctcttcttggtgcttttaggggtgtggccgcaatagcccacatcttagttaaggatgctattgaaagtgttgactctgttgaatatggctcgtggaactacaattcattagtcgaggacacagacaacagttggcccgagtttagagcagaatattaaaaatttggaagaccaatttagggcagtactcaaaaacaattccaagatgtataagcttctgaggcctacaatggagaagg

SEQ ID NO: 46998 - DNA, 1715 bp, Setaria italica
  misc_feature (1693)..(1715): n is a, c, g, or t
  Peptide Sequence Number=SeqID_112972
tttgtttggttcttaactttgttaaggtttgtctaaaagagcgctcagcactacacggaggcggccatggatgagatcaagatcttgaagcagatcgctgatggtgatcctgatgactccaaatgtgttgttaagctccttgaccacttcaagcactcgggccctaatggcaaccatgtgtgcatggtatttgagtttcttggtgataacttgttgaccctgataaagtacacgaactatcgtggaattccccttccgatggtcaaggagatatgccgccatgtgctcatcggcctcgactacctccaccgcacgctttctattattcacactgaccttaagcctgagaatatattgcttgtgtctaccattgacccctcaaaggacccccggaagtcaggtgtgcccttggttctgccttctgccaagacagacgagccaactccaaaggcgcctgcaccatcagtaaatggtggcctctccaagaaccagaagaagaagatccggaggaaagccaaacgtgcagctgctgcaacttcagaaggtggtaatgctgtggcatctgctgacacagatgggtcagacgacagaggagatctaggcacaacaaatgagggcagtcctagccaggatggagctaagaagcggtcaaaaggagatagacagggtagcaaaggggctaagaagaagatggcaatggaggctgatctgaagtgcaagctggtggactttggaaatgcatgttggacatacaagcagtttacaagtgacattcaaacaaggcagtacagatgtcctgaggttatacttggttccaagtattctacatctgctgacctatggtcctttgcgtgcatctgcttcgagcttgccacgggggatgtactgtttgatccacacagtggtgacaatttcgacagagatgaggatcaccttgcgctgatgatggagctactaggaatgatgcctcgtaagattgccttgggtggtcggtactcgcgcgagttcttcaatcggtatggagatctgaggcatatccgacgcttgcggttctggcctctgaacaaggtgctgatggagaagtacgagttcactgaaagaaacgcaaatgacatggcggattttcttgtaccgatacttgattttgttcctgagaagcgtcctacagctgctcaattgcttcagcatccatggcttgatgctggtccgcttcaaaagcaacctacaaccctgccagattctacgcagaattcagctgatggtgtttcagagaagcaaaggaaagagaatgaagaaagagatgcaatggcagtagagctggggaacattgccatagatggtgcttcgccatccaggacggcgagtgatcctcaagcaagcacgaataaagcaactgctaccccttctaagaagtgagatgctgttgtttttacaacctcagttcttcctgtgtgggaaacggttgtttctttaggtttgaaatatgttagggatagttacccggggaaaagaagagtagggggttggacttcgttgtatggggttggatggacaaggttagatttgttgggggcggcagaggcccttgtttttttttttcttcctgagaacatattcttttgtacaattaggatctgcaattttttaagccatctaggagtgaattgaatgactgagcaaagtcacttttacnnnnnnnnnnnnnnnnnnnnnnn

SEQ ID NO: 46999 - DNA, 306 bp, Setaria italica
  Peptide Sequence Number=SeqID_112973
aggtggtccgcaaagaagcatatggccatatggccagttgccaggtcactcaaaagtgaagcagaaactggattatatcaaactgaaataatggggcttactacccaaagatttacacaatcttgaaatgcttagaagactgacactgcacatttatttaattggtacccaaagatttacacaatcttgaatgcttagaagactgacactgcacatttatttaactggtaacattttacagttttaaggacctcccccaaccctatgaacccaggcatgacattctttgcagttggtgtccatttg

SEQ ID NO: 47000 - DNA, 268 bp, Setaria italica
  Peptide Sequence Number=SeqID_112974
ttttcatctttatgtccacccttggtgacataaaagagatcataggactagttatcattgtatttcttacaccccgtttggatgtagatattggaggtcagaattcggaattagaattaggtgccctcaattctaccgtttggatggtctagatattggtattggaaacttagcttcaatgccaagcggtattcagcgctgcaaacacagagtcccgcgattccgccccctgcccctccgtgttctttagaattgtcatcccccgcat

SEQ ID NO: 47001 - DNA, 1072 bp, Setaria italica
  Peptide Sequence Number=SeqID_112975
tcgccgtcacgctcatcggcctcgtcggggcgtactccgccggcagctgccggcagattgacactaccatctatgtcaactctctggttggtgccgtcattggtttcattctcgttcaagcggccattgttaagttttgcaaagatgccataacaaacagctgcttgtggaaacaactaaaacgcatccgtgataaagtgtcaggatgtctgtgtggcacagaacaatcttgtttggagcagaacactcaacgacagcggtaaactggcaattcgaatggcagtgccaagcagcaagaacatcaagtgctggagaaggctcgctctcttgttctgctgctctccactctcgcagcggccatcacctaccaagcaggcctcaacccaccgggcggcctctggcagcgcgacgatgccggcggccgctacatggccggagatccgatcctcttgaccgtgaatccgaggcggtacaaggcgttctactactgcaactccatcgcgttcgtggcgtccctggttgccatcatccttgcgaggactaacgccctgcaccaccacaacgcgctggaggccgccatgatactggacctgttcggcctcatcggcgcgtacgccgccgggagctgccgggacgtgagcacgtccatctacgccatggccctggcaggagccgtcctggtctacgttgtgatccatgtcgtcttcttgacgctgggcaacaaggacggcagcacgaaagggaacgatgaagcttcactagagaaggagaaaacggccgaggagctgatggagaagaggcgcaaacggttgctcctcttcgcgatcttggcggcaaccatcacttaccaagccgggctgacgccgccgggcggcttccttgacaacgacgatcaggtaagaaagcgccttgctggggaccctgtcctgctcaacaacgacccgcgccggtacacggccttcttctactgcaactcggtgagcttcatgctgtcaatcgccctcatcatcctcctggtgaaccccaacctgtgaccggccggccagtccggagcaacgcgctgtcggtttgc

SEQ ID NO: 47002 - DNA, 596 bp, Setaria italica
  Peptide Sequence Number=SeqID_112976
gctgtcggtttgcacggcggcaggcttgattggcatcatgggtggctatgccgccggctgcacacagcatctcaagacatccatctatatattcgtgctggcggcggtggtcctgggctctgttgtcttgctggttgcagtgttctttgttaagaatctcataaaacaaggggaggacaaacctagcaacagcagccacatagcttcattgccgtcagctgaggaaggcggtggtgccaataatgccacgagagcagagcaggccccttcacaagtacgcggcaacagcagcaatacagctgcacaagttcgccgggaaaagaagttgcatgccaagcgcaagtacctgatgctgctggggatccttgcggcgagcgtcacctaccaggccggcctctggcaggatgacgatgctggcggcggctacaagaacggagatccgatcctcttgaccgtgaatccgaggcggtacaaggcgttctactactgcaactccatcgcgttcgtggcgtccctggttgccatcatccttgcgaggactaacgccctgcaccaccacaacgcgctggaggccgccatgaggccgaacaggtcca

SEQ ID NO: 47003 - DNA, 802 bp, Setaria italica
  Peptide Sequence Number=SeqID_112977
tccgttctacttgtctaaactaagtcctatttgttggtcttcttgggttgtattgtaacgtcctacttattcgttctggtaccttgtctaaacctagcaacagcagccacatagcttcattgccgtcagctgaggaaggcggtggtgccaataatgccacgagagcagagcaggccccttcacaagtacgcggcaacagcagcaatacagctgcacaagttcgccgggaaaagaagttgcatgccaagcgcaagtacctgatgctgctggggatccttgcggcgagcgtcacctaccaggccggcctggcgccgcccggtgggttctggcagtccaacggcagcgggcacgccgccggcgacccggtgatgcacgacaacaggaggtcgcggtacctggccttcttctacagcaactccacctcctttgtggcgtccgtcgtcgtcatcgtgcttctgcttcccccgtcactgcaaaacaagccattgtggctctgggtgatgaacgccactatcgttctggacctgctcggcctcctgatcgcctacgctgcagggtccagcaggaccctgaagacctccatgattgtctccacgctcgtcttcggcgtgctggtctattttgcaatccatgtgttgctgtcgcactttagcaggagacgtaagacagctccggcggcctctgcctctggcgctgaaccaaacgaagaggcaaacggtgggcttcaggcacaaatgggtccaggccacgagcgttcttaagctatttgaatgtgtagtatgggagatgggagtctgtgcag

SEQ ID NO: 47004 - DNA, 313 bp, Setaria italica
  Peptide Sequence Number=SeqID_112978
ctctcttcttctcctcctcctcctcctctctctctccctctcatgtttgcattcatgttgacagaataaaatgattaggtagggcatgcatgttcttgtttgtgcacggcatataggagagttagttccttcagaggaagcggatagctagtaaataagttatttcaggtccggttaataattcagttacgtagccatgtcatgagctaagataatataggagagagaaacgcacacagcagtcacacatctctctctcatcaacaacgacatgcaaggatatagccctttactttagccgtacaaaaccgcc

SEQ ID NO: 47005 - DNA, 431 bp, Setaria italica
  Peptide Sequence Number=SeqID_112979
ccggtgagggtcttgacaaagatctgcatctgcaaaagaataaacagacagaagggtaagtatctagcagtaggttaataaaacagtctctagtgaacagcaacaacacattcaaacagatgccacaaacaggtcgtgcgtgttcatcacatcattagtgctatagaatgaacgtgcagcagcatttcattatccaagtatatcaacaaagtatgaagagcatgcttgatcatcgtatgtacaaaataatcatcaaattgtagcaatagatatcttccatctattaatgcatataaccaggaggatgcatgttgctcacataaaagctatggcatcatacagaaacagcgtaatcatcttaatcatgtgacatatgcagatatggatgggctcaaatcaacaaaagcagcagcatgccatcatccaagtat

SEQ ID NO: 47006 - DNA, 538 bp, Setaria italica
  Peptide Sequence Number=SeqID_112980
tagtaccggggtaaaccgtacgtccttcgtcttggtaggtagtacgttaggagacgtagacgaggtgggtgatggaggacagcgcgccgccccaggagcggacgcatgcgagcgacgcctccgtcgccatctgcgtcaccgccttgttggagatgtccagacgctgcttcatcgtcggcaggccctcctgcgccagctccgggtagctcttcaggatctcatccgacatcaccacgtaccgggtcttcaccgtcgtcgtcttgcagagtctggtgagcttctccttgagctccgggtcgtcgcagttggtgttcttcatgaagccgtcgacgacgtagtcctgcatcaccagctgctgcgggaaggcgtggccgagggcgaggatcgtggccttgcccggggtttgggggccagtggacgacgcctgcttggcagctgccgtgtcgaggtcgttgctcaccatcgtcctgtgaacgaagttgttcctttgcgggattacaagggagaaataatggtgattggtgagtaccagagatcg

SEQ ID NO: 47007 - DNA, 452 bp, Setaria italica
  Peptide Sequence Number=SeqID_112981
aacgaccgtagggtcgtcaagtaccccgacgcgcacggcggcccgccggggttcatgttcgacagggagcgtcagaacgagggcaatggcaacggcggcgctgaggatgggaacgacgacgacgatggcattgccaagcgaagagccggcggcgacgatcaggagcaggagcaggacgacgaggtggagagccatgggcatgaggatgaggatgagtagagctagctagctgaggtggatcgatggatctctctaaccccggccgagcagccgcatgcacggccatggcaatggcattgttaatttgcttattaatccgtttctttgtttctacttgttattagctcctctccggcctgttactacttatatgttagcagcactactgttactactactactacggtacttgttatataagatgatgatgatgatgatgctggccatccaag

SEQ ID NO: 47008 - DNA, 1058 bp, Setaria italica
  Peptide Sequence Number=SeqID_112982
cccaaactgccgcaccctccctcccgccggcgccgccacttcgctgccggccgtttcctcgaacccgtcagaaattctcctaacatgggcagctcctccgctgacggcgcgaggctaccgccgtcgagggcggggagccgcctctgcgtgcggtgcggcgagcggaaggccgcgctgaagcgacccaaaaccctagagcagatctgtagggaatgcttctacatcgtctttgaggacgaaattcatcaaactattgttgacaacactctgtttaaagctggtgaacgtgtggcaatcggagcttctgggggaaaagattcaactgtgcttgcatatgtgatatcggagttaaaccgtcgtcacaactatggtcttgatctgttccttctatcagtcgatgaaggaatcacaggatatagagatgactcgctagaaactgttaaaaggaatgaaatacagtatggcctaccgctgaagatagtttcctataaagatctctatggctggacaatggatgatattgtgaaagcaattggtctgaaaaacaattgtactttctgtggagtttttcgacgtcaggcactagacagaggtgctgctctcctgaaagctgataagattgtaactggccataatgcagatgacattgcagaaacagtcttgctaaacattctgcgtggtgatattgcaaggttaagtagatgtacattcataactactggtgaagacgggccaatcccaagatgcaagcctttcaaatacacctacgagaaggagattgtcatgtatgcatacttcaaaaagctggactacttttccacagaatgcatctattcaccaaatgcataccgtggttttgctcgtgaatttattaaagatttagaaagaatgaggcctagatctatattggacatcataaaatctggtgaaaattttagaatctccacaactacacggatgccagagcaaggaacgtgtgaacgctgtggctacatttctagtcagaaactatgcaaagcatgcgtcttgctggatggattaaatcggggcttgccaaa

SEQ ID NO: 47009 - DNA, 482 bp, Setaria italica
  Peptide Sequence Number=SeqID_112983
actactagaataccaagaaattaaaagttaagtccatccaatagacaaccttgccttgccctaatgcctcctcctccgttcctcaaacaatcaaacatccccagataactaggtcggtgtgcatggagcagctgcctgttcttgccagtggctcaaaggccaccacgacgacgcccttctacctcgccttagatcacagagcgtccacatcgtcttcgccgccagcggaggcgccaacgccgccgccggctgccgtctcagatccttctggacagtccaacagcgagatgggatccgaaataatcaaagcgaagatcatgtcacaccctctctatccggctctcctgagagccttcatagattgccgaaaggtcggagcgccgccagaggttgttggtcggctttctgccctcgccggtgaggtcgagatgaattcaggcgacgggcaagaacaaccgacagaggcagacccagagctcgat

SEQ ID NO: 47010 - DNA, 1777 bp, Setaria italica
  Peptide Sequence Number=SeqID_112984
cgctccacgctctctagttaaagcccccggccgggtcagcggcagcgacccccacgcagccaggaggcatctccatcaggagcccgagtcgggagcggaacttggaacaggatggccgccgccgccgccgccaccaccgccaccaccaccacccttcgtcctgccctgccccaagcagggccagagcaaagagcttcattgctctgcacgcccaagcacagggttgctgccggtgggaggagaagcctgagcttcaccgcgagggccagtctgaactcaggcgccaaggtgagcatcccgaagcaatggtacaacctcgtcgccgacctgccggtgaagccgccgccgccgctgcacccgcagacgcaccagcctctgaatcccagcgacctgtcgcccctgttccccgacgagctgatcaggcaggaggtcaccgacgagcggttcgtcgacatacccgaggaggtcatcgacgtctacaagctctggcgcccgacgccgctcatcagggccaggaggcttgagaagctgctgggcacgccggcgaagatctactacaagtacgaggggaccagtccggcggggtcgcacaagcccaacaccgccgtgccgcaggcatggtacaacgccgcggcaggggtcaagaacgtcgtcaccgagaccggcgccggccaatggggcagcgctctctccttcgccagcagcctctttggcctcaactgcgaggtgtggcaggtgcgcgcgtcgttcgatcagaagccgtaccggaggctgatgatggagacgtggggcgccaaggtgcacccgtcgccgtcggaggcgacggaggccgggaggaagatcctggcggcggacccgaccagccccggcagcctcgggatcgccatctcggaggccgtggaggtggcggccaccgacgccgccaccaagtactgcctgggcagcgtgctcaatcacgtcctgctccaccagaccgtcatcggcgaggagtgcctggagcagctggcggcgctcggcgaggcgcccgacatcgtcatcggctgcaccggcggcggctccaacttcggcgggctcgcgttccccttcatgcgcgagaagctcgccggcaggatgagcccggagttcagggccgtggagcccgcggcgtgccccacgctcaccaagggcatctacgcctacgacttcggcgacaccgccgggctcacgccgctgatgaagatgcacacgctcggccacggcttcgtccccgacccgatccacgcaggtgggcttcgctaccatggaatggcacctctgatctcgcacgtgtacgagctgggcttcatggacgccgtcgccatacagcagactgaatgcttccaagcggcattgcaattcgcccggacggagggcattatcccggcgccagagccgacgcacgcgatcgcggcggcgatcagggaggcgatggagtgcaagaagaccggggaggagaaggtcatcctgatggccatgtgcggccacggccacttcgacctcgctgcgtacgagaagtacctgaggggcgacatggtcgacctgtcgcactcggccgacaagctggaggcgtccctcgccgccgtgcccaaagtctgatgatgctgaagagatagctgcaatgattgatatttagttcttgaatcttgtgatgatccatcagctgtggaccttgggaaacttacgagatccaaataatgaaatgaatgaataaattttatcaataaaaagaataaatttgaggggaaaaaaaaaaaaaaac

SEQ ID NO: 47011 - DNA, 465 bp, Setaria italica
  Peptide Sequence Number=SeqID_112985
ccggcacgccagcgtcgtgtccaggtggagcgcgcccgcagcagcatcgacaggaagctcacggacatggagttcttctccttgggcagcaggctcacgatcgtctcgaggaccacccgcttctcgtgctcttgcctcgggtccatcttcttcttgtctctgccatgcatgtcctgcaacaagctcgacaatgtcagatgatgaatgcgagaactgttagctgcactgatgttttgtgaatgtaaaattcagaacatgtcaccagtcttcgcagagacttctgggcatagagcatgatcagggtccccaaggccattttcccctaaccccctcggccttcatcgcaatcaggactctctggaacgtgtcgatccgcagcgacgtgagctcgtcggcccaccaggcgtcaacggccttcgacacgctcacgctgttgtagccgccggccgtggatccagcgccgcg

SEQ ID NO: 47012 - DNA, 248 bp, Setaria italica
  Peptide Sequence Number=SeqID_112986
aaaaccatagccaacaatgcagtacaataaataattgatctgagattcttaccttgaggtagatgtcgatggcgcggtacatgccgtcctcgttaaacctagcgcgttccgggatcatctcggcgaggccggtgaacttgtcgatgggcaggttcgcgtccgatgcgatctcagccaggtacgcctccatgagcctgccgaccatgccgacgtcgttgggcggcgacgccgccgagatgaagtcgtcg

SEQ ID NO: 47013 - DNA, 431 bp, Setaria italica
  Peptide Sequence Number=SeqID_112987
aaaggaccctgcaacaatgaagcggaacaaagagcttcaaatttcacaaacctgttcttttgaaaagcttcattttcagtttaagcgagtgacgccatgaacaagatctgaagtacagatcacatgttgcttgatgaataaaactgctgttcgttcagtttaacgcaatctgaacaagctgtctgcaccggttacagacggttcatgcttcataccaacaattgaaactcgaacatgaagagcatataccaaaatggaaagcaaagaaagcgaggagcagtacgggaggaggagttcgaaggtaccataccagtcgctggtcctcttcatcgccggcgtatcgaaccggctctccatccttcaaccctttcgcaaaagtcaccgagctaccgtacgttcacctactacccgactaactaagaaccctaacc

SEQ ID NO: 47014 - DNA, 1737 bp, Setaria italica
  Peptide Sequence Number=SeqID_112988
ggcgccgacgggtccctcaggcgcatcttcagccgcagcagctccatcttgagctcgtcgttctcccgctgcagctgcgacacctcctccgccggcgcggcgccgccccgggcgtgccggcccatgaggctcggcgtcggcttgtacggcaacgacgggggcggggactcgccgccgtagaacgacgacgcaccgctcggcgcgtgggtgggcgcctcgcgcaggcgccgctgctcgtggtacaggacctgaaccaccgtctgcaccggcagccggtcgttctgcgccgcgtgcgcgcacgcctcccgcgacagcttctggcagtccatcgccttgcacaccttcttcctctccggctcgctcagatgcggatgcgccttgaggtagatgtcgatggcgcggtacatgccgtcctcgttaaacctagcgcgttccgggatcatctcggcgaggccggtgaacttgtcgatgggcaggttcgcgtccgatgcgatctcagccaggtacgcctccatgagcctgccgaccatgccgacgtcgttgggcggcgacgccgccgagatgaagtcgtcgtcggtgttgtagtccagctgggccgcctcgctctcgtgctcaaggtacccggccaggatcctctgcaccgcgtcgacgtcgaacgttgtgccggcgtccagcgaggaggacgggatgaggaggtcgtcgagcacggcctgcccgagctgcgaggacatccgcttctcgaggtcgagccggcacgccagcgtcgtgtccaggtggagcgccgcccgcagcagcatcgacaggaagctcacggacatggagttcttctccttgggcagcaggctcacgatcgtctcgaggaccacccgcttctcgtgctcttgcctcgggtccatcttcttcttgtctctgccatgcatgtccagtcttcgcagagacttctgggcatagagcatgatcagggtccccaaggcaattcccttgaaccccctcgccttcatcgcaatcaggactctctggaacgtgtcgatccgcagcgacgtgagctcgtcggcccaccaggcgtcaacggccttcgacacgctcacgctgttgtagccgccggccgtggatcccagcgccgcgctgaactggctgttgttgcaggtgatgtgggcgatggcgtcgatgcaccggccgacgaggtccacctcctcggccaccgggaggagctcctcggacttgcggagcacggtgaccgcgccggcgaggctcatcagcgccacggcctcaaggtaggcctccgccctgccgaccaggttcccaccgttgctgtcgtcggtcatctccaggtgctcggcggcgcaccgcagcatcgcgacgttgtcctcggtgatctccaaattctcgccgtagcagaactttgtgacgagctcgaacgccctggagccgcccggcatgcccgtgaggtcgatgtgggtggtgaacttggagccgttgatccccgacacctgcttccgtatgtagccgcaccgagacgccagcgggagcttgtgcaagttgaaggtcgcctccccgacctggatggtaatatcgctcggatattcttgtgaaaggacccagtcgctggtcctcttcatcgccggcgtatcgaaccggctctccatccttcaaccctttcgcaaaagtcaccgagctaccgtacgttcacctctcccgctctgccctccctacgtaactcctcccccatattctcct

SEQ ID NO: 47015 - DNA, 1402 bp, Setaria italica
  Peptide Sequence Number=SeqID_112989
caactctattcttcctggacaattaactcaaaaagttaaaagtaagtcaaagaaatttgtaaaggaagtgtgaaaacaacaaaaggctcaaaattaatctaggcttctttgaaattaatttgacagggagctagctgaatctggcttcatttctgtctaacttgcagtagaataacctcaggaccttcagcctatatcagcatgttcttcaatgtcatatcataacaagtatcaactactgagatggttattttgtttttgatacctaccagatattttttacaggtataaagtgatacaatactaataactgttcaataatcatggtatagccaaaaggctccactcataactgacaacaatggaaatgaatagagtgaatgtgactcatttattcaaccatcatttctgcttatagacaactcattgacagtaggtaataaaaacgcaagttgctaaaggtaacaagcccaaagaagtaataaccattttatctggcaaaacaagctgttgtcatgccatgttcaccgacgtaaactcacaaaaatattatattctacctttctacaggaccatgaagcaacactgaagctgaagcttcaagaagaatttaaatagaatggtatttatctgttctataaagaaacaatattagacctaacagcattggactgccagcaggcacatttgttacacttatacctgagcacaaaagtcaagaacaagtaaagtatgaagctatctgcatcgagttatttattcaacaaagaatgggaatatcttaataggttaaaggatgttttatatactatactctctgttcgtttttagaagcgtattagaatctaaagatgtccttagaagtgtactttgaccaccaatttctcgtacaatatatcatcaattgctgcaaaatatgtcatattaaaatatatttgaaatacaaatctattcatataacttttatacactaagcatgcacataatttgactaattgctggttaaaatttatgaaactcgacatttttaaaatccttacacgacaactaaaaacgaacagtgggagcaaaaagatgggtaagtgaattaggattcaacagtgacctgtctaaacaacctgtcagaaattaaactaaaaacacagtttcctagattctgaaattatttatgatgaatactccaaatcttctacaacaggtagagaatatcatataatgaattcattaccaaatcctaataaaatcaaagaactttcactacaataaccacagaaggcaccccctatttgataaagagaaactaaattgtttcaggatgccaggaaacaataaaagcacaaatctaacaactttcatcaagttcgaagcaatttcagaaactaatcccagctcactccaacta

SEQ ID NO: 47016 - DNA, 1078 bp, Setaria italica
  Peptide Sequence Number=SeqID_112990
ctgctcccccgggcgcacccctacatcgcctacctccacagcaacatcgccgcctgctacatgcagatgagcccgcccgactactaccgcgccatcaacgagtgcaacatcgcgctcgaggcctcgcccaagtacgccaaggcgctgctcaagcgggcgcgctgcttcgaggcgctgggcaggctcgacctcgcctgcagggacgtcaacaaggtgctcgccctggagcccaacaacctcaccgcgctggatgtggccgacagggtcaagaaggccatggaggagaaggggattgtcttggacgagaaggaggtcatgcccacgccggaggaggtggtggccgctgcacccaagcagaagccccgcaagaagaggggaggacggaagttcgccgccaaggctgcggcagcggctgtggaggaggccgaggagcagaaaatggcagaatctgtcaaggaggaagaggttgaggagctgccgaggcaggtgaaacttgtgtttggggaggacataaggtgggctcaggtgccggcgagctgcagcatggcacagctgcgcgaggccgtccggagcaagtttcccgggctgaaggctgttcttgtcaagtacaaggacaaggagggtgatcttgtgacaatcaccaaccaggatgagctgaaatgggctcaggagttggctgagcctgggagctcacttcggctgtatgtcactgaggccaacccggagcatgaaccttatgttgatgatgcaaatagtgggccattggagaaaaatgtgaacagcgcgtcggataatggaagtatcagaagcaataggcaggatgaggataggagcacggtgacttgtattgatgattggattgtgcaattcgctcggcttttcaagaaccatgtcggggttagctctgatgagtatctggatctccatgaagttagtatgaagctctacactgaggcaattgaggacactattactactgaggaagctcaagaggtgtttcaacttgcagagcgaaacttccaggagatggcagctcttgcatttttccactcgaataatgttacctacttggggttaa

SEQ ID NO: 47017 - DNA, 251 bp, Setaria italica
  Peptide Sequence Number=SeqID_112991
attataataaagtgataaactcatgctctaaactttaaatgaaaaatatgtactcataacactgggcaaaagcattcatcccaaaacttacattttgtcagaaacgacgccagaaatggcgcctgggaacagagcagctgcagcagtagcagcaaggcgcgcggccatctgctccctgccaagcccacaccggacgaactcatcctccccgaacacggactggatcccctcaaccacggacgcgagggaga

SEQ ID NO: 47018 - DNA, 736 bp, Setaria italica
  Peptide Sequence Number=SeqID_112992
agccactatggttggtgccagagaaaccaaaaggctgagatagcaaaatggatgcctgcttgagctaataccaggatcagtactcttttgtctctgaggacatgggcaaaaaatgatttttggtagctcccaactgcagatgcgtgctgagtggtacttgatgcatttctcatatacagaatccccactactgatagtgtggctgcaaatgcatagggaagcaagaatccattgtcatcattactaaccaagacatttgtgatttcttgacttccaataagggatactgattcaaagaatgtcatcacccagaaggtatcaaacagcaaatcttgcttctggtcttgcttctcatgctccaccacaagccaagtctcaaaacagaaagagaacaatgaagatgcaagtgttagaatgaaattgttgatccatgcacaaccaagtgcactgaaactcttcaaggcacccactgcaagctgaagtacccagtaaaatatgcaagcccttcgtggtcctattttgtcagcgacgacgccagaaatggcgcctgggaacagagcagctgcagcagtagcagcaaggcgcgcagccatctgctccctgccaagcccacaccgcacgaactcatcctccccgaacacggactggatcccctcaaccacggacgcgagggagaagatgacgaggaagacgcggcggaaccggaggaagggggcggcgcccacgtcgaaggggg

SEQ ID NO: 47019 - DNA, 290 bp, Setaria italica
  Peptide Sequence Number=SeqID_112993
ggggtgggtccacgcacgcaggcggtggtgcccatggcgtcgtggctgctgctccccctcccctccttcccctggcttccccctccgccaccgcccggatcctcctccggcggccgcggcggagggggcgggggcggagacggcggcgactggaggcccaacgtcgtcgcggccttcgccggcgcgcaggtcggcagcgccctccgccgccgcttcgcgggcctcctccgctcgccggaggtgcgacatcttgaagccttgccgaacatgggtgacatttgttttggggg

SEQ ID NO: 47020 - DNA, 252 bp, Setaria italica
  Peptide Sequence Number=SeqID_112994
gggaaaagggaagctagtagcgcaagaaccttgttctttccggtgtctagtgtgtagagtgagagcaggccggcgcagctgagacgagtgcagggatggctggagcggttggtgtctcgctggaggcgttcgccaagattggccggcctgaggaggcgcaggtcgtcggtgtggaagccggccggagccatcagggtgacggtggcgttggcgccgtggctgagagcgggacgaagggcgttgctgtcagcc

SEQ ID NO: 47021 - DNA, 421 bp, Setaria italica
  misc_feature (364)..(421): n is a, c, g, or t
  Peptide Sequence Number=SeqID_112995
tggtcgtggcgacggtgagggaagcggcgagcgcgacggcgcccgcggcagcccgggacgccgaggcggtgctcggcgagtccaagaggctggtgccgcagggctccaacccgctgcacaactaggatcgaggaagcaagcgcaggttcttcgttcggcttccattttttttctttctttctccctcgctcaatcacacaaggcgatagattttgagcccgtaactgtaattagctagcacagcggtagagctcctctgagtccaatccaacacaagccaagattgtacatgcatgcttctttgttgccatgttcttccgagcaaaggtttgattcagaaagcaacaatgattgcgagaaaccnnnnnnnnnnnnnnnnnnnnnnnnnnnnnnnnnnnnnnnnnnnnnnnnnnnnnnnnnn

SEQ ID NO: 47022 - DNA, 807 bp, Setaria italica
  Peptide Sequence Number=SeqID_112996
atcgccaagcactcctcgtcctcttcggtccccgcctcgtccttcctcgacgccttcttcgccgcctatgaggacagcggcacgggggccacgacccgcggcctccacctcctggtgcacgcctatgcgcggctgcgcctcccgggggaggccctcgaggcctgccgctacctcgcgcagcgcggcatcatcccctccctctctgccttcaacgccgcgcttcagtcggcgcagcgcgccggggcgttcggtgtcgcatgggaggtgttcgagcttatgacgcagaagagggtgtatgcgaaccagagcaccgtcgagctcgtcatcggcgtcctgagtcgggaaggcaagctcgccaggaccgcggcgctcgtggagaggattcacggcaagaagtgtgctcccagcatcgtggcgcacgtggcactcacgctgaggatgatcgaggaagagaaggtggagcaggtgatattgctgctgaagaggatgctgcagaggaacattctgcttgacgacatcgcttactcactgatcgtggacgcttactgccgtattggtgatctgaaggccgcattcgagcaacgggatgacatggtccgcagaggttgtcacctgaatgcgtttgtgtatacttccctcatcagagcgcattgctgtcgacgcagtgtcgacaaggctgtccagttgctccaggaaatgctatccatgggattgaagccgtatgatgctacgtacagccatctcattgccgggtgtttcagacaaggcatggtagaggaaggctttggaccttaactttacgtaaaa

SEQ ID NO: 47023 - DNA, 678 bp, Setaria italica
  Peptide Sequence Number=SeqID_112997
gaacacctgagcaattgaagagatctccgaccaagccattgattgtggaggcactagcatcagacaaaaagatgctcttcgtcatgttcctggccatctctgcaaggtcctcctcccaccagtcccctataataactgggatctccttatgaggcttaggaaatggatatgactcagccccaagccttggccgaatgatgaatgcgccatggagggttgcccgtaggccggggacatgagcatgccaccacagagtgccttcctgcccgacgacattgaaccgataagtgaaatctttgttcggctggatagggtattgggtgaccataggcaccccatcagcccagcagttccgaaactgctttactccatgccagtggatcgtaatgttgtaaggtgacctgttgacgacatgaacagtcaccgagtctccttctgtgacctcaatggtcggccctgggagctgcccgttcaccacggtgaccagtgtctccttgcacaggcgcgtcatcttcgtctgattcacgacaaatgtgtgctcgacggatgccgcgcgcgccagcggtgcggtggtagagaggaagatgatggcgactgccagagctggggcagcagcgaggaggctccggctctccatgctcaccatggctgcttgctttgcttcgtgaagcacttgct

SEQ ID NO: 47024 - DNA, 480 bp, Setaria italica
  Peptide Sequence Number=SeqID_112998
aatattcccagaggactatgaaatgaagaggaggagattaataagacaccggattactgctggatttatcgatgaaaaagagaatcaaacaatggaggaaatggcagagagatgcttgaatgagcttgtaaatagaagcctactacaagtcgtgaagaagaatgggtttggacgagtgaaatgttgccggatgcatgatgccgtccgtcagcttgcccttgacagagcagaaaaagaatgctttggtaaagtatacgagggctctcagacattttcagtagacggcacacgtcggttgtcaatacagaattccaatattggacctctgagtcaatctggtgcaacaaaatttcgtgcaatccatgtttttacgaattatatcgatattgatttgctgaggcctatccttgcctcttcaaatttgctgtcaacattggatctgcaaggtactcaactgaagatgctgtctgatgaggtctt

SEQ ID NO: 47025 - DNA, 718 bp, Setaria italica
  Peptide Sequence Number=SeqID_112999
ttttttttttgtatcatgcaatgctgtgcacatttcaagtgtgtaattgcaaagcataagcagtggataaaacaaccagttacagcagaaatcaaaagcaatgatatctgaattgaagctacaagaaggggtagaatgacaaagacgcactactgtagaatttgctgaaacgtaatgatgtcttaccttgggcagccgctggtgggagctcccatgcaacaacgtagcgaccgaaggctggccgtggcggacctaggacattcactagctcatagggatcgatgtgcaacattttgtgcgccggcacattgacgccgaagaggcagtgctccagggcgaagtagacctagttggggtccgacgggcacacgacggcgagcacgagaacgttccgcggcagcccagcatccgtgtagctgacgtcgtcccagatctccctgaagctcatcatccagtccttgtcccacctccacccaccgcgatcgcggcggcgccatgaccacatgcgaaccagcgctgcggcgtcaactagaagcccctagaacatcttgaccattgggctcttagtcttcttgtttgggcttgtagctatgtctgtagtgttgcttgttctcttgcgactgctactgctcaaaggacttgctatgaacacaattccattacaacaattccctacccttatttcatcaacatcaagttcatagtaaatatgtgtttt

SEQ ID NO: 47026 - DNA, 401 bp, Setaria italica
  Peptide Sequence Number=SeqID_113000
gtggtggtggggttggggcgggcggggtggcggtgcgggttggggatagggtgggcgtggaaggcggcgagggacgacgccatgggaggcggagcggaggcgagggttggtggtcgggcacgtgttctacctgctggagcccgcggcggagaaggccaaggagctgctggacaggatcgcggcgtttgtcagagcggagtgactagtgaggagggcggctatggtccgtggacgtcgtgggtaatttggcaggaagcgggcgtgcacgcttgacgtttggtacagagtggtcgttagacccactactctagcgaatgagtaacaagaatttttccacgcattatggaattttgtgtttagtatgtattaaatgttacaattatagttgaatgggaaaaaat

SEQ ID NO: 47027 - DNA, 856 bp, Setaria italica
  Peptide Sequence Number=SeqID_113001
tctacgaccgcatccgccttgtcttcggcgaccccatgctggggatcgacctgttggcagccacccgggagccagggcaatgtgaccaaagccggcaactctccggtccagtgacggcaaattcaggtcctatccagaaaaatctcaattacagcaagtcagggccgatttcaagagttgatccagacatgccgcggttggtgaattttcggtcgaattgcggagcgagcccggggaagatgttcatggagtgcttgagcttgagtagctcggtgtcgtggaaggatgggttcgaggatgagttcttggaagattccagctgcattagcacaatcagatcggggatgcttgtaccgttcagtggcgagcagggggaatccacaactccaaccaagagtggaaagattggcagaagggtgcggtttggcccgaagagtactgtgacatcacttgcgccaccgtctacaattggaggctcggcgttggcattgcattatgcaaacatcatcatcatcattgagaagttgctccggtacccacatcttgttggcgaggaggcccgtgacgatctctaccagatgctgccgtcaagtttgaaggtggcattgaggaagaatctgaaaacatatgtgaagaatgtggcgatatatgatgcgttcctcgctcatgattggagagagacgcttgagaagacgctggcttggcttgctccaatggcacacaacatgatccggtggcaggctgagaggaactttgagcagcagcagattgtgttgaaggggaatgtactgctattgcagacactttattttgccgatcgggagaagacggaggcagtaatctgcgagctgcttgt

SEQ ID NO: 47028 - DNA, 760 bp, Setaria italica
  Peptide Sequence Number=SeqID_113002
ttttttttttgtaatacaaagactaccatatagatcaatgatctaaacaccagttcatgaaaatagcaccaatttacatttaagaaaatatcacgagttatacacaaccgattatttccagttattctccaatcgagacacagtgcgggttgcttttcagaagtccaaatagagcacagatttaaaaaccctttctccgttactatctgtacaacagtttagccgaggactttcttcactccagccagagccttattcgtctcgtttcttttccggatgccaatttggaggcgccactggttgagagcagcatctggaactaacgatgccaagaaccactggaccgagtggcgccaatacgggacgcaccttgcctcgtagccaatgcaacgaagagcagccttggcgtactcctcaggtgatggtatgaatgggcaatcacccttgacaggggacatcttagtagcgacatacagagggatctggcattgcacgtctactccatattgtttgtactcaacacttaagcttcgagaaaattgatcaacatacgctttgctcgccgcgtagacagcatagagcgggaacgccggcaccacgacggaggagcccgaccccacgttgacgacggcgccccttcccctcgccgccatcagcggcacgacggcgcgcgtgatccgcgtcgccgcttccacgttcacccgcacccacggcctcccacacgggactccccccacctcgtcggaagtaggccgcacac

SEQ ID NO: 47029 - DNA, 471 bp, Setaria italica
  Peptide Sequence Number=SeqID_113003
atttagacccccattttttcgctccttttgaggaactgattgcttcagttggtggtagagatgcatttgtactcaaacattggtgcaatagggaattgccaatgaagaaaccacaatcagaagggtgcctaagattgggaatgtcacctgataggttgttgaatgagacatcaagaactgtaagctgagctagttcactgaaactgggagggatgcttcctgagagcctattatggtcaagcctcaatacttcaaggcgtgaagcgtcagttaaatgtaatggtatgctgcctgttagagaattccttgataaatctagaacctcaagagcagccaagtcaccaaactgccctggaatctgacctgtcagattgttaccactcaagaccaagctcctcagaaaatgcagaccaccgacaccatcgggtattgaccctctgaagttattataaccagcatcaaaatttgcat

SEQ ID NO: 47030 - DNA, 272 bp, Setaria italica
  Peptide Sequence Number=SeqID_113004
cggccgctggaacacgcgggccatgaacatgtccttcgtccagctccgtggcgcggagtccgcgcgcttctcgggccgcgccacgaggtccgtgttctgggtgggtggtgggtcatcgacggcgacggcgacggcaccgtcctgaccgcctcagatctctcccacggcgtcgtcttctttcaggatcttcttccggcgcgcgcgcctccggggatccaaggaccactcgaccttccggttcgtcgacgacggtggctcggacatggcgcggc

SEQ ID NO: 47031 - DNA, 661 bp, Setaria italica
  Peptide Sequence Number=SeqID_113005
ttaaaccagagtacaatgatagcagcagatgctcgactagtgcttgtttggcatcaattgccccttacaatggccggagagagacttctgtctatgcaactgatattatcagtggaatcacaatacactgtaaagtattcgtggacaagatctcgcggatcagaattttccaccatgctgttaaaattgacctagatgaaattgctacattgcgtgttcatgcctttgacgatgaagaaaatgtgttctcgtcgttggtggggttgcagtttttgtggcagctttccccaagattgcttgatagcagtagccatcatcttgttcatattccactgaaagaaacacatttgagtgactgtggtggcttttgtggtgatatgaatattcggtttgagctagaagacaagaatcttggttcagatttctttgtggtgaagggtattgagatcggccaagaggttgttaaagctcagttattcgagcctcagcttgagcatgtgattgacacaatcacattgactgttgctgaagctatgtcactagagccaccctcaccagttctcgtgacagttggtgtttcggtgaagtttaaactaaaggtttttcgacaaaaagttgctgaagtgattaaattaccatcaccatatcatcgatggcatgc

SEQ ID NO: 47032 - DNA, 294 bp, Setaria italica
  Peptide Sequence Number=SeqID_113006
cttcccactcgttcttcttgttatacaggcggcacagcacccagtcatccaactgcagagaaatggatcaggatagaattaagttactctgttctgttcaacccaaatcgatgatctttaatctctagaagaaagtaagaaagaaaacattcggaggaagaatcagcggcttaccctgagcgatcccttcttggctgcggcggcacggccggcgtcggcgagcctgtactcgtgcatgatccagtcggtcttgacccctcgcggcgccttgccggcgtagaacacgagcgcctt

SEQ ID NO: 47033 - DNA, 1495 bp, Setaria italica
  Peptide Sequence Number=SeqID_113007
tttttgtttttgttttttaaacaggaacatcaaaatttcgtctggttctgttgggagaaagaggaaagagctacacatatacgagtatctaccttctgaggtgaaaagtgaaaaaaaaaatgagccggcgccacccccgggccggctccttgtacgctacaccgacactcttaacactgtaaccccgaccaggttcaggttcttccgactccttcctacgctgtatttacagaggccgccgcgtccttgcggcgccgtctcctggtcatccatcctctcatggttcattcccatgccgcgtcacttcagaaattcagaagggggccaacccggcgccgccggtggtgtggttccccttgaccctcggcgacgcgaagagcgacgagtagaagtcctccccgggcggcggcagcatgtcgagcccgctgtacatgctctggatgtcgtcgtagctgaggtccacgaacaggtcgctgttcttggcggcgaggttaccgccgtcgtccacctggggctccttcttgggcaccatcatcgcggcggcggggtcctggaacgccgggaacgagtcgtccagctccgggaacgggtcgttgtcgacgatctccgactccggcgtgcgcgtctcgccccacgagtgcgagtgggactgcgagtgcgagtgggaggtggtcatgtccatcgcctcctccttggtggtggtggcggcggcgagggcggaccccttccccatctgcatcttctcccactcgttcttcttgttatacaggcggcacagcacccagtcatccaacctgagcgatcccttcttggctgcggcggcacggccggcgtcggcgagcctgtactcgtgcatgatccagtcggtcttgacccctcgcggcgccttgccggcgtagaacacgagcgccttcttgatcccgagtgtgcgcccccgcggcgcgacgggcttgtcggctccggttgccttccagtatccgttcccggcggcgcggttgggccgcgagccgttagggtacttgcggtccctgggcgtgaagaagtaccactccctggtgccgaagagcgcccgctccggcaggtcccatgggtcgaacttgtagaggtccacctccgcgatgatgggcaccgggaggcgctgccccgccgccttccggcacaggtagtgctccaccagctcgtcgtccgtcgggtggaaccggaaccccggcggcaggttcagctccgcctccgcgtccctctccctcctcaccggcactcccatggcgatcggtcggtacggtgaggtcgaagctgaaaattgatcggcaaatttagctggctccctcccactatgcaacactctgcaacagtactcttcttggttggctccggcggctgctgctggctctgaggcggtctctgggtgtgtcctgtggattctgcgatgttcttgaagctgggaaccgcgggcaggggaggatatatagggggcgggggctcggcggcggtctgg

SEQ ID NO: 47034 - DNA, 242 bp, Setaria italica
  Peptide Sequence Number=SeqID_113008
ggaatgaggcggaggacgcgctgtcgggatcggagctgggagcccaggcggctgctgctgctgctcgggccggggggctctcttggaaaggccgcgccgggagccacgactgcgagcggcggcagccgctgcagcagcagaagggcaggcagctcaggcagaggcacggccatagtcataggaggggctacttctactcgcgcgccgcggattcgtcgcccaagtaccatccggggcagtcg

SEQ ID NO: 47035 - DNA, 347 bp, Setaria italica
  Peptide Sequence Number=SeqID_113009
tggatatcctacagacagaaatgacagaagtatatgagaaattcttgcatcaacaggagcatggacttaactgtcatgaagacatggaagaaacaaagctgatagacaaaactaagaaattaaggttaagtctaaatagagcacaatcgcacaatttagaagatgggcgcccatacgaatatatccatgtacatccacaccattagagaaatcagaaatgcatgtaaataaagtagcaacacaattgtatcctgaatggcaagaaatgattttaagcctaaagaacaaaaccagaagcacataggaaatttggaatccaccttctattgctcaagaaactggagtat

SEQ ID NO: 47036 - DNA, 346 bp, Setaria italica
  Peptide Sequence Number=SeqID_113010
acaagactaccaacgaccgaccctcgaagggccgcagcctggataaggccgagttcaccgtcacggagatctacgagaaggtgcggcggctccggaccaagtactgcaacctgcgcgacgccggggggccgcccgtgccagaaggcggcgaggatggcggcgatgaggtgcgcaagtacgagctctcgaaggcgatttggggcgaccagccggccaatgtcgccaagaaaggaggcagcaccagcgccgccgccgttgcggtgctgcccaaagcaggcggcgccatcccacgcgtgcgcgagggggttggaggagctgcagggcctgttcccctgccttgcagcgg

SEQ ID NO: 47037 - DNA, 459 bp, Setaria italica
  Peptide Sequence Number=SeqID_113011
aaaggagatggatattatagcccattcgtaaacatatgatgttttagaaatcaaacctctaaaattaccagcattgtaaagaaatatttagtttgttcatgtgaaaatatcattgggtttatcatgaaaaatgttttcagaagataatgttacaatatctggctgttatttcgtataaaagcagcggtcaaaattgtgtattggtgactcgagaaatctaatttaccttgcttgttgagtaactttttatctttttagtcatgcttataactgactttgaagactcgagaatgattgtgttgctcgtccagaatgttaaattgttaattacttacaagaaacaaaataaaccaactattgacaagaaactgataaacatacctttcctacatttacatttgggcatgcttgccatgtttcattagcgatatggtttgttagattgtttgacatttgttg

SEQ ID NO: 47038 - DNA, 1512 bp, Setaria italica
  misc_feature (1473)..(1512): n is a, c, g, or t
  Peptide Sequence Number=SeqID_113012
ctcctgctccgcccgcctccgcagccgccgagaccccgtcgtcccgagcggctttcgaagcgcgagcggaaggagaccatgtcacggtggcacacggccgcatgccgcatctccgccgccgccgcgtcccgcaactccgcggcggagtcacgcgtcctctccagggcctgctcgaaggctccctcgctgcctccgctcccgccgcctctccaaaccctcgcgagaaccttcgccaagtccgccgccgccgccacctccacctccacggccacatcacgcagctccggcgcagccgccccagcttccgccgggccgaggcccgaggtcagactgaattctatgttcctgtccaagccctgttcattagcgttaccacctgactcccctcttagagcagcagatccacagtatgaaggcatcaagcgtttcatgctcacactgttgttgttctacagtaagcaaagcaaggcacttagaggagcaaatgttgtttatgatcgaattacttctcaagttgatgcgcctgctatttatgatgtttttcagttggagaaaacatttaaaacaacattttcattgcttgttctccatatgtggcttgttctacgccgtttgaaggaagaagggaaggatggtgttaaatttggacagtacatctatgaaatttacaaccatgatgtggagctcagagtttcaaaagctggggttaacttgctcttgataaaatggatgaaagaactagagaaaatattctacggaaacattgtgaagtacgatgctgcgataagccctgaggctcgtcaggatgatcttgtaaatgtcatctggaggaatatttatgctgaggaaggttcagaggctatggatgcggctgctgcccctgcggtccaggcattggcaagatacacacgaagggaggcaacttgtctatcattgactgacaaagatgttatgttctctggaaacttcaaattcacaaccctgctgcctccaacccccagtcccagcccaaagaagcccgcacgatgaactgccatggtacatcggtgtttcatgtgaagattggtaaacagcagatcagtggatacctatcattcactcagcaatacaaataacatgatttttccatcagctgtttattctggggtcctctggatcgaaacctttttgatggatatacttcgttctagataggaagttcattttgttaagcttatgcaagtgatccatttgctttagctgcccgcccaccagaacggagcctctttttttttccaaccgggtaatcattttgcttggctgatatggactcgatcatcattccaatgggaagtgatacagaagtaaccctacagatgcatcatttgaattctgaatatgtactagtgcttggaagtcgtggatgcttagatgatctgggaaatgaatgcaatcaggcttattggaaggtgtcacctgattttagaaaaagtnnnnnnnnnnnnnnnnnnnnnnnnnnnnnnnnnnnnnnnn

SEQ ID NO: 47039 - DNA, 328 bp, Setaria italica
  Peptide Sequence Number=SeqID_113013
tcgcagcagaggctaatctgttcagttcagtccaattaggagtaagcaaagattagcaagagaggcccggcttgagtccgtcaatcagtccggttgagtgagtctccagcgtaggtgctggaactaatgtaccaccaccaccacccacctgatcaatccaatccaactccccgtctatctcagcaatccgacctccaattccggactcatcaatcggaacttcaactccggcagcaattcggactcatcaatcggaactttgactccggcagcaattcggactcgaggaatgtctgatgcacgttaactcgtaatgtaaatgttccca

SEQ ID NO: 47040 - DNA, 483 bp, Setaria italica
  Peptide Sequence Number=SeqID_113014
caccagacagcatactaaggtaaccatgcaaacagacagctgaactgaatatcagatttgtctgctttctgttgaaacaacactgtacaaacaggcgaattttcaagccttgctcttgtcataaaatgcacaatggtacaattaatgtgaatttgtaaagcaatgcagtggcacgatagtaaatcaacagtcctgcacctacaagcatctgatatgtcgacaccgactgccgagtgagccaaaacatttacaatcctaacacattatcgtgcatatcctaaccgttgaagcatgcacattgctatgaacttatttaaggtatatccaaactataatagcagatagtattcaagcttaatactatgcgaacatgggctcctagctgtttgcatccatcattgtcctagaaatcaactgagcccagcaaggtattgataacatgaccaaagtcgaaagagaaaattaaaagacagcaattgatat

SEQ ID NO: 47041 - DNA, 378 bp, Setaria italica
  Peptide Sequence Number=SeqID_113015
cttgatgattcttctcaaacttcatctgtccatggatggatccatatccttcggcagacatcgatcatatcatccatgatgcagaagaaaaacaatacatgagctaggtagctggttgtgtatgctaaagtaaagcgtttactttccataccatgatgaagacagtgatcaagcatgtgtgcaactgatcagctatcgtttcctcagacatctttgaaaagaagctggaatctgggtatcctatcgggtggaaggggacaagacactatcaatttacctttcatcgcacctctaaatattgcctcaactacatcaatgaagtcttgcttgctgctaaaagagcctatccactttgtatgatcaggtgtcccttgaata

SEQ ID NO: 47042 - DNA, 1021 bp, Setaria italica
  Peptide Sequence Number=SeqID_113016
acatttctatcaaaacatagtttcatgttacatgaaaaatcttctacgacctgagatacattatagtagaaatcagcagacaaagttgtgttttcaacaccgtcatgatatccaaaacattaactctcctgcagagcagggagaaacaactacacctttacaatgacttgattagatcgcactattttagttgatcgttctggttgtaacacaggttacagaaaggaaaagctaactccctgtggtgtatcaagagatcatatttgaatgtgacagtagccttccacataaagagggaactgcactcttgatgattcttcacaaacttcatctgtccatggatggatccatatccatgatgaagacagtgatcaagcatgtgtgcaactgatcagctatcgtttcctcagacatctttgaaaagaagctggaatctgggtatcctatcgggtggaaggggacaagacactatcaatttacctttcatcgcacctctaaatattgcctcaactacatcaatgaagtcttgcttgctgctaaaagagcctatccactttgtatgatcaggtgtccctgaatccatcttcatgtgatgggcattgaagaaaaaaatggttgctggaaccaaagtaatatcaaaatagtcaatgtaaacttgaatctcctcagaatccatatcaaccaatgctactgaagcaaacttggatatgtcccaagaagatttagcaaggatgtcgtcaagatggaggcaggcggcgtcggcggcgcggccgaaccgaaggacgaggaccttgtcgagggtgtcgcggatggcggcgtccacctcccgcttctgccgcagcgtcggcagcaaggccgaccccatcttcccaccggccacctcttctcgtgcccctccctactgcgagccgaggttctcaccgcccctccgctccccggtgacctgtgccgctgtgcgcaccggcggcgtgcggatgccgcggaaacgaggcggacggggaacttccagcctacaaggcca

SEQ ID NO: 47043 - DNA, 276 bp, Setaria italica
  Peptide Sequence Number=SeqID_113017
ttgtggtcttgtgaactgccttcttcttcctgcgcacgctgccctttcctccggtgcgcacagcgcccgccatcttcttgagcttatccacattcatcattcgagcaatcaatcgacggtaccgcgcacaggcagcggtccaaccctagtaacagtaaagcaaaacgaaaccggcgacacagcaagagtacaggcgacgcggcggcactcggtcatacacgggaagaggagaggggccccgccgcggcggtctcactcaccttggaatggataggc

SEQ ID NO: 47044 - DNA, 964 bp, Setaria italica
  misc_feature (1)..(55): n is a, c, g, or t
  Peptide Sequence Number=SeqID_113018
nnnnnnnnnnnnnnnnnnnnnnnnnnnnnnnnnnnnnnnnnnnnnnnnnnnnnnnttttactcttttgtttgagagctctcatccatcatcaccacccaccatttgcagtttaagcctccactaaattacagctctacacatttctcgatatcaaaaaattacttgcgaacgtgaaacacacacttgttgcaaaactcaatttgactgggattcgaccaaatccttgtaaaactgaaaactcatggaaacgaatgaggcacgtcagagttcacggaagagctcgcctctcgcatggtagatggcaacactgaaccaacgacccttcacagcaacggatcagatgtgcaataaaattacgattctttcttctcttctggctctgcttccttctctgcggcctcttcaaatgtctctcccgggacaagctcagggacatcatcatcatcctgtgcagctgcactagcaccaccctcagcaccaggtaccttctggaactgctcagcaagcctccgaaggttttccaggttatcaggacccagttggttgataattgttggcagcagatcttgtagacttttcgtctgtggtacaccactgactacccacgtatttgcaggaatggatgcttgcactttggggttctgaaattggataacaacatcatccttgaaaatgttaacctcctcaatgccaggaatagtgttcactccgattcttttcaaagtactttggagcctcttgtcatctgtggttgtggtcttgtgaactgccttcttcttcctgcgcacgctgccctttcctccggtgcgcacagcgcccgccatcttcttgagcttatccacattcatcttggaatggataggcggcggcgggcggagtgggggaggaagaaaggggattagcagataggactcgggaggccaaccactgcgggggcttttctcccctccgcgttagggtttt

SEQ ID NO: 47045 - DNA, 751 bp, Setaria italica
  Peptide Sequence Number=SeqID_113019
atactgttcaataatcaatagtggctttttataggcaatacaatcaattttattgatagtgacttaacttttggaatttcagatgagacagttagtgcataaaacttggctaaagtaatgttgcagtaggaaattataaacatgcagaccaaattctagagaacttacaccagggaacaatcttccagcgctggttgtcaccctcgcaccactcccacagcacaagagtggttccatcgcgcacaccaccgtggtccttatctccgtgcagagcatcaaagttcaagtagatgttgttcaccatcctaatgcagcggaatccgttaccgacgtccctgctctctgtccacaggaccgcctcatccagggtgtctggatcatatcgggtcagacgaacctaacaacagtcgaatgaagatatcagatctcatagttttggaattgtgctgtcaggaatgagtctgaggacataaccatcaaaaacaggtagcaatagtcgaactaatttaggactagtgacacatggcaatgcacatggacactactagtagcagcgtgatatgcacgtcagcacatcgatgcagatgtcaaacaccatgggaggatgcagatctataatgttgacatggtgagccggtaaagtacactgatataattgtacaatatctgatgaagtacatggcactgattaatcaaacagagataaagaccaataccatcatgtgaatcttgaatgtactataaaaattca

SEQ ID NO: 47046 - DNA, 944 bp, Setaria italica
  Peptide Sequence Number=SeqID_113020
gtcttcacacaaaaccatttctaacatgctgaacaatcaccgctgtgagaagcagagcatgtatcaagcaaaggttcatacatcattcttcacactttgtaaacaacgatcagttcgaacaatacaatcgctgccacttggtgtcatatggcgcattacaaattatagcgtgcaagtagaatcacaatgaaaacggactcacacgcaggcaccttgggaggtgccgcttattccagaaaccgcggtactaattacttcgcttttattaagacaggagctgcttagagtggcgcagccacgcatttgtttgttcaccagggaacaatcttccagcgctggttgtcaccctcgcaccactcccacagcacaagagtggttccatcgcgcacaccaccgtggtccttatctccgtgcagagcatcaaagttcaagtagatgttgttcaccatcctaatgcagcggaatccgttaccgacgtccctgctctctgtccacaggaccgcctcatccagggtgtctggatcatatcgggtcagacgaacagggtgtgacttgccaagggaatgcttgagagcctctccagttgccttgttgacgagggccatggcagggtagccttcctcatccttcaccctggtgctgtacttcatgtccttgatccagtgctgcgtgtcgtcgtcgcgatcggtgcgcacgaggcagaccttgccgtcgcgggtggcgaggctgaactggtcctccccggccttgcagtagatcctgtacgtctgctgcctcactggcggcgcgcccccgccgccgtggtgcgggcgggtctcgtggtggccgtactcggaccctccacccccgttacccgtccgtccgtccgtccgttagtaagaatagttagttacaaccaatacctaaatagacaagacggaaataccgttaaccgaacgtaccca

SEQ ID NO: 47047 - DNA, 575 bp, Setaria italica
  Peptide Sequence Number=SeqID_113021
accatcgcccacccaaccccgtggcgctgtgattcatggtgctcgcttgctcgctgccacagaataccagatcaacgtgcatggcgaacactgtgctggaagtcaagatgcgctccattttgatcttcaaagcatatcgagctgcacatagtcccaaaaccatggcagccattataacatctagcatatacaataaaaaccttctaatatgcctcgagattgactggctgcctgacaaaattttgcactatcactccccaagttcgctcattaggaactatccctccatttactgccttgtttagaagcatagacgcatcatcaagcaatctgactttgcagtgccaactaatgagaatattgtatgtgataatatctggatgcacattttcgttgggtagcttctctaggagatttaaagcagcatgtgtccatcccattttgcacaatccatttatgagtgtattgtaagtcacaatatcaggagtgagcccttgattcaacatctcctttgagagctctagtgcatcgcgtactttccttgcttttgtcagtagtcttctacttgtattcta

SEQ ID NO: 47048 - DNA, 778 bp, Setaria italica
  Peptide Sequence Number=SeqID_113022
tttttttttaacgtaattttttttgttaaagtcttgctgtccctaaattaatctgcacttgttcatacacagatcactttagtattctaggacaaaaaatatgcagcgttctcgcagaaaataccaggtagtagtatgtacctatctccccatttcacggcaggtcaacttcactagagctgcatgtgattccccattttcaaccgtggttctatttatatctcagtacatggattgcggatcactggaatctgcttatcccaactatatacatattatgctaatgtagttgatgcaccgggaagatgcaatgcttctgtccatcatttgctagtagaagctacatgagctgcaacatcttcagacgctgctcatgctctgcatccatcttcggcggtgtgtaaccgtctcgaaggtcctccacgacatattcctttgccagctccttcttggtaagtatgtgatagtgccgctgccagatcctctggatggccagagttgcagcaaggaacccatatgcaactccaaggatggcgaataaaataacaaagatgacagcgaaagcaaagcaggcttccattgaagctggtaagtccactataccccacccatagaagcaattatggcatccagccaagcacggatcattgttgttgaaagacgagaggtgcactattagcccaaaaaatccaaccagtacaaagaacaccaccacaccaacacagtagtaaaagggcaccggatgctttgacagaaaccgatcccaatcatcagaaaa

SEQ ID NO: 47049 - DNA, 350 bp, Setaria italica
  Peptide Sequence Number=SeqID_113023
taacaaattacgtttaggttacaaggcttggttgtggttccaagatgcaaagttcttgatatggtagtttgcatcaatcatattgataatgatctcttgcttgcaacttctgtatttgatatgctcaacaaaaggttaaatactttgtgaacatagggtcatatgtattgtcaggattattcattgatcaggcatactaatctcaaaaggtcatcaccaactttcatgtggctatcacagatttattggcctaactgccgcatatttttttatgcattcagtaaagttatgcaaaaattggtttcttagttgttgctcagtagctgcatgtcgtaatatgcaagtgaagg

SEQ ID NO: 47050 - DNA, 500 bp, Setaria italica
  Peptide Sequence Number=SeqID_113024
ccgatgtgacctgaactaaaaattagtccatggatccaaacactcccagtctaattctggaaaagctctgaggtagtaaggtgtactactctcttctaaagtcttatgcctgtgtgcggtgtgcccggtgctgttcatctacatccagatcttcaagcttattatttggtcatcagagtttttatttgccaagaaatctctgtcattttctgtaggtttgcatctttccgaggaaataataatgcgctgatttttttccacaagaaattgaagaaatttttttcacttgattagttcaccatagatttattttaaatatcttgtaatacaaccctagttcttcaatatttgacgttggcttgaagaaatttacatcatgctttgaagcaatcactgaatcgcagttaggagtttacagttgcaactaagctccacaaatcctgctctcctcccccttcacactgcactattccaccttactactgcatctttagaaaagt

SEQ ID NO: 47051 - DNA, 676 bp, Setaria italica
  Peptide Sequence Number=SeqID_113025
ggagttgtagcttacgggggaggatttgaggagatggaggtgcagccggagctgtcgctggggatgtcggcgccggcagcgggctttgctgttgtgaagagccccaggagctcgtcgtcggactcggacggcagcggcgggaagaagaggaagcacttcgcatggagggaggaggccatgtcccatgcaagcggcctggagctccagctcggcgaccctctgccgccggactgggaacagtgcctcgacctgcattctgggaggatgtactacctgaacaggaagaccatgaagaagagctgggtgaggccgaggtcgtccaacaaggaggagcagggcgccctgaacctggagctcaacatctccacgaccccttccatcttcgacggcaaggctagctccatcggtgctgccgttgcggacgagaccagaagcccgaatggcggcggccacatggtggccgtgccctgcgccaactgccacctcctcgtcatgctctgcaagtcctccccgtcgtgccccaactgcaagttcgtgcagccgtcggtgcctgccatgccgcggacgcctccccgccggcttgacgccatcaagccgctggagaccctgagcctcctgcactaggcttgcaccgtgcaagcgggggcagggctaagtctaggtcctactttgttta

SEQ ID NO: 47052 - DNA, 1588 bp, Setaria italica
  misc_feature (1539)..(1588): n is a, c, g, or t
  Peptide Sequence Number=SeqID_113026
ctttcggcgccgccgcatccgccgccgcgtcccgccacgcgctgttcttcccgccgcctctccccatgaccacctcccgcctcgtcagcttcctccgcgggccggcgaactctcccgccccctcagctcgctggggacctcgccaaccgcagcgcctcagcttcccgcaggctggcgaggggatgcggcgcgtctccgtggcatgctcctccgccagcggtgaggacgagggcatgacgtacaagggcgcaggcgtggacatcgacgccggcaccgagctcgtgcgccgtatccgcaagatggcacccgggattggcggcttcggcggcctcttcccttttggagatcattaccttgttgctggcactgatggtgtagggacaaagctgaagcttgcttttgaaaccggtattcatgacacgattggcattgacctggtggctatgagtgtcaatgacattgtaacttcaggtgcagaaccaatgttcttcctagattactatgctaccagcaagcttgatgttgaccttgcagagaaggttatcaaggggattgtggatgggtgccaacaatcagattgtgttctcctaggaggggagacagcagagatgcctggattctatgcggagggtgaatatgatctaagtggttttgctgtgggtagagtgaagaaggataaggtcatcgatggaaaaaacattgttaagggagatgtccttataggtcttccttccagtggggttcattctaatgggttctctcttgctagaagagtactggagaaaagcggactttcattgagtgaccaactcccaagaaatgatggcataacaactactgttggtgaagctcttatggcaccaactgtcatctatgttaagcaggtacttgagataattagcaagggtggtgttaaagggctagcccacattactggtggtggatttacggacaatatccctagagtatttccttctggacttggggcgaaaatttttactggatcatgggaagtgccgcctgtcttcaagtggcttcaacaggttggaaacattgatgatgcagagatgcggcgaacattcaatatgggcatcggaatggttcttgtggtaagcagagagtcagctgacagaattatcgaagacacccgtggatcaagtcatgcttatcgcattggagaggtgattgagggcgagggggttcattacgtctgaccttttaagccttcatagcttgtagcggcttgagacttattggtcgtctgggcaaagcagtccagtttatgtaggcataatcttaaggggtttaagttctccggtgatagtggttctccacttctactcccacaagaaacgtgggggggtaaccaaataatgtttaaatcgttacacgagaacttgcccctaaacggctgatattggtatttggatcttgttgagaagagcgcttgtggaaatgcacagatgtccaggatttcctggggagtagtatcagttttgtttgaagtaatttaaagagcttatgtggtcttaacctgcnnnnnnnnnnnnnnnnnnnnnnnnnnnnnnnnnnnnnnnnnnnnnnnnnn

SEQ ID NO: 47053 - DNA, 425 bp, Setaria italica
  Peptide Sequence Number=SeqID_113027
catcggcagaatttgttatgcaatacatcagcaatttaggagtgacgcacggcggccattccagatagcacaggctaatgcatccaattatgcgcatgcagtggacactagtagcagtagtggttcttgtcccaacttggatgaaagggacaggcccataaatttcttcatagcctccaaatctgcatctgtctaaattgttagctgtactgatctatgggctgcgtcactgtccatttggagtggggagaaggttatctggggaaaataattgtatttatgattgtactgttgtccatcactagcagatttgagtagctgcaggatgatattgatgcgattgccaattgcatgatacactgcttaagtggggagtaggaggttaatgggagcactcacatgtgtataactatgaatgactttta

SEQ ID NO: 47054 - DNA, 543 bp, Setaria italica
  Peptide Sequence Number=SeqID_113028
ttccagttgtttcttcaaatccgatagttgtgcttcattctggggaagttcaatgggaattttattagggaaaagatcatgtagatgatttgttttctctgtagcacttccaatggctggctgatccttacagctccctccctgagtgtgagacccaattatcagaacaccagctggaagttcacttctcagtgatgcatgatattctgtacatttggtaaatgacttttctacatcctttagtaatacaatcaaattactgtttttgctttcttctgaaatgacctaaattaacttgcctaaagcaaggctatcaacttcttcaccaccagaagactctggctgaagttcaacagcactacaaaagcctccaagatcattgccatattcgatagcattgtcaaatctaactccaactttagatgacccatttttcaaaagcaagcaccactttgcctcgataataataagcactgggtattgactttacggaaccatcgccaatatactctaacctatctccttctctgcaagtgtttgttg

SEQ ID NO: 47055 - DNA, 241 bp, Setaria italica
  Peptide Sequence Number=SeqID_113029
aaactgtggatcagtggatgccacgctgagcatcgtgatgctatacaaataatgcaaatatatataatgcagatgatttatttcatgcaaatgatctaatgcagattttctgataacggcggtagctaataatagaaaaaaaataggtggttcttccacataatctcaaaatacatgttgattttttcgtaagatttatcgctatactacttcattttagctttaaccataatatctgaaa

SEQ ID NO: 47056 - DNA, 493 bp, Setaria italica
  Peptide Sequence Number=SeqID_113030
tcgccgcggacgccgccgtcgcccggcgtggcgatgccggccaccagcccccgcgtccgcgacccgtgacccaggaagccaccgatgcagcagccgccgccaccgccgccgccgatgtgtagatacggctgggtaggagagatctggcgaggcggcggcgaggaaaggaggaagcagcaatacaatcacattctgttagctccaactcaaaccttagctcaaaaattctttttttctttcctagcgtgctctgccttgattatttgttggtgtacatgggacgtgcggcgtttggcaaccaaccgatggattgctcatgtttggcaattttttgtaacaaagcttatgcaatatgtatggcagaatctcatatgcaaaatttatttaggattatggtattatcttcgataggactcatcaactcttgttgcctggctcctcttgcagtaaactaattttagctagcttacaatgttcctgcttgtgaggtcaa

SEQ ID NO: 47057 - DNA, 766 bp, Setaria italica
  Peptide Sequence Number=SeqID_113031
ccttcacgatgcggaacatcctccgcatggtgctgggggagaaatggtcaggctcccatggcggcagcaccgaaggcgaggagctctggcgattgctcgaggagggttcgcgctgagcggcgcggtgaccaatgtaggcgagtgggtgccgtggctcggctggctcgacgtgcagggtttagtccggcggatgaagcgggtgcacgtgcagttggaccggttcaacgagcaggtgctacgtgagcacgaggagcaccggcggcgcgccggagacggcgagttcgcggcgagggacctggtggacgtgctgctgcaacaactagccgaggacgggcaggaggagcccgcagagacgaggctcacacgcgatggggtcaaggccatcgtccaagacatcttcgccggcggcacggagacctcggcgttgacgatggagtgggccatggtggagctcctccgccgcccggacgccatagcggcggccgccgaggagatcgaccgcgtggtgggacgcggccgctgggtcgctgagagcgacctgccgaacctcccctacgtcgacgccatcctaaaggagacaatgaggctgcaccccgtgggtcccctcatgatcccgcacggcggccgtgaggacgcggtggtcggcggctacgacatccccgcgcacacgggtagtgatcaacgcgtgggccgtggggctggacgtcctattaagtacggtacggtaccgtaccgtaaggtagtattaaaaaacgtaaaaaaaaaa

SEQ ID NO: 47058 - DNA, 307 bp, Setaria italica
  misc_feature (40)..(40): n is a, c, g, or t
  Peptide Sequence Number=SeqID_113032
gtatcaatggcaagcccatttgggggcattacgagttcgngttttgttactgaacagagacatgagagtggaaaatactgagtaaatggtgttttgcaggtaacctctaccctagtcggccatctggactactcattcgcaacggcatggcacccggacgggcttacctttgcgacagggaaccaggataaaacctgccgcgtctgggacttgcgcaacgtctaactctgtccggcggtccttcggggcaacattggcgcgatccggtgcatccgctactcctccgatgggaggttcctggtagtta

SEQ ID NO: 47059 - DNA, 2011 bp, Setaria italica
  misc_feature (1965)..(2011): n is a, c, g, or t
  Peptide Sequence Number=SeqID_113033
cgcctcgccgcacggcacaaaagagctcggccgcgccctcatcccatccacacgtttccgcctcccgatccacagccgccgccgctgccgccgacacagcaccgctcccttcccctcccccaccaccggcgagtccccctgccctcgtcgcagccgaggccggccgaccaaccgaccgaccagcaccgctccttccttgccaggcggcgcgggcgcggcgcgcaccgcgaacgagcgagccgcgcggcggtgctctcgttgccctctgaggggaggcggttcgtgggttgcgcggcgcggaggatggcgtcgagcgcggcgtcggaggcggccgggcgaatgatggatgacgaccacgacggctgggcgtcggacggcgaggtagacgtggagatggaggtgggaggcgagggccacggcctcgatgccgaccggagggacggcggcgcggacgacgacgacgcgtactcgctggtcactagggtaagtgacacatcagcagccgaagcaagggcaggaaaggatatacaaggtataccatgggataggctaaacataaccaggcaggactacagaaaagctaggttggaacagtataaaaactatgagaacttccctcaatctggagaactcatggataagttgtgcaagcaagtggagccaagcagcaagtattacgagtttcagaacaatactagatcagtgaaaccatcgtttctccattttcagcttaggaatttgttgtgggcaacctcaaagcatgatgtctattttatgtcggagtccacagtaggccactggtcaccattgtctcacaaattgtcaacggttctcgacttctcagggcatgttgctccagcagagaagcatcctggcagtttactagaagggttctctggggttcaagtcagcacacttgctgttaatgagggtttattggtagctggtggttttcaaggggaactgatttgcatggggttagcggaccgcaatgtgaaattctgtacaaggacaactttgagcgacaacgctataacgaatgccatagatatacacagatcgacaagtggaagcttgcgcattacggtatccaataatgattgcggtgtccgtgaatatgacatggaaagatttcagctcttgaaccacttccgttataactggccggtgaatcacacatctgtgagcccggataggaaacttttggcggtggttggagatgatcgggacgctcttctcgtggattcacgaaatgggaaggtaacctctaccctagtcggccatctggactactcattcgcaacggcatggcacccggacgggcttacctttgcgacagggaaccaggataaaacctgccgcgtctgggacttgcgcaacttgtcgacctccctcgcggtccttcggggcaacattggcgcgatccggtgcatccgctactcctccgatgggaggttcctggtgttctcggagcctgccgactttgtgcacgtgtacagcgccgctgcggactacaagaagcggcaggagatcgacttcttcggggaggtgtccgggatcacgctcagccccgatgacgagtccctgttcatcggggtctgcgaccgtgtctacgccagcttgatgcagtacaagatgaagcatgcgttcgattatcttgactcgtacgtgtgaagaactgaatatcccgtgttgtctgtctggtgctcgctgtcggtcactgctctcaggtggcggttctggtgcgcgattcagggaatgtatctgcctgttcttgtgcgcttttcagggaatgtatctgcctgttcttgtgcgctagccgatggtttacggcgagttgggactcgggcgagcctgccgtgtaaatagtttagcagttgaagcataatgttgaggaccttaactgtctgaacatatataagcagattaatgtatgtttgccgctgttagtttcagactaaaagnnnnnnnnnnnnnnnnnnnnnnnnnnnnnnnnnnnnnnnnnnnnnnn

SEQ ID NO: 47060 - DNA, 544 bp, Setaria italica
  Peptide Sequence Number=SeqID_113034
cgtcgtcgtcgtcgtctgtctcccccctctccctcccatctcccccgccgccccctttatattacaaccgcatcgcgattgcactgaccaccgcctcgaatccgccgccctccgctactcgaacccgactcaccggcgcccgctcccgcctggctccagggcccattcgtcgacccgtcgccggcgagagcgcgcccccgaggccttcaaacccttccgctgaagcgaagcgcgccacctcggaggaattgtagccgtcctcagtgctcggggcggagatccgaccggacttggggttggttcctcctttctctcgattggaggcgctgaaagcgtatacgtgaagctcctggggacatggacatggcattgcccgttgtgaatgccacagcggcggtgctcgctcgggtctcggctgcgtttaatgcccctcttgcccgtgccgtcgtcttcggggtccatattgatgggcatttggttgtggaagggcttcttattgcagtcatagtgtttcagctcaccaggaagagctaccaaacccccc

SEQ ID NO: 47061 - DNA, 266 bp, Setaria italica
  Peptide Sequence Number=SeqID_113035
ccgacgtctccttcgccagtcgctcgccccgcgccgcctgatccgccgctaatggcggcctttagcctcgtaggccagccgacgcgacgcggccgcatatatgccacagctcactgtccgccgcgccttccccgcgcgcgccaggattggctcattttgctggccggggaagagggggattccccgtggccgcgcgaaaattcgctgaacccccgtgcagcgtccccagcccacatgttttttgattcccgcggatgcggaggccg

SEQ ID NO: 47062 - DNA, 261 bp, Setaria italica
  Peptide Sequence Number=SeqID_113036
gccccctgttttcccctcccgccgcgtcctcctccttcctcgctgccgccaactgcaacagctacccgccggcttccgtatatataacccacctcccctcccacctcgtcatcggctcatcgccgcagcgcaaagcgtcaacacaaccagaccaagatccagaagcaagcaacccgcaagctactctatagctagtccactcgatcaagaacttaaggcctttagctcggacaggagcgaggatgagcgcgccgtctttga

SEQ ID NO: 47063 - DNA, 601 bp, Setaria italica
  Peptide Sequence Number=SeqID_113037
agggtaagtactaaggaaggtaggtgtttcctctggaaggacatccttgtagtcctgcaaaacacatgaaacaacactaggaagagatgttatgtcattagttgaaagcaacatgtcttgaaagcaacatgtctttgtacacaagtaaaatgagtacttggcctgggttacacctcgcatctctcatttcagatttggtggctaacataaccaaataattttcctctcttttatttttatctctctcatttggcctgtggctctcactcaccgatttgtggagggcactcatactctttttctcactctcaactctcactttggaactcttttgcaagtgttcagctaagagttgttgcggtgtcattggtttaagcaccatgttctttcccttccacttgattgtgtattgatttgtacgtgcgaccacaatgtagagatgaaggatcatattgccatggccttcccaaaagcagatggtatactgtcatgggtgccacatcacactcaatggtgtcaacatactcaccaactttgaatggaactttcactctttgtgcaatcttgatggaactagagttcttcaaccattgcacatggt

SEQ ID NO: 47064 - DNA, 333 bp, Setaria italica
  Peptide Sequence Number=SeqID_113038
aatgcagatgattaggaaatcaggaacaaaaatattaaaatcactggtcggcaagctaaccagaagacgttctacaatcaaacagtgaacacagaaaacaagcaccttgacttcactagaccttttggagtcaagcccatgagtttgcaaatttcgtgtgagaatagatgctgcactggaagctccaggaggacattcaatttcttttgcatatagttgcatgctgaccatatttgagcgatgactagcctcgaagaaaaaattgattttatcactggaagtatcacgggcgtttgcatggagctctgatgccatgagacatgtgataaaagg

SEQ ID NO: 47065 - DNA, 281 bp, Setaria italica
  Peptide Sequence Number=SeqID_113039
ttcgttctaggaaccggtcgaggtagatgtaggcgacgacgtagcaggacgggctgcagctggcgaagcggaagatgcgctccaggtacccgccgatggagatggccggcttcgtgagcccctggaacgccgagaccggccgccgccgcccctccgccgtcgccaacgccccggcctcctccaccgccgcggcggcgtcgttgcgctccgccacccgctgcagcagcgccgacaggatcgagaccacccgcggcaccgccgccgcctccaccatctccccg

SEQ ID NO: 47066 - DNA, 916 bp, Setaria italica
  Peptide Sequence Number=SeqID_113040
ccgtgaagacattacagtgtgagtagtcctgagtactgttgtgctggcggcggcgaactacagtcacctaacgcttggttcagccctcatgggaccgtgaccccactgcatcatgacccacatcacaacctttttgctcaggttttgggtaggaagtatttcagactctatcctgcttctgtatctgtggacctgtaccctcacacagaggcaaagctaagcaatactagtcaggtagatcttgacagcattgatgaaaaggagttcccgaagacagcggatcttgaattcgtagatggcatattggaggaaggggacctgctttacattccaccgaaatggtggcattacgtgagatctctttctattagcttttctgttaggttttggtggcgaacgtcaggaagttcataacgctattgttttgatggtccatgatatttctatcatcggatctgtagatgcttaataaaacttcattgagcgaatatttcatgatccactgttgtgtgggtacggcctcactacactgatgtatatcattgttttcacgacagtgatttaaactgttagctgcaatcgtactaagttactattggatgctagcgtgcttgttttaccctaaccgacaaccgactcctctacattacgagctatctatgttaactaattcgatttcctttcttttttaagtggaaggattcactagtgcttaaatctgtcatttctgtacatgtgaaaatagggagcatgttaaaaatgtaactcgagagtcagctcattaagaaatgttcggaaatcatctgcaattattatgtttggctttatccctgggagataagccaccaagaatggttctgtaacttttgttcacttattctgaatacttctcatgtctgccccttcatgtctttca

SEQ ID NO: 47067 - DNA, 1227 bp, Setaria italica
  Peptide Sequence Number=SeqID_113041
agatgtgtaacatagatcaatgtcaaattccaaggtcgaaaaattaacttactgagttcctaggactttgtagagcctgaactttatcatgtgttacatttgtaccatttatggcatcccgtgctccattagttaacctgttaatcttgtatgtttttatatcattgttgatggttgaagatttttttaacttttaatcttgtatacttattttcataggctaaccattagtcctgagaatttgccatgcttctgcttacagtgattcctttaccatctagtatgggaaaaaatatatgagtatggaaccaaattcttcaatggcttattattagaagttgcttgaaatttgagattgctaatttgtctgagcaaatcatctgcattaaattttcttgtattcatgcaatttgcaaaaatgtgtggcctttattttccattgattgcaaatcctgtccataagcaattgctgcttcacgttgatcctggactttagcttggttcggattaaattaggtctacattctggttgaacattgtggtgtatctccttcgacattctttttttgtgatatatggtccagggtttcactcataacaaatggtgttgcaggttgggaaaaatcatgcatgtactgagtggaaacaggagcttatcacattttctcaatttcttgagaggatgtggtcaagtgattctgcaaacctggcatatgtagcaggcatccattgttgaccagataaaggagctccgtgaagacattacagttcctgagtactgttgtgctggcggcggcgaactacagtcacctaacgcttggttcagccctcatgggaccgtgaccccactgcatcatgacccacatcacaacctttttgctcaggttttgggtaggaagtatttcagactctatcctgcttctgtatctgtggacctgtaccctcacacagaggcaaagctaagcaatactagtcaggtagatcttgacagcattgatgaaaaggagttcccgaagacagcggatcttgaattcgtagatggcatattggaggaaggggacctgctttacattccaccgaaatggtggcattacatgagctatggagcagatcatttgttttacttggctgtggatttagcttttgtaattatcgatgataaagcactaactgctaaccatactgtccatattaagtactcgaaactatttttagaggaatcagtag

SEQ ID NO: 47068 - DNA, 474 bp, Setaria italica
  Peptide Sequence Number=SeqID_113042
cgtcagcggcggcgaggcggaggcggttgaccggtgggaatgtggagaggtggaagagggatcgcgggggaccgagaccctgccgatgtactcaaacttctaccagtgaaggccctatcttgtaagcaaattgagaggcggtcatgcatttctttggaggcatttatacgtgattactttatatgtgagtcccctgttatactcagtggctgcattgatcattggcccgcaaggacaaagtggaaggacataaactacctagagaggatagctggagatcggactattcctgttgaggtgacttacttacactcctagacattgataactgacatgtaaaattgcaaataatttgctgttatttgggggaaaacatggtaacacatccaatttggccagtcgctgttaaacattcaagcttgattttcaggagttcagtttcagcttggttttgtaggtaactaacggttaatt

SEQ ID NO: 47069 - DNA, 555 bp, Setaria italica
  misc_feature (123)..(123): n is a, c, g, or t
  Peptide Sequence Number=SeqID_113043
atatattacatgatcacaagacatgatggaaaagtaaatgttggcgtggcaatggttatcttacaatcgagtaacaaggacacactgcagttatcttctaaggggaacatagtacagtaatcncaaaatgtgggtttagccattgttgttgtacttgtccattcgccatggcccatgggcagataattgtaacttataaacaatgtcttactcggacagaagatcatgttataggcgcacaccatattcaaagaatcaataacgtataaacaacaatttacaggcgtggcacatctccagttggaaactctccacgtggcagttaccttgcagctcgtctttcatctctaccgcaccaaggcatctatttcttggtgtatgcaaaatgcatccctgtcctgttaattccaccatgttaatatatctgttccccagtgcatcaatcgcaggctcaactagcagaatcctcctgttgtctactgcatgtgtggtgtcaagctttcagtgctcaatagttagtaaactagaataacaattacccaaggttttacttaa

SEQ ID NO: 47070 - DNA, 1250 bp, Setaria italica
  Peptide Sequence Number=SeqID_113044
tttacctttatttattttcttaaagttaattttctttaatttaacgtttattaaacaacaatttacaggcgtggcacatctccagttggaaactctccacgtggcagttaccttgcagctcgtctttcatctctaccgcaccaaggcatctatttcttggtgtatgcaaaatgcatccctgtcctgttaattccaccatgttaatatatctgttccccagtgcatcaatcgcaggctcaactagcagaatcctcctgttgtctactgcatgtgtggtgtcaagctttcagttcatgttgtaactgatacattcccaggttttcttaagcagatgcacgctgatggaaattcatggaaatcatcctgttttggtctgatatcatccggttctcccataagacccctctggactttctgtaccttctgcgaaaacgtatcccagcccatctgtttccgtctctgaaacagtacattgagtttctttgcatttggacgaatagttctcttgtggcccatgtatcgccttcggccagctaaaaccttggccatgtttccattattatttgtaacgaagacatcactttcatcacaaacgatgaagtcaattgcagccagccgtgacgaaaaaggaaggaatagtttcaaatcatccccagcaagcatctccttggtgtagaaatttggaaagagttccctaagaggtcggagagtttcctctccaccatatatttctccagaagcaacatacaggtttgtatcgttaccaaaaccaagagctcggagcattaaaccaacttcatgaggagtcaatgggcatttccccctgctgcgctcatcctcagcactcaattcaggtaatgtatcccaccgtttcctaatttcactcagttcctttctttctttttcaccacctccgtagtagcagccagaaaatgcaagcatgtcaggttcaaacctcaagtgaactgcgacatatcgtgggctcatgagtctcagctttcgcacaagtttctgacccagagtacgtatggaatttgtaaatcttaatgcatgaaaatttactcggcaacgtagcttttgcagatcttcatcgagctcactagtgagcctataatcaaatttggttaattgcaaaactcgccttcgcatgagtattggcaaaacttcatcaatgtaaaactcaggcactgatttccttaggcgtcttcgtctattggttcctacggttagttttattcctatttgtacta

SEQ ID NO: 47071 - DNA, 545 bp, Setaria italica
  Peptide Sequence Number=SeqID_113045
ggcttggttcttccatggttacgaaaatgatgttgaaatctgcacaactcttctggttggggttgttttgcccttgctttatttgaaatccggttccattttttgaattatggagtgggttcttccagtactttttgtagtccatcaggtcgtttcaaatgttacaagtatttctttggtgcaccactttaaaggaacgtttatgtgcctctttcacaaggtgccagtttgaaaattttgccttttttttcctgggtctgctgctcctttttctctttgcacttgtgcatcatgtttcatattcggcaaatgggtgtcacttgtttgcggatgatttttatgattttacctttagagttcaaagtttgcaatcgaaattttgagtacttgagcctgagcaatttttaagccaagcaatgtgggtgttttagttacatttgaaaaaggtttggtgaacaaatgcttgcctgtaggagaccactctgactcacacgtgtatcctgtgttagtggtgaaacaattcagatccctggaaccttaaacgc

SEQ ID NO: 47072 - DNA, 692 bp, Setaria italica
  Peptide Sequence Number=SeqID_113046
tcagagcactgtgctcttgttggctctggtacaactgtaagtgggactcctgattctaggacagctgaaataaggcttaatgcctcgtccttacaattcaattgcatgcatgactcagcacacacaatagatctgtcccgtatagcctcaagaactcgtgcatatttttccacccatattttaagcttgttagcttcatcaactgctgcagcttttgcttctgctaactcgtgagcatgaatttcaaatgaagtgcgagatttctcagcaactgtagtagcatcagctaggattgaattagccgacatttcattctgcaaaacatttgatctctctttctcagcatgataaaacatagctgatgcaacctcatagtgatctaaagtatccaagaatttctttagagcagatactgtggctggcaaattagttaagaaaagatccttatgctcctgcaaaggaacacggatttcttgaattcttgaagagaataagctcaaactaactgctaattccattcctttcttctcttcaccagcaattcctgcttcatcttggatatttcctcgtgtccactcaatcaatgggtcccaaacaaatacttccaacaacatcaagatgatattctttattcttcaagaggacatccaataacttcctcacaagtaactactaaaaacaccttccacacc

SEQ ID NO: 47073 - DNA, 800 bp, Setaria italica
  Peptide Sequence Number=SeqID_113047
agacaagacgccacctcgcccccctcgtctctcgtcgctgccgtgcggcgaaggcccctcgctccggtggctggggtgctgctgctgctccgggtacgtgatgcggcgttccttgcctgtcacgatctgctcggagacctgtggcgtggggagctggagcacctgcgcgagctgcgtcttcgccggggcggcggcggtggcggtgacgtgggaggggacttcttggatgtccttgggcgccttgacattcgcggaatccttgggaggggccgtggtggggagctgctgggcggcgttggccggccgctgccgccggcggcggcggaaggcgaggaggcagaggacggagatgaggacgagcaggagcacgaaggcggcgccgacgccgatgccgacgagcacccacatgcggagcccgaacaccaccgtgctctgggacagctccgagtccgacatgggacccggcggagcgcgagaagccagggcgccgccctacagcttcttgcgaattgcccgatctcctggtgctcttgaccgtaattaggcttcaaagattgggctccaccgcgcaaacagcatcgagctcggattttctggactgaagtggaccgcgtacggcggatttagagcagaatcgggcgttaaggatgaaacagtcgcgaatgccacgactttgggcgcagcggattggatttgagtgggtaatcgggtgcgagaggaaggtcaggaggcagttgttggaggcaatgcggttgtaaagattggatttgcttgggggaaaagtgaggagtggaaagttt

SEQ ID NO: 47074 - DNA, 1748 bp, Setaria italica
  Peptide Sequence Number=SeqID_113048
gtcatgatccatttcttaaccagaggtgccaaaaacccattttttaacttaaatggcacgggtttatcatacatagatacttctacctatataaatataagcaggaaaatttactaggggctaaatcatattgttgacatgtacagatgatgtgctgaacggatgagggcacccgaacaaacgacagtacagcacccagttttcagtgggcactgttctccttcagaaatcatgaggatttcacttcctcaatcagtaatccgacaggcgacaacacctaggcatctgggtttctccatctgaagggttcggcttgtgtggcaccattcgcactgctgtcggtctcatggtcacctgatccaactgccggtttctctggtgctcttgcttgccctggtgctctgttgcctcggcgatcctctctgtacgggaaatcatcgacctcaagcatgtgaatgacatgcccaatccttggcctcttactagcatcaggatctacacatcgcaatgccactagcaaagccttcttcactgacctagaagtaggcttcttggggatctttgggtccacaacgccatcagaatttcggctgcttaccattgtcttaagccaatcaactaaattaacctctcctggtggcctgttataatccactggtaccctaccagatattatttccataatgagaattccaaaactatatatatcgcttgtttcattcaacattccagtccccgcgtactctggagcaacatacccgaaagttcccataactcgtgtagtaacataactccgttctgaaccaagaagctttgcgagtccgaaatctgagagcttagcgttccagtgcttgtccagaaggatgttgcttgacttgacatcacggtgaaccacttttggttcaagttcctcatgcaaatacatcaacccttttgctgttcccagtataatcttcatcctgttctcccatgtaagagggcttacgggtccaacgtccccgtgcagccactgttccaagttcccattatcgacatactcataaacaagcatcctctgattaccctcagcacagtatcctagaaggcgcacaaggttcttgtgtcgcacacgcccaatcgcttcgacctcaactttgaattccttctctgcctgacccctgttgttgagcaagttcttgaccgccacctgcgtgccgttctcgagcactccatggtacacgatcccatacccgccctcgccgatcacgttctcgtcggagaacatcccggtcgccgtctccagctccttgagcgtgtaccagtggccccacccgaggtgggacacctccggcaccgccggtggcgcgtggtccgcagcgccacctcgcccccctcgtctctcgtcgctgccgtgcggcgaaggcccctcgctccggtggctggggtgctgctgctgctccgggtacgtgatgcggcgttccttgcctgtcacgatctgctcggagacctgtggcgtggggagctggagcacctgcgcgagctgcgtcttcgccggggcggcggcggtggcggtgacgtgggaggggacttcttggatgtccttgggcgccttgacattcgcggaatccttgggaggggccgtggtggggagctgctgggcggcgttggccggccgctgccgccggcggcggcggaaggcgaggaaggtctaagtaaggtaacggtaagaatagaaggaacgaagacaaggaagacaacgaaaggacgga

SEQ ID NO: 47075 - DNA, 663 bp, Setaria italica
  Peptide Sequence Number=SeqID_113049
agatgtctggcttccaaagatgacgctcttcattcagtgaacatgtccagcaaccccagtatactcttgtcgtcaattgcatcacatctcgagtgatactttctttaagtgcttttgtgcaacaaagagttcagtgtctctcaacccaacacccagcaagctccagaggtccaagtcagtattggtgcagaatcactcaagtaccgtgcatatagaacagcccatcatgagatcccaaccaagctccccagctgtggtttgcatcaagcagtgaagaaccgcacaagtcatggctgttttcgggccaacaaaatgctgtgaagggagtgtcagccacactctgtgcaaatattagctcgcctgttttgatgctccaaatgcgaacagtgcagtcctccccgcctgacataagtaaggtctcagatggatcaacaacaagtggtaactgtgtgtgtgagttcacatgcccctcatatgactgtatacctcccttctgaatgagacggagatcaaagagtttgatagatccatccatggagcttcctaagaagtagttctcatctgatgagagcgtaaccaagctgcaaactgccgacgacatagaaatatctctcgaacatttatccttgtcagcctgcatgacattttccaacagaacaatag

SEQ ID NO: 47076 - DNA, 285 bp, Setaria italica
  Peptide Sequence Number=SeqID_113050
ggatcggggcagagggctacgtgcccgacacgagggacgtgctgcacgatattgcgaaggaggagaaggagacgccgctgctctaccacagcgagaagctggccatcgccttcgggctgctgcgcacgaggcccggcgacacgatgcggatcacgaagaatttgagagtttgcagggactgccatgaggcgaccaagtttgtgtctcgcgtctttgaccgcgagatcgtggtcagggacaggaacaggttccatcatttcagggatgggaagtgctcgtgtaaag

SEQ ID NO: 47077 - DNA, 204 bp, Setaria italica
  Peptide Sequence Number=SeqID_113051
gcagccacagcaggctcctcgctctccttggacttctttttctttttcttctcaccatcagcagcagccactggagtcgcctcggtttccttgtccttcttcttctttttcttcctctcctgatcaccatcctcctggattgcttccgctgcacagacaacagagcctgcagcggaagcaatccaggaggatggtgatcaggag

SEQ ID NO: 47078 - DNA, 816 bp, Setaria italica
  Peptide Sequence Number=SeqID_113052
ctgacagtatctcagagaaatcaaggttgactgcattagctctgtcgcccatcatcttcacaacttttgcatactgtatgttatctgtgactattttagtgagctcaggaaagtgccaaccataccattcacgaaccctcatagcataagtgttaagctctttgtcaagatcatccaataagccaatggcctgaatgatcatggtatcaaccttatcaggactgaacttcagcttatacctagacaggctgtgggacagtcccaggctcatcggaccaagttcttgtgcacccagcccagttataagctcagtgagctgatttctcagccctctcatcagctccatcacagcactattgtgaaggcagtcaattttcagcttttcctttatagcatttccaagcttggaatcagcaacagctaatgtttcaccctcacagtgcttctgcaagaacttgcgcagacccttgctaggcttgccatcaataatcagggtcgcagcagacagagcgtcagatgtgttctcaaacttgttgaaagccttaagctcaaccacccttctcgccgagtcggatgtcgtgaactccttccatagatcctcgaccttgtcgagcttcccctcgtcgagcaccttgaagagggcgaaccccgcgggggtctcgaatagcaccaacatatcctcctagaatcagtaacctgcgactatctcagccgaaacctggggggattcggcggtggagaggacgaggcgaataggggcttcgcctgcggcggccggggagacgagagggggcgggtggggaaaagggaggtagc

SEQ ID NO: 47079 - DNA, 1912 bp, Setaria italica
  Peptide Sequence Number=SeqID_113053
ccccggcccggcccggaatccagattcgattccggccccgcccggtgccgccccgcctcggcgcgttcggatctcggtcggactaggggggagggaggcttctcgattcgtctcgggacgagatggatcatgtggtcgggggcaagttcaagctcggcaagaagatcgggagtggatcgttcggggagctcttcctcgctgtgaatgtgcagactggagaggaggtcgccgtcaagctggaaaatgtgaagacaaagcacccgcagcttcattacgagtctaagctctacatgcttctccaaggaggaactggcattccgcacttgaagtggtttggtgttgagggggagtataatgtgatggtgatcgatcttcttgggcctagccttgaggacttgttcaactattgcagtagaaagttctcgctgaagactgtgctcatgcttgctgatcaaatgattaatcgggttgagtacatgcatcaaaagggatttcttcaccgtgatataaagcctgataatttccttatggggcttggcaggaaagccaatcaggtgtatattatagactatgggcttgcaaagaaatatagggaccttcagactcacaagcatatcccttacagagagaacaagaacctcactggaactgcacgatatgcaagtgtcaatacccaccttggtgttgagcaaaagcaggagagatgatttagaatctcttggttatgtccttatgtacttccttaggggcagcctaccatggcaggggctaaaagcaggaaccaagaagcagaaatatgacaaaatcagtgagaaaaagatgcttactccggtggaggtactctgcaaatcgtatccatctgagtttatctcctactttcactactgtcgttcgttgcggtttgaagacaagcctgattattcttacctgaagagactattccgcgatctctttattcgggagggataccagtttgattatgtgtttgactggaccattttgaagtatccccagataggctccaacccacggatgagggcaagtgaaagaactggtggagctgctggaccttctgtggaaaagattgagaagaccccaggcgaagcgtccggtaggaggaatccatctggttctgtgaatcagagtgacaattatgcacagcggccacgcgagactgtatctatgtcattgaaggaaatcatgcatagtacagaccggtctggggaaaggactgtggagagacctcgtacatcctcgcgtacaggcagcgcatcccggagagctattgcatcaagcagcaggccaggcacatctgtggaaccaagtgagcagccatataaccggacaagcaggttgttctctagcaacagtggcagtcgtccatctagcacccagagagttaatccatcaccaggcgagtcgagggccacctccctttcacgggcagcagttgcgagaggctcccgtgatgagccgctccaccgcagcctggagcttctgtcccttggtggcggtaaaaggaaatagtgggaaagaaagcggcatctgagaggcagaatgggaagaatgctgtttgcgactctgtaaatgacaggatatcacctcatatttgtcaacagttcccctggggcatcccataatttcgtagtgccccggcctgttgtatcattgcttcatagatagcaataatttgttgttaatgtgtgtgcgttgctgttgcgttagggccaagtcctagccttgtgatgattaatttaggggtggtcaagattcacatatttatgtttcttcacccttttgctggacttggcgacttttcctcccgagacaagtgctcgtgcatttcctgttgaactctgaattttctcatattcaacagaagttgataagaagggacttcctgtaaaaaaaa

SEQ ID NO: 47080 - DNA, 310 bp, Setaria italica
  Peptide Sequence Number=SeqID_113054
ccctcgtttccggcggaggtggccacgaacactccccgcgagacggcgccgtacgcgccgatcgcgatcgggtcgaggtagaacggcgccgtcacgccgccgccgccgccgatcgagacggagatgacgtcgacgccatcggccacggcgcggtcgaagccggcgaggatgtcggagtccatgcagccggcgcccttccagcacaccttgtacgcggcgaccctggccttgggcgcgacgcccttggcgaccccgggcgcgtacccctgcatgctcgcctcgtacgcgacgctgcccgcggcggtggtgg

SEQ ID NO: 47081 - DNA, 436 bp, Setaria italica
  Peptide Sequence Number=SeqID_113055
ggctcggacgcagtgcagccggtcagcggaggagcggatagcagcgccggagatggacacgcccgaccgtgccgccgcgcagcccgcggcctcgcgcgccgaggactcgccagttttcagcttcatcaacaacctgtctccgattgagcctctcaagtcggcctacaacgccaatagcctccagggataccagtccatcaacataacctccatttcctccatcttcacttccccacatgacaatgcgcacaaggaaccaaggctcccgaagagctctcttggtgaaatttcggaaagtgaggtttgtgctgacggcaagaatacaaacaagccaactaagtcttcaaatgctgtcaggttgtttgcctgcactagcactgtcactcaagaaacccacacggttacatgttcagatgtggttgatccctcccaccgt

SEQ ID NO: 47082 - DNA, 527 bp, Setaria italica
  misc_feature (11)..(11): n is a, c, g, or t
  Peptide Sequence Number=SeqID_113056
atttttttttntttttttttttcttagcttcaaacagctaaaaagatgctcactcattctgtaacagagtcttcacgtacagcttccataccagaaggatcatttttctccctgttcacaaagccagagtcttcactgggagacggggagctgaacggcactacccttacacgccatgtcgccatgcaatgcaaatgcgatgcaacccctctacgctacggtctacaggttgaccttaagcaagtccattccatgcacgaaacagcacacctagctacaactacaagctaaacttcacaaaagcctgtacactggagcaccaagctgccttggtcacattccatgaacacctgcctgacgccctgacctgatcagtttggtgacggaacgagctctcagaacgagtccgacaggagccaggtcgcgaacgattccagctcgtcctcctggtgctcgttgcagcccgcagcggcctgcggccatcgggctggagcagcgtgctctggtcgtcgtcgttctgctgctgg

SEQ ID NO: 47083 - DNA, 565 bp, Setaria italica
  Peptide Sequence Number=SeqID_113057
agacgggcggcgaactaggagctctgccttccgttaattatcctcttcctgaacacattgcccatccttcctgaagcagcgggcagcgccttcatataaacttacccctacggcatacagatcagcctgttgtttgtttgatttggcctggccagtggcgccggccggcaagacacagagttcgtctagctctatcctataatctctctcccttccggcagagccctgaccgcttctgcgcgtgcgtttatatgggttcttgggtgcgcaccattacgacgccgttccggaaagcctgcaccatcttcgtcccgcacaaggacggcaagaagccgcagcaaccaagctcagctatggtgcagcacgtcgaagccgagagggccaagctccacggggaggtgatggcgtgcgcctacgaagacgtgcaggtcatgtggtccatgctcgaccaggcaaggatccgggatctcagtggcagctcgtgacggacaccaaacgtctgttcatgcattcctggagccgcatgaatggacatggagtacatagcaaaaatatctccccccct

SEQ ID NO: 47084 - DNA, 413 bp, Setaria italica
  Peptide Sequence Number=SeqID_113058
cagagaacatctgcttttgggtattgtttacattgaagcaaagacagtacaccaggagtcggttattgcgcgatcctctatccgaaaccgttcacgccaaagtcgggcttcatctcggcatgccgagatgaagcgttgagcgcagcgctggaacactaggtcattccggtgcttcccataacatccacggcaggaggagtaagaagctgttatagtgtagcacagggatacttgccggacgttccccgtccagagaagctcgaccgaggaggttgctgtgtcagagcccagcgacgaccagatgcttgccgcgaaaggacatcggaacacgatgtgattcctcaacctcgccgcagaactcacatgaggcgtcccgtgagatgttcttcttcagcaagttcgcacggcacttg

SEQ ID NO: 47085 - DNA, 485 bp, Setaria italica
  misc_feature (485)..(485): n is a, c, g, or t
  Peptide Sequence Number=SeqID_113059
agactagacaacaatcatctatggaatgagcaatgctagccatgccaaattagagattcaaagcttctatatgtaaagaggatatcaggtattggttgaggtagatactctggtaattcccatggtttactatgccatcgttctttcttgtgatatttttctagcattgttcattccagtggttgtattttgctgcacatcatctatggaaatatggccttagtgttatttcctagccgaactaaatgttcctataaataatatatttgctttgtagctggtaaaactgcctctcccagttaagtggattaatgtttccatcatcatcatctaattcttgttcagctctacttttaagcttttctgaaccaatcttaagaaatgcttagaatactgtccgactgctgaacatgctttcaagaagtgcaagaagctgggctgtagcattctgctgtctcgaggtattttctgaaacctggttttan

SEQ ID NO: 47086 - DNA, 320 bp, Setaria italica
  Peptide Sequence Number=SeqID_113060
aaatacatcatttgtttttcttgcgtggtaacaaaagtagctttgactgttcggtcgtattaattttatcaacacaatctaatcaatatttctattagcctacgtttattattcctgtgttacgaattcctgcaatccaaacagcctaaattgtacatccctgtattttggaaatcctgtagtttccgattttcactccatcatattcctacatttttttttctcatttctctattttgaattcctttattccaaacaaacactaagacactaagaaattacggtcagcaaacactaagacactaagaaattacggccag

SEQ ID NO: 47087 - DNA, 1919 bp, Setaria italica
  misc_feature (35)..(35): n is a, c, g, or t
  misc_feature (43)..(43): n is a, c, g, or t
  Peptide Sequence Number=SeqID_113061
gtgctcgagtctgagaggaggcttccgacccgatnacggtttnttacctggggaacatgcacaaaatctcagtagcaaaagagctgaaaggtcacaccctcttccttttcttgtaaaggaagaggagcttagcggcgatgaacttgaggaattcatcaggaaacgatacagtaatggtgtgagatatgctgctgatcgcaacttttctagagaagatgatgacattttccccatggatggtgcactcaaagagcctactatttggagggttaaatgcatggtcgggcgtgagcgccaaatggctttctgcttcatgcagaagtttgttgatctgcaaaaaattggtaccaaagtgccaattatcacagcatttgcactggatcatgtaagagggtttgtttttgttgaagcggagaaggcctgtgatgttacagaggcatgcaaagggttttgtagtgtgtatgcaagcagaattatttctgttcctgcagctgaagttcctagcttgttatcaagccgtacaaaaccatttgaaatttcccgtggtacatgggtccgcatgaagaatggaaactataaaggtgatctagcacaggttgttagcgaggatgatggacggaaaagagtactgataaaaatcatacccagagttgacctccatgctatttcgagaaaatatggtggtgcaatttcgctaaaagaagcagtagttcctgctccacggttgatcagctcccaagaactagagttcttcaggcctcatattgaaatgaagcgtgatcgtcagactggtgaagtttttgaagtacttgatggtttgatgttcaaagatggttttctatataaaagggttgcacttagttctttgatttactgggggatacaaccaacggagactgaacttctgaagttctcttctagtccaatcaatagagcttctgctgatgacttggattgggtctccagcatctatggccctaagaaaaggaaccttcccgcagaacgaggtattaagtcaccatcttcaaaaacgaaatcttccaaagcatcaaaagcttcaacttcgactgaaaattatgatgataatgatgaattcaacctccatgatcttgtactctttgggcgaaaagattttggtgtaatcattgctattgagaaagatggtcttcggatattaaagggtggtcctgaaggatctgccgtgacagtaaaaaagcaggacattaagaaaggctgtgtggacaaaatgtttacagctgttgatcgtcagaagaagataatatctattaacgacactgttaatgttctggaaggaccatttcagggtaagcaaggtgtcgttaaacacttgtacatgggcacactgtttatttataatgaaagtgaaagcgagaactgtggttttttctgtgctcaatgtggatcatgtgaaaatgtgaagaaacggaaggaaagctctactactgaaaacttggacaatccaattcccatgttttctgagccttatgagcaaaatgagcatcgggacactgagaggccttacaggagcaccagagaacaacttttctctatcgggcagatgctacgcattaggaagggccctttgaagggctatctctgtcgagtagtcaagatatttcgaaatgatgtgactgttaagctagattctctactgaagattgttacagtgcaagctgagtttctttcagtcccagctaacaggggggataactcgtctggtgctccagctggtaattttggaagtcaagatacatctttctttggttcagaagcagacaaggcttcatgggacaatgggttgccatcttttggcagtgactcatggcaacccttttcaagttccaccttaccagcccagaatgcaggtggagaatcagaaagtgatccatggtgttaag

SEQ ID NO: 47088 - DNA, 3324 bp, Setaria italica
  misc_feature (3269)..(3324): n is a, c, g, or t
  Peptide Sequence Number=SeqID_113062
taaaagaaactaaaggtaaaaattttaaaggaaaagtaacaaagaataacatctttctttggttcagaagcagacaaggcttcatgggacaatgggttgccatcttttggcagtgactcatggcaacccttttcaagttccaccttaccagcccagaatgcaggtggagaatcagaaagtgatccatggtgtaagaaaagttctgctggaggtgaatctgatccatggggtaagaaaaccgatagtgattctgatccatggggtaataaagtggtgccttctggtgatggtgattccgatccgtggggtaagaaagtggtggctcctgctgatggtgattccgatccatggggtaagaaagtggtggctcctgctgatggtgattccgatccatggggtaagaaagtggtggctcctgctgatggtgattctgatccatgggctaagaatacaacatcttcagcttttcgagtattgaacactggtaccactcaaaaggaaagttccagtggcaaggtgtgggataaacaagctggggttggtggatctgatgctgctggcagctcttgggatcgaacatcagtcaataaggagtgtgaaaagagtgacaactggggagaggcttgcagggtggcagacatgggaactggaggtgacgcagacccatggggaaacaaggttaaagcagtagatatggaaggaacagatagctgggacaaggctacaatgcctccagacaataagttggagggtgtcagtcaaggatgggggcaacctttgggcaattcaaatgaaggccaaggaaaagataatttttctaaagctgagggcaacaatgggggttgggatactgctttgcctgccactgaggatggtacctggggcaagtcaaaggacagtaatggtgatggagcaggtggcttgaatgaggctagatcctctgacaaaaacggtggtgcaggaggttgggatacatctgctgctaactggaataaatcatctgtcgttgctgaagcacaggagggaggttggggcaaaggaaaaggagcttcagatcaagctggtttgggtgattgggataaaccgaaatcttttggcggcggtggttcatcaagctggaacaagggagaggaaactagggcagatgaccagaataacagctggagcaggcatggaagcttcggaggtggacgtggatttgtgcgaggacgagggaggggtaggggtgaatctggagattccgatggcacaactgatcaaggaagttggaagagcccatggggtggcgacaatgctggaaggccctcttggaggtctgatagtaatgtggacaatgaagttggagattctggtggatactggggaaggggaagaggagggagggggcaatatggagggcgagggagaggaagagacaatggttggagaaacggtgatagaagcaattccgggattggaagggaaaatgatggtgctgatggacaaaaatggggaaacggaggttcttctgattggaataaagatacatctaataaaggttcttggggtggagataactggaatgccacaaatccaccaagtaaccagccctggagtagcagtggaggcacaaagtcatatggtgaaaataaaccgtccacttggaatagttcagaggataacaaaacgtctgtaggtgaacaagatgatccttgggcaagcaaggtggcttctactgaaggcaaagaacaacggaacgatacttgggcaagcaagatgacttctgctggtgctgaggatagcagtggtggctggaacaccaagacaaaagactcctgcagcgatgggggtgaagaaagtcaaaatgattcctgggcaaataagattgggtcaaacaaaggtaaagaacaagaaactgatccttgggcaagcaaggtgccttctactgtgggttctgatgacaacaatggtagccggagcactacggcaaagggcaccccatctgaggaaaaggctgatgatccctggagtagtaaaggaggtaatgataacatcaagattgatagctggggtgctggctcctccgatgggaatcaggaatcgtcttggagcaaaccaaatttctctttgggagaccaggaaaacacgtggagcaagccaaggtttggtgatgataatggtggaaacagtaggggtggatttggacgtggatatcgaggcagaggtagagggaggaattttggggatggtggatcctcgtggaatggaggcaacagaaacgatgaatcaggtggcgaaaggtctgaacagccatggaacaggagggattttgatgctggcagaggaagaggccgaggttgctatgggcgaggtgatcgtaaccaaggtaacagcaactttgggtcagcagatggtggcagttggggctctggcaggggaaatggtggccgtggtggttacagaaactggaatggtaacaatggaagcggtgaaggggggcaaggaggtggctggtcttccaactggaatggcaacaaaggaagcggtgaagggggtcaaggaggtggctggtcttccaactggaatgcgaacaaaggaagtggcgaagggggtcaaggttttgcgaaaagcaagcccagctgggaagcgcagaatacgtctggtggagaccaggcaggaaagagtgatgcaaacaactcctggagccagaacagatcatctccctctatcctggggcagccaagcagtgatgttaacaagtctagcacatggggtgcaactagtggtggagctggaggcggaggttcctggggaaagagcaatgaagatagatggaattcgtctggaggagcagctgcagagaagtcttcttggggaggtggttcagaaggtgcccccaagaaagatgatgatggcccatgggggaaagggggcgaggagagcggcagccaaggagggggaggtggtggccgttcctgggacaaagctgcggataatgcatggaacagcaacaagggcggtgacgccggcagtggtggatggtaagcgcgccgtgcaataaatctgcgccccttgttggcgcgacgatgtaagtagtggtgtaccgtgcggtttgagctcgtggactagatgtttctttctagccgtagcgtctgctagctcctttgcgatgcttgctcgaaccctaaacagtgtggcctagctagaatctgctcgcctttcttagcactggcagtggcacgtggcagtaatcgaggagcctgttcgacctttaaaaaaaaaaaaaaaannnnnnnnnnnnnnnnnnnnnnnnnnnnnnnnnnnnnnnnnnnnnnnnnnnnnnnn

SEQ ID NO: 47089 - DNA, 599 bp, Setaria italica
  Peptide Sequence Number=SeqID_113063
cttgctgagcacatgtgacccaggtttgagctaatggcagcttgtgggtgaggcaagctgctctcaggacttccagtatctctggtaaagcatttttgttaggaagcagtgctgaactgtacgcgtggaacgcttgagacttctgcgcttctcagattaactgcctggagagcactgcagatggtgttgagctcagaggtgaagttaagcttctgccttgtcatgatcagctcgatgacgcccaggcagttgtagctccccttctcgaacacaggcaggcccatggtgccgtggacatcgaggtactgtgcatcccttaccctgggatactcgtaggtggtgaagtacctgacgtccggcgaccactcggggagcctgccaatgaagaccctccccggcagccccggcgagtcccccgacttgacgtcggccgagaactggtactttgtggacacctccctgaaccggatgaggctgtcggagctctggtcgagcgtgaacggctggccgctcgtggtcagcaccagccgcccgtcgccacggctgacgggcacccagagctgcacgagcacgtcgccgtcgctctgcgttgtctggat

SEQ ID NO: 47090 - DNA, 597 bp, Setaria italica
  misc_feature (483)..(597): n is a, c, g, or t
  Peptide Sequence Number=SeqID_113064
tacaaggggtacggaaaagacttcgaaacaaaagttacaagaagcagtacagctgggcggaccagaagcagcaacggcagcgcagctgctacatcctactctccatactccaacacaacgaaccctaacagggggagcgtccctaatggcgtgactgatggtggtggcggcacgggtggagatcacagcaaccatgcgccataggagccctgactcaaggttgcgcctcagctgcctcgctatgggcccgtgtgaagcaggttctgttgataaatgtcatctatgaaccacaagtacctctccggtagttacagtcagtgaaggtgagaaggccgaatctcccgtgcattaggctcgggactgttcgagtagatcacctgctgtcttgttgttcagcggtttttttcaactttttgtacagctttgacgcttctatcagtttttcagttggttacagtttattcaggcaagcgtttagaaaannnnnnnnnnnnnnnnnnnnnnnnnnnnnnnnnnnnnnnnnnnnnnnnnnnnnnnnnnnnnnnnnnnnnnnnnnnnnnnnnnnnnnnnnnnnnnnnnnnnnnnnnnnnnnnnnnn

SEQ ID NO: 47091 - DNA, 744 bp, Setaria italica
  misc_feature (737)..(737): n is a, c, g, or t
  Peptide Sequence Number=SeqID_113065
ttttggttcttgattatttttaccaatctattgttaaattgtgacactgtaacttctatgaaccttgcaatgtgttagagtttttgatttttttctacaatctattgttatcccgtgatattataactacttttttttatcttgtttcttcaaataaaaaggcatcttacgggtttttatttctttttgcgatgtgccgttgtaatgtgatattgtagctagattttcgattttgtttctacaaataaacataattttacaaaattattctaattatttataactaattcctttttcattttttctatcccaaacatgcatcaatgcaacataggttaaacatgtaaagacgacaaattcttcagcattaaaatattatacgagtacgacgtatagctaatttggagtgcggttcaaatattgtcaattaatttctaattttgattggtttcttgatctaattaaatatatcaatataatagtattttaacacctaaaaaaatttatatatgcgcgccattcggactagttctgtctaaatattcaatattcaatattcaatctggtttcgagttttcgatgtccaaagcagctaggtgtgtgttggttccatggttgtaagctgactgcaggtagccaggtattgcttcttcttctacttttatgtggctatgtgagttgtgaggcatctcttttggactacctgtaaaagaaaacctctaaatcaatctgggttncctgcct

SEQ ID NO: 47092 - DNA, 784 bp, Setaria italica
  Peptide Sequence Number=SeqID_113066
caacgaccctgctcgcgtggaaccctttggtggcggcgctcagctccttgtagctgaacttcctcgggcccttgagcagctccggcgagaaggcgccgtcgttcctggcggtgagctggatgagcttcctgatggagacccaggcgaaaaacacgaaggcgacggcgagcgcgacggggcccaggatgccgagcgcgagcccgaccctcttgtggtgggcggtggaggtcggcacggcctgatccgatgagttgctggtggcgtttgactcgaaggaggaagagttggccgtggacgggaggtcgaacgtctggaaggtccactccttgattgtgtgctgctgggtgctcccctccgtggacgccgagaagccgacgtacatggcgccgttcaggtacggcgagaggtcgacggcgacggagaggacggggcgcttgggcttgggggccggggcgtagctgaggaacacctccaggcggcggtcggcgctgcggtagtcgatccacgccgtggtgaggttgccgctcctgaggtcgatcccggacgcggcgaggtcggccacggcgacggacaccggggagccgaggtcgaggccgacgtggttgtcgctggtgtcggcgaactccgggttggccatggtgtcgaactcgacggcgacgatggcggcggcggacccgttcttggcggagccggaggaattgaagaggccgaggtagccgccggtggcgccgagcgtggcgcggccaggggagacgaagaaggcgatgccgtcgccacccgcggc

SEQ ID NO: 47093 - DNA, 839 bp, Setaria italica
  misc_feature (807)..(839): n is a, c, g, or t
  Peptide Sequence Number=SeqID_113067
aagaaattttaagggttaagttaacttaccgacttacgttacgaagttacggacgaccctctaagtctcctgacacctagcgcgagggaggaagaggcgaggagaagatgcagatcttcgtgaagaccctgactgggaagaccatcaccctcgaggtggagagcagcgacaccatcgacaacgtcaaggccaaaatccaggacaaggaaggaattcctccggatcaacagcgtctcatattcgccggcaagcagctggaggatggacgcacactggctgactacaacattcagaaggagtcaactcttcacttggtcctcaggcttagtctacttattgtaatcaaggtcaagactctcactgggaaagagattgagatcgacattgaacccactgacacgatcgacaggatcaaggagcgcgttgaagagaaagaaggcattcctcccgtgcagcaaaggctcatatatgctggtaagcagcttgctgatgacaagactgcaaaggactacaacatcgaaggtggctccgtccttcatcttgtccttgctctgaggggtggttactagtaaagttcagaactagtcagatgaaccatttaaggtccgctgcgaattgtgcagacctggtggtgtgaaacttgcaaagagataataacataccagctttgcgcctttgcccaatggaaggggttgtcttccatgttattatctgatacatgatttgactaattgttccaggtttgtctgcctcagtttttaccaattattaatatccggatgtttttttggagttcaataaaacaannnnnnnnnnnnnnnnnnnnnnnnnnnnnnnnn

SEQ ID NO: 47094 - DNA, 608 bp, Setaria italica
  Peptide Sequence Number=SeqID_113068
atttttgggtttgtggttgttcttccgcttcgttcgagttcggcgccctctagtctcctgacacctagcgcgagggaggaagaggcgaggagaagatgcagatcttcgtgaagaccctgactgggaagaccatcaccctcgaggtggagagcagcgacaccatcgacaacgtcaaggccaaaatccaggacaaggaaggaattcctccggatcaacagcgtctcatattcgccggcaagcagctggaggatggacgcacactggctgactacaacattcagaaggagtcaactcttcacttggtcctcaggctcaggggtggcactatgatcaaggtcaagactctcactgggaaagagattgagatcgacattgaacccactgacacgatcgacaggatcaaggagcgcgttgaagagaaagaaggcattcctcccgtgcagcaaaggctcatatatgctggtaagcagcttgctgatgacaagactgcaaaggactacaacatcgaaggtggctccgtccttcatcttgtccttgctctgaggggtggttactagtaaagttcagaactagtcagatgaaccattttttttgtttaagtttagttt

SEQ ID NO: 47095 - DNA, 249 bp, Setaria italica
  Peptide Sequence Number=SeqID_113069
ggagggcgcttcatcacgtgcgccatgtagcacccgcgccgcgcgaagatcaccacggggctctcgcggaccaggcgccccacccgcgccgcgggggcctcctcctcccccgcagggtcgatggtcagccccctccggatgcccaccgcctgcatggtgtgcccgctagctctcgaccaacacgtgatcgatgaagctgccgcgtagctagaacgaaggagacgatcgagctcgatcgccggcggccgg

SEQ ID NO: 47096 - DNA, 272 bp, Setaria italica
  Peptide Sequence Number=SeqID_113070
gggggcgggggggtcgtcggcactctccccctccttgcgctgcttgccggtgcgcgatgcggggccgtgggtacgacgccggcttcctcggcgatgacgtcgacccggaggccatcaccaacgacgacgccggccgccggggggacagcctcgtcgcggctgactccagctccgtggattgcatgcatggatcatgtagcagctctttgagcctccatggtgtaagagttgatgatgaacaatcggctcttgataacagcagcagaccctcc

SEQ ID NO: 47097 - DNA, 428 bp, Setaria italica
  Peptide Sequence Number=SeqID_113071
taagtaagtaattaggtaaacgagatggaacgagacgaggatgattcatcagcaaaagatatccttggaaaaggaaaagttcatgtgggagcaagaacaaaggatcatgttctgtgatgtgagcaccttggatccggatcaaaagacctatgtgttggcaatgagggcacatattgcagcacaaaagatggctgccttcaatagtggatttggcagtgggtttgatggtgggtttgactcttctaaaggtggtgatgtcaatggagcatcacaataggctgcagttcttgaaagggtccagtgtcttcactctccaagtctatttgcacgtttgttacaattagattatttttagcttggttaaaatatttgtatttttgtcggctttcatatggatgtaacttcaactcacgtgcttggtccaaact

SEQ ID NO: 47098 - DNA, 496 bp, Setaria italica
  Peptide Sequence Number=SeqID_113072
tcccctcgttgcgtgtctcagattgtcaatagatgtgggttctgattggaggaaggaagctggagtgcagggaatcgtgtgttcctgctccttgcttccacaaccatggagagtgggggcgagatcgtgcctgtccacaacagcgttgacactttggacgcagcggctgccgccattgaaactgtgaacgcagcagctgccgccattctcacagcagggaaccgcagacaacatgacgtactgccgcgaaggaaatgggctgatcggttgggcatgtacttctgctttgggtctcagaagaatgggcgacgcatcaaccatgctgcacttgtcccggaacccacacctccaaggacagatgcacctgcaggagaaattccaaaccacccaccgcctcctgtattcccgttgtggcacctccatcctctccagcttcttactccaatcagaaccctcatctattgcacaatcgccaagcaatgacgctcagccattt

SEQ ID NO: 47099 - DNA, 344 bp, Setaria italica
  Peptide Sequence Number=SeqID_113073
caacaacagcagaatggtgaaacaggggatcttcagtcatatccgaattacccagaggtcccatatgcaaagcttctgacttcgatcaacaacagcaagaatggtgaaacaggggatcttcagtcatatccgaattacccagacagcccaatagcgcgcctgatatctccaagctcaggttgttctggcacttcctccccattccctgacccggagatgctggcttcctcacgctacacattcccctcgttcccagttcgtgagccaccaaagatattggatggagagggtgttgcaacacagaagttgatacctcgccatatgcgcaatggcggttccatttt

SEQ ID NO: 47100 - DNA, 369 bp, Setaria italica
  Peptide Sequence Number=SeqID_113074
ctggcggcgacgactggacgaccggcggcgactgggcgagcggcgccatcctacgccaggccttcgtcggacccgtcgccggcgacgagtaccaactaggctgatttggtcgtcttgatttcgtggaagtgatctggcaacggggggctccttgttgagcagaccggatcatgcttcttgcagtgtaaaagcttggatctcctaggtgtgccttggagcggagaggatcgtgtgttcttactccttgctgcgactatcatgcagagtgggggtgacatgagacctgtgcacaacagcgttgacacagtgaatgcagcggctgcagccattgtcacagcggagagccgcacacaagctcccccagagccg

SEQ ID NO: 47101 - DNA, 828 bp, Setaria italica
  Peptide Sequence Number=SeqID_113075
tccttccgttccttcttcctagtctttcctttccttcctaattctagtaaccctactattcttatttgttactaattcgtcctaaggtattcggtcgtcttcctacctatccttgctgcgactatcatgcagatgggggtgacatgagacctgtgcacaacagcgttgacacagtgaatgcagcggctgcagccattgtcacagcggagagccgcacacaagctcccccagagccgcgaaggaaatgggctgaccgtctgagcgtgtacttctgctttgggtctcagaagaatggtcggcgcatcaaccacgctgcacttgtcccggaacccacatctcaaaggacagatgcacctgcagtagaaattcctgaccacccaccgcctcctgtattcccatttgtcgcacctccgtcctctccagcttccttcctccaatcagaacccacatctattgtacaatcgccaaggatcggcgctccaccattttcacccctctcgccaaactccccatcccccacagggccaccatccatcttttctattgggccatatgcacatgagacacagctagtctcacctccagtgttctcagccttcacaactgaaccatcaactgctcctttcactcctccaccggagtctgtccatttgacaaccccttcttctccagaggtcccatatgcaaagcttctgacttcgatcaacaacagcaagaatggtgaaacaggggatcttcagtcatatccgaattacccagacagcccaatagcgcgcctgatatctccaagctcaggttgttctggcacttcctcccctacctacccca

SEQ ID NO: 47102 - DNA, 948 bp, Setaria italica
  Peptide Sequence Number=SeqID_113076
atttgtttctgctttggatcttggttttccgcccaaaaccttaggaatttcttgatagttgccaaaaagagaggtgaaagataccatccagtaaaattgagtcgatgcacaaactgttggaactcaaacgaatatgagtagcatggcgtatctcaagaattctgtgcttaattatgcggaaattagggatcggaacctatattaggcgatgtcattcccttctagtcagtgtaggtgttgatcagctgggagaacctcctggcatctgcattggccttcaagtcagcagagcactcttcatattggtttggaggtggttttggggggtagctggctaatgacatcatcggatccctagagcagctccctccctcttaatatagcgctaactgccctgggacctaaacgttttgtgtttcgtccctcaatcaaaactaacccttgaaattctttatatttttgtaattagactgccatcaggggttaattagcaattgtgcctttagggggctaacacataacagttaggtctcaggccagtttataacatttaaatttaaactaaactattcttaagaagtgtgcgctatccatgacccaattttagatcaaagaatccgctagcatatcattagctattcctctaccaaattatatctattctgtcttggacaccagaaatatcaacataatgtttagtttgagaactaacattgaactgttcatattacacctgggtggaaaattagtacagcccttcactcttcatatctgtatcatgacgctgcatctgtttttctggcagactcgaaacttcttgaactatcttgtaacaaaagttgccctgctagatactattgaactttgccacagtagaatagcgtatgttatctgataagtctatgcacacgctgtgtaatgtgcttgctaactttctctattatttat

SEQ ID NO: 47103 - DNA, 438 bp, Setaria italica
  Peptide Sequence Number=SeqID_113077
gccccattttctgatgggatattagcaaatgtagaatatgctacggagtaagacatgtcatagtacaagtcacaatgctctattagctgagccttggctttcggatccatatttggatcaacatggactatcttgacctttgatataatgcaatcaagcacattgtcattcttttcctcagaaagaaaaacacgtctggggtcatgcttcttcccatcaacatctatgcacaccaaggaattgataaccgtgtcctcaggacggaagaaccaacggcaagtaaaatattgacagcggtcagtcccctcgaaaaattcagtaatgcgaccaatataatcagcctcgttttcttcagccttgacatagacatcgtcgccaagggtgtagacgatgttgtccaccttggcgctccggtagtgacacctggccttgacctcc

SEQ ID NO: 47104 - DNA, 1038 bp, Setaria italica
  misc_feature (1001)..(1038): n is a, c, g, or t
  Peptide Sequence Number=SeqID_113078
ccgccccggtggcggtggcccggcccaacccgcgcccgtcggtggcgccttccatgtcgccgcgcggcgcgtcgtgcgcccgcgcccggttcgcgttccagccagccgcggtccgcgtcgagggttttgactgcctcgaccgcagccgcggcggccgtggccatggcatcaccgccatggcctagatgtgcatacaacaccaagtaaccctgagaaccccccctcctcttcctccatggtgcaagaagctttcttttgctaccacaagctcctggagagaaagggagagagaggaggggagaaaatcgagaggatcaatttgtcctaaatttaacccctaaaaattatataatccatccaatccaccccacaattataatgagtttaggtaattttaccacagatctttttgtatgtaaataaagttcaggttcaggttcctcatgtaaatttgggagcaactagaaatccggagagaggagcagggacaagggcaaatcaaaaaaagaagagggccctcttggattaatcaagatttcctgatctgtccctgccatctctctggggaggagaggatttattagtcattggattaggtgggagggaggttgggattagttaggtaatctgtcctagttcatcaatgatgcccttcttttttatttttggtttttgatggaattgtttttgtccgtccgtccgtccatgcaaccaagaaattccaaggccatggagaatctgtacaaaagagtgagtggctacagtcagagagcagcagcagcagcagcagcagcagctaggttaagtccccagtcagtcgatgagctgagtgagagagaggagagacaggccatgatgagtatgatgagtattgtttgtgatcttttttcttttggatttttgtatattgtaatatcctgctggatttatttccaacgaagcaatctgtataatataatattattatgattatcataaccataaccaaaaaaaaaaaaaannnnnnnnnnnnnnnnnnnnnnnnnnnnnnnnnnnnnn

SEQ ID NO: 47105 - DNA, 347 bp, Setaria italica
  Peptide Sequence Number=SeqID_113079
gagagtactgccctcgtgttcttatattctctcgctgctagctcgcgtgcgtggtggcaactggcaagcgctgaaatggccgcggccaccggcttcctcgttccatcggctaggctgacgcccgcggcgagaggagcgaggcggcggcggtgttggcaccggcgtcgcctggcgccgcggtgcgccgccgcggtggatgggaggcaggcgacggtggagagcaaggccggggacgcactggaggtgtgccgggtggtgaacggcatgtggcaggtgagcggcgcgtcgtggggccgcgcgcagccggcggcggccgtggacgccatgctccggtacgccgacggcgg

SEQ ID NO: 47106 - DNA, 523 bp, Setaria italica
  Peptide Sequence Number=SeqID_113080
gtagttcttctcagcagagatagaactagctacccatccatatctggtttgctaggatgcttagtcccttcatgcatatgcaagttgagcactaacagtcatgtaattttgctaatgtctgcaagcatctggcccaaactgatcacctgagtgacttaacagcctgtacctgaccggaggaggtgcctatctatctttcattctgcatagactgatttcctggtctatgcttattggtagctattctttgatgaccacattctgaaagtcacttttttcccttttcacctcctaataccctaaagtagttcaattgtttgttccatcctcccaaagtctaactagttttgtgtagtacctcccatggtctgataatatttagaagtgaattattgaaacacatgttttgtgtttgtaattatagaaaagttctggtatattgacttgtggtacataagcccagcttttatggccatagtgtttcaaaatattgatgcatcttgtcacattaggaccataaatc

SEQ ID NO: 47107 - DNA, 411 bp, Setaria italica
  misc_feature (397)..(411): n is a, c, g, or t
  Peptide Sequence Number=SeqID_113081
taccaattttagggaattaggggttaaggaagaaagaatgccccggtgatatatttgggttggctgccctggagctcattattgcacgccttctctattacgtcgactggagcctcccaagtggaatgcaacctgatgaaattgacatggacatgttcgttggcgcaacgacaaggagaaagaaccagctgcacctagtggcatcaccttatagagaggtttccgtgcaaagctgatcgaagggtaagcatgtttattggccaacatttgcaattgtgcccttgtacctgataactgaaaaggtgcatgtcgtatttgttcaaatgataattgtcaaataagtctaaataactagggacaacttgcaccagtacttttccattaaagttacaaaggnnnnnnnnnnnnnnn

SEQ ID NO: 47108 - DNA, 482 bp, Setaria italica
  Peptide Sequence Number=SeqID_113082
aagtgaagcatagatgataaaaaatgaacataaaattatccaagcacacaaagcaatataaaaaaagagttatttgcatcagcagtaatagtgcaatcactatcccacaatagataggtagagcataagtgcctacaaaatgcatgtgccatacccactattcacacagttcttgaggtaaagagaacttaaatttactgaatcaaagatgagctctcaaatctcaatctaacttctcagcagtgacttctcagtttgaatcattttgccagtgataggaattggtttttatccagatttttgttctctcgcaatgcgttggcagaggctctcttatttgtaatcaaacatgatctctcaaatctcaatctgacaaacttctcagaagtgactccctttttttaagggtctctttttaaatgtggaaacccaaattatgcagaaaatgattaaaaaaagtataaattacaatctatctcgaa

SEQ ID NO: 47109 - DNA, 462 bp, Setaria italica
  Peptide Sequence Number=SeqID_113083
taaaggtaacgaagggaaactaacaaacctttagtagaactagttaaggggtagacaaggccaatagaagttcctcttcatcggcccaaacaggctctcacactcatcaaatcattcttggctgggactccaatgcctgtgcaatccagtgcccacagcgacatgtaacctgtactgctacaactgattcaagacatggccatcatcaaagttccatctcagccaagtcagtcacttgtttgaaccccacttgttctgcaacttgctatagctgtttatgtatccaagctactggtgccactgtgcgagttaccatagccgtttatttgtcgggctgtgctggtgcttggtaccaattatcccctaagaaaactggggaaaaactgatgcaaatttattcttaggctcgcagtaacatcaacagttcaacacgctgtttcagttccgtggcaacaaaaaact

SEQ ID NO: 47110 - DNA, 1074 bp, Setaria italica
  Peptide Sequence Number=SeqID_113084
ggctgggactccaatgcctgtgcaatccagtgcccacagcgacatgtaacctgtactgctacaactgattcaagacatggccatcatcaaagttccatctcagccaaacttggatgactgcaataccattgtgttgcacctgtttgaactgtattatttccactctagaggtcttcatggttcagagacacaggcttctctctgatgaactgtggtgaatgattctatactgtcggagactgcaaagctatttcagcagcctcctcaagaccatggtgttaaaccatcaccaccccactagattaagttgttcttgaggtggctgcacaatggacatgtactagcaggatacctagcattggccatcagcattctgatcatcggaatggaaggcagatattgtcatgccaatatcaagactggtttgatactctcggtatgaggtagtggcacatgatggtttggtacaaatatctcggtaagaatctttgcctgtgtatcatgcctttttttttggcacatgtatgtcttgtcattgaatcgcttttcttcagatgattccacttatggttcagccctaattgatccgactttttgaatttagcttcaaaagcatataaatggtaacctattgttaagatcaaatcttcagctcttgcaacttcactgttcttcaggatttactggttgtgtccctgcagacaatgagacaaataactactgttgctcattcctgttttgtgcaaagtgtttccagatttgcagagcacattagttgtcaccatcagctgtaaaaatgaatccgcactacattgctaagccttttgcagatgaacacctcataagtgtcagcagtccttttcagaaagcagcaactgtagctcttgatatatacaaaggtatgcagaccttattctgctctacatgcttgtacatatcatttttcaggttttagtgttaccacttatcgaaagtttgaaacaccaccctccactgaggagaaagccaaggcacattcttgcccttttatctttaggcaccctcttttttgttccttttcaatcttttacctaa

SEQ ID NO: 47111 - DNA, 2000 bp, Setaria italica
  misc_feature (1911)..(2000): n is a, c, g, or t
  Peptide Sequence Number=SeqID_113085
taaccactgtatgcaactgttgcaacaacaaggcagtggagtacgccactgctgcacgcaacaacaaggcaacaacgcagccaaacatctcacctgctgaaaatcttgtgacccgcggctacccgctagcccccgcccgccggagtcgccgccgcgatgcccgcccgatccgccggggccatcgggctcctcctcgtcctcctgtccgccgtcgcggtcgccgccgccgccggggaggggaattggcgggaggagcaggcgcgggaccgggtgccgcgggtgccggggcaggccttcgacaccagctacgcgcactacgccgggtacgtcaccgtcagcgagccgcggggcgccgcgctcttctattggttcttcgaggccgagaaggacccggggtccaagcccctcgtgctctggctcaacggagggcctggatgctcgtccattgcctatggacttggagaagaagtgggacctttccatgttaatgctgatggaaagggggtacacgtgaatccttattcttggaacaaagttgcaaatttattgtttgttgattcacctgttggtgttggttactcatactcaaacacctctgatgatattttaagaaatggggatgcgaggactgccaaggattctttggcgttcttactgaagtggcttgaacgctttcctcagtacaaggggcgtgaattttatttgactggagagagctatgctggtcactatgttcctcaactggctcaagccataaaaaggtaccatgaggcgacgggcaacaaatcgattaatttaaagggctacatggttggaaatgctctcactgatgacttccatgaccactatggaatatttcaattcatgtggactactggcttgatctctgatcaaacatacaagctgctgaacattttctgtgacttcgagtcctttgtgcatacgtctaaacagtgtgacaagattcttgatattgctagcaaggaagctggaaacattgattcatatagcatcttcacacctacatgccatgcaacttttgcctcctcaaagaacaaagtgatgaaaaggctacgttctgttggaaaaatgggagagcagtacgacccatgcactgaaaagcattcaactgtgtacttcaatctagctgaggtccaaaaggcacttcatgttaatccagtgattggaaaatcaaaatgggagacatgcagtggagttgttaataatcattggggggactgcgaaagatctgtgctgcatatctatcatgaacttatacagtatggccttcgtatatgggtgttcagtggagatacagatgcagtgattcctgtgacatcaactagatatagcattgatgctctgaagcttccaacagtaactccatggcatgcttggtacgacgataatggagaggttggtggctggagtcaagggtacgagggactcacctttgtgactgttaggggtgcaggccatgaagttcctcttcatcggcccaaacaggctctcacactcatcaaatcattcttggctgggactccaatgcctgtgcaatccagtgcccacagcgacatgtaacctgtactgctacaactgattcaagacatggccatcatcaaagttccatctcagccaagtcagtcacttgtttgaaccccacttgttctgcaacttgctatagctgtttatgtatccaagctactggtgccactgtgcgagttaccatagccgtttatttgtcgggctgtgctggtgcttggtaccaattatcccctaagaaaactgggggaaaaactgtggaatagtttttgttgccacggaactgaaacagcgtgttgaactgttgatgttactgcgagcctaagaataaatttgcatcagtttcacagtactgtaaataaaaaaaannnnnnnnnnnnnnnnnnnnnnnnnnnnnnnnnnnnnnnnnnnnnnnnnnnnnnnnnnnnnnnnnnnnnnnnnnnnnnnnnnnnnnnnnn

SEQ ID NO: 47112 - DNA, 403 bp, Setaria italica
  Peptide Sequence Number=SeqID_113086
caagccgccggagaaggaagtgcgacagggccagcttccgcgcggcgtccacggtgcacacggtcagggtcatcgcccccaggatgagcgagagtgactggagacgggctccgcggcggcactgctgcaagacgaggcggacgaggtgacgttaacggtacggtgctggaggtgcggatacggcgctgcgtcagaggagagctcacgtcgccgtagttcgccgtgattttgccacggtgacagactacacgaggatagtagcggtagtgtgatacgtacaacagatgcaggcgctgctcgcggcgcgacgaatcgaggaagctaaggatcgttctgttctgctccctgctggcgattgacatattcccctcgctgtgtataaatggctccatgaattacgaga

SEQ ID NO: 47113 - DNA, 466 bp, Setaria italica
  Peptide Sequence Number=SeqID_113087
ggggtttgatgattccactcacatcttctagaatgtttatctttactttattattagatttcgacccaaataaccggatggggccctatgaaccacgagaaagtttagtaagcataattattatcttgtaaattagggaagccattagtccacgtcaatgggaatggttgcaaatacttactctgtacaaattaattcaatgttatacttgcaacttcgctaacctcaaacacttagacgatgattcttttgcataaccagagatttcggacattaatgtaaaagaaaacaagttggtggattgaccttgattagagaactttatgattaaaagggtgctataatttttgtgatagtattaaattctgccacatgactccgaatttcctaccatcatctcgaaaagtattatataccacaaagatataaaacatagaagcatgatgtaaatttaatatgaaaaggt

SEQ ID NO: 47114 - DNA, 592 bp, Setaria italica
  Peptide Sequence Number=SeqID_113088
tataagtagctcatcgacgtgcacgcacgcgtacatgtgtgagcatgcatgaacacgcaagattatactagaagcggtatattataaaagtttattggcctactggccggcggcgaaggcgtcgacggggaaggtcttggtgacgccggcgaggctcttgaagtggatcttcccggtgggggggtcgtcgacggccatctcgttgacgggcggccagagcataagctccttggccttgacgcccttgagcttcttgatgcccttgggcttgatgtagccggtgatctccacgtcgtagctcacctgcttgccgatcttgctgaacttgtgctccaccttcttgcgctggttgatccacatgtaccccgtgtcgcgcacgaacccgacctcggtcacgtcctccagcggcaggagccccagcggcaggccgaactcctccagcagcgccacggccatcttcaacccctcgtcgtggcccttcttcaccacggcgccctccttctccgccatggctaggctagctgttcttggcgtgttactgatttgcaaaatctagctaattttcaggctggctaaagcttaattagtcgag

SEQ ID NO: 47115 - DNA, 536 bp, Setaria italica
  Peptide Sequence Number=SeqID_113089
aagggtcttgagaaccattttggcttcacaattggtgcctctacctgtacatgaaggcttcacagggtgaccttgttgactctgagtgtcacgctgcttgtttggaaacatgtttgcaggaacttgggagccattgggtacacttgatgaagtgggcatgggatgttcataaagattatatgcaaaaaaaattccttttgcaactcatacattggaccatggtgttcaagaccttgatgtagtactggtatcggatctgacagtgtgagcatatggtccaaaatgtttctccaagtccaggcctgctccgtttatttgaatcaactttctttgatggctgctgtttagctggctttggcacatttctaaacccactcttccttttcaggtcatactgggatcgctttgtgggatcacatagtacagaatgagcttcagcaaccaacttgaaagctgcttcagcacccacaaaactaatttttatcaggatgaagtagaaaatgcaagcttgcggtactgttttctatcaaggcttc

SEQ ID NO: 47116 - DNA, 252 bp, Setaria italica
  Peptide Sequence Number=SeqID_113090
aacaccggagtgactccaatctcgaccaacccaaaggcatgacctgacccagcacatcagacctcgttatggtgccatctacatcagatattacaattttagcgttccatttccacaagtaaatatgtgcatcaacctagtaaaaattcaaatttattatatgatcctaaggataaaaggatgagatagttaagaaatagaggcatagacctgctgcttcccaagaactctggtgcagaagctaaaggtcac

SEQ ID NO: 47117 - DNA, 671 bp, Setaria italica
  Peptide Sequence Number=SeqID_113091
ccaacgggaaataacttaattgtcaactttgacgataaggtttgcattttttataatcgttgatccagacgacttgaaatcctcctcactgacaagatgctgtagaaaggcttcctcagcagattctcgacccattcctggccgtaacatgttcccacaaagagaaatctcaacccctgcaacacatcaaagcagaacattgacacattacctttaggaaataagaataaaatgcaacctgacatgtgcttacccaagcccttcggtgattcagaatgctcttctttatcctggtactattctactaagtatttctattctttctatttggttctaacggttttattgcttccttcattcattggtctctggtatatcatgagctttaggttcattggtcgagggttgataacccacaacattgtcccctgaggcatcaggagactcgtcctcattggtcaagggttgataaccaacatcaatgtcccctgaaacaccacgagactcaccttcagtggtcatgggttgataaaccccatcattgttccctgactttgacacattctgaacctcatctttgtatgtagacacaacatgagctgcatcttcattttgtagacaaagcatgaacttcatattcatttagttgacacactgagcacttcatcttc

SEQ ID NO: 47118 - DNA, 1995 bp, Setaria italica
  Peptide Sequence Number=SeqID_113092
cgaccaaccaaacggcatgacctgacccagctactattctagtacctcgttatggtgccatctacatcagataaggtttgcaataatcgttgatccagacgacttgaaatcctcctcactgacaagatgctgtagaaaggcttcctcagcagattctcgacccattcctggccgtaacatgttcccacaaagagaaatctcaaccccaagcccttcggtgattcagaatgctcttctttatcctgttcctcttcttctgagtgttctggaatgcttcccagtttgtctttatcactggtagccatggataacggtaaaccttcagatacagcagcctcagtttcaggggacaagtcagactccttgccataaggagaagaagcccttttgtttcgagtcctatcagcttctgttgtaaattttgaaacatccactccctcctgtaatggaccatcttgatcacagtaagcagttttagtttcaccttcctgcagatctgtttcagcaacagaagtgttacccaaactaagctcagaatccctctgataatcagatccgggagaaaacagttcgtttcctgaatccccatcatctatttgtaatgttagatccaagcagctctgaaaagtttcctttttaccaaaactagcaccagcatcctccaactcagtgtcctcattgctgagatcacaaacctcatccttgttagctggggatttacaacccttggctctttcgagcactgggacatcacaagattcatcttcattggtcaacggtttatgctcctcatcattggtctctggtatatcatgagctttaggttcattggtcgagggttgataacccacaacattgtcccctgaggcatcaggagactcgtcctcattggtcaagggttgataaccaacatcaatgtcccctgaaacaccacgagactcaccttcagtggtcatgggttgataaaccccatcattgttccctgactttgacacattctgaacctcatctttgtatgtagacacaacatgagctgcatcttcatttgtagacaaagcatgaacttcatattcattagttgacacactgagcacttcatcttcatttatagacacatggagtgcttcacctttgtcaactaagatgtgatgtgactcatccttctcacttggtacctcttcattctctataaaaacctttgactgatgtccagaatcaaactgtaccttttcctgtgatatgtatagatcatctaaaatgccagcatcccacacctcaccactgcggctgaagtccccactagagctctgcccaggtcccaaatgaaactgcgggtcacttaactgcacatcatccataccctcctctgttgaagaaataggcgcggtgagcacatgtccatccacactaaccagaaccacctccgaatttcccccatcagcttgggttggcaaatcttctgcttcctccaacctaccataaccatcatatgattcaaattcgtccccggtttgcttctcttgatgctccacattcaactcttggctgccaagcctgtcactaggaccaatgtaaaggtccccatcactcttactgcgcgctgggggttcaggctcattgatagcttctgattctgaacctgtaccagagtcttcactgccaggcacaagctcacgcatgaaataggcttggccagagttgtcaagctgcatgtgaaagctggcttccacgccattgacggtgatggtgacaaccttctcagcacccttgagcacgccctggaacttcccaaaacggacgtaccatggagtggtgcggtatgaaccatcgggctgctcaactgcaatgatgtcaactgcgccgccaaatgggtggaagggcgtcgcaacggagtacactccctgcgagatcacagacccaacccttcccaccacgttcatatctgcaggagcctccttttttacctaaaacttagctacctagtctattccttcc

SEQ ID NO: 47119 - DNA, 516 bp, Setaria italica
  Peptide Sequence Number=SeqID_113093
gactcagtcgcactagtctatctgtctgtacatttgaagggactttgtcaagcatataatgcagtccaagatttatagaatctaaaatgcatagtgagtcaactaaaaccactgttagtaaaacctaatgttctgctgaaacaattaagtagccacagtacacatatcagtctggactttttgacattaacatattaaattactaatgttcagtatgttattaatttgaacagggggtatgctaaactctggaataagtaggttatgcaacaatatacaccaacgtaagaacaaaagaagctctagagagatcatatagagaatatttcagcaccgcaatgctgcaatttattaagcgacttcttcgtgcaaaatggaagattaacagaagagggaacaagttcccagatccaaagaactaataaataaaaagaatggacaaatagttagtaacaagcttacttactgcccaaaccgaattacatctccaacatgaatctccgtgtacaacttctt

SEQ ID NO: 47120 - DNA, 513 bp, Setaria italica
  misc_feature (416)..(416): n is a, c, g, or t
  Peptide Sequence Number=SeqID_113094
aataagaatttaaggtttttaacaaagtaagtaataagttttactacaagaaaccggaaaaagataagtgtagataagtaaggaggggcccttagtgagtgtgtataggtttctgagtcagaagattctcaggatggagactagggtgaatagttccgccttcttctcctttaccgagaataggagatccatcaaaagcctgcctagagatttacctatttcttatcagcagacctatgccttgatcattcctatctaagtggctatcttttcatgccgagccatccttttttctttacatgcctgcctagcttgggaaagaaaggagatgcatatctccagagtgagaagcacaagctattgtatgtaccattcctctttactcattctagttcttaactacttgctcgaaaaanagtctcctatacttaggtaggttttcctatacgaggaattactcacccagactgtctcttcgagaaatgttcattgagatcctatccatattaatgc

SEQ ID NO: 47121 - DNA, 1070 bp, Setaria italica
  Peptide Sequence Number=SeqID_113095
gccggccgagtcggggagctcgccgacctgggcaccaagaacccggtgctctacctcgagttcccccagggaaggatgaagctcttcgggacacacgtctaccccaagaacaagtacctcacgcttcagatgactagatccgccaagggcgtcgtctgtgaggacgtcttcgagagcctgattgtattttctgaagcctggtgggttggaacaaaagaagataacccagaagaactcaaacttgagtttccaaaagaattccaaaatgatggcgtagcagcagattgtgatttcagaggtggagcaggtgctgccatcgatgaagcaactgcaagcaaagctgcaaaggaagttgcagaaccccgttccccgaattttgagtcagatggcgatgcttctgacgattcagatcaaaaggatggggatgctacacagactacaagtggaacaccttcagttagacaatctgctagaaatgcagggaaagccttgaaaaagtacacagatttatcttctggaggtgattcatctagcagtgataatgaagttgaggttcctgaggacttggatgagaaggagatgaagagtccagctgttattgttaaggatgaaagccaaagcgaagacatcaaacctgcagattcttcagcaaggcccctctctagcaaaaaggagcctcttgttcaggctactctgtctagcatgtttaaaaaggcagaagagaaaaagagatctacaagaagtcctaaaggatcccctgcaacaaaaggtcctgctgctaagaagcagcgagcaagtccaatggtgaaacagccaacagggatcaagaaagctagtggaactcgaagaaagcaaacacaaaaggtggaggaagatgaaatcgaagagctctcaagttcctctcaggacaatgctgtggatgatgatagtgatcaggactgggccgagtgacgcccttgtatgtgcaccacatattcacacgcatgcatgggtttgtaatcggtgaagaatgcagaatggatgcacgggtggaaggagggatcttattgggaggcacagagcgctgcatt

SEQ ID NO: 47122 - DNA, 588 bp, Setaria italica
  Peptide Sequence Number=SeqID_113096
acaatgtttggttatccttggtagatgagatgaaaggcctaatatgaatgagttgagcaggggtcttgattcaaatattgctcattttttggtcctataaatgcctatttgcaagattgaggacctttggccttttcaatttctgttacaggtggaggaagatgaaatcgaagagctctcaagttcctctcaggtgggctgttagcttacatcagccgaaatgtgcattgcattatttgttacctgtgtcagtttagcatatgcctctcaagtgtagaatgttcctgtgctaatttgagataaacccatcagtcttcggttttagaaggaagtgtgtgaacctgtatccatctcaccacatgtatttcacatgtatttctgatcttttgagcacaatggttttgcatccttacctgttgtagttggtacaggacaatgctgtggatgatgatagtgatcaggactgggccgagtgacgcccttgtatgtgcaccacatattcacacgcatgcatgggtttgtaatcggtgaagaatgcagaatggatgcacgggtggaaggagggatcttattgggaggcacagagcg

SEQ ID NO: 47123 - DNA, 465 bp, Setaria italica
  Peptide Sequence Number=SeqID_113097
aagaaagaggacattgacccttgtgcttcgctgaatgcagctagtggaactcgaagaaagcaaacacaaaaggtggaggaagatgaaatcgaagagctctcaagttcctctcaggacaatgctgtggatgatgatagtgatcaggactgggccgagtgacgcccttgtatgtgcaccacatattcacacgcatgcatgggtttgtaatcggtgaagaatgcagaatggatgcacgggtggaaggagggatcttattgggaggcacagagcgctgcattcagcgaccgatttaagatgtggataccctgctgtaccataccatttgtatgaaagaagtttgagtttacgaaatcgactatatagttagtcagaactgggagtgcgttgtttgatcctaacttgtttgtaataggaattgcacggagccatatatgtttgaatttgatagaaactgttcatgtgccc

SEQ ID NO: 47124 - DNA, 1003 bp, Setaria italica
  Peptide Sequence Number=SeqID_113098
agaagttcaatgtttggttatccttggtagatgagatgaaaggcctaatatgaatgagttgagcaggggtcttgattcaaatattgctcattgtttggtcctataaatgcctatttgcaagattgaggacctttggccttttcatttctgttacaggtggaggaagatgaaatcgaagagctctcaagttcctctcaggacaatgctgtggatgatgatagtgatcaggactgggccgagtgacgcccttgtatgtgcaccacatattcacacgcatgcatgggtttgtaatcggtgaagaatgcagaatggatgcacgggtggaaggagggatcttattgggaggcacagagcgctgcattcagcgaccgatttaagatgtggataccctgctgtaccataccatttgtatgaaagaagtttgagtttacgaaatcgactatatagttagtcagaactgggagtgcgttgtttgatcctaacttgtttgtaataggaattgcacggagccatatatgtttgaatttgatagaaactgttcatgtgcccacaggaatacaggatcattgttttggggagtgtagtaatgaagggaacatactggatgagaccaaaagacgaaagaacatcaaacctgcagattcttcagcaaggcccctctctagcaaaaaggagcctcttgttcaggctactctgtctagcatgtttaaaaggcagaagagaaaaggtgagagtgcaaaaccacctagatagtaacgtgccatgtgattttccttccattttgactgtacagatcatggaaaagtcttgacatgcattagacaattgacataagtgacacaaaagctaagaatatgcacaacagatatattagttatccctcactgtcactagcaggcagctatgcctttagctttagcctaactcccaatttcatggaacacacggtattcgataaggatgtgttaaacattatctatttacatgtcaacagatttaactc

SEQ ID NO: 47125 - DNA, 619 bp, Setaria italica
  Peptide Sequence Number=SeqID_113099
ccttagcaggttggtggaagaagcagcaatgtcagaagctgtttagttgtttccaaggctttacatgaatatgcccttagcactctagaggacattttgaggatgacaaggtttgtgcgctcttgctaggttttattctggctcgtgttagggcatgttgggatgtgaggattagacccaatcccttcagactgggagggaaaatgaactaatgtccctgctgacctgaggggattgagtgtaaaacctacctattcaggcaagcacgttacttttattcccagtaattcgtgttctctgaaccacaagtccacaagtaataggtttttccgtagccaacatgaatagagccattaacacaagaaccaaaaagtaataggtctttccattgctatgattcttaatttcttatgggtaaaagtttatgcctgtagacttcgtgttggaaaatggtgatggtaatgcactgtgtttgtcagtgttatacaatcatcatgccacatgttgatgttgttatcatttgtccatctcatgtgtcttttgagttgcaatgcttgaaggtttgatcccactaggttcattttggtggtcaacagacatcaaggaacagcctcattag

SEQ ID NO: 47126 - DNA, 981 bp, Setaria italica
  Peptide Sequence Number=SeqID_113100
aatccaaagtgaaaaaccatggatgataacaagcaagaaggaaaggaatcggtattgaacagcaaggtcctgaatggggaagtggttgttcctgataaggatgctaatactgctgattacacaggggttaactttgataagaacttggttgatgataatgccgccaatcgagtgcaaagccagaatgtcaactttgagaactcttcatcagtgaagtcaaagcaggacgttctggccagaaatgggagaagcaagtccttgaagctaacaactaatgaagtgatcgcagctctgaagcactatgggatggagccacaagagaattcatcagatcaacctgtggagaagtactttggtgctgcacgcctgtggccttgggaaatcatttactatcgcaggcgtaagaaaggtccaatatctacagagaattatgctaagcgagttgagcagaacaaagaatttggtattgtggatcagtatgtcagaagcagcactggttggtgggagtgcccttagcaggttggtggaagaagcagcaatgtcagaagctgtttagttgtttccaaggctttacatgaatatgcccttagcactctagaggacattttgaggatgacaaggtttgtgcgctcttgctaggttttattctggctcgtgttagggcatgttgggatgtgaggattagacccaatcccttcagactgggagggaaaatgaactaatgtccctgctgacctgaggggattgagtgtaaaacctacctattcagacatcaaggaacagcctcatgtttaacaaatccacgatgaagttgaaagagttctctctctcgccatcaaggtctggatatgtattccaccagaagtaatgtttgtaagcagctacctttatggcttttttcaaaagattaagcagctacttttatgtatgacattagcgaaacatattcataattgtcatcaagagcacattggtagaaag

SEQ ID NO: 47127 - DNA, 390 bp, Setaria italica
  Peptide Sequence Number=SeqID_113101
taattagtacaaaaattttcttactcatcagtgaggcaaggtcttcagcagagtgtgcgccaagccatgctatcaattatgacgcaaatattgaatgaaaaagttactcaacctcttttggatgtgattttacgcaatttagtaaaagatgacaagggagcatctcacaaacttgcttttgacatcattcgtgattgtgctaagaaatggagcctatcatttgcagttttttgcctcatgcatttttaacaaggatatgccagttaatgacctcaggaaattcatcataagttattctggaaatattccagtgtgcaccccagatccttttgctgtcattccaaacttgacacatgaacttctcagtgagcaggttgatatacggctgga

SEQ ID NO: 47128 - DNA, 357 bp, Setaria italica
  Peptide Sequence Number=SeqID_113102
ccgccacgaggcccccgcccagcgccacggtcgtctcctggtccgggtagctcaggccgcggtgcccctccgccacgccgtagaccaggtacgcggcgtaggaggtcgccggcgtgagctcggcggccgggagccggccgtagatgtccagggacgagcactccaccagctcggccacgtcaccgaacctgtaaacgatcgcaacgctgattacaacatggctgccaaatcagcgaaatcaggacggatgaaagattagcagtacatatttcattgacagagaagaagagtacaggagctggcaaagaaataaagaattatttattgatagagatgcaatgatatgacattgatgtc

SEQ ID NO: 47129 - DNA, 498 bp, Setaria italica
  Peptide Sequence Number=SeqID_113103
tatgaccattaatattctctagaataaaggaggattggcatttttgcacgcatatttagtttcgaataatgtagttccatatgtcctaggagaatatttgggtgcaggtgaagaagcacaaaagagaggagaaaacacactctaaggagcaagaaacacaacttcaaccaataagaggctgccacgtgtgcaacccatggattgaagggcccactaacaaccacaaccgcctcaatccaccgggtggcacacacaatcgccaatgggacccaccaggcagtcacccaagcgaaggcgattgtgagtgggacccatagggggtcggttgaaccaggggttccattgaaccgcccttgcctccccccgtctccaggtgacgcatggcgacgattgacggggctcctacatggttatgggatattcctcgaagattccctagcagagccgcctccaacctcctataaatagagtagctctcctccctttccaacacacacc

SEQ ID NO: 47130 - DNA, 425 bp, Setaria italica
  Peptide Sequence Number=SeqID_113104
catatcaaagaacctaaatgtaacaacgtagctgcatgagcgtgatgagcctgccggcagcgcggccgcccgtgccgtcgttgtcgatgtcgtcgcagtggcgttcgtcgttccccgtagatatgatcagtcgctgaccatgctactggtacgttaccggtgtcggcggccggcggctagacggcgaccttcttctggtggaagttgttgatgaagtcggaggccttgcggtcgacgtcgcgctcgccgatccaccacccgccgtagtcctcgtcgctggagcgcaccttgcgcacgtaccccgtccgcccgtcccagtcgctcatgtcgtcgtcgtaccgccgcgacttgcgcaggaagctgaagatcgggcagaagaacgacttgcctcccatggaggcggcggcggtgcggcagggcaagct

SEQ ID NO: 47131 - DNA, 354 bp, Setaria italica
  Peptide Sequence Number=SeqID_113105
ggcggaccaggaccgcgcggcgaccgcgcctccacgtcacgcgcgccggagaggacccgcccctcacctaccagccggagcgcccgatggcggcggccccggccacgcacgcctaccgctcttcggcttcgataattgcaggcctaacaggtgctctgcgggcagcatctagaggatcctgtgctcatttctgcaattttcaagcattagtgaacaatggacttctatacagaagggaaaatcctctctccttgagatgctcttttcgctccttgcaagcaagaaataaccattcatcagccgttgcacctaaggattattgtgaaacttacatccagtttctaagagataaac

SEQ ID NO: 47132 - DNA, 282 bp, Setaria italica
  misc_feature (224)..(282): n is a, c, g, or t
  Peptide Sequence Number=SeqID_113106
tactattagtaccttttacagttggggctcaacagttctcgcctggctgtacaggcagctgtataaggcttgcaggcgcactgcaaaggagtccaatgttggagggtccacctatatgctccagatctggatttgggagcgaatgcccgtaggtcgaccttgctatctccgtgttgatgtaagtcacaactggtaattccattttctgccttattgttaacggnnnnnnnnnnnnnnnnnnnnnnnnnnnnnnnnnnnnnnnnnnnnnnnnnnnnnnnnnnn

SEQ ID NO: 47133 - DNA, 1583 bp, Setaria italica
  misc_feature (1523)..(1583): n is a, c, g, or t
  Peptide Sequence Number=SeqID_113107
tgtaagtcgtaaagtcggtcgtcgtcgtcggtcttggttgtcgtctaaccgtcgtagtagtcgtcgtctaccttgttcgcggcagaggaagaagcagtacgtggaggagctggagggtaaggtgaaggccatgcaggccaccatcgccgacctctccaccaggatctcctgcatcaccgccgagaacgccgctctcaagcagcagctgggtggtgccgccggagccgccccgccgccgccgatgccgatgtaccccgccgtgtaccctttgccgatgccatggatgcacccggcgtatgccattcgtggatcgcaggtaccactcgtgccaatccctcggctaaaaccccagcagccagcacctgctgcagcagagccaccttccaagaaggctaggaagaccaagaaggttgcaagtgtcagcctcctgggattgctgtgccttgtgatgctttgtgggtgtttaattcctgcagtaaatcggatgaatggctcagttgatgccggagaaggtgctggatttggtccatctcatcatgggagggttctggctgttgagggtcctcgtgatagtgtctctgatagtattgatccaaagccaccacaggcttcgagtgagacacttccagcactgttgtatctaccgaagaatgggaagcatgtcaagatcaatgggaatcttgttattaagtccattgttgcaagtgagaaagcttcttcgcgaatgtctggctatgatgggaagagtcctcgaaaccaaggaaaggaagaaactagcttggcaattcctggctatgtggctccattggaagctggagaggtcatggaatcaactacaggaatgaaaaataaactgatggctttggctcccacagatggaaacatgtatagggaggatgatggattactgccgcagtggtttagtgaagcaatgtctggtcccttgctgagctcaggaatgtgcactgaagttttccagtttgatgtatctccatcctctgcacatgcaaatggcatcgttcctgtctactccaatgccatgtcaaactcgtcacagaattttacagaaaatcttccttctcgtcctcacacagtgaagaacagaaggatttcatactccgaggccattcctctaagaggttcaaaatccaatgacaccgatcacctcaaaacgacaccgaagaatgagagctttggcagtacgaagcctgtttcatcagtggtcgtctctgtgctagccgatccaagagaagctggtgatgggaacggcgaggggaggatctcttctaaatctttgtcccgtatcttcgtagtcgttcttatagatagtgtaaagtatgttacttactcttgtgtcctgccgttcaaaagccatagccctcacctgtaagtctgggttctggacttctggagctgagtatgtgttcaggatctataacattaacttgatagtggttctcgtgaggaactgatgtactgtttatgctgataaaagttggacagttggattttttcatcaaaannnnnnnnnnnnnnnnnnnnnnnnnnnnnnnnnnnnnnnnnnnnnnnnnnnnnnnnnnnnn

SEQ ID NO: 47134 - DNA, 239 bp, Setaria italica
  Peptide Sequence Number=SeqID_113108
gttctacttgtacttttgacggatgaactacttatgcgtgattggaaccaagctaatgcggagtctgatctgaaatatgagttgctgatggaactagtagtcatgtatggattaattttccacgtcagctttggccccgcacgtgaggacaacatcactcatcatcgtgtcattgtgcgggacatggcagtggcaggacaacgtgctgtggtttgttgattgtaggtacaggttggtga

SEQ ID NO: 47135 - DNA, 609 bp, Setaria italica
  Peptide Sequence Number=SeqID_113109
attacaaccaaatcaaatcggagcagcgcgtccgcgaaaagggcgatcgatcctcaaatctcatgggctggataaacaaagattgcattcaaagtcttgatcgattacaaccacagactgaccagaggaacagatcattcagtcgcacgcacaatcgcatcatcagttgggacaagcgaagcggagagagggaaaacacggatctcgttccgatcgagtcacggcggcggccgccgatccctgccccggctagctacccggcgtagatgtggatcccgatggcgatgaggaagatggtgatgagcgcgaagtagaggatggcgtggacgatgatggcgatggggctggtgtgcatgctgccgaactccgccacccgcccgcgccccggcagcgtgcagagcagccccggcgtgagcaccacgaacagcgccgtcgccacgatcacggggccccagtccgccatcggtcggtcgacggccgccggctgacggctgatccccttcccctctctcccaccctctcgccggtcgccgctcgcttctgctgctgcctcccgaccaaatctgctcgcctttttggcgttctcgaactctctcccccccctaagaa

SEQ ID NO: 47136 - DNA, 494 bp, Setaria italica
  misc_feature (344)..(344): n is a, c, g, or t
  Peptide Sequence Number=SeqID_113110
gggttcagaggaggtcaaaggagtgccatgttgatgtccgcatagtggatgatgaagtaaacatcaagctcactgaaaagaagaaggacaactctttgtttcatgctgcaaaggttctagatgagttccaactggacctaatccatgcagttgggggggtaataggagatcaccatatattcatgtttaacaccaaggtacctgaaggctcctcagtttatgcatgtgcagtggctaagaggcttcttgaagcagtggatgcacagcgtcaaacttttaacattttcaactaaactttagcttgtattacagttcaaactatgtttgttgactgggaattttcngttagctgtttctgtgagcaaacttatttgctcaggcatggagaaaacttcgtcttttgcatcagcaagcttttgccatgcctagagcctagactcgtttgttattgtatgacttacctagccctgcttatagaaacgcttcaacgcata

SEQ ID NO: 47137 - DNA, 543 bp, Setaria italica
  Peptide Sequence Number=SeqID_113111
agtaagtagacaaggttggttttggtagctcccatcaaaaattaaagtttgttttggtagagagagaaaaaggaccggatcggagccgggggaggaaagaagcttacgaccctttgcgcgtgatagtcgtaaagccttagagcttcggcgaggaggatatgatgcgtgtgactttgtgatcgatacgagattctagctactgatgttcatcgtctaaacaattttttcgtcccttttttctatagaaaattaaacaagtactgtttttttttctccctagaaggtgttgatgttgttattagctaggacgctgttgcgatctactccttggcatgttttgtcacatgcctgaacagcaggtgacataaaataaatgtgcatatatactccacatagtttttctgtatccattttcgtcatgccaacttgcatgagctagcagatacgcactgtgccgtgccactagttaattaaataatgggaaattcaacaagaaaataaaataaaaagaccttctcatcatgatcattatacttccctccc

SEQ ID NO: 47138 - DNA, 335 bp, Setaria italica
  Peptide Sequence Number=SeqID_113112
gggggcgctatttatagctggggtgcccgggcggggcggaagggtcaaggaaggagacggacggactgccgaacgggcgggggaggtggtggctagcttcgcggccgggggctcccacccacggcctcgcggtcggactggggaaggcagattcgtcgtagtcaaggacgcgggcggggccgcgggggggaggtgggtggggtgggagcggcgacctggccgccagccccagcggctgagctttctggggtcgcttcgccttgacgcggagatcggggggtagcggaggcggaggcggccggacggctggctgtggccgcgtcggtgggtggccg

SEQ ID NO: 47139 - DNA, 264 bp, Setaria italica
  Peptide Sequence Number=SeqID_113113
agctgctactgctcgtcttacctggttcacacaccagagcttggttcttagtagctcctgtctccgtccattgccgacagctagctagctcgatcgttacaagctaaggcactgcagccacagggctccggtagctccgcgccctcgtcgcagacacaccgtgcggtgcgcgccggctgaggaggaggaggaggaggaggaggaggagattaagattattagctagaaggcgaggcgagggaattgatcgatcatctcgcgaga

SEQ ID NO: 47140 - DNA, 438 bp, Setaria italica
  misc_feature (401)..(438): n is a, c, g, or t
  Peptide Sequence Number=SeqID_113114
tgaattgaatttacgaagtaattacattggatttgctccattgtgattactgacatgctattcttcaacgcattgcaggtcatgaagtggacgggaagggaagcaaatttgcagacatcgtttatgaacatcttttttgctggtaatataatgcggatacacagtatcatattgttgattgtaatgtgcaaagtactgttagtaccgttattagttagttgaagtattgttcagtaatttattttagggtaggtatattaagttgagcacgtgaccggatttctttaatggggcattggtgaattgcctccatcttggtagaatgaatatcatgtgctataaagtggctcaagagaagatagcaataatacgtgtgcagtgtgcactattagtaaaccttnnnnnnnnnnnnnnnnnnnnnnnnnnnnnnnnnnnnnn

SEQ ID NO: 47141 - DNA, 437 bp, Setaria italica
  Peptide Sequence Number=SeqID_113115
tcattcttttcatgcggtagctcccacagttcactcttctggatagccctccagtgttgttctgtcaggctcatattcaacaagcgtcccagtgtttttgctgccaaaggcgacccacacaacctagtagaaatgctccgagcaatatcttgcaattgagaatatgactctgggtcatttctaccaaatgcacactttttgaagaagtcccaaaatatatcagtaggcaatccttcaagttggataggcttacagttgcctgtggtgacacgagtagcaaccactggagatcttgtagtcactaagatcatgctgccttcaggaccatacttcaatggtgcataaaacgcctcccaatcagcattagcgttcggccaaatgtcatccaacaccaaaaggaattttgagcacgtcttcagccgcttcatcaattcaat

SEQ ID NO: 47142 - DNA, 676 bp, Setaria italica
  Peptide Sequence Number=SeqID_113116
tttttttttttactttaaacttgtcatctcattccattcaacccaagccagcaaaagcacattcatggatcatataagcagtctagcttccaattcttgctcgtcctaatccatggatcctgagactgctggatcagcagaagctgtagtggatgcaaccgatataatcaaggcgcggagcgcattggcaagatttcaacgctccttggaggtattgtaccacggagttacagctagtgaaaagatgaagattagatactaaaattctagtattgtaatttggtggtgcattctagctacatcccgaggaccataacaagtagggagctagagctgagtggatgaggaggttcttctgatgtgggagttgcccttgctgctgcttgtctggatcagtgcagccatctccactttcagttgtttgcactgcctcttgagcttgaggttctcattcaccaggcgacgaacctccttctccagctcctgcacgtacgccctcttcctcgccctggagcggagcgcagactccctgttcttcatcatccggatgttcttgcgctcgtcgtcgccgtcgcagcaaccgctgctgttgctgccgccggccccggtgagctgcagatccaggccgcccagcaggtactcctcctcctcctctaccacctcatcgccgccgccg

SEQ ID NO: 47143 - DNA, 372 bp, Setaria italica
  Peptide Sequence Number=SeqID_113117
ggagtttctaaaatgtgtatcgaaaacatataaaatggtgaactagggcagaaaattcttataaaattaagaagttcctataaaaagtatggttcttaactttattataatgtattgtcatgtacatgttagtttgatgaaaaggcatgaaccagacctacccaaaactttatcaacacgtcgaaagcaactggaaccaaacaaacaaaaaatgtgactgcagcttcatctgcttcaagcccgtagtgctcaagaataacctctaccaatgtatgccaacctgactctgaatggtaccctagaaggatgtctgatattagaataataagaaaggccttcccactgtctgaaatgttatttagcaacttatat

SEQ ID NO: 47144 - DNA, 1145 bp, Setaria italica
  misc_feature (22)..(22): n is a, c, g, or t
  Peptide Sequence Number=SeqID_113118
tttttagttttttttttttttnttttttttttttttttttctaaatccaccgcgatgtatgctatactttcttcagaatttgcacagcagaaactgaaatgaaaatgaaacaaggctccacatgtgagaatttcggggggcagagctgactgccgctgatagatatcaggtcaaaagaatctgaatttttcctgtaggggatccggtgcagaatctttgttgcgcaaccggatgattttttttttttgacatgaaccagatgagtgttgctaacggactaacagagtcttccacattatatgattttaggataagaaccaactacggactaacatagagtctttcacatgatatggtttcataaaaggaaccggctcatgttacttctccagttcccggtcatggaaaataaggctgacacctgatatgaggcctttcagacgaagagttccttcagaattgaaattttggaatgcccatccaatagattgtatgattgttacctggaaggtgacaattgccaagcgattttccaatataaaaaaagaaattctctagtggcgtgttatttcatccaaaatgttgaccacactgggtgacaatcttggaaggtatttgtatacccaaaactttatcaacacgtcgaaagcaactggaaccaaacaaacaaaaaatgtgactgcagcttcatctgcttcaagcccgtagtgctcaagaataacctctaccaatgtatgccaacctgactctgaatggtacctgcaaaagtgcagctagtagacttctatatggtggataaaatcattgccaattaacaataattaacaacaaaaggaagatgcaaacaaatacaatattaatatatctacacaccttaatgaaaaaataatcaaacagaaaaactttcaatgctattttttagttgtttgacggagaaatatgtatcccaaagcaagaatacaagactaagaggcagttaaattttctcatggtagttcagcttttcctatgaaccagcttctgacaggggaaacaatctagcactaaagttaagtattttccatatgaaggcattgttttgaacagagaaaacaaaaaaaataatagttgagagagagagagagagaggaagaaagaagagatat

SEQ ID NO: 47145 - DNA, 262 bp, Setaria italica
  Peptide Sequence Number=SeqID_113119
gccttgatctcgcccctgctcgcggcggccccgaccccgagcacctcgtagtgcgtcctcgccgttgtccccagcgccggcgccatcgccaccgcggacgcgcgggccacgaaccggccgccgcgccgtgccccggcggcgccgcagctcggaacagcggatgccgtcgatgcgaacgaagccgccatagtttcgcctcccgtgtgctgttcttggttgctttcttcttgaagtgcgaagtgtttcgtcgtcgtcgaggaga

SEQ ID NO: 47146 - DNA, 452 bp, Setaria italica
  misc_feature (1)..(28): n is a, c, g, or t
  Peptide Sequence Number=SeqID_113120
nnnnnnnnnnnnnnnnnnnnnnnnnnnnccttatttcagtctcaagatgattcagatgaggattacaaaaaaccatgattcatcacatgatttgctacaagaaaatcattgcaaaataaagctgagagctaacaactaaacacaagaaaacatgtttaaatacatatagggaaagaaaaaatacaggcagtatattacaatgacaaccttaagacccagaaaccttccagttgcagcaaataagtggaggatgctcttggtccttaaactcacaaaaacctcaattgctgttgaactccctttgtttagggcttcttcagattctaacagtgcagaaggtagcaatatatttttcgatgattgaaggaggaggcgaccactcctgatattcatcccaaggtgaatatacaattgcccatatgccctaatctgaagaacttcatctgtacaag

SEQ ID NO: 47147 - DNA, 640 bp, Setaria italica
  Peptide Sequence Number=SeqID_113121
gggcagaagctttccatttccgcttggtctgaatgatctaccttcaatgtcttgtagcaccttcccagtatcaaataagttcacactatattcatcttcgcctatttgcatatgactaatatcaatcctattaaaccttataacctggttagcatcagcattagagttgttactttcatcagtctgtgtctcaagcaaatgaaaaacaggcctgaggtaattatcaagctgtatcaagagataataggcatttgcggactgaggaaaccccatgaccacaaaatctgaaccatgtaacactgactttggaatctttagagtaacctgggactgagagaaaccttaagacccagaaccttccagttgcagcaaaaaaaacctcaattgctgttgaactccctttgtttagggcttcttcagattctaacagtgcagaaggtagcaatatatttttcgatgattgaaggaggaggcgaccactcctgatattcatcccaaggtgaatatacaattgcccatatgccctaatctgaagaacttcatctgtacaagaattttcaaagttctttccatccactttcttccctaagccctctacatgaacccctcttttcaggacaacatcggtaggtgattgcga

SEQ ID NO: 47148 - DNA, 478 bp, Setaria italica
  Peptide Sequence Number=SeqID_113122
aaaaaggtcctgctgtgtttgattcgcccagttctctcaatcaccattgttgcaggttgcaagcttaagctgagctttgccgacccacctgcttgatgcggatgtctagacttaaaactgtggaaacttgggagctttggaaggacaagatgtggatccttgatggacgtttggtacttcatgctttgaattgaagcacagcaatgtgccataccatgctgccgtgtgatctgattggctgggtgtcttgcttcatgctcacatgaagtttaagtaccggcgtcatcggctgcagctagaagttttgttgtgttgtaatgtaatgcgctttcatgggttaaatctaggagccttgtgttgctgggaacatctggtgtgaaagtccaactttttgacctttctccgacaagtaaccgccacttttgtattttggagtgaacctttaaccactcatgagtcatgatccagtactatcatc

SEQ ID NO: 47149 - DNA, 385 bp, Setaria italica
  Peptide Sequence Number=SeqID_113123
gtcccaatgtagaaggctgactacaagcttgtgcattgaataaattggttgaggatgattgccgtctccagttgattcttgctttggtttgctgcaaggttcttaaggatgcaagggtcttgtggcaaattgatttttataggttcttgttgctttctagattggaccacacgcagcttaatcccatacactgcagatatatggctagggcctgtggagtgaagcatcattctagcttaacaggccctgacttgggttgcatatatgaaacataggcatgcatgatcgtcatcctttggtgttacttctatttctttagcgaatcgcttatagtttcttgcatgcaccaagtagctatcttcaagcaaaggaattggcatgagat

SEQ ID NO: 47150 - DNA, 811 bp, Setaria italica
  Peptide Sequence Number=SeqID_113124
gggttttaatgtggagaaagttcagtataagaatgtggtattcactgtgtgggatgttgggggccaagaaaaactcaggtcgctgtggaagatgtatctcagtaattctgatgcactgatctatgtcgttgattctttggacagagaaaggattggagatgcaagacaagaatttcagactattatcaaggaccctttgatggcaaacagcataatcttagtattcgcaaacaagcaggacctgagaggtgcgatgagcacagatgaggttagcgaaggactgggattgcatgatctcaggaacagaatatggcacatacaggggacctgcgcactccgtggtgagggcctatacgatgggcttgactggcttgcatccaccttgaagcagctgcaagaatcaggccatgcaacttcagttgctggcccttccatctaactcaacagaagtgacctcggtgcctcaaccagatgatgcctggtgccgtgatgatccgttcatttgccacaagcccacaggaatatgctccagcgcaagcattccttggtgtggctgtccagtgcccgcagatggaattcgtttgcttcatatgagccaattcacgcggcaggaactcgcatactttcttcctagatgtttgtaaagccttagatgagaggacgttgtgtgtatcgacattgatcttgtcttgtgtgtatacttgaaggctggtgcatgctgttgttttggtgattgatttcatgtcaataaaagaattgctttgtgattctaggacatcaataacaaagacttttaaggacaaaaaaaaaa

SEQ ID NO: 47151 - DNA, 264 bp, Setaria italica
  Peptide Sequence Number=SeqID_113125
ttttttttcaagaagaaatcatggtttctttacgcaaactatggccatgctatcagaaagtaaggcattttacaaataaagaaagagaggcaggctatgcttcgagtattctgggattctcctcctgagttcagttgattgtgtgggtatacagccacaaaacaccgtggcactgacaacactgcgaaagctacagcacaagacctgattacatcatttccccttcgctcagggaggtcacaaacaccaaaccgtccagtaaaa

SEQ ID NO: 47152 - DNA, 352 bp, Setaria italica
  Peptide Sequence Number=SeqID_113126
ttcacagcagcttcagttgaatgtgatccaggggctacccttatgtccaccttgtaacgaggagggagactccgtatgagttttacgcggatgcaaaggcctataacagttgccatgctgcagtgctccactgttgccatgctgcagtgctccactgttggggtgaaagtaaccctgacatgattactttcatcattgagttcaattgagtcttcagttaccacattaagctgttccaatgagtatgggtgctctggatcctttatatctctaatgtgatcaaatatttccagctggtctataggctctactgcattttcatctgtggtctctggtgcttgtcgtacacgcc

SEQ ID NO: 47153 - DNA, 1117 bp, Setaria italica
  misc_feature (1)..(33): n is a, c, g, or t
  Peptide Sequence Number=SeqID_113127
nnnnnnnnnnnnnnnnnnnnnnnnnnnnnnnnntttttttttttttttttttattgcaatcctcattcaaactcatattcaatagataattaattctgtagatactatgtatatataatggataaattgtatcctacttatattctacccttcccatttccaatgggtgtatatatttttacccataccttccctatttgtgtgggtatacagccacaaaacgccgtggcactgacaacactgtgaaagctacagcacaagacctgattacatcatttccccttcactcagggaggtcacaagcaccaaaacagtcggtaacaatataataactgaaaggggcggcgaaacaaaattcatccacacgtcctgcaacagccaagggcatcccaattctcaaaagataggagtaaactccatggggccataagcttgtgtgggttctgaacattaacaccgtggcgcccagatatgtccgggcctcagtcaaatgttggcgacaagcactcctccaccatgtccagtaggtttgggttttccaatgcagccgcaacacgttccttatcgttcagttgcttattcacagcagcttcagttgaatgtgatccaggggctacccttatgtccaccttgtaacgaggagggagactccgtatgagttttacgcggatgcaaaggcctataacagttgccatgctgcagtgctccactgttggggtgaaagtaaccctgacatgattactttcatcattgagttcaattgagtcttcagttaccacattaagctgttccaatgagtatgggtgctctggatcctttatatctctaatgtgatcaaatatttccagctggtctataggctctactgcattttcatctgtggtctccggtgcttgtcgtacacgcctctctttcttctcatgaattacagggttagcatttatcaaccccataaccatttccacgaagcacaatgcactaactttagataagtaagacaaatccagcagatggcggcggcggcggccggagaaggcggtgcgcttggcgtggttcggtcgccggtttggtctcctttgcggctcagctcgcgtcggggaagacaactgggtgtttt

SEQ ID NO: 47154 - DNA, 410 bp, Setaria italica
  Peptide Sequence Number=SeqID_113128
tcccctacaaccttaggtgttgatatttttgtttgcaaggtggatattgaatcttattacataattctgtcagcatctgaattattttgaacaatcaatatcttactctgttcaggctcattttccgtgctctctttcccttcatctatcggaagggcaaaagaactggtgtttggcttgtaatagttcaaattattggaagcactgatctgttgctctcactggtggtgcgctattttgactcttttgatgcctttggtatggcttttgaatgagtaaaagaactaatacctacaaggtgcagatgtcaatgaactttctgaagttaaagcttgggcatccttggaaatcatgttatctctgggcaggttcacttatccgacaaccttcggtagcccatcattgtagag

SEQ ID NO: 47155 - DNA, 482 bp, Setaria italica
  Peptide Sequence Number=SeqID_113129
gtccagacttaaaaattttcaccagaatcgaccagtccgatcgtagggcccattcggaagcgaatgctctaaaaacatttaggatttagaccaaattcaaataaaatcggatttgaatgtataaggaacccatatccaagtgacccttgtggcattttgggttactgatgcatcatggatttgatctaatttcctgatcgttaaggaaatgaattcactattctgtccaacccaagggatgaacctaaactcttacccatccctccccactcttcccaatccaaagtttggtgataaatatgaataccaatcaagacatctcaagtttgcatttttcttgtctaggattgtaatcaagatacagaaccagttaaacacgccatgccagaaaagtaatgactcatgcaatgtactggtgtccaattatccaacataaaaatggtagtgctattgtcaatataatctaactgaaaaaaccttgc

SEQ ID NO: 47156 - DNA, 296 bp, Setaria italica
  Peptide Sequence Number=SeqID_113130
gtctagtcgtcttccccgcactccactcacttgagagcagagcggagcgggcgggcgggcgagcgagcaaccaaccactcgtccgagtcgtcgccgtccccgtctctccccccacgccgttaccgccgagcgccatggagagcggccacaagagcggaggcggaggggcagccggaggggacggggtcctgtgccacgcctgcgggtaccagtacccgaacgggcaccccagcgccaagcaacggcgcgcgcaccgcaagcactgcggcaagcccgcgtccgccgccgccaccgac

SEQ ID NO: 47157 - DNA, 460 bp, Setaria italica
  Peptide Sequence Number=SeqID_113131
tttcctttccacgaccgcagaggccacgggaaggaaccatggagcggagatgacgctctactgggtcttgaacatgtggcggatcaggtcgacaacgcggttgctgtagccccactcgttgtcgtaccaggagacgagcttgacgaagttgtcgttcagagcgattccagccttggcgtcgaagatgctcgacctgctgtcaccagtgaagtcagtggaaaccaaatcctcgtccgtgtaacccatgatacccttgagtggcccctcagacgcagccctgtaaaacataacaatcaaattaacaacatttcacaaatccccaaccaagaagaatgcaagatacatggactgaggaacctctccatgtcaaacatggcaacagattatcattccagacaagaaatgtaaaatacattgataaattaatttaaaacaataaacaagagacttacttagatag

SEQ ID NO: 47158 - DNA, 1440 bp, Setaria italica
  Peptide Sequence Number=SeqID_113132
gattctagaaccatgagcaaagaaatcaggctcaacctttctcgtgagagcggcgccgacctgtacctcaagatcctcgccttcgtgaagcccgagcacttctttcaggcgtacctcctgtgccgcgagttcgagagcatcgtggatcctacaacccgcgagtctgacttcgacaagacgctgaccatcgtgaagtcggactccaccctcgtgaccgtgggcacgatgaacaccaagctggtcaatagccaagagatcctcgtgtcggacttgatcactcaagtcggttcccagatcgccgataccctcggcatcacggacatcgacgccaacacccagcaacagctcacggagctgatcggcaacctcttcgtgaacctcaattcccaagttcaggagtacatctacttctacgaggagaaggagaagcagacctcctaccgctacaacatcctcttcgtgttcgaaaaggagtcgttcatcaccattctgccaatgggcttcgacgtgaccgtgaacacgaacaaggaggccgtcctgaagctgaccccgaaggacaaggttacctacggccacgtcagcgtcaaggccctcaacatcatccagctcattacggaggacaagttcaacttcctcgcaaccctcaagaaggctctcaagaccctgaagcccgccctgctcaaggaggctccccgcgccgaggaggagctgcctccccgcaagatggccttcttcaaccgggtgatcaccctcacggtgccgtcgtcagacgtggtcaactactcggagatctaccaggtggctcctcagtatgtcaaccaggccctgaccctggccaagtacttccagggcgccatcgacggcagcaccctgaggttcgacttcgagaaggcgttacagatcgccaacgacatcccgcaggccgcggtggtcaacaccctgaaccagaccgtccagcaggggaccgtccaggtcagcgtcatgatcgacaagatcgtggacatcatgaagaatgtcctgtccatcgtgatagacaacaagaagttttgggatcaggtcacggctgccatcaccaacaccttcacgaacctgaacagccaggagtcggaggcctggatcttctattacaaggaggacgcccacaagacgtcctactattacaacatcctcttcgccatccaggacgaagagacgggtggcgtgatggccacgctgcccatcgccttcgacatcagtgtggacatcgagaaggagaaggtcctgttcgtgaccatcaaggacactgagaattacgccgtcaccgtcaaggcgatcaacgtggtccaggcactccagtctagcagggattctaaggtggttgatgcgttcaaatcgccacggcacttaccccggaagaggcataagatttgctctaactcgtgatgagaattcggatcctac

SEQ ID NO: 47159 - DNA, 564 bp, Setaria italica
  Peptide Sequence Number=SeqID_113133
ctgaacatgatcaagaagtgaacaagcgaatagacaatgcatacacaatctcaagcatggtaacaaataaaagacgggttaaaattacggcctgcagagagcggcttccagtccttgacatgccaacgcactgctccacacgtcgtcaccgccggagatgccgccgtggaggctcatggcgtcctcgggcagcggatcgaacggctcgtacttggcctccggttgccacgtcgacggcaggatcagatcgccatcgtctgtcgacaaccccagcgagtcgtagcagctctggtccacgctgaagccgagctccgcaagcacctccgtgcgcgcgtcggggcactgcggcgcggccgctccgggatccgcgctcgccggcgtggagagctcgccgaacgcgtcttgcctcgtgaagggatggtgatccggcggtggcgggacgtcggggctcatgtcacttgacgaccctctcaaggcgtcgagcgattccggcaggatggcgcacggctcgaccgccggcggcggctgatggttcaagaacttggcgtacaacaacgccaagtc

SEQ ID NO: 47160 - DNA, 2015 bp, Setaria italica
  misc_feature (1942)..(2015): n is a, c, g, or t
  Peptide Sequence Number=SeqID_113134
gaagaagaaaataggcatttccaaagattcaggtggactcgatacagctgatgttgttgagggcaaaacaccagccaacaagacagtggatggtatttcgagcatgagcaaatctgggcgcacgctaagatccatgcgcaagaaggaagatgccttggagggtttgaaaaggctgggaaatgaagatagtgatgaaaccttaacagggaaaagcaaagatgcccctttgcttaaagaaagcaagctgatgcatagaacgagctctgcacgcaagaggagtaaaattacagaccatgggcatgaagttgaagatctcagtgtgaacaattctgcttcgattggcaagagaaggtcggggcgtgctgaaatgagcaatagagtgcccatctccgagcatggtaggaagaagaagaaactttctgaacttatggcagagacaggcagtcctaattctgcatctgatggcaagagcaagactcgagggaagcgttcttcgcatgaatcaactgagaaagctgaggatcctgatcgtgactccaaggatacgatgaaggctaggaaaagaaagaagctcaatacattgggggatttgtcttcccagtcagagccttcctgtcataagaagtccacaaaggttgggaaactgatgaccaaagcttctgggagcagcatatcacatacaccacctgctgtcaaagctaatggtgcagcgtctcagacaaaatcacgcagagctaaacacaagctagtaaatgctgcagacaagtctccacgtcctgtgaaggtggatcggggcaagaaagaagcctttagtgaggagtctctatcttgcgatgaaatgctatggcagctctcagtagctgcatgtgatcttaagcagcgagagaaaatcgtccccacaagtgttaacttctttactgattttaggaacaacttgatggtttctagttctgatgtcaatgaggaggtacctgagaaggcagctaacattgaatccactccttctgaacagcctcttgctgatcatatgaaggatgactattgggctgacattctcattaatgtggaggagccactgtctagcctcaaaaagaagaaagatgagagtaagaaaagaacaagcaagaaggcacatcaggtcaagaaacttactgatactccatcagtgactctggaaaatgcagatgagccaagaagtgaaggcaaagaagatacagagaatggggaacaacttaaggccgaaagcaaaccggtggtcgcaaatgggtctcgactgaacactggaaccaaatctgctgaagaaatggaacatagcaatggcgtgctggctgggctggtgctgcacttcagcgggccaagagctgttccatcacgcagtgaccttatcaagatttttagtcaatacgggcctgttagcgaagccaaggcagagattgcaaacaatgccaactctgctcaggtgatcttcaagaggcgcatggatgctgaggcagcgtttgcaggcgctgggaaaatcagtgcccttggaccagcccttgtcagctttcgactcaccgacttcccagctgttgcttcaggaaatgaaccttcgcatggtgcatcaaagaaatgaaccctaagctgtagaagctgttgcataaccaatgaggtcaacaagatgagggagttagaggtaaaggtatactaagtggtagctagcttgttgcagaattaagcattcataggaacagcgatcgcatctatgttttccagtgttgtgaagtgtcatatactcttgcgtcattgtacgctgcggaccagatcagacagttaccaataggtgttgtaaaaacatgttttaaagctgttctttttactttgtttcttaatccgagcactggattctgatgtgggtgcaagcatatctttgtattgtttggtggatataaagtctttgttactnnnnnnnnnnnnnnnnnnnnnnnnnnnnnnnnnnnnnnnnnnnnnnnnnnnnnnnnnnnnnnnnnnnnnnnnnn

SEQ ID NO: 47161 - DNA, 1155 bp, Setaria italica
  Peptide Sequence Number=SeqID_113135
tttttttttaaccccttagaatcactcggattgatttcgatattttttttcttttccacattacaaaactatgtcactgtaaaactctcaatggtacatgatggttcaaaatgaaaacgaagagaaaaattgcagcactaacatcttctgtctacttataatcacttctcttctcttcagcctcttttctcttttgttgcgcaaaagcagcatatccagcaccaacattggcagaaggcaaaagtgccgcagaaactgttgctgataaatggtcgtgtccactaggaatagcaaggttcttaacatccccatcaaccttatcccattttgacttcttgtttggcctactctctttttttacaccttctgcaggtaccggaagcgtagcaacaccagctggaatcttcggtattgatgcagtaatcggaggttgcactcctgcagcaataaattcaacttttgggctttttttcctctcctgttccttcctctcaagttctcgcttcatgtcagcttctatctcatcatagtagtcggctttgtcatacccgtaaggatcaaaaacatccttactgaaacaggtccctatctgatcgatttcttgataccgcacagcatgctgcaagaagtcaggatttctgtaatccttcctgttgcgcacttcagcattaaaactctttccggctcttttgtacacaaggaacctgttaattttttgctgtaatgctgcagagcactttgcagtcgcgggtggaggaaggaaacgactcaatggatcatcattttcaccattagttgaaacatcagtagtttcctccacctgggcatcttcaatttctggtctagttacatccacatccatgtctgtccctacttggttctgctcaggcgcatcaggatgctgaggcatttctgcttcggtatttgagggcataatatgaaccatacctgagagagtccgttcttcaagattcccctcagcagactgagcatctgagccaaatctgtgcacgccgctcatgatctccccatcctcctgctcgggcgacatggccatctcgtcgtgcccatagtccacgattgcaagcgccccgcgccgcggcgggcgcggcaggtcgggcggcggggcggaggatgggccccgcagcggggagg

SEQ ID NO: 47162 - DNA, 775 bp, Setaria italica
  Peptide Sequence Number=SeqID_113136
gtcttgttacactagcttatcaagtgtaagttctatatgttcgacatgtagattggtatatggttgttatgttgttcaaagttggtatagacttgtgccagttctatagttatatctgaattcacccttgtagtgtacttgatttatctttgaaatctgttaatatttttggtgaaatctgaaacatctaagcaatctgcttttctttgggggtttcactgaccgctcaaattaatttgttaatctgcattccatggaaaagaaatctgatttatttgagtaatctgtagataattttgggaaaatttgagcaatctgtctttggggtttcactgacagcccaaattaatgtgttaatctgtatgcaataaaaaagaaaatctaaattatttaatttgattggtttgcatataatttctgagaaatctaagacatctgcgcaatctgcattggggttgcagcattgcatagaaattaaaattcaagtctccgagcaacttgcatttatggggttttgtatgtctagttatgtggtcttgtagagtcagacttgcaatatattcctattcatgattcatttagtgcaataaaataagtttaaatttaatagttaatatatagtgattggttatcgtactttcttgtcatcgctctggttgacactatttttatcagaaaaatcagtccttttttgtttctccctgaatactggtagtgtgtgtacaagtctgtagccacctaaacatccagttggttaatacaacttgataaataa

SEQ ID NO: 47163 - DNA, 482 bp, Setaria italica
  Peptide Sequence Number=SeqID_113137
gagaggaacgcgagaaaacgacaaaccaaaatcgcgaagggtagctatcatccataaaagttgagaacaacaactagcagcagcaacatactcagcctctgtagtagattgagcaacattagattgttttctagaggaccaagaaacaagtgaagaacccaaaaattggcaagtacccgatgtagactttctatccaaacgacacccagcaaaatcagcatccgaataaccacacaaactgagagttgaagcagcagagtaccaaaggccaaatgcaggagtaaatcgaagatacctcattatgcgcttcaccgcctgacggtgagaagtcctgggggacgcctgaaaacgagcacacatacacacagcaaagtgtatatctggcctcgtagcagtcaagtacagcagcgacccaatcatgcttcgatattccttctgatccacgggctctccgtcctcatcagcatccaaagcagcgctag

SEQ ID NO: 47164 - DNA, 455 bp, Setaria italica
  Peptide Sequence Number=SeqID_113138
cttcctctgcttcagatgacttcggcaacgggctctccgcttgcatcgcgagttttcgccgtcgcggtggcgatggtagtgtttgcggtagcgttgccggcggcggccttcccggccggtttgccgcctggggcgccggcgttcccgaacccctgggcggcgttccagaacctctccggctgccacatgggcgaggagcggcagggcctggcggggctcaaggactacctcagccacttcggctacctcccgccaccgccgtcgtcgtccccgttcaccgacgcgttcgacgaggatttagaggcggccatcgcgacgtaccagcgcaacttcgggctcaacgccaccggcgcgctggacgcgtccaccgtggcgcagatggtatccccgcgctgcggcgtggccgacgtcatcaacgggacgtccaccatggcgaggaactcgtcggcagcggg

SEQ ID NO: 47165 - DNA, 281 bp, Setaria italica
  Peptide Sequence Number=SeqID_113139
ttgttagtctcatcatcggggcacccgagcagcaggtccccggggtcgtccatgagcagcatcgcgacgacccggagcggcagcagcagcagcagcctggccgcgtacccggagggccggatcctggaggcgcccaacttgcgcgtcttcaccttcgcggagctccggtcggcgacgcgcaacttcaagcccgacacggtgctcggcgagggcgggttcgggcgggtgtacaagggctgggtcgacgagcggaccatgaaccccacgcgctccggcatcgg

SEQ ID NO: 47166 - DNA, 634 bp, Setaria italica
  Peptide Sequence Number=SeqID_113140
taaggaaggtagaccgaaacaaccacagagctggcgcgtcgaggctatggtttcccgggcacagctcacaggatcccgttcccttgggctatcgccatcagctcggcaatagcagaggcgccgccaccaccatcaggctagagcaccagcgctaccttccgcagaggcagccgttctctctcttgggctacaaaaatggcggcaccgcacctgctacgtctgccatttgcccgttcagtgaaggagcacgcggcgccgaggctgctagcttcgctggacagatgcacgcagccatctccagggcgcgcggctcggcagcggtgacgaccacggaactggcgtcagagatgatggcggggaacccaccaataccttcaacggagatggggacattggcaagctcaccgggagagttcctggtgggtgtgcaaggagaccactacctcttccatttcttgggtagcggcagctgggcatgtggctatggaagcactgcaggcaacaacggcagcggtggaggaagcagctgcacggccgctccgggcagcgcctggccggacccgtcaggtttcacctcgtcgtcttctggtaggaagtaacttaattaacttagttagtaacgtactaaacccta

SEQ ID NO: 47167 - DNA, 359 bp, Setaria italica
  Peptide Sequence Number=SeqID_113141
gtcgcactagtggcgtgtggacgtaattaaggccggcccgggtggtttaatactccttgtaggcaaccaaataaatcagattgaatgagcgtaggttgggcagcgtctgccacgccgggtcccctgaccaacaaacactctttactgcccaaagatgtgacccaaccacatgttatatcgcattcgtttctgatcgctcctactgcttgcagttgcgtcgagtgtaatttttagaacggtagttgtggctgtgccaggagtatggaagaggtgtattcttaatttcctataccatgcacaatgtcagcaagcaaacaaccgtgaggtgacctacaagaagcaacatgcaactggagaag

SEQ ID NO: 47168 - DNA, 149 bp, Setaria italica
  misc_feature (146)..(146): n is a, c, g, or t
  Peptide Sequence Number=SeqID_113142
ctttcaccagcaattggctagcttacgagtgattggtgaaagttgccaaggtctgaaccgacttgttgcctggactttgttgcaagttgttgtgtgcgcgtatactggttgagctttacagcccatggactctgcactttgatganctt

SEQ ID NO: 47169 - DNA, 1317 bp, Setaria italica
  misc_feature (1259)..(1259): n is a, c, g, or t
  misc_feature (1272)..(1317): n is a, c, g, or t
  Peptide Sequence Number=SeqID_113143
aagctcgaagctgagccgctagggtttatcgccgccggccagatcacacgcctagggttttgccggcaccgtttgcgcgagagaggagaggaggagagcgaggatgatacggcggacccagcggacgcggcgggagtacctgtacaccaagagcctcgagggcgccgaccgtgtgcagttcgagaagaagcgccgcatccgacaggcgctcgaggaaggcaagcccatccccaccgagctccgcaacgaggagcacgagctgcggaggcagatcgacctcgaggaccaggagcgtcaagttccgaagagcatcgttgataatgagtacgctactgccaacatccgggagcccaagataatgttaaccacgtctcgcaatcccagctcgcccctgattcagtttgttaaggagctgaaggttgtctttcccaactcacaaagaataaaccgtggtggtcaggttatatcagaaattgttgagtcttgccgatcacatgatattactgatcttattttggtccatgagcatcgtggtaaacctgatgggttgatcgtctctcatctaccacatggtccaactgcatactttggattactcaatgtggtgactcggcatgacattaaggacaggaaggcaatgggtaaaatgtcagaagcttacccccatttagtactggacaacttctcaaccaagattggtgaaaggaccgctactattctgaagcacctctttcctgtgccaaagccagattcaaagcgaataattacttttgctaatagagatgactacatttctttcaggcatcatgtctacgagaaaccaggtggtcccaaatcgatcgacctgaaggaggttggcccccgatttgagctgcggctgtaccagatcaaactaggtactgtggaacaagacgaagcgcagagcgagtttgtgctgcggccttacatcaacactgccaagaagcaaaagacgcttggctcgtgaattgaattgagcgtggtttagttgataacctgcaccgcacctcagtacagcaatttttttgtttttggcccttcaacctttactgtaatagtaacatcaatgcgtaggataatgtgtcctgtgttcttcccccgatttgggcccccagcgactatagcatccagtgaagtattcaagatgagttgttgggtgagatatgtgaaattccctggaatcactcgtagtcgttattaatagttgggcttataataccaaaaaaaaaaaaaaaaaaaanaaaaaaaaaaaannnnnnnnnnnnnnnnnnnnnnnnnnnnnnnnnnnnnnnnnnnnnn

SEQ ID NO: 47170 - DNA, 1070 bp, Setaria italica
  misc_feature (1070)..(1070): n is a, c, g, or t
  Peptide Sequence Number=SeqID_113144
actgaagccttttctgatatacactgttggcaatcataaaccaccttactttcttgagcttgatctgagtgctctgcatctttttaggttgagagagcaaatacggccaaatagcaaataatgcgcatgcgaagcctcaggaccagctagagcatggtgtgtcccctgcaccaagtatttgttccgaaaatcagaagaatcctacatcgactgctgaaccaattgctcccaagcttggtgtggactatccatttccaccacatcttgagtatgcatatccaccgccagatggaaacatattgaacaatattgttaatgctctcattgccgtcccccgattctacacccaggtgttacacttaatgaacaagatgaatcttccagctccatttcggatggcattgcctactccgccgctaccatcacaagtgtctgctccccctcatcctccgccaccactgcaacctactacaacggaggaacctcgttcagctgatttgtctagtgatgagtctgagttggaatcatctgatgacgatgttgataaacggaaaagcaagcgtgcaaaacatgaagctattgttggtcctgcagttgataaaagtgttgctcatgaagcagttggggtgaaacctgctgcattggtttctactgagcttcaagtgataaaaaagaaaacccagtacttcagataaaaattgcccctaaggctacacagaaggaaccacctataccaagtacaactgacaaagaattggattcaacaaatgaacagcttgaagagaaacattttgtcacaccccaggaaatagagaaagataaattaccaccagaggagattttgtcccttcctatgttcaagaattacactccaggaaatcccgccattgttttgtacattaagaacttggcaaaggatgtcactcatgatgacttcttctatgtctttgggtctcttttcgaaagtatggacagtgtaagatcgggtctaagtatcaagctaatgcaggagggacggatgcgtggtcaagcctttgtgacattttccctaggttgaacttgctcaacgn

SEQ ID NO: 47171 - DNA, 322 bp, Setaria italica
  Peptide Sequence Number=SeqID_113145
tggcggacgtggcgatggccatgcacggtggcgccggcggggtctagacggccgtgtcgggctgctacgcgggcccggcgttcaacacggtggtgggcctgggcctgtcgctcacgatggccgccgcggcccggtacccgcggccgtacgcgatcccggcggacgcgtcggcgtaccaggccgcgggattccttgcggcggcgctggtgtgggccatcgtggtgctccccgcccgcgggatgcggctcgaccgggtgctgggggtcggcctcctcgtcgtctacctcgcgttcatcgccgtcaggctggtctcgctcggagg

SEQ ID NO: 47172 - DNA, 331 bp, Setaria italica
  misc_feature (327)..(331): n is a, c, g, or t
  Peptide Sequence Number=SeqID_113146
aagggaattagactagtttgttcgttaactgaacaacaatttcagcttttacacaatagctaaaatggagagaagactttcaatttgaagttcattgactgtcacaaggactctgttaccgggcttgcagatgcttatgccgctgctcgtgggggcgatgtgccccccagcaaccagcattaatattgtaaaaaatgtaagattcttgatattatttcaggtagatggtagaatagcaattcatgctcatttgccattacttacttttggttctgcaatagaactactgatctttgaccgcgaacaaaaaaaaaaaaaaaaaaaacnnnnn

SEQ ID NO: 47173 - DNA, 295 bp, Setaria italica
  Peptide Sequence Number=SeqID_113147
gtaattgttatagaacggcatcaccgacttgcacaattactacattgcttcctgcactataggctcaggaaacatttgttgcgagcgcgctatggtttcatctagtttcttgttggatgatctctaaatagctatccatgatctttctttgtttcctcatgtacatatgtatgtgttttccaagtattctttgcctgtctttctgtttggttcattttcagagtaatctgctctcaaaagattccgtataagtgtaaggtacttatcgacttcaatcagattgtccttggacccc

SEQ ID NO: 47174 - DNA, 364 bp, Setaria italica
  Peptide Sequence Number=SeqID_113148
aagaaataagaaccagataaagccttttacaatcatattcatttagcatctgtaattcgtatacaaggtcatagtgaggggaggaacatgacctggcaacagtacgaattcttgttgtcactattattctactgtcataagtgttctcaaacaaagcaaatctgatcatgttcccatagatgaggtcatcaagctacttggtgatggggagcagggggatgaaggtagtgtctattgttgggtgtggaggattaggaaagactactatagcgaatcaggtttaccgtaagattgactgagcaatttgattgccaagcttttgtgtcattgtcccaaaatcctgacatggtgatgatatttcggt

SEQ ID NO: 47175 - DNA, 573 bp, Setaria italica
  Peptide Sequence Number=SeqID_113149
ggaaccaggtgagggagatgtcatacgacatcgaggactgtgtcgacgactacatgcgccagctgcgcagcggaccgcagaggcctagtggagtcatggggttcttcttggggtatgttcagagagtgaaggaacttgttaccggccatgagactgccaagcagattcaggagctcagggatcgcattgtcgaggcgggacacagaaggaagaggtacaagattgatgatgcagttaattccgctagcgttaatgttgtgcctgttgaccttcggttgccagctttctatgtggaattgggaggccttgttggtaccaatgttcccatagatgaggtcatcaagctacttggtgatggggagcaggggatgaaggtagtgtctattgttgggtgtggaggattaggaaagactactatagcgaatcaggtttaccgtaagattgctgagcaatttgattgccaagcttttgtgtcattgtcccaaaaatcctgacatggtgatgatatttcggtccatactatcacaagtaaagaaggatgactgtgacggcaccagccttagtgacaaggaa

SEQ ID NO: 47176 - DNA, 422 bp, Setaria italica
  Peptide Sequence Number=SeqID_113150
cccctcctcgtgaaaatgccggggaacagcgcgtcctcctcgtcctcgccggaaaatagcgcccttttggcgttccggggcacctccgccttgaatctgaagatgttccccgtcgcaggggtgcccaccgccgacgcccccgcggaggaggaggaggagcacgcggtggccgaggacgcgacccggtcgggcgtgtcgggcccgaagagcgcggcgcggaggagcgcgcagtacggcgacgtggggggcgcagatccggaggaggcggtgggtccacttgccgcggcgtcgtgggaggacgacggcgagggggctaggtcgaagagcgcgaggttggatccggtgcggctggggatgaagcggtcgctgtagacggtccgggaggccggcgtgggcgcggatgcggccgtggaggcgtgcga

SEQ ID NO: 47177 - DNA, 589 bp, Setaria italica
  Peptide Sequence Number=SeqID_113151
agcagccgtccagatactgtaccgagccctattgcagaaagcctcaagggcttggatgctacacaagtcgggaagatgccatctttgtgcagttccaacctcaaggagtcggcaacagcctctatatctgctgcatctacaacggaatcgtcaccagcttcactcctctcaagcatcatgcaacctttttctccgagggttgcaatgacaaatttcgcacgagggtactgcagaaggatctcaagcagggcacagggtaaggatgggattgaggtccagttctttggaaatttccctgaacagacgatgtagcttgctagaatgagcaaaccttctaattcttcctttgttctctcttgctcggcatcaaccaatattggaatattcatctgatcagcctgtatatttctgcttagcaacagccagtgccatttctggtgaatatccatctagatataacaagcttacatcttgcaatgcagctgataaacatgacatcggcaagtcactaggaaccattggaggatcgcccggtgtgagtatacatgtacgagttttcgttgcttatcaataatgatgtagacaaatg

SEQ ID NO: 47178 - DNA, 526 bp, Setaria italica
  Peptide Sequence Number=SeqID_113152
tgagatgcaacaatggaggagtgccaaggtgattcttggtatggcatggtatgcaaacatattaggtctaaacactctataattaaagcttggaggcttctataacgtaattagctaggcttctactgccatgatccgatgctagtagatatatagtacatatacatcacctctctatcagtcaagacacaatagcctgctgatgggtttgtggtatcgattttcggttaaggcaattaaccctataattaatttgctgctgatggtattgaattcttcatataatccggctaatgatgtctgttggttttagtttgctgatgtcctaactttaagcttttcctgaagttgcatgtcctgagttttctagagctccaagggcatatgatccttgacacacagttttatcaggagaaatcatggaccctagctaaagctagcaattgaattgcatactacccttcagagttcagacaagttattggtgaaattaacatatggtagggaaactgtgcatggatatgaa

SEQ ID NO: 47179 - DNA, 498 bp, Setaria italica
  Peptide Sequence Number=SeqID_113153
aagaacagcggacagcggcggcggctgaaccgtctgggatcgagcgtggtgcgcagcgcgacggtgctggcgcgcaccctggtggcgtgcgaggagaagcgggaacggcggcaccgggaggtcctggagctggaggagcggcggttgcggctggaggagcagcgcacggaggtgcgccgccagggcttcgccggcctcatctccgccgtcaacagcctctccagcgccatccacgctctcgtcgccgatcaccgcagcggcgactccgcatcccggtgaccgccgccgccgccgatcgccgtcgtcgtgcatgccctcatgcctagctagcagcctagcattctcgcattgtgcgatccggccggctgatcgacgacgacgaccgatgaggcatcagatgtaaataaggtggatgatgatgattgattgtgttggaagaaaacaaaaaaaaaaaaaaaaaaaaaacgtaaaaaacgaaagaacgtaacgtaaccgaaa

SEQ ID NO: 47180 - DNA, 678 bp, Setaria italica
  Peptide Sequence Number=SeqID_113154
aaataaatagtatgtattttataactaaaagcatgcacatttcacataagtttagtgaagaaaaccaaaagcaggaatatatagaatagaatagaaaagctcatagagaatggtaccttgccactaatagctcagaaattaatttgaaaacaacatggacagccacataactgtaatttctggtaacattgggtgcttgtgattttaatgctagaagtagaagccatgacaagaaaaactacaggatgcacaagcacaactagcaataaataaagctcttacactataatctgcaggtaatgcttctggacagcatggtgatgaggacctctggtgcacccgctgccctggaggagctgccgccgtccgaatcaaggccggtgcgggagtagcagcagtcaacgccgctgcttgacacttactaacaagaaaaagggaatgaggagaagggccggggaacgggaaggggatgaagcggaggaggagatggagggagaggagcaggaggaggcgcacttgcccgctgccgtcgggcacgccgtcagtgccgcgagggagaggtggccgccccggcggcggcggcggcggcggcgcctttgccgaagcagcgcgcgacgcgagcgagtcgtctcgttcccggtgtgcggtggggaggctggatacacacgtggattggtg

SEQ ID NO: 47181 - DNA, 425 bp, Setaria italica
  misc_feature (1)..(21): n is a, c, g, or t
  Peptide Sequence Number=SeqID_113155
nnnnnnnnnnnnnnnnnnnnntttttttttttttagtctagtaagcagaataggacaaccttctcatagcagaatgttcagacgtaacagtacagcttacataaagttgcaagctagatcatatattgaaaaatatcgtagctgtcggtcttgaaatcagtacatcttgcaacccactttcttctctagagtatgatagctttcacaatcatcttccacaggttttaaactccaacgtatacctttcacagatttaaagactataatctgcaggtaatgcttctggacagcatggtgatgaggacctctggtgcacccgctgccctggaggagctgccgccgtccgaatcaaggccggtgcgggagtagcagcagtcaacgccgctgcttgacgaaccttgtccgctgccgtcgggcacgccgtc

SEQ ID NO: 47182 - DNA, 1534 bp, Setaria italica
  Peptide Sequence Number=SeqID_113156
acaggattaaagttgagtacatagtaacagaaacatgcatcagtaggaccgtcgaatttacactatgcagttttttttagaccatttacactatgctatttaggggcccaccgtacctccacaaaactgcacagagagtctgtaggatcagcggattacagtgcctagctcacttttccctccctccattgataacttaaaaggtacatggcaggtaataagataatgagcattatttcatcatcatccttcctcctcttcctaactagatcctccactgttgaatccatttttctacaaaataaatagtatgtattttataactaagagcatgcacatttcacataagtttgtgaagaaaaccaaaagcaggaatatatagaatagaatagaaaagctcatagaaaatggtaccttgccactaatagctcaaaaattaactttgaaaacaacatgggcagccacataactgtaatttctggtaacattgggtgcttgtgattttaatgctagaagtagaagccatgacaacaaaaactacaggatgcacaagaacaactagcaataaataaagctcttacaatctgcaggtaattcttctggacagcatggtgatgaggacccctggtgcacccgctgccctggaatagagcagtattcagttaaaaataaacttaagttgctaatctacctgaaatgctggaattagaagagaacatgtgatcaagtggaagtgctagaagcacctatttagaagtattactaagaaaccacaagaaataaggtggaaaaggagacaagcaatattagcaaaagggataggcatcattggtctgactctccattgtgtttgtgcttacgtaactatagttaatatgttaatgccatcttgaatgggtcttgaattagctagtacagataaactttcaagacgagatcctcattagatttaggcacaaatcacttcctgttaccagcatccaacacaaatttcgtagttaaagaacagaagtatcatagaaatcatgttccaataaatcatacatggtgcattaaagatacacatgccgattcaaaggggacaaatgagattaagctgatgcgattaagctgtagaatattaaaaaacaaccacacaagggatttttctatgaaatgagtgtgtttcaatatgtttgctcaaggtagttgatctcagtacctatcaggacttctcaaattttgttttgcttgcttgagcattgaaataactacacaactatgcagcacacgaataaaaacctacacgaatagaaattagaaagaaccctctcatgtctcctcgcggatctagcaccgcacaggaacatgggatttacctaccaagaggagagggagggttgggggtatatgcactgaggagctgccgcagtccgaatcaaggccggtgcgggagtagcagcagtcaacgccgctgcttgacgaaccctaacggggaatgaggagaagggccccgctgccgtcgggcacgccgtcagtgcggcgagggagaggt

SEQ ID NO: 47183 - DNA, 403 bp, Setaria italica
  Peptide Sequence Number=SeqID_113157
attacagtgcctagctcccttttccctcctccattgataacttaaaaggtacatggcaggtaataagataatgagcattatttcatcatcatccttcgtccttttcctaactagatcctccactgttgaatccattttttaatataatctgcaggtaatgcttctagacagcatggtgatgaggacccctggtgcacccgctgccctggaggagctgccgccgtccgaatcaaggccggtgcgggagtagcagcagtcaacgccgctgcttgacgaaccttgtccgctgccgtcgggcacgccgtcagtgccgcgagggagaggtggccgagcgcgcgacgcgagcgagtcgtctcgttcccggtatgcggtggggaggctggatacacacgtggattagtgg

SEQ ID NO: 47184 - DNA, 1106 bp, Setaria italica
  Peptide Sequence Number=SeqID_113158
ttttggtatttgtcgtcttataggtacgtacctttaagttatacgccatgcaagaaaggaagctgtgattcgatacatctacgccaagaaatatgaaagaaaaaaaggttaaaactaatgagaacaaaaattcaaaaacataacacaatttttttaataaaaatcatagataatcagaaaacttgaaaaaccacacgtcaaaatgctatgtgtatgactctgtttcaaacagaggaaaactcgacttgatccaaacatgatagcagaataggacaaccttctcatagcagaatgttcagacgtaacagtacagcttacataaagttgcaagctagatcatatattgaaaaatatcgtagctgtcggtcttgaaatcagtacatcttgcaacccactttcttctctagagtatgatagctttcacaatcatcttccacaggttttaaactccaacgtatacctttcacagatttaaagctgagtacatagtaacagaaattaaacatgcatcagtaggaccgtcgaatttacactatgctagtttttttagaccatttacactatgctagttagggacccactgtaactccacaaaactgcacataatctgtaggatcagcggattacagtgcctagcacccttttccctccctccattgataacttaaaaggtacatggcaggtaataagataatgagcattatttcatcatcatccttcctccttttcctaactagatcctccactgttgaatccatttttcactataatctgcaggtaatgcttctggacagcatggtgatgaggacccctggtgcacccgctgcccaagaggagagggatgggtgggggagatatgcactgaggagctgccgcagtccgaatcaaggccggtgcgggagtagcagcagtcaacgccgctgcctgacgaaccttgcccgctgccgtcgggcacgccgtcagtgcggcgagggagaggtgaccgccccggcggcggcggtgcctttgctgaagcagagcgctcgcgagcgagtcgtctcgttcccggtgtgcggtggggaggctggatgcacgcgtggattggtgaggatcgggttgggttgaat

SEQ ID NO: 47185 - DNA, 465 bp, Setaria italica
  Peptide Sequence Number=SeqID_113159
tactacaaacggggccaggttcaggtgtggggcggaagacacaacagtcaagttgaagagaccgaattgagtttctaaccccatcagataaaattgagcatgggagcttgtacttttcatatagcctaagtgtcagctcttcaatccctggtgtaacagcaacttggagccaattatcgatataaggaaaacaactgtattgaccatataaatcaagcctcagtatcttcaagccaatgcctgagtgatttctcaggatgctatcaattctgcaggttaagtttccaccaacacgtaactcatagcaaagcgtatgcatatccagagtaagtttgggataacatctccaggaacttagaaaggcatgagaaaggcaagcagcacgagcagcagcatccattggcattaaagaatgtatatggcgccagatgtccataggaaggtccgggattgaacatcccgatg

SEQ ID NO: 47186 - DNA, 376 bp, Setaria italica
  Peptide Sequence Number=SeqID_113160
ttactacaatggcgactggtggcaaggctcattctactactaggtgatctgggggcctctcccttggagaacaaggtaaatgggggaagatcctgttactgtttgggctaccaagtttaatgctatgctctgcctttacatatgttattcactttacatttttgtaccagtgaatatccttttccaatgccatattaacatcagcagctgatagttcgtacatgttgacctgtcctgttcatcacgtgttatcttagttctttagatagaaaaggaacatatgctctctcctttttttcccccaaaagtcagaacatacagttatagcatgacacaagtttctcgaaggttttctatgcaaggaaatcaagtttct

SEQ ID NO: 47187 - DNA, 482 bp, Setaria italica
  Peptide Sequence Number=SeqID_113161
actttcccatataataagtgtaattgaaccagagatggctcttgtgcctttctaggaattgtgctgactttgttaggtcgcagccaacaaaaagaaacttagaatttcaattgaacaccattggcattactaatatagatgccatcagaaagagagaatatttagagctttaagtccaacttgcgcggaaaagtcaaagaatcaatcatattatggtttccttggaggactcttcaactgtattgcaaacagaatgtcccctctataaataaagattgaccaatggcaacctagcacaagacaccaaacacccatgcacacgcttcctatcaaaatgaaaagaggcctcctgatactttggtccttgttctactccagtgctgcaaacatagccactagaaaccaggccaaccagcctcttgaatttgatcattggatattatccagcaacatgttacaaggaaacaagactcgactttgaa

SEQ ID NO: 47188 - DNA, 448 bp, Setaria italica
  Peptide Sequence Number=SeqID_113162
cgaattatcatcggcgaccagaacgtcgacgttggggttggcgcggcgggtccgcgcaacgatggtctcgacattctcgacctcattgtaggtcggaatgatgacaaggaccttgtcgagccggacttcagtgtcggtggcggacattcctctccgatctgttgtgattcgcttgtgcgagcatagcgcgacggcgttgcagcaacgacatcgcgatagcccctgctgtcataacgaggacgatgatccgcaaccatggtgcaatctgtactccgatggtgaggccggattcgagaggtatagtcaccgtgaaatgtgtatggactccctcctcagtgcgcagtgccacggatccgtcagggttcaccagccccgagaaagaattcgtggttgagacgacgatatgtcgtccagtctcaactgcccttgccctggtgatctgccactg

SEQ ID NO: 47189 - DNA, 1117 bp, Setaria italica
  Peptide Sequence Number=SeqID_113163
gtcacactcatcaagtcaccatggttcatggaccttccggtagtccgggccatctgctgtcatggcctccttcctggtccattgacatatgacaagaccccaggcaccatcatctgtgcacaggctttaagcaaccgcgacaagctgtgcagatctagcacgcgcgctgctggccttcaccggtgcggcctctcctcgcaagcaaatcaaagcatggcgccggtgaaggtgttcgggtcggcggtgttcgccaacgccgcgcgggtgatggcgtgcctggaggaggtgggcgtcgagtacgaggtcgtcgaggtcgactacatggccagggagcacaagggcctcaagcacctcgcaagaaacccgttcggccaaatcccagcgtttcaggatggggacatcatgctcttcgagtcccgagctatctcaaagtatgtactccgcaaatacgccaagtcagcccaagacgacctcctgcgagaaggcaacccggaggaggcggcgatggtggacgcgtggacggaggtggaggcgcaccactacttcccggccatggcgcccatcttctacgagtgcgtcgtgtacccggccaggctcggcacggtgccggaccagaagatcgttggcgagagcctggagaagctcaggaaggtactcgacgtctacgaggcgcatctgtccaggacgaagagcaagtacctcgccgggaacttcttcagcttcgcggacctcaaccacttcccgttcaccttccacatcatgacggcgacgccgcacgcgtcgctcttcgactcgtacccgcacatcaaggcgtggtgggcgagagttatggcgaggccgtcgctgaagaagatcagcacccatatggagatcaagccatgacatgatcgctcaagccgacgacatgggacatgatttggatatgtagtaatgtagcgtgctcgcttcgttcatatcctttccaataatgttgtggctgcattattgcaggactgtgtgctgtgcgtatttgcttttttattactgtcctactactgtacaaaccatttggtcttgtaatatagcaatgttggtgtttcatgtccgtccgttatactaaaaaaaaaaaaaactagaa

SEQ ID NO: 47190 - DNA, 247 bp, Setaria italica
  Peptide Sequence Number=SeqID_113164
aacagccagggtttgagaagaggagggacctctatctcctctaccactacctgaatcactacaatctttttggtctctgggtaccgctcatcagcgatgtccataatcgaagactacttatatctgctcgcggtttagtttcttctgtttattctcacatgaaaacagaggcagcaatgcgcgtgtgttcataacctcactgtatgtcgtgaatcgttatcatgtaaaatctctagctttttgtgtg

SEQ ID NO: 47191 - DNA, 1210 bp, Setaria italica
  Peptide Sequence Number=SeqID_113165
cagactctcgcttccctccaaaatggcacccacatccgtggttcaccaccctccaacaacctccttccctttcccccccggcgccggagggcacagccgccgcctcccccaatggggcccacctgcatcccctgcaccgtttcccccagttgcgacgcatgtggtgccgcgccggctcctccttccagtggctgccggcatttgggacttcgtctccggcggagcgggtggtgccgccgcggcgtccctcgccgtccggcgaggtatgcagctcttccgccagggagatgtggagggttcattggcagaattcgacaaggcaatcgagatggatccacggcagaagaaatatctttggcaaaggggtttgtcgttgtactacctcgataggtttgaagaaggtgcagagcagttcaggctaggcgttgcagctaatccgaacgacaccgaagagtccatatggtgctttctgtgtgaggctcagctatacggaatcgaggaagcaaggaaacgatacttggaggttggtttggactcaagacctgtaatgcgtgaagcatatacgatgtttaaagatggtggagatcctgaaaagttagtcgcaaacttttcaagtggctctggtggtgacgtcttctattcttcattatatgctggactttacaatgaatctcagaaaaatgcagataaggcaaaatttcacattgttgcagcgtgcaagtcgccatatggatcaaggtctggtgattacatggcctcacttgcatttgtccactgtcagtgtcgcaactgggatctagagtgagaaatcattatgtctgaagcgtatgcggaaattttggttggagccagccagtaaattgtaacatgggtatttttttcccatgacacggaccgcaaagatacttgcagacggattctcgtgtttataccctcagcaattactagaagggaccctgatcaagaaccgatcggtatttaggtcctgtttgggaggacttctcctcccaaaacggttccggcttttagggaacatttggggaatattccttatgatagcaaaaatgtctcctttaaatgaatcagaagttggtgaaaccactttgcacactggagaaggcgggagcccttccaaaggggctcttagtcttcttcttgtgaacacgatggattatttgtaactaaaaaaaaaaaaaaactaaaaaagaga

SEQ ID NO: 47192 - DNA, 432 bp, Setaria italica
  Peptide Sequence Number=SeqID_113166
acgcgtgcaaatacaaaggcatagatagtgaacagcaaacagttcctgtactcaagaaaggaatcccatggagttaacctaccaacttgagagttaaaatgactaccaagagttaacctactgtaacagaaaaattcactactgtgacagaaaaaatcacttgtggcaaccatcaagcagttctcatttctcaaaactactaattctcatggatatatgctaattatcgccgacagctacagaatacagagtgtagggcataaagaactagatccatatctagaatgacgaaaatcgtgtgcagaagacatatcagttggtgcagacatcatggcgtactgctgacgtaaaaatgttactaaaaagtaacccctgtatactaattacttacatttcgtctagtttccatattgtaaaatttctagtagctga

SEQ ID NO: 47193 - DNA, 406 bp, Setaria italica
  Peptide Sequence Number=SeqID_113167
acctacaatacaacaaaaattgcttctcctcaggtacaactgtcacagctggtgtcgaaagatgcgggtcattgcctgagttcaatttggaccatttggaaacccaccacatttttagaattgatttttacacaaggccacttctcgaccatatgctttctagccgttgagctgtgcatcagtagatgttcttttcgatttgtgttttgacttcttctctttcttcttatgctcatcatgcgagcttcgatcccaacaatgtttcagcttgcggtcaacatacctcatatccttaacagtaggtattttaagctggtcaacctgcaaagatgcacaaacaatacaaagagaatgacaaaggtacaatagctatcaaaatgaatacatggaatgtaacaaagcatag

SEQ ID NO: 47194 - DNA, 1142 bp, Setaria italica
  Peptide Sequence Number=SeqID_113168
tttttggcataaattcaattcagattcaaaatcacacgttagttcaagatgattcacaaccacaggcagattatcttggatttcagtgttcagactcaacaattgctacagccacaagaagaaactcaagttataatggctgcataccattttcagttctccattcatggcaatagaatgtccaatgctacacctcttggtttgtatctttgctgcaactctccctttacagcaaggaataagttatgcatatcgcctcatcacaaaattgcttctcctcaggtacaactgtcacagctggtgtcgaaagatgcgggtcattgcctgagttcaatttggaccatttggaaacccaccacatttttagaattgatttttacacaaggccacttctcgaccatatgctttctagccgttgagctgtgcatcagtagatgttcttttcgatttgtgttttgacttcttctctttcttcttatgctcatcatgcgagcttcgatcccaacaatgtttcagcttgcggtcaacatacctcatatccttaacagtaggtattttaagctggtcaaccaagtaatggattgcattgattgattgaacaaactgttcgactgtacaatcagaatgttgccttgagaagatagtttccaagtatctttcaaaatcgaagaccctgagaatatcattggacttgtgcaaagcagccagtgccaactgccctggagtatagagaagaggagcatcggtcaacatcattttgtcagcatgggacatcgcggtttgatgcaactccttcaaacgctgtactgcaccattacctaccctgcagaaaccctccaggtcatcaataaatccttcaatagatcgatatggcgcataaacaatgagatcaaaatctaaagtcttaagaaggaccatctcattatttagaatgatctggtggtcctgctgaattcctttaccaagctcctcagcagaaacatggttttcttccactttgcaagaagcgtatacacatgttaacataatatgctttgggtgatgctccataacagaccactgtagatagaatctcttgaaatatattatagctgtagcctggaattttagtagaagggaaatttagaaatagactaacaaca

SEQ ID NO: 47195 - DNA, 795 bp, Setaria italica
  Peptide Sequence Number=SeqID_113169
ggcccgcgcggaatctgattcctctgcttttgcggggcggaaaacgaagtgaaagcgaggcggctgtgtgctgtctcacggcggcggcggcggcggcggcggcggttcgggcacccgactcccggatggccggcgtgggaggcagcgggagcggcggcgttgtgcacgacgtggaggctctggagggcgtgcgctccatcgtgctgaagccgtcggagtcgctggacgactcccggttcacgaggatcgccggcgccgatttcaacgaccccgggctcggcctcgaggggctgctcgggtcgttcgcgtccacgggcttccaggcgtccaacctcggcgacgccatcgacgtcgtcaaccagatgttagattggaggttgtcgcatgagaagcctggcgaagattgtgatgaagctgaacttgaccctaaatacagagaatctgtgaagtgcaagatatttctgggcttcacttcaaaccttgtgtcttctggcatccgggatatagtccgatttctagctcagcatcgtatggtggatgttattgtcacaactgctgggggtatagaggaggatctcattaaatgccttgcaccaacttacagaggtgatttttctttacctggagcactactgcggtcaaaagggttgaaccggataggaaatctgttggtgcccaatgataactattgtaagtttgagaactggatcatgccactatttgaccagatgctactagaacaatctactgagaatatttggacaccgtcaaaggtgatagctcgtcttggcaaag

SEQ ID NO: 47196 - DNA, 448 bp, Setaria italica
  Peptide Sequence Number=SeqID_113170
tctttcagtcttcagtcttcactcgggaagaggcgagggagtggggtgcggggagggaagaccaatcggcgctgatggaggcggcggcggcggcggcggggacgccggagagggagacgtcggcggagtggggcgatggcgtggtggcgctgggtttccgggtgaaggcatcctctcgcgagtcgccgtcgcagaaggcggggaacgtgctggaggccgacctgcgctcccactggtccaccgccaccaacaccaaggaatggatcctccttgagctccaggagccgtgcctcctctcccacgtccgcatctacaacaagtccgtcctcgaatgggagctcaccgccggtctgcgctacaagcccgatgccttcgtcaaggtgcgcccgcgctgcgagtcccccaagcgcgacgtggtctacgccgccaaccacaccccttgccgcta

SEQ ID NO: 47197 - DNA, 326 bp, Setaria italica
  misc_feature (180)..(180): n is a, c, g, or t
  misc_feature (192)..(192): n is a, c, g, or t
  Peptide Sequence Number=SeqID_113171
tgtcccacacatgactacctctttgaccggacgtgcacctccgccctctccctcctcgagttggtcggcaccactacctccgtccagcgacaagcaatgtagaacaagagatgttcagtgccatcgatgcaaggggtttggacacgtgcagcgtgactgtcctagcaagcgtgttttggnggtcaaaaaagntggtgggtattcctctgctagtaattttgatgaagatacactcgctttgcttgctgctgaccatgcaggtagtgaggaacaaccagtgtagcggattggtgcagaggatgcagatcattatgagagccttattg

SEQ ID NO: 47198 - DNA, 440 bp, Setaria italica
  Peptide Sequence Number=SeqID_113172
cgctctctcccaaggggctcagctacgaagtggcggcgctgatggcggtgaagagccggctgcgggacgagaagggggtcatggcgctgtgggacatcaactccgtcgacccctgcacctggtccatggtcgcctgctcccccgacaagttcgtcgtctcgctccagatggccaacaacggcttgtccgggacgctgtcgccgagcatcgggaacctcagccacctgcagacaatgtcactacaaaacaacaaaatatcaggtgatattcctccagagatagggaagctgaccaatctgaatgctcttgacctttctagcaacgagtttgttggtgatatcccaagttctttgggcagttgactcgactaaattatctgcgccttgataggaataacttgtctgggcagatcctgtagatgttgcaaagcttgcaggcct

SEQ ID NO: 47199 - DNA, 967 bp, Setaria italica
  Peptide Sequence Number=SeqID_113173
gttgttactagcatttgggtttcttctacttgttagtgtactttcagtaatcacagttttctttattcaacataagagaaaacctagagacacaactgccaggagtgccagagatatattgtcagtctggacttttgacggaagattaacattcaaagacatcattattgccactgacagttttgatgagaaatattgtgttggatctggaggtcaaagcacaattagagggtggaagtgtgtttgccataaagaagatacactcgaatggagaaatgacagatgatgcaacatttcaccatgaaattgaagtactaatgaagataaagcaccgcaacatcgtcaaactgtatggcttttgttcacatagacaattcaaatttttagtttatgattacattgagagaggaagtctgactactatcctatgtcatgatgagctagcaaatgagtttcactggaaaaaggagagtatccctccttaatgatgtagctcgggctttatattatttgcatcatgagtgtaatccacccataattcatcgggacattacgagtggtaacatcttgttggatactgagtataaggcctttgtatcagattttggtacagctagaatcataaagccagattcatcgaattggagcgaacttgctggaagcttcggttacatcgcacctgagctcctacaaacctgtggctacagaaaaatgtgatgtgtacagctttggtgtggtaacaatggagggatgatggggaagcacccaggtgatcttataggccgcctaacctcacttgaagaactggatggtttgcttgaggacatcattgacaaacaccctgcgacaccgacaagcaacaaagaacaagatattattcagctaattattattgccaaacgttgtgtgcaagcttcaccagaagacgcaccaacaatgcagcagtaaacaccctgcgacaccgaca

SEQ ID NO: 47200 - DNA, 288 bp, Setaria italica
  Peptide Sequence Number=SeqID_113174
gccgtacgtgatccacgggcactacgcggacgcggcggaggcggcggcgcacctggcgagcgcgctgaacgtgccgatggtgatgacgggccactcgctggggcggaacaagctggagcagctgctcaagctggggcgcatgacgccggccgagatccagggcacctaccggatcgcgcggcgggtggaggcggaggagaccgggctcgacgccgccgaggtagtggtcaccagcaccaagcaggaggtcgaggagcagtggggcctctacgacggcttcgacgtcag

SEQ ID NO: 47201 - DNA, 327 bp, Setaria italica
  Peptide Sequence Number=SeqID_113175
gttccgaatcttactgataatgcaataaaactatgcactgagactagccttaatgcatcaatcttaattattacatgtagtagaactgaatttaactgaagaattgtatgcagaagatgtaagtattccgatattagagtttgcgagaacaggctagcgtacatgtctatccgtggatgcgtgcatatatgttcacgtgcaatcattctgttatactactaagtccgtatcaaaaatataatgtttagaataaatttataattaatttgttttaaactaattagtttatcatgaacgccgtatatttagaaacggggagagttctat

SEQ ID NO: 47202 - DNA, 462 bp, Setaria italica
  Peptide Sequence Number=SeqID_113176
cttcatatggttatatgttcacattccgatacggatagtttaacaaacaaaaaaaatacatcgttatttccattttggggtagtatccagtttcctcagtgcaagatacacacataattgaacaaatggttatacaatccattgtctacccttctctggtaaagaagaagttttcaatttcactctaaagcaggtagagttgcctagagaacacgatctatgaaaactgaaaagaaaggcctaataagagtttagatcaatatacaccaggttatatgtttgcaacccagggtcttgcaggctaatgctaatccgtattttaatatccattacaggggagtgtgaaaaacatatcaatgatcacaactacaatgttaaccatatgtgactactgaaaatcacaacttttgcaagaatattgcacctccccacagctccactgtcccctgaatcataatccat

SEQ ID NO: 47203 - DNA, 436 bp, Setaria italica
  Peptide Sequence Number=SeqID_113177
ttaactatctcatcatccccttaacgagataggcagagtttatgccaatgaacaggctacaagatctgacgcctgctccatccatgacggtgccgatcgagcattcctctaggccgacgctggggtttcccctggggactgcgctgttgctccttgtgatcttctccctgagtggcatgttctcgtgttgctaccactgggacaagctccgctccctcctccggtctcggcatcctgccatgttccaagagggcgagcatacggtgatctccatcacgtcatcaccgagcaaggaaactcctgatcacaagctggagaaagtggggaaggagtgtggtttgcctgttattatgcctggggacaaggtccccaaattcttcgcgaggccgtgcccacacgagatgtgttgcctgagcagagaagactgaagttccgt

SEQ ID NO: 47204 - DNA, 762 bp, Setaria italica
  Peptide Sequence Number=SeqID_113178
gcaggcggaggaagcaagcagccaccactataaatatatcctgcaggctcaggtgagcacggaacccctgagcatggtcttcttgtaataccgcgagtggatcggtttgtacagggaaggatggtggttggcgcccaggtcccactccagcttctcccaccattccttctcgcagtcgcactccaccttcttgctcccgccgctgctgacggccggcaggcgcttgaggctccagcagcccctgatcttgacggtctcaagcatgggagcagagatcatccagcgcccgcagatgccctgtagcttgggcagctcgtgcaggtggatgtgcttcagattccgtaatttcaccgtatttattgattgctcctcatgttggtgactcccaccagcatcggtgtacaaggggaagacaacctcgagattcccacaccacacaatctcgagggtcactaggctgcgtaaactgctttcgaccattggcatggccaaggggagcacatgtattattctggggcacaagtctaggtgcagtatctcaagatcctcaaatgatccactcccaatgtcgaatgccaatgttctgctccaattccagatgtagcgtgctttagggagctgtgatgcccagaatgtcctcaggtggaaaaagatgagctcgtcaccgcttccttctaattgaggagtggtaaatacacatcccaacttggggcaccgctcgactcggcaccaaactagaagataccataatgaacagaaaca

SEQ ID NO: 47205 - DNA, 649 bp, Setaria italica
  Peptide Sequence Number=SeqID_113179
gaaaaagtgttcaaattgcattaggaagctcttatttggttagggaaaaaaatctaaatgaaaaacgtgccagagaacaaaaactgctaaccaacactcgaaaatgacacccagggaattaatgttctagaccttgttcgaaaatgtaccgaactgaataaatgtgtcatctcatatgcgtcatgtgcgtgaaaaagctaaaaggacagccatatatttcggtgttaatttgtgcgtataacagcaaagcgtatcgtactcgaggatatccatacaccctgactcgtagcatgacaaggccatctgtctttcttgcaagccacatggcacgccgtatcgcttcgacatgtcgcttgtgtgccacctgctacacatacgtatttccatattgtacttaaggatatcggccatgcatgcatgatgttttactgcatatcaagtcagttaagcattgtggtcttaaggaaaaagctcataaaaactctatccgttctaaatttagattattttgacttttctaagtttatagatattattattatgtatctagattgtatttccacataaaaaactatacatctaaaaatatcaaaacgacctgcaatttaaaacggagggagtaggaatggacactcaccaaatggcatgt

SEQ ID NO: 47206 - DNA, 478 bp, Setaria italica
  Peptide Sequence Number=SeqID_113180
gtggagatagaaatgaaattgatgatattgttgtttgttgcgctccgccagtgttgcttaaggcccgttcgttttggcccctgtgattgagtttgaactgtactatccacatggcagaagtaagaggtagttgaaaccggtaaaatctagtaccttattgcacgatagtagattgagttggtcctgttttctattcgtgcgctagtcagtaactcacatctggtctggggaggtactggtggtgattagtactcgagggtcgcaggagttctcaaatgctatcgctctttaagggaaccgtttgccatatgcagttcgacggggtatgaataaatcgtgtgtctaggtccaccttacaatgttataaatcgaatcgattcgccaccgctctcggttaagagaacctcgatcgctgagtcacatcgtagtaagaagtggaatggaatgaaatgtgaatgatgatgcagttattgtttaa

SEQ ID NO: 47207 - DNA, 584 bp, Setaria italica
  Peptide Sequence Number=SeqID_113181
cagagtctttgaggtctccttggctgatctccagaggcaagactttggtgtccaggacccagggtaccaagattgcctctgaaggactaaagcacagagtctttgaggtctccttggctgatctccagagcgatgaggatcaggcgtacaggaagattagacttcgtgcagaagatgtgcaaggaaagaacgtgctcacaaacttttggggcatggattttaccactgacaagctgaggtcactggtgaagaagtggcagaccctcattgaggctcatgttgatgtcaagacaacggacaactacatgctcaggcttttctgcattggtttcaccaaaagcgccccaatcaagtaaagcgcacttgctatgcgcaggcgagccagatccgtcagatccggcgtaagatggtggagatcatgacaaaccaagcctcaacatgtgacctgaaagagcttgtatccaagttcatccctgaagtcattggcaaggaggtcgagaaggctacatcaagcatccttccccctccagaacgttctttatccggaaggtgaagatcctgaaagcgccaaagttcgacctggg

SEQ ID NO: 47208 - DNA, 543 bp, Setaria italica
  Peptide Sequence Number=SeqID_113182
aggtggcactcctctgagaccacaaggctggagatgcgcgagaagggcatgcgcaagatcccagcacggagctggacgttcaacgacaacactgtccactcgttcttcgcacgggacagatcacacccgcagtccaaggacatctacgcgggcctggacgtgctgatcctcgagtgcatcaaggccgggtacgagccggacaccaccttcgtcctccacgacgtcgaggagtaccagaagcggcacttcctgatgtaccacagcgcgaagctggcggccatgtacggcatcctgacggcaggcaccgggcgggccgtccgcgtcgtgaagaacatccgcatgtgcggcgactgccactctttcctggagcacgcctccgccgccaccggtaaggtgatctcggtcagagactcgtcagggttccacattttcaggggagggaagtgtacctgcagagaatagagacagccgggccattttttttgactatggttgcagtttaggagatatagaagatatatccttgcactgaggtcttgtaca

SEQ ID NO: 47209 - DNA, 391 bp, Setaria italica
  Peptide Sequence Number=SeqID_113183
aaaaagccctggtcaatcatcacagttggggtccggggggaaaagaggtggcaccatatgttcgtattccaggacggagagcatcttccttttgtttatctctggcagctagcaggctggctagcaattctaatcagaaattgttacttctccagtccaacaagaagcacgttgcaggctctgaatgtgtccgcaaattggttaagaattgggcttcccataattgcaaagataatcgcacaggtacaagtgtaatgatttgtctgattgactgtcgctagcgtcaatggaggcactgatcatagcgagggtgaactcatgcctgtgatttttttcatgaagctttgaatacaaaaagggtccagtgcaggagacaaatttcttggagcat

SEQ ID NO: 47210 - DNA, 1100 bp, Setaria italica
  Peptide Sequence Number=SeqID_113184
atctgaaatccttacccaattatatctcagttctcccatgggactattacaaccaaatacatctagcagactagcacaaggcgataattgagaaaacgcatgtatgtcagggaaaatgggtttaccagtggcaaatcataaaattctgagtaaccagtggtaaataaggaatttggaattttcttgttaggaatctaaaactccctagactatgcaaggcccagtatcttgccaaacactatcatcagataaggtttaccttgcacacaaagtacagttgtacttagtagcaaattgtaaaatggggattagtaacatcatcaaagctgctatgaacatggagttctcgttccaacaaaaccaaaacccattatgacgtatgcaaaggcctggaggtagatgtaaagatagtatttatggcttcctacgaccaagtcgtatgaggcacatattaggaggtagaatgcaagcaagagctcaggaatgtaaatcctctcaacgcattcggttggcttcactggttcaaggagtggaacatcaagatcatccttcgccagatctcctaccttctcagtgactacccagtcatttgcatgtgcagtctccagcaaaccagttagagcagcacgcatgcggtgcatggacatgacattctcgaacagaatccagaagggcatcagatggagagacccaggatttctgatggcattcatacatgtaatggcagtaggaatatagaccagcccccatacaggaatgcttacaccaggaacaatggcagacaaagggatcacaacgcaataaaacaagaatgtcacgaggggagcgataacccttcgcacaaagaaaaagctgtacaacagatgatgtttcttccatattgacacctccttgttggtaacgacttcccatgccattttcctgaagagattggcagcaccacaagtccacctatgctgttgatgtcggtaggcttgaaaggtacttggaagttcacttttaaccctaatatcaccaacatacaagaactcaaatcccttgaggcttgcccgtacagccaagtccatgtcttctacagtggtgcgatctttccacccccc

SEQ ID NO: 47211 - DNA, 792 bp, Setaria italica
  Peptide Sequence Number=SeqID_113185
ctgcgcttggttgtgtgttcaaattagttgagattacaaacagcctcgcattaaactctctgaagatgtcacaaaggtatcgataccatgtaagaaaaaatgctacagattgtatggcaaagaaggatatccgttggttgatataatgaccggagaagatgagccaggtccaaagattggcgaaaggctgctgtgtcgtcaccctttcatcgaatcaaagagagcttacgttgttccacagcatgtcgaggaattattgaggtgctactggcctggaaattcatgtatgaaatcccaccatagtaacttctgcatagtgttcattgccttaccttatctgtccgtgtgccaattgcttcaatccgtcatgtaccgtgcttacattgcttcgatccgtcatgtactgtgccaattgcctttcatgaagcatattcacatacactgacgcattttaggactacatctaattcattcagatactgaaagtgatgacgaagtgcctaaaactatgagtgaatgcatttgctaattccggatttctgccaatagctatagtgccctgctagtgcttatcataaaagtagctgtaggaattatcgtttgcatcagctgaatatgtgctgtggtttcagtttaaatttttagatggatcaaatcgctttaagtatttaagctgggaggcactgatgtcaaaatgtgctgtgttgtcattggtgaagccacttcacgtcaggagcttccatccctacatgagactaggagtcggtgcattcagcatctggagcgaatgag

SEQ ID NO: 47212 - DNA, 2034 bp, Setaria italica
  Peptide Sequence Number=SeqID_113186
acccacccactcaggagtcagtctctcgatcacccgagcacgcgcgcggcgccccactcagagaaaaaccatggcggaggcagcggcgaacggggacgcgcgccgcggcggggtgccgcggccgacgaaccccatggtcacgccgctgctcaccgacctctaccagttcaccatggcctacgcctactggaaggccggcaagcacctcgaccgcgcagtctttgatctttacttccggaaaaatccatttggcggcgagttcaccatcttcggtggccttgaggagtgtataagattcattgctaacttcaagttcacggaggaggaaatcaaatttctgcgatctgtcatgcctacatgtgaggatggcttctttgagtacctcagttcaattgactgctcagatgtggaggtttatgccatccctgagggttatgttgtgttccctaaagttccacttatgagaatcgaaggacctgttgctgttatccagcttcttgaaactccatttctaagtcttgtcaactatgcctctctggttaccacaaatgcggcaaggcaccgacttgtagcaggaaagtcaaagaatttactggaatttggacttcgacgggctcaaggtcctgatggaggaatcagtgcatcaagatattcttatatgggaggctttgatgcaacaagcaatgttgcagcaggaagattgtttggtataccaatacgtgggactcattcacatgcatttgtgagctccttcatgggtcttgatgaaatcaccgacaaagcacttaccagttctgatggttcaagcaaatgtgaagattttgtttctctggtgcagaactggctgatcaagattcaggattctagttcattgcgtggtacctttggagaaacaagtcaaagtgagttggctgcattcacgtcatatgctttggcatttccaaattccttcctggccttggttgacacatatgatgtcatgagaagtggagtgccaaacttctgtgctgttgctttagccctcaatgatatggggtataaggcggtcggaattaggttagactctggtgatctagcatacctatctgttgagacccgcaagttcttccatgtaattgaaaaagattttggggttgttggctttggaaaaatgaatattacagcaagcaatgatcttaatgaagaaactatagatgctctaaacaagcagggccacgaggtagatgcatttggtattggcacctacctggttacatgctatgcacaagctgcgcttggttgtgtgttcaaattagttgagattaacaaacagcctcgcattaaactctctgaagatgtcacaaaggtatcgataccatgtaagaaaaaatgctacagattgtatggcaaagaaggatatccgttggttgatataatgaccggagaagatgagccaggtccaaagattggcgaaaggctgctgtgtcgtcaccctttcatcgaatcaaagagagcttacgttgttccacagcatgtcgaggaattattgaggtgctactggcctggaaattcatccacttcacgtcaggagcttccatccctacatgagactaggagtcggtgcattcagcatctggagcgaatgaggccagaccatatgaggcggctgaacccaactccttacaaggtaagcgtgagtgctaagctgtatgacttcatccacttcttgtggctcaacgaagctcccgttggagaactgcaatgaagcaatgaggcggcgagagcgtcggcgcccaaggctaacagtaataagctgatcccaataagctgttgtcgcgggataaatttctgcggatgtttttaccatacccgtgtttcagtaaaatttgaggcaaaaatatcataagcgaactgttacgcaccaggaattaagaggataaccatactgttatgttatgtatgactgtatatgccggataaaacatcttggctaattaaatacgatgagaagcaatgcgtggatttggtgggcatttaggtaggaacaaaaaaaaa

SEQ ID NO: 47213 - DNA, 535 bp, Setaria italica
  Peptide Sequence Number=SeqID_113187
atccagcgcgaggccttcatggcgctgaagccggacctcttcgagggcatgcgattcgatttcaccaagatgatcagcccgtacttcgcattgagccacagtgtggccatgggatccattgatgtcccggcacaggggaacgaggtgatcaagatccccacctccaactatgagtttggtgccaacttcatcaatcctaggatgatgctcatggggagggtctcgcatgaagggagggagaacattcgtgtcaaatatgacataacggacaacctcgctgtaaagataaatgctcagttgacaagtgagccccattactcccagggcatgtttaattttgattataagggcaaagattttagaactcagattcaaattgggaacaatgccttctatggagcaaactacatccaaagtgtcacaaagaacctttccttgggaactgaagccttttggcttggtcagcagaggaaatctggagttggtgttgttgctcgctatgacacaaagaaatgggtcgcaactgggcaaattg

SEQ ID NO: 47214 - DNA, 1028 bp, Setaria italica
  misc_feature (987)..(1028): n is a, c, g, or t
  Peptide Sequence Number=SeqID_113188
aaggaaatttcatggaatctgtcgaatacaaagaagttaatttcttattagagtagctaacatgcttgttttatctttttcatgattaagacacgatattgaatcattgtttatttcttatgcatgaactcagattcaaattgggaacaatgccttctatggagcaaactacatccaaagtgtcacaaagaacctttccttgggaactgaagccttttggcttggtcagcagaggaaatctggagttggtgttgttgctcgctatgacacaaagaaatgggtcgcaactgggcaaattgcaaccactggaatggttgctcttagttatgttcagaaagtatctgaaaaggtttcccttgcatctgatttcatgtacaatcaaatgtcaaaggatgtaacagcaacttttggttacgattatatactgagacagtgtcgattgagggggaagctggataccaatggtgtgatttctgctcttctggaggaacgattgactccaggcgttacttttcaattgtctgctgagattggccattggaagaaagactacaagtttgggttcggtatggctgtcggagagtaagactcgagcagttcatcgaggacacatgtacaattatagttgttggcattcgtcgacagggattaagacgattctagttttgttgcatttatttgtctccagctcttcgtttagcggctatggccggatggccatggacagaggcacctttcgaagttttgatttcactgggctcttgagtagattgatgtaactatgcgcctgtgttaaactagaacaggggaagcctgaatagatgtcactcctacctgagtagactgcttttatggcgttaggattctcgctgttgaatgcttagatcctaggacagtgatttcgaacttcatttccttgatgcaaggtcttagtccatggattgacaccatggaggtatggaccctttattatatatatttgcaccnnnnnnnnnnnnnnnnnnnnnnnnnnnnnnnnnnnnnnnnnn

SEQ ID NO: 47215 - DNA, 887 bp, Setaria italica
  Peptide Sequence Number=SeqID_113189
ccgtgctctaccggttcgcgcacggcggctacatcccggtggccatgtcggcggcgctcatggcggtgatggtgctgtggcactacgtgcacgtgcggcgctacgagcacgagctggagcgcacggtgtcgcacgagagcgtgcgggagctgctggcgcggcgcgacgtggtgcgcgtggccggggtggggctcttctacacggagctggtgcagggcatcccccccgtgttcccgcacctcgtccacaagatcccctccatccacgccgtcctcctcttcgtctccgtcaagcacctccccgtgccgcacgtcgacgccgccgagcgcttcctcttccggcaggttgccgatcatcatgctgactccggctccgacaccaacagcaccagccggagccgggtgttccggtgcgtggcgcgctacggctaccgggacccgctggaggaggccagggacttcgccgccagccttgtggagcgcctccagtactacgtccgcgacgtcaacctctacggcgtcgaccacctgcagccgggagccaaggtcagctacccgacctcgcgatgcgacagcatggcgacgtccatgaggcgccagaggtccgtcaacatgatgatgatgcggccgtcggcgtcgtacacggagagcctggccctggcgcgggccaggtcgacgtcgtcggggacgatgatgatgttggcgcactcggcgtcctgcaacaacagcaacatcaggcccaccaccaccacgacgggcggttcgcggaggagatgctgacgccggcggagtccttctcggagctgtcgaggatggggagcgccgccggaggatgatgaaggtgagcctggaggaaatggcgcgcatcgaggaggagcagcgcttcat

SEQ ID NO: 47216 - DNA, 470 bp, Setaria italica
  Peptide Sequence Number=SeqID_113190
ttttgattgacttgagatatggggactgtggtggatgcaaggttctagcaagagttgggatgccaggactgtttgaaaccgacccttttgctgggccggatcagtatcttgcattctgcagggctgggtttgatcatttccatttctcagtggtgacagagcgttatttgattctccttgatgcgagacagccattgacacctgttttggcatggcagcatgagcttgagagccctaataatgttgctatgtttcgtctttctgaattgaggccttctaaggaacatgagtgggcatcaaattcaggctttgctattttagttggttcgttgtggacaggggaattcagtgtgttctgttatggacctaaggagcaaggctgtccagagaattctcacatgtatgcttgggatcttccttctacggttttctctgacaagtcagcactgcagctgcagcaatggaatagg

SEQ ID NO: 47217 - DNA, 571 bp, Setaria italica
  Peptide Sequence Number=SeqID_113191
gttcgccgccttcttgaggctacccgcgcgcatgtccaagcagcagaagcgcgacagggtcgacgccatcatcgccgagctgaatctagagaggtgccggcacaccaagatcggcggggcgttcgtgcggggggtgtcgggcggcgagcggaagaggacgagcatcgggtacgagatcctggtggacccttcgcttctcctcctcgacgagcccacctccggcctcgactccacgtcggcgagcaagctcatcctcgtcctccagcgcctcgccaggtcgcgcagggcgatcatcacgacgatccaccagccgtcgagccggatgttccacatgttcgacaagctgctgctcatctccgacggccacgccatctaccacggcaaggcccgggactgcatgccccacttcgcctccctgggcttcgcaccggagatccccatgaaccccgccgagttcctcctcgacctcgccaccggcaacctcgacgacatcaccgtccccgaggcgctgcaaggctcgccggacccccagctggaggtggcggatgacctgggagcggaagaactcctt

SEQ ID NO: 47218 - DNA, 448 bp, Setaria italica
  Peptide Sequence Number=SeqID_113192
tcgttcgtaacgtctgagatgcaggccgttgttgccgtggtggtggcgctcctcgccggccaccccgagacggcaccacgaccccgaaggcagtagctttccagtgcggaggtggcactggctctctggcctggcgtagcatgtgaactggtggcactggcttgagacgggcacggagagacagttggtggtggtggttgccgattggaggaggagaagaattgggctgctgatcagtggggagaggaggtgagctgctagttgcttctgccgtggatgggaaaaggaaccagcgtgcttgctgttttgcgtgagatggcaagcaggtggagataggtagctggaggtccggttcttggaagctgctcgagatcgctcggaggatcgaatctgctacttggcggtggaagaggaagaacgagaggaatcgagtgggcttcgtgctagc

SEQ ID NO: 47219 - DNA, 446 bp, Setaria italica
  Peptide Sequence Number=SeqID_113193
ccaaagtgtgaagggaccaaacacataggcaccacaagcatgaagggcatcgccctcctcgttgctcttgcggctgtgctcgcatcgtactgcggcgcctcatcgcctcaccatgccttcccgtcggcagaagcaccggctctggcaccctatgccgagacgccagtgacggcgcaccttggatccaagcatgggaagcctcaccaccatgggttggcgccggtggaaccaccgtcgtaccacggctcacctcaccacaagcaccatggtcatcatggccaccgccaccaccatgaccatggagctccgccaaacccttcccctgctcaccaccctccaccccctcatcatcgcacgccaccgcctcatttttcacctcccgctcatcaccatgcaccaccaccaccagctcaccacgcaccgccgcctcattttccaacaccgcc

SEQ ID NO: 47220 - DNA, 671 bp, Setaria italica
  Peptide Sequence Number=SeqID_113194
gcctcggacttctggctcccggtcatgggctcctttgagaaggtactcacgtttctcaggctgaaatgcaacatcctcggaagtgacatcgagaaggtgatcaagcccaacatggccctcctccagcagtacggaatacatgtgggtaatttccccaattcattcctgcccgtggtgatgaccaggccccctgagcacgtccaggccgccatgacgcgcatcagtaaatttgggttcaggcaggactcagggatgttcgccatagcgcttgaggtgtttgcaatccacagccaggagaagattgatgagaaaatcaggacccttgaaatgtttggctggtctcaggacgatgtgctgatgactgtgaggaagatgccacatttactgaacatgtcgaaggaaaggttacagaggaatttggaattcttggccagggatgttgggctggagataccgtacattgctcaaaggccagtgctggttatgtatagccttgaccgccggttggtaccgcgccatcatttgatcaagattctcaatgcaaagggattgcttagtgataagtttgacttatattctgcatttgccctctctgagaagaagttcctggacaggttcatccatccttacgagcatatggttccaggccttgctggtgcttacgcttctag

SEQ ID NO: 47221 - DNA, 487 bp, Setaria italica
  Peptide Sequence Number=SeqID_113195
ttgttaaccttcgtagttccagagtcggcttgtgtcgaaaccgctgtcgaagccgaccttatagtagcccatccccttgggtatcgccgtctggcagcagcccatgccagagcagaagccatccactaagtctgacggatcgctgcatgtcgaaacgcacccactctggtagcccgtgccgttgatgtcggagatgtaggcaagggtgttgcatcctatgacagtgaacttgttgtggacgtctgagaaccgataggaagaactacttccgttgagagtccatgaactacctccatgtgaccggaagagtggttgtagcagtatgttgagatatggttgagcacccggattgtgctatgaatcaaggaaatgttcagcagctccagattaccaatgaatggcttgtagacgctaccttgagccaggcagctgacgttaaaacctggtgatgagcagttgtcaccgatgccgaacgggtactgaattc

SEQ ID NO: 47222 - DNA, 222 bp, Setaria italica
  Peptide Sequence Number=SeqID_113196
aaacgcttgcagtacagtaatctgacgtatgattacacaccaaacaccaagcaaagcgatggccagtcgccctcagccgcatcgatcgtccggttgagcaccgacgccgttaactgagcgcaactggtaggttacacattagaagacagcgctgtcagcagggaagtcgtcgaagctccacaggctgacgccgtccatgccgttgttcacgccgttcacgtc

SEQ ID NO: 47223 - DNA, 957 bp, Setaria italica
  Peptide Sequence Number=SeqID_113197
tttttttgcatgtagaaccaggttcacaaagtttatttggcataacaatcacaaccgtacaatatagacgaccattgccgacatgatcgaattcataggactattgaccaacagtagtgcaaagcacccaaacgagtagtacaaatattcatagtagagagtacaggtttgatcaggaggccggcagtacagatacaggttctagcaagcaaacgcttgcagtacagtaatctgacgtatgattacacaccaaacaccaagcaaagcgatggccagtcgccctcagccgcatcgatcgtccggttgagcaccgacgccgttcctgaaccaagaaccagatcctgacaaagggtgatcgtgatccagtagtagacgaacacaaggaacagaagccatggctatggattcaattcaggtgcttacaactgagcgcaactggtaggttacacattagaagacagcgctgtcagcagggaagtcgtcgaagctccacaggctgacgccgtccatgccgttgttcacgccgttcacgtcctgggcggcgtcgacggcgaacaggccgtcgagggactcgtacccgcccgagtagggcagctggagcagcgtgaacggatcgaacgccagctcgtcagcgagctccagcgtggagccaccgccggagctcatcccaccagacgactcgttgtcgtatctcggcttcttcgcggggctaccggactccggctcggtgctgccggtgaaggagctctccatggccagcggcgcggcggggaaggcggggaaggtcatgttgaagaaaccgtccacgtcgaacgacaccgtaatttcaggcttcacggcgatctcctcctgcttcttctctcctgcgagcaacgcgggctgctccgccgctgcagcatggtggtgctgcggtttcggcgcggctctcgggttgccgcggcggcgtgggcgcgcgcc

SEQ ID NO: 47224 - DNA, 527 bp, Setaria italica
  misc_feature (313)..(313): n is a, c, g, or t
  Peptide Sequence Number=SeqID_113198
caagtacaatgttgtcagaggtcaccagaaagatttatgcttcattattccccttgaaataataattccttcaatacggttcttatcccaccacatcaaggtggattcagcataaacttaaaagtgtcatgctgcctaaacaacaaaatccacaataagttgggaacaaaaacatcaccttgtatggatgaagaagacccatgcagatttgcaccctgcggcgctgtccatctgaaactttatgcatgcgccattgcagatcaatgtctagcagatcaaccagcttctctcgcctaacaggatcaaccccgtnaactgctcatatttcagggtagagaacaaatggaatgtttacatgtactctcaccggcatgatacgctaaaagattttctactagcagtaatgctgatttaatgcctatcttgtagcttaaggcattactaatctaggtacgattaaacaaaaaatagtggaagcagcatttatttaaacaaaaataccatgccagcaggaagctatctagaag

SEQ ID NO: 47225 - DNA, 475 bp, Setaria italica
  Peptide Sequence Number=SeqID_113199
aagagctttggttggtaagagaaagtgagggtgtgagatccacataattttccatttcacatatacttgttgttcgtgtttttgctaaccatacaagaagatgtccgaacaacccaaccttgaagattgtgtcactattgtacaatttaatgaaatgagggaaagcatggaggagagacaagatagtatttttcaatgatctgcaagccattatggaacacctgcgacatattcctcatgttcctgaaatgcaagtaaccatgaagatgaagttgaagaaaccgaagaagaagttgatgaacgagttgcaagagaacaacaagaacattgagcacaagctgctgtctatgctatgagacccgctggtccacaacgtggaaatggaggtggtcgtggtagaggaagaggtcgtggacatagaagaaatgaccatgctgaattgaaaatgagtacgaagaagaagaagttgaacagc

SEQ ID NO: 47226 - DNA, 413 bp, Setaria italica
  Peptide Sequence Number=SeqID_113200
aaagacgacttacaatacaagacaataggtcaaattggccatgcatcccatatccacatatcatggaattccaagaaacaagatctctgtgcacgagttgctcaaagacaacacgtgccaccctgaccaaaccgctcttggcatacatgtccagaagggaagttttcagcttgtcctgtaacccaaatcctctcctccaaccataccccatgaagctccctccctctgggcagggctgccgcatcagctgcagcagatattgcgctgaccagagtagcaatagtcggcccaatgccttctgccgccatgtcacggcacagagcaagcgcctccactggccgcccgttctgccccggatgccgcgatcatcgagttccacaccacggcactccctcacagcggtgccgtcgaac

SEQ ID NO: 47227 - DNA, 409 bp, Setaria italica
  Peptide Sequence Number=SeqID_113201
aggaacaaaatagtttactaacaatgggatgcaactgcaaacgcaacccagcgatctagctcagaagcatgggctgagtttaatgggaaatggaccttgaacatcttgattttattgccattatgatggctcaaaagttcattaactttatgcacaaactttgtagcttctgggttatagaaatttggatttccatgattatttgaatctgcttgcacttgcatcccaagagcatgtgggtcaaggatgagatggtcaacatattgcccagaggtgtctccatctggtggaaagacagtcagtcattgcagcctcccttacagtcattagcgaaagaatgctgaccaaaatgtcatcaggtagcgaactgattctatcaggagtctgcagaagaaatagaatcataggt

SEQ ID NO: 47228 - DNA, 670 bp, Setaria italica
  misc_feature (1)..(78): n is a, c, g, or t
  Peptide Sequence Number=SeqID_113202
nnnnnnnnnnnnnnnnnnnnnnnnnnnnnnnnnnnnnnnnnnnnnnnnnnnnnnnnnnnnnnnnnnnnnnnnnnnnnntttttttattctttgttttttttacgtgtccataaaatttattgtgccatcattcatatagaaattcaacggtaatatggaaaatacagcccgggcataaactttctcgtagcactattaagcaaattaggttactcccaggaactgtccgaagcacattatggcgcagaaagtaacggccacacaagagtaacatttatactagagataattcagctcttctgggcgctggcgccctccagttctttcctcagctgcagcgagaaatcatcgttaacatcatcgtcatcccagtcgtcctcccactgttggacggcttcattgccttcttccttgtcgtcccattcttggtcgatctcgaactcctcgaactcgtcgtcgtcctcgaggaggtccatcttggcggcctccgccttcgcgtccgccggcgccggtgccgtcgccatcaacgctgcgatctgattcgcgtgcggggagaggaggcggaaaccctagctggacctggaggcggctgtccgtcgggtgcgtctttgcgggctgctgccttggcgactcggtgcggtcggggttaaagcgatgggcggtggcgtcg

SEQ ID NO: 47229 - DNA, 243 bp, Setaria italica
  Peptide Sequence Number=SeqID_113203
aaccagtcgatcgaggtgtactctcctcgatgatctcaaggaatacttccggcttactatggtgtctcttggggctacgctcgagcagggagtgacgagatccccggcttcgtgttcctggcccacgtcgtcgatgtgatgtcgtccatgcactccagaatgtcgagcaggtaccgcgcctcgctgccgtaccgcaccaggcctttcctcgtgctgatgtggcccgtcgcgttcgtgttcatg

SEQ ID NO: 47230 - DNA, 463 bp, Setaria italica
  Peptide Sequence Number=SeqID_113204
tttatgggaacgcagtctccaacagggctttgctgtgaaagcttgtagccatgtgcctctataaaccctagaattcgcttcaaatgttgcacgtctgaggttacaagaagaagagttttggcccacctccttgcttcagcttcccatgcattcacgtcctcatcgtcaaacaaatttgaaccttgatcctgtttgctgtgcttcacgaatgtggtagggaaatcaagaagcttgctcaacaaagtgttaccaggagaacattctttcttctgaacaaaccattcctgaactatcactctcaatggtccaaaataatcagtgaactctcgaggtattgtagaaatgaaatgcagaagttggttaagagaggaacttcagcagcatttatcagcgatgttgcaactttgataacctgctcacaaactttcagacgatactttggattaaagtgctgtttactcct

SEQ ID NO: 47231 - DNA, 492 bp, Setaria italica
  Peptide Sequence Number=SeqID_113205
tcgaccgcgtgctgctcgccggcaagggcgacaagcaggggcccaggaagacgagggtgtaccacctcgccgtgagctcgaacggcgccgccgtcccggcgctgggcaacgccggcgccgccgagttcaggaagcagaacgcaacggggttcttcgaggtggaggtgaaggtcaccggcaagttcagctacacggggcgcctcaccaagtgcgacctggacgcgacctgcccgctcaagctgcagctcgcgccgccggggacgaaggccgtcgtgttccagaaggtcaagtgcaagctcgccaagcccaagaagtactgctaaatttgctgaattgcatcaacttcgttctttgttgctcttcgcgtttgcttgctcgtatctatgccatgcttggtagccttggtgctgattattcatcttgatcgatttgagatgtttatgtgtaatgcgtttcccgccgctacaagatgcatgtgaatggaaattttga

SEQ ID NO: 47232 - DNA, 280 bp, Setaria italica
  Peptide Sequence Number=SeqID_113206
cggcggcatcgcaaccgcgccgcgcgtctcgctcccgccacacacagccatgccgctcctccacctctcgctcccgccgcaccgcctcctcgtcgccggccgcggccggctgtgcttcccgccggctccccgtcatacccgcctctcattcagggcggcggctggggatgcagccgtgtcagtcgcagcggagacctacgggctccccttccctccggagcgcgcctcccaccaccacgagctcgccgcggccatcgccgccgtggagcgcgcctgcccg

SEQ ID NO: 47233 - DNA, 218 bp, Setaria italica
  misc_feature (201)..(201): n is a, c, g, or t
  Peptide Sequence Number=SeqID_113207
aatacgggtatcctagtacttgtcaatttactctctgttctccccagcaaccatgtttctcggttcttaatttgttgctcagcattgggataatctggtgttgtagctagaaatttttgacaaaaacaactattttgggtggttttgtggcttatctttggaatctactggtgctatagtgattgcctcttcttgcctttnttaatcagatgtgggaa

SEQ ID NO: 47234 - DNA, 490 bp, Setaria italica
  misc_feature (471)..(490): n is a, c, g, or t
  Peptide Sequence Number=SeqID_113208
acgttcgtgaagcggctgctgcaggggctcgggggtcaaccccgccgtgcacgaggtcgccggcgaggctgagctcgccgggatcgtcgccgccggcgacgtcgcgctcccggcggtgttcgtcgggggcaggctcctcgggggcctcgaccggctcatggccgtgcacatctccggcgagctcgtgcccatactgaaggaggccggcgcgctctggctttgaggaaacatggggctccgctggctcgtggccgtgcacatcagttcttcctgctggcggtggcgctcctcctcttcttcatcattttcttcttttattttactccttcgagttactgaaggtgtgttaacttatcttagataggacttcgattcttttagagaagcatatactatatagttaagcgatttctatttattttccatcatgtgaatatgaattgaagagtgctgggaatttacctgagaaannnnnnnnnnnnnnnnnnnn

SEQ ID NO: 47235 - DNA, 389 bp, Setaria italica
  Peptide Sequence Number=SeqID_113209
taagtggttataccacatcaaaaagggagtaagtgccttagtccgtgtggtggtgcgggaactaggtcctgatcctagtaatatactaagtgaagcacttaatggcctgagtttaggtcagcagcagcactataacagcattcagttccgattcaaaatatcaaaggctgagaataaatcataaaataagaaatggcgaatgcatggcttataaatatatttcacagtgaaaacccaattaattacccatattatctttagtctggtaacagatgagacctctgcccttgataatacaagtgcatatctattttctgtggatttatttattcattcattggcagccctacctggtccctcactccctgtacccacattaatatgggagg

SEQ ID NO: 47236 - DNA, 637 bp, Setaria italica
  Peptide Sequence Number=SeqID_113210
aacccaatcttatgtccatccttccaagagtgagatctctgaagcagttagatgttctgacccttccattttatctaatggaacaaatgtaatagccagcagaaagggcaaaaaacttgaagacccatcgtattctcctagagttagctcatcagttactacagaacattttcaaagtgctgatgaatatgatgcctcctatatggatgagcaggcctcatcgtacatcagtcaaagtgaatcggtggttcagtcgtcgtcatgtttaccttcaggaatcaacaatgtcgcttccaataatctgaacggaagctctgttggctccttggtaagatctgcacaggaaaaaactggctgtgatgagaaacaattggatcataaatctgtagcaacaacggacaaaattttaccttctgttattcctgccaacatgcttcaaagtgctataactgacaatggtgcagtaatgaaaaaatagcggcggtgaatattatgtatacaacaggaacctactgggaggaacatcatatgaatggcccagtgtaacaccacctcatttgtaaccatcaagatgcaacctgtctgctgcagctggacgctgttgcatttcaggagatacaaaatgaggtggtgttac

SEQ ID NO: 47237 - DNA, 719 bp, Setaria italica
  Peptide Sequence Number=SeqID_113211
agcaagatgttcagaagtatgggaacatttaagggatgagtacacgtgaatcaacatatgcagggtatgatgggtcttggaccgcaatcgtcacattagatccaaatgtgacagcctgcaggcgggaaatgtcacatttggcaccatcagagacaaatatgtctgaatcttcaataccaaggtctgcatagtaggttgcagcaattgctgcccttagtttcttttcaccttgctcagctccataaccactgtagccatcaattgttgacaaggcatgtgctctctctgccatggcattcgttatgacatctggaatgggctccgtggtgtcacctatcccaaggcttataatcttagcatcagggtacttcagcaaatgagctgctcttctcctggcaatctcaggaaataaatatcctgcttggagcttggccatgttagcattgcgcgggacactagtcttgtaagatgtatcgacggccggcgggctactgacgcagcggacagtgacagacattctccccgcgggtcggcggtggatggtctccaatgacctggaattgagaggtaacgaagacgaagagaggaaggaggaggagggcgcggtggtggcgggggcaccggtgggtgctgccatggcgacggcaggagaggcggcggcggcggcggaggaggatgggtaggctgacgagcgagtgaaaggaaaaacctgcttcgct

SEQ ID NO: 47238 - DNA, 671 bp, Setaria italica
  misc_feature (1)..(31): n is a, c, g, or t
  Peptide Sequence Number=SeqID_113212
nnnnnnnnnnnnnnnnnnnnnnnnnnnnnnnatttagccgatttttgtgctttctgcgtgcctaacatgtgatgcatcccagagttattccgaaacagcaacatcacaggaacagtaagggaacgaacttaggccatacaaccatttcctggagattcaaatcatcaaatgtctcagggtcagggatacaacaagcatcgtttcgacttggaaatggcttgaaagaagtaacaccgcataagcctacgacattatcaggctcccttctaatatctccaggtagcttgacagcgcgaatttggtgttccaaatcctgctgcaatcttattgataccgtccttccaagacgatagagaagctgcgtcggtgctcacttgtacagctgttttaatctcctagccgcttcaatgatgttatctctgtggccgaatgcactgaccctcacaaagccttcgccaccgggtccaaatccactgccaggggtagtcacgatgttcgccttctcaaggatctctgcgaacacatcccacgaattgcgaccagggaagtgcacccacacataaggagcgttcttggcaccatacacgttgaatccaagcgatgtaaatgtgtcgacaattatttcagtgttctccttgtagaagccaacaacatcattgtctattagtcct

SEQ ID NO: 47239 - DNA, 743 bp, Setaria italica
  Peptide Sequence Number=SeqID_113213
tttttttttaagggaatgaacataggcaatataaccacttcctggagattcaaatgtcacagggatgttttgaattggaaattgtttgaatggagtaacacgcgcaaaagcctacgaaactattggtaactctacagagagaatttggtgttccaaatcctgctgtcatcttattgataccgtccttccaagtcggtgctcacttgtacagctgctttagtctcctagcagcttcgatgatgttatctctgtggccaaatgcgctgaccctcacaaagccttcgccgcccggtccaaatccactgccaggggtagtcacgatgttcgccttctcaagaatctcagcgaacacatcccaagaattgcgaccagggaagtgcacccacacataaggagcgttcttggcaccatacacgttgaatccaagcgatgtaaatgtgtcgacaattatttcagtgttctccttgtagaagctgacaacatcatgcatagccttcagaccctctggagagaggcaagctaatccaccagcttgagcaatgtttgatgcgccattgaagcacgtgcagacaatgcgattgaaatctttagcgactggatgtccatctgagaaaagaagctccttggggacaacagtccaacctagacggacaccagtgaacccagcatatttggagaatgatgctgtaaatcctacttgcctaggggttagttgtactaacgtttcgtcctttcttctaagt

SEQ ID NO: 47240 - DNA, 1652 bp, Setaria italica
  Peptide Sequence Number=SeqID_113214
agggaatgaacataggcaatataaccacttcctggagattcaaatgtcacagggatgttttgaattggaaattgtttgaatggagtaacacgcgcaaaagcctacgaaactattggtaactctacagagagaatttggtgttccaaatcctgctgtcatcttattgataccgtccttccaagtcggtgctcacttgtacagctgctttagtctcctagcagcttcgatgatgttatctctgtggccaaatgcgctgaccctcacaaagccttcgccgcccggtccaaatccactgccaggggtagtgacaacgttcgccttctcaagaatctcagcaaacctaaatttgttggagcaaatgcaattaagcgctaaacattccaatatgcagcataaataagtaaactactggaacacagaatacatccaagaattgcgaccagggaagtgcacccacacataaggagcgttcttggcaccataaacgttgaatccaagcgatgtaaatgtgtcgacaattatttcagtgttctccttgtagaagccaacaacatcatgcatagccttcagaccctctggagagaggcaagctaatccaccagcttgagcaatgtttgatgcgccattgaagcaagtgcagactatgcgattgaaatctttagcaactggatgtccatctgagaaaagaagctccttggggacaacagtccaacctagacggacaccagtgaacccagcatatttggagaatgatgctgtctcaatggcaacctcttttgctccaggaatttcaaagatggactttgggctatcgtctgatatgtacatagcataggcagaatcatagacaatgatggacccattgtccttagcaaattttactagttgtgttagttggtcccgagatgcagcagcaccggtagggttgttgggtgaacaaaagaaaattatatctgttcgtgggacagttgacagatcagggaaaaatccattttcgggattgcatctcatgtactcaatgttcccatacttctgaacatcttgctgatataagccagtttggcccatgataacacttgaatcaacatatgcagggtatgatgggtcttggaccgcaatcgtcagattagatccaaaaaggacctgcaggcgggaaatgtcacatttggcaccatcagagacaaatatgtctgaatcttcaataccaaggtctgcatagtaggttgcagcaattgctgcccttagtttcttttcaccttgctcagctccataaccactgtagccatcaattgttgacaaggcatgtgctctctctgccatggcattcgagatagtacaacaatttaggacaaccaatacaagaagactaatagctgtaactctgccatggcattcgttatgacatctggaatgggctccgtggtgtcacctatcccaaggcttataatcttagcatcagggtacttcagcaaatgagctgctcttctcctggcaatctcaggaaataaatatcctgcttggagcttggccatgttagcattgcgcgggacactagtcttgtaagatgtatcgacggccggcgggctactgacgcagcggaacaagttagaactaagtaactaatttactttaccccgttacgggtttacgga

SEQ ID NO: 47241 - DNA, 313 bp, Setaria italica
  misc_feature (302)..(313): n is a, c, g, or t
  Peptide Sequence Number=SeqID_113215
ttggatgcttcaactcctgagaatacgcacaagagcaaaaaagcaaggaagtaagttatgcactgagttgattcacattgtaacagagtctcactcatcaaattttgtcagactgggttcctggtcagtgattgtgttactgtggaggaaatgtgcaacctcatgtgagtttaggcaatacgagagtgatgttgcaattgtaagcctggtactcctatgtagcaattcggtgcacaccacatgaaacttattccaattcaatgcagtaccagactacaccctaccgatcaggatatcttgcnnnnnnnnnnnn

SEQ ID NO: 47242 - DNA, 453 bp, Setaria italica
  Peptide Sequence Number=SeqID_113216
ggacgttcaagctcgacacgctgctcaaagctcgccgacgtcaagggcaccgacggaaagaccacgctgctgcacttcgtggtccaagagatgatccggtcacagaagcccccggcgcgcacggcggaggcgccggacatcgtgacggggctcgccgccgagctcaccaacgtcaggaagacggcgacggtcgacctggacgtgctcaccacctccgtgtccagcctctcgcacggcctgtcccggatcagggcgctggtggggtacggacgacctggccggcgacgagaggggccggtgcttcgtggccttcatggcaacccttacgtggcgcaggccgaggaggtgatccaggagctggaggacggcgagcgccgggtcctggcgcacgtcagggacatcaccgagtactaccacggcgacgtcggcaaggaggaggccagcccgctcagg

SEQ ID NO: 47243 - DNA, 252 bp, Setaria italica
  Peptide Sequence Number=SeqID_113217
gacaaagaagccggccggcagacacagccatggcggtcggcgacgacgccaacggcggcggcggggtgcggcggcgccagcgcgggtgcttgtgcaccaaggccgacttcttcccggaggagtcgttctcgagctggtcggcgtacggccgcgcgctgcggagcacgggctcccggctggcggaccggctcacgtcgcggtcggcggagtcggcggagctccacgaggtgcgcgcacgcagcggcgccgaca

SEQ ID NO: 47244 - DNA, 1960 bp, Setaria italica
  Peptide Sequence Number=SeqID_113218
tagagctactgctggtactgaagaaatactttcagtcttctctagatgagcaccaatttggacctcgagacattgattcataaggcaacgaatgaatatacacagcttacatttacctcactgggaaataatataggaactcagaggactacatgcattttcagtgctacacagctaccggaggacatcaatctagcaacgaatagattaatacaacagaaagaatacccaaaatcattgaagaattttgatgaccgtaacttagtcttttggataccggcctgagatcctcaatagaaacctctcgaatttgcaagtcactgcaactgccgttgtctggagatctgccgaagcccctcttccaggtcttccaatgtgatcgtgatcatagtatcagcatcgttgcagttgaaatcaaggcgtaggtccaggttttcacgggcattgatgagcagcgtgtctacaagacctccattcatctgtttccgccgctcttcagtggtttctctgccaatcagctctccagtgacctcaatgctgcagcttgggtgcagcttgaacccataaagtaagctgctctcacttgggttcttcatcttcatatgtaggatctcagctagttctgtcgtgctgaaatcatcaaaatagaagaatttggtgactctcctacagaagccatcatttgaggtgatgacacgcttcatgggctcacagtacccagcaaatatgacaactatcttgccactgtccattacagacattatctcctccaaggcttctaaaccataatccttgtcatcggatttttgcattggtatcaacctgtatgcttcgtcgacaaaaagaatacctccctcagcgtcctgtatcttcctcctagtctttggtccagtatgccccacaaattctccaacaagatcagttcgctgaacttcaataactttgtcagtggggagaattccaaccatatggagtagctttccgagaattcgagcaaccatagttttaccagttcctggattgccaagaaatgccatatggggagctcttctgctagcaatccctaagcccatagcccgccgcttctcatcaaaaagcattccccttgcccatcgacgtaattgcatttttagctcttgcagtccaacaatttgtgatattgcctcttcaaactctgccattgctttcccttcacagcatgacatgagggctttccgttttctttgctcttccatatgacgactgaggagcttcagcaacttctcactaccagctcctccaggaatatggtttaagggcattttgccttcatcatcttttgcaaagcaatccgcgttgtagctgagcaacacgctgacggtgctgtaatctccagcttgaagtgcatgccagacagctaaatgcaatggtgtcatgccgttattggctttggcttctatgtgtgcaccacgttcaaggagtagatttgttgattcacaagaactatttttcactgccatatgaagaggagtctctccatacatgttctttgcctccagatcaacagtttcggtaccttgccagttaagcaagaacttaactatttctgtattattgtagccagcagcaacatgaagtggtgtttgacacatcacggggttcttatcgttgaggagggcgggattctcccgcagcttcctctggacgccggcgaggtcgcccgcgcgcgcgaggccgtggatggtctcgaccttggccagccgcggcctcgggcccccgttctggctccccggcatctcctccctccccctctttcggagctccacctccgtgtgtgcgcgcccgcgtgagcgctctccgtgtgtgtgaggaggagccgtcggggaggaggaagaagaaagggaggcgacggcgaggccgtgaaagaggacgtgccgacggggaccgcggtcctttcgctgttattcgccttttaaaaaat

SEQ ID NO: 47245 - DNA, 1539 bp, Setaria italica
  Peptide Sequence Number=SeqID_113219
ctaaattaccgcctcaactcatgccttctttctcacctgaagccaaatgactgcagatgaaacaaaagctcgtctggtacagtgtcatgcttactgatatacatcccttgtttccaagatatcccattattccgcgaccaacacaggatgttctcaaatggcctatatgctgcactagttctttctttgcccatacggtgacaaagataccaaccatttgtttgcaagatatgaggttatacttaagctggtccctggaggcagtggcagacgaagtaacaccatcatcattgagaccaaaaatattgttcaatttgtcatccaattcatcctcttctgaagagtccatttcattagcatatgcttgtgggcaccgaaagcaagcatctttgtaggatttcttggccatttccactgggcaattgcagaatttaagctgttttctccgggatggcatgtaagatttcctgatggatttcaaggacttttggaaaattacagagccgctagcagttcttgaacggttggagaatgaagcatcaaggcctggcgttgattgggatgaggttgaatcaagggagggagatggtttgtgctgaaaatatcagcatcagtgtcaacttgtctatttagcacgcggtttataagagcaagccatcttgcagctggttcattgtcttctatcacaagcacattaccagcattgagagggacaatttcctgaaatcctaaaacataaatatctgaatggtcatcagcaggaagaaaatcatccagtttcaactcagcggtaggtgcttttcctccaacattccatgtggaaacaaatatcctgatatgttcgtattttgtagcgtttgcagagtggcttagaaaatggctgatccgtatgctcctaacttctgaaagtttccggaagggggacgaagatggtgacttcgagttgcttgatccacacttagctgtggagcagcttgcccggtctgtcctctttgcggctttcttatcttttgtcccaaaaagctttggctgacagcccttcatctttccatcatctgggaaagccatccccttctgaagttaaaagaacgtcggcagcttgcccccaaaacttcaacccaatcagcagcggcccaatccgtccgcccggcaggccagaacgaacctccgagccccgcttcccccggccgagagcccggaaggaatcctactaaaactccagcggagaatccaccaactccgcaaccattcctcccagacgcaaccagaaagagccgcggcggtggcggcggaggcggaggggcgcctcaaacccggggctgggtctgcaggaagccgacgagggcacggccatccgggttggccccctcccctcctcccccgtggattaaactactcggccgcgacaactgtacagcggggcgtgggccggcgcggttccacggcatttcttggtggggggatcgggggggcaattgtttacgggcgcagcgcagaggcgcggcgcggggcacggtctctagcggggtggggctggag

SEQ ID NO: 47246 - DNA, 611 bp, Setaria italica
  Peptide Sequence Number=SeqID_113220
cgaggcggcggcggggcggccgtacgtgcggtgcaatgactgcggcgtgcgcatcgtggaggcggcgtgcgacgccaccgtggacgagtggctggaggcggaggcggagcgcgcgggctgagcaaggcgctggcctacgacaaggtgatcgggccggaactcttcttctcgccgctgctctacgtgcaggtcaccagcttcaagtgcggccgggatggccctcggcttcacgtgggcgcacctcatcggcgacatcccctccgccgccgcctgcttcagcacgtgggcccagctcttcagcggcaagaaccccccggcacccaccctgcgggacccactagcccggcctccgtcagccgccgcacctgctggcgtgacggccccaccgtcggtcaaggccaccgccgcgcccgtcggcgaccactgggcggtccccatcacccgcgacatggtgcccttctccttccacgtcaccgagcagcagctcgagggccttcagctcggccgccaggtgggcacgttcgagctggtcgtggcgctgatgtggcgcgcgctggccgcgatccggggccccgacgaggaggaggcgtacgtcgtctacggttgtacct

SEQ ID NO: 47247 - DNA, 258 bp, Setaria italica
  Peptide Sequence Number=SeqID_113221
cccttgtccccaaccatctgtcatccaccctcgtggtccacgttcgctgtggatatagcctgccacctattaaccatctcgtgctaccgccgccgaagttgctcattaatattgtgcttgccattggttgctgcttagcccggctgatgttgctttgattggtccagaggctgggaactccaaagaggaacagggtctatggagggtggaggcgccggaaatggtttgactgggacagcgcagacaaagggagtgggg

SEQ ID NO: 47248 - DNA, 264 bp, Setaria italica
  Peptide Sequence Number=SeqID_113222
tattaacttaaagtagcatttaggcctggtggagttctttgtaatcaagcttagagtatgtggttgcatacacatttgattcaggatatgctttcaatttgccatgagactttcaagggttctgtgcactatgcatggactagtgtcccaacatacccgaggttcaaactctattatctattattcgtaccttgatccttttttacagtttaactgtatttaaaactaatttaggcatttactgttgaactttaccatctaata

SEQ ID NO: 47249 - DNA, 484 bp, Setaria italica
  Peptide Sequence Number=SeqID_113223
actacgaatacgacgctgcggtaaagcaagcaaagttcagtactacaataacccgatgtggccaggagaggcccattccttgaaagtggagaagatcttgtaccaggggaagtcaccataccaagaagtcttagttttcgagtcgacaacctatgggaaagtccttgtgcttgatggcattgttcagttgactgataaggatgaatgtgcgtaccaggaaatgattactcacctcccactttgttcaattccatcccctaaaaaagttttggttattggtggtggtgatggaggtgtgctccgagagatttccagacatagttctgtggagtcaattgacatatgtgaaatcgatcagctggttattgatgtttgcaaagatttcttcccacatttgtctgttggatttgaagatcctcgtgttcaacttcatgttggtgatgctgtggagttcttgagaaatgcgcctgaaggtacatatgac

SEQ ID NO: 47250 - DNA, 1514 bp, Setaria italica
  Peptide Sequence Number=SeqID_113224
ccccggcgcgccgccctccgctcctcctgctccctctatttctttcgccccccgcgacgccgcctctctccttacccccgccccgcctcgccattcgcgccccagaggctgggaactccaaagaggaacagggtctatggagggtggaggcgccggaaatggtttgactgggacagcgcagacaaaggggagtgggggtgatggctccgccaagccgctgcccccttgctgtgtcaaggccagggccgcagcgcccgagtctgaggccaagtgccatgctacggtggtgtcgggctggttcaccgaacctcgatcgcgctgcggtaaagcaagcaaagttcagtactacaataacccgatgtggccaggagaggcccattccttgaaagtggagaagatcttgtaccaggggaagtcaccataccaagaagtcttagttttcgagtcgacaacctatgggaaagtccttgtgcttgatggcattgttcagttgactgataaggatgaatgtgcgtaccaggaaatgattactcaccttttggttattggtggtggtgatggaggtgtgctccgagagatttccagacatagttctgtggagtcaattgacatatgtgaaatcgatcagctggttattgatgtttgcaaagatttcttcccacatttgtctgttggatttgaagatcctcgtgttcaacttcatgttggtgatgctgtggagttcttgagaaatgcgcctgaaggtacatatgacgctatcattgttgattcgtcagacccaatagggcctgctcaggaacttgtggagaagcctttttttgatacaattgctagagccttgaggcctggtggagttctttgtaatcaagctgagagtatgtggttgcatacacatttgattcaggatatgctttcaatttgccatgagactttcaagggttctgtgcactatgcatggactagtgtcccaacatacccgagtggagtgattggatttttgctatgtgccaaagaaggtccaccggtcaacttcctgactcctataaatccaattgaaaaactggaaggggctacagaagctggaagggagatcagattttataattcagagatgcatagggcagcatttgttcttccaacctttgtgaagaaagagctagaagcatattgcgcttccactgaaagagaacagccagaggaaacagctgcaacagcaccaaagataagtgttgcttccaagagtgaaattcttactgcatcctagactaaggctagcttacctgttccttcccggcgctcttggttatcgccagtggataccaagtcatgtaccatcggcatggaggtgtcggctccattgcgattagacgtgtaatgaggcatctgttaataattcatgctctgaactatgagatgagattagcatatgttctaaaacgaaaaggcgagctcacagagcaatgtatgataatgagtgatgagcatttcaaattgcatttatctttttcttaaaa

SEQ ID NO: 47251 - DNA, 522 bp, Setaria italica
  Peptide Sequence Number=SeqID_113225
cctcactcactccccccaccccctcctgccgataagaagcttcgtcgccgtcccctcctcttttctccgtcctagcaaaatcctccccgtacccagagccaagaaagtaaaagagctgaggtattaaaggccggaagccggcgagctgcgggagaaaaaactttctttccggggaggaaatcgggacagggccgggtcaaaaccatctctcctggcaagcaacctcgtctccggttggtgctgctgcctgccgctgctgtcggagacgagcgggtaggggagaccacgagctcggacgggcggctcgagaagagggaagggggggagcttgtgaagaagcctgagagaggtagccagggatcaaatcaaatcaagccatggactcggagcactggatctcgcgcctcgccgccgccaagcggtactacgcggcgcagctcggccacatcgacgatatgccggggatggggatggaggaggtggagatggagatggaagacgacgggggacatggagatggag

SEQ ID NO: 47252 - DNA, 668 bp, Setaria italica
  Peptide Sequence Number=SeqID_113226
atagttctcagtattttcatcaccatcactttctaaggcctcctcaatctcaagctcaaagtctgcatcattatcatcttcatcctggttttcgtccccctggcacgtctgtgtgtcatcgccaacaccagacaggacagatgcaagaaacttgcggtattcctcttcctcatcgacattctgcagatcaccatcatcatctgactcctggagaaaggtctctaattcctcaagtgaatagtttgctagtgagtatcttgctctcgtccgtctgcaaattgcatcttcctcactagcttccagagggtgatgagagttttgcactgttggagagcaagtggcttcgcctggtaaaacctccttttccaattcattcaagcgaccttcatcattctcaatattaacctgggttgatgttttttctggaaatatttctttgacaacatctttagatgacaatctagtttgaggaagtgcacagtcacttgtgttttcattaactatgctattctgcagatacatcccgctacttggccgcttgtcagaactatgttcctcgcattctgcttctgaagtaaggcttgatgaggtctcagacggagatccttccctaagaaaagggttaaaatccacatcatcctcctccacgtcatcgtcaacttccatta

SEQ ID NO: 47253 - DNA, 397 bp, Setaria italica
  Peptide Sequence Number=SeqID_113227
aaccaaggaaaccatccattgacagttctctgatcgcaatcttcagaacttggagctcatggagctctgcaatccattcagggactttgggaaaacaccagtaggtcaattctagtgtctgcagatggcggggagaagggtttaacaaactcaaaccactcccacaaataccaggccagtacatgtatagatatttgaggttgcaaagcatctcaagtgaagattgtaaaacatccatacacaatgctgtgttggagattgttgttctggaatagcagagtttgagatctcttagattggtcagttggccgagacccctgatgctgtctattgagttctcccccagatcaaaggattgcagagttactagagacttcatgttgccaatcccatcagg

SEQ ID NO: 47254 - DNA, 968 bp, Setaria italica
  Peptide Sequence Number=SeqID_113228
aattcatgtgatgagtgtttctaacaagcagtctatgcctgacaagttgtcctgggtgaagttctcttctatcagctggactcatgatgggaaagggtttttctatggtcggtatccagcacctagagaaggaggggaactggatgctggaactgagacaaacatcaaccttaatcatcagatatattaccatgttttgggatccgatcagtcagaggatatattgtgctggaaagatcctgaacaccctaagtatagctttggcgcctcagtcactgaagatggaaagttcatcatattgggcacctatgacggttgcgaccctgtcaataagttatattattgcaaaatttcttctcttcctcgaggaattgagggcttcagagagagtcaggaaatgcttccgtttgtcaagcttattgacaactttgatgctcaatatcaagttgtggccaacgatggtgatgaatttacatttttgaccaataaaaatgcccctaagaacaagctggtcagggtaaatatcaacaacccagaattgtggaccgatgttcttcctgagcatgaaaaagatgtgcttgagtcagccgatgctgttaacaataaccaactgttggtgtgctatatgtcagatgttaagcatattctgcagataagagatcttagtactggaaatttaattcatcagttgcctctagagattggttctgtctcagagatctcctgcagaagggaagataaggaagtatttattggcttcacaagcgtatgctcgccatgttcatttacttgtttagaaattagcagctacgtgcatccaaagctatgcaagacaggttgattatggcgaatgtttcagagtactcaacaaccccaacataacagtacatttcaatactgaagccgtggatgttgttagcaatgacaaaggtcagatgtctggcattcaattgaagaggaccgataca

SEQ ID NO: 47255 - DNA, 719 bp, Setaria italica
  Peptide Sequence Number=SeqID_113229
catataacaatctcaccatctaccctgccgtaacatggaaaaactaagggcaattagcttgtctctgagattgatatcatgccgctgtgacaagtgggttccctagtgcatttatttggtattttagatgtcaatatattttcctataaacttggtcaaagttagagaagtttggcttaaggaaaaaaactaaatcggtctgcattttggtacagagggagtaccaataagcatagaagcactcctaaattctgacaatattggaaagattagtagaagattttccacaagaaaaaaattaatactttgctgatccttagcattattaagataattatttcttcaatctacggctatgaatatagtgaccttttttgcttgaaatgagaattcagagagacagaatacaaaaatgaacttactgctaataacttcagtgaatgcaatggcacaacacgatcatcatgatccgctgtcaacaacatggttgctggatactcgcaatggtcaccagagctttgttcccaaggtctccgcacattatgaaggggagaatatttaatgagccattggaactcttcttccttatctgaacaaccatagtctgtagtccatgcatgaccaattgtgaacttgtggaaacggagcatgtccatgacaccaacatgagcaagagcacacccaaagagatcaggccgttgattaatggaaataaggaa

SEQ ID NO: 47256 - DNA, 286 bp, Setaria italica
  Peptide Sequence Number=SeqID_113230
accccggactccggcgcggccgccgactacggcgtccccttccgccgcctcaccggccactcccacttcgtccaggacgtcgtcctcagctccgacggtcagttcgcgctgtccggctcctgggacggcgagctccgcctctggatctctccaccggcctcaccacccgccgcttcgtcggaccaacgaaagaaaaggaaacgtaaacaaaataaactaaaaccgtaaaacgaaaaccttaaaaactaaaaaccgtaaaaacgaaaaaacaaaaaaaccgaaaaac

SEQ ID NO: 47257 - DNA, 366 bp, Setaria italica
  Peptide Sequence Number=SeqID_113231
ttttgtttttcgttttccgtttttagttttagtttcccttttgtttacgggttttcccttttgtttgttcgttccttccggtcgggtaaggtacggtcttatactctgctgtgggatttgactgaggggaagaggtctgtactcactggacgcaggctccatcatccactcactctgcttctcgcccaaccgctactggctctgtgctgctacccaggactctgtcaagatctgggaccttgagtcgaagcacgtcgtgcaggacctcaagcccgacatcccagatctccaaagaaccagatcctgtactgcacaagcttgagctggagcgcggatggaagcaccctctacactggctacaccgat

SEQ ID NO: 47258 - DNA, 211 bp, Setaria italica
  Peptide Sequence Number=SeqID_113232
ctaaattatgaatctgttttgatagtcttatcctgggaaatggctgtggtatctttagaccgagtagctgaatccagagatcttaaagatccggatggttccatctgtgtaaccagcgtacagggtgcttccatcagcgctccagctcaagcttgtgcagtacagaatctggttacacagatggaaccatccggataagactatcaaaaca

SEQ ID NO: 47259 - DNA, 1357 bp, Setaria italica
  Peptide Sequence Number=SeqID_113233
ctgtgtaaccagcgtacagggtgcttccatcagcgctccagctcaagcttgtgcagtacagaatctggttcttgccagcggaaaccttaggcctgaggtttccgctggcaagaaccagattctgtactgcacaatgtgcttcgattcaagatcccagatcttgatggagtcctgtgtggctgcgcagagccagtagcggttgggcgagaagcagagcgagtggatgatggagcccgcgtccaacgcgtacagcctcttgccctcagtcaagtcccacagcagggtaacattgtctttccctccggaggcgcacagagagccatcagggctcacagcaacggcgttgacgtagccgccgtgaccttggagattgctgcggagcttgcagttggtgaggttccagaccttgacactgcggtcccaggagccggatacgatcgtaggctggatggtgttgggcgagaagcggacgcacgagacccagccgctgtggccctcgctggcgccgtggtcgccgccaatggtgtacttgcacccgccgcttcgttggccacgagaaggacgtcctctccgtcgccttctccgtcgacaaccgccagatcgtgtccgcatcccgcgacaaaaccatcaagctgtggaacacactcggcgagtgcaagtacaccattggcggcgaccacggcgccagcgagggccacagcggctgggtctcgtgcgtccgcttctcgccccaacaccatccagcctacgatcgtatccggctcctgggaccgcagtgtcaaggtctggaacctcaccaactgcaagctccgcagcaatctccaaggtcacggcggctacgtcaacgccgttgctgtgagccctgatggctctctgtgcgcctccggagggaaagacaatgttaccctgctgttgggactttgtacttgtagggtctaagtaggtcttgttacgtcgtttggtacgtcgggtcttcctattctattcctacttcgtcttcttgtcttctcgcccaaccgctactggctctgcgcagccacacaggactccatcaagatctgggatcttgaatcgaagcacattgtgcaggaccttaggcctgaggtttccgctggcaagaaccagattctgtactgcacaagcttgagctggagcgctgatggaagcaccctgtacgctggttacacagatggaaccatccggatctttaagatctctggattcagctactcggtctaaattatgaatctgttttgatagtcttatcctgggaaatggctgtggtatctttagcttttcttttcgacttatctgcccaagtacttcggcttaatttactctttatgtcagtagcttt

SEQ ID NO: 47260 - DNA, 554 bp, Setaria italica
  Peptide Sequence Number=SeqID_113234
gagccctgacgggtccctgtgcgcctccggcgggaaggacggctatactctgctgtgggatttgactgaggggaagaggctgtactcactggacgcaggctccatcatccactcactctgcttctcgcccaaccgctactggctctgtgctgctacccaggactctgtcaagatctgggaccttgagtcgaagcacgtcgtgcaggacctcaagcccgacatccagatctccaagaaccagatcctgtactgcacaagcttgagctggagcgcggatggaagcaccctctacactggctacaccgatggatctatcagggtctggaagatctctgggttcggctatgcaggctagatggtgaaggcctcttgggaaagggttttaggggagttcttggttcggcaaaacattgtaatgttcgtcaagtttttgactgtcgtgagctatattgtctgtttcgtactttccagttcgcccaactatttatgcttagctttgttaatgagctaatcgtactatggaagaatctattttgaacaaaaaaaaaaaaaac

SEQ ID NO: 47261 - DNA, 1535 bp, Setaria italica
  Peptide Sequence Number=SeqID_113235
cccagcgccgccgccgcctcctcgcattcgcagcactagcaaaccctaaccctcctcgcaaccatggccggcgcgcaggagaccctggtgctcgccggcgtgatgcgcggccacaacgatgtggtgacggcgatcgccgcgcccatcgacaactcccccttcatcgtctcgtcctcccgcgacaagtcgttgctggtctgggacctgacccaaccccgtccacgtcgccggggacggcactaccaccgccgactacggcgtcccattccgccgcctcaccggccactcccacttcgtccaggacgtcgtcctcagctccgacggccagttcgcgctctcgggatcctgggacggcgagctccgcctctgggatctctccacgggcctcaccacccgccgcttcgttggccacgagaaggacgtcctctccgtcgccttctccgtcgacaaccgccagatcgtgtccgcatcccgcgacaaaaccatcaagctgtggaacacactcggcgagtgcaagtacaccattggcggcgaccacggcgccagcgagggccacagcggctgggtctcgtgcgtccgcttctcgcccaacaccatccagcctacgatcgtatccggctcctgggaccgcagtgtcaaggtctggaacctcaccaactgcaagctccgcagcaatctccaaggtcacggcggctacgtcaacgccgttgctgtgagccctgatggctctctgtgcgcctccggagggaaagacaatgttaccctgctgtgggacttgactgagggcaagaggctgtacgcgttggacgcgggctccatcatccactcgctctgcttctcgcccaaccgctactggctctgcgcagccacacaggactccatcaagatctgggatcttgaatcgaagcacattgtgcaggaccttaggcctgaggtttccgctggcaagaaccagattctgtactgcacaagcttgagctggagcgctgatggaagcaccctgtacgctggttacacagatggaaccatccggatctttaagatctctggattcagctactcggtctaaattatgaatctgttttgatagtcttatcctgggaaatggctgtggtatctttagcttttcttttcgacttatctgcccaagtacttcggcttaatttactctttatgtcagtagcttcagtcatgagatcatgggtactgcggaataggatttggtttgcaccatgttttggtttttgcctcaattttcctgaatcatgcaatagatggtgctacaggatgcattcaacccggtgatactggtgtgttcatgattttgattgcctgttttgtgtggaattcttcagtagctggattcgtataggctttctgttgctgcgatccgagtatgttgtgtgggcagtagtatctttttgccttgtctaagactttgcttctctcagccatgcttggattataatctaactgaagatttcttgctttttgcttcttatattcaaaatctttaaaagcggcttggtaaaggg

SEQ ID NO: 47262 - DNA, 346 bp, Setaria italica
  Peptide Sequence Number=SeqID_113236
ctgttatcagtgacagtaggcctcctccttcatggccatctaaaggaagaatagatttagaaaatttaagagtcaagtacaggccaaatgcacctacggtcctgcgaggtatcacctgcacatttgcagcagggaacaagataggagttgttggcagaaccgggagtgggaagacgactcttctgagtgcattgttccgccttattgacccatccagcgggcgaatactcattgatgatcttgacatttgcaccttacacttcctctgaaaagggttggctcccagcatcgattcctcaggagccaacccttttcagaggaagtgtaaggagcaacgtagatcctc

SEQ ID NO: 47263 - DNA, 432 bp, Setaria italica
  Peptide Sequence Number=SeqID_113237
taagatgggcatgcatatcctattaatttataagttttagtaattacttgcatatacaaccttaacttatacatccttatatatatcacagaaatgataacccatatatggccatcttccattgccatttgtaaattctattttgttaaccttctaatcatggataacaaaaaaatacgatgtacccttttggtaaagagaaaatttagcgttaccctacctctactcacactggaggctgaagagggtgcattggaggttttgaatgcttggaaggacagaaaccatagtatgcaaatgaaaacagataggggagagtttgcagtaatctacacatgcgtgtagtaccttagtcgacttaaaattattatttttactttatgccttctatttaaaagagaactagtattgtatattagatatcattaaaat

SEQ ID NO: 47264 - DNA, 1103 bp, Setaria italica
  Peptide Sequence Number=SeqID_113238
ttttttttttttttttttttttaacttttattttacaagcacttataggcagcatatcagctgaattgttcggaagaaaaacatatacgctgaacaaaacaccccccataaatgacaattatttggtagatactgaaacccaagacacatttctccggcacacaataatacaaaaaaaactcaccatttcctgccgaacctaatatttatccatcaaatcttttattaagtaagtactcacgactagaggttcaagcaaactcatacaaccatagcttcaaatgctggatagcattgacactgctggcttgtcagtgaaccaagtgagctctccatccttcagggaaaccatctcgacaggcagcaaatctgatgtgttttgctgttctgaaagtgctttatgaatagcaccggcttttccagcaccggtgaccacaagtgcgatatgtgctgacgaattgatcacagggagagtgaatgttattctctctggtggtggctttggcgaatccttgacaaaggtgacccatttctggttttcatggacaaccgggtgacctgggaggagtgaagcgacgtggccatcaggccccatccccataagcataagatcaaacttggggaacccagttaccggtgacattccaatcacaccatccttaacaagttgccttaaacgagtctcatattcctctgcagccccctcggctgacagcgtgtcatttatggcataaacttggtccgcaggaattggcacctttgaaaggaactcatcagaggcgagcttgtagttgctgtccgcatggtccttgggcaccaccctctcatccacccagaacacatgccatctgctccaatccacagcctccaggtacggtggctccgccagtttcctgagggccttgacgagggagccgccggagagcacgacggtgaaggcgcccctctccgccgcaaatttcgccgacagctccgccgtgcgcttggccagcgacgccgcgaggtcctcctcggcgtcgaagatgatgagtttcttcctgggaggccgcctcgccggcggcggcggggtaggaggccatggcggagaccggcctgaggggaga

SEQ ID NO: 47265 - DNA, 465 bp, Setaria italica
  Peptide Sequence Number=SeqID_113239
tgccaacaaaagaaactcgtcaatgtatagcattcttcaatatccaaaggacaaaactacatcagtgtcaatattgaaatagtataaaacagttccataggcaccacattgggcgtaaaaaaaattagcacaagtatttttctttctatgtttttgtttatcatatcttatatttccattgtgggagtacaagtaacttcataaacaataaggttagacactgaagactagtaaaagtacaaaaaggtaacaccaggaaaagactattaaggcgtatagaaaacaatagagcaagaaattggtagcttacctaataagcgcatcccgccatggtttatccacatggaaaacatatgacaggtcaaggtcctttagtgttgtgttctcattttattattttgttttttttgtcgatcggccttgcgtagaacccttcaagtcatacttacggtgaattcgaagctc

SEQ ID NO: 47266 - DNA, 2700 bp, Setaria italica
  Peptide Sequence Number=SeqID_113240
ttaaggtaactaaaaactaaaagtaaattaacgtaactttactttactaattaagtaccttagtattcctgtagtatgtctataataccaaggtaaagaacaacatcatattcctcaactgttcgtccggattttctagtttgttcatgtcccgcacttttgcacagaaccgtgttgaataattgagaacatattaactttttacagaaaaattggcgtagcagtactgctatttactattcatttatctactcagtattgttcagggaaaacactctccagaaattttacaaatcgttttgcatatgaactcgggtcaacagctgatattgaaaggggatcgaacttgagagatttgactgcatgctcgacccttttcgacacgttgtattcctgtagtatgtctataataccaaggtaaagaacaacatcatattcctcaatgttgtccggattttctagttccgtgttcatgtcctcccgcactttcagagctcgagctggcatattcacccctaactgcacacggaaccttccagtcccaggcaaaacaagatcgacttcttcatagcctgcttccgatgcccgaaccatgcttcctcttatgtgtgaaccacctactgtagtacctggctcatgagcaacgagcagaaatcctttccacgaacttttctcctcatattgcaacagatcagtatctgaaattccactttcaaggctgttctggtgtgatgaggatgtcttcaggtgagagggagctctaaaatggattcccaagagcatgctgtaatcaataatagactgggattccaggaacatacaatcaagtgatatttgcctaataagcgcatcccgccatggtttatccacatggaaaacatatgacaggtcaaggtcctttagtgttgtgttctcatttatattttgtttttttgtcgatcggccttgcgtagaacccttcaagtcatacttacggtgaattcgaagctcagtgcaaaacatatttcccatcacaacaaagcggacctttcttcctcctttcagagtaatcctgtgcacgccaaagaattttgtaatgagcgtattatcataagctctgacatgattgtaatattttggaagcatcttcaacagtatcttcagctcagcttttctcaatgttttaatgacaaagcgttcatcctgtgaaagatagaaaatactgccacttttcccgggtgaagaaagctcttttagactgtcatcaccgcataaggacatcatgtaatctgcagcatcaatatgaaacatttctcgtagattccggaaaaccatagggcaataatccttccaaaagaaattgacagagcaatgtggaggggtatactgcgagccctcagaagggaagtacattcttatccgtgctcgaggtccaaaatcatttgaacggacttcacgcaatgggacaggggtgatttttcctacagtatacctgatgccgagttgtagattaagcattaggtaatagctcctgtggcctctgtaaatagtttccatgggcccaccagcttgtttttgcaaggtctggtcatgtgatttactgctatctggcattccggaatcatgaccttttggcttttccgagataagtactccttgtacatattcccgttcatagactaatactttatcagctacattatcttggagacactcaccagttgtcaagggtacagtggatgaatcttcagacaggcgatttccagaattatcatcgaaaactggtgcagtgccatttgaaatacgcctgggtcgatggaaaaggctgcgtattctccatgtgttgcaaagtttttgcaatagaaacaatagtccactattgacattttcattaccagaacttgaggcacttgaaacatcatgatctgttacacactcagacacttcaaggttacaaggcattttacttcctggttgataaaacataccatggccatccttgagtcccctgtcccatgtaccaatgtaacatgctcctgatgaatacttgcaaaaacctttcccatgagccagtccgttaagccaattacagtcaagagtatcaccatttgtccacttcatcactcctctgccattcattttaccggatttccaccttccaatgtaggtgttaccatcagcccatgtatatttaccaaatccgtctggcaaaccctcattccagaaaccttcataggtatcagagttggcgtaaaccattgtgcccattccatgctttttgttcatcctccaagaacctttataaagagagccatcaactcctttgaaagtgcctgttccatcaatgaaacctccacagagatctccatcatatgaagcgccagaaggccattgaatttctcctctaccagtcatcttgcttgtatcccattcgccataataaagagttccatctgtccacatatactttccaaatccatgaggaactaaaccagcgaagttgccaacatagatgtcaccatttggaagggtactccccctctggatgttccccgtgcttgcctctccagtggccatgccaaggtttactaggatggctcagaaatggcaaaatacattcagcaagatcgccgccgagggagatcgcgcggagccgacacgacgccccatccgaccaggaccagcctccggggaaggatcacagcagcgagaagagaaaag

SEQ ID NO: 47267 - DNA, 246 bp, Setaria italica
  Peptide Sequence Number=SeqID_113241
tttccaattgccgttgaccttatcgtacatgaaaccaattacatggtataatctagagctcatacaatgtaattggtttcaattgccgttgaccttatcgtacatgaaacaaacatcaaaatgtccattgaaggtcaagacaattggttcaagcgcaaccatgctaacatgtcacacgtttcatccctttcctcggccatttagctcccggcagcagtcggaaggtcaagcaattggttcaagcgc

SEQ ID NO: 47268 - DNA, 482 bp, Setaria italica
  Peptide Sequence Number=SeqID_113242
aagtgtgcttattgtcgtgtcctttacatcccttagaaggtgctcaactccaatttcctcaacttcatgagcagcaatttctgaaggaacatggacaaacaccttctgacttttctgagtagcattctctttaacctcttccacagcgtaatacgctttagtgggtactccccaactctttgggttgaacatcaataatcaccaggacaggattaggaacataactgttgaacaacgcatggacatccaggtcgttctcccttagcttcggaccagtgctgtaccagccaacaacatgctccttggcgttaatcctcttgaacatggagaacatggactcatggtaattgtggtcaaggaaccagatcctaggatccttgtcatcctcctcgaacggcacggcgtaggagttggtgacgtcgacggagtcggctcgtgtgattggaaggttgtgtgggtcgttgctgcggctgcggcggccg

SEQ ID NO: 47269 - DNA, 1390 bp, Setaria italica
  Peptide Sequence Number=SeqID_113243
tttagtttttttttttttttttttttttttgggggggtttacaggtttgccataattcaatcataggaaacgaaagtctacatcacgaaacatgatgcgtcagatggaatagcatcgagatctacagaaaaactgaggtataatctagagctcatacaatgtaattggtttcaattgccgttgaccttatcgtacatgaaacaaacatcaaaatgtccattgaaggtcaagacaattggttcaagcgcaaccatgctaacatgtcacacgtttcatccctttcctcggccatttagctcccggcagcagtcggaatggcggttggttttgaatcctcagccttctcatgctccttgtttagcatcttattgttgatcaagttgtggagtgcaatgacactccggatcagagaagacaggtaaatgaccaacatcatgtcatttgttttcactgcaaaggctttaatcagctcatttacgttcagatttggaagcaaattaaatacatcctgcaagtgatacaaaatctcatgattcagtgggagcttcccttcaattacaagatccaaatagcttcggatctccctgagccttgcatccagtcccttcaatgctgcaagcttgctagtgacctctgttgcaagtgtgcttattgtcgtgtcctttacatcccttagaaggtgctcaactccaatttcctcaacttcatgagcagcaatttctgaaggaacatggacaaacaccttctgacttttctgagtagcattctctttaacctcttccacagcgtaatacgctttagtgggtatccccaactctttgggttgaacatcaataatcaccaggacaggattaggaacataactgttgaacaacgcatggacatccaggtcgttctcccttagcttcggaccagtgctgtaccagccaacaacatgctccttggcgttaatcctcttgaacatggagaacatggactcatggtaattgtggtcaaggaaccagatcctaggatccttgtcatcctcctcgaacggcacggcgtaggagttggtgacgtcgacggagccgcgggaggaggtgccgaggaggacgccgacgacgcgcttgcgggtgtcgcgggcgacgcggttgtagtggtcgacgatgctgagcagcaccaaggggtgcaccaccacccgctccagcgtccgccccgacagctgcgcggccttcaccacgtccatctcgccggaaccctagcggcgaccacggatctgctgcgcgcggccccgctcctcgacggagtcggctcgtgtgattggaaggttgtgtgggtcgttgctgcggctgcggcggccgcctcctgtctgtgcttgtgctttgcttctcctgttcgtccccttcccctt

SEQ ID NO: 47270 - DNA, 881 bp, Setaria italica
  Peptide Sequence Number=SeqID_113244
aacccatcacctgaaggagatcctatgagaggtttaagcttgtcaccagtgggtggatcactcatgagtgttgtgttagctatttccaacaatctttatcatctgaagcatcacaatgatttgtaacatcactgtcatcaattgtcatcatgcttattccatcctcacagttgggctcagcagctacagttgggatatccataacaaatgaccagattctcgaaagttctgacgatgatgggcacccggagtaacagtttatggcctgccttttatgcccagtagcccctgatgtagcatcatgcccattccaatcacaattttggcaaagtgatgtgttctcttcaatacagtgggcagctgcaggctgtgaaccacaatgatctactgcagatcagatgcagcatccttgtgacagcgcattagctgaatgaacactacgatcacatgataaacacaaggatgctgcatctgatctgcagtagatcattgacctttgtttcccacagaaatcacaaagagcagccattgtcctggacagtatttgggaaattccacaagctggtcagtcccactaccaaagccaccttacttggctttcttcagcagttgaattcagtggaatcctatgtgatacgaggatcgccgcgcgccaagctcggggctcggatcccaccggcgcggcgcggaaaccgtcccgtgggggcggggcagcggcggagagctcgagaagcttccttcctcccgcgcgacagcaaacggcctttcctctttttttcttggtggaggactaggaggaggttttgccaacacagcgagcaggggacgggggggataagcgaggagagaagatgggggaggaggggaatggagcgcaacag

SEQ ID NO: 47271 - DNA, 576 bp, Setaria italica
  misc_feature (14)..(14): n is a, c, g, or t
  Peptide Sequence Number=SeqID_113245
aactagtaccatcngtttaagacaatcaacttgcacattatgcttccttttcagttttcacgcatcccacttggtaagtattcgtttaagacatcaagatgataccctgttctgcttgtctagtctcaacttgtttcagcttgtttcagcttattctctctcacataacactattgaatcagccgaaatcagccgaaataagccaaaaaaaaaacgatcagccgactcagtcgcactaggaaacgcatatctacagtaggcaagcttttaagttggcagaaaatgacatcttcttgtattaatcatttcttctgtctcgtactcatttcaagttatttttctgcaacttcactctgtttgaccggaacgacgatgcctactacttcgggctgataagggggcgcatcgtgcacagagttgctccaggccgcttcgtcctcgacgggaaagtctacgtaccacatccacatgtacagaaacgacggcaacaacacaatgggccttagcccagcatcttcggtaatcggtatgagcttgcaaaccgcatcatgcgacctacaatttagatagagctag

SEQ ID NO: 47272 - DNA, 784 bp, Setaria italica
  Peptide Sequence Number=SeqID_113246
cggccgcggagggccgccgtgctcgtctgcctcttccggggcgccgccggcgagctccgcgtcatactcaccaagcgctcctcctccctctccacccactccggggaagttgcattgccaggtggaaaggctgaggagggcgatgctgatgatgcagcaacagcattaagggagtcaaaagaggagattgggcttgatccatctctggttaccattgttacctctcttgaacacttcttgtccaaacatcttctggtggttgttcctgttgttggcatactttcatatatacaagcgtttaaacccgttcttaatgctgctgaggtggatgaaatttttgatgtgccactggagatgttcctcaaggatgagaacaggacatctgatgagctagaatggatggggcaggcgttcacaattcatcacttcaattataagaaagggaacaagaagtacagaatctggggcctgaccgccggcatcctgatccatgcagcttcagtcgtatatgagcgaccaccagactttgccgagaaaagaccaaagttgaacttgccaaagtactcaaaggagtgccgttcaatgccatgatctgagtctgagcacgaatctccataatacaaaatctcagttatattgattctagcacacaacagactactactaaacattaaaagtggttgtagaaactaaagggaagttaaaatcatatggttccatatcattcatattcttttcaaaacttttcacatgatagagtaatagcattagtattttagaataa

SEQ ID NO: 47273 - DNA, 464 bp, Setaria italica
  Peptide Sequence Number=SeqID_113247
agggaaggggacggcacagcgcagctcatcgaccacgtcctcttcgtggccatggaccggcaggccttccggcggtgcaggagcctcggcggcctcaggtgctacctgctccggcagaggtacggcacccacgccgacgatgacctcgcgtcggagcagctctacatgtccgacggcttcatacgcatgatgtggcggcggatccgcttcctcggcgacgtgctcaagcacggctacaacttcatattcactgatatggacgtgatgtggctgaggaacccgttcccgaggctggaccttggcgacggcggcgaggacctcctgatcagctccgacaagttcaacggcgtggcgcgcgactacgtcggcacgagctgacacgggcttcttcttcgtggcctccaacggccggacgacggcgctgttcgacgagtggcacgcggcgcggcggggtcgccgggcat

SEQ ID NO: 47274 - DNA, 501 bp, Setaria italica
  Peptide Sequence Number=SeqID_113248
aaaaaaaaacgaaaaaaaaaacgtaaaaaaaactttaaaaacctaaaacaaaccgtagactacgtccaggacgacatgggcggcctccaggtcctcgttgatcgaggggacggtcgccggggttggctggaagtgcctcccttgccgggcgcgctcgtcatcaacatcggtgaccttcttcagcttgttagcaacggcaagttcaggagcgtggagcatcgggttttggcgaacaagagtagggacacaccgagggtttcggtggcggcgttctgcagcacggacgtgataaggtccacgagggtgtatggccccatcgaagaactcacgtcgtcggatggcagcgatccaccgctttacaggagcatcaccattcacgagtacctcgcgcacttcctcaagaaaggcttggatggtcgccacacgctggaccactttctgctgctgcaaccgactcctaccgtgtagatccaatgctgcggtcactgcttctcaaattgg

SEQ ID NO: 47275 - DNA, 1192 bp, Setaria italica
  Peptide Sequence Number=SeqID_113249
tccaggagaactgggggaggaagacggggaaggaggcaggggaatcgacggtgcctaagatggtggggcaaggggtttatggtgttgggccagtgcttgcagcgctcatggctgggaggagggagttttatgcattgtatatgcaggaaggtatggatttgagcgggagtaacaagaagaagaaggataaaaaggcagtcgagaaagtgctgcggatggcagagaagattagtctgaaggtcatcgagacgtcgaagcatgaccttaacatggtggtggataaccggccacaccaaggcctggtgcttgatgcatcacccctggaaatggtgaatatgaaggagttggatccagtcaggttggaaggtggaaaagcacctgtctggatagccttggatgaggttatggatcctcagaatttaggagccataattaggtctgcctactactttggtgctgagggggtcgtgctgtgtgctaagaattcggctccattgagtggagttgtgagcaaagctagtgcaggctcgcttgagttgatcgagctgctttcctgcagaaacatgatgcatttcttgtcttcatcagctgaaaatgggtggcgagttcttggtggtaccattgctaacaaagctgtacctctttctgaagttcaaacaggggtgccaactattcttgtattgggcagtgaaggtactggtttgagacccctggttgagcgatcctgcacacatctggtcagaattcctggaaatgctggtgcatttgttgaaggagcagatgcagacacagatgaaggggaagaaggtgatagctcttctagtaatcaagatttgagatcgttccttgcggtggagagtctgaatgttagtgtcgcagcaggagttttgctttatcatctggctggaaaacatgcctgccccgtaagtgatacatctagcgttgctcaaatgtaaggatactttgtgatccatgcatatcaaagttattacaattgcccaatttagtgcttctgctaaagactaataatttctgttgcatgctttaattcttctgtttcattataaaacttcttagatagtcttgataatttctcaattctttgagaaatacattatctgtattctcatcaggcttagtgccttaggggggctttgtactagcattctacactggtcagtaactctgtatc

SEQ ID NO: 47276 - DNA, 248 bp, Setaria italica
  Peptide Sequence Number=SeqID_113250
tcttaatatctctcatagttgactgtaatctcgtcttggtttatttagtttgtggaatcaccagaatgctgatgattgctattcagccaagcaaacgaaaaagcttgttcgaacggctgctgctgccgctgcagctgcgccgctctctgccgagcagcagcaggcagctgcaaagcagcacacgcccaagaaaatggcaatgtaaaaacacggagatcccttcatctagcgcgagcctgccggcgacg

SEQ ID NO: 47277 - DNA, 378 bp, Setaria italica
  Peptide Sequence Number=SeqID_113251
aaaagaagggaaacaagatttactagcttattataatgaactctttaatgaataatatttactagcttactaattaccagtgtttcaaaggcatcgcctaggcgtccgggcggacccggcttgccttggggaaacaggtccgccttgtcgcctaggcgacgcctaggtgataggtcgccttaaaaacactgctaattacttttatatgttgtgctgtttttcaactctggtctctaatgtacaagcagagacaaaggtgatgacagcaacatattttatgagctttggaaaatccttagccgcagatgtatatggcttcaagcataattattcaaagctacaaaactaaatggttccattcacctttttcaatttatt

SEQ ID NO: 47278 - DNA, 795 bp, Setaria italica
  Peptide Sequence Number=SeqID_113252
gtagtaaacagcacattcttgaatgtaaatttttaaggggcagttggctactgcttatgctggtcataattggatgtacccagtcgcttctagagtttctgattctgaaactagcgaaaattggacctggttcatgaaaatgcttagagaggccataggtccatctagaggattagccatatgcactgatgttggacaagcagttatgacaaagggaatgcatgttccacagtgtccaacttcaagaagaagtttcatgggaaggtatttttatattgaccatacaaaggaccaccaaagaagagaactactaaagcagcaactcagtccatagcactattgtcctttctttgaaccatagctaaaacagtgaaccttcaaccaagacaaaaggaaaaggtgatacaccaagttctgaaaaatcagcaaggtgcgtgtcgaggagtggtactaatcaacctgaagccctttctattgagcaccaggtgtcaagtgagcaaactgctactacaaccaaggcaaaagggaagaaatcatctgctgcaaccaaggctaaaggaagacaaaaagctgttgcagctaatgctaaaggcagacacaagttgctgtgatggtgttttcttgtactgatgctgaacttgtaatgtgggcctggagaccttttgcttagtctggagtatgtctctatgtactgcttgtgacatctcttctcaaaactcatgtattgttgatgaaatatctatgcactgatgttccttttgtgtaacttgtttgcttttgtgttacattagagat

SEQ ID NO: 47279 - DNA, 751 bp, Setaria italica
  Peptide Sequence Number=SeqID_113253
tgaatgcagactaagcacacaactatgcagcatcagtgcaaagagaggaaatacagtggtagcagtggtgttacaacttgattaattaggaatcgaaacgaaagaacttgtaactaatttgatctgggtggaaagtgcagagtttgcgctgtctgcgttctttgatggcaaaattctgcagtttccaccacagggtacttactacagtagtaattacaggacaattgcaaagccatcagcaacgttcattgaactgaagtgcgaacaaaacaaaggaataaggtagtaagagcttgagctagagctagtacttggggacgaggacgagccgagaaggagcatcatcatcatctacttgttacttgttagccgaggcaggaggcgggtggccgtcgtcgtcggtggtggcagagtcgtccttgaccccgacgagcacaatcttctggtaggcaacgtcggaggggtgcatggggtactccaccggcgcgacgggtcggcgcgccgtcacggcataccagaggtagagcacgaagaaggtgaccatggcgccgcacgcggccgcgaagagcagggacacggcggccccccaggggctgtaatgacggtcggcgcggtcgggcggcggcgtggcgagcaggctggcggggttgagcggctgggagtgcatccggtagggagcggcgtggaaggcccagctgaagagggtgcagttgccggagggtgtccggaagccggcgaggacgggcccccc

SEQ ID NO: 47280 - DNA, 722 bp, Setaria italica
  Peptide Sequence Number=SeqID_113254
ttcttctcgtcaagaacccctcctatcctcttcagttaaatttggtgaagcatttagcccagttatcatcagttagagcagttttggcatgtgtatttggaagtagcatactatctggtgacaatgaatcatctcctacttatgtgaaagatacaacacaagcccctgaaattgagagatcattttttgaatttgctctcgagcaatcagagagatatccaaccttgaaccggtggatacagatgcagtctaatcttcatcgagtatctgagtcgtccgtgacagataaatctgaaaatgaagtctctttgcatcaatccaagggaaagttttctatgaagcgagcccgcgagcatgatagtgatggtgaatcggagcttgacgatattataataagcgggaacgctacttcaggtccgctagaatcccctaaacatgaagacactagactagagccgaccgcttttatttcatttgattgggagaatgaaggaccatatgaaaaagctgttgagaggctaattactgaaggaaaactaactgatgctcttgctgtatctgatcgttgtttgcgcaacggagcatctgataaattgcttcaattgctcatcgaacaaaaggaagacagaagtcagggcacaggacaaattcgtgcatatggatctcacaatcttgggagtgattcttggcagtactgcttgaggctaagagacaaaaaactt

SEQ ID NO: 47281 - DNA, 299 bp, Setaria italica
  Peptide Sequence Number=SeqID_113255
tgtctattctatttcttattcttaattctatctatttatctaagcaatctagatgttaaaatacatgacctagataagttcatataagctagtgttgcaatgttgtttacttatgtcatagtgggttttcttagcacatcatcgcctagccagctcaacaaactaacatgtgtcatatcacccttctgataaagttacttccccctgacaaccaattctgtagtccttagcaggaaggagacagttcatatcgagctcccacagttggctacatgcatttgataagctatttagctcct

SEQ ID NO: 47282 - DNA, 352 bp, Setaria italica
  Peptide Sequence Number=SeqID_113256
gaacccaccaaaccctactcgccgcggcggccggcggggggcaggagccaggacccggaggatggtgcccttctcgatgtaccgcggcaacctccacatcggcgggcgcgacagcatcgccgccgccccgcgccggtgggagccgccccgcccgacccttaccgtgaagcggttccgccgcctcctgcgcaaccgctccctcgccatcgcgcgcctcgccgcggagcagcagcgtcgcggatccccgtcctccgcgggcgcggacggcggtcgtggcgcggcggagcacgatggggaggcacggggtgaagaggaagcggatcggctggaggaactagtgggacagcagccg

SEQ ID NO: 47283 - DNA, 267 bp, Setaria italica
  Peptide Sequence Number=SeqID_113257
cgtactttgtacttggtaaaagtcgcgagcgaccaaatgtaccaaaaaataagttaaaaaattccccagcaagtcaacccccattatctgttgaccaaacaattctcttgccgccgccgacgtttgcgagtccagacgagctctcaatcgcgtgattcgcgtcgccgttgcggccgtcagtgcacacactccaccaccgtgctcgccgcgccgggcatgtcgacgcggccgagcatcgacgagccgggcatgtcggcgccgccgtcg

SEQ ID NO: 47284 - DNA, 394 bp, Setaria italica
  Peptide Sequence Number=SeqID_113258
ctcccgccgccggtggcgcggccctccgacgcgctccggaagaggaagaggtccttgagcctccacttcttgctcccgctgccgcagccccgcatcatggaggtccggggagacggcggggaggaagggaactcgtcgtcctcgatgccggcgccgccgaccctgaacggggagagagaccgcgtggctctcctgctccgcgacgaagcggcggaggctggggcggcgggcctgcccgacctgcccctctccaacgcctccggttgggctctccttggggaccgagggcgcgtggaggaggacgaggagtaggaagaggaggtgtcgtcgaccaggagaatgctcgggtgcggcgtgttcagcggccggatcctgccgccctcgaagagctcgg

SEQ ID NO: 47285 - DNA, 576 bp, Setaria italica
  Peptide Sequence Number=SeqID_113259
tgcccacccgcggcggttacttcgtaggcaacgtcagccccgcccgaatggacttccgctggttcgcgctcggcaactgcgtcgccattctcgcctccctcgccacgcccgaccaggcatccgccatcatggacctcatcgaggagcgctgggaggagctcgtcggcgagatgcccgtcaagatatgcttcccggccatcgagggccacgagtggcagattgtgacgggctgcgaccccaagaacaccagatggagctaccacaacggcggatcctggccagtgctgctctggctgctgacggcggcgtgcatcaagaccgggcggctgaagatcgcccggcgagcgatcgaacttgccgaggcgaggctggcgagggacggctggccggagtactacgacggcaagctggggaggtacatcgggaagcaggcgaggaagttccagacgtggtccatcgcggggtacctggtggccaagatgatgctggaggacccgtcgcaccttggcatgatctccctcgaggaggacaaggccatgaagaccggtagactacaaggaaggtaacggaacctaa

SEQ ID NO: 47286 - DNA, 240 bp, Setaria italica
  Peptide Sequence Number=SeqID_113260
tgttcctgccgctgatgacggcgcacatggccggcgggctcaacgtgacggtgaggagcagaggggatcagcaggccgctgcggcggcggcaggcggcagcacacccattgcagttgctgctgctacggggaattgatcgagcactccattccatccatccagtagttaaccctcatgtaagtacgaccaattaaaatcaggattgtttagttcataaaatatatacattattaaaaatt

SEQ ID NO: 47287 - DNA, 436 bp, Setaria italica
  Peptide Sequence Number=SeqID_113261
agtagacgtgctgaatgtaagcaagactgctacttctcttcttccacgacttcatgaagtttgtgccaaatgccgtcaaatagaacaaactactctttggctctccacttacattaaaaccatgtcgttctcaatattgggatttgcgtcctaagtacaataagctatgattaactatcttcattgttttaactataggatcaaaatatatgtgcttacataggctctgcaatatattaatctatttccaagatcaacacaggcttcttgtctgaaagcttattcgtttgcatatatttactttacttgatttaaattaatgtttttgctaatttcatattcatatactacttgaaagacctctgtttacaaggcatgcacttccggtaggacaactaaaggtgatttatccattccaatctaacagtttacgtag

SEQ ID NO: 47288 - DNA, 529 bp, Setaria italica
  misc_feature (481)..(529): n is a, c, g, or t
  Peptide Sequence Number=SeqID_113262
caaggacttttgatcagcagaattacaatattgccgatataggatgtccttttcaaggacttttgatctgtgttgcttgacagcaagctcatttctgatctactcatctctaactgtggctctattacttgagttttggtatgtaggtgttgttgctactggtgttcttgtgcccaggtgaagaaagctacaagttcaaatttcaaattttaaacaatctggtgatctaacttttcaatgtaaaagtgaagctgcgatggagaggggcaacaacgggcttcactagtgaagctgcgatggagaggggcaacaacgggcagtgaagcgtaggttttagttgttattgaaaaaatttagaaataattgtatgatattgtcactttgtatgtgtttctttatcaaggcaattgtctcgttgacagtactttaattaatgtatttattggttcttgaatgaattacttagttttcttttggtagnnnnnnnnnnnnnnnnnnnnnnnnnnnnnnnnnnnnnnnnnnnnnnnnn

SEQ ID NO: 47289 - DNA, 200 bp, Setaria italica
  Peptide Sequence Number=SeqID_113263
aacaacgggcagtgaagtgtaggttttagttgttattgaaaagttagatcaccagattgtttaaaatttgttcttgtgcccaggttaagaaagctacaagttcaaattttaaacaatctggtgatctaacttttcaaggtaaagtgaagctgcgatggagaggggcaacaactaaaacctacacttcactgcccgttgtt

SEQ ID NO: 47290 - DNA, 654 bp, Setaria italica
  Peptide Sequence Number=SeqID_113264
tggttagcagtatttgaacttgttctttgagcagaattacaattattaggaagcaatttcactttaagcaagctcatttctgatctactcatctctaactgtggctctattatttcttgagttttggtatgtagctgttgttgctactggtgttcttgtgcccaggttaagaaagctacaagttcaaattttaaacaatctggtgatctaacttttcaaggtaaaagtgaagctgcgatggagaggggcaacaacgggcagtgaagtgtaggttttagttgttattgaaaaatttagaaataattatatgatattgtcactttgtctgtgtttctttatcaaggcagttcaatctgctaccaggtagcgaaataataacaaaataggaagcaattcacttttgtgccatgctactgtacatgctccaagtttcataagagatctcatagttgattaaactaaaattaacttctgccatggtactgtacattctaccacattgtcagcactaatgatttgcatgtacagaacactaagcattacttcagtttcaaccaaggatccaagaacaataaatcttgcttgctgtcatatgacacacgaacatctattgttcttggatccttggttgaaactaagcattacttcagtttc

SEQ ID NO: 47291 - DNA, 481 bp, Setaria italica
  misc_feature (470)..(470): n is a, c, g, or t
  Peptide Sequence Number=SeqID_113265
atttcgctacctggtagcagattgaactgcttgagcagaattacaaatatttgccgattataggatgtccttttcaaggacttttgatctatgttgcttgacagcaagctcatttctgatctactcatctctaactgtggctctattatttcttgagttttggtatgtagctgttgttgctactggtgttcttgtgcccaggttaagaaagctacaagttcaaattttaaacaatctggtgatctaacttttcaaggtaaaagtgaagctgcgatggagaggggcaacaacgggcagtgaagtgtaggttttagttgttattgaaaaatttagaaataattatatgatattgtcactttgtctgtgtttctttatcaaggcaattgtcttgttgcagtaccttatttaatgtatttgttagttcttgaatgaattacgtagttttcttttgggtgaagcaaaggtttaanaaaaaaaaaaa

SEQ ID NO: 47292 - DNA, 1211 bp, Setaria italica
  Peptide Sequence Number=SeqID_113266
tcccgttgttgccccttctccatcgcagcttcacttttaccttgaaaagttagatcaccagattgtttaaaatttgaacttgtagctttcttaacctgggcacaagaacaccagtagcaacaacagctacataccaaaactcaagaaataatagagccacagttagagatgagtagatcagaaatgagcttgctgtcaagcaacatagatcaaaagtccttgaaaaggacatcctatatcggcaatattgtaattctgctcaagacagttcaatctgctaccaggtagcgaaataataacaaaataggaagcaattcacttttgtgccatgctactgtacatgctccaagtttcataagagatctcatagttgattaaactaaaattaacttctgccatggtactgtacattctaccacattgtcagcactaatgatttgcatgtacagaacactaagcattacttcagtttcaaccaaggatccaagaacaatagatgttcgtgtgtcatatgacagcaagcaagatttccaggttaaaacttgaaagcaatatttccttgtctacatgcttgcagcatataaattctaccatgtaaactctatttctaccaccagctaatagaaccttgacacaattttgtttgtaatgtccagaactttcatgcatcccaaaagctaacgtgcaggatcaacaatcagaaatactccatggaacacagaaacaccaccaatagtacgaagttatcgtcagaactaagttcacaagcagaaatgttttggagacaataagtggtacggatatctaacatgtttgcttttgtaaggctcattgcatgatgactgaaaagacgccatcataagattttaaagcaaatgctgaatatggatgggtatgagttctacaaccactacatgtctacagtttaagtgagagtagcacgcaccattttcagttcttcatttggaattttggataccgagaacatcacatttcagagctttgtgtttattttatccgcaaaaaccatgcatgcagatcacaccccatcctagctgttaaaatgttgctttcctatagctctagaaaatgaactaatcatatttgtgtttatttggtatgggttgaactaatcatgaaggaaagctccccttaaccagcagtctagcttaaaaccaaagaactaaagttaacttaaagtaactaaaaaa

SEQ ID NO: 47293 - DNA, 625 bp, Setaria italica
  Peptide Sequence Number=SeqID_113267
ttacaatagaatggttactggtattgtcgtcacagttggtaagtatgttacaccagaccacaaggacatcaatggaaatgggatagaaccagattacaatcgtcttcctggtagtatttgaaatcacccgatttctttttgtgacaattaaagtatatgcaatgtagttccgggtggcttattttctttttgtgacagatttcaatgaagccagagattacctttcacgttgtcgacttaaagaattaagctgagtggtgcactttattctgaaggttctcaaaatgtgtcggatgacccaatacggtagagtgatggaacagaaatgctgctccacctgactgaacaacactctctccatggcgcgctgatacggtaagctgcacattcaagtatcaatacaagcctccgcgcagtgagcacgcccttccatttgaaggctgctttgtcttcaattgagcacggttaaaccaacacctgtgaatagctaatggtctgtattcaacggttacctagatgctcacaggtgttggtttaaccgtgcaggagagctgttgattatagtataattatattataaaggagttccagattaaggaaaaaaaaaaaaaaaaactaagaagaa

SEQ ID NO: 47294 - DNA, 654 bp, Setaria italica
  Peptide Sequence Number=SeqID_113268
gctggaatagagactgcaaagctttttctgaataaaggagacacggtcatttatactgctggccgggatcgtcaagtccaaaacacaattgttgctgaaagtggaccaatgattgctactccccttatgttactggtgaataataggacagcaagtgccagtgaaatagttgcttcagcactccatgacaattgcaaagctgttcttgttggcgaaaggacttttggcaagggcgtgctggtgaaagacaaaaccatcttctcaagctcacaagctgcttcatcctcaaaggtgatatttgtcaagtccgaaccctcaacaaaaaggcacttgagacttatgaatctgtcctttttgaaggtgagcttgccctcggtgcagtcaatgtggtggagcctgacacactgtaacttgggtagcttagcaaggacatccagatcatcttgattcagcagggtgcgactaagagttaccttggcaagtttgttattaccaccatttgtgatcactggaagaagatgccccttcagtgtggttcccctgatgcttagagactctagaatcttcggattttgtttcaagcaagagccaatattattgggtaattttacactggaaggagtatccttgcatgatgcggctgtaggaagagtg

SEQ ID NO: 47295 - DNA, 1454 bp, Setaria italica
  Peptide Sequence Number=SeqID_113269
ttgggtaggttggttcaacgagagcttcctccccgacgccggaagccgcccgtggtcgccggagatgtggatgcaaaggaagcaggatattctccaaggcacaatcgaaatcccgtgctagagcccatgatatcattcaaaaaatgctagcgagccttggtgatccttatacaaggtttctatctccctcagaattctcaaagatgtcaaaatatgacatgaccgggattggattaaacttgagggagattcctgatgacaatggctctttcaagttgatggtattagggctactattagatgggcctgcttactctgctggtgttagacagggtgatgagcttttatcagtgaatggcattgatgtaaggggtaaatctgcatttgatgcttcatccatgctgcaaggtccaaaggagacgtttgttacaattaaggttaagcatggtgactgtggtcctgttgagtcaatgaaggtgcagagacaactggttgctcgaactccagttttctatcatttggagaaaagagaaaatgatgattcatctgttggatatattcgcattaaagagttcaatgcagtggccaagaaagatttggtcagtgcactaaagcgtctccagaattcaggtgcctcctatttcgttctggatttgagggacaatcttggtgggctagttcaagctggaatagagactgcaaagctttttctgaataaaggagacacggtcatttatactgctggccgggatcgtcaagtccaaaacacaattgttgctgaaagtggaccaatgattgctactccccttatgttactggtgaataataggacagcaagtgccagtgaaatagttgcttcagcactccatgacaattgcaaagctgttcttgttggcgaaaggacttttggcaagggcttaattcaatctgtttttgaacttcatgatggttctggtattgtcgtcacagttggtaagtatgttacaccagaccacaaggacatcaatggaaatgggatagaaccagattacaatcgtcttcctgatttcaatgaagccagagattacctttcacgttgtcgacttaaagaattaagctgagtggtgcactttattctgaaggttctcaaaatgtgtcggatgacccaatacggtagagtgatggaacagaaatgctgctccacctgactgaacaacactctctccatggcgcgctgatacggtaagctgcacattcaagtatcaatacaagcctccgcgcagtgagcacgcccttccatttgaaggctgctttgtcttcaattgagcacggttaaaccaacacctgtgaatagctaatggtctgtattcaacggttacctagatgctcaatttttgtttttgaaacgaaccgggcgggagagctgtgattataggtataattatattataaaggagttcagattaggaaaaaaa

SEQ ID NO: 47296 - DNA, 589 bp, Setaria italica
  Peptide Sequence Number=SeqID_113270
cgtaggcgagccccatggcgacctcgagccccagggccaggtagcacgcggggtggccccagttgagccacagcgcgtgcagcgccgggagcacccccgacaggcccatggccaggaacagcgacgcgcggagccggcggtagcgcggggacgagcacgacggcgacagcagcgcgccgaccacgagcacacccaacgccgtgatgccggagaggtaggcggcgcgcgcgcccgggtggcagaggaaggcgtagtagacggggggaacgaaggaggccacgatcatcacggagatgcccgcgtagtcgagctgccagaacaccgcggtggcgcggcgcgagtggcacgccagaaggtgcgccgttgcgctgatggccaggcacgacatggcgcccagcaggaacaccatccgcggccactgcggcacgccggacgacagcgccgccgccccggcgtcatgacccggcaggcccgaatggtcgctgtcccaggaagcgttagccgatccgaccacgaacctcatgatccccggcgcggcctcgtcggcggcctccctcgcccctccggcgacggcgagcgccaggaacag

SEQ ID NO: 47297 - DNA, 1056 bp, Setaria italica
  misc_feature (1008)..(1008): n is a, c, g, or t
  Peptide Sequence Number=SeqID_113271
aattcaaaatgcaggaacattccaatctagcatttagatgcaccacagggaaaatgcacgaattcaaagagagatagacacaaggaaagtccatgagatccaacgtcatgttagttttcctccaaaatttctattgattcatgcatcgcataggaatcctaaggaatttcataaggtgcaaccctttattccaaaggggtacataggtaattttcctacaggattagaatccttcaaaactcctatggttttcctttgttccaaagggggccttagaagtcggaattctctgatgatggattgaaagccacctggtcatcacaatccaagttatctccagagtgctcacggccaactcccatcaagtcaagataatgttggtaatgggatataatgaagttcatcttatcagtggacccttgaccacagatggcgtcgccatacaggacgttcatggtagcaccaaagccaggataccgcttggacaatgtgtcgttcttggtgggtttccagttaccaacaaacacatcatgggcagatggctgcttccgcttcattggagtcatccacctccaaatagctgcttcaaatgctagggtggcattctgttccaatagctctgggtgattcaacagatcctgcttgatacccttgccaacgataccatagttctggttccagtaaataggaatggcgcctctgccatagtactcaactccttcaacacaagggtataattcgttgctatcgtcacagtagctctgactggggctcaattcgtgattgtagcaaagcccccaagccgtttcaccaccaggcgcttcacgatatccacaggaggtcttggcgccgacatggccgaggaaggcggcgacctccctcatgcccatctccttgcccccggtggtgccgaacccgcgaggctcgaagagggcggcggcggtgatgaaggcctggtagtcccagaagtcggcggcgtgggcctgggcatcgttgcggtggcgaagngctcctcgaactggtacgccttgaagtagtcgctgatggcctcgttgc

SEQ ID NO: 47298 - DNA, 468 bp, Setaria italica
  Peptide Sequence Number=SeqID_113272
aggttttgagtgcagcagttatgttctccgcacttcggttaaactttggtagagaattctacgttgatcaatggcaaggtctgacgctggcagccgacgacgaaccacatcgtgtcttggtgccttggtggttgtcttcctgcaggagggtacagaggtttggaagagaaaccttcggttccctggctggtgttgctaaccgcttggcttctatggaacgaaagaaatgattggggctcttagaggtcaccctatctaagcaacgcagttggtgaagaagatcatggaggaggaagatcttcggtgcagagagctggattgatccgtgttgccgatggagcagtaagtgtcgttgttgcaggttcagtttcaatcgcaatggtaaacaggttgaagacgagtttccatgtcatatctcgttagaagcaagtttagagacggattggaactttgtaacttggtcggact

SEQ ID NO: 47299 - DNA, 657 bp, Setaria italica
  Peptide Sequence Number=SeqID_113273
ctaagtagatgctaataatgttgctggtatactttccaagcaagatgagatcaacctattgaccaaggtgttcgatcacataacagctatgaaaggtgcaaccataggtgcaaacaatgaaaggcaatctgatgaaagaaatttgttggcagccatgttatccctcgtcgtggtgatatgcaatgaacacattatcagtagagaagattttgttcgtgccatccatgaagatgcagcactggtgaagaagctcgcggaggtactgaaagtaaacaagcaatgcacggctgagtgtttgagagtagcgaagcttacctgccaggtggtgatagctatggttcaagccaagcccagcttcgtccaacatttcaatgaacataacttcaaggaagaactgaccgaggctttggaaatcatgtcggaggttgatggctgcatgctctttgcttctcttgtgaaggaagcacataaactcctaaacagcgcacaagaacatggtgttcgttcaacagaatttcattaattaagctaccacggccttcaggttgtgtttgtgatcaacaatcacactgaaaaactgagtaaccttcaaaaaaaattgaaatccatgagttgacaggatctgaacatgaagtttcttttgtgaagcgactattt

SEQ ID NO: 47300 - DNA, 474 bp, Setaria italica
  Peptide Sequence Number=SeqID_113274
acgacgacgacccggacgtacggaagacgtcggagatcgaaccaaccgaccgggcgctcgagtcggtgctcaggaagatggcgccgcccaacggccgcaccgtgctcatcttccgcgcgccgtgcggctgcccaaaggagaggatggaggtctggggcgctaagaaggtgcgccggatcaagaagtagggaggctaaccgaaggctcttctctcctcctaccatggcgagaaataatgagctaatcattaccatggctgctccatcgcaaatgattacagtttctacatacataatactattacagttccctgctgtcgtagtaagtataatgcgcataaggagaggaataaaggggaggtagatacaatgtcatcagcgaccattccttggattatgacaataagtggctgttgcctgttcgtatataaataagtgcagcagagacagattccttttttggttacttggaaac

SEQ ID NO: 47301 - DNA, 773 bp, Setaria italica
  Peptide Sequence Number=SeqID_113275
aataccgacggactaatacgccgccgcggcgccgcccgcccgcccgctgaggggacacgggctccagtcatgacataatgtggattacaatggcagaatcaaccactagtggggagcctctttctgaagagaatttattaaaaactattgaagcatgcaacagagcccttaaccttgatgcaacaaagaacaaaatacttgactttttgaagagctgaatgggatgcattgcgccaaaaccttgctgctgttgttggtagtgctgttgcctcaaaactgatggggactgctggtggtttggaggcactggccaaaaatgcccgattgtaatgtgctgcttctcgttgcaaagaagaaaaatatgtccggattctctactgcagcagcccagtctcgtgttggctatcttgaacaaactgaagtagttcaaagcacatctccacctttaagatctcagtctagtagacttatagcagcaaaaatcaacactcgcagcaaggattggttccataagaggtgatccaaactggaaaaagctgggcagaacttgttagaagaaattagtaagaagattaaaaaagtggcaagaactaccatctgcaaggcttccaaagccacttcctattccggactctattctaaaaaagaagtgagggggccgtcgactccggcaaatgaaagaaagataagcacagaccaacatgataaagcttgtgaattaggaatagcggtttgcgtgccagaggagagctcagttgggtgatggtttaggg

SEQ ID NO: 47302 - DNA, 901 bp, Setaria italica
  misc_feature (39)..(39): n is a, c, g, or t
  Peptide Sequence Number=SeqID_113276
cccatctcgcatctggtcataaaatcagggggatcaacngaaaaggaatgctgatgtatatgaaattttcaaagaacaaggttttcttccttgtgtgctgctggtcggccacaaaagatccttcacatgagtatgtataggccactttggccccatgatgttgtgttccttgaaaattagttactcctaaggtcagaaatatgcctttagcaaactgaataactcagagaagctattaagttcattaaaattatattgcacataaaattgaaatataaaggtttattgttggcataggtataactttcagtgactttcatttcgcagactctcttttgacaatatagaatacatttcgatagttgcatctagcatgattttgttagatgaatgttttgattttgaggggttaatcagatttcagaatttcattttggagcagtcgaattttctggtttggcgatcttaactatcgcattgacctgctggatgctgaagtacgacatctggtggctatgaagaggtgggatgatctcttgaagtctgatcaggtttgaagataaccttttacattttcaagattggataatactatatctattacacaaacagggtagtttttgctaattctgaaaattaattaacagccattatatttcagctaacaaaggagctaataagtgggagtacttttgttggttggaaggaaggtttgattaactttccaccaacttacaagtatgaaagaaattcaagcagatatgttggtgagattcataatgaagtggagaaaagaagaactccagcatggttacgtctctttctgatcatactatatttttatttgcaagtgcccatgttttagaattttaaatagaccagccatgcatatgtcgttcaa

SEQ ID NO: 47303 - DNA, 1757 bp, Setaria italica
  Peptide Sequence Number=SeqID_113277
gttgctggaatagcgcctagtgatgaccttgatcttgatcagtggctttgtacccaggagccagcagatttgtatgtttaggtttccaggaagtggtcccattaagtgctggtaatgtcttgggagcagaggacagtagaccagtacggaaatgggaggctcttatccgccaaacacttaacaggtctcagcaacccaagacaatctgcaaaagctacagtgctcccctgtcaccattactaagacctgttgcttcaggcgatggacatgaatatatgaaatccaaacttgaagatgaagcgttaggaagtttaactcagtttagagattggcaaactagtacaactgagcttcgctgcaactggttgtatggcaccagctcattggactggccagaatatccgcttgacactccatcaaaggttttggtaccaggtacagggttgaggcgagtgacgagcttaggactatttagcaccaactttatggaacaccctcaaggtcttgagctacagagtgtagatttgcaagttgggatcagaaggcagtatcatagctcgggaaaccttagcatgctatggtctgaacagcaggagaagcttgatttattaaattcgcttgattgcatatctgatttgacatcagaagaagactcaccttctgttggtactgacgagggatgtgctactcttgggaaaagagaatcttcaaagcatcgtacaaactatgtgcgcattgttagtaaacaaatggttggtatatatgtttctgtatgggtttctcgaaaactgaggcgacatgttaacaacttggaggtatcaccagttggggttggactcctgggctacatgggcaacaagggatcgatttccatcagcatgtctcttttccagactcgattgtgctttgtctgctcccatctcgcatctggtcataaatcaggggatcaacagaaaaggaatgctgatgtatatgaaattttacaaagaacaaggttttcttccttgtgtgctgctggtcggccacaaaagattccttcacatgaatttcaggaggagcagtcgaattttctggtttggcgatcttaactatcgcattgacctgctggatgctgaagtacgacatctggtggctatgaagaggtgggatgatctcttgaagtctgatcagctaacaaaggagctaataagtgggagtacttttgttggttggaaggaaggtttgattaactttccaccaacttacaagtatgaaagaaattcaagcagatatgttggtgagattcataatgaagtggagaaaagaagaactccagcatggtgcgatcgcatactgtggctggggaagggtaccaagcagctctcgtattggagctcggatttgagcttttcagatcatcggccagtcagcgccatcttcttggttgaagtcgaggtgttcaatcagcaaaaacttgaaagggtcttgaacttcaatcctggatcgtttcaaaggggtaacataacatgatggcggattcctggactttttttcagtcagtggcactgagctgagcattgaactcttcagcagttcttctgttggatttagtcttggatttagttttctaggaacacctagatgttgggggtaaggattttggtatatgttgggagcatgagtcgtatgtaactgaagtactgcccactagattgcacatgggaatatttcagactgaaaatgaatttagagtgaaatgcattgtaggtctctaaact

SEQ ID NO: 47304 - DNA, 574 bp, Setaria italica
  Peptide Sequence Number=SeqID_113278
aaccttttcaaataaaattacatatgcaggtgtgcacaataatgcatgactggacttgaattacatatgcaggtgtgacacgacaaccggaacaatcaaagggaaattagaattgaacgcaaatacccggatctacggccgggacttgaattacattcatgctgtagtaatacgcatagaccaattatggcttgcatggtggtggcggcgggctggccggcgtcacggtgttgaggctgcaggtagtgacgcagaaggacgcgcacagcccagtgaccctcactttgcacgtcgtgaagaagaagttgatattgttcaggacagcaggggcgatggcaatgatgttattgcacgtgttcgtaccgaagccatcgcagagaccacggcaagtcgcgcggcagtcgtcctggatgtcagccatcgccgccggcggacccatggagagcagggccagcgcgatgcaggcggcaacaatggccatcttgagcatcgcggcagccatggtgatcaggactagctagttgttgcagctatagctataggaagagatcagatggacagcagaagcgatggc

SEQ ID NO: 47305 - DNA, 591 bp, Setaria italica
  Peptide Sequence Number=SeqID_113279
aaacaaccagaacaataacgggggcaactttatactcccattaaaacaccggatcagatacatattctgaggcttagctcatgaacaccgatgacaacgcattacaggcatgcttcatctggccggcagttggcacatagccggagctataggacactttattacatagatattatgtattagtaatatttaagaagtaacacgcaggcagcatcatggcttgcatggtggtggcgcggcggtgctggccggcgccggtgttggggcgccaggcagcatgctgaagccgatgcagaacctgatgcaggtgggaacacaaactggagagacttgctctttgcactcccgtaagaaggacttcttgagttgaagtacaggggcgatacgagtgacgatattgcacgcatcggaaacgaagtcattgcagggaggaagacaagccgcgcggcattcatcctgtatgtcggccatcaccggaggacccatggacagtaagacaagcacgatgcaggcggcaacaggaatagccttcctaagcatggcgccgttagcggagccatggtgatcaggactagttgttgcagctatagc

SEQ ID NO: 47306 - DNA, 681 bp, Setaria italica
  Peptide Sequence Number=SeqID_113280
tttgttcggtaaaaataaatagccgtaaatttctcaagataggtaataaccttttcaaataaaattacatatgcaggtgtgcacaataatgcatgactggacttgaattacatatgcaggtgtgacacgacaaccggaacaatcaaagggaaattagaattaaacgcaaatacccggatctacggccgggacttgattacatagatattatgtagtagtaatatttaagaagtagcacgcaggcagcatcatggcttgcatggtggtggcgcggcggtgctggccggcgccggtgtcggggcgccaggcgacagggtgttgaggctgcatacgttgatacagacgggatcacaaattgcagagacccgcactttgcacgtcgggaagatatccacaggaagctggatatggatgagatcgatgacggcattgcacacattcgtagctaagccttggcagattggaacacaagttgggcggcagtcgtcctggatgtcagccatcgccggcgaacccatggacaacaggaccagcgcgatgcaggtggcgacaggaaccaccttctgaagcacggcgccattagcagaagccattgttcaacaggactcgatgtagcgtgggtacctagaggaagaggggagaagtatcagctaagtacgagtcgcttagacttgtagttct

SEQ ID NO: 47307 - DNA, 621 bp, Setaria italica
  Peptide Sequence Number=SeqID_113281
tttttttttacagaaccacgacctttgtattagggggtccaatttatacacccattaaacaccggatcagatacatattccgaggcttagctcatgaacaccgatgacaacgcattacagccatgcttcatctggccggcagttggcacacatatccggagctataggagattttattacatagatattatgtagtaatatttaagaagttaacacgcagacagcatcagggcttgcatggtggtggcgcggcggtgctggccggcgccggtgtcggggcgcccggcgacagggtgttgaggctgcatacgttgacgcagacgggagtgcacagcccagagaccctcactttgcacgtcgtgaagaagaagttgagattattcaggatagtaggggcgatgccaatgacggcattgcacacgtccgaactgaagccatcgcagagaggacggcaagttgcgcggcagtcgtcctggatgtcagccatcgccggcgaacccatggacaacaggaccagcgcgatgcaggtggcgacaagaaccaccttctgaagcacggcgccattagcagaagccattgatcaacaggactcgatgtagcttgggtacctagaggaagagg

SEQ ID NO: 47308 - DNA, 1114 bp, Setaria italica
  Peptide Sequence Number=SeqID_113282
agccgagcgagcggtgcggggtgcggctcatcgttcgccacgacgagtcgacgacgaacccgatgccgccccaccgcgccggaggggccgcgggcggcggcgacacgagcgcgttcttcgcggcgacgctagtgctgtgggcggtgtctgtggggttcgagatcggcgtgcgggggcgacgtgagctggcgcccgtggccgccggcttcgccttcttccaggctgccaacgccgcggtccgcgcctcggtctcccgcgacccgctcttcgtcaacaccgccgtatccctcctccactcctccctcacctccgcctccgttatctttgttcttgtcaatcaatggcgtaataagggcctcgagaacatgtttgagcatgaagaactatttggtggcagttggattggagcatactctgctctctgcttttcttgtggctactttgcatatgaccaattggatatgctccgttaccgtctatacagtggatggattcctggaattctcatgcatcacctgatcctgctcatttgctttacactagctctgtataggaatgtcacaatcaactacctaattctctctcttgtgtgcgagctgcactccatatttttgcatataaggaaagtgaggcggatggctggatttcgtgattccaatcggaaagtggtgaagctggaatgggtactcaactggacgacctttgtgactgcaagggtggtgtgccatatcttgattacatacaaactcatcgctgatgcccacaagtttggtaagggcattgagcttccgctagctcttcttggtatggcaggaatgaatctgctcaacatatttttaggcctcgatctatttaaagcgtatgcacgagaaagaaatcagcagagacatcaagattgaatgcaccttccctgatgtactctaaattttagaaggttatagttctgttcgtgtaaagacagagaggtatgtttaagtcttggcgctggagagtaaaccgtttgcgtatgtatacatctttatgcttcgctaccagaaagtgttcgttggtagtatgtgcattaccacatagacatactattattatttattaggacaatgctctttcggtcggt

SEQ ID NO: 47309 - DNA, 332 bp, Setaria italica
  misc_feature (317)..(317): n is a, c, g, or t
  Peptide Sequence Number=SeqID_113283
catcttccttccttgccgctccatcacctggcgcatcagcccctcgaagaaccgcatcatcttgccgctgccgctgccgccgccgccgacgtccccgccctgccgcttccgcttcccgccgtcccgtgggtcctccgtgtcctccccgtccgagcccgacgagaagctcacgtcaccgggggtcatcatgcatgccgcgtcgctggcgacggccgcaggcgcagtggtgccgctcatcagcggcgccggctgaggcacggcggcgacgcgagtcggctgatgttcggcgtgcatggccgggcgccatgccgggaacnccctgcagaacgggg

SEQ ID NO: 47310 - DNA, 430 bp, Setaria italica
  Peptide Sequence Number=SeqID_113284
tacttacaagacgacgaatactagaccgtaatcatggagagatggattgctgagaagtcctcccggagcgaagaagaggctgcattgactgaaagtaccattgaaaatgctagaaagctgctaacctactgccagaattacgatgcgtaacttgcttactgcaactctagtggacaattgactgacctgtgactgtgactctgtaaggttgcaatgcgcggctgcttgagcgtagaaagtcttttgaggtttaatattattgtaaagggcaacggtggtatagagtaatcggttgctatatagcatgtttgtaacatatatgcatgtttgtaacatgtatgtcagtttgcattgctgtagcttgtagaagaggatatattttcggcggttccaatcgatgcttatgatttagctaagagaacaaaaaaaa

SEQ ID NO: 47311 - DNA, 264 bp, Setaria italica
  Peptide Sequence Number=SeqID_113285
ttcttcaaggaaccacttggcactggcgaaatatgaagctgcacagtgcctccagtaggcatgatagtttgttcgttgaactcactatgttgtatagcaatcctgcctgaatgtcactcacgacaatttctgtatgttgaatctgttgaaattaggtattgccgttttctattgctgttcttcagctgtacgagttctgaagattgtaaatcgagcattcacagtcacaatgaagatgatagcatctagactaaacaaaaaaaa

SEQ ID NO: 47312 - DNA, 407 bp, Setaria italica
  Peptide Sequence Number=SeqID_113286
aaaaaacaaacaagtacttctccagtaccttgtccttcttgcttagattccacagtggcacgctcttcaattgttgctttgaactctttctcattctcaagcaaaaccatgcttagataccttgcagcttgttcaccaaggttatctgcggcgaggttaggaactgcgatgaatgcaaggaggaataacttcgcaagtggaggaatcaaggaggtagattgatttgcatgtgcaggtctcaagcgactgtaagtaactatttcttggtttccatagtctatataaaatactagaaactctctctccatgggtccttgatgttcactcacaatctacaaaaacaagaaaacatgagtatgattattaggggaaaataaaatacagataattataatgtttgctatacg

SEQ ID NO: 47313 - DNA, 451 bp, Setaria italica
  Peptide Sequence Number=SeqID_113287
gggggctacggcggggcggggagcggcggctgtggccagcagggctaggaggcgcgatgccccacgaggcacggggagcaacggcgcgtcggcgtccggcgaaggggagcggcggcgagtggcgacacgggcgcgcggggatctggcggtgcgcggcgagatttatctggcacacccacaccctcaagacgccaaatgccacgacgctccttctttgcatgctcctggaactcttctagatttttcacagcagccctacgctcccgtgagatcaatctatgtgtctcgatttgagccaagccattctgtagataagcaaaataggttaggaactgcgatgaatgcaaggcggaataacttcgcaagtggaggaatcaaggaagtagattgatttgcatgtgcaggtctcaagcgactgtggctgaaatcccgtcatatccttagctgttcc

SEQ ID NO: 47314 - DNA, 1567 bp, Setaria italica
  Peptide Sequence Number=SeqID_113288
ctggtgtcaactatgttggtttatctgcagcatgtccatttgaaatattgattctcctagaatactccattgagacatgaacctgaacattgtaaaaaatcaaatgctaagatcaattgaatttctatgtcctttatcaatttatgaacagaaactataatagttcactaagaacctgtttgccaattagccgtgtacgcaagaattccttagctgcacgagcaaaatgttcaatagttttgctttctccagaagaatcaaccaacttaggaggtctgatgctagaaatatttacacggcgctctgccaaaggacttccaacaggcaccatatcatcagcaataactatacagtaaccattcaccacctctatgacctgaaatgatatcaattagttaaaaaccatgtgtatagatgatatgcatagttgtattgcatggccaactagacagatgctatctgcaattaaacatgtataacaactaacatgagtcttagaaaaagattatataatctgttaaccacaattgttgataatagagacaaattaaatcttcgattcatttgtaccaccagaagttaaaatgccaataaaaactcactgttttggttacacattacaccccgtaccgttacaaattgatgcactagaccaaggttacagcagtcagtcagttcgctacccccactgttgcccagtttcggtgctatcgatagccacagttcagcacacacagtaggatcaattttccacacatacaacataacataaatgacacggctgacactgctagcttctcagtgctcaattagtaaaattacccagcactaaatcgatctattaacatacaaatcttggtgcccaaattgttgtgcagtcatcatcacagtgacttctcaacagctttcacaagcatcatccagtcacctagactatgataaaatgtgatagaaggccaaagattggaatttgcttctttatacataaatgaaatctttcagaggtattaaactagaaaaaacactcctttactcccttcatgtgtattttcacaaaagaaaagtcttgatgagaagattttgacctttaatttctcttacgatatagtcaattgttacaaaatattaaaatattcagactgcagatctattaacgaaatgtctcacactaaaaacatatagaatttttgacttattgtttgtcaaacttataatgtcgagtatattgtatcaaagtacgctttatattattggatggtattcttgtttctaagtgcataaaccttgtatggaaccaatgttccaattctgatgcaaatatgttaatgctacctttaatttaaaaatacaaaaagaactgaatacaccagtgctactttttataaaacaaggcaaacggaactaacgtttcctgtgaatttctgattgtgtattggtgctgtatttgtaacaggtggctgaaatcccgtccatatccttagctattccttcttagcctgaagttcagcattcttgagctttcttttggtttcagctccaagcatgtttgcgctccattcccatatac

SEQ ID NO: 47315 - DNA, 266 bp, Setaria italica
  Peptide Sequence Number=SeqID_113289
cgggcggcgggctgtggccagcagggctaggaggcgcgatgccccacgaggcacggggagcaacggcgcgtcggcgtccggcgaaggggagcggcggcgagtggcgacacgggcgcgcggggatctggcggtgcgcggcgaggtggctgaaatcccgtccatatccttagctgttccttcttagcctgaagttcggcattcttaagctttcttttggtttcagctccaagcatgtttgcgctccattccatatactttgccaaccc

SEQ ID NO: 47316 - DNA, 654 bp, Setaria italica
  Peptide Sequence Number=SeqID_113290
ctccctccactctctctctccctctcccgccgccctgtcctccctctctctctcgctgccctctcctctccctttcgctcgcccctcactgcaatagatccgctggtgaggggcgacggcggggcggggagcggcggctgtggccagcagggctaggaggcgcgatgccccacgaggcacggggagcaacggcgcgtcggcgtccggcgaaggggagcggcggcgagtggcgacacgggcgcgcggggatctggcggtgcgcggcgaggttaggaactgcgatgaatgcaaggcggaataacttcgcaagtggaggaatcaaggaagtagattgatttgcatgtgcaggtctcaagcgactgtggctgaaatcccgtccatatccttagctgttccttcttagcctgaagttcggcattcttaagctttcttttggtttcagctccaagcatgtttgcgctccattccatatactttgccaacccctataagaaagatgacaataactgctcatgagtaaaaattcagaaatattgctgtaatttaattgttcaaaggacatgttatctgtattctgtacattttctacaagctcaagcgccaagtccttggcagtatttccatcagaaataaaaaaaaaaaaaaactaaaaaa

SEQ ID NO: 47317 - DNA, 696 bp, Setaria italica
  misc_feature (614)..(614): n is a, c, g, or t
  Peptide Sequence Number=SeqID_113291
gtggccgcgctcgccgccttcctcgcgccgccgcggatccacaaaggtattcttggcgtggtgctttcgctcgtgtcgcgcgcccctggtcctgtcgcggcacccggcgtggatcttggcctggattgtcccgatactccgcagcaaaagcaagggttccgaggtggtttcgcggtttcctggcgtctcctcttgctcgccggttcgtcccaaggcatatcttggtgcccgtgatttaagtggtacaattaaggccagaagaatcagctttattcaaccagtgtttggatatggtatcagctaaccttgggttggcacattatgtactggaactcttcttcatcgcaccaagttaggaacaccatttttctcaaaaggatggggaggtaccaaacttgatttgctagagagcatggtgaagcagctgttccctgaagcacattgccaatcctggccaccaactgctgtgcagccaatgtggaaaacaatttgggagacaaacagttcttgtctgcgagagggtgttttcaggactaaatgtgatgagagactagtcgatgcattgccccctgaaaatcacaatgcaggagttgcttttcttactcctaaaaacnttacaccagagaagatgtcatgcatggtccatcttgcaggcactggtgatcacacatttgaacgcaggctttggctcggtgg

SEQ ID NO: 47318 - DNA, 731 bp, Setaria italica
  Peptide Sequence Number=SeqID_113292
gcgaaagcgaagccacggcgccgtccctccccgtccccgcgggccgtcgcccaccgtttcttcctcttctgcttcggttgcgccgcgcacaagaaatccgtgcagctcctaccggaccgtggagccccacgcgacccagctccccacccgtggccgcgcccgccgccttcctctcgccgccccggatccagagaggtaatttttggcgtggtgctttcgctcgtgttgcgcgcccccggtcctgtcgcggcatccggcgtggatcttggctcggattgtaccctgcagcaaaaggaagggttacgagctgggttcgcggtttcctcctcgtcgtcggcaggttcatcccaaggcatatcttgttgcccctgattttaagttatacaattaaggccagaaaaatcagctttattcaaccagtgattggatatggtatcagttaatcttggtttagtacattatgtactggaccacatatatggaactcttcttcatcgcacaaagttaggaacaccatttttctcaaaaggatggggaggtaccaaacttgatttgctagagaagatggtgaagcagctattccctgaggcacgtttgcagtctcagccaccaactgctgtgcagccaatgtggaaacagtttgggagacaaacagttcttgtctgcgagagggtgttttcaggactacatgtgactctcagggggcaatgcgtcgattagtctctcatcac

SEQ ID NO: 47319 - DNA, 711 bp, Setaria italica
  Peptide Sequence Number=SeqID_113293
gtttatgtgtctcctttgcggcaaaccaagatggatctgctgctttcaccaagttccaggagtttgtatgcatgcattggtgaaggcacccatggcttatcagagcccatcgaaagatttggctgctataaatagccgcctaaactataatgggcggagaataaacactcgaataaacttcgacatggttagcgactcagtggtagctggtagtctgggccagccaaatggtggttctacctccttggatcctgcagctgcatttagctccccatcaaagaagagaaaaccagatacttgatcaaataaatgtcaacctctgtctgtacatagctcacaattccacagcaggatttcttctgaataagtggattaagcggagtgctttaactgtacatgtatgtgttagtgagtagtagcagtttacaggcagcagactgtttcggattagctttgaggttgtatcatcatttgcctgctgattgaacacaattagattgtaacatctgcggtgtagaatgctaatgaaccttatagttattactgaattgacttgcatttgatgtaccaaatctttatcctggctcttgcaaggtttttatcaggggtctatttggttccaatagtactacacttgattcatacgtttcaaatgttttaactaggatctccaaacctaaattattttcctgactaggaatagtcatcacg

SEQ ID NO: 47320 - DNA, 791 bp, Setaria italica
  misc_feature (748)..(791): n is a, c, g, or t
  Peptide Sequence Number=SeqID_113294
taagtaagtaattgctaatagccaaatttttggatcacccaagccttctcctttcccgaatttaccagacatgtccccaaagaaagtttcatcttctcataatgtttatgtgtctcctttgcggcaaaccaagatggatctgctgctttcaccaagttccaggagtttttatgcatgcattggtgaaggcacccatgcttatcagagcccatcgaaagatttggctgctataaatagccgcctaaactactcatttgtgttaattctgcagtaatgggcggagaataaacactcgaataaacttcgacatggttagcgactcagtggtagctggtagtctgggccagccaaatggtggttctacctccttggatcctgcagctgcatttagctccccatcaaagaagagaaaaccagatacttgatcaaataaatgtcaacctctgtctgtacatagctcacaattccacagcaggatttcttctgaataagtggattaagcggagtgctttaactgtacatgtatgtgttagtgagtagtagcagtttacaggcagcagactgtttcggattagctttgaggttgtatcatcatttgcctgctgattgaacacaattagattgtaacatctgcggtgtagaatgctaatgaaccttatagttattactgaattgacttgcatttgatgtaaccaaaaaaaaaaaaaaaattaaaaatctttatcctggctcttgcaaggtttttatnnnnnnnnnnnnnnnnnnnnnnnnnnnnnnnnnnnnnnnnnnnn

SEQ ID NO: 47321 - DNA, 2916 bp, Setaria italica
  Peptide Sequence Number=SeqID_113295
ccacgattccctggacgcatcacacggcggccgcgacgaatcggccggaggagtcgccggagagcgcgggctccggcgagctagggtttggggatttgggggatcgaggcgggggctgggactgggcgagggcgtcgccggcgaggccgcggcgctgctggatgaggtgaagggcgtgcttctcgcggcgccttcggtcggaggcagatcggctaaggatgcagagaggctctgcttcgcgttcgtgctgtactgcgctgtgaagctcaaggggcggaaggaaggctctggggtcaggctgtgtgagatcttgaagagctgcaagctcaagtatgacgatttcttcaaggaaatgcagcagcttggtctgaagattgagaagatcttagagagccgttatggccgggattgggaaggccaactcgagctgaagcagctggagggtttggtaaacctgctggccgatgcaagcaggttctatcgtaaggcatataatgaactattctcaagtgcgagtactgatcaggagcctggattagcaacaagtactcctgactatattcttttcgggtggcatgtcttcttaatgcttcgttcaagatcaccggaactgtttaaggatctagtatcctgcatccatggattggttgctgtattggccatacttttgattcatgtgcctgctaaattgaggagcttcacgattgaaggctcttctcacttaatcaaacaaactgagaaaggcgtggatattattgcttcattatgtcataactaccatacctctgaagaacgtctgaaagaaatgatgggcaaatctcacgaggcaatagaggacttctttggcatgaaagcattaagtgcttcaaagtgcaaaacagaaaatttggataaaatagacacagatggtctgatgtgtttcaaaggtctcatcgacgaggaaagtttccagcaaaatttggaaaaattggagaaactacgcaattccaatagctgggaaggggagcttgatttgaaactatttttgagtaatgactatgttccctctgccgagaacacatctggggcctccagtaatttaggatgttcaaagcgtgcatttgaaacattagcgtcacccacaaagacaataaagaacatgttgactgtcccttgttccccttcatcacctgccagtggtggttcagtcaagattgtgcaaatgacaccagtaacttctgccatgacgacagctaagtggcttcgtgaggtgatatcttcattgccagagaaaccttcatctaagcttcagcagttgctgtcatcatgtgatagggatttgactaatgatgtgactaaaagggtcagcatagttttggaagcaattttcccaaccaagccttctgcagatcggggtggttcaataggcctcaactgtgcaaatgcatttgacatcccatgggcagaagcaagaaaaatggaggcctccaaattgtattatagagtattggaggcaatctgcagagctgagtcacagaacagtagtgtaaataatctaactccattgctgtcaaatgagcgttttcaccgatgtttgattgcatgttcagctgaactagtattggcaacacataagacagtcatcatgatgtttcctgctgttctggagagtactggtctaactgcatttgatttgagcaaaataattgagaaccttgtgagacatgaagaaacccttccaagagaattgaaaaggcacttaaattctttagaagaacagcttttggaaagcatggcatgggagaaaggttcatcattgtataactcactgattgttgccaggccatctcttgcttcagaaataaatcgtcttggtcttttggctgaaccaatgccatctcttgacgagttagtggtaaggcagaattttcatgttgagggcttaccagctacaccatctaaaaatcgtgctgctgcgtcagatgataacactgatcctcgatcaccaaagagactctgcaatgaatccaggaacacagtagtagagcgcaatttgcagacaccaccacccaagcaaagccacagcgtgccgactaacttgaaagcaaaatgccaaccactccagtccacatttgcaagcccaactgtcagtaatcctgttggtgggaatgaaaaatgtgctgacataacggttcagatattcttttctaaaattctgaagctggctgctattagaataagaaatttgtgtgaaagggttcaatatgtggaacagacagagcgtgtctacaacgtgttcaagcaaattcttgatcaaaggacagcattgttttttaatagacacattgatcaacttatcctttgctgcctttatggtattgcaaaggtttgtcaattagaactgacattcagggagatactcaacaattacaagagagagccacaatgcaaaccagaagtttttttgagtatctatgttgggagtaggaatcgcaatggggtactaggatcacgccatgttgatatcattaccttttacaacgaggtgtttgttccagcagccaagcctttcctggtgtcattcatcggttctggtactcgtccagaagacaagaagaatgctaatagccaaatttttggatcacccaagccttctcctttcccgaatttaccagacatgtccccaaagaaagtttcatcttctcataatgtttatgtgtctcctttgcggcaaaccaagatggatctgctgctttcaccaagttccaggagtttttatgcatgcattggtgaaggcacccatgcttatcagagcccatcgaaagatttggctgctataaatagccgcctaaactataatgggcggagaataaacactcgaataaacttcgacatggttagcgactcagtggtaatagacaataagacaattaggta

SEQ ID NO: 47322 - DNA, 437 bp, Setaria italica
  Peptide Sequence Number=SeqID_113296
aacactcagtcgcactagtcaacccctctcggcacggagttcctggttacgacggtgttggtcatgacattcctcgatggtgctgatcgccgttagtcggcacaggtgacgaaggcgtggactgtctgatactgccaccaccgacgggcgcgcccgtcggcaggtccccaaaacagatcagccctcgaaagccttcgtcctcatgaacggcatatcagacaccatctcacgggcctgtgcagctaccttatgctcagcgagcacctcataatgggtagccacgacttgctggacagagttaaaatccctctctccaccgctcatcgaatacgtaatagcggcggtaatcattccgataaccacaccaacgatgagtccggtcagcagcaggaggagaacggcctcacctgaggtgaagaacatcatcatgaggccga

SEQ ID NO: 47323 - DNA, 419 bp, Setaria italica
  Peptide Sequence Number=SeqID_113297
ctggtgttgaagatacaagagaatatttggctttattggtcatgaagaggtataaatcttgctttcccttaaggaactttgactagagtcttcagctggagtacaatacatgaaaatgattaactagctatgttactgaaagaataattgtagcttcagggaccagtttgagctgtacaattcatgtaacactgagtacatcagagtttgcattatatgcactaatccaacagttttgttgatagaactagacttgtgtcttcgtactgttatgttggagtacaaattctacagagtagcaaatgcatttagctccaaatgataacctagatccattaaacaggatttaccatggtgtttttttatggcatcttcagtttctcgtcctgaaatctatattggtatttgtgtggatgaag

SEQ ID NO: 47324 - DNA, 419 bp, Setaria italica
  Peptide Sequence Number=SeqID_113298
agacaccgcatcaccgcgctctggtgccgtggcggcttcctcctcctcctttttataggccgcctccgcttcttcctcctcctcctcatcgtcgtgcgccacacaggagacggaggaccggcgcctcggcctgcacctgccattcgacgacggccacgagagggcgccgctcctgctgccgcccaccaagaccatggacgctgccgacgagaagggcgagaggcccgacctctccgaggatacggcccaccagattagcgttgatccatggtatcaggttggcttcgtcctcataacgggggtcaacagcgcgtatgtgctaggatactctgggtcaatcatggtccctttaggctggattggcgggacatgtggcctcctcctagctgctgccatatccatgtatgctaatgctcttt

SEQ ID NO: 47325 - DNA, 480 bp, Setaria italica
  Peptide Sequence Number=SeqID_113299
ctgaaggcaacatatgcactcttagtgacgatggagctctaaaacttccttactgcatcgcgatatcaggattcacctgtgctcttttgcctttggaattccttatttatccgccctcaggatttggttgggattctccacacttttcagcctcatctatattgtcataacatttgtgctgtcattgagagatggtattatccttggctccatcttcagctaccttgccaactttgataccatcatttcgtatgcatttctgtttaccatcccttgttataccaatataacaatgctagaagtatgtttgacattctgtttcatcgctgatatttcgtaggaataactgcgcctgcaagggattacagtattcccgggtcacatggaactcgaatcttcactacgataggtgctgtagcagaccttgtgtttgcttacaacaccggaatgctgccagaaattcaagcaaccataaggcct

SEQ ID NO: 47326 - DNA, 340 bp, Setaria italica
  misc_feature (32)..(32): n is a, c, g, or t
  Peptide Sequence Number=SeqID_113300
gctttctttcctcctcgcctttctttccctgnttcctctctgctctgctttgcttctcctcctcctcgggaggcgcgcctcgtcggtcgccggtaaccatggctgctgcttctacctccgaggtgagggtcgggagcaggaggatcgtcgattacctcaacgacggcgaggagctcggggtcgagggcgtggtggggacgccgccgtgcacccctgccgcagcggtggtggtcggggaggcggcgaggtcgtcggtgcttccgaggttcaggtggccgcggctcgtcaggcttggcaagaagggcgccggcgccgggaaggggaagggaagaggaggagg

SEQ ID NO: 47327 - DNA, 1613 bp, Setaria italica
  misc_feature (1587)..(1613): n is a, c, g, or t
  Peptide Sequence Number=SeqID_113301
cccccctcctctctccacggtcgtggccctccggcggcatgccgagactcgccgccgtccatcactcccgatcgtatgattgcgatgaagcctgaccaagtactgtcttggaaacaaatttcaacattgatcaatcacgtggagcattaggcggccactcgttaccttgcaactcgagaggagatagcaaagtgatttgctatctcctcgtgacccttgcctgcaaggcccagtgatggcagatgctagttcaaggactgacacatcgactgttttagacgacaacgacaagaatcagaggatggaaaacggacaaattatggcagctgcgccttctaattcatcagataggtctgataggtccgacaaacctttggaccaaaagacgttgcgacggcttgcccagaatcgtgaggcagcaagaaaaagtcggctgaggaaaaaggcatatgtgcaacagctagagagcagtaagctgaaacttgctcaattggagcaggagctccagaaagctcgccagcagggaatattcatttccagctctggcgaccaaacccatgccatgagtggaaatggagcgttgacttttgacattgaatatactagatggctagaggagcaaaataagcagataaatgagttgaggactgcagtgaatgctcatgcaagtgatagtgacctacgacttattgtagatggcataatggcacattatgacgaaatattcaaggtcaaaggtgttgctgcaaaggctgatgtatttcatatactttcaggcatgtggaagacacctgcagaaaggtgcttcctgtggctcgggggttttcgtccatctgaacttttaaagctcctagcgaatcacctcgagcccctaactgagcagcaattgctgggattgaccaacctccagcaatcttcccagcaggcagaggatgcgttgtcccagggcatggaggcattgcagcaatcattggcagagactttggctggatctcttggtccatcaggttcttcaggcaatgtggcaaactacatgggtcagatggccatggccatgggcaaacttgggacacttgagaattttcttcgccaggctgacaatctgcgacagcagacattgcatcaaatgcaacggattctaacgatccgacaggcttctcgtgctcttcttgctatccatgactatttttctcggttgcgtgctttaagttccctgtggcttgctaggccacgtgaatgaccgaggatagtcactgtgttgagttcccggagctgctgtgaggaatcatatggcgttctcgttcccgacgacgcattgcaaaccattggtgacttggtttttgattgtacaattacttttagctgctgctcggtccaaattgtacttaagtgatgtacaagtaggttaatcctgtaagttatggtgatttatgggtgtattagcaataatgattagagaaatcaggatcagtgttgtgttgtttgtaatggttagaaatttagtcgtaaatgtaactcctgggacatggggggcagaatgggaagagtaataagagtctcccgttggttattatgttgcaaaatacnnnnnnnnnnnnnnnnnnnnnnnnnnn

SEQ ID NO: 47328 - DNA, 406 bp, Setaria italica
  Peptide Sequence Number=SeqID_113302
ttccctcactcgcttccaccctctccacttctccagctctgccatttgttacgctattgtcgcagtcgtaaaaaaaccatgtcattatcacaggtgaggctgaggaggatagccataaataaggtatagttagatacatgaaatagaaaacagaaattgagctatataattagcacgcaggcaagatgtgaatacagagttctagacaccaagctgttcatatggggctgatcaccaaatatgtgaattaggttgagtttattgtatttttcagtatggtttactaatcgcggtgttttggggcaaataggcgataatttgtggactcctgtaagtaaacttggtaaggctgttatctgaatattcattgatgtgttgagcacttgcacacttggctagtgcaggt

SEQ ID NO: 47329 - DNA, 438 bp, Setaria italica
  Peptide Sequence Number=SeqID_113303
ggcggtgtagtggccgttgcagtagtcgcgcagcatgttcatggtgtgctggtggccggcggccagcggctcgtactgcaccgccggctggtgagggtccgcggcgccgccgaagaagtagtcgatggtgggctgcggcgcgactgccgccgcggcgtcgagggagtggagcaggtggaagctgagctccgatgggatggtcgcgacgccggcggaggcggtgaggtgcggctggccggcatccaggtcccgggtctcgtgcgccatcaggagctcgcactgagggtgatacatcctttttcttcagaggtcgcagcaacctctaatgcagtgcaagattaaacaaggtagcgagtagcgaggttggttaagctcctgctgaaatggagtgaagggatagagaaaagagagaggaggaggtatgtagaaggggcaacc

SEQ ID NO: 47330 - DNA, 241 bp, Setaria italica
  Peptide Sequence Number=SeqID_113304
gtccttgccaccgtcactctgtccattcctgatgaaaacaccagcataccagaataccagtgcccaagacatgcatgctattccgtaagtacatccgatcccaagccctttggccataccagctttgtaaccaagcttcagtgtgttctgaattgcctcagaataggaattaagtgctttgctctctccgacaaaagagtacactgttcttacttgggcaattgcctgctccgcgacgacg

SEQ ID NO: 47331 - DNA, 1341 bp, Setaria italica
  Peptide Sequence Number=SeqID_113305
gaggcggcgctctgcgccgcctgcgacgaggaggtgcacgccgccaacaagctcgccgggaagcaccagcgggtgccgctcctctcggacgccgacgccgccgccgggcccacggccgcagcggcagcgcccgccgtgcccaagtgcgacatctgccaggaggcttctggatacttcttctgcctagaggatcgtgcactactttgtagagattgtgatgttgctatacacacagtaaattcatttgtttcggtgcatcagagattcctgctaactggagttcaggtgggccttgatcctgccgatccagttccacctattgctgataagcatgttaatgccgctggtgggtcggcacatcaaccagcaaaacatctgccaaggagaagcccaacggttcaattttcaggtgaaggcagtgcttctgttcccagcaaaaatgtaacaaatggaggctatgcacgacagaattctgttccaacggccaagacaggagtggttgattggacgatgcacaatagtgcaattcaatcagtagaatctccgcctaaatacatgtcagaggaaagtccaacacttctgcaatctagccagaccacagccttctccaaccaaattaacagtgatagtgatcgagcctacaacttgccattctcaggtggcaatgggtcagatagcctaccagactggcctgtggatgagttcttcaataactcagaatatagtcccaacttcagctttgtggagcatggttcttctaagagtgacaatgctaagctggggagtgctgggggatctccacaatgccgtctagctgaaggctttgttgctgaggaactattaggccaggtgcctggattggtcaacgatgaatatatgagccgagtacctgagaattcatggacagtacccgaggttccctcgccaccaacagcctcgggactcaattggcatgggaatttgcacttccctgcatatgacagcaccatgttcgttcctgaaatctcctccctccagggctctcaaaatcaattcgctgtaccttgtggtttcaagcgcccgaggagacagtattgagtgacaacaagagcactagaaaccacttgtctattttaggcatcttgagcaaggcctctttgctgggccaaatgacgaaaaacatcaggactgggtgatcattcgaagttcaacccaattattcagtagccaggtttaaagtgtgttgtaatgcctcaatgttgttcatgttccaaagattcgagcttcactaccgaattgtagtttgtgtatatagcgaaataaagaggagcaccagtaacatcataattagtggcgcaaaaa

SEQ ID NO: 47332 - DNA, 640 bp, Setaria italica
  Peptide Sequence Number=SeqID_113306
ccgtgggcgccggcgggttacaaggtggccagctccggcagcgtgcggggcttggcgcagtgcctgggagacctcgcggcggccgactgcacggcgtgcctggcgcaggcggccgggcagctcaagggcacctgcggcaacgcgctggccgccgacgtgtacctggcgcagtgctacgtcaggtactgggctgacggctactacttccgcccgacacaagattattcgcaggacgatatcgggaggaccctcgccatcgtcgtcggcatcatggcgggctggcactcttcgtggtcttcatctctttccttaggaaaacatgtaactagcatcttctatagttctatgctcacaagtgtcgtcctgtacaatctgtgggtgtccggtgtccctgagtctgtagcactagcctcagttaaactggtgtctcgatgcaggctagctgggccactggaaccttgcttccactctcggatgatggcatgagaacaaagggctgagcttgcgaaagagatcgatcaactagcgaagcctccaaaagcttggtgaagaacatgtaatctcattttgttaggaatagatgtgggtcattttgttagcatgggatgtgggccggctatctgaggagcactgtcttgat

SEQ ID NO: 47333 - DNA, 409 bp, Setaria italica
  Peptide Sequence Number=SeqID_113307
gaagccgccgctgccgtcgcccgcgcgggtgttcgtcgccgtcccgcgcgacctctccaccgtcttccgggcgctgccgcccaagaagcggatccgggtgtcgtgatgctgcgatctggccgcaattcaccaccggctcccaggcttggtcgatttcttggaaaattcttccgagttctggcttttcttcttcttcttttccttttccccccttgggttactggtacccacggccatggtataaattataattcgcggtataaataacgtgctatttttctgcgtgtttctttttccttcttttttgttgtgtttgcgtgagcgagaatttgtagctctagaaatgaagatattgctgttactgaatggaagcagttgaaaggaagcaaaaattgtaagaaaaaattca

SEQ ID NO: 47334 - DNA, 327 bp, Setaria italica
  Peptide Sequence Number=SeqID_113308
gagggcggggggcagttagcgagcgaggcagcaggcagccatgagcggcggcgggatggaggtggaggtccgcgtggtgggcggcgcgcggagctgcttcgtcgcgctcccgctccacctcatccacgccctcgagcgcacctcggcttccggcgacctcccgcccgtcctcgcgctcgacctccgcggccccgccggtggccgctggtccctcgcctggtccggcgccgcgtcccgatcccgcgccatcgaggttgcacaagagttggcagaatgcatttccctacctgacggaactatagcacagttgagccgtaacccgttctt

SEQ ID NO: 47335 - DNA, 328 bp, Setaria italica
  Peptide Sequence Number=SeqID_113309
tgaggtcggtcttgacgcccatggagaagaggaacaggatgagcgccaccagcgacacgctctcgaggatgtaggtgccgcgctcggagaagaggacgccgcggaaggtctcgctgcggcccagcacggttgggcccaggaagacgccgacgagcatgtgggtgacgaagcgggactggccgaggcggcggagcacgacgtgggcggcggcggagaggacgaggatgacggagacctggacgaggaggagcgggagggagaagcgcagcggctggtcgcccaggaacatgccctgcgagttcacaaggttgttgtcgtagcacgcccg

SEQ ID NO: 47336 - DNA, 496 bp, Setaria italica
  Peptide Sequence Number=SeqID_113310
tagaaccaaaaggatattgaatgaaatcttgtcgcggggggagtaacttgtgtcttcggcaactgaatgatcaagcagtttactcacaaaggcattctgttgctgatgaaacactgatgatccaaaatcattactgagagcctctgaactttctgggcaggttcctggctgcttctcacttactgaatttgagctctctgacctcagggaacgtacacccgcaaagttactgaagtggttccttgcgtacatgccatagggactgctctgcgaagcctcacctacagtatgttcaacattgccagatatcatgaaaccatcagaaaagtttgcagccactgtttagtttaagttgcacaattatgcataccaatcgaatgatatactccctgcaacttgtataatgcacatgtttatactgttgcataaaatataaagcaaatcctgcgtacctaaagagattttgtttgtttacaattcgatacagatggcaaat

SEQ ID NO: 47337 - DNA, 262 bp, Setaria italica
  Peptide Sequence Number=SeqID_113311
cctccgcctcggcccctcccctccccgctctttctgtgaggagggaagagaggcggatgccggggcgacggggctcgcgcgccgcaagcatgacgccgctcggggcgcgaggccgcgcgcggttttaaaatcgccccgcgcctgccttctcgccgtagtttagtcgtagagctagctgtgcctgcggagtgcggacatgggctccggtctcaagtaccgggcgggctgtgcctgattgtcgccgtcgtgctcatctgggtca

SEQ ID NO: 47338 - DNA, 436 bp, Setaria italica
  Peptide Sequence Number=SeqID_113312
tgatgacacagaactttcttcacctagtggatcaaaaaaatttgattctcgattaacagttggacaacctggtgatcaaggagaagagcgtacttcttttacatatggtggaactcatgttcttggggctacaggggccatgggccttacgcttggggaccaaaatttccatggtaccccagcactgctgccagttatgcggtttggaggtcagcgtccagttgggcctggtgttccttcgattggtatggctctgccaggatttgtgtctcaacaacaacttggtctcagcaattctgagatgacttggctaccaatattgactggtgcctctggagccctaggagcaccttatggttcaccttatatctctatggatggaagctattactcccgaccatctgaacaagcatcttcatcaggttctattggaacg

SEQ ID NO: 47339 - DNA, 1104 bp, Setaria italica
  Peptide Sequence Number=SeqID_113313
ggcgtcgtggcgaccatcgccggcggcggcgatgggcccgtcgtcgcgctccgggcggacatggacgcgctccccttgcaggaattggtagactgggagcacaagagcaaggaaagtggaaagatgcatgcttgtgggcatgatgctcacacaacgatgcttcttggagcagctaaattacttcactctcggaaggatgatctgaagggtactgtgaagctcgtcttccagccagcagaagaaggttacgcgggggcttttcatgttctaagagaaggtgtcctggatgatgtgtcggccatttttggcttgcatgttgatccaagccttcctgtaggtgccgtcgcttccagaccagggccatttctagcagcatcaggcagatttttagtgacggtcactggaaaaggcgggcacgctgcagggccacaagatgctgtggaccccatcgttgcagcatcctctgccatcgtcaaccttcagctgcttgttgcccgggaaattgacccccttcaggctgcagtggtctcagttacgttcatgaaaggaggtcacgctcacaatgtcattccggagttagtatccttcggtggtacattaaggagcttgacgacagaaggcttttcgtatcttaagaagaggatcaaagagatcatagaagcgcatgcaatcgtccaccgctgcaccgccagtgtcgacttcatggaggagcagctccgtccatatccagccactgtaaacgacgaagggatgtatcaccatgccaaagaagtggcagagaccatgctcgggcaggacaatgtgaggagaggcaccccgctaatggccgccgaggatttctccttctatgcgcagaaatttgcaggggcgttcttcatgatcggagtccgcaacaagactatggaggcagtgcatcccctgcattccccttactttgtgatcgatgaggatgtgctgccggtaggagctgccttccacgcttcagtggcgatcgagtacctgaataaacatgcagcaatggcaaacggaactggacatagacatctgttgattgctttatagataccgaagctcatctaatagaaataatcagtgaacattggg

SEQ ID NO: 47340 - DNA, 255 bp, Setaria italica
  Peptide Sequence Number=SeqID_113314
tcgtcccttgcgccctcatgctacaatacaatatagtagcatatccagcatacagtagattgacgacaggagcatacagtatagagaagagaagttaaaaaccggactgcagtgacctctgattttaaccgggtcttattttgatcgtgcagggaggactagcccggatcggcatcatgccggacggctactcggcctggatggcgcaggaccagctgttcggcgacagcgcggccgccgccggcgtcgggcggg

SEQ ID NO: 47341 - DNA, 397 bp, Setaria italica
  Peptide Sequence Number=SeqID_113315
tcaaggcggaggggcctgcggggtgggtggggaatctgttcgtcttcgatggccggctatctctgccgccggcgacgttcaggcggcaactatctcaagaggaagaagctgctggtgctgctgctgttgaggagaggtgggtggggcgctgctacacgtgcggatcggaggtggtggagctgcgccaccgcaactgcgccaacatcgactgcaaccgcctttacctttgctgcggctggtgtgcggaggagctggccggctgctgctgctccgactgcaaggccgcccctcggctgcggccgctcctgccgggccaccagagatatttgaaatggcatgtctaccgtgatggatttctgacggcccaccggagaggacgacgatgctgctgatacgg

SEQ ID NO: 47342 - DNA, 491 bp, Setaria italica
  Peptide Sequence Number=SeqID_113316
ttaaaaacatgaacacgtacgtgtgtgcgtacgtgtaccgtacgtatgcaaagacacgtatggacgacgacgacgtacgtggtgggtcacacacgtctccgtcacggccgtggacgtgtggcccgtcgggcgcatggggttcatgtttaggtcaagtgacagagaccccttcgtggacacgtagcacgccaatcattgtactgtgtgtatgctatatacacgttcgctcgcatgcgtggttagccatatgctacattattttctttgtttgcttagataaaaatagatcaccatgagtctattaaagccagggaataggaaatgaggcaaacactaccaaaaaattgagcccttttagaattttctttttgtggatttgtggatggagaaaggtgcagcgtgcacataggcgataggtgagtcactggagagaaagatggagcgatgcaattgtacctaagcacgtggaatggactgcccaagtgaacagg

SEQ ID NO: 47343 - DNA, 498 bp, Setaria italica
  Peptide Sequence Number=SeqID_113317
gttctcttccagctgtcccaagctgatgatagagttcctcagcgcggggatgtagtacactccggtgagcagcctgtgctctccagactcggcggtgaagatgacggagccgacgcccttgatctctacgccggaggcatccccaaaccttgacggtgcctcggatgctagagtcaagctcggtgaagaactctcgccgaccggtcatgtgctgggtagcgccggtgtcgaggcaccacccctcagtcctatcgttgctgaagccgtcgccgaggaaggcgtgtgccctcggctcgtcaaggtggaggagaaccgctgcggccgatgccgctggagttagctcgatgcttgcatgtgccaggagcagagctggctcctcctcctccgctagtgcgacgtgagcctggccgcgtcttggctgtcgacagtccttggtccaatggccaagcctgccacagttgcggcacgtgtcgtctcgtggcggcctgtgtttgccgg

SEQ ID NO: 47344 - DNA, 383 bp, Setaria italica
  Peptide Sequence Number=SeqID_113318
aacacttaccatatagatcagggcaatggttctgagggatctagatgtctgaacagaaggcaaaccaacttggcagcaatatagataagctacacatggacataccaagaactctgcctgtcagcctgtgttgtttcaacatagcccggataaaggaggaggggggttgtgataggcttggcgagccagcataaaaacccagccactcatatggagatcaaacccaagagaaatactaatatgctgttagccaatgtgttttagtacaactaagaaacataccttcataaattggaatttcctacttaaaaaaacttgaccatggaagatgaaatccccatgctttgtttcaagaacgggagtgcaaaactgtggctgaccgg

SEQ ID NO: 47345 - DNA, 565 bp, Setaria italica
  Peptide Sequence Number=SeqID_113319
tttctttccttaaatttctttgttctttccttttcttcggaggggaggacgcccatccggtctcggaatcgatctgtttcctcggtaaggctccccgccacgcttcggtggatctttttccttcatctacaggtcaacgagtcatcttctataggatttatttattcgttccggattcggttgcttcatggcgggttcttgctaatccgatccgtacctctgtccgcgtccctggttcggccgattaaaatattcgtcgtcttcgtctccggcggcgcaagatcgattggttgaattgctcctctccggtgcgcgggagacgatggagtctgggaggaagcctcggagcctggtggacctctgcgtccagaaggtcatcgacaacctccgctacgtgggccacgtcgacggcatcgagacggagctgctcaagcgcatcctgccgcactgcacgctggagcagctcacccgtatcgagaaccgcacacagatggatcttagcccgataaccgatcctctgtggaggcggttctatcagaaggaatttggcgaggaccataccaac

SEQ ID NO: 47346 - DNA, 1193 bp, Setaria italica
  Peptide Sequence Number=SeqID_113320
tcctccctctccaaatctgctccttctcggaggggaggacgcccatccggtctcggaatcgatctgtttcctcggtaaggctccccgccacgcttcggtggatcttttttccttcatctacaggtcaacgagtcatcttctataggatttatttagtaagtaggatctcctgataatcttttgcagctgccgcgagcgacgaatccaatctaaatctttcctcctgtccaccagttcgttccggattcggttgcttcatggcgggttcttgctaatccgatccgtacctctgtccgcgtccctggttcggccgattaaaatattcgtcgtcttcgtctccggcgtcgcaagatcgattggttgaattgctcctctccggtgcgcgggagacgatggagtctgggaggaagcctcggagcctgttggacctctgcgtccagaaggtcatcgacaacctccgctacgtgggccacgtcgacggcatcgagacggagctgctcaagcgcatcctgccgcactgcacgctggagcagctcacccgtatcgagaaccgcacacaggtcggtaaatagccctgcaatgttctcaaatctttttcttgggaattcgactgtgattgtgtgtggctgggtttgttggaacagatggatcttagcccgataaccgatcctctgtggaggcggttctatcagaaggaatttggcgaggaccataccaacctagttatcaagagaatgaaggaggcaaaaggaaaagcgcgttacacatggaaggagctcttcaaggcaaaaacagaggaggcaaaaggaagttgaagacagaatgctcgagaaaatcacaaagaagttccaggcagagaaagctgagaaacaaagcaaacaaattaaactttgttcaaaggtgcctccaagcagcaaaagaagtttctttggaggtggtggacctagcagtctatccaattccaactacaagagtcctatactgaaaaaaagccaggatggaggctaacaggtaattgttactcttgaaattacgatcataaattgaaattgctatttctgaatctgtctaattctgatttgcagtcgagcaagattgcaatctgctatccaaaagaacacttttcagaggtcatctcagcaaaggacaacctctttgagtggacagccagtgagaacaacgaccattcatag

SEQ ID NO: 47347 - DNA, 1387 bp, Setaria italica
  misc_feature (1349)..(1387): n is a, c, g, or t
  Peptide Sequence Number=SeqID_113321
ctcgcgccgtcctcctccctctccaaatctgctccttctcggaggggaggacgcccatccggtctcggaatcgatctgtttcctcgttcgttccggattcggttgcttcatggcgggttcttgctaatccgatccgtacctctgtccgcgtccctggttcggccgattaaaatattcgtcgtcttcgtctccggcggcgcaagatcgattggttgaattgctcctctccggtgcgcggtgcggccaattttgcagcttgcgaggggaaaaaaggatagaatctgagaagttcctggatatagcgagtggttgtggtgttgtttctggcagggagacgatggagtctgggaggaagcctcggagcctggtggacctctgcgtccagaaggtcatcgacaacctccgctacgtgggccacgtcgacggcatcgagacggagctgctcaagcgcatcctgccgcactgcacgctggagcagctcacccgtatcgagaaccgcacacagatggatcttagcccgataaccgatcctctgtggaggcggttctatcagaaggaatttggcgaggaccataccaacctagttatcaagagaatgaaggaggcaaaaggaaaagcgcgttacacatggaaggagctcttcaaggcaaaaacagagaggcaaaaggaagttgaagacagaatgctcgagaaaatcacaaagaagttccaggcagagaaagctgagaaacaaagcaaacaaattaaactttgttcaaaggtgcctccaagcagcaaaagaagtttctttggaggtggtggacctagcagtctatccaattccaactacaagagtcctatactgaaaaaagccaggatggaggctaacagtcgagcaagattgcaatctgctatccaaaagaacacttttcagaggtcatctcagcaaaggacaacctctttgagtggacagccagtgagaacaacgaccattcatagacccaattcaaccatcaccatcaccaaaccgattggttcaaacaggcaaattcagaacagcagacccaaattctagagagatttggctattaatggcatgttcaactccagagctcttgtggcctctgcagaaagaatctctcctttatacaagctgtgttacttgccatttcatgaagctcttgtgccctcagaaatggtgtccaagtttttgcagagctgagcacttgcagttgtatcttaaaggtgcagccatttggcaaaagagaaatgcaccagttgtaacatataagggcattatcaatatttgtaacaatcattttcttattaaagaaaaaggcatgtttcttggtttctaacaaaaaaaaaannnnnnnnnnnnnnnnnnnnnnnnnnnnnnnnnnnnnnn

SEQ ID NO: 47348 - DNA, 516 bp, Setaria italica
  Peptide Sequence Number=SeqID_113322
gtaggagcaagcggtggagaacttgctaaaccttggaagcagctacaaccgagaacagtaggcaaacgcggtgaccacaaagcattgcagatgctgatggagaaaggaaaatatccctcgtcgggatgtgcggaggtggagcacctccccgcgcacctggcgtggcgctctcgctgcacaacttccgacatcacagctatatgaggtagcgaagaggctaggatctttgccaaggccgcgtagaggtgcaaggcacccccgcacgccgagcgtggcactctcgtagtgcagccacaggcacagaatcaacatcgcaaggacgatggcatccaccaagccaagctcctcgaaagcggaggagcgagtatgggatgctgggaggcagccgcgccggcgacccgaatccgtggccagcatgcaggcactacgcgccagcacaccggcagtagccagtggtagcaccaagccccctcccgtagacgaaggcacaaccaccgtcacagacgaagtccgtaa

SEQ ID NO: 47349 - DNA, 514 bp, Setaria italica
  Peptide Sequence Number=SeqID_113323
cgggaaaaaagaaccagagcccccgcgtcgctcccatcggggcgacacgggcggagcccagcgctgctgcccgcgaggccctcccaatccgccgttcttctcccttgtcgccgccggagtggctcgccggaagcccgtgcagccaccgggatggcggcagtggggcctctttagagcggggtcatcttcttctgccatttgtggtttcgtggtggctcagattccggtagctcgggcagccggcgtggacggggctgctcggatccatggccaacagcgccggatccggcggaggcacccccggagagtcttggatctgcggcggcttgaacaaggtgcgacggttgggggtgcttgttgccgtcggcgccggggtgtgccgcagcgagtcgcgaccggcaagagcgcgcctggggttggcgttggagtgcggatgcagcgcggcgacgatgcagcggccgtgcagcgcgcagcgtcgagggcaggcgcagcacaggagcagctccaacttcgg

SEQ ID NO: 47350 - DNA, 666 bp, Setaria italica
  misc_feature (628)..(666): n is a, c, g, or t
  Peptide Sequence Number=SeqID_113324
acgacggaggactcggaccgccagagccggggcagctggggccacatcctctacagggtgcgcgccggcgtccggcggctcgtcatgtccacgcactccctccccaccacgcagaagcagtcgtcgctgccgtcgtcggcggtgcagcagcacaacgcccagtgcaagccggcggccgcgttggcctacgtgcagaggcagagtttccaccacaacggccacgccatggcgcactaggagagcgtccctcgccggttgcggacgatggccgtcgcaaccgatctccgtgagatccaaatggggatgaagagatgcccgaaaaagaagaagattcaggttccaggtgaagatatcgtaatacgattataagtggaaatttagcccggtgaattgaggattgaaatgaaacgtagcattaccgttctgttctgtgtagatctagtgcccccctgtcctgtagaggtgaatttgtactctcgttctttatattcttttttgggttggttggtcgatgtaaaaatgtaaaatgtttggttgatcttgtactcctattgattttttgcccccctccctccccccgcggtaaataaaactaatgcaagccgtgcttctctgttcttgaggaaannnnnnnnnnnnnnnnnnnnnnnnnnnnnnnnnnnnnnn

SEQ ID NO: 47351 - DNA, 403 bp, Setaria italica
  Peptide Sequence Number=SeqID_113325
tgctcgctgcgttctccagtaccgtcaagtccgggagcccatccgtcaagaccatactgtccataggcacagatgagtacaaggtggacgtgtcaaatgcggccttctccagaatggcttcggacaagaacctccggggagtgttcatcaactcctcggtggaacttgctcgagccaacggcttcgacggtattgacatgtcatggattttcccagccacacagatggacatggagaaccttggggtcctgcttgcggaatggcgggcaaggatcatggaggaatccgccacgaactccttgtccgagcctcttctccttacagcaacactctacttctcgaaccacctgtttggcatgcctgacagcaatctcgactacccaatagatgacatctcaaacaa

SEQ ID NO: 47352 - DNA, 620 bp, Setaria italica
  Peptide Sequence Number=SeqID_113326
gcggcgaggctggcggagcacctggggcggtgcatcttcttcggtggggatgggcagcaacgactacctcaacaactacttcatgcccaattactacgacaccgcgcggcggtacagcccgcgggactacgccgcgctcctcctccagggctatgccgcccagatcaccgagctctacggcctcggcgcccgcaagttcgtcgtcgccggcgtcggccagataggctgcatcccctacgagctcgccaggatgaacaacgacaaccagcccgacaccccctcctccgttggtagcgaagacatcgccatctccatcggcatcggcggtggcggtggcggtggcggtggcggttggggtggcggcatcggtgttgggagatcatcgtcgacttcatcaaacccaaacggtggcagcggcagcggcggcggtggaagctacagtgcgacgaacccgaccctgacgcctgcagacgccggcagtggtggcgcgtgcaacgagacgatcaacagcgcgatcgccatctacaaccgcggcctgctggacatggtgaagcgcttcaacggccgcgggccgcagcagctgcgcggggccaggctggtgttcctcgacacggtgcaga

SEQ ID NO: 47353 - DNA, 688 bp, Setaria italica
  Peptide Sequence Number=SeqID_113327
atgatatcttcttcctcaaactgtgccaaaattttcccccaaatcaaaattcactggcggatctctccgatcgccaccacgaggaatttcgtgattcctgtgctacgaatgccatggagaaggaggtgcatgaagagttgaatccactacttcaaactatagagtttgctccttcaacatctgatccaaatcagaagcttgattcggctcagccttccgatcccaatcggaaacctgcgaaaaagccgactcgtcaatgggctgcgtggacacgccaagaggaggagaatttcttcaatgcgctgcgccaagttggaaaaaactttgagaagattacacaccgtgtccagagtaaaaacaaggatcaggtcaggcattactactatcgtcttgttcggcgcatgaagaaactattgggtcctggattctcacttgatgcaaaaaactaccaaggataccattgctgctatgctccgttggtggtctctgctcgaaaaatttagctgcagtgcatcaaagctacatctgaagcctcggagattcaaaacatttgtagaagcattgggaaatcaactgctaaaggacagaaataagtccagaagaaagtgcccacgagtggatatgtgtgtatcttctccatctccaattgttggcaagactcctgggaatgaggctttttcccttctta

SEQ ID NO: 47354 - DNA, 483 bp, Setaria italica
  Peptide Sequence Number=SeqID_113328
gcggaagagggcttcaatggccacccacagattgtgggcggtctgatcgtcgtgctccatggcgaggtcgaggatggagtcgtcgacggagccgaaaatccaactgcggatgcagcagtcggcctggtcccagtagggatcagtggggcgaggcggcagcatcacgtcgatgtgcggtttgaggccgaatttgccgcacatggatttgaagtaggacgcccacttggagtagttggagttcttcatctccggggtgacggcacacttgacagaaacagtcgcgtagtggtggatgacagtcagcggtgcggtgccctggatgaagctgtcgccggtggaggccatggtgttggcgctaagggtaggcatggatggagagcccagggcaggcgtggtgttggcgccgagcgccggcgaggaggacgtcctcgtggcgaacagggtgccagacatctctgaattggccgtggagatcgtggacat

SEQ ID NO: 47355 - DNA, 268 bp, Setaria italica
  Peptide Sequence Number=SeqID_113329
gagcgacggctacttcgccgacctcgcgaagctcctcggcggcgcgtggctgatgtggtgggtgcaggcggcggcggcgctgtcgaacatgggcatgttcgtcgccgagatgagcagcgactcgtaccagctgctggggatggcggagcggggcatgctgccggccttcttcgcgcggcggtcgcggcacggaacgccgctggtgggcatcctcttctcggcctccggcgtgctgctgctctcctccatgagcttccaggagattgtc

SEQ ID NO: 47356 - DNA, 653 bp, Setaria italica
  Peptide Sequence Number=SeqID_113330
ctcccccctacgtctccaagtcgtgcttccccggcgactctgcccgggagccctacatcgtgacgcacaacatcatcctcgcccacgcgcaggccgtggcgctctaccgcgccaagtaccagccttcccagcgcgggcagatcggcatcaccgtggtgaccaactggtacgtgcccaacaccgactccgccgaagaccgcaaggcagtgcagcgcagcctcgactacatataccgggtggcgacaccatcgtgcacggctcgtacccgggcaccatgaccagctacctcggtgatcggctgccgcggttcacgccggagcagatggcactcgtcaagggctcctacgacttcatcggcgtcaactactacaccggctactacacctcggcggcggcgccgcccaacgggctcgagcagacctacgacggcgacatccgcgccaacacctcgggataccgcgacggcgtgcccatcggcccgcccgagttcgtgtccatcttcttcaacttaccccgtaggggtcttccgtcgtagtcttccttgtcttcttactacgtctaaactaggtaacgtagacccaaacaaccgaactaccgaccgaaagaaccgacaaaggacaagtagacaagacgacaagacctacgaactaaca

SEQ ID NO: 47357 - DNA, 575 bp, Setaria italica
  Peptide Sequence Number=SeqID_113331
gtcccagtggaagagggtgacacgccccttgccctgaggaagcctccgtgaaaacatcatcaaggactacgtggacttcgccgaggtctgcttcaaagagttcggcgaccgcgtcaaggactggacgacgttcaacgagccgtggacgtacgcggagcggggctactccgccgggctgttcgcgccgggccggtgctcgccgcacgtctccaagtcctgcctgagcggcgactcggcgcgtgagccctacgtcgtgacgcacaacatcctcctcgcccacgcccaggccgtcgcgctctaccgcgccaagtaccagaaggtgcagggcggccagatcggcatcgccgtcgtctcccactggttcgtgcccaacacaaactccaccgccgacagcttcgccgtgcagcgcagcctcgacttcatgtacggctggttcctcgaccccatcgtgcacggcggctacccggccaccatgatcggctacctcggcgaccggctgccgaagttcacggcggagcagatgacgctcgtacaaagggactacctaacgaacttacaatacggacgtaacaaac

SEQ ID NO: 47358 - DNA, 464 bp, Setaria italica
  Peptide Sequence Number=SeqID_113332
ttcgtgaaacacgccatcagtaccggcgtcaacgtcaagggatacttcacctggaccttcatggactgcttcgagtggggggatggatacctggatcgcttcggcctcatcttcatcgaccgcctcaatgacctcaagcgctaccgcaagcagtccagcatgtgggtcgagagcttcctcaggaggaagaagacgcattactgatcatgagctccatgaccagctggtgctacgtcattgctccggtcggccgggatggccggccatatctcccaccgtgtttttatttgcagggtgattgttgccgaggtgccgggaattccattttcagagagtgatttctgtctgctgcctgcatttgcctctcgttgctgtggttgagtgcgcagtgaggggggaataaagctcacggctgatgagctattttaccagttcaattgtttaatgtaattcaattcttctcg

SEQ ID NO: 47359 - DNA, 759 bp, Setaria italica
  Peptide Sequence Number=SeqID_113333
tgtctagttaggtagtcctagtctagtccgtttccggttgccacagctccggggatgggtgtcgggaccggaatggcgaaggggctcctcgccgctgtgctcctcgccgtgctcgcctgcggcggcgctcacgccaagttcagcaggtacagcttccccaaggacttcgttttcggcaccggctccgccgcgtaccagtacgagggcgcctacaatgaaggaggcaaagggcttagcgtatgggacaacttcacccacatcccaggaaaaatcaagaacaacgataccggcgacgtggcacttgacatgtaccatcggtacaagggcgatgtgcaactcctcaaggacatgaacatggacgccttccggttctccattgcctggagcaggatcctgccaagtgagcactgaccactaagcacttgctgaactcccaacacataccatatcatacacccggtcgcgaataactgtcgtatgtaacagagatttgtcatttgtgttatgtatcgtcatttgctttctgcagctggttccctgagtggaggaatcaacaaaaaaggtgtggccttctacaacaacctcatcaacgaggtcatagccaaagggatgaggccatttgtcaccatcttccactgggacacgcccctagccctggaggaaaaatacgaaggcttcctcagtgaaaacatcgtgtgcgtgcagttctactaacacctgtcatcgaccatcgattataagttcctaatcgcccatcga

SEQ ID NO: 47360 - DNA, 2011 bp, Setaria italica
  Peptide Sequence Number=SeqID_113334
taccaagctccagctccagcttcagcagtaggacgcagcacgtcgccatttccggttcccagttcttccgagaacgatgggtcctggaactgggatggcgccgaagcgggtgctctccgctctgctcctcgcagctctcgcgtgcaacgtcgcccacgcgaagttcagcaggtacagcttcccggagggcttcgtcttcggcaccggctccgcgtcgtatcagtacgagggcgcctacaaggaaggaggcaaaggtcccagcatctgggacaccttcagtcacatcccaggtaaaattaagaacaacgatactggcgacgtggcagatgacatgtaccatcgatacaaggaggatgtgcagctcctcaaggacatgaacatggacgccttccggttctccattgcctggaccaggatcctgccaactggctccctgagtggaggaatcaacaaggaaggtgtggccttctacaacaacctcatcaacgaggtcatagccaatgggctgaggccatttgtcaccctcttccactgggacacgcccctagccctggaggccaagtacgaaggcttcctcagtgaaaacatcatcaaggactacgtggacttcgcggaggtgtgcttcaaggagttcggcgaccgcgtcaaggactggacgacattcaacgagccgtggacgtacgcgcagcgcggctacgccgtgggcctgttcgcgccgggccggtgctccccctacgtctccaagtcgtgcttccccggcgactctgcccgggagccctacatcgtgacgcacaacatcatcctcgcccacgcgcaggccgtggcgctctaccgcgccaagtaccagccttcccagcgcgggcagatcggcatcaccgtggtgaccaactggtacgtgcccaacaccgactccgccgaagaccgcaaggcagtgcagcgcagcctcgactacatatacgggtggttcctcgacaccatcgtgcacggctcgtacccgggcaccatgaccagctacctcggtgatcggctgccgcggttcacgccggagcagatggcactcgtcaagggctcctacgacttcatcggcgtcaactactacaccggctactacacctcggcggcggcgccgcccaacgggctcgagcagacctacgacggcgacatccgcgccaacacctcgggataccgcgacggcgtgcccatcggcccgcccgagttcgtgtccatcttcttcaactaccccgaggggctccgcgagctcctgctctacaccgcccgccgctacaacaaccccgtcatctacgtcatggagaacggcatcgccgaggagaacaacgcctccatcccgctcaaggaggcgctcaaggacgggcaccggatcgagttccactccaagcacctgcagttcgtgaaccacgccatcaggaacggcgtcaaggtcaagggctacttcacctggacattcatggactgcttcgagtggggcgacggctacctggatcgcttcggcctcatcttcatcgaccgcctcaatggcctcaagcgctaccgcaagcagtcaagctactggatagagaacttcctgaagcggtattagatggaacgaagatcgccgcgcccactggtacgaggtccatccacatcgtcgatcgatcccctgttctttcagcaactacagctggtgccgccgcgtcgttgttgccagtggcacttaatctgttcgcggtcttgcggatgggccgggtgtgtttgcttgcagagagtgattgctgctgtgtgtgcctgtagtctatggggtcgctgttgctgtcgtggagtgtgctggcaggaaatgggaataagagcaattccaagaggctagctaatcttaaaaccctaaaaaaaaaaaattctaagggtcttccttacgtactttctattcggtcgttctaacttacttactaccgttagtagtagactaggacaaggaaaatagggaaataaagaagtactaaattacctaaagtaagta

SEQ ID NO: 47361 - DNA, 267 bp, Setaria italica
  Peptide Sequence Number=SeqID_113335
aagcggaatttgtccagaaagattgttctgtgataaacttagggaagtcaagtttgcaagatttccaattgtgccagggagatttccggcaaaataattctgctccaatctaagccgcatcaggtttgtgaggttccctatctctggtggtatggtaccagatattttatttgcgtgcagccacaaagcatttagggtgtttgcaagactaccaactgaacccggcaaattcccttgcattacgtttgtaatataatctatgattta

SEQ ID NO: 47362 - DNA, 372 bp, Setaria italica
  Peptide Sequence Number=SeqID_113336
ttaaattgtacttaagtccaagcagatcaaatggaactggttgaattgaaaaaaagaaagaaaaagttcagaaatatttttcccggatgaaattacaatgtaagaacgaaaggaaagtgcaattcggaacacaaaatcaagaaatccttcctgttttcttcttccatgcatgcgagaaaatgaggtgacagaattattttttgaaagacagaatgggaagtctaaaagggcaaagtgtgtttgtgcggtggtgaatcgcttgattagtcccaggcaggtccgacgggagccaggcgaccgtatttgtacgcctggcgtccaggcagcaagcgcaggcagctctgagcttctgcctgctcagagctgcctgcg

SEQ ID NO: 47363 - DNA, 413 bp, Setaria italica
  Peptide Sequence Number=SeqID_113337
ggcttggtcagtccagccctatgataacgacacttgtaaaatattggtgcttggagctgaagagctaacttgaattattgttgtttgtgagtggcaacttgctagtgaaaggtgaacgtggggccgtaccgcggtgcccttgttgtagactaaattaacagtttggaagcaatgatgggagtgcttgcttcggtgtagagtactttgctgagggacagttctggcctgccaagctgcaacgatcccggtcaaggtcacgttgtaagattcctgatcggcagatctgtttgcaatagcccatagggagggccactgtaaggcacggtttggtcatgtgttgcctggagccagaatcaaaatgtttgcttttggcatgcaactgttgtcttaacacttaactactattaactagc

SEQ ID NO: 47364 - DNA, 591 bp, Setaria italica
  misc_feature (9)..(9): n is a, c, g, or t
  Peptide Sequence Number=SeqID_113338
gcgcggccncctttcctacctccccgcctcccatccttccgagtagtggccgcgagagcaccatcacgcccaccaccagctcaccctcgacgccgccgcagcccgcgccgccgtctcccaagaagatgtcgtcctcgccgggacagcagcagcaggcggggagcgggggcggcaaggccgactcggcggagctggcgcgcgtgttcgagctgttcgacaagaacggcgacgggcgcatcacgcgggaggagctggaggagtcgctgggcaagctggggatgtccgtgccgggcgacgagctcgcgtccatgatcgcgcgcatcgacgccaacggcgacgggtgcgtggacgtggaggagttcggcgagctctaccgcgccatcatggccggcgacggtggcagggccggcggtgagggcgccggcgccggggaggagggagccggcggcgaggatgcggacgaggacatgcgggaggcgttccgcgtgttcgacgccaacggcgacgggtacatcacggtggacgagctcggcgcggtgctgtcgtcgctggggctgaagcagggccgcaccgcggaggagtgccggcgca

SEQ ID NO: 47365 - DNA, 576 bp, Setaria italica
  Peptide Sequence Number=SeqID_113339
tttaggtttaacgtttaggttaaggttagttttcggtcgaaagctcgtcctattcttcatgtccggcgacggtggcagggccggcggtgagggcgccggcgccggggaggagggagccggcggcgaggatgcggacgaggacatgcgggaggcgttccgcgtgttcgacgccaacggcgacgggtacatcacggtggacgagctcggcgcggtgctgtcgtcgctggggctgaagcagggccgcaccgcggaggagtgccggcgcatgatcggccgcgtcgaccgcgacggtgacggcagggtcgacttccacgagttccgccagatgatgcgcgccggcgggctcgccacgctcgggtgaccgcccccggccggcgccacctgcatctggctatggagcgctgttcactgcatctatgcttgatccgtactagaacttgtagatattgcttgttggcttgaggggagctcacgtaaccacgcctgatctttcttttggtcctatcttcttttgttgatttgttcgttattagagattgaatgggcttgataattaactattgtattggttgtcgc

SEQ ID NO: 47366 - DNA, 642 bp, Setaria italica
  Peptide Sequence Number=SeqID_113340
ttagcaatagacatcccttttattatggtgatacagaaatcacacgtccttattaatcagctttatcatttctccagtcgtcgtcgagcacgctggattctacaagttctccggaattcttatttcttcatagtagtatatataactctgccgccatcttcagccttacgggcagaagacgaccttgtagttggttccggcggggcaggtgaaggtgctggtggcgtcgtccttggggtagctgtacgcgtcggggcactgccccttgaagtacctcgagtagttggtcggcccgcagctgttggccgccgagccgacgcagcagtacacgtccttcttgaacacggggcacgcgttgttgcagaccccgtcctgcctcagctccgccgggcaccgcgcgttcacgtccaccgcgcaccggggtccccggctgcacccggacccgccgtcggggaggaagttcatgggcacgttgaagccgtcgatgagggagatgtcgaagaagtcgaggttgttgaactggttgagcgcgaactccgccagcgtgttgggggcgcgcccgtacgccgtgcacgccagcaccccgccgcagtcacccgtgcggcagctcccgcggccggtacgtcgttcgtaaccggtcta

SEQ ID NO: 47367 - DNA, 761 bp, Setaria italica
  Peptide Sequence Number=SeqID_113341
agttaaacaaagtttcgttagtatgttgcaacggaggaacaggtgctttagcattagaagaatgttcatgtaaagctaaaggtacagataaaatacgattggctaaatccgttggcagaagaagcaactgctgttgggactccggtggaagctcaggaatgatggaaagaactggctcttgctctggaagagatgccatttcgtacagagcaagagaaagttcatctgtgctaccaccattctctatggcattgttatttccaggactcggagatgaattttccttctgagaaaccttagataaaagtaggagcaggcgatatagatttctcaagttattaacatcctcgtcatctagtgaggttaatggggatggaccaccagcaaatggcaatctggaggctgctgcagatgttgctgagcttaatgtggctacaccaagtgcatctattcccttagcaatctcctgaagaagtaaatccttcacaaaggcaccctggtcagtgagtgtgaatgacaagacttgcttaattgcatatcttgtactatcaacatcttcttgttgatttctgaccaatgattgctctgttctggcacgaagtgactcagttaacaaagattccagacgatcaatttggaaagtgccatccttataaagaagagcctgcaaagttgatcggagctttggtgaactgtcagtgagaacttttcttgcaatccatgggtatgaactgcccagcactttatagtttggattaaaa

SEQ ID NO: 47368 - DNA, 369 bp, Setaria italica
  Peptide Sequence Number=SeqID_113342
cgagggtcagtgtcgtgagcttgctgtccgcgtcggcggaacttgaggctgttgatgagggcaggcagggccatgctgtggccgtatcgagtgggttagagattgatgtgattctgggtagctcaatgatcaacttctactgtaaagttgggttggtggaggctgcagaggcagtgtttgaacagatggaagagagagatattgtcacttggaatttgatgattgctgggtattttcaggatgggcaggttgacaaggcttttgacgcttgtcgaagaatgctggagactaacctcaagtttgattgcgtgacattggcgtccattatcatggcttgtgtaaagtcttgcagtatgatggtcggtacag

SEQ ID NO: 47369 - DNA, 308 bp, Setaria italica
  Peptide Sequence Number=SeqID_113343
ccggtcgcggaggcaccgcatctcgctccctcctgaaatcccgacatgggaagcaagaagaaatcgaagccgtgcaggagcaagaagaaggccaagaccagcgccgaccaggcccaggccctagactacgtccgcgcctgggcgcacctcgcgcccccggaaccctcggcggccgatgctgacactgacgacttcctgccggctcaggctgcgcgcggcggcggtggcggcgacgtgctgtttgagcttcactcccactcaaaccacagcgacggcttcctctcccccaccgcgctcgtcgagcgccg

SEQ ID NO: 47370 - DNA, 560 bp, Setaria italica
  Peptide Sequence Number=SeqID_113344
tagaacgactaatagccgatgccacctgggtgtctatcatataaaagaattctgtccggaataccacgggtttcatgaggattcgcacattctgttcctaggtcagaagtactacacatcatatgcagaggaacaatattcaggagtgcatgagaagcagcatgtgagccacctcgaaactgtagcttttctttcctccacaagtatctttactgagtgtggaatccgtacccaaaaagcctgggagacaaaggaatacgggggtatgttgagctcaacactatccgatattttattgcttgatttcgatatgcgataaaaaccaaaccatttagtagtcactgtgcaatcatttgcttgagcagttgtcttcacacgattagttctacatgtactcgtaggtatataagccttcaacatgtattagaagagtcagagtgcaagtgctcaaaatatttgatgaactagatagtcaggacaatcaagacagaaaagtagtactaaaaaaattatgtgctaaaaaccactccaggggatgactcataatgcaaaatgtatat

SEQ ID NO: 47371 - DNA, 581 bp, Setaria italica
  Peptide Sequence Number=SeqID_113345
aaacgtagaaaattagttacgctccaactacacagctaagccgggaacatcaggtgcacctgttttgttggcaagagaacgtttggtggttggagtgcattccgaaagtgcaagaggatgcaagtttgctgtttcagtcccaactataaaggcggctctacgagggtggcttcaaatcgcagatgaaaatgtttcaatactggccatgctagcgagaattgtatgaggcacaggcacgtgccaataaaagaggttcccggtgctcgacgtgtgctgtggttttctactctggggaggagccagctagccacgatcgacatgagttctcacttctgagggaatgataaggcgtctcaaagttgcaggatgacccgtcatgtgtttgtgttaggtgcctgtgtagaaccaagtgatgtatgtctaagctagtgtgtttttgtgttagtatctagatgtcaggccagctcagctgagtccagtgttgttgctgttgttgtggttgttactttgtaagctgacttcgtgtagtgtggaagcgtggtgactgtggagattattgacgagttgctggtgtgccgtag

SEQ ID NO: 47372 - DNA, 653 bp, Setaria italica
  Peptide Sequence Number=SeqID_113346
tatatgttatggtaggctctatgccaaatcaaaacttgaaaataaagcagagaggaattctgctccgagcctgaattgacttcttgtcttgatttatcatcaattaagattctcgtattttgttagtcaacgagagaaaattgaagataagattttacatttatgaagaatagttacaataagtgcatctaaagttttcagaacattttgcaataatttggcacagaacgtgaagttttgtgtacatcttaacatctctaccatatatggtgcttggaagtattcccatgcacccatatgcgttgataattatgtttattgatattgctataaaacttacaacgatgtcacaccaactgcagcgttgctgccaatttgttatactatgcaaagttgacaacgctaaccgtacataggagagatgcaggtagcgtcacagcacgcactaggaataattcaaatgctatgccacatgtgtgcttgctcatacatcgacaaaaagacaagagcatgagaatgagacatgctacttgaacgagttctcaatgtcgattacgaagcggtatttcacatctcgattaacaagccttttgagagcctcattgatataatctatcttgatgaatactacaaataactaagaacggaaataa

SEQ ID NO: 47373 - DNA, 249 bp, Setaria italica
  misc_feature (241)..(249): n is a, c, g, or t
  Peptide Sequence Number=SeqID_113347
gttggggtgattaggaatgcggtttgtgttgcttattactaatgctagcttctgggcttttgaggattatatatagtgttcatacccatacatacccctagtttaagcttttaagggccatgaaccgtggagagagatatcgatttgttggtagcgtcaagtgaatcatagatgagttcgctgcaatggaggataaaaaatatattgccgcaacgagttaatttaaaaaaaaaaaaaaaannnnnnnnn

SEQ ID NO: 47374 - DNA, 584 bp, Setaria italica
  Peptide Sequence Number=SeqID_113348
caaaagttccaactcacataatgaacaggggcacaaagaatacatggatttctaaccacacaacacatcatgcgcatctgcatgtattttatcatacccatggtgagcaaataaacgcaacctagtcagcatacacctcaactttccctaatgacggacatcacccgatctcaggtcaccgacgccatgaccggctacccacctctgcaataacaggaaacgaatcacagattaggtcaaggcatagcatatccgatgcaacagaaaagaagtgaaatacaacaaagggcaggggctcacggatctgcaaggtttggtttgggaaggatagaggtgcaggcaggaacaacggtaagcagagatgtcgctagggcttgagactggagcaaggaggaggagaggagcgcacagataaggagggggtacttatctcggtggaggcaggaggcgggaggagaagagcacgcctgctcgctgccatgactggacggcacgggctcccaactgcgccgacgggacagccctcgacaccggcagggagagagggcgccgcggcgccgcctgcgcaccccggcgaggcgata

SEQ ID NO: 47375 - DNA, 301 bp, Setaria italica
  Peptide Sequence Number=SeqID_113349
tttcttacacaacttactaccgtagactacctacttactagaataggggtacaatttcccaatggttgcccctcggctatagagtggggcgccgggatgggcctcgtgggcacgatggcaatggcggcaggcaagcatgggacggagcccagttgggtggggctgagccataggtgggcgggacagacaggcacgggatggagcagctagcgggtggagggagatggatgggtgcacatgagtcaaagctgacgatgagcggcatgagcggagggaggtggcatggggatggataagaaag

SEQ ID NO: 47376 - DNA, 1152 bp, Setaria italica
  Peptide Sequence Number=SeqID_113350
tgttattgcaatatcattgctattacaaagaggaaatcctcgttttgctcagctaactagctcagtttttggtttattttactgcggctatcttccttctttctgggttaagcttcgctcgggactagctgcgccagccttgaatacaagaattgcatacagttggccaattcttcttggtggacaagctcactggacagttggacttgtagcaaccttgattgctattagtagcatcattgctgcagacacttcagctttcctttgtggaagggcatttggtcgtacacctttgactaacataagccctaagaagaccttggagggtgctttagctggtctagctggctgtgtactgaccactgtgctgctgtcaactttcttacgctggccaaggtcgctgttgagtgctacagcttatggaatcctgatctttctgggctcattatttggggatcttgttgaatccctgatcaaacgtgatgctggcgtgaaggactctggatcactcattcctggtcatggtggaattcttgaccgagttgacagctacgttttcacaggggcactttgttactcttttgtcagagtagctctacccttgtatggagtctgattacagcagctagtcgttcactgtcaacatgtctttattctaccctttgtttgggtctgattacagcagctcgccgtttgttgtcaacatgtctttcttcgaccatcagcaatgtggtcttgaagttttacataatgattagtgtcgcggagatgccacagatcaatcttcatcgcgggacaatgtcgtgtcctgcccaagcaaatttagtggcaagcgcctgactgttaaagatacaacagttgtattacaaccagagaatgcgcctgctaacttggacagtttcttatgttgggtttgagctgttcttcccggctcaaccagtttgccaaacttgtcacttcgggtgtagatagtttgtttttttagagtaaaagggtaaggctaattcttcaccacaaaagttgttaaagtgtattaaggaggcttatgttgatagctctagtagaccaaatcatacttgttgacatccgttgttttcatgattcaaggcatctgattgacatttaaaggcaggcatggttttcagactaaaa

SEQ ID NO: 47377 - DNA, 375 bp, Setaria italica
  Peptide Sequence Number=SeqID_113351
gggcgggagcgcctcgggcgcgaacgggttgtagggctcgtgcgccggggtcggcgggcgcaccaaatcggcgcgggacggggagtagggcgggtggagcggctcgccctccggcggcggcgcgtccgcggaggcggccgaggaggatggagacgatgacgacagcatgggggttccgagcgcgaggtcggagccgagatcggggcggcgggcgcgcggcgcgcgggggaggccgaggtagaggttcagatccatccgtctgctgctccgcgccgcgtcatcggcggccatccggcgggcgaggcgcccacctttagccacgcgctcccgcgcctctccctccgccggcgcagtcccaattcccaaaggccgccg

SEQ ID NO: 47378 - DNA, 457 bp, Setaria italica
  Peptide Sequence Number=SeqID_113352
atgcatccatcccaatggttccaggtcattaaggaactcatgctcaggaagatttgctggcagggtcaccatctggtgagttccatgctgcggtggaatggctatacacctgatctctttaacttgaggattgtcctgtggactcagcccatacaagaatccagcgatttgtgtccgcagatctgctacgcatatgaacatacaagtttgtggcagagatggccctgacacgccaatcagtcttcgatgcgaacgcttgttgctcgtatggacttgttgtcgtgataatgagctcatctccatgtacattcgttgtccttgtggtaacagcagttaactgagtcgtctctctagactgtttctcaatctcagctatctgttgccgctgctgtgatggtggagcaatttcagcactaagggacctcattctttctgattatgcaaagaaaaacaatgt

SEQ ID NO: 47379 - DNA, 474 bp, Setaria italica
  Peptide Sequence Number=SeqID_113353
ctgcaagtttgcaagcaggggtacaacatgctgaacttgttgattcacaggaagaatcttaactatcttcatttagactacaatttcaatttgaaacccgtgaagactcttacaggcctgcttccgcccagtcaagctcagtagtttggaaaaactttgttgcttggagtgaacggaacagatgcttctttttctgagccttgggaggcctatgatgtagctcattgagtacataacacttcaacagcttctggtaactcacacgaactttcacaggataagctggtgggcaatgctccttgaaccactccgatacaagaggaatgtcctctgcacgacgtgttctgccagatcgcatgttaaaaggctttggagcaaaaagcaatgatataccagcggctgttgtatcagtgtagagttcagtgcttttcaagagaggttccacgtcttctgggagacaaaaatcttcatcat

SEQ ID NO: 47380 - DNA, 7207 bp, Setaria italica
  Peptide Sequence Number=SeqID_113354
tttttttttttttttgtttaaaactaatgggaaatcactatcagcctgcgtgtcaagttcagaactatcagcatagctacgaaccaaaatcttactgttaccatggcgtgcacttgtacatttttaccccgtctctcaagggttggcttacaacaaaaaggtataatacaagctagagcaacatttggggtgggggcttacagcccgttgctatgggtacaacccgttgcgtcagcttacagccttacaggttcacacatcgctgtccaaaacaaagctcagtgcgtttcagatacagagctaaacatttggggtgggggcgtcccagcgcctacgagaaggtgtcctccctatccccttctgcgacctcaccctcctcgatgttgctaaactccaggaagtgtgttggccggtggtcctcgtggtagaagtcccggggcatgcccagcttcatattgtacttcatcagcgggtcatgcttcactcccatgaagttgaagttccaagggaacgttatctggaaccatatagaagccaaggaagcggtcactaagaagcatctggaccttctcataatgagttgggaggtatccatgcgggttgctcccattgtccttgttgctgcgtccccactcgtaaccgcttggtgtcagcttgtatgcagtcaacgagcaagatcctggcgtgaagctgcatgtcagaatgatgcacttctcaccatcccattgtttgttgccctccagaatcttagcgtgtgatgtcaggtcctgtggtgatagctgtggagcttcatttggctgggtatgcatccatcccaatggttccaggtcattaaggaactcatgctcaggaagatttgctggcagggtcaccatctggtgagttccatgctgcggtggaatggctatacacctgatctctttaacttgaggattgtcctgtggactcagcccatacaagaatccagcgatttgtgtccgcagatctgctacgcatatgaacttcttcagtatgttctttggcataatataagtgtagccagtctcctttatatcgtcagaattgacataaatgtgattgacacgaagatacaagtttgtggcagagatggccctgacacgccaatcagtcttcgatgcgaacgcttgttgctcgtatggacttgttgtcgtgataatgagctcatctccatgtacattcgttgtccttgtggtaacagcagttaactgagtcgtctctctagactgtttctcaatctcagctatctgttgccgctgctgtgatggtggagcaatttcagcaccaagtatgatatctcgaatttcagattgcgtcagtgcagaagtattgacattgtttttctttgcataatcagaaagaatgaggtcccttagtgcacattcaaccttcaaccactgttcatcattcaaagttggccatatatgatgtggttcagtaacaattgttttgtcaggtttgagcaacatctttgccttctcgttattcacatgtagagcccgtagaataagtacgatacgagagaatgctgtgtatgaagagatacttttcaaccaatcatcatatatattataaagaaccatctgtggttcagttgccttcagaataagatcaccaaacttctcaatctttaagcaagcctggaaaggaagttgcagctcactgcccttgataacaatgttagggaagtcgagtagatggacctccaatggatccaacatgcccttccttgtcacaataatttgctttggctgctcttctacaggcagagatcgaaccaatgcagcaacctcctcagctgttttccacttggccagctgtccaagacgcttttgccccgcccatacacttgtgtggataaccttaaggaaaagttgaccagttcttggattgaaaatgaaaatagcaccgttgattggttttgtggtcaagttaccctcaaaggttttgtgaatagtgactcgatacacatttgtatcatccacaaaccatatgatttgattgctgaagatctctccatagttttgtgaagacagatatggttcagtgggttcagatgagtacaactgcagacccttccttatcctctccctcagcacatacagagcaggatttgacttcatgatcttgttcattgcttgctgaagtaggggctttgacccagggaaccagttgccaaaagcagagtgcaaattatacgctagatcaattccaatcatcaccccagtaggtgatgggtagatggacatattgtctgttgtgtaatccatgaacttggctcttgtataacgttctatgtcatgcgaatcataatctccccaacgcagttgaacatcaatccaatacttgttacttgctttctgatcgaagagatccttcgactcagaaactaagcttggttttgacatctgccatctgtgtgcagcaaagaggaggatatctgcgcatgaactgttcatcttgtaactcttcctgggatgtattgtctctttctgtacagtctcgatctccagtgcatccaactcttggtccaaaacttggcaaagatccataacaacactttcatgtatcttctgccacaaatgtgcacggaagatctggatcagagaaatcttcaatgtgggaattttcccgtgcatgaatatccccgtaagatctagctggacctggaaaccaacatacacgtttgcacgattgatggttggtgaccaccacagggtaaatcttcgattggggatttgattgagcccagaacgctgtgcatttgtcagtttcttgtatttcatagactcttcgaaacctgatgccttctcccaaaacagaccctcccaggtagggaaataagttcctttaaataatgtatgttccaggataccttctacaccaccaagcgcttgaatgacatcagttctgtagttatttaggttccaaagcttcccatcatgccgctgatgtgtccaccagaatgggttctgtttcagcacttgatattgcttaaaatctgttctcactctccatcctttatcataggctagcgtatggcggtccttttggaaaagagtgttgatacgaggtatacctctatcccatgagtcttcaagatcctcaagggtcaaccgtctgttttgagattgtgcttcctgcctcttcaaagcatactcagcccaaacacgctgtgaatcaataaactcactctcccatggctggatgtagcgatacaagttaggaataagctggtcctcttcatggctcataccacttcggaaatgtgttacaccaacatctgtctgcttactgtacctaagatcgctttgtggtataagaatatgacccatcgacagcattcctagacctccaatttccttaggtgtatagaagatgacaggaggaaacctactaggcatctttgaattcaggccaatctttatacgagtctggatcttgttttcacatttgacaagtaaatccaaaagctcctgcgtatggactgttgcttcgcggaaatatgtcataaggccaatgagagctgtattccacttgttgactatcttggtgaatgttgttgaccctgatgacattagaatctgcctaacacggttctcaaacaccttcatatgctcatcatcgactctcagaaaggcaattgctgtcctttcttttgtctgttcattctgcaaattccatactccatcctttgtgttgctgaatgcctcctgagtcattcgtatctttggcagtatacggacttcaaacccacacatgctaaaaagcaggtttggattgtccttgctgtaaacagagacaaagctattctcccattctaaggttgtaatactccttggaaggcggttcttcatatcccagaacacacttcttccaagatttacatcatgtttcatcagcctcattcttgcatctctaggccaacatttcttgttattgtagccaaccatgttctcattgttaggatcaggatgttctgtcaagtaccgctgaattagatctcgcgcttcctcatgagtgaagcggaacaatatgtgcaccttgtcaatatatcgagaatacaatctgatgggatgccttgtctcaatttttgtgtcagcatatgtaaggaactcatttggcatctgaggtggcccagcaagctcacttgcacgtgttagaccgagaatcaggagatccagcacaaggccataatactgaacaacaaaagatgcaaactgaagccctcgaatgagaccataagaatttgtgtggctcatgtccttgtaagacaacacaacattgttctttgcagtaacataatcagctatgttatgatctaagaccaaccgaagaagcctgttcaacagtgtcagatcaattttttcaaagaacttctcaaattttgtctggagcatcacaacacactgtccatcacttgtgtcccatacatcctgtaaattgtttatgccctggcaccatttataaacaagtagaggtggtggttcagaatcagcaggcttcacccaatttgggaagagatggcgtttgtccccctcgtaccacaagtactggtcaaggtatgcatcagtgattttttcaagaggttcgatttcatatactgggatcaagtagctgtataagtccatgaattctatgccaacttctttgaacgcccgctgagtaagaagatgccttttaatccttgacagtgcttcgtgtggattatcgtaagcctgttcaatcaacccaagctcctcccgttgcagttggttcaacctaactgctacactgtatgactccttcagcctttccagtgcaagaataagaagtttggtgtcatgcttgtatgatagtggcggaaaaggaattggtgagaacttccttgattccagccagtgaactgttgttgtataaatagcaacagcttcctcaggagttacatatggcccatctttcaggtaattgtgttgcctctcttgttctgccttcagccatagacgagttaaccttccaagatttttccgacaaacagtcttgtcaactgtagcaccacgcctgatacgctcacggttgtaatgagcaacattcgtccaccaatctgcctttgacttcacataacgaagaatcatgttctcaataggcacaggtaggccagggactttccatgggatatttgccttccagcatcgccatgcctcactaagatgctgtaatatagtccgggccttgttttgtttgatgccctctggcatagcatctagaacatcgtgcataactgcagcacgaagctccaaatcaaaatgagactcaacacgttgctttgttacggttttggctactcccttcgaatgccgaccctcaaactgccttgccaacaaattacccaaccagcgctccaataatgggacaataccgcgaaggaagaagagccacactctccacattggagcccaaaacccacagccaggtccttttccaacagggccagtgttgaaacggtaatatatcaagtgcttcagatccttgcacatcctaatctgcctcatcaatcggtacttgtacctatacataccagttagctggccaacatgagagaatatgtattgcagaccatctgccaactggaaagcatcaacatttcccagacggaactggatgttagcatcaacgaccaacttagtaagtcgtaaaatttcacgacacagatggaatgcatttccaaaacgagattttttcctttcctttgttgtaagagtcttcacgggtttcaaattgaaattgtagtctaaatgaagatagttaagattcttcctgtgaatcaacaagttcagcatgttgtacccctgcttgcaaacttgcaggcctgcttccgcccagtcaagctcagtagtttggaaaaactttgttgcttggagtgaacggaacagatgcttctttttctgagccttgggaggcctatgatgtagctcattgagtacataacacttcaacagcttctggtaactcacacgaactttcacaggataagctggtggggcaatgctccttgaaccactccgatacaagaggaatgtcctctgcacgacgtgttctgccagatcgcatgttaaaaggctttggagcaaaaagcaatgatataccagcggctgttgtatcagtgtagagttcagtgcttttcaagagaggttccacgtcttctgggagacaaaaatcttcatcatcatcctcttcggttactttcctctcccgacgatcaaccttgttagttgaagtgatgggatttatcagaggatcatagtagaatgctggcaaatctggatcctctgtcttgatatacattatcatgggggtatgatagatcccaagtctcactttccttggcctgttattgtatagatgagggaaagcaatcctatactcagttcgaagtggctgacgtatgatgagtttatttatgtcattaaactcattccagtcctcatcacccttctccatatcacggtacagcggttcaaacttcggaccccctggaatgcacatatttagtgctttggcagtaaagaaagattccatatcaaacaagtagaaataattcctatcaatcaggtctgacaacagctggccagcaaggcgatatagtgttgccattatgggaagagatagatgccatttcctgtagctggggccgtttataagcttggtcttcataagaggcttgtggtcatagaaccattcatatacagctgcatcttcttcactgtccaactccaactgtatggcctcgagtggttcaacatccaacagattatcagcatagtccagtggaggctcctcatcatcaaatggaggaaagcgcattcgtttaaaatgccgcctatccctcttctctctccgcatcatgatccacattgtaccccactgtgcaaggtatatgggttccaccacccaggggatttcatttacaaaagtgatagccccagtaatgtgatacaaaattttcacatgccgaacctgctcccaaggcattggcatgttctccagtagtttgtagacagcatggggcacaaatttgagcgctccaagataaacacgcttgtcgtgcctgtacttcttggaggacatgtctccgtgatctctgatgattttgcggacgtgctcaggaggcatgtcctccttctgcgcctcgacgaaacccaaacttgcg

SEQ ID NO: 47381 - DNA, 775 bp, Setaria italica
  Peptide Sequence Number=SeqID_113355
ctcctgataaagtggacgggcggggtgaggtgggcgaaggagaagaagtcgtagaactcccccagcttcggcggcgggcggatggccgccatgtcgtgcgcctccgatatcggcggcgcgccctcgccgctgccactgccgccgccatgagccccggtcgaggcgggcgtgggcggggagggcggtgtcgcggggcgcccgtgcttggatgatttatgcttggcggcgccatcccggggcttggcgaacgcggtggtgcaggcgacgatgtccagcagccggcggacgtgcgccaccgcctgctcctccgtcgcgtactcctcttcaacgatccggagcgtgcagggcttgagcgccacgatttccaccacgtcctccagccgctgcccgcgcgccacatgggagagtgaatagtttgtcaggtgacacgtctccacgttcgaccccagcagcttccgcacgtccagcacacggtccgtggatatccccttgagtgtcacctgggattcatagggggtgacaaccgtgacgtctatcacgctgggcacaactttctcttccttcttcctcctatcgcctttgccgccgccgccgccgccgcccctgcccttgccacggccggccttgggggccattggctgcctcgctcgctcgctcggagcggcccagcggcgaccctcaagcgcaaatggagcggtggcagtcgatggcggtaagggtttaacgccccccctgcagccgcagaggagggagcagcagaagaggagggagcaga

SEQ ID NO: 47382 - DNA, 371 bp, Setaria italica
  Peptide Sequence Number=SeqID_113356
ttttgtttttcttgtattgttggtgtggcatacaatactttgatccgccatctcagtttcttggggaaagcttatgaggcctgccttgtgcttcatgaggtgattgagaaaggcattactccaaatgacatcactgacagccttgtggctgattgtctctgtagagaggggaagttgttggttgcacttagttatttaaaacgatcactagaaaatggtctctctagatctgcagtatctagtattatgcgaggtctcattgctggtagtaagctccatgaattgcatacactagtaggatggatgcttggacaaggtttcatattagatgtatatatgtatcaggaattaataattgctttttgtagaaa

SEQ ID NO: 47383 - DNA, 236 bp, Setaria italica
  Peptide Sequence Number=SeqID_113357
tgatgctggaagataggaagagatgaaccattagattgttgctcgtaagctgagtataattttgttgagatggctagagctgtatctctatatagtgttggcctagctgttatatagctgctgcagcgcgctgataacaggagcgctgtgactcgctggttgcaggctcttcttggttgtttttttgcctgctccattgtattaattacagcctgagaaacagacgcgctgctttg

SEQ ID NO: 47384 - DNA, 405 bp, Setaria italica
  Peptide Sequence Number=SeqID_113358
aggggccctttggattgaagtattttcaaagaatgttcaaaaggatttcaatccaaacaaaattttcctatgatgctggtttggaaaaaagagaaaaaagagatcaaggatattcataaaggatgacttctaatgcccataaatctgtaggaatgtaacattgagcttggaaaaattcaaatgactgtggacacatcttattgcaaattcttgtggtatttcgtcctaaaggattgaataagctacaaattaagggtgtgatgacgaacgaaatccagcattccaagttaaaatcacaagaaacatggctcaggtgagagaattatatgaaaactaatatatgagtttcatactgcaaaaaaaggaactcatgaggactaatctatttcacacagccaaaaaact

SEQ ID NO: 47385 - DNA, 466 bp, Setaria italica
  Peptide Sequence Number=SeqID_113359
attttcattctgatcgaccattgaagtgggaccattacccctgcattacaagtacagatatttcaaaaaggtttgacagaacacagtgattgatctcaaatgaacaaaatgacaatacaaactgaccacataggtcatgcggaaatagacaatgctgccacttgacgcaatgcagagatgcagctaagttattctagttcaggataggtgcgaggggcagttttatgctcttttcgaaggggtaatagttttcagttcagaatgccctatgcagatgtactatagtcaatgttatgacaaaatgacaacaaactttagaaagccaaacaacaactggtcaagaataggatcagaattacttgaaaacagatgggactccacacttcccaggggcatgaactcgtaaacaagaaccctgtggtcatcttcacaacaatacccgatcaacttcactaaatttgggtga

SEQ ID NO: 47386 - DNA, 441 bp, Setaria italica
  misc_feature (372)..(372): n is a, c, g, or t
  Peptide Sequence Number=SeqID_113360
gaactttaacggcaactctcaggggctcttctatctccaacccttcgcggagatctttggtaatgtaccctctgtagactctgccaaatccaccacccccaagcaatgaatcttgcctgaaatttttggtaatcctcttgagctcctcaaatgtgaatgctatcaaagggttgcgagccgtatcctttctcagtgcctccacctctttcgggttggatggcagctggctgtcttcctttccaattctctccgatgggctctgaatttttggagattctgctgcaaaggcattggaagaaaccctgttgaagtatggattccctttaaaccagcaattacccatactgcacaactcctaaagaagaaagttcngcctctctctccctgtctcaccaagaacaccaagaacagaaaaggaagaaagagagtgcttgcagtgag

SEQ ID NO: 47387 - DNA, 571 bp, Setaria italica
  Peptide Sequence Number=SeqID_113361
aagaagtgattccaacatgtgaagaatgacctcacaaagaggcttttataatgacctgcaatagtaatggatggtacttcatattcttattctccaatgactcatttgggccattttaccactaatcagcattccactttgaaaacagatgggactccacacttcccaggggcatgaactcgtaaacaagaaccctgtggtcatcttcacaacaatacccgatcaacttcactaaatttgggtgagagagctgccctggaaatataacctcagccagccactccctatggccctgcaagctattgtcaccatcatggactttaacggcaactctcagcggttcttctatctctaacccttcgcggagatctttggtgatataccctttgtagactctgccaaatccaccaccctgatttggtggcattggaagaaaccctgatttggtgcgccccactcctctctgccgatgccgaggccgtcccatcggagcgtgggtctcgatgcgcgctccggtcggcgtcaagatatgttctcgccgctcctcccttatccttgcccccactttctt

SEQ ID NO: 47388 - DNA, 1058 bp, Setaria italica
  Peptide Sequence Number=SeqID_113362
tccgatccccagcacacggaatccatggagccggcagcctatgtcgcggccatcctctcgttcctcttcctcttctcgctccaccgcctcctcggcagcgaccgccaccgcaagatcaatggcaagaacaaggagatgcagcggctgccaccgagccctcccgccatcccggtcctcggccacctccacctcctcgggaagccgatccacgccgcgctcgcgcgcctcgccgagcgctacggtcccgtgttctccctccggctcgggtcgcgggagaccgtggtggtgtcctccgccgcccacgccagggagtgcttcaccgagcacgacgtctgcttcgcgaaccgcccgcgcttcccctcgctgctgctcatctccttcggcggcgccaccctcccgatgtgcggctacggctcctactggcgaaacctccgccgcgtcgccacggtgcagctcctgtctgcgcaccgcgtgagctgcatgctccccgtcatctccgtcgaggtgcgcgccatggcgcggagaatgttccggtccgccgcggccgccccggcggcgccgcgagggtcgagctgaagcggcggctgttcgaggtctccctcagcgccctgatggaggtcatcgcgcggaccaagacgtcccgcaccgaggcggacgccgacacggacatatcgccggaggcgcaggagttcatgaaggcgctggacgtgttcatcccgctcctcagcgcgtccaacaagtgggactacctgccggtgctgcggtggttcgacgtgttcggcgtgaggagcaagatcctggccgcggtgaccgcgagggacgcgttcctgcggcggctcatcgacgcggagcgacggaggctggacgacgacgagagcgagaagaataagagcatgattggcgtgctgctctctttgcagaagtcagagccggaggtctacacggataccaccatcatggctctgtgctctagcatgttcagcgggggagccgagacaacgtcgacgacggcggaatgggccatgtcgctgctcctaaaccaccccgaggcgctgaag

SEQ ID NO: 47389 - DNA, 588 bp, Setaria italica
  Peptide Sequence Number=SeqID_113363
ctctacatgctctgaaccaccactttcaacagccggatactcttcccgactgcacaactcccagtctcccatcaaggcagatgttttgctctcttatttcgatacctgtgctgcagaaatgattgttggggatggttcggcaaatatccaggaagtgggctcatcttgcatctccagcgtaaaggttgtgtcacccaacaagaagagggtctcacccctgcacactggtaccggattgtccccgatcggtaggagtggaaggaaactggttttgaagtccatcccttccttcccttccctcactggagatgctgacagcgagccccattaaacagagtcccccagcatttggcacctgagccctgaggctgaccggtacgggaaccctggatccttggaagctgacttcgcccaattttgtttgatgaagagatgaaggaatttagcagttctaccatgcagagatatatagttggctaatatttctcggaagcccgaagagtaacagttccactacatgtgattgacctgtcgttacctagtcctgtccatgccatttagctaaggtctcagaatgtatatatttcc

SEQ ID NO: 47390 - DNA, 472 bp, Setaria italica
  Peptide Sequence Number=SeqID_113364
acgaggctgctggctcttatgcacaggcatgcatagctgttgccaaagaattgggccatccggttatagacatctggacaaagatgcaggaatttccagattggcaaacatctgcattaagtgatgggcttcacttcacgcctactggaaacaagatcctgttcgacgaggtggtgcagacgctggcaggcatcggtttcagcaaggagagcctcccatatgatctccccctctaccccgaaatcgaccccaaggaccccatgaaagctttcggagcttgaagaggacgccttagtgcatgattggattagagatgtttgctcgtgtcaaatgatgtgccctactcactatctgttctgtttggcagtgcgtgtgcgacttttacttctggaattgtgttttgtcctttgtaattaatatgcataagtactactgatgccatcacataaacagtgaaattcaataaatggca

SEQ ID NO: 47391 - DNA, 401 bp, Setaria italica
  Peptide Sequence Number=SeqID_113365
gacaagacctgcgaatcccggagaagaaggacatggcggctgcagcgaaggcatcatggatggtggcgatgagcgtcggcgcggtggaggcactcaaggatcaggcggggctctgccgctggaactacgccctgcggtcgatccaccggatggccaaggccaacgctcctagcttggcacaggccaagaagctggccccggcgacggcggcggcggagaggcggcgagcggacaaggccgaggaggggatgagaaccgtcatgtacctcagctgttggggccccaattaggcataggtcctctgcttctgctttcagtttcagcagccgagcttggcttgagagacctggccggccggctgctcctcctggttgtaacataccacgatgatgatgaaaatt

SEQ ID NO: 47392 - DNA, 338 bp, Setaria italica
  Peptide Sequence Number=SeqID_113366
taccttggtaagtaatctggaagatgccgtcggacagatggaaagaaatggcgatgctcgaaggaggcaatggctgatcacaagtactgtgagcggcacatcaacagaaaccgtcaccgttcaagaaagcctgtggaaaaccaacctaaaaagaccgccaaggacacacctgctgctgctgctgctggctcattgccctgtgctgtgtcacaaggtagcttgaagaaggcaaaagttaatgactcgaagccaggcactgtcagctattggactgatagtttaaacaggacaatgttgagcaaagagaaagcaaaaccaacaaacagaagacaacaata

SEQ ID NO: 47393 - DNA, 607 bp, Setaria italica
  misc_feature (588)..(588): n is a, c, g, or t
  Peptide Sequence Number=SeqID_113367
ctgccaggctcgaattttgaagagtactcttggttgccacgagagtgaaattgccactgcagtgtccaagttgccaaccattctaggaatatctgagcagagccttcaccgcaagattcagttcttggtcaatgaggttggactggagcctcagtacattttgcaaaggcctgccctgttcacatacagcctggagaagcggctagtgccccggcattgtgtcatgaaggtcctgcaggcaaagggatttctgattagcaatacgagctttaacacatttgctcaatatggagaggagactttcaaattgaggtacattgacagtcacaaggactctgttcctgggcttgcagatgcttatgcaacagcttgtggtggcgttgtgccctctgcagtctaattttaacatcgtgaaatgttctaatccatttcgtattctgggtggatggtgtaactgcgacatgcgctcattagaaggtgtcgatggtgcaggcattctcaattctgcttgctgcaatagaactatttgtgatctctgactgctaatagtccaggtttaagtatggttatctatgattctatgaaggngctagctggcttatctgga

SEQ ID NO: 47394 - DNA, 408 bp, Setaria italica
  Peptide Sequence Number=SeqID_113368
aaacaggttgccggaagatttgtggagtaccacggcatgacgatggtgacaatcagaggagctggccatttggtgcccctcaacaaaccagcagaagggcttgcccttatcgacacattccttcgggggaaacagcttccttcacaaagatgacaagaatgtttagtgttgccatgggggttattttttccaaaaacaatttgtgaaggattggacgacctaagcgtggaggtggagagaaatagctttgaaagaagggctagttttgactggaagttgatattcctattgaacattgaatcttctagctacattttgcatctgcggatgccttgtttggaagttttcggttgaccagaacattgcaattctcatttttggatatcagtaatttacaccaacaaaatt

SEQ ID NO: 47395 - DNA, 1043 bp, Setaria italica
  Peptide Sequence Number=SeqID_113369
cgagcaggaggagaaggaggaggaggtgccgccccctcccccgccgccacggccgtcgttggagcaggaagaatacgaaggccgtcctttcccgcggcgccggcgtccacgtcgtccccaccttcgccggtaagcccccgcatcccaacactacttagaaataggatacggatacctttatttctctgtttcgtcaatttgagtctgttggtaagcaattttgagttagggcttttgccccgactataaggtgacctgtttgtttaaatgcttgcaaggagtcactctctgttctagcatttagtttggattcaactactagcagctacgttccgtgctagtttgcgtatagatgcaataatcaacaagcatatggttatatctcaatttgtcaccatgctgtggtttctcagaactctcacttatacctttttttaaaaaatttaattaggctaaaaatcaatcttccgcaatctaatgtcaaaaaatgattttcacatgacattgcatatgcccagcaccatcagtacattcatgtatttcatcatacagctagcctacggaaatcatcatcttcatgaaaacagctcccaaaagataagtattaactgcaagacatcctgcaggtcatacttatcttttgacagctgttttttgaatattgccacttccataggctatctgtgtggtgctatacctactaatatactggtttttctgcaccaatactatgccatgttgaaatttttatttggaacatattgcaattttagcctaataaatctgctgcttattactttgcaacatctatgtcctttttttccttttttttttagttgttcttgttcttgttgattgtctagtgatccttttaattacatgaattagctgtctatcacagtacttatatacaggaatacagttgcttcaaatccgagccttgacccatgattagccagcaccagtactttttaaattttaacattgtatcagttgcaatctaagtttaccaaattagttcggtccttgcacacatcatcctc

SEQ ID NO: 47396 - DNA, 506 bp, Setaria italica
  Peptide Sequence Number=SeqID_113370
aggttagtacttttactttagttagaacaatgatgagcacgatagacttgatttttcatcttgcagatcaagaactaactcattttgacctacttcttgacctttatcagtaggtaatttccttttcttgaatgggttgttctcagggatattttttggctccacttcattgccttccactcggggggattgcttctgcagtagaaatttgctaagggcaagaactccttttttgcactttttcccatcacttgaaatctcatcaactatcatattttcattgctttcctgggatgaaaggattgtaatacagctcttttgtgtcgaaatttcctgagaaccacattgattagcaacttcaaatgccgaggtatcaaggaaatcaataaggctaatgatcctggagtactggtcgaatgctttcatggtaataggattcaggtgcccctctgcaatccctcttgcaattgatggtgataatgctggtccaagaattattcctagta

SEQ ID NO: 47397 - DNA, 691 bp, Setaria italica
  misc_feature (622)..(622): n is a, c, g, or t
  Peptide Sequence Number=SeqID_113371
tgaaatcctgtgatgatttactactttatctttctctgcgttgggccaacagaaataacaattttgagtccaagaaagttggggtaggctgaaataaatcccaacgagagccaccaacaatagggactaaagttatattttgtagagaattgttcctttttttcagatctaatgcaatgaacattattggacacataataattttcacattagtattactgcagaaggaatgtatacttgttttccccatctgcttttgaaattagtgaagttatgtgaaagtaaaataggaaggccatgccgattgctacgctgtcttcaccatgatttttcccaaactagcaatctggatccattcgcccttctccaacttcagttttctatgctacaaaatgcgagtcttctttagccaaatatcccttctgttaccacctactcttatcagcttttcttttctgattctttctttaatctctattaagtttaaggagcaaaaagctcaaataggacccctttggcattgaaatggtcggttcagattcaggtgctctttcgctgggatttctagatcaaaccaatcaagcaactaagccaaacataattttattcgacgactctttcnctttcaagattagcaggcatgtggccctgtttgttcttttgttctttatacaccaactagtatatatgg

SEQ ID NO: 47398 - DNA, 311 bp, Setaria italica
  Peptide Sequence Number=SeqID_113372
ttgggaaaagtctgaatgccattaaaggtgcacaggacaagataaggcatgcagcaagtgaaaggaggcagtcattacagttgcaactcttagaggacatagctaatcaacttcaaggaatcaaggatgctgcagaagcagggcaacacatatactgtgctcctcctaaaagctccaagaaagctagaaatcacatctggtagaagcttgaatctatattacaagcaacactgaggcagtcagtgcttgaggcctattagagcctgctaatccatatgatttaatctcctcagaagctatcttgttcatct

SEQ ID NO: 47399 - DNA, 1377 bp, Setaria italica
  misc_feature (211)..(211): n is a, c, g, or t
  Peptide Sequence Number=SeqID_113373
tattgtctaaattgttcttatgatgtgcatgtagttgatgacatttgcttctcaacagaagctaaaggcctgattggtcgaagcttctcagatgcaacaatgcaagcagagaaattacagactcgagctgcggctgatgatctccttgggaaaagtctgaatgccattaaaggtgcacaggacaagataaggcatgcagcaagtgaaaggnggcagtcattacagttgcaactcttagaggacatagctaatcaacttcaaggaatcaaggatgctgcagaagcagggcgacacatatactgtgctcctcctaaaagctccaagaaaagctaggtcagtattgaatgaaaattgctaggatgcatactttcttgcaacatcttttgcgctgcatttagcttaatttattcattgtttcatggatgcaacatcagaaatcacatctggtagaagcttgaatctatattacaagcaacactgaggcagtcagtgcttgaggcctattagagcctgctaatccatatgatttaatctcctcagaagctatcttgttcatctggggaaagaacaggaggctgttaggcaagctatttaaaggagatcagcttgtgaggtattgcaaactgaagcatcaaatgtatgcagcccttaattcaactacatggacccactgctgacaaattaggcagtcaccaatttttgaagttactaggatagtctcttgcatgatgcgacatgaaggaataggattattagattgcgaactttgtggctagagtcataggacacttgttacattatagattgcatcttctgcttgcagtctcagctgagttaatccatttggtttgttcactcctcacagttcttgaaagaaagaaaacaaaacgaagaacttaatgtctataaccacaactcaaagccagacatattctcaaatgtattgcatagtgtactattgctattgtttcactatttgcttatcatctgaataagcctgagatttctctctgtggaacatctattctcacttttttatctcggaaaacaaacaaaatttacttcagtattatcttccagtatggtcatttgcccgaacacctgtatgtctatttcagtgaactaaagcaacatttgttggagcacctgaaccccttcttgtttgaatccatctagttaaacctaaagcaactagcgtttcaaagaaaagaaaatctaaaaacaactaacatttggatgcaaagctgctcttaaattactttattttatcagaacttactaaaagtgtgattagatttatggacaaatatgaaatgtaccacttagattcttcaaaagtctggtgaatgacaaacaatttatgaagattgatggggt

SEQ ID NO: 47400 - DNA, 1194 bp, Setaria italica
  Peptide Sequence Number=SeqID_113374
tccgagcgggaggcccgcgcgctccgcaaggaggtcgacgcctaccgccgcctcctcggcctcggccccgcccaggacgccggctgcgacgaggaggaagaggacgacgacgaccaggagatggtcacgccgcacagcatgctcatgtccgagggggagcccagctcctccagatcggtcgatgcgagtctgatcatgcagcagcggttggggaacgattcggggttcagcttcaagacgcccttcttccgtgagcaatccgtggtgccgcctgtgattggggaccgtggcaatgggggaagcgaagacggcatcgctgttcagacacccgccaaagctaccgccgttcaatcgaggctggagctcagcagcactgaggatgaggatggggcagagacagaggatgatggagcagaaacggtggaaatcctccccctgtctgcccggagtcaagatttggatcagggttgcgatttacatgttgatgccgctcctggtatggaatctaccaaggagcagacacctcatggatttcaggaggtagggtgtgggggtatagataagattggccgtgatcatacgggaagtgagaatgatgcaaatgtctatgatgtgcatgtagttgatgacatttgcttctcaacagaagctaaaggcctgattggtcgaagcttctcagatgcaacaatgcaagcagagaaattacagactcgagctgcggctgatgatctccttgggaaaagtctgaatgccattaaaggtgcacaggacaagataaggcatgcagcaagtgaaaggaggcagtcattacagttgcaactcttagaggacatagctaatcaacttcaaggaatcaaggatgctgcagaagcagggcgacacatatactgtgctcctcctaaaagctccaagaaaagctaggagaggaatattgtgtcgcgaaaacacgattggctgtgtaaatattgtttttggtttgtagtctagtccactgatttgttgattcatcaagttttgcttgttgttttaagtaaatgtggataattattttgtacatgtatataaacaaacaggggatccattttgctgtttgtaaccctgtgatatatgtgtgctgcgaactgtataatcctttggctatatgagttgtgttggggaactatgggctggtataacatgacagaaatgaaaagg

SEQ ID NO: 47401 - DNA, 472 bp, Setaria italica
  Peptide Sequence Number=SeqID_113375
gctggtttgaagctttgagactgctgtccagagagcgcaggttgctgaagctgctgctggctgtgactgtgctgctgcgactgttgctgttgctgctgctgctgtagaagagcaagtttcttctttattagcatatcaatatcattacgcgatccaccactttggccaggagaaccaagatttggaataatatcaccaccactatttgtctgcccatcctgtccaaggaccacattcctgttgttaagaagcatccttaatcttctggtatcaacatcacctattgaggaaggtatattttgctgtgcatgcagcaaaagctgttgctgctgctgtggcgtcagaaactgaagctgctgaaattgttgtggagattgcataaatgacttctgctgcagaattccagagcgaagttgatcaagtcccgtgagtggccaacctttcagagttaaattgtttccagcctgattag

SEQ ID NO: 47402 - DNA, 307 bp, Setaria italica
  Peptide Sequence Number=SeqID_113376
ttagggttaggtagggtaggtaggacagcaagcaacataccaccaggtgcagcgcagtagatagaagctcttatgttaaggattgattcaagcttcagagattacagtaaataggcttataccccacatcttattttaaggagtgattcaggctatgtagattagtggcgtcgaatttcctaaactcaggtttatgcccaatggaatgagctgtcaatgcatagctttgtggttatttcaatttggcagtctgctatgatccattgcccatgtatgccaatttaattgctgtattctatttcctttt

SEQ ID NO: 47403 - DNA, 1655 bp, Setaria italica
  Peptide Sequence Number=SeqID_113377
aatacgaatttacgtactagacctacgaaaggaggggctcttctctctggcccagccccgtgcctacgtggcactcaacgaccccgccgccgccgacgctgacatcacgtccctcgtcgacgccgtcgcgctgggcctcttctgcgtcttcgccacgctcggtgtggtgcccgttatcaggtgcgcacggggagggcctgcggagatggtcgctgctgccctcgatgcccggttccgcgaccacctactcgccaagcccaacctcttcacggaggctgcatcagccgctgttgcgtcgttccagcgccctgtgctgtgcctcttcgacaggaattttgagctgtctgtgggggtgcagcatgactggagctaccggccattggtccatgatgtgcttggcttgaagcttaacaagctgaaattgcctgcagagaagtatgaattggatgactccgataaattctgggtcacaaacagctggtcaccattccccaaagttgctgaggaaattgaggcacagcttgccaagtacaagcaggatgtggatgaggtgaaccagcgcactggtggtggcagtggagttgagttcgatggaactgatttgattggcaacacaaggcatctcatgaatgcggtcaattcgctccctgagctgacagaaaggaagaagatgattgataagcacacaaatattgcaacagcattgcttgggcatatcaaggagaggtctctggatggatactgtgactgtgagaatgatatgcttgtgaatggcactgtggaccggaacacattgctgagtctccttaaagggaagggcaccaaggaagataagcttcggctagctgtgacctacctgctgtcctttgagacaccaccatcatcagaattggagcaggttgaagctgcacttcgagaatcagaagtagacatgtcagcgtttcagtacgtgaagaggataaaggcattaaacactcaatttgctgctgcatcaggcacagcaaccaagagcaacattgtcgattgggctgagaagctttatgggcagtcccttagcgctgtaactgcaggtgtgaagaatctcttgtcagatgggaggcagctggccttgacgaggacagttgaagctctaatggaagggaaaccaaacccagaggtggatgactacctcctttttgacccacgagctcctaggtcaggaactggtggtcagtttaaaggacccttcagagaagctgctgttttcatgatcggtggtggaaattacattgagtacaggagcttgatggagctagaacaacgcacacagccttccaagcatgttatatatggtgcaacagaaattcttagtggggcagagtttattcaccaacttgcggaattggggcagaaagctggattgggtggtggcagcagcaacataccaccaggtgcagcgcagtagatagaagctcttatgttaaggattgattcaagcttcagagattacagtaaataggcttataccccacatcttattttaaggagtgattcaggctatgtagattagtggcgtcgaatttcctaactcaggttatagaaccaaaataaaaggaaaaataaaaagaaaaagaaaaactaaaaagtaaaaacaaaaataaaaagaaaacaaataa

SEQ ID NO: 47404 - DNA, 1995 bp, Setaria italica
  misc_feature (1)..(2): n is a, c, g, or t
  Peptide Sequence Number=SeqID_113378
nntcccctcgtgtgccttgcctatccctttgcgtgtctcagtttttaattttttttttgttcgaaaaggtttattggcaaagcgtttgaacaaataattggtggagctgatattatacatggtgggggaccgaggacacccgtaaagcgcttttgaagacaatgtttactgtgatcaactcccaaaaacttgtgtattatttggttttaccaaaactttagggggaataaggagccgggtaaattgactgtaactgaccactgcttttgaaatccgttgccaccagctgtgaggattcggtaccttgtgagagcatagagcatgtgcagcagcatccgtcgattgagccccccaggtacttcgatcccaccccccggacacacacaacttgtgtgtgcacaaaatctgatgtcatcacatcttcatgcagaaatgattcaacgacttcgtatttacgcaaacaacttctttaacctgttaacggcaacaccagccgtcttgttcattggttctagaacgagggcatggttaaaatcttcaacagcctccttataataacccatcatctccctagcagttcctctccgtaaataagctttcacgctctttggttcaagatcgatggcatttgtgcaatctgcctcagcctgacggtagttagttagttcaagaaaggcagcagctctgttgctgtagtatgtagccacttttccatttaatttgattgcttctgtatataaatttactgccttttgccattgtttttccttgaatgcagcattacctttctctttagcagtttcagccgcttcttcgttcattgcctgtttacttgaaacattagattttgctaggatctccacttgttcttggatggtcgcatacatggtttgaacggtgtccaataaaaatcgatcaccaccgtgcctagcaatgaatgaaactgaaataggacacttatcatgcgtacccagaggaatcgaaacctggcaacaccctgacatactagctaaagatgaaaggcataatgtctgagaattgtagctttcagaagagagttccttagcattaagcttaggggggcatcccaaagcagttggaatgaccaaaatcccatcatccttaagaagtgcacctagagctaagcgtgctttgtttcttgcatcttggcaagcgtcaatatctgaatcaccatcctcagacaaattactgactatgcgagcatccacagcaggcttaactgagtttatccactccatatgctgatctttgaattcacgcttatgaagtgatcgcatggcattacaaagtgctagcaacgaagggaactttgaatccccattcttatgcccatttgaatagttcctcaggctggattatttttgaagccaaataattttcaagattcacacgagtgacttgtcttccaaaaagcttctccacagattttgtcaccacctgagtaagccttctagcaggtatcttcgaaagttcaaagcaatcatctgctatgtaaaaatgtctaggtgggcgaatatcagcataaggaagtctaaggaggagatgcccaacacgacgcaacacatttggatcccttgcaaaccagcctatggtgtcaaggctgggtgcaacgggaatgacaccaccactggaaacagcatgggaaggcctgaacgccaagacaccacaataagcacctggtatccttactcctccaattgagtcaatacccagggcaaaatctaccattccaccagcaactgcaacagctgatccgcttgagcatccgcctggtactcgctccggagcagcaggatttgttggtgtatcaaaatgcttattctcaccatggatactgtaggccatctcatcaataacagttttcccaacacaaatagcaccaccatcaacaagagctgaaaccactggagatgtttgcgtctcggcatcatgtgtctttgcccattcaagactgccgaaacttgttaactatta

SEQ ID NO: 47405 - DNA, 499 bp, Setaria italica
  misc_feature (458)..(458): n is a, c, g, or t
  Peptide Sequence Number=SeqID_113379
tctaaattaccttaaacctattgtaattgtacttgtctactacttcttaatttattcctttattagtaagtaaggtattccttgtattatttttttttctttattgtattgttctagttcagtgcctacttaaatttctgaatcttcggcattagcaaacaatattcatattcatcagttaatggatgctattagatattgcagtcagaatggagtctatcacaaggaactccaggtagttcgggaattcggatcattcaacaactactattggagctttgtgaaccacaagcccatcacaaactgtttcttctatgactacgccaaatatctacaaagactccgaaagttgaagctataagcaaggacctgatgcgctgagggttccagtgtgttggccccacaacaatctactccttctgcccttcatgcaggttggatcgtttacaaccatttangatatgatgtgcttcaggttattttaaggcctacagccaac

SEQ ID NO: 47406 - DNA, 1230 bp, Setaria italica
  Peptide Sequence Number=SeqID_113380
gtccaagtgccaacatccatggctgctgccgctccagcaacgcctacgaagagtgggagggacttctttggggtgttcaaggacctgaagcagacagtgacgaatgggtgggtgggcagtgaggccgcctccagtggaagaggagattgacacaaaataccttgcgcacaaagccaagcttgaggacttggagcagcatctggtgacagcatctcagcaggcagaggcgcttgtcaaatcttatgatgatcttagagcaacaacaggtctcttggggatgtcgttcatcaaactagccaagtttgaaaaggagcaggctatgtgtgcttctcagaaaatacgagctgctgatatcaataattttgcgaatgctgttgttagagttagcagatcacagacaaaactaaatgctgaaattgtaaaacatctgggcattatccatgaatacatggagacaatggctgctgtacataatgcatttactgatcgttccaatgctttgcttcgtgtgcaaaatttgtcagcagatctgtatttcctgcatacccgggcgggaaaacttgaatctgtttcatcgagaggaatggatcaggagagatcaaggtatcaaaagatagaagaactgaaagaaacaataagaaccacggaagatgcaaaaacacacgcacttaaagagttggaacttatcaaggaaaacaacatgaatgaaattaaaagatttaacaaggaaagacgccatgatttggtggagatgctgaagggttttgtatcagatcaggctgcatactcggatcattttgctagcatatggacaaaggtagcagaagatacaaaaggatatgcgaacaggagttgaagtaggatgtacatatacaggtgaaactgagctgttattgtgcagcatgaacatggactacgccattgagaatcattttggtgaccgtctaggctttatatgcggacaagatcactctttccattcccgaagggacgcatttctaaggattttttggggatctgtatccgcgtatcgccagttgtgttacttgtgtacctgaaaattctcaggaaacatagcacaactattttcccttgtctctttttgtcagcctgggcttcatgtattgctgcggttctttctttttctgtacatttacacggcaccagttgaatgaattcgctgcctcctgagataatacataagattttgtcctgacaaaaaaaaaaaaa

SEQ ID NO: 47407 - DNA, 413 bp, Setaria italica
  Peptide Sequence Number=SeqID_113381
gtgtggtcgggttcaaatcggttgggaaagatttgggaggcagcttcaaggcaaggacaggggcagggagctgcagatgtcgcaacaaaccaaccaatcggtgaggcttgcgattggtaatttggtatgcaatgcagacaagctgtagactgcctgctgtttgcttgcaagttaatcacaccagcttcatgtacaaaatgcggcataaaccctgctgcatcttgctccattagtatttagtagtagcttactagtgtcggtggactatgcgtgattagcaggaggctgagatgcgttaggtgttgggcacactgattgcctaagttgcctcttgagtaattcttctgaccatattccccggtggtagggactagggggcacgataatgagcacagtttattctacaagaatct

SEQ ID NO: 47408 - DNA, 380 bp, Setaria italica
  Peptide Sequence Number=SeqID_113382
cgggcgccccgtctccggcggctggagcctcctcccgggggacgccggcgcgacggtcctccggctcccgtcggaggcggcggcggaggggtgcgagatgacgtacgggttcctgccgtgcaccgacacggcgctcgggaacctcttcctcgtcctggcgtacggcttcctcatgttcaaggccgccacctacctctccgccggcagcgagctgctgctcgagatcctcggccccggcatcgtcgggggcctcttcctccccatcctcggcgcgctgcccgacgccatgctcatcctcgtttccgggctctctggctctaaagaggttgcgcaaagccaggttttgattggaatgggcctgctcgcggggtcaacagtta

SEQ ID NO: 47409 - DNA, 955 bp, Setaria italica
  Peptide Sequence Number=SeqID_113383
aggcagaagcgacgttctatgagggaaagtggtgcatcaagtcggtcggacaagaagaccaacacgagcaacgaggatgatctttgcttgacacctctccgatcattgccaacagcaagaacaagagatactaagcggctgcgacagtaccatgcttactcaatgcaggcttctcaggccccattatcattttggcatcggtgggtgtatgaaatgtatgactcatatacacttgctcgtagggctgcagagttatggagacagataattgcaaaaccaagcatggacgatcatgtaagaaagccagacatcttgtcatttcacatcggaagcaaacttccagtttcagaatctgtgagacaaaaacttctggagatcgacggaatttcatatcgtctacagaaagaaattcagcttctcaaggcctttaaccttattaaatgcagaatttgccagtcccatatagcaaaacgtagtaacatggtggtgatgtctactgatgggcctcttggtgcctatgtcaaccctcatggttgtgtccatgagacaattacagtcagcaatgcaactgggcttgctctcattggcaatccttcaacggttcacagctggtttccagggtactcgtggacaattgcatcatgcgcagcctgcgagtcccacataggctggctattcagagccaccaagaagaatctgcgtccgaggtccttctgggggatccgcagctcacaaattgcagatgacgcccaagtagatcagagcgagtgatgctcaagcttccatgcacatatagaccattgtagcagtgaattactaaactatttatgacctggtggtcccagagtccatctcttcctttcacctctagctcctttgtatttcttgtatcctggggacggtgaagttccttgtaaacttatcactttctcatgtgtgtttgttgtcgtaaaaa

SEQ ID NO: 47410 - DNA, 1181 bp, Setaria italica
  Peptide Sequence Number=SeqID_113384
gccggcctcgttgatgccctcaagtaccaccgttcgcctccgcggagtcctcgctcggggtcgcacccgaccgcgcctcccacaatgtgctcctccacgccctggtcaagaactctgagctcgctgctgcccagaagctgctcgacgaaatggccaacaagaagttgaagcaccgcccggccccagacatcatctcctacaacactgtcctcgccgggtactccgcgcaggacgatgatgagggatttaataatcttttgaaggagatcaatgctaggaagctggagccaaatgttgtcacctacaactgcaggatacagtggttcgccaagaaaggcgagacagtcaagggggaggagctgcttgatgtgatggagtcaaaggaggtagcaccgaattaccttacctacaatgctctcgtgcaggggtattgcaaggaggggaatgtcgggctagcgatgcgggtgttcaagaggatgaaggtcatgaagaggcgcgaggggaggagtgacttgggtgtgtctgcgcattcacagacatatgtggtgctgtttaggagcttggtggagaaagagaagcttgatgatgcattgtggatttgtaagagctgctttgcgatgaaggcagcaccaccatttgaggctgttaagggtttggttgaggggttggtgaaggctgggaggtctgcggaggctagggatgttgttgccaagatggatttacttgtgaaaggtgatgctaagcttgcttgggggaaggttgttggtgaattgtctcttgaagagggagcaccaagttcaaatccatgatttgctagaggcatctttgttacttctgattgatttgtcttttggaccttgaacgatgatgacaacgatgaagataagctttcatatgggatccagtgtcgtcttcgagttatcactagcttgttttttttgaaaggtccatggttagatcaggatgttatagatgtctctctaaagctgaatggtaagaggtgccattccataatccgtttactgtaagagtttgctctatttttgtgtcttctaataatatttaaaatgacgttgaagtggcgaggagaccattatagatgatgcatctaccatctgtcactgttacatgtttgtttattaattgttgttgttttctagttcttttgtacgttcttctaa

SEQ ID NO: 47411 - DNA, 424 bp, Setaria italica
  Peptide Sequence Number=SeqID_113385
tgccaggccccggcctacaccccgacgccgggtggtggtggcggcggcggcggcggtcatggccgcggtgggcgcggaagcggcaggcagccgcccacgccagtgggatctcctccgagacgcggcagagctgggaaccagccgccatcgagctctcctaccccatcctacccgtcgccgccttcgagcactcctactccttcctacccatcgccgccgtcgagcgccaccactccctcgtcccactcgccgccgaagagctccacgccgtcgtacccctcgccgcctcagggatccaccactccctcgtaccctccgccgccatcgagcgccaccactccttcttaccactcgccaccgcagggatcacccaccactccgtcctacccctcgccgccgtcgagcgccaccaccccctcctacc

SEQ ID NO: 47412 - DNA, 377 bp, Setaria italica
  Peptide Sequence Number=SeqID_113386
ttaaaaagaaaagatggcctttgcccgttgacacctgaggagactgctcttgtcctcagagcattggacatcgatagaagtatgcaaatatacattgctgctggagaaatatatggtggaaagcgcaggatggctgctctaacttcagcatacccgaatgtggtatggacatgatagaatatgttatgcatctattgtatcgtgcttgtgttgtacagtactcttctacctgccctcttctccttgctaatattctgatttaaccattgtgcgtaggtgaggaaggagacacttttggaaccttctgatctgatgttcttccagaaccattcatcacaaatggctgcactagattacttggtatctttagaaagtga

SEQ ID NO: 47413 - DNA, 1665 bp, Setaria italica
  Peptide Sequence Number=SeqID_113387
ttttcgtgcaatggtgggcttaaccaaatgcgagctgcaatatgtgacatggtcgtaattgcaagatatttgaatgtaactttagttgttccagagttagataagacttcattttggaatgatccaagcgagttccaagacatatttgatgtcgagcactttataacctcattacgaggtgaagtccgcattctgagagaattgcccccgagggtaaagagaagggttgaacttggaatgtttcactccatgccaccaattagttggtctgatatttcctattatcaaaatcagattcttcctttgattcgcaagtacaaggttctccatctgaatagaactgatgccaggctagcaaacaatggtttaccaattgacatccagaaactgcgatgccgagtaaattatgcctctctcagatttacccctcaaattgaagagttgggcaagcgagtaattagaatacttcgccaaaatggccctttcttggtccttcatttacgttatgaaatggatatgctggcattctctggctgtacacaaggttgcagtaatgaagaggcagaagagcttacaagaatgaggtatgcttatccatggtggaaagagaaagtgattgactcagacttaaaaagaaaagatggcctttgcccgttgacacctgaggagactgctcttgtcctcagagcattggacatcgatagaagtatgcaaatatacattgctgctggagaaatatatggtggaaagcgcaggatggctgctctaacttcagcatacccgaatgtggtgaggaaggagacacttttggaaccttctgatctgatgttcttccagaaccattcatcacaaatggctgcactagattacttggtatctttagaaagtgatatatttgttccaacatatgatggcaatatggctaaagtcgttgagggtcatcggagattcatgggtttcaagaagacagtcttgttagaccgaaaacttattgttgagctagtggaccggtacaccaatggttctctgcaatgggatgagttctcttcattgatcaaggctgcccatgcaaagcggatgggttcagcttcaaagaggacggtgattcccgacagacccaaggaagaggattacttctatgccaatccccaagaatgcctccaagatcgtgatcttctacaaacatcatgatatcctctcatgtctatataccgcattcacattataccattcttttgcaaatgcaactgaacctaaaaggcgatattttgaagtcagacaagcgactcggctctgtacgagtcatagttgaggcctacctgtaaaacttgaggaaagggtgaaaggggggtgttggatgtagttggtaaatacacattatagcatggagtggggatttgttcattccaccaaataaaagagatggtcttgtatagatggcgatagaatttatttaccactaagagggatgtaatttaagagagaactgagagatgcagctgggttcctgacttcctgcatctggtctcgggttgtgtaacatagcagttgttgatagccgcccccattgtccccaccggcgaaattttggcaaccatgttgttgaaagatgtacacactgtttattgtatcgatacagcatgtattatatgtcaattgtgcaga

SEQ ID NO: 47414 - DNA, 375 bp, Setaria italica
  Peptide Sequence Number=SeqID_113388
acgagccaggcgtcggagtggacggcgacgagcgacagccagtcgcggcgcttcatgccgtccctggcgaagttgatccccagcgcgggctccggcatctccggcggcacctcctccgccggcagcgacacctcccagctcccgttcgggagcccgtacaggcacaggttctccttctctgggtcacagaaggcgtagaactcgtccacatcggaggtgagggcgcggacgaggccggcgcggcgcgcggtgtagtccctgtagatttccccgacggtgcggggcgaggaggagacgggggcggccgtctccatcggcggcggcggcggcggagaccggggcagtgtcggcggcgcctgcggttggggagagagg

SEQ ID NO: 47415 - DNA, 1169 bp, Setaria italica
  Peptide Sequence Number=SeqID_113389
ttgccactctcatgagtggcaaatctcacatttcgccacgtgaccaagtagctataatccacaacgcaaagattaccgagtgcaacaagcaaatactagtatcatcatcaaatgtcaactcatgagagtggcaaatctcacatttcgccacgtgaccaagtagctataatccacaacgcaaagattaccgagtgcaacaagcaaataccacaccaaccaagaggtccaagatggcatcaacaaatgatttctcaagactaaatggccagtttccacatgtcaatgaaaacaagcacaacagcattcgaccagtctattagaccaactatcatgtatgtgtcctgttccagcacctaccacaacaaagacaatgcctatggcaattcacatctacagccaaactggagagtgtcgtttggttgatcagctgagtcagcaatgggaggccacagctccaaggttttattacctgcttttcttggagcaatcagggcacttgtactgctttatctgatccgcttttgctggggttatcctcacgcacttgccgtggaaccaccgctcacaaatgtcgcatgcgatccagaactcattcgagttgtagagacccttgcaagtgccgcagagggtttcgctgtgctcttcgtcatcctcatacccatcttcaacaaccgctgatcttgagttcttcatcttcccatcatttgttcgctttgttgagtgcctggatttgccactgttatcaacaccagacttattctccctttgcttccggtcaaccattgcttcatacacggatggatgatcattgatcatgttaaataagcgcttcctgtcgttgccgttgaggcgggcggcgaagaagtaggcgacggagacgagccaggcgtcggagtggacggcgacgagcgacagccagtcgcggcgcttcatgccgtccctggcgaagttgatccccagcgcgggctccggcatctccggcggcacctcctccgccggcagcgacacctcccagctcccgttcgggagcccgtacaggcacaggttctccttctctgggtcacagaaggcgtagaactcgtccacaaaacaaaaagcaatatactgagtgcaggagaaaaattgagtcaagacgtttgatcacactatccattaaccgtgctcactgc

SEQ ID NO: 47416 - DNA, 369 bp, Setaria italica
  Peptide Sequence Number=SeqID_113390
tcgcgacggcgcggctgcggtcgctgtcgctggacgacctgtcgcggacgctggccacctcggggctgcacgccttcaccctggcggagctcaaggccgcgacccgcaacttctccagcagccacttcatcggcgagggcgggttcggccccgtctacaagggcttcctcgacgagcggctccggcccggggagctacagccgcagcacgtcgccgtcaagtacctcgacgccgacgggccgcagggccaccgcgagtggctggccgaggtggtgtacctggggatggttgagccatccgcatctggtgaagctcatcgggtacggctgcccaggaccgagcagaggatgctcgtctacgagtacatgg

SEQ ID NO: 47417 - DNA, 420 bp, Setaria italica
  Peptide Sequence Number=SeqID_113391
tggcgctgcgatgtccaggtgaaggcgaggaggaccggcgcgagcgcggcggatgcgatggcgtagggccgggaccagcggtgcgcggcgatgtccgggatggtgaggcggcgcgggaggtacagcggcatgcagagcgcggtcgcgaggcaatgcagccaggctcttccccttgatgcctctgtcttggagtgggacggcagggacgggacgtcgtcgtcctcatcgaggaggagcggcgcggcgaggccggcggcgggcggcttgccctgctcggcgcagcagtgggaggtccagacgacgacgacgtagccgacgtagagcgagacgaacgacacggcgacccagacggtgactgcgccgttcacgagcacggcgagcaggtagcagagcgcgaggaggaggaagcagaggtcgcgc

SEQ ID NO: 47418 - DNA, 253 bp, Setaria italica
  Peptide Sequence Number=SeqID_113392
tgccttgccctccaatacaacttctgcacaccgcagggcgttgaaactgatcatgtaggttaaggttagtgcagtgatggtaagattccatgacatgcccctgccctcgcatttgtcgaaaaattggaggaagcactgggcgctatccttattaaggatgggctccacttggtcataattgtcgaagaatatattacacacccactagatggatccattagaattgaaaaaggtgaaaggcatcagcatatat

SEQ ID NO: 47419 - DNA, 1555 bp, Setaria italica
  Peptide Sequence Number=SeqID_113393
taaaataaaggaaaaattaaacaaataacaaaacaaagacaagaccctagacaacaatcaataagtgttctcttttcctccagaagcttctgtgccatttcatttgagccttttccccatcttaaggcaatggaaagcctcagtagacgcttattgataatgtcaaacccatctttcttactactgccatttatattggaggagcagctcccacggatatgctcctgagcagcaagcagtagaactgcagactggataagttttccaccctcaatgtaaatccagacctcttcaagtagattatttgtcttttctgcaagcagtctagttgtatccaagaagatcttcatttcaggcagatacagcagatggataagcttgtagatgtaatccagatgattctggctggaagaaagattgtcctccagatacttatgcaggcaagtattctcaactgcaacatggagcgggagtaggttctcaatgacaacattgccaactgtgcgtacattggctgatgcgccatggcgtaagagcagttcgatcatctcaacagagaacttttcagcagcttcgtggagcgggaagtatccattgttgtttatgcagttgggattggcatgcatcccagagagctcaggtgccttgccctccaatacaacttctgcacaccgcagggcattgaaactgatcatgtaggttaaggtttgtgaagtgatggtaaaattccatgtcatgcccctgcctgcgcatttcttgaaaaattggaggaagcactgggcgctatccttttcaaggatgggctccatttggtcatatttgtcgaagaatgtattacacacccactcaggagtagggtcttggatgattatgtcatttactacggacctggccatctcagcgtacctttggtatagaaacttctcatagaaactccaaccgcggtcctcagtaaggtaaacaacaggggcaggctgccgaggatacttgtttctcactgtaatagatccatcattgccattaccattatctttgtcacaggcaggtgccttcaatttcaattccatccttgcgtttttcgaaacaaggaagtttgatctcgaattacgctccaaagaagattactacaaggcacgcaatggtcaaacaatgactcagaagaccatgaaataaaacgaggcattctatctaaaatggatcacacaccactgaaacataaacatatgctgcaaatagaaaacattgtatttactgcataaatcctgaaaatgtaacaatgattgatatatgtgaaaatgaagggccaaacaactttataacataccagttgaacccaggtgctagaaactctgatgcatatgaattatgaaattagaaaccaaaagctaaattagatgtttgagttcaacaagaagtgaaagatattcactggtcactgacttgcacgaataactaacttgcccttgctgattccacttgaagcacaattagagaacttggcatgtaagacacggcaccaaaccaacaaaacaaaaaaaatgtatacacaactcgc

SEQ ID NO: 47420 - DNA, 609 bp, Setaria italica
  Peptide Sequence Number=SeqID_113394
acgttgtaacacccatttcgccaccaggcacctttctactcatgcatgctttagcaatttcaagagcctgaacgccccaatagcagcagtgctaaagctccttttgggttgattgcttgtaagtgctgtgattcttccactgaactaagcttatgatctgtaattggagtacatccattgaccattgggaacttagcctctgctgttgcatagggtggatacactctcacaggacaacgggttcgtaacagtgatctccaatatgggaaataacttctccttgcatatgtgggatcccatccgccacctacttctgttcttgcagccttttcctctgcagcatgcagaatagccgtttccataactgctctgtttgcacctttgctacatgactttttgtctgacattttgcagtcataaggttggaggtttatagtgtccatgacttcttcattggggagaaacccatagtctttgaggatagatgaaacatgttccaagacctccattcgggacacctctgaatgtgcctgaatgtatgctgaaagaggttcaaacaacatgggaaattacatcaacaagcagccttgcacaatcattaagtgttac

SEQ ID NO: 47421 - DNA, 1134 bp, Setaria italica
  Peptide Sequence Number=SeqID_113395
gggggtaaaaggcacatttcccattgcattaagccaaaggcattgtctaggtccaggtcacccacaattgttatagtcagttagtattacacggccattaacacacaaaggccatagtagcataaggtttagccacatcaatgccatttaattgggaacatccactaaaaaaacgcaacactcagtgaccaaccagctcgatcttggagaaacttgcacgttgtaacacccatttgccaccaggcacctttctactcatgcatgctttagcaatttcaagagcctgaacgccccaatagcagcagtgctaaagctccttttgggttgattgcttgtaagtgctgtgattcttcccactgaactaagcttatgatctgtaattggagtacatccattgaccattgggaacctagcctctgctcttgcataggctggatacactctcacaggacaacgggttcgtaacagtgatctccaatacgggaaataacttctccttgcatatgtgggatcccatccgccacctacttctgttcttgcagccttttcctctgcagcatgcagaatagccgtttccataactcctctgtttgcacctacaagtccatggcacctttgctacatgactttttgtctgacattttgcagtcataaggttggaggtttatagtgtccatgacttcttcagtggggagaaacccatagtctttgaggatagatgaaacatgttccaagacctccattcgggacacctctgaatgtgcctgaatgtatgctgaaagaggttcaacaacatgggaaattacatcaacaagcagccttgcacaatcaataagtgttctcttttcctccagaagcttctgtgccatttcatttgagccttttccccatcttaaggcaatggaaagcctcagtagacgcttattgataatgtcaaacccatctttcttactactgccatttatattggaggagcagctcccacggatatgctcctgagcagcaagcagtagaactgcagactggataagttttccaccctccgatcaccatttccccccacccccagctcgccacacgtcaccgcctcatttcccacccccagctcaccatgcacctccacctcatttccca

SEQ ID NO: 47422 - DNA, 319 bp, Setaria italica
  Peptide Sequence Number=SeqID_113396
tataacttgtatccatctgcagtcagctaggagcaacagagagcgagctagacgcgtagacacatgccggggcacatgacgatgatggcattggcatgggcatcgtcatcaccctcgtcagtgaagcttcgcttcggcagcggaggcggcggcaagacgacgacgacgagcgcgatgccgctggtcacgaagcgctcttcttcgtcagcacacctcctcggccgcggccgggccctggcagcggcggcggcaacggcgaccgccgcctgtgacgagcagcgcctgcagaaagaagagtcttgtcttgtatttcgtcctt

SEQ ID NO: 47423 - DNA, 241 bp, Setaria italica
  Peptide Sequence Number=SeqID_113397
tcatctgggcttctggggcggcggctggtcttgtgttggtggcagtatcgcagcttttgcttgccggtaaccgtttttaattattgggaggaaagagagcgagccaggagacgcagtatggctcatctccctctggtatgttccttgttaaaatatgggctattgctacaactacaatgccctggatttgtcatggttgaggttttctacccatcacccatgcatgaatttgttctgaaat

SEQ ID NO: 47424 - DNA, 750 bp, Setaria italica
  misc_feature (620)..(620): n is a, c, g, or t
  Peptide Sequence Number=SeqID_113398
aagttacaacagttacctaggaccaataggtagaagaggcagtgataacaaacgtggagtgcccacactgctgccggatgttctgtgcccagtgcaaggttccatggcatgatggtgtgacatgcacagagttccaacggctcgggaaggattagcggaccagggaggacctgctgctgaggaaggctgcacaaaagagcaagtggcagaggtgccccaagtgcaagatgtacgtggagagggtcacaggttgtgtgttcatcatctgcaggtgtgggcactgcttctgctacctctgcgcatccccgatgtctagggataaccatcattgcaagacctgcaagcgaacctggtgaaagacctggagcttccaagtcctacctgaaggaaggaaattattagctttattaaatctggtcgatttgcttttatgactgttctgattagctctggctcgtgcagttctgatttgacaagtcggaatcagaagtagcgctggagtctattagtaataatcgtgaagttggtttaggaatgacatcacaaagtgagactgtcttgcgaccttttgaatggtgacatatgaaggtgccggccagtttctagcaatctatgaagtnttaggtgctggccagtttctagtagtctaggaagtatcaggtactagcttagaaggaaactaggtgtgttcccattgagaaatcaccgagcatatataaggaaatttctatgaacttctagatttgtttc

SEQ ID NO: 47425 - DNA, 423 bp, Setaria italica
  Peptide Sequence Number=SeqID_113399
gattgtgccaccgttcccggcattgctttcctatgcgtccaggcaaagcttgagcaatggtcgaccatttctttggcccatatttgtttaccatctgaactatgatttcatcttcttctttcgaccatggccctttgaccaattcaggatttagaaccttttgccacctgtgcaaacactgtacgtcggttctgtctggaaaacattccgctatctttttccagtttttcccttggtatgtctgaaccgcacgggacaatatagaatcctcttcgggtgtccaatttcctttggtagaacgccgggttggaccagtggtcctcccattcagtgatcgttgcctctgcggctcatggctgttttccccttcacgagaagctggcggaagtccaggatcctctccacccttctttaccctttctt

SEQ ID NO: 47426 - DNA, 284 bp, Setaria italica
  Peptide Sequence Number=SeqID_113400
attgtctatttaagtttattggttctataagattatttagtttaattgatagagggaaaccttttactcttttagttgatgcaagatatcttgtgagatcttgttcctaaacttttatcatgtctcttctccaggagagtatgttgctcttgctggtgcaagattggatggtgcggaaatgcatgcgtgtggtctggcaactcattttgtccagataaataggctgccatcactggaggaatcacttaaaaggtggacacctccaatcctttgttgtgtgtggt

SEQ ID NO: 47427 - DNA, 296 bp, Setaria italica
  Peptide Sequence Number=SeqID_113401
caggcagcagtcttctcgttttcctcctccggcgtcccgtccctgggagcctccagcgccatcctcgggcccgcttgcctgcacctcccgaggaaggaatggcctcgcttcctcccgccggcgccgcgggcgccgactccgaccagcttttggtagaagcaaatgattctacacggacactgattttgaacaggccaaagcagctgaatgcactctcctccgcaatgattatgggactcttgaggtgtttcactgcttacgagaaagatgatggagttaaattgttgattatgaag

SEQ ID NO: 47428 - DNA, 631 bp, Setaria italica
  Peptide Sequence Number=SeqID_113402
tgcttctacaatccagtccttgaaaaaggcctctcctaccagtctgaaaatctctctcagatcggtatccctcagaaactacctatgttcaaaactatactataatcttactgtctatgtgtgcccatgggagtatagttgtttcattgttttctaactctgattttagataagagaagggagaatacaaactgttggggagtgcttgcgtcgggaatatagaatggtttgccatgtcatgcgtggtgacttcagccgtgacttctttgagggatgcagggctatactggtagataaagatcgaaacccaaagtggatgcctccaaggttggaacaagtgcatgatgaggcggttgaacaatatttctctacaattgatgatccacagtgggaagagttaaacctacctaccagacatttccatgggagaaatattaagtccaaactttgattgaaatcttgggcaaaagatgtgaacgatggagcctcgaggatggtcagaataataattaattaataatctcaagtttggggagagtttttacactacaaactaaaaatgaaataatgttgtttatcgtagaaactctttgtaatgtatacatgaagttctacccattttagaataaaa

SEQ ID NO: 47429 - DNA, 1127 bp, Setaria italica
  Peptide Sequence Number=SeqID_113403
tcgtcgggtcgtccgtacttccgtacctagtctttttggttagtaagtctaaattgtatttcttaattctacacggacactgattttgaacaggccaaagcagctgaatgcactctcctccgcaatgattatgggactcttgaggtgtttcactgcttacgagaaagatgatggagttaaattgttgattatgaaggggaaaggaagagcattttgcgctggaggtgatgttgctgcagttgtccgggctataaacaatggcagctggaaatatggtgctgatttcttccgaaatgagtttttgttaaactacatcattgcaacgtatagcaaacctcaggtttctcttcttgctggaattgttatgggtggaggcgcaggtgtttccttacatggaaggtttcgagttgtgaccgagaacacggtttttgcaatgccagagacagcattgggactctttccagatataggggcttcttattttctgtctcggctacctggtttctatggagagtatgttgctcttgctggtgcaagattggatggtgcggaaatgcatgcgtgtggtctggcaactcattttgtccagataaataggctgccatcactggaggaatcacttaaaaaggtggacacctccaatcctttgttgtgtgtggtattattgatcaatttgctcaacagccatcactgaaagaaaatagttctttgaataggttggaaatcatcaacaaatgcttttccaaaaggacagttgaagaaattatatcttctcttgtgagattgttatagtgattgcaatgttctatgggttcacctattctgtcctgcaaaattaattagttagcatctattatgttaggagcaagtggcctcaaatttacctgatgaatgggttgctgcgacgatccaatccttgaaaaatgcttctccaaccagtttgaaaatctctctgagatcgataagagaagggagaacacaaactgttggggagtgcttgcgtcgggaatatagaatggtttgccatgtcgtgcgtggtgacttcagtagagacttctttgaggaatatatcaacatccttaacactactctttttcattaatgatctctctactttgttgtctttg

SEQ ID NO: 47430 - DNA, 1270 bp, Setaria italica
  misc_feature (1247)..(1270): n is a, c, g, or t
  Peptide Sequence Number=SeqID_113404
tagttttacgttaagttttagtttagttaaccgttaagttaaacttaacggtttttttgttcttaatttgtcctagtagtactagtctatttgggtacttcttttcctagtattattagggggtctttctacgaaagttaagtaagaaaccgaaataaaacaaacggtttttaagacaaatagaccaagaagacagcattgggactctttccagatataggggcttcttattttctgtctcggctacctggtttctatggagagtatgttgctcttgctggtgcaagattggatggtgcggaaatgcatgcgtgtggtctggcaactcattttgtccagataaataggctgccatcactggaggaatcacttaaaaaggtggacacctccaatccttttgttgtgtgtggtattattgatcaatttgctcaacagccatcactgaaagaaaacagctctctgaacaggctggaaatcatcaacaaatgcttttccaaaagaacagttgaagaaatcatatctgctcttgaacaagaaacttcaaattcggcagatgaatggattgcttctacaatccagtccttgaaaaaggcctctcctaccagtctgaaaatctctctcagatcgataagagaagggagaatacaaactgttggggagtgcttgcgtcgggaatatagaatggtttgccatgtcatgcgtggtgacttcagccgtgacttctttgagggatgcagggctatactggtagataaagatcgaaacccaaagtggatgcctccaaggttggaacaagtgcatgatgaggcggttgaacaatatttctccagaatcgatgacccacagtgggaagatttggacctacctgcaagacgttcctatggaagaattattgagtccaagctttgattggaagtatcacactgctgataaaataaaagctgaacatatcttgtaggtcaaacttctgtcacacaagaaattctattgtttattgaagagagctgtggctattttaaaatcggtggaaaactttttctcgtagtcagatcttgcttaagctggtgtgttatcgcctcatcgcgtcatcatcgttgtgatcttctacccaatttcaagagggggctcctatgtaacatccgtgtgctggataagcaacatggtttttaaaagtccattagaccataagctcaccttataaataaataaatttaacatttccggaagattttcattcaaaaaaaacnnnnnnnnnnnnnnnnnnnnnnnn

SEQ ID NO: 47431 - DNA, 607 bp, Setaria italica
  Peptide Sequence Number=SeqID_113405
ttaattaaagttaattaaaaaagtagtagtaggttctaagtattactactttgtttatttttgtcttttgaggtagttatgcctccatcaagcgtttttcattcatttatatctgttgcatgcatccagatttctgaatttttatatcaagcagtatctaattttttttcctgtagcatagcaagaccaaatctttacccctatttaatttgtgctcctaattggtttgattaaaatatcttcaggttaggtatcccgaccgtataactttaatacgaggaaaccatgagagcaggcagatcacacaggtttatggattttatgatgagtgccttcgcaaatatggctcagtcaatgtctggagatattgcacagatatattcgactatttaagtttgtctgcacttatcgaaaacaaaatctttagtgtccatggaggcctttctcctgctatcacaacactggatcaggtaagttattatcttggtgttgtttctgtctgtatgtgtcatttttcaaaatgttttaacctgtgctctatcagataagagtaatagatcgcaagcaagaagtacctcatgatgggcatgtgtgaccttctatggtc

SEQ ID NO: 47432 - DNA, 1666 bp, Setaria italica
  misc_feature (1632)..(1666): n is a, c, g, or t
  Peptide Sequence Number=SeqID_113406
ccgcctcctcctcctcctaaccctagaatcttcgagaagcacccggcgaggagcccgctgccgcggcgcttccggaagcttctggagggaggagagagatagggggagtggggacggccccgcagcggtggcagcggaggcggagatgggggcgtcggatctggaccggcagatcgagcagctgaagcggtgcgagccgctcacggaggcggaggtcaaggcgctctgcctcaaggccatggagatcctcgtcgaggagagcaacgtccagcgcgttgacgcccccgtcaccatttgtggagacatccatggacaattctatgacatgaaagagctgttcaaggttggaggtgattgcccaaagacaaactatctgttccttggggattttgttgaccgaggattttattctgttgaaacatttttgcttcttttggctttaaaggttaggtatcccgaccgtataactttaatacgaggaaaccatgagagcaggcagatcacacaggtttatggattttatgatgagtgccttcgcaaatatggctcagtcaatgtctggagatattgcacagatatattcgactatttaagtttgtctgcacttatcgaaaacaaaatctttagtgtccatggaggcctttctcctgctatcacaacactggatcagataagagtaatagatcgcaagcaagaagtacctcatgatggggccatgtgtgaccttctatggtctgatccagaggatgctgtagatggttggggattgagtcctcgaggtgcaggattcctctttggtggaaatgtagtttcatcatttaaccactcaaacaatatagattatatttgccgtgcgcatcagcttgtcatggaagggtataaatggatgttcaacaacaagattgtaactgtatggtctgctcctaattactgctacaggtgtggcaatgttgctgcaatcctagagctggatgagaaccttaataaacagttccgtgtatttgaagctgcaccacatgaatcaagaggcgttccttctaagaggcctgcaccagattactttctgtgatgctgcacattgaacgcccgaacttgctgcctaatttgtgcttactggcactggcaggcaagctcagcggaagatgtcccatgttgtaagagctcaggcctcacgggagtcctgccaggaggtgctttttcaggatgtgtaaatctagtgtcgcgttctcctttcaggcctatgatttgtaagagagctgatgttggcattcagtttttcacagaatagctcccatttgagctcgagaaacatgtgtcaatgaaggggtttcgtggggtgttgtgcactggtacatgatgtaaaatttttgtcgcggtgccttcgtcctaagaaaaccaaggtagagagtgatttgcagatggtgtgcctgaatatcctgctttgttgcgctggaacatgtaggaaattttgtagctgacattcgtaaacttttagtaggaaagcatgtggtccagtaccgtttgcgtctagcactaacttgcctgaaatattcgcatgtaatgattgtaatgtaagttgctcaagcagcttttctaatatggctagctgtaaatttactaaccgcaaaaaannnnnnnnnnnnnnnnnnnnnnnnnnnnnnnnnnn

SEQ ID NO: 47433 - DNA, 2009 bp, Setaria italica
  misc_feature (1994)..(1994): n is a, c, g, or t
  Peptide Sequence Number=SeqID_113407
aataccttaactccggcgcaaacaatgcagcatcatgttcagcgtccacaaacaccctcgccaatgtttgggacaaatagtattcatgcacgtccatttccaagaccagttggaagtccagctgcatcatttagaccacaaatgacagatcccaatcaaagagcacaattggtccagggagctgtgaccacagtagctgggagtgtgccaacacaatctatagtgtctggaaatgcaccaactaatcaatctacatggcaaaaatcagcaaacaaggagcagaaaactaattctttcactccaacagcacatatgaataaggaaactattagccaaaactcggaatcttcgcagaattcttttgttgcaatgcatgcaaaacaagtcaatcaagccccaggatcttcaaaaggtggtggtggcatggaaaaccagtcaccaaaattgagtgcttctaagtcttcgaccacgacaaactcaagtcagactcaatctcatgtcactcaagcagagcctaaattgcaggtccaatcttctgtgcaagcacctcctgcggcagcttctaaaacacctcagaggaaggcatcttctggacagaagaagcctctggaagcattaggctcatcccctccaccatctagcaaaaagcagaagacatctggaggtttccatgaacaaagcattgaccagcttaatgatgtcacagcagttagtggtgttaatctgagggaagaagaggaacaacttttctctgctccaaaggaagagagtcgagtttcagaagctgctcggagagttgttcaactagaagaagaaaagctcattctacagaagggaccactggcaaggaaattagcagaaatcatgaggaaatgtaatttgaaggtcattggcactgatgtggaacgttgtctatcgatgtgcgttgaggagaggttacgaggatttataagcgatataataaggttctctaaacagagggttgatgttgaaaagtcaaggcatcgtttttatccgttatcctcagatgttcgcagtcatattatgagggtgaaccgagaagctaaagaacaatgggagaaaaagcaagctgaagatgctgagagaataaggaaacaaaatgatggagatggcaatgcaaatattgatctagaaaaagacaagaacgagacccgtgcctcgtcaaagcatgcaaagacttacaaggaggacgatgataagatgagaactacagctgcaaatgttgctgcgcgagttgcagctggtggagatgacatgctgtcaaagtggcaattgctagctgaacgaaataaacagagaagtgagggaggtgatggttcttctggctctgtaccaggtaacatgttgcaacacaagccatcactaaaatctgggaaagactcgatggaagatcagggaattgaaaagagaggctactccacaatgcttggatctggtggtattagaaggtcaccactaacaaaagtggcacggagtgtttcagtaaaagatgtgatagcagcactggagcgagagcctcagatgtcaaaatcctctttactttttccagctatacgggaggccattgacagaacctgctgcaaagtaatttgcagtaaaattattgcaattcatgttgcatatcaagttttgttactctggctgttcatggtttcttagccatttacagaggattttggtcaacatgagggcccaatcatcaagcgatggggctggggctgatcggttgacaatcaattttgtgggcatttggcagttactatcaattctgcgtttccctggagccatttttgtttttcaagggaacagtctgcaaatgtgtttcttttaatatttttctgtataaatgcctgtgggtatcaatgcccagctgacttatgctagcatgaacatcatgctcatttttgtatagcataaactggagtagaatgttcgttgatatactttggtaagtcttaaatcattttaccatnccatttaaattctaa

SEQ ID NO: 47434 - DNA, 1303 bp, Setaria italica
  Peptide Sequence Number=SeqID_113408
cttttgatatttatcaatctatctcctttggaagttgagctttgaaatgctgtaaccgaaaagagtggcaaagaagatggggaaggccgccagaactacagctgccagtggtagcaagtcacagcgaaaaccaaagtagtctctcacaaatgctgcgacagatttggtctctccaaatacctcaatcttcttatcatcctcatacccaaactgggtagtgaagaatacattgagtgtccatgacatgggggacgtgtagtacagccatagccaccattttggtatttgtggtgcaggcacaatgaagccagacatgaggttttgtatggtgtagaacatagatgctaatatggacgccacttggatgtttggggtgattgataccatcatcattccaaggtagaggaagtagagcagcgtacagaacatggtatacaagaaccagaagaactttgctagttcccatgcataccctatcagtgggtaagctatgaacatgaacaacattatttgcacaaacacataaggaatctccatggcaacctgtgcaaatgagtaagcccaaggtgagtacattcctgcaaacctttctctgtacatgacagagcgctcaatcgagacgaatggcatcactgattggcagttgttgatgccagcaaacagagtggtgccatacatgcatcccaatatggtaaacagaccttgctggtcatttatgtggtttatattgccttgctgccagtataagaccccaaaggcaatgcaagagactgttaggaacacaattcggaccaggttataggaagggcttctccaatatgataaacattgcttccaaaggcaagctttgaactgctcccaaaacttctgtggataccgtgttgggaaatggagattgtttgtacccaaaggtggtatactcaagcgtcttacgagttcatctttatccttgtacattgatgagtccctgtaaacttgtgcaaaatcgactcccagttgaatttccatagatgttgaggtaacttctagcatccatgttgatgggttgtagttgtccttgatcttgggtaccccagatattgcctggaaatattggatgaccttacatgaatggtgtccaagcggcccagcatagatcaactctccaccccttttcatcagcatcagctgatcaaacgcctcaaatatttcgatacttggttggtgaatagtgcacacaacggttcgacctgtgtctgtaacgttcttcactgcgcgcatgacaatagcagctgcccttgcatccaagcctgatgttggctca

SEQ ID NO: 47435 - DNA, 467 bp, Setaria italica
  Peptide Sequence Number=SeqID_113409
gcaagcaggacttcctcctgtggacaaatccgaaacaatctctatcggagttcaggcagtctgagcaataccagtttcctggaggcactcgctcaagcggtggtgacaaacaatacaaatgccagcctttatcacagcgatcacataggagcatgacatccccgtgtaacccgctactacactgctcacagacctgatccactgcctcattaaacacagtagccccagcatcagacttcctccttttctgcttccgaacaccagcaggcgcctcattagccacagtaaccgcagcatcaggcttcctcctcttccgcttccgagcaccagcagatgccgcactatttctgtccgatttcttactgaaggcatttctccttttccagctcctaacacctgaaacctcttcagccatctccccagtatcagaaacttcatcctgtgaaccagaaaccgagggttgctcg

SEQ ID NO: 47436 - DNA, 505 bp, Setaria italica
  Peptide Sequence Number=SeqID_113410
gtatctagtggtagtttaattgtacgcattagttagatgtcatggtacagtgaggttacacatatgggttcctagcagtatcactaatgtactgttgttctctctttgtacatatcactctcttcttggaactgacatgcacttctcctgtgttgtttgaggaaaatcaatgttttcttatttttatattactgttataattttctttaaaaaatccatgtgatcagtcgcattgctgaaacatttccttgttttctcacgccaaactaataattacaatggactataatgaacattcaagtttttagtaatcttgatgagatactatccccttttgtgttaatgttccaggatttatagtgtatttcttcttcgttttctcaatttttgtttgttaaattagttgtaatgaatggcatattttgtcattggttctgtcgggtacatcgatgtgctgtacactgatttgattaatttctttattggtcttgttggagtactaaac

SEQ ID NO: 47437 - DNA, 368 bp, Setaria italica
  Peptide Sequence Number=SeqID_113411
tcacgccctccccgcgcccgcgctccgacggctcgcggtcgtcaccggcacgccggtacttgtcaagaatgctgacaataatgttgggaggattgttaaagcgttattatttgaccacccatcccttgatgagtccgggacagagcagactgatcacgtggcctgtacctctcctcatggtcatgcaggtcatgcaatgggcatcttaccttgtcgctcgtttcctgctactggttttgcatctgtgaatgaagatgctgcttatgtcagcccacttttggcattcaacttgggattgcatgtttcttgcctcaatcttctaattcaaagaggaggggagcctttcaagttttgttctcaagttgaag

SEQ ID NO: 47438 - DNA, 571 bp, Setaria italica
  misc_feature (444)..(444): n is a, c, g, or t
  Peptide Sequence Number=SeqID_113412
actactagtaataggtgtgagatcataagagcacatgacagaacttttgaggagcatgcaatggaaaaagaattgtcatgtgctctgtataggtgtgagatcataagaggtgggatgaaggaatacttaaccccagttggtccaacaccacttcatgtgaatcctatctttgagataggtcctgttgagccacttttgtcagagtggttagtgtttgagggcatcagtgtggatgagtctgggaagcagcatttccttgatgcatcagttgcctacaaacgtgcagttctgaatgccgttgagtacctttccagatttgggtactccaaggagcaggtatatctcttactatcttgctgtccatgtgagggtaggatatctggaatagtagactctcctaatgcagtggcaactcttgccatccctacagcaatatttgaccancggatcaatgttgatgctgatgagattaaattttacaccaaacattagtgaattgatgttattggagagagaaaaaggatataaggccaaaacacttgaaaggagaccaggaccaaaaactgataag

SEQ ID NO: 47439 - DNA, 741 bp, Setaria italica
  Peptide Sequence Number=SeqID_113413
tatttttttccatattgtgttttcatggcattgctttaactgatgcttcagatcatatagccatataggcatagtggattatttgttgagatcaaactcaatctgtctgtagtgtaatcagtcatgtctgaaccacacgggcaacacatgtcaatattgttggtcctgatgaggatatgtcagttggataaataaaatctggatgtggacaattcttttttccattgcatgctcctcaaaagttctgtcatgtgctctgtataggtgtgagatcataagaggtgggatgaaggaatacttaaccccagttggtccaacaccacttcatgtgaatcctatctttgagataggtcctgtcgagccacgcttctcagaatggttagtgtttgagggcatcagtgtggatgagtctgggaagcagcatttccttgatgcatcagttgcctacaagcgtgcagttctgaatgccattgagtacctttccagatttgggtactccaaggagcaggtatatctcttactatcttgctgtccatgtgagggtaggatatctggaatagtagactctcctaatgcagtggcaactcttgccatccctacagcaatatttgaccaggatataaggccaaaacacttgaaagggagaccaggacctatctcgaagataggattcacatgtagtgacgttggaccaactggggtcatgtattccttcatccacctcttatgatctcacacttg

SEQ ID NO: 47440 - DNA, 547 bp, Setaria italica
  Peptide Sequence Number=SeqID_113414
cttcaattcttcatatggctattttggcctttttttccttctatcttaatgcaatgatatgcagttctcctgcgtatttgagaaaaaatcttcaattcttcatcgctgcttgcatgagacttatcagatagctcatgatttgtggttcatatattctggcatagtgaattatttggtgggatcaaactcgctccatttgtgtgttgcgatgtagcctgatcaattattctgaaccctacagctgatgtaaatctgcctatgcaaactcacgttcccttgtacgcttctccaaagtaacagaatctctcttgcattctatataggtgtgagatcataagaggtgggatgaaggaatacatgaccccagttggtccaacgtcactacatgtgaatcctatcttcgagataggtcctgtcgagccacgcttctcaggtaagtggtttagttagggcatcagtgtggatgagtctgggaagcagcatttgatgcatcagttgcctacaagcgtgcagttctgaatgccataagtaacagaatctctcttgc

SEQ ID NO: 47441 - DNA, 541 bp, Setaria italica
  Peptide Sequence Number=SeqID_113415
cactcttgccataccctacagcaatattgaccagatataaggccaaaacacttgaagggagaccaggaccaaaactgataagacttccagatcttctgagctgctcaaatgatggacaccttcctgtcacccaagaccaaagtggtagaagtgtaccctagagatgcatatcatctagaaattgatgagtatcgttctacttatacatataaataatcatctttatatttccaacttccaggaatcatctatgtatgtgacctggaatccagaatgttgatctttagtttgtcagacaataatcatgtatgaggatagaaacacctgagtggtgtcatattttctgtattgctacaaagtcgtgctatgaataatgttgaaatttaatttccctctctagaaacttacttatttagggtggtgattcatgtgaaagtcactaaaggagagtggtactatgatcggtgttgccagcaaaagtagaaataccatgtcgtcccttgaatgaattgattgttaactagtattttaccttaaaaaa

SEQ ID NO: 47442 - DNA, 1192 bp, Setaria italica
  Peptide Sequence Number=SeqID_113416
tgaaacatggctcctctgacccccaagattagtagtgcccataaatgtgaagaagcagccatgggagcaaaaggtccctctccataactgctggcatccagatatccctcctgttgctgatgtaactgaaggggaattgttccgtgttgagatggttgattggagtggaggccgggttagggatgataactctgcagatgatatgaaatccatggatttcacaattgctcattatcttagtggtccgctaagaatagttgattctgaaggggttccagcttcacctggtgatcttcttgtagtagagatctgcaaccttggtccacttcctggcgatgagtggggttatactgcaatatttgaaagggagaatggaggtggattcttaactgaccatttccctagtgcaagaaaggccatttggtattttgaaggaatttatgcatactcccctcagataccaggtgttcgttttccaggattaactcatcccggtatagtaggaactgcaccatcagttgaacttcttaatatatggaatgaaagggagaaaagattggctgagacaagtccagagacccttaaactgtgtgaagttctgcaccagaggccccttgttcatttaccgacccctgagaactgcttacttgggaagatccaagagggtgctgctgaatggcacaaaattgcaaatggagcagctagaaccattcctggaagggagaatggtgggaactgtgacataaagaatctaagcagaggttcaaaagtttatctaccgatatttgttgaaggagcaaaccttagtactggtgatatgcactttctcccagggcgatggcgaaatttcattgtgtggagcaattgaaatgagcggattccttgagctcaagtaataaactttgttcttattacacttcaatactacatgttatattatgttttatgaatgcatcttcaatttcagaggaccataaggatgggcccaaacagccaattgcatcaaatcggatccaccagtgttggaaaactgaatgttattagattccatcatatgttattatgacactagcccagtacactagcaccagacatcttcatagcttcttgcaaaggactttatcagatagcacatgtagaatatgaattagtcaattcataggatacagaggtttattttgattttttttcc

SEQ ID NO: 47443 - DNA, 867 bp, Setaria italica
  Peptide Sequence Number=SeqID_113417
ctaatagtgttgcttcaagatttgtgtctttcaatctgcaaagggttgaatcgcatctattcagaaagggacagctgaatggcacaaaatggcaaatgaagcagccagaactattcctggaagggagaatggcgggaactgtgacataaagaatctaagcagaggttccaaagtttatctaccagtatttgttgaaggagcaaatcttagtactggtgatatgcacttctcccagggcgatggtgaagtttcattttgtggtgcaattgaaatgagtggattccttgagctcaagtgtgagatcataagaggtgggatgaaggaatacatgaccccagttggtccaacgtcactacatgtgaatcctatcttcgagataggtcctgtcgagccacgcttctcagaatggttagtgtttgagggcatcagtgtggatgagtctgggaagcagcatttccttgatgcatcagttgcctacaagcgtgcagttctgaatgccattgagtacctttccagatttgggtactccaaggagcaggtatatctcttactatcttgctgtccatgtgagggtaggatatctggaatagtagactctcctaatgcagtggcaactcttgccatccctacagcaatatttgaccaggatataaggccaaaacacttgaaagggagaccaggaccaaaactgataagacttccagatcttctgagctgctcaaatgatggacaccttcctgtcacccaagaccaaagtggtaaagttaaatcatctatgtatgtgacctggaatccagaatgttgatctttagtttgtcagacaataatcatgtatgaggatagaaacacctgagtggtgtcatattt

SEQ ID NO: 47444 - DNA, 232 bp, Setaria italica
  Peptide Sequence Number=SeqID_113418
ccttcaccaacatgagataacgaaatcacttgcgacgaaggttgtccaagatggttgcttgaaccttggcgatggtatgtcgttgtctgtactcaagcaaccatcttggacaaccttcaccaacatgaggataacgaaatcgacttgcgacgaaggagttggtttggttcctggcttctgctttgctggctctgcctgttttattctttttggtgcagaaggtatctattag

SEQ ID NO: 47445 - DNA, 1711 bp, Setaria italica
  misc_feature (1685)..(1711): n is a, c, g, or t
  Peptide Sequence Number=SeqID_113419
gccggccgcggtggctgctcagccgaggccggcgctggcaggcgcgggccgaggaggctgcggaggtggcggcgctcagggcggagctggagcagctcagggcgaagatctccggcttagagtcagacatggtagagcgatccaaggaactgaagaacaaggatggtgacatcgcaaagctggagaaagccattgaggagaggtcacagaagattgcttctctgcaggccgagattgcttccctccaagcacagggatctatagctgctgaggagcaggcaggcaaggccaatgcccgggctgttgagcttgagaagcagattgagaagctgaaaaaggatattgaaacacaaagtagccagagaacagcacttgagtctagggctaacgatgcagagaagaaggtagaagagctgactgcaaagcttaatgttatccaaaaggaaagtgatgacaaaaagcgcaaaatcaagaagacagaacgtgctcttaaagttgctgaggaggaattgatgaggttgcagctagaagcaacagctaaggcaaagcagctgacggaggttcatggagcatggttgccaccttggttagctgcacaatatgctcaatacctggaagtggtctcaggtcactggaatcaacgtgggaaacctgccatgcaaaattttttgcagaaggcatcagaaaaatcagcacaggcgaagaaatgggctgaacctcatattgagactgctaagacgaaatggattccttttgctaaggaaaaattggttgtcctcaagaaaaacgcagaaccttatgtacaaaagatctcaacaagatccgtggagctgtatgagtcatcccgggttgctgtgacacctcatgttgtcaaagttaaagaacttgctgatccttactaccaggaagccaagaagttttccaagccttacatagatcaagttgctgagatcacaaagccacatgttgagaaagctagaactgctctgaagccgtacactaaaagagttgttcatgcatatgggtcatttcttgagtcagcaacgacataccatcgccaggttcaagcaaccatcttggacaaccttcaccaacatgagataacgaaatcacttgcgacgaaggagttggtttggttcctggcttctgctttgctggctctgcctgttttcattatattcaggctgctaatagataccttctgcaccaaaaagaataaaagatctcgtggcggtaacggtaaccatggccacaggagacacaagcggcggcacacagacaagtagatcaactatccagcgcttagggttcgtctgctgtgtatggttgcatatcttcaagcggtgccatggaggaaggagggtcatggtctcatgggtaacccttaccgtgaaaacattgtacaccaacatttcttcttctttttacattttcgccccaggtgtaatatggacgtcagtggcagcagacattttatctgcactttgctggggttcaggggttaagcctcggcctttgtttcattgttcattattgtttattgtaattttgtgaatgcgtttgagcttgcgtgcttgttcttgttgccttgctggtgaccaacatttgaacttatgtatacaaagtggttgtttagctaccaggctggagttcagcccattggtaaaaaaaaaaaaaaaaaaaannnnnnnnnnnnnnnnnnnnnnnnnnn

SEQ ID NO: 47446 - DNA, 707 bp, Setaria italica
  misc_feature (1)..(55): n is a, c, g, or t
  Peptide Sequence Number=SeqID_113420
nnnnnnnnnnnnnnnnnnnnnnnnnnnnnnnnnnnnnnnnnnnnnnnnnnnnnnntttgagagcagaacatagaacattttttttccgaagaacatttcacaatgtggcataacattgattgataagttcatcagaaacaagcacaattcatagcttaagcgcgcttcaggagcgtattcacatggagggcaaaccccctagtacttccaaccacacatcacatacagatattacgaatcactgaacacataatcatatggtcatagaccactgcatgaatttgccctccctccctgtagcaccacaaaccccctagttcttaccgccgtcgtgaacctcgagctcctgaatgatgacgtagccgaccttcttagggctctcggtgtcggaagcctcgtcctcctcgtcgtacagctcgtcgtacggggaggccgcggcggcgccggcgaccatggaccagacgaggtacgcggaggcggcggtgagcgcgccgcaggcgatgccgaagaggagcccgatgacgaccacgaggatgtccctggcgcgctcctggggcccggcggccgccgcatgggcggggtgcgggagctcggggcggcggatctggacgttggcggggatggagtggaggtggtggtggttgcggtggccgtggccgtggtggaggtgcgggccgaggcggcggacgcggaacacggtgacgacc

SEQ ID NO: 47447 - DNA, 953 bp, Setaria italica
  Peptide Sequence Number=SeqID_113421
ctccactccccagcttcgcctccaatggcgacgagggcggcggcagccacgctaacggcagcgacgtcctctctcatcaggcgctctgcctcgctgcggccgcacggtctccgggtcccccgccgcctgcctccccaaagatttgtgcgccacattgcttcatcaaccaatgaggaagctgctgccaaagcagcagctgccactgctgatactgaaggaccaaccatttttgacaagatcattgcaaaggagattccttcaagcattgtctatgaagacgacaaagtcttagcatttagagatattaatccacaagcccctgtgcacgttctagtcatcccaaaagttagagatggactaactggactaagcaaggctgaaccaaggcatgttgaaattctgggccagcttctttgcgcagtgaaagtagtagcagagaaggaaggtttggcaaatgggtaccgtgttgtcataaacaatgggcctgaaggatgtcaatctgtctatcatttgcacttgcatgtactcggtggaaggcagatgaagtggcccgctggttaaattacagagggcgggacatattgctttattttgtatccctctttctgaatttaccggttgtctgactgttgttccaaaaagagaacgagcgatgtactactatctgcccctgtgaagatcccctttgagcactcatctctgtggttactgaactttagcagcagattctgcgagaacattaaactggtttaggatcatcctggcaattgttctcagttgcgcatatttctatagtcaagcataggatgcagtttgctcaagattgtttaagctagctaagggtgcgtttgacagggctcccagagttgattctctggtaattccagcagtagctttgccaaacagtttttagatagaagtaattttctactgattctatgaagtttgaagtt

SEQ ID NO: 47448 - DNA, 336 bp, Setaria italica
  Peptide Sequence Number=SeqID_113422
ctcggcctcgcccacacgcgcatcccccactggcgtcccgcgacctcaacgagagcctcctccccggcgggggcggggggctccgccgccgccgctgcctccgcctcgcacgacgagtacgaggagcgcgcctacgactccgacgacaaggtctccatctccatctcggactccgacgccgaagccgacgacggcgggccgccgtcgcgcccgcccttctcctggcggaagctctggcgcttcacgggcccgggcttcctcatgtgcatcgcgttcctcgacccgggaaacctggagggggacctgcaggcgggcgccgccgcggggtaccagctg

SEQ ID NO: 47449 - DNA, 247 bp, Setaria italica
  Peptide Sequence Number=SeqID_113423
tgggtttagaacagctagcaaagccagttctggtactaagtgtccttccaaatgcagatagcgctgatgtcgaaccaagcacttgtttgcaggctgggatgcaagaacgcacggccagcatctgcataccagctgtcacggatgctcccattgtcctttatttagaaaagggccaactgggttggtaataggatgagattcgaggccgagatttgcagggcgaggggcgcgcgttagaatcggaggc

SEQ ID NO: 47450 - DNA, 623 bp, Setaria italica
  misc_feature (562)..(562): n is a, c, g, or t
  Peptide Sequence Number=SeqID_113424
aaggaacgacaaggggaagaccaaataggactaagttagcaccgaatgttccgatgctaccaaaaatagaccatcggaacatccgatggtatactttaactacccattcaagcaacggttctttaagctcttgggctatttataccccctccacttgaccatttggagttgctggatgaagttgaagtgtgtaggagtccattgaagagtaagacacatcaagaacacatccaagccacccaaaagtgtttatgtaatccatcaaagatttagcacaagcttagcaaaatgattagtgctagaatagactagagaagagagagtgcaaggtgtgcctaccttatgatcaggttctagagtgaaccacctttatacaaggtgtgccggcaccttggagccttagtggctcaccggcaagtcatgagcaaatgactttatgtgtttatcgagtgctgtttgtttgtgggaagaaggcagtgactgcactttggtacattttccaatattgcaatgcgcatacaagtgtgtattcgtgtgcacttatatgttgtcctattttaanaattcattgcctgcatcgtgaaacttgccatgtattcgtagaatcttccttaacctcgaag

SEQ ID NO: 47451 - DNA, 324 bp, Setaria italica
  Peptide Sequence Number=SeqID_113425
ccttttcagtttattcacatgattaccaactgttcgaaagctcgaaacctcaattactgagtcacgcatttgaagaagacatattggaaagcgttttcctacaatcatgcatcgcctgaatacatttttcttaagctgttggagacttgcagtggtaatcacatcaaaatcttttggtacccttttcagtagcaaatctctcacacatcccccaacaagataagcttcaaaaccttgtcgtctgagctttttgagaaccgccaatgcatccttaggtatagcatcctggttaatgccaaaagcccttgagtcaaaaagtctcca

SEQ ID NO: 47452 - DNA, 431 bp, Setaria italica
  Peptide Sequence Number=SeqID_113426
ccaccgataccgttacatcctctgcgacatctgaaaatatcctgcacaacaggcaatgttccaaaagtttcaggcagcaagatctgtatttgaattggcaataggtaaacttgaagcatagagtttttaacaacaatacaccactttgcctttgctatacactcctgagaacaccaaatgctgaagaaacaactaatgacaacaaatcattccagtcaatgctgcaagtacttgaactctgcttgtaccataatactgttgatgaatttctcaagaaacttcttaaatcttgtgactttctagggagcacaaaagattaggagtgcatctgatgaccgttcgaggagcaaaagcattttcagagtagcagtttgtgagtccttccaaaaccttcaaccggttcaactttcacttggctgcgaaaccctgaa

SEQ ID NO: 47453 - DNA, 214 bp, Setaria italica
  Peptide Sequence Number=SeqID_113427
tgcgggttttcttctgtttgcactcatatggagcattccagaagctctaatcactgcagagatgggcactatgttcccagagaatggtggttatgttgtctgggtctcttctgctcttggtccctttgggggtttcaacaaggttgggcgaagtggcttagtggtgtcattgataatgctctatatccggtcctctttcttgactatgtcaagt

SEQ ID NO: 47454 - DNA, 315 bp, Setaria italica
  Peptide Sequence Number=SeqID_113428
agtggcggcagcggcgcgcggcggtgatgagcgtggagtaggtgatgttgtcgagggggacgccggcgtcgagcatgtcgagcgcgaggcgctcggcgtgcggccactggcgcgcggcgcggagcgacttgagcgcgacgttgaagaagatggtgtcgagcgggaaggcggcgctggggagcgcccggagccaggcgaggagggagagcgacttgcgccacgacgggtggaggtagttgaggaggaggagcgcgtcggagggggagggcggggagccctgcgggaagaaggcatcgagggtggcggcgaggtcgg

SEQ ID NO: 47455 - DNA, 1174 bp, Setaria italica
  Peptide Sequence Number=SeqID_113429
tcccagatggcctttaccagtaccaatacatcttctcctttcagcatcccataacctcacagtattgtccttgctcccagttacaacaagcgtcttcccagaagaagagacacaggtgtcgatgcaaacaataatttctgtgtggccagccagtacataagaacatgacatcgatgcaacatcataaacacggacctgctccaagttagtagctacagcaagatattgttcctcatccccgacaaacttcaagtcaagaatctcatcattataacctactagacgtctatatagggacagttggaaggtcccttcatcagtttttttgggacaatagaacaaaaactgctgatcagcagtaacacatagcaatccttgatcatttggcaacataacagcagaagtaaacccccttctggtttcctcattctctgagttaacagttacatcagatgattgctgctcgaacacgcaacgaccactctccaagcaccagatgcgcacaaccccacgttcacctactgtaagaaaataaccatccgatccccccttcatgtttaccagttctatgcccaaacaagctagtagctcacttcctgatccaatgaaggaaacagcttctatcatttcatacgttggtattgtcttcttcgagctgtacttacgaacatcccacacagtaacaaccttatccctcccagcactgagcaatgtttgtccatcatcagacaatgtcaatgaagtgaccgttgaaaaatgctctttcagcacagcaacacatttttggtttcaaggttccatactcgcacagtgccatcttcgcttcctgaaaacaacagaaggcgctttggatctttgtggaacataatggtcgtcacaatgcctgtatgacctcttaagaaatgtgtgcaaaatccaccatccacatcccatatgcacaccttcttgtctgctccggcagttgcaagcaacccaccagaagcatggcacgccatggccataataggaccatcatgtcccttccagctgcgtatgcaagtgcgggtggcgaggtcccagaccctgataagcctgctgtgccccgcagcaaagaggaggcgggagtcgggggacagcgtcagcgcggtgatggcctccgagtcgccgtcgacgggctcccctatcgcggaggcgt

SEQ ID NO: 47456 - DNA, 227 bp, Setaria italica
  Peptide Sequence Number=SeqID_113430
gtgggatgatagtcttgtagtatcagtggtgaagccttgttgttcatcagtggagggtttatctctgtttggggctatgaagaaggacgttgccattgttgggtcatgattcttctcaataatagtttgaaaagaatgactcgactgctggcaatcagtgtgatgtggaataagagggggcgaacagtcgagtcattcttttctaactattattgagaagaatcatg

SEQ ID NO: 47457 - DNA, 1435 bp, Setaria italica
  Peptide Sequence Number=SeqID_113431
gtttgttaacaacgaaccggattaccggaacctccctctcgtcaacgtccctcgtccgtcgcgctcaaggaaaccccaccccagttgcgcgctatggcggcgacgtcgccgaggcgcgcgtcggtggctgccgccgttgccaccgccgtgctcctcctcctcgcgtccgtggccgcgggcgacgaccgcaacggcgtgtacgacccgtgcgcggacacgacggtggggcgcggcgacgggttcaccttcggtgtggccttcacgggccgcgacgccttcttctccggcggcgtgcagctctccccctgcgacagccgcctcggtctctccaaccgcgcccaggtcgcgctcttccgcccccaggtcgacgagatttcgctcctcaccatcaactcctcttccttcgacccgtcatcttctggtgggtacatggtagctttcgccgggaggaaatacgccgcgaggtcagctccggtgttcgttggcaacagctcctacacggtgaccagctttaccctggtgttggagttccagaagggcaggctggagaacctgttctggaaggacggcgactgcaagtcgtgctccgggcgcgcggacttcgcgtgcgtggacaagagctgcgcggtgaagacgacgagctgcaagggcaagggcgggcaggcggactgcagccccgggatccagctggcgttctcgggcacggacaagcacgaggacgtgctcaactcgtggtacgaggtgtccaagctccggcagtactccctgttcgggctcttctccaacctcaaggactcgctggccagccagttcagcagcttcttctagagcccggatcgatgggatgagcgagaccagagatatcgttctgtatgttcgttgatctgttgtgccgaactacgctagcatgtgcatgtttagtaaatactagaagaactgtctcgtatgcattataccaaccacatgtaggcatacatcttctacatataaaaggatcgataggtaatgaactaaacagaagtactccattcactaaacatgcacatgctagcgtagttcggcacaacagatcaacgaacatacagaacgatatctctggtctcgctcatcccatcgatccgggctctagaagaagctgctgaactggctggccagcgagtccttgaggttggagaagagcccgaacagggagtactgccggagcttggacacctcgtaccacgagttgagcacgtcctcgtgcttgtccgtgcccgagaacgccagctggatcccggggctgcagtccgcctgcccgcccttgcccttgcagctcgtcgtcttcaccgcgcagctcttgtccacgcacgcgaagtccgcgcgcccggagcacgacttgcagtcgccgtccttccagaacaggttctccagcctgccctttcttggaacttcctaa

SEQ ID NO: 47458 - DNA, 898 bp, Setaria italica
  Peptide Sequence Number=SeqID_113432
aagaacggggtgttaacgatgatgatgagattgctgtggtggtggtggacagcgatgatgcggtggttggcaagttgaggcaaaaggggaacaagggtggtgggtcgggtggtggtggattggtgctacggctacgagggagtcgagttgaggctgcaatccttcctaccacagcaagatggattgtattcaatataagcaaagcaaaaccagcagggccgctgctctgctcctgcagtctctttctacatggaaaggaaaggatggatgcgaagttgaggtgtgcatatttataaccatctaccctacctctagtactaccttttccctcctcttgaccttgagcaattcatgccatggtgcccccaaattccaacaaagttaaccaaacaatcggacgaaatcactcctaatcgacgagacgaagtacaaccatcaagcgatttgggaggaagatgtggaaatattgatagggcccccacatgcagaatgaggcagcaacaatgtgtgacaaaaacggctactgctttctcgccatatatccacggatttgtcaatgaaggtaaggttaccaccacctcaccgcaccaccgcagatccacagacacaactttcccaaaaatcattaaaaatataaataaataccacaaaaatgggctaaaagatgaaacgatccagatcaaatcgaaactaaaatattcacacaaacctattttaatttttcagaaaaaaataaataaatgatgcgttgaaggaaaagaggggaaaggaatctcccatccgactctccttacggtgctgaaagatgtggcggtacagctcaccaaaccaaagagacccgggccggccgaagacccaaaggaacgaagaaaaaccaaaagacggaataaaataaaca

SEQ ID NO: 47459 - DNA, 769 bp, Setaria italica
  Peptide Sequence Number=SeqID_113433
ttcagaccacagttcggaagaaggattccctctttgcagagctcgtcactgatcataaatacatgtctcaagaaaatgatcatattgggagccctcttgtattgtcaaaggtgatgtacttgtcaaatatcaatgactcattgtctgttgctgctgtaccagttggagcaaggtgtgatgacttttcaaccgatccaaatctccgtgaggaacattggctggccagcttgcgttcttcgttgaggccacctttgctgattaaaagtcacaaatatgctggcggcctaatactaagatcgaagaactttgctgtttctcttgctgagctgatttcagtagctgggaatccactaaatgctggtgaagctagcagatttttaacagaatttgggcaattttcatatcaaatgcctgatgacataaaattgaccttgtctgctgcctggcatggaccaagtgtaattcctcggaagaggaaaccgactgctggaggttgcattgatgttgagctgaaaatcgatgaggactccagaatcggggcttggattgagatcaacaggaagtcgaacccacggttactgagatgggctctcacactatcagatacaccagaggatgacctgggatggggtttgagcttgcggagagggactgaagccaaaccacaacgatttcaggtggagggttttctgaatttgcatctgggcaagaaggctgctgtgcaacctggtatcgtgttcaatgtggatgggagagatgcacacctgct

SEQ ID NO: 47460 - DNA, 406 bp, Setaria italica
  Peptide Sequence Number=SeqID_113434
gctatcactcgtgtgcctaatctttccattgtcaccgaatttcttccaaggtgggctttatttatttatattgactacttcgtagcatgtagcaaacaggatcaccagtgattttactttatgattcagaatacaatgtgttactggcataagcttctctctaacatcttccatgttgcagtaagtttacgaataactactgatgtgtagagataggaactttttatttatgtatatgattgtctttaaaaacagtacattaaatcagtggcgagggatctgttactgagttcacgacacgagtgtacataagtttaagaaagaagaaaaggtattgttgggagttgggatgctggtataacagtatcatttaacacatgcataccatgcgtagtatataggaggc

SEQ ID NO: 47461 - DNA, 338 bp, Setaria italica
  Peptide Sequence Number=SeqID_113435
gggctgaatgctgtcacctttgcggaggcgccttcctgcacctgctgcacagaagatctattggatgctcgtgctccagtagaaaaccaacgaggtaattgcgcaccactgagtcgtgatattcgctcataccccagaatcttggagaggtcgagaggggagcggaccgacggttgccgcggcgaagggccggcgacagcggcgaccgggtcctagggaagagtggagagagcgctctgcgagaccgggcgctggcgagcggcgacgaagaggccgcttcggcgcgcgcgagggcttgcgctagggctttggatcaggtcaggaaccgcgacgccatt

SEQ ID NO: 47462 - DNA, 515 bp, Setaria italica
  Peptide Sequence Number=SeqID_113436
ataactggaaccagcggtaccccaggacaagaaaagccaggcggatcaacatagacctgacgaaactggagagcgaaactggcagcaatagctatcaggaacgctactaccataaaggcaatagcatagttgtatcgatagcaaagtcccactataaaaccacaaagagcaactatgacaagacatagaacaccctcttgccagattgacataattccaagggagcgacgactagttgctttgtcattccatcttaatgtgatcgcacaagctgatacaactgaataactggtctgctcccagaaagatagaagggttaaaaatctaacagttaatacgactggaatgagatattcaagttgaaatatttactgaagtttcgcaccagggtcccaacagaaagaatatgagagagcatgtgcacattaaagagacctgccatgactgctgcaacacagccaacccagatctgagagtgcagaggagtacgcctttttgggtgtactttagcaaat

SEQ ID NO: 47463 - DNA, 1304 bp, Setaria italica
  Peptide Sequence Number=SeqID_113437
tagttccctacttattaaaacctactaaagtagtctaacttattgtactaagacatagaacaccctcttgccagattgacataattccaagggagcgacgactagttgctttgtcattccatcttaatgtgatcgcacaagctgatacaactgaataactggtcagggtcccaacagaaagaatatgagagagcatgtgcacattaaagagacctgccatgactgctgcaacacagccaacccagatctgagagtgcagaggagtacgccttttttgggtgtactttagcaaatattgaaggtagcagcctatcccttccaatcccaaaatacaaacgtgactgttaaggaggtgatgctcatcaagttgatcaatttgattgaagaataattacgaatccgatactgatacctaagaagctaggaggtataccgtatacctgaacatacaatccaactagaagtgttgtagtaagtccagcaacagcaccaatgctgatcaatacagtaacaaatttcagccccttagcagaaaaagcctcagccaaaggagcatcttcaccaagtaatgtatgtggcaccattccagtaatgaccaagcatacagcaacatataatagaacacatgctagaaggcttcctaagataccaatgggcaaatcgctctgctaaagtttgtttgcatagcagaaaagaaagttaaaatgcacttcacactaaacagaatatggccataaagagattaggtaataaataagtgaggctactcattacctgtggacttttggcttcctcagcagaattagcaactgcatcaaatccaacatatgacaaaaaagactactgttgctccagtcacaacagatttgaaaccatttggcataaatggtgaccaatttgttacatccacctcgaacacaccagcaaatacaacgactataacgatgactatctgcatgaccgaaacaggcgcatcgttgcatcagtccaaaacacagaataaaacctcccaaacatgaatgtgatcatgagaaaaatactaaaacctaacgttgtacaaaatgtctcacttagaaacttaacactgatgttacatgaaaaagccacttcaacctgttcacttacccacattcacaatgtgtaagctacatgtagtgaagaaaaaaaacactttagcacgcaagcagtcttaccttcagtgtagtcataaaaagtgttcacagctgatgattccttcacaccataacagagaattgcagttaataggatgagaagaattggggaccaatatattaatcgatacg

SEQ ID NO: 47464 - DNA, 240 bp, Setaria italica
  Peptide Sequence Number=SeqID_113438
ttttgccatttctattgaagcttcagaaggaacttcgtggtaaccaatagatgaggggtccgagctgcaaggggcagcattgtactgaccatagccagcgtaaatgcccacggcgatcagactcaggatgacaaatctataccacgcttcttcatgtagctgcgcgacaaaatgtcaatgccatcagtcatgagaatttggtagtaaataatggtcatcaaggcaacaccagaaagggaa

SEQ ID NO: 47465 - DNA, 306 bp, Setaria italica
  Peptide Sequence Number=SeqID_113439
cgggcgacggtgccggtgacgacgaagatgccagccccgatggacgcgccgataccgagcagcacgagatcgaggacgccgagctgccgctcgaggtcctctctggaggcctcggcggacgcgtgggcgccgaggggcttgcggcggtgggcgccgaggggcttgcggcggagcgccgcggagcagaggccggagaggaaggggcggccgctcgaggaggagggcctgtggtcgtcggcttcctccatggcgcctgaggagatggggagctggtggcgtcgcgacttgggccttcgcgtcgttggc

SEQ ID NO: 47466 - DNA, 808 bp, Setaria italica
  Peptide Sequence Number=SeqID_113440
actcaggatgacaaatctataccacgcttcttcatgtagctgagcaaacaggaccatgttgaagaaaacagagataactggaaccagcggtaccccaggacaagaaaagccaggcggatcaacatagacctgacgaaactggagagcgaaactggcagcaatagctatcaggaacgctactaccataaaggcaatagcatagttgtatcgatagcaaagtcccactataaaaccacaaagagcaactatgacaagacatagaacaccctcttgccagattgacataattccaagggagcgacgactagttgctttgtcattccatcttaatgtgatcgcacaagctgatacaactgaataaccggtcagggtcccaacagaaagaatatgagagagcatgtgcacattaaagagacctgccatgactgcggcaacacagccaacccagatctgagagtgcagaggagtatgccttgttgggtgtactttagcaaatattgaaggtagcagcccatcccttccaagcccaagatacaaacgtgactgaacatacaatccaactagaagtgttgtagtaagtccagcaacagcaccaatgctgatcaatacagtaacaaatttcagccccttagcagaaaaagcctcagccaaaggagcatcttcaccaagtaatgtatgtggcaccattccagtaatgaccaagcatacagcaacatataatagaacacatgctagaaggcttcctaagataccaatggcaaatcgctctgtggacttttggcttcctcagcagaattagcaactgcat

SEQ ID NO: 47467 - DNA, 1957 bp, Setaria italica
  Peptide Sequence Number=SeqID_113441
ttttttttttttttttttgttcttgtaaagttaattgtacccacagctccttcttttcttttctttttattattgggcaaaactctatgcacttggcattccttaaggaacggacactacaacatatcattttacagtctaagaaactcactgtctacatacataactatagagtatgcactgtgcaatatttcaggagaaacgcagttaggtcccatcttatggtacagtattttcaaagaatttagagggttgccatttctattgaagcttcagaaggaacttcgtggtaaccaatagatgaggggtccgagctgcaaggggcagcattgtactgaccatagccagcgtaaatgcccacggcgatcagactcaggatgacaaatctataccacgcttcttcatgtagctgagcaaacaggaccatgttgaagaaaacagagataactggaaccagcggtaccccaggacaagaaaagccaggcggatcaacatagacctgacgaaactggagagcgaaactggcagcaatagctatcaggaacgctactaccataaaggcaatagcatagttgtatcgatagcaaagtcccactataaaaccacaaagagcaactatgacaagacatagaacaccctcttgccagattgacataattccaagggagcgacgactagttgctttgtcattccatcttaatgtgatcgcacaagctgatacaactgaataactggtctgccatgactgctgcaacacagccaacccagatctgagagtgcagaggagtatgccttgttgggtgtactttagcaaatattgaaggtagcagcccatcccttccaagcccaagatacaaacgtgactgaacatacaatccaactagaagtgttgtagtaagtccagcaacagcaccaatgctgatcaatacagtaacaaatttcagccccttagcagcaaaagcctcagccaaaggagcatcttcaccaagtaatgtatatggcaccattccagtaatgaccaagcatacagcaacatataatagaacacatgctagaaggcttcctaagataccaatgggcaaatccctctgtggacttttggcttcctcagcagaattagcaactgcatcaaatccaacatatgcaaaaaagactactgttgctccagtcacaacagatttgaaaccatttggcataaatggtgaccaatttgttacatccacctcaaacacaccagcaaatacaacgactataacgatgactatcttcagtgtagtcataaaagtgttcacagctgatgattccttcacaccataacagagaattgcagttaataggatgagaagaattggggccaatatattaatcgatacgataccaccgaaaaactcctctccatgtcctatccagcttggaatatggcccttcaggaatgggagcagctccaagaattggatcaagtaactcgctaagctacgagcaatgcttgccgcaccaatatggtaatccaccatcaactgagtgaaaaccaagaaggcagtgatctcattgatcgctgtatacgagtagaggtatgctcccccaaccacagcagggaatcgagatgcgagttcagcatagcacaaggcattgagcacacacgcagctccagcgagaacaaaactgatcgtaacacctgggccggtgtcgcgggcgacggtgccggtgatgacgaagatgccagccccgatggacgcgccgattccgagcagcacgagctcgaggacgccgagctgccgcacgaggccctcgccggaggccgcggcggacgcgtgggcgccgaggggcttgcggcggagcgccgcggagcagaggccggagaggaaggggcggccggtcgaggaggagggcctgtggtcgtcggcttcctccatggcgcctgaggagatggggagctgaggtaggacgtacgacgaac

SEQ ID NO: 47468 - DNA, 422 bp, Setaria italica
  Peptide Sequence Number=SeqID_113442
caagtgtattgctaaggaggctgagctgatgtttgagttcctgaggcttgaagcacccattgatgatgaattaatcacccagtgcacagcaatacgcttgtgtgccttgagccttacgaactgcactcgggacaattctgtttctgcatccgctgttatgttgtgagatgtgggactgcaatgttatccggcgcagtaccatggaatttatggtcaacaaattactaaaaaaattcttcggctgccaagcacaagactgttaaggaagaacctgctgctgagcacatgactgtcaaggaagaacctgctgctgagcacatgactgttacggaagaacctgctagaagtggtcctgggggtgatggggataagtattgctgctgatggagcagcaaacaccaacagggggttctcagtataag

SEQ ID NO: 47469 - DNA, 325 bp, Setaria italica
  Peptide Sequence Number=SeqID_113443
ccagtgcacagcactacgcctgtgtgccttgagccttatgaactgcactcgggacaattctgtttctgcatccgctgttatgttgcacaagactgttaaggaagaacctgctgctgagcacatgactgtcaaggaagaacctgctgctgagcacatgactgttacggaagaacctgctagaagtggtcctgggggtgatggagataatattgctgctgatggagcagcaaacaccacagggggttctcagtataagaaaggtgctgagaagagtaacaagtggaaaggtggtgagaatttcggtggtgagaagagtaataagagg

SEQ ID NO: 47470 - DNA, 358 bp, Setaria italica
  Peptide Sequence Number=SeqID_113444
aaaacttaaaagtaaaataaactaagaaagttaagaaagactaccgggtagacaacgtagaacaggagacgagcttgatgatacggagatcaatcattctgagttgcctgatccaggagcatgcacgttcagtggtccacacagcagattgcagcttttctgatgtttctggtgcggctttgttggtatgttcattcctcccctggcctagctgtaacacagcaaacatttctcttatattttgactatgcaatgttatgtaatcctttttctgcaccccggacatttagctcaaatgaaatctgtcgcaactataattgaaccattttattttcatctatgttcagttatcattgtc

SEQ ID NO: 47471 - DNA, 471 bp, Setaria italica
  Peptide Sequence Number=SeqID_113445
ttgtttttggttaaattattggttgtttgggtaaaggtcttggttgtattccaccagacagttctgttaagtggtctgactataggagctaccttgagaagtattatgaaagcaatgcttctgggttcgttgctgctgctgctgctaaaaatccgcaaaatgttactgacatgggccttgctgttgccaaatttgttagtaaccctcttgcatctttactaaaccaccgatgatcttactgaagctgtttgtgtaacatatttcaaactcacaatttttttcaattagtgtctcgagatggaggaggaactcctgtctgtgtggaatactcaagtgttgcataggtttggtgagcccgtagcagcctgcgctatcgtggagagtagcctgatcaaggagcatgcgcttttaatctgtggcacaggggctgaattggatcttccttctgccattgcttttgtgtgtattacc

SEQ ID NO: 47472 - DNA, 245 bp, Setaria italica
  Peptide Sequence Number=SeqID_113446
ctgcatttaacatcggtatatatcggaaaccctagatcagatcggggtcgtatttgcatccgggaggcgccgcaaatttgtacccaggccacgaccatggagcgccacggctccccttcagcggggcgtccccgtcccgtcgacctcgcgaagacgaaggtggtcgtggcaatgagcaagggagaagagtcagagaggagttgagacacgtaacaggggataggcaaggcacacgaggggatagg

SEQ ID NO: 47473 - DNA, 315 bp, Setaria italica
  Peptide Sequence Number=SeqID_113447
cattctcgaagctgccgcactcgtcctgctctctccccctcctcccagaggccagatcttaccgaccggtcgagtcctagctgttctcccaccccgtgacgcgccgcgaaggccatcggccggcccatcgccgccgccgcgccaacgagggggggtctctgattgcattcaagatgggaggagataaagaatccgccaagctgaaggaggagaagaagtccaaagatgagatccatctcaagatcaagagcaaggacaagtcatcgggtgatgaggacgagaagaaagaggttgagatcgagatcgaagcctaag

SEQ ID NO: 47474 - DNA, 641 bp, Setaria italica
  Peptide Sequence Number=SeqID_113448
tggttctttgggtagaatatagggtatttttattcttgctatggtcttttgattaatgcctaacattggtttccagtgtattaaagaggaggctgacctgatgtgtgagctgctgaagcatggtgctaagccttctgatgacatcatccagctgagcagcgtgatccgcatgtgcgccttgagccttgtgtacctcagagaaccccaatctattgcttccgccgctgcaatggtggttagtgccctacccccatcctgcctcccgccaatatgtgtgcccaattttaacaagtatatctatccatttcttttctgtaaatttacctacatattgacactggttgcaaaatgatgaatgtattcgatccaagggtatggcaaatgaggctaaaaggatgtgtgattggatgaagagagagaacaggcttattaccttaagcttgcctcagcctcgtgagctccaccggagctgcgtgatccggatgaaagccttggatgttatgaccagaatgttgcatgagtgtttctttcttcctccaagccaaatactgttcgcactgaagcctgggagctggcgccttcttctggaagagcatcaggatggcccgaggttgcagcagtgcgaacagtgtttctttctt

SEQ ID NO: 47475 - DNA, 877 bp, Setaria italica
  Peptide Sequence Number=SeqID_113449
ttaaagaggaggctgacctgatgtgtgagctgctgaagcatggtgctaagccttctgatgacatcatccagctgagcagcgtgatccgcatgtgcgccttgagccttgtgtacctcagagaaccccaatctattgcttccgccgctgcaatggtgggtatggcaaatgaggctaaaaggatgtgtgattggatgaagagagagaacaggcttattaccttaagcttgcctcagcctcgtgagctccaccggagctgcgtgatccggatgaaagccttggatgttatgaccagaatgttgcatgagtgtttcttttcttcctccaaggttagtggaaaatacttttttttggttcatggcaataggttgacataattttatgcatttctggtctagccaaatactgttcgcactgctgcaacctcgggccatcctgatgctcttccagaagaaggcgccagctcccaggcttcagtcgaagactcgcccaagcccaagcgccggcgcaagcccaacaaacctgatgctcttccagaagaaggcgccggctcccaggcttcagtcgaagactcgcccaatcccaagtgccggcccaatcccatcaagacttaagctggcccagaatgggaagtctagctataagatgtagcgactagtgagtgcgtctgagtctgtatccaacaaggaactcctgaattcaaactgaatctattcctcctacctgctccttcctccctgctctcttttcccattgctcgtgctgctaacaaatactcaccgtagaactaagtagactaatttttctttttttccccagtccttttcatttctggacatctgttattgtatttgtactggttcacatactagtcatgttt

SEQ ID NO: 47476 - DNA, 1551 bp, Setaria italica
  Peptide Sequence Number=SeqID_113450
gtcaagtaccatggaaagtttaggatccatagctggttatcattctttagtccttcattattgaaggcaaccgatttcttgctgttatacatacgttgccttgcctttaccctacttgctattgtactgatcattattacttgttagatttcccaatgtactatatggatttgttcgacaaacttcaataatcatctcgcctcttgttgtgtattttttttatttacttgttcggaaagatctcttggagaaattatggggatgggacagactgctaccaaaggcgacttccgtgtctttgtctgtctatatcacataccttgaagagtatcaccgtcgcaatgtgcacgcagttactacggacacgagcatatctgctctcgctgagacttgtctcagcaatgagaagcaacttgtatctgagttgaagctccgggtgacacgtgaacaggagacgagcttgatgatacggagatcaatcattctgagttgcctgatccaggagcatgcacgttcagtggtccacacagcagattgcagcttttctgatgtttctggtgcggctttgttgtgtattgccaaggaggctggcctgatgtgtgagttgctgaggcgtggcgctgatcccattgatgattatttaatcaaccagggcagagtgatacgctcgtgtgccttgagcctaatgaactgcacttctgtttattcctctgctgctatgttggtacgtgcctgccttaaaacctaacctaatattatcatccatccatgagccttaatgggcctatcgtccatccattcttgagccttttgaactgcactttgcacaattttgttttaaccagtactagtagcctatcggcactaactgtatactgaggggtggcttcaatttaagggtatggcaaaggaggccgaaatgatgtgtatgtggatgcttaaaaataacaagcctgtttatttctatgatgatcccatacctcgtgagattcgggacagacacatagtccggtctggtaccttgaattttatggtcagcatactagaaaagtcttctgctgagcacaagattgataaggaagaacctgctagtagaagtggtcctcatggtgatgggtatggcattgctattgatggagcagcaaacaccacaaggtatggttgtatggatggatgtttttttccttcttgatgcagctacatgagttataagagaattagtttgttacttcatgataagcattgtgatactatgccatttcactgtattatcaccaggggcagcatggaagaaggtaacaaagaagctgatcaccaaaattatggttgctatgagctttcatatttcccttgcaatacgctcatttgtaatgttgttttcgtgttgttttcagaaggttttttggagaaactatggggttgggaaaggctggtcccactatgcagttatgttaagtggtctgactatggcagatatcttgaggagtattacaaacacaatgctaatgagtttgttgctgctgctgctgctgccaagaactccaacaaaaa

SEQ ID NO: 47477 - DNA, 1549 bp, Setaria italica
  Peptide Sequence Number=SeqID_113451
cgttccccctttcgttcctgcatttaacatcggtataggaaaccctagatcagatcggggtcgtatttgcatccgggaggcgccgcaaatttggacccaggccacgaccatggagccccacgactccccttcagcggggcgtctcaacgagctggtcgtggcgaagcccaggaaagaggatgtggcggaacgcagcaaagaagagtcagaaaggaagtattttagttgtctcatcaaacagatggagatggagaaacagatgcagatggaggaagaggagtactttatgccgaagccaaagattgtcaagtaccatgatctcttggagaaattatggggatgggacagactgctaccaaaggcgacttccgtgtctttgtctgtctatatcacataccttgaagagtatcaccgtcgcaatgtgcacgcagttactacggacacgagcatatctgctctcgctgagacttgtctcagcaatgagaagcaacttgtatctgagttgaagctctgggtgacacgtgaacaggagacgagcttgatgatacggagatcaatcattctgagttgcctgatccaggagcatgcacgctcagtggtccacacagcagataaaagcagcttttctgatgtttctggtgcggctttgttggtatgttcattcctcccctggcctagctgtaacacagcaaacatttctcttatatttgaccatgcaatgttatgtagtcctttctctgcaccccggacattttaggtgaaatagaaatctgtcgcaactataattgaaccattttattttcatctatgttcagttatcattgtcttccagaaagctactagttgtacttattgttacaaaggttcagtggccaagtctgatgatgttgatcttaaaaaaactgctgggtctttatactttgggcagttttataaactgcaatgtgattgacattgtaatcaccaacaacctcaatatgacctacaaattaattgcattggtcgagttttcctcttttttctggtacacagttttgttttattaaagaccaactaatggtgtttctatcttctgacatttggttttattttagtcaagcattgcttaagtatttgtttactgcgtgtaccctgtgggagaagggagtagggagtagctgcaagatggtaaatctgtcccggttcttcaattttcattgtttcatttggtatgcatgtgggtagcttggctggcagtctggcactatccaacttggttcatgcaccttttttactaaaatagctgaaatatttgggtgcattatagatgtaggccaacctaggaggaaatcggtggcttcctttttgtgaaggataaattagctcccaaattcgccttgaacagttggatggtatatggattattttgctcgacttttttatggtcattgtactaatccaaaacgatggtttcaagtgtattgccaaggaggctggcctgacgtgtgagttgctgaggcgtggcgctgatcccattgatgatttatttaattcaaccagggcagagtga

SEQ ID NO: 47478 - DNA, 1226 bp, Setaria italica
  Peptide Sequence Number=SeqID_113452
tcttccttaacagtcttgtgcttggcagccgaagaattttttagttaatttgtttgaccataaattccatggtactgcgccggataacattgcagtcccacatctcactaggtgcggcataaaaagaagaaatcaataggcttatttatttttacgcatccacgaacacatcatttcagcctccttcaccatacccaacataacagcggatgcagaaacagaattgtcccgagtgcagttcataaggctcaaggcacacaagcgtattgctgtgcactggatgattaattcatcatcaatgggtgcttcaagcctcaggaactcaaacatcagctcagcctccttagcatgcacgttcagtggtccacacagcagattgcagcttttctgatgtttctggtgtggctttgttgtgtattgctaaggaggctgagctgatgtttgagttcctgaggcttgaagcacccattgatgatgaattaatcacccagtgcacagcaatacgccttgtgtgccttgagccttacgaactgcactcgggacaattctgtttctgcatccgctgttatgttgggtatggtgaaggaggctgaaatgatgtgttcgtggatgcgtaaaaataataagcctattgatttctctgttgattccaccatacctagtgagatgtgggactgcaatgatatccggcgcagaaccctggaatttatggtcaacgacatactaaaaaaattcttcggctgccaagcacaagactgttaaggaagaacctgctgctgagcacatgactgtcaaggaagaacctgctgctgagcacatgactgttacggaagaacctgctagaagtggtcctggtggtgatggggataatattgctgctgatggagcagcaaacaccacagggggttctcagtataagaaaggtggtgagaagagtaacaagtggaaaggtggtgagaatttcggtggtgagaagagtaataagaggaagaggaaagaagaagatgtttgggtaaatatggtgttgggaaaggctggtgattccaccagacagttctgttaagtggtctgactataggagctaccttgagaagtattatgaaagcaatgcttctgggttcgttgctgctgctgctgctaaaaatccgcaaaatgttactgacatgggccttgctgttgccaaattttgtctcgagatggaggaggaactcctgtctgtgtggaat

SEQ ID NO: 47479 - DNA, 1466 bp, Setaria italica
  Peptide Sequence Number=SeqID_113453
ttcttgagccttttgaactgcactttgcacaattttgttttaacttgtactagtagcctatcggcactaactgtatactgaggggtggcttcaatttaagggtatggcgaaggaggctgaaatgatgtgtatgtggatgcttaaaaataacaagcctgttgatttctatgatgatcccatacctcgtgagattcgagacagacacacagtccggtccggtaccttgaattttatggtcagcatactagaaaagtcttctgctgagcacaagattgataaggaagaacctgctagtagaagtggtcctcatggtgatgggtatggcattgctattgatggagcagcaaacaccacaaggggcagcatggaagaagaaggtttttggagaaactatgggttgggaaagggctggtcccactatgcagttatgttaagtggtctgactatggcagatatcttgaggagtattacaaacacaatgctaatgagtttgttgctgctgctgctgctgccaagaatccacaaaataccaatactactgatatgggtgctgctgttgccaaattttgtctcaagatggaggaggaactcctgcggtgtagcctggatgacgccagcactatcattgagagtagcctgatcaaggaacgtgcacttaaaatctgtggcaccagggatattccttctattgttgcttttgtgtgtattaaagaggaggctgacctgatgtgtgaactgctgaagcatggtgctaagccttctgatgacatcatccagctgagcagcgtgatccgcatgtgcgccttgagccttgtgtacctcagagaaccccaatctattgcttccgccgctgcaatggtgggtatggcaaatgaggctaaaaggatgtgtgattggatgaagagagagaacaagcttattaccttaagcttgtctcagcctcgtgagctctacaggagctgcttgatccggatgaaagccttggatgttatgaccagaatgttgcatgggtgtttcttttcttcctccaagcaaaatactgttcgcactgccgctacctcgggccatcctgatgctcttccagaagaaggcgctagctcccaggcttcagtcgaagactcgcccaagcccaagcgccggcccaagccccaacaaacctgatgctgttccagaagaaggcgccggctcccaggcttcagtcgaagactcgcccaatcccaagcgccggcccaagcccaacaagacttaagctggcccagaatgggaagtctagctataagatgtagcgactattgagtgcatctgagtctgtatcgaacaagaaactcctgaattcaaactgaatcattcctcctacctgctccttcctccctgctctctattccccattgctcgtgctgctaacaaatactcaccgtagctgtgactattttttctttttttccccagccttttcatttctggac

SEQ ID NO: 47480 - DNA, 1521 bp, Setaria italica
  Peptide Sequence Number=SeqID_113454
cctactcctgcgctatacttgggttgggtcgatcggcttgctagttcttgttcttggcttcttgcctttgcctttgttcagtttgagcaagagagtccgactagattcaactgcagctgcagttgtgcgccacttttccagtttgcattgctaccgaactaattcttcagatatttgctttgctgtgtaccttttgctccagattccatttgcctgatccaagtttgtactatatatgctgattgctaggaaaaaaaaagagtactaaatgccaactccatgacttatgatttatgaacatgtccaaagatcggtttagttatccctgggacgtgtcgcattatttttgtgtgaatatcacaagataaaataggaccacatatggggcacagatcactgtgctcagtagatcctcttgtggaaaaagttcttgccaataagtcgatgtcctgcacgaggacgacgcaccattgtctagcaaattcattttgacagtgactgaaagttgtaactgcaggggggtctctgattgcattcaagatgggaggagataaagaatccgccaagctgaaggaggagaagaagtccaaagatgagatccatctcaagatcaagagcaaggacaagtcatcgggtgatgaggacgagaagaaagaggttgagatcgagatcgaagccaagtttgtggagaaggaagaggtagaggtcaaagactcgggtgacagtgcagggtccgcgggcaagggtaaagaggcgaagaaagacaaagagaaggagaagtcagagaagcatgaagatgagcacaaaggtgaggaagatggtgagaaggtgttaaagaagaaggataaggagaaagataagaaaaagaaggaagacaatgaagattcaggaaaggtggataaagataagaagagtgagagcaaggagaaagacaagaaggataaaaaggctaaagataaggaaaaggatggatcggagtcgaagggttcaaatgatgaaaaacaagagaaaatcaaagataagaaaaagaagaaagatgatgaagacgctggcaaggaagagaaacataagaagagcgaaagcaaagataaggataagaaggccaaagacaaagatgaatcagagtcgaaacataaagagggtcagctagagaataagaatggtgaaggcgcgcagaaggatgttcatgggaataaagagctcgcaggagcttcagacctggccacccgagaaatcaagctaacaaatgatgaaccacagaaggaagacattgacaatgaagatgctgaagtcaagaagaaaaacaaagagaagaaggataagactgacaagaaggaagatggtaagaagaaagagaaggatggtggaggtgatgacgacgagggtgagaagaaagacaaagaaaagaaagagaagaaggacaagggtgacaagaaggaagatggcaagaagaacggtaaggatggtggtgaagatgaagaaggcaagaaaaaagacaaggagaagaaagataagaagaaa

SEQ ID NO: 47481 - DNA, 1599 bp, Setaria italica
  Peptide Sequence Number=SeqID_113455
aagagatggagatggaggaggaggaagaggaggaggaggaggaggaggagtccggtaaaattacaaaggagaggcctcttccacacattgtcaagtaccatgatctcttggagaaattatgggggtgggacaggctgcttgacttggggattgccgtgcccttgtctgtctataccacataccttgaagagtatcaccgtcacaatgtgcatgcagctactacattcacgagcctatctgctcccgctgggacttgtctcacgaatgagaagcgacttgtatctgcgttgaagctccgggtggaaactgaacaggagacgagcttgatgatatggagatcaatcattccgagttgcctgatccaggagcatgcacgttcagtggtccacacagcagattgcagcttttctgatgtttctggtgtggctttgttgtgtattgctaaggaggctgagctgatgtttgagttcctgaggcttgaagcacccattgatgatgaattaatcacccagtgcacagcaatacgccttgtgtgccttgagccttacgaactgcactcgggacaattctgtttctgcatccgctgttatgttgggtatggtgaaggaggctgaaatgatgtgttcgtggatgcgtaaaaataataagcctattgatttctctttttatgccgcacctagtgagatgtgggactgcaatgttatccggcgcagtaccatggaatttatggtcaacaaattactaaaaaattcttcggctgccaagcacaagactgttaaggaagaacctgctgctgagcacatgactgtcaaggaagaacctgctgctgagcacatgactgttacggaagaacctgctagaagtggtcctgggggtgatggagataatattgctgctgatggagcagcaaacaccacagggggttctcagtataagaaaggtgctgagaagagtaacaagtggaaaggtggtgagaatttcggtggtgagaagagtaataagaggaagaggaaagaagaagatgttttgggtaaaatatggtgttgggaaaggctggtgattccaccagacagttctgttaagtggtctgactataggagctaccttgagaagtattatgaaagcaatgcttctgggttcgttgctgctgctgctgctaaaaatccgcaaaatgttactgacatgggccttgctgttgccaaattttgtctcgagatggaggaggaactcctgtctgtgtggaatactcaagtgttgcataggtttggtgagcccgtagcagcctgcgctatcgtggagagtagcctgatcaaggagcatgcgcttttaatctgtggcacaggggctgaattggatcttccttctgccattgcttttgtggtatgtgcgcctaccttgcctgaacagaccaaacaaaacatgctgtttcgtattgtaccacctgaatgctattcttttctgaatcctagtgactgaatttgtgctgctgttattaaaaaaaattctaaaatgaggggtggggatgaaaatcatgctcggagggcagggaaatgaaaacctttgtctcactgtcatgttggcattgtgatgtgctactca

SEQ ID NO: 47482 - DNA, 2152 bp, Setaria italica
  Peptide Sequence Number=SeqID_113456
cctgcatttaacatcggtgtgggaaaccctagatcagatcggggtcgtatttgcatccgggaggcgccgcaaatttggacccaggccacgaccatggagtcccacggctacccttcagcggggcgtctcaacgagctggtcgtggcgaatcccaggaaagaagatgtggcggaacgcagcaaagaagagtcggaaaggaagtattttagtcgtctcatcaaacagatggagatgcagaaacagatagagatggagatgaaggaggaagggaaacagatgcagatggaggaagaggagtactttatgccgaagccaaagattgtcaagtaccatgatctcttggagaaattatggggatgggacagactgctaccaaaggcgacttccgtgtctttgtctgtctatatcacataccttgaagagtatcaccgtcgcaatgtgcacgcagttactacggacacgagcatatctgctctcgctgagacttgtctcagcaatgagaagcaacttgtatctgagttgaagctctgggtgacacgtgaacaggagacgagcttgatgatacggagatcaatcattctgagttgcctgatccaggagcatgcacgctcagtggtccacacagcagataaaagcagcttttctgatgtttctggtgcggctttgttgtgtattgccaaggaggctggcctgacgtgtgagttgctgaggcgtggcgctgatcccattgatgattatttaatcaaccagggcagagtgatacgctcgtgtgccttgagcctaatgaactgcacttctgtttattcctctgctgctatgttgggtatggcgaaggaggctgaaatgatgtgtatgtggatgcttaaaaataacaagcctgttgatttctatgatgatcccatacctcgtgagattcgagacagacacacagtccggtccggtaccttgaattttatggtccgcatactagaaaagtcttctgctgagcacaagattgataaggaagaacctgctagtagaagtggtcctcgtggtgatgggtatggcattgctgttgatggagcagcaaacaccacaaggggcagcatggaagaaggtttttgggagaaactatggggttgggaaagggctggtcccactatgcagttatgctaagtggtctgactatggccgatatcttgaggagtattacaaacacaatgctaatgagtttgttgctgctgctgctgccaagaatccacaaaataccaatactactgatatgggtgctgctgttgccaaagtctgtctcaagatggaggaggaactcctgcggtgtagcctggatgacgccagcactatcattgagagtagcctgatcaaggaccgtgcacttaaaatctgtggcaccagggatattccttctattgttgcttttgtgtgtattaaagaggaggctgacctgatgtgtgagctgctgaagcatggtgctaagccttctgatgacatcatccagctgagcagcgtgatccgcatgtgcgccttgagccttgtgtacctcagacgaaccccaatctattgcttccgccgctgcaatggtgggtatggcaaatgaggctaaaaggaatgtgtgattggatgaagagagagaacaggcttattaccttaagcttgcctcagcctcgtgagctccaccggagctgcgtgatccggatgaaagccttggatgttatgaccagaatgttgcatgagtgtttctttcttcctccaagccaaatactgttcgcactgccgcaacctcgggccatcctgatgctcttccagaagaaggcgccagctcccaggcttcagtcgaagactcgcccaatcccaagtgccggcccaatcccatcaagacttaagctggcccagaatgggaagtctagctataagatgtagcgactagtgagtgcgtctgagtctgtatccaacaaggaactcctgaattcaaactgaatcattcctcctacctgctccttcctccctgctctcttttccccattgctcgtgctgctaacaaatactcaccgttagtcttgttgactaatttttctttttttccccagccttttcatttctggacatctgttattgtatttgtactggttcacatacttagtcattgttttggtct

SEQ ID NO: 47483 - DNA, 1458 bp, Setaria italica
  Peptide Sequence Number=SeqID_113457
ctatgccatttcactgtattatcaccaggggcagcatggaagaaggtaacaaagaagctgatcaccaaaattatggttgccatgagcttttcatatttcccttgcaatacgctcatgtgtaatgttgttttcgtgttattttgagaaggtttttgggagaaactatggggttgggaaaggctggtcccactatcgcagttatgctaagtggtctgactatggccgatatcttgaggagtattacaaacacaatgctaatgagtttgttgctgctgctgctgccaagaatccacaaaataccaatactactgatatgggtgctgctgttgccaaaagtctgtctcaagatggaggaggaactcctgcggtgtagcctggatgactccagcactatcattgagagtagcctgatcaaggaccgtgcacttaaaatctgtggcaccagggatattccttctattgttgcttttgtgtgtattaaagaggaggctgacctgatgtgtgagctgctgaagcatggtgctaagccttctgatgacatcatccagctgagcagcgtgatccgcatgtgcgccttgagccttgtgtacctcagagaaccccaatctattgcttccgccgctgcaatggtgggtatggcaaatgaggctaaaaggatgtgtgattggatgaagagagagaacaggcttattaccttaagcttgcctcagcctcgtgagctccaccggagctgcgtgatccggatgaaagccttggatgttatgaccagaatgttgcatgagtgtttcttttcttcctccaagccaaatactgttcgcactgccgcaacctcgggccatcctgatgctcttccagaagaaggcgccagctcccaggcttcagtcgaagactcgcccaagcccaagcgccggcgcaagcccaacaaacctgatgctcttccagaagaaggcgccggctcccaggcttcagtcgaagactcgcccaatcccaagtgccggcccaatcccatcaagacttaagctggcccagaatgggaagtctagctataagatgtagcgactagtgagtgcgtctgagtctgtatccaacaaggaactcctgaattcaaactgaatcattcctcctacctgctccttcctccctgctctcttttccccattgctcgtgctgctaacaaatactcaccgtagctgtgactaatttttctttttttccccagccttttcatttctggacatctgttattgtatttgtactggttcacatactagtcatgtttggcacaatgttcttgtctggtatgctagagccaagaaacatttacggccccctttcgaatataggagaaacataaggaaaaatatagaattgagttcctttttctttattgtctcctcactgaacaatgagggcaattatgagatatggatgacatcatgattcttttatttttaaaaa

SEQ ID NO: 47484 - DNA, 830 bp, Setaria italica
  Peptide Sequence Number=SeqID_113458
tcgctttcccttcacgctcgccaagacgaaaggcggccgcggcggggagcgcgcggcacggcggagtggtttctccacgcccgacgcatccctctcctccgcctcggcgcctccctctcccggtggttcagggccttgcttccttaaggagcttatttcctgttcctgtcatgggtttggaacatttgacgagttctgctaatccttcatcaggtttcacgttgtatggaaatgaagcaatggaggaaacaaaaaggctacagggtctgagagcagaaactttgatggaaacctgccaaagcacagagagtagagatggaatgatcagatgtccaattccgtgcaaaagcagcaggtggtatagggaacgtgaattgagagctgcacaagatctttctgatttcattctgagcaaggcttcacctccgtactttgtggggtcaccaccagttcgtgcaaccaatccacttgttcatgatgcacaattctgtgcgtggaaggtgcaaagtgttgatcagtcactaggaattcctataccaaccaagggctacaacgctcgctactgtgcagggaaaggatctgttacgaaggcttgaagctatatttatctgtttcatggccactcagcgacgtagttgtaactctgcttctctcagcaaggctaacttgtacatacgagtaattgtgcctttttgaaggtgtgaggtcttatttgagtgtttagagtatgtcatcagcagtgttgtaaatattttttgcttcggtttttttgttagtggagctagttttggtggtactggtaaactttgttgttgagaaatgaggtaacc

SEQ ID NO: 47485 - DNA, 434 bp, Setaria italica
  Peptide Sequence Number=SeqID_113459
ccaatcagcaagcggtctgttggaagttccttcgagcagaccgcttgctgattggtgatgccttgagagagcttcacagaatcggtgatgccttgagagagcttcacagaatcaaagacaattataaccagttgcacttattaagtacatagaactttctgaaacacaggatttccatatcccgaaccattttacagtattccgtgatcagaacagataccaggtccttgactgcactcaaccaagtgttgggctttttacttttaaaaagacatgaaagcataagattgacgttgcatacacaatggatgccagtattgcatccacccataaggcaacttttgcatccaacttctactctggcattatgcggttatgcctgtcatcatgcaatctcgagttaagcacaacttgatcctcactatcaggaagat

SEQ ID NO: 47486 - DNA, 287 bp, Setaria italica
  Peptide Sequence Number=SeqID_113460
taactaattagtttaacaaaagtgtatctagagatttgtggaccacactagttcaatgcttaaccaccattacctcgaaaataacacctacatctaaggtacaaacttgatgcacaagaggcttcatcaaattgcttggacattttccttctcttagatcatagtccatccttgctatgccatccttgatcccacaggcagaacatctccaggacaaaaacaattgaatgatatcaaatgatcaacagcatccaccacaagaaaaccttgtttagcatgccgctcaa

SEQ ID NO: 47487 - DNA, 938 bp, Setaria italica
  Peptide Sequence Number=SeqID_113461
ctgctagtatgcatcttttttttttggtaagcaatgaaaggcaaccaaccaaatgttgagcgtgtgataaaacagagtacatgtttgctgatccacaccgagctccatgctggccaatggaatttaccattccgtcaaggaatttacaatgcatccaccagagtcaaggatacgtagtcgtggaattcaccaaccgtaaagggaggtgccatttagttctttacattgtgtccatgtcccacaacaaggggaagcccggtgacgatgcatcagctagctaggtgataagctcgatgctgaaatcccagagcctcttggccagcgccatgtccttggctttctcgctcggctcatacaggttgctgtcgcagaagtacttcccggacacgcccttcacctgtggatggagggccacatagcatgtggttgccgccccctgctgagcatttttcagcaccaatttcccaagagtccgatggagaacatctaggatactgtgatagcgaagaagattcgtgacaatggagccaggatgaagagaatttgcagttatgttgacatcctcttccttgaatcgcctggcaagttcattagcgtgcaagatgtttgcaagctttgactgcccatatgctccaatgctgctatacactgattcatcattaatcttatcaaagcggatgccttccccatatgtaaatctgtgcccctctgatgaaacgttgacaattcttccttccacatttgattcatgggaggtcttcttcatagtatccaacagaaggtgtgtcagcaggaaatgaccaacatggttagttgcaaactgcatctcaattccgtcctttgaaagtgcaaaaggtattgccattactcctgcattgttgacgaggatgttgagggggagccccctggagacgaattcggacgcgaaggcgcggacg

SEQ ID NO: 47488 - DNA, 454 bp, Setaria italica
  Peptide Sequence Number=SeqID_113462
aggaaatatgtggatatgtttggtacatcatcaaacaattctacggttggcagccacatcacccgtaagatgacgcaccttcctgttcagctgatagaccgtacctttttcagtactggtaccgcaattcggagtattgccgtcagctatggagctcttgttctcaggtggttactaagcaaaacttcagttgtacagcgcacattgctttcccgtgccataaggtcactatattgttggtgcgactccttgccattcttggtcggcgttgatgttctgatggccatgctctgtgattgcactatgatccacaaccatctttatgggcagaaattcatccttggacataatcctaacttccagggtgaatcagcaatgggtatggagaataatgaattgtgcaatgagcagccattcttgtcgagtttgttaggaaacaagagagactatgtcc

SEQ ID NO: 47489 - DNA, 236 bp, Setaria italica
  Peptide Sequence Number=SeqID_113463
tttaagtgcagtttcctgcatcaaatccagactgtttcattgcccgatactaattcacaacaatcacgcctgaaaagtaacaaattctcacctgcaaatggttcatcagcgtctctatagatgccgtcctatccgccccaatctcataggacctaatggagaagttctgcctgaacatgagcccatcatgtatgatccggccaaagccaaacgtatcaatgagcatgtcaggtcgc

SEQ ID NO: 47490 - DNA, 517 bp, Setaria italica
  misc_feature (328)..(328): n is a, c, g, or t
  Peptide Sequence Number=SeqID_113464
tctgatgcaagttgcacaataattttgagcagaaaaatttgttagtgcagcaattgtaggccaattgtaacatgtcgattgggtgacataaactggtaatgtagttttgtgattaatggtataaatatatcagagtggctgagatttgaaccttgttgccttcagtatcgtgttgcctgttatagaatcacgtatatgccaatcccgacgcattccatttttaccattagcactaacccatgtatctacttcaacagtatcacccctgcagcagaatagacgagcaaactcagaacacgtatcagtagaatccagatggaaggggccnccttaagctcacaaaacacaaacttataatatcttttaggaacatgagaaaatatattaagaggttcaatgagggtatccgtatcaattattaaagtctgcaaactgcctgaagtgacatataaccacgctcctccaaaaagttattgtcaaacagcacaaaagaccagggacctttccttcacattta

SEQ ID NO: 47491 - DNA, 764 bp, Setaria italica
  Peptide Sequence Number=SeqID_113465
tgccttgtgtgctttgcttccaatagaggatgctgatggccacaatgatttttaccattttttcctgccaaatcaccatttggaacatcacacagttcacaatgaagatggaatcacagtttcttgggccttggttcccttcggcctccacatggtccgggctttcaccatggtcggacctgattcaaggctcagcagatgctcacagtgcaaggttgtttctccagactcgctgttgcaatcagtgtgcacggtagtgtgtgactgcagcacactatcccggccacactcccttttgtaatccagcacaatgctcgccagttcatggttctcaagaatggagatcggtgcactctgataaaggtgaatgtaaggttaactggtgtatgtgaaaacatttgtgtgctagggacttgtatactaaactgtcttctatttttggtttctttacaatcctatcagttccatatcaactttattttcccccttaatacatacaagaaggctgcgaactaagcaggaagggaatccgaatgataagtgtcataaaaatttgtgcccaccaataagtgcatgagaccagccaagaatatatagcatatcaccaatcaagcaaataagaattatctctactcatattttttatagtttagatacactgacttgtacacaggctgctcttgcaagtaagcaacacaggtcagggacattgttaggtacctaggtgaccaaccaaatatagttaaatgtttcaggagaagcat

SEQ ID NO: 47492 - DNA, 1014 bp, Setaria italica
  Peptide Sequence Number=SeqID_113466
tgcctgttatagaatcacgtatatgccaatcccgacgcattccatttttaccattagcactaacccatgtatctacttcaacagtatcaccccagcatggataacgctcaacaatggcctgcatttggctaaccacccagaacaagtttcgtttactcatctctggtgtggagccgaatccatcacctagcagcccagcagtcttcacatgattaagtgcagtttcctgcaaatggttcatcagcgtctctatagatgccgtcctatccgccccaatctcataggacctaatggagaagttctgcctgaacatgagcccatcatgtatgatccggccaaagccaaacgtatcaatgagcatgtcaggtcgcttgggcttccagtcaagcagcgtccactgcttctcggcagccaagaagatggtcgtgatggccgcaaggagcatgctccagtccgggagctggttgtagaatgtcctcggcacagaggagggcacggtctcgtgctccccatccgccactgcagacttgcccccgccgttcaccttggggacggctgcatgtgtgcgcgtcttgcctgccctcacggcattcgacgaggatcccggcttcgcggcgactccgcggacgtccaggctctccgggcgctccccgaggccgttcttgggcgcggccggcgccggtgccggcgaccccgggaagaaggctgaggccgcgatggaggcggccatggggaggtatggactagaaacttcccctccaaatcaaatcgaatggtgcctgcctgaatacgggatcccaaccttccgcagtcgtcgtcggtggcggcggcgaggggaaagaaaggggagagggctcggctgactccgctcgcttcggtgcgcctcaccacgcggccattggcgccggtacgggcgagggattgagaggcttctggcggatgcgatggtgtgctttggcggcttcggtggcgcgggggcgtggtgggggcggggccggtcgacctccctttctc

SEQ ID NO: 47493 - DNA, 2020 bp, Setaria italica
  misc_feature (1)..(14): n is a, c, g, or t
  Peptide Sequence Number=SeqID_113467
nnnnnnnnnnnnnntttttttttttcagccaggagaagaatatcaaattaaatatcaataaatacaatatacgagcttaattctctgcacaaatatggctgctccccgtcatacagaagtagctacaaatcaatacttacaagacccatttgtgcaacccaagattttgtcataggaagaagaaatcaaaggaaaaatagaaacaacaaaccatgcacgggaggcttctttcctcttcgatctccacttctcgccgccaccattgttggcccccttatatctcctctatcttcagacactttatgtttaaattagcttaggtctcacgttgctatgagattataacaaagcatcacgtatgccttgtgtgctttgcttccaatagaggatgctgatagccacaatgatttttaccattttttcctgccaaaatcaccatttggaacatcacacagttcacaatgaagatggaatcacagtttcttgggccttggttcccttcggcctccacatggtccgggctttcaccatggtcggacctgattcaaggctcagcagatgctcacagtgcaaggttgtttctccagactcgctgttgcaatcagtgtgcacggtagtgtgtgactgcagcacactatcccggccacactcccttttgtaatccagcacaatgctcgccagttcatggttctcaagaatggagatcggtgcactctcaagaatccatgcaatgtatttaacattattgacatgctgatttatatcaagatcagcccaccgaggagtcaggcctgtacggacatatttggctgcagtagcgcttttatcctctggcagttttggaagtttgcggttgtcttcatcggcaatagcggatcgctcaaaaaagtagggttctatttcagtccgcacttcatctggaattcttgcaagcttcctagtgagcttgttcatcataacccatttacttgttgccttcagtatcgtgttgcctgttatagaatcacgtatatgccaatcccgacgcattccatttttaccattagcactaacccatgtatctacttcaacagtatcaccccagcatggataacgctcaacaatggcctgcatttggctaaccacccagaacaagtttcgtttactcatctctggtgtggagccgaatccatcacctagcagcccagcagtcttcacatgattaagtgcagtttcctgcaaatggttcatcaggcatgcaatgacattattgacatgctgatttagtgaatgtaaggttaactggtgtatgtgaaaacatttgtgtgctagggacttgtatactaaactgtcttctatttttggtttctttacaatcctatcagttccatatcaactttattttcccccttaatacatacaagaaggctgcgaactaagcaggaagggaatccgaatgataagtgtcataaaaatttgtgcccaccaataagtgcatgagaccagccaagaatatatagcatatcaccaatcaagcaaataagaattatctctactcatattttttatagtttagatacactgacttgtacacaggctgctcttgcaagtaagcaacacaggtcagggacattgttaggtacctaggtgaccaaccaaatatagttaaatgtttcaggagaagcattcggtgtccaacttgtgcattccttgtcataaataagttaaccaaaataatatatcacctaaataatatattgtgagagattggattgttcgatgaatagtcaagtggacacctaatcatatccagtctgaggcccctcaagcacctaacattccaatgttcattaacttctgcaaacagctggctactgaagttctggcaacagaacatacaggattgggcataagtaaatgatttgtttgccacacgattgccaaatgccccaaaacaaaacgccaggaaacacatcaggcgacctcaatgcaatgttcagaggtacagaagataaattgaaagattattcttgttaaggat

SEQ ID NO: 47494 - DNA, 1197 bp, Setaria italica
  misc_feature (1)..(57): n is a, c, g, or t
  Peptide Sequence Number=SeqID_113468
nnnnnnnnnnnnnnnnnnnnnnnnnnnnnnnnnnnnnnnnnnnnnnnnnnnnnnnnngaaacataattaatttagaagtagcttgggtataagagaatggcttataactcattacatatttatgttctacagtttaacaaaagattgaagtattaacatagcaatatctcgtaaggtactcatgtggtacataaattctattctacgtacgtgcatgtgggtgtgggtgtgtgtgtgtgtgtgtgtttccatgccaagtatcttgagggccggcgagggggcagaaattcatcttcctctcgcattccttgcataggcaaagatactgtcactgcaacaagagtatgcatgcctcacttgacttacagaacctgcagggcgtcaaatctttgggttacctgttacccttcagcatcagatgcaaattggcaagaccgttgttgcaacaggacgttgtgtgtctaccttgctatcaccacaaccttccttaaaattcttgctccgatgagtacatacatccttcactccaagttgtacttggccctttgctgccaagcacgaacctcctctgcttaatcagagcaaaatgtcaaccagcatggataacgctcaacaatggcctgcatttggctaaccacccataacaagtttcgtttactcatctctggtgtggagccgaatccatcatctagcagcccagcagtcttcacatgattaagtgcagtttcctgcaaatggttcatcagtgtctctatagacgttgtcctatctgccacaatctcataggacctaatggagaagttctgcctgaacatgagcccatcatgtatgatccggccgaagccaaacgccaaagccaacatgagcccaatggtgttgccggcggcggactggcttggtcggaggcggctgtcctctttgctggttcccatttgcttagggacctctgctggccatcgtcccgagcagtgaggaggggaagtacgggccgccacacaggggacgtcgtccaggtggagatgtcgaggtgctgccgccatgatccatggggagcgcccctaatttgttgccggagatggatggggccgtcgccaatttttgctgtagatggccgtcgccgctaaagctgcccaggcggctggccgccctccgcgccacgccgagctgccgccccgctcggcccccctcgcgccgcag

SEQ ID NO: 47495 - DNA, 241 bp, Setaria italica
  Peptide Sequence Number=SeqID_113469
ggataacgctcctacccacgtcacttctgagttttgtgaatagcatccttgacgagatcattgagaataagaatggagaaattccttatgtaggctactcaaaagcaatgcacacatcacttgcttgttgagaaaggtaatactggagattgaacgacgcatttctactcaagcagaacacataagaaatcaaaataaccttatgagagcacgtgaagagaaatataaatcaaggataaga

SEQ ID NO: 47496 - DNA, 427 bp, Setaria italica
  Peptide Sequence Number=SeqID_113470
taaaaggaaacataagagttcattgccggataagaccttttcttcccggggaggataggaaatctactacaattgaatatgttggtgatgatggtgaactcattattgcaaatcccacatttcacataatcgtggggatacaatcatgtatgaatttagtgttcaaatgattgagatatacaatgaacaaatccgtgatcttctttgcagcaatggtccagagaagaaactagtttgaatgcccaatatcctttgcccccctctgagtactcacatttatttgttatacatcttcattttctcttccaatgtgataagtatacatgcaactggaccctaggcctggctttgaactagttcagttgattcagttcaaatgaacgtatgtagaaacttgaaaatttaggttgggcattccttttaccat

SEQ ID NO: 47497 - DNA, 2153 bp, Setaria italica
  misc_feature (2016)..(2153): n is a, c, g, or t
  Peptide Sequence Number=SeqID_113471
ttggtgatgatggtgaactcattattgcaaatcccacacgaaaaggaaatgaagggagcaagtcattcaaattcaacaaagttcttggccccactgcttctcaagatgaggttttcaaggacattcaaccccttatcagatcagttcttgatggctataatgtttgcatttttgcatatggtcaaactggatcaggaaaaacgtacacaatgactggacctgaaaatgcaaccgagaaggaatggggtgttaattacagagctttgaatgacctgttccacatttcacataatcgtggggatacaatcatgtatgaatttagtgttcaaatgattgagatatacaatgaacaaatccgtgatcttctttgcagcaatggtccagagaagaaactagggattttgaatgccagccaacccaatgggcttgctgttcctgatgcaacattgcatcctgttagctcaatgtctgatgttattcagttaatgagaatgggacttgcaaacagagctgtgggttcaacagcattgaatgaaagaagcagcagatctcacagtgttgttaccatacacattcgaggtttagatttgaaaactggagctactttgcgcggcgcactacatctcgttgatcttgctggtagtgagagagtggaccgttctgctgttacaggagatagactcaaagaagcacagcacattaacaaatctctgtccgctcttggagatgtcatattttctttatcacagaagaatgcacatgtaccgtaccggaacagcaaacttacacaagtcctgcaaacttctttgggtggccatgcaaaaaccttgatgtttgtgcagatcaacccagatgtctcatcttattcagagactctaagtactttaaagttcgctgaaagggtttctggagtggaactaggtgctgcaaaggcgaataaagagggcaaagatatcagagaatttatggaacagctttcactgctcaaagataaaattgcaaagaaagatgaggaaataaacagattacaactactcaagacacaaactccaagggccaggacagtgaaacgtgctgattccccattgaaacattcatcctcctccccgggcatatcttctttagggagcagaatcaaacaccgaagaacggcgtctggtggaaaagcaatgaacattggcagtagggctggctctgatgctgataacttctctgatatcagtgacaggcactctgaatctggttctatgcagtctgttgatgatatccaaccacagaggggcattatgggacttcctaagatctctttaggtgagatgagtcagaattctgctgaccctgagcttgcttgctttggctatgctgaatcagaggagaggttaagtgatatatcagatagtggtctttccatgggcacagagactgatgtttcagtaggcagtatagttgagttgacactcttcccagagcaggaaaaacatctagcaccctgaaagagaaagagaaggcaccaaaaactccaaatgatcgtttgtctaaggtggccactcgagtccagaggacaacagcaccaaaaccagctcaaacttcattatggcctaaactaagagatcctccagctcctagatctccattgtcagctgcgagaacgtcatcgacacaagcaatatctgcaccaagaacgtcaaatactacaaagagatggacatagctcaagtttgatcaatgtgttccagcactagttttatgttttgtacagcactcagataatatctattatttatggctgctcatcgatgatgccctctgcttttcctaaccgttgatgaaatttggattcattggagaagatgattctgttggatagtagtttttcccctttttgatgaaagagagatattctcttttctgtgtagtgattatgtaaatttttcttgtacatatgtaagggtagaaaaagctttgttgatttgttgaaagagggaataaatcttcattgattgttgaaaaaaaggnnnnnnnnnnnnnnnnnnnnnnnnnnnnnnnnnnnnnnnnnnnnnnnnnnnnnnnnnnnnnnnnnnnnnnnnnnnnnnnnnnnnnnnnnnnnnnnnnnnnnnnnnnnnnnnnnnnnnnnnnnnnnnnnnnnnnnnnnn

SEQ ID NO: 47498 - DNA, 1829 bp, Setaria italica
  misc_feature (1798)..(1798): n is a, c, g, or t
  misc_feature (1803)..(1803): n is a, c, g, or t
  Peptide Sequence Number=SeqID_113472
cctcccggcggcggctgggggaccgatgtggcgaggttcctggcggccgtggagcggatgggcctgcccaccttcgccgcctccgacctcgacaggggatcggtttggctcccatgttggggaaggcttgcactgtagccttgaagaaaacggtaggatgccaagcatggagttttccataagggaaaatggtcatagtacacagaactctgggttcggagaagagagtaaacaagcgagagggaacctacaaaaggtctccaaaagtccaggtccatcagaaccatcatctccgatgtcacggcctgaactatcttctatttcaaggcatgccgggcacaatttccatgaagtcttccatctgagacatggagtttattctgatgtgcctacttctaaaattttggagatgatgaaatccaccaacttggataacgctcctacccagtcacttctgagttttgtgaatagcatccttgacgagatcattgagaataagaatggagaaattccttatcacatcacttgcttgttgagaaaggtaatactggagattgaacgacgcatttctactcaagcagaacacataagaaatcaaaataaccttatgagagcacgtgaagagaaatataaatcaaggataagagtattagaagcacttgcaagcgggatgagtggacaaacacaaatacactcgaatgcaacaaatggaaaagcaaatgttgctgcagattatgtcatgaagatggccaaaagcaaaggtgaagaacgaagattggttgacaaagatatgccaagctcgatgaaggacaaggaagatgtaactagattgacaaaggataaggaagatatggctaggctcttgaaagataaggaagaaataattagactgatgaaagagaaggaagaaatagttacgctgattaaggagaaggaagatattggtaccttgaagaacggcaaagtggatgacaaagatcaatcagcagatgtacatgcagctaaatcaatgacatatgatgataaaatatttaggatgatgaaggaaaaagaagaaagtaatcatacaattatgaaactaaagctcgaattagaaaccatgaaatcatcatatgaagagagccagagcatgttaaagtcagtgaaggaagacatgcttaagcttctaaaggacaaggataatagtgacattataatatcaaaactcaggcaagagcttgcagaagcaggaaaatctcataacagacgtattcaagaactggagactagagctttgcaggcaaatgaggagttcgaacagaggataaaagcagtagagctaatgctcgaagattctagaatgagagcaagcgattttgaggaatcgttaaaatcaagaatcgaaagttgggagcagaaggaaatcatggtgaaccaatttgtaggtctgcaaatacagagtgtccaggatttgaggttgtcttctgtttccattaggcatgaaatccaaaactgccagaaaagatggtgtgaagaaattagtggccttggacaaagtcttaatgtactgataaatgatgctgaaaattatcatgctgctcttgaagaaaatagaaaattgttcaatgagattcaggagctaaaaggaaacataagagttcattgccggataagaccttttcttcccggggaggataggaaatctactacaattgaatatgttggtgatgatggtgaactcattatgcaaaatcccaacacgaaaaaggagaggagggagcgggaagaggaagaacggaggaaagaggaaggaaaaggngaggnggagcgagaggaggaagaacggaaga

SEQ ID NO: 47499 - DNA, 468 bp, Setaria italica
  Peptide Sequence Number=SeqID_113473
tttatatcatctgacaatatgcatacactcatacataaattggacaataatataaaaaataggcaggcaataatcactgcggtcataatatgcctggagtgttcgtgaggatatggatatgtatgtgtgaggatagtcctaactctacccatcttgaggtttcccaagagtgggcgtgggctaccaccctgcttgtctgaacccatcggaatatctttgttacaagcagtatagctgttttggaaaaatggcgtgccactgaacttctccttcaaacttcaagatgaactgatgtaagccatgccaagcgaaggatgaggaggaatgagtcggcggagcccggactgatcttgagtcgacgcagaccgaatgctgggggaggatagcggggggagctcgttccgggtggcaggcaggcgggcgggaggaggtggaggccgccgggggaagatgggaggggaggaaggg

SEQ ID NO: 47500 - DNA, 270 bp, Setaria italica
  Peptide Sequence Number=SeqID_113474
ctcccaagtcccaagccatcgccctcacgcttgctgccgtcccgccgccgccgtcacccggccactgaagcggcccgtgacctcctcccgcttggttcctccggaatccgggcgcgagctccccctcgtccgtcctctggctgttcctcctcccttcctcatcctcctctaccggggatttgggtttatcgctgagttgcgtgacggcaatgtgctagaagagcgaatttgggcggctagcaaccactgattctttactcttcctgacat

SEQ ID NO: 47501 - DNA, 483 bp, Setaria italica
  Peptide Sequence Number=SeqID_113475
aaaaactaaagggaaaaactagggaggtcattggttcgtcctatggctggataatcaccgcagacgagatatctgagctgcagcttgtcaaccccatcaccggtgatcagatcgcactgccatcggtcacaaccatcgagcaggtggagccgatatttgatgatgctggcaccctttgtaactatgagtacttgtggtacactggagaggactggctctatgataagccatcaatccttgatctcagtaagctccgtgataagttcgacaaggcctttctatcttcagatccatccaccggggactacttcgtggtgctgatcctgttagattgatctcctaccccatgggcccaaaggtccatcgggaccttgatccgcgccctgttcggggcgctcaccctagcattgggtggtgggccctgtcgcgctgcgctatataaacagggtggggacacggctcggctcgacgaggttcgccgca

SEQ ID NO: 47502 - DNA, 476 bp, Setaria italica
  Peptide Sequence Number=SeqID_113476
tcagcaggagaggaagcactgttttagcactcctaagaagagtgctgtttctaaggagccacgtaatagttacactcctaactttcggcgacctctcttgagtaagcagatgacaaattggttttatgccagtaccaaaagtgatttagatgagaagaaactcattttgggtgaaatgataagcaacatggatctgccctcatctctcacagaggcactctctttaggtcttaacccaaggtcagattggatgatgaaggtatatgcacttgatttcttaaagcagtgtttgctagaacgtggaccaaaaggcattcaggaggttgcacaaaattttgagaaggttatgaggcttgtttgtcggtatcttgatgatccccatcacaaagtggcacaggctgctctctcatcactagctgagatcatgccggctttccagagtaagtccgaacgttatctcgacaagacactgcccc

SEQ ID NO: 47503 - DNA, 1381 bp, Setaria italica
  misc_feature (1266)..(1381): n is a, c, g, or t
  Peptide Sequence Number=SeqID_113477
ttcgttaaactctaaccgcctatccgtgggctctgatcgttctcatcgcccacctcctctcgacctctcccctcccctctcgccaagccagcctccgtctagagtgctccgccatggcttcttccaagaggagaggtggtgttggcggggagaagaaggatctcttccatgtcgtccacaaggtgcccgccggcgacagcccgtacgtcaaagcgaagcacctccagcttgtggagaagcaaccggatttggcaattgtgtggttctggaaggcgatcaactccggtgatagggtggacagtgccctgaaggacatggccgtggtgatgaagcagcaggatcgctctgaggaggcgatcgaggccatcagatccttcaggcacctctgctccaagcaagctcaggagtccctcgacaacctactcatcgatctgtacaagaaatgtgggaaagttgaggaacaaattgagcttctgaaacagaagctgaagatgatataccttggtgaggccttcaatgggaaagcaacgaagaaagcacggtcccatggcaagaagttccaggtctcaatccagcaggagacatctcgcattttgggaaatcttggttgggcttacatgcagcagaacaacttcgaagccgctgagttggtttaccgcaaggcacaaactagttgaggcctgatgccaacagggcgtgcaaccttgggctgtgcctgattaagcagggtaggcatgaagaggcaagacaagcactcgaggatgttcggctacgcagaatctatggatcggaagatgaaaaggtggtggcccgtgccgagcagcttctccacgaactcaatctaattaattgtgtttcatcaccattcgatgttggcctaagtgtccatgaagagatcatggagagactagaccttgtgatgaatgagtggacaccgttcagatcaaggcggctgcctgtatttgaggagatagccactttcagggaccaaatagcttgttaatacattattctgcatggttttttatctttaatgtgtcaaggccatcctggaagattttgtgcatatatggggggtgctgtggacatgtggttgttacagtgagaaatagagaacagatagatatcatatagctggggttgatgcaaagcgttcccttcaggagtagcatggtttttattcgtgttgtaaactgcatggttcagattcctttgaagcatgttgcgaaattgtaagggatatgcaattggtggtttgtgagactnnnnnnnnnnnnnnnnnnnnnnnnnnnnnnnnnnnnnnnnnnnnnnnnnnnnnnnnnnnnnnnnnnnnnnnnnnnnnnnnnnnnnnnnnnnnnnnnnnnnnnnnnnnnnnnnnnnn

SEQ ID NO: 47504 - DNA, 350 bp, Setaria italica
  Peptide Sequence Number=SeqID_113478
gtcgcaacagagcccagtctgagaaccaaccgaactcagccagagaccccctctctctcccgatccgaccaggccccgacccctacccatggccgcgccgctcgcacgagcgccgctgccgcgggccccacttcgccccgctcccgccgtccagttagtcccgcgcggtcgtctccgggcgacggcggccagtggtgggggcgcggccgggcccgtgctccgcacctgcaagaactgcaagcagcagtacgacccggtggcgaaccacccctccgcctgccgctaccacaccgcccacttcggaggtgaaacaaagagaaaatttgaaagcgtttacgctggtgggacca

SEQ ID NO: 47505 - DNA, 554 bp, Setaria italica
  Peptide Sequence Number=SeqID_113479
gctagcagaaattgcattgtggcgcgtgttactgtacaactttgttgtaaaagaaaatgaagatgctacgcacactcgagtactagtgacatgaatgttaaaagctgcatattggcattatgttatcctaaaaaatgttggtttgtggtaatatgcttttagcaagatgtggtgctgaagatccctttgaccgtcacacgcatagatgcagcaaactaccatcactcccgagccccagcgccttgcgctcgcgaagatgccaagcagaacgagcccgtcctagttgccccccgaatcaaactccataaaaatttgtgatggatttacacctaccacttcggaaccaaacacatgcttagctttttcccctatcttgaccacttcccaagggtattttattggtgttagctaagagtttcttagtctacttaaaacatttcccaagggttatttcctaatggactgacatgctagtattcagcaaatcgtctgaatggcctcaagaatccaatggacgtttccggccggacccaggaatgggcagaagcgatagg

SEQ ID NO: 47506 - DNA, 662 bp, Setaria italica
  Peptide Sequence Number=SeqID_113480
aacaacaaaattaggactagacaatgggaaccatactggctgccaagtatgctttctattcttaagcaaattcattctcctgaacatgtcaaatttatttttgttatttgcattatcagttctgcacaaagtagcttcctccatgctatttccttcgcattgttttgaaattgcaattttgttatcatttcgaaagagtactcaagctccctccgcatattatttcactgacccgaccatttagaagtaaaatcttcaaaacacttaagcctcatgcatatcaggtcataacttgcagattgttcatatgcctaaatctttatgcaagataatgcctttttactgcacaaagtatcttactagttactacctgactagttgcaagaccttattgaatgacatttctacagtaggtggaaagttagggtctctggacatttatagcttaagaatgttggccttatatatgacatgttaaatataggaagtcactgtatttttttattaagctttaatccctctccataggaaagatgaaagtgttttctcggacccaacctataatgtcaatgttctttttgggaagagagatgaggtaagatcatcagaccatcagccgtcaaaatatcgtctgaacatgcatggactaacaactgtacaaa

SEQ ID NO: 47507 - DNA, 416 bp, Setaria italica
  Peptide Sequence Number=SeqID_113481
tccgtccgctctaaaggtacatgctgcagtttgcaattactcaggcagtaaattgtctactactacttcctcaaatagtgggcactagaaatggcagtagaagccatgctatgataagatcactgctgctgatcagacagtgaggcaacctatacaagtgcagattagcaatttagcatcagccctactgttttgtaagcacatgatgtatcaaccccatgttagctcgtagaggaatggatccatatatagtttcaaggatctacccattaggattggcaaagctgtaactttgacagattgatttaaccagctttctgtctacagtataacatctctctaggaaaacaattaaggctctgtttgttcagtcttgtgcttgtggtatttacaatcaagctacaaacacacaggca

SEQ ID NO: 47508 - DNA, 1643 bp, Setaria italica
  Peptide Sequence Number=SeqID_113482
agatggtcgagtccttcatcaacagctaccgggttgcaaatgatgggaaatttccgtcagtcaaccttacacacaaggaagttggagggtcctattatatagttcgtgagatcgtgagggatgtcatccaagagaacagagtccttggtcctggtggcttggattctatggctctgagttttgaagattgccctgattcctcagaggtatccatgaagcatgaattgggtcaagacaatatagagagcttggcaatgtctgatgatggccaagccggtcagggttctgtgtcagagtcatccagcagcgaggaatcattttcattgcaaaacaactccatcaacactgatatactgctggggtcatctaatattttagaggctggtgttctgaaaagtatagtccaaaatgggactgcatcaggtacagcattcttggagacaaaccttgagaagcaagatgaagttccatctgggggatcaattgaggttggcctgaatagttctgaagagctaaacagtcaggaggatgcacatgaggggatgggaagtgttgctactgatattcttccctcagaagctactgatgtttatgaaacaaatggtgcacttttaagagagcatgagatgttacctaatgatagtcatggtggctcaaatgatagtgttgttgatgatggaaatctccttgcagcagccaatggtgctcttcaagaaaagcaagcatcttttcaggagcatgatccatcaaatgaaagtgtgcaaggtgatgttcagagcttagattgccagattagtactacattatctgctaatcccataaatggttttgactcagaggctgaagtcacaaccaagactatcgaagcatcggatacaaaggggctattgcacacagaagaccagcacagtgtagtacaggtagatggtagtgaatttaagaaatcaacatccggtttcacaaaggaagtggttgaggcaaccgacgccaggcatgaacaaggaatgagcaccacaactgtgatcagcaggcatgcactttgccttctaactttgcgttgcatgcttactgtttataatttccttcatacgtcgcaaaaggcgacagtatattaggagaacttcgaaagcgcagcagagaaagatgacaacctattctggcttgtccttagggcatttgttgttgctatatcaaaaatctgggcaaagtgaacaatgcagtgaaggcagcttatgtggaactgaagattgagatgcatccttcctacaggaaaaatgagaatcggtccacagagttccatttctatcgtacgaatacatatgcttcttttgtgctgcagtgttaggttattgattagagacagttgatttagttcgtagtagcttcccactgtaggtgtaatgtttggtggtcttggtcagctctgtaaaatatctgcaactacaatggatggcatgcgcttttatggtgaaaggtgcaacacctctgttattatattatcagaaatttgcagagctatttggttggattgccaactgaatgggtattggcttatttctaatctggtgaaatttagcttggatttacctctgatctagcttgtagcagtattttgtaacatcttagtcagatcctgtgccaac

SEQ ID NO: 47509 - DNA, 375 bp, Setaria italica
  Peptide Sequence Number=SeqID_113483
ctaaaaaaagttagaataactttccccagggttagtatgccataatgaaatcaagagtgcaaaggcattatggcatcctgattaggatagtaggccttaacagaactaaaccttgatctaataactaaaaaaaatcaaaatcacataaagagttcaggaaacattatttgtactattaatgtcatagccctaccaaccctgagcgtactccaacactcaaaaatagattggcctactcaaaaagcctgatgcatacatctgcactagcaaaggccagcacgtggcttctccgatgtaatgtatgccccgattgcttgtattggattgcccatctatgagaagaaaaaacatataactcagaggtcagttaagcca

SEQ ID NO: 47510 - DNA, 800 bp, Setaria italica
  Peptide Sequence Number=SeqID_113484
tttttttctacgatgacatgaacatttcacattgaagcatgagtcggaagcaagagtaggactgctctttagcagctgctaaatatcatcatcagaaattgttggggtacattgaataaatctgttatactgtatattaatgttcagcccatgctatagcgcttgataaacatacaaatctgggtgtgttattgcacagccagctaggattaactcccaaaaaaattggatggatccagtaaatagattcagacgagctgttgtgtccaaggaatgtgaaaataaatctccaaacatgatcctctattgctcaaataaactagaaatagccgccaaatatccagctagctggcccaagataccctttcctgtctgactttccagtaccaatccagcagtcagtcctatcattgccaacgcgccgttaatcgcttctgcttgacgtcgcctcttcagcttttctttggccctaatttcttgcatctgtttagcagctagacgcttagcttccagtggatcaaccatcacaacattagcacctgagtttcttttgccttgtggtgcatctgcactagcaaaggccagcacgtggcttctccgatgtaatgtatgccccgattgcttgtattggattgcccatctgaacaaggacggggcagaggagacatgctggattgcgaggaagcgggaggagccggaagagcaagaggctggaggaggaggaatcgacgccgagaagcagagactggtggagcacgccattcttggtgctgcccgcctccacctctcctctcccctcc

SEQ ID NO: 47511 - DNA, 302 bp, Setaria italica
  Peptide Sequence Number=SeqID_113485
ccaacggccgccgatcacagagtcaagcgcgcgcaccgcggcgcggcgcagccacaccccgccaccgccatggccaccacctccctcgcctcctcctcccgccaccaccctcacctcttccgttcccatcggaaccccaactcctccttcagaacctccagtcgaggccgcctccagcccatccggtgctcgtccccgcagccggccacaggcggcgaggcggaggaatcggagcgccggcggctgtcgaagcaatcgtcgtggaaggcgaaggacgcggacggggacgactacctataccg

SEQ ID NO: 47512 - DNA, 387 bp, Setaria italica
  Peptide Sequence Number=SeqID_113486
ggcatcggcggcggcggcggcggcggtcagggaggcagcagtggcagcagcccggcgccgtcgccgtcgggtccgcgggcgtgcgacttcgagaacgagcggctgtaccgggcgtacctggtgatccagcagttcaggcagacggtgacgtgcgaccccatgggcatcaccccgagctggagcggcaccgacctgtgctccagctacaagggcttcttctgcgagcggccgcccaacgtgacggaccggaccatcgcgtctgtcgacttcaacggctacatgctgcgctccgactccctgcagggcttcatcaacagcctcccggacctggcgctgttccacgccaactccaacgacttcggcggcgccgtgccggcgctcggcggc

SEQ ID NO: 47513 - DNA, 2331 bp, Setaria italica
  misc_feature (1)..(51): n is a, c, g, or t
  Peptide Sequence Number=SeqID_113487
nnnnnnnnnnnnnnnnnnnnnnnnnnnnnnnnnnnnnnnnnnnnnnnnnnngtttctttggggttttgctgttatgcaatctctatggacattcatgtattcacactgaggtcaattttttcatacacgtacacagcaaaacaaggcgaaaaaataaatggataaacgaaaggctggacctgttaaaaacattagggtgcatagcctgggcctacaacacatacacaatcatgattcatgcagctcaatatgccccttgaaaggatagccgatcccttaatgtatcgaaaatggaggcggcagcactgttctgtgcaagtgtaatcttcaggcggccaaatagctcgtcactatccttagcttgtgaggctgcatctgcagcttccttcgccatacccatccgtgcatatgcctcagatctttcacgaggatccgttagctttggaatatatttgagagcttcagttttttgaccagcgtcaatgcatgcttccacgaaaggtttgtagcctcctggtggtcttctctctcttgaaaacttttccaaagcatcccagtttccaactgtagctaaagcacatgttttaagccagtaccacctcttatcaggaaccttgaattctgacttcactttgagtgcagctcgctcatttcccattgcaatacaggttttgattgtatcactaacactagaacccataaatatcgcctgctttgtggaaacttccagttcatgctgtgatcttagcaatttagcatgctcttcagaagctttggattcaaaaacatgttcctttgtctcagcaaaaagtctatgggcctgctcaattggcctcacttgctggagatgagatcccttgcttgccatgggattcttttccaattcactcgattccttcaacataagaaaggcggcatcttgaagtctcccagtcgataaaaagaagtctttcaaatcttcatgcttcgaatgtcttgcatatgctataaacaaatctctagccacaggcctcgcattaattacaccgaaaaaatccaaatgagctttcttctctatagctaccttctgccagatatggaatagcacaaggtacacaagatcagtatcaccgctttcaattgcctttgataatgctttgtcttgttcatcaatgcttagcaacaaaggaatctgctttgaggattgtgactcatgatcaacgagcattgcagccaacctccgccgggcacagttatcggcatgagctgccactgcagcatatgatatccctttacataacctgagcttatcaagcaagccctcaagaaggactgtatctggaagagatgctgatgccgtaatcttttcacatgcccaatgcattatcacaacctccggattcaggttaaggtactcagaaatgcgaagtgccaaaaggtgctgattagcattaatgagacgtccaatgagcactggtgcggtaagcaacttgtactgctgaatggtcagtggcatcccaatctcaggatcacgaacagcatttagaactcgcaacattttacacatttcttgaaagcgttcatgtggaaaacgactgcagaaagctaggccataagtagcagctcttagcaatgtgcgttggcgtgaaacatcaaactcatggccagcagcatcaatgcaagcctcaattgcctcaggcaatgaagatgatattagctgatagttgtcataagccttagcactttgcctgtcatagtgatctcgagcatcatacaataatgctgctggggacatgcttccaatgccgaaaattaatgtagtactgtccgggactcgatgtagaaattccatacttgagtttgagaggattcttacaccatcgcactcaggaatgagttttatgggttcatcataattatactgcacaggatctccatttggaccgaccatcaaaagcacttcaggccagtagaggagtacactgtccagtccacaccaagctatttgttccggtggcaacgctgaatcgcactcatactcgaatatgatcctggagaaatcagtggggattacgagcaggcgcccatcatgtgcaaatgctgcaagaagctttccgttgggtgacactgccatcttctgcacgggtccaatttccagctcctccccgagcacctgcacgccatcctcatctaccgcgaccacccggtcgccaaccgcaagcagcacctctgggctccctgacatgacaaattgcggttccaccacggccatgcacagaacatgctcctcatcaccgacgcctgggtcggcgaggtcacgggggtgtgggtcgtcggcctctatgtccgtgg

SEQ ID NO: 47514 - DNA, 400 bp, Setaria italica
  Peptide Sequence Number=SeqID_113488
gacaacagcaccaccaccacggagctcgaccccgggagctccgacaccttcgacaccagctactaccgccacgtcgcccgccgccgcggcctgctccgctccgacgcatcactcctcgaccaccgcttcaccagggcttacgtgctccaggccgcctcaggcaggtacgacggacacttctaccacgacttcgccgtctccatggccaagatggccgccatcggcgtgctcaccggagaccaggggagagatcaggagaaagtgcaacgtcgtcaactgacatggattggattggattggattggattactagctacttcagtgttaattagttgttacagcctgccctatatatcttgtgtttaatcgtaggagtagctaatagctagctaccatctcg

SEQ ID NO: 47515 - DNA, 252 bp, Setaria italica
  Peptide Sequence Number=SeqID_113489
caccttccgccgcctcctcactgtcgcgtcgggcggcgccgccgtgccgccccggtgctccagacggcgggaccgcgatgctacgaccccggggaacggcaggaccatgaggtggctctccaggacgtggtgcagcgacgcgagctcgaaggagtcgtacagcgggctcccgcagtcccacgtggcgaacaccagctcctcctcctcctccttcgctctcacctgctgcaggtcagctcctccggcctcctg

SEQ ID NO: 47516 - DNA, 594 bp, Setaria italica
  Peptide Sequence Number=SeqID_113490
tgcatatcttcatagtaagtggcagggtgatcagtggagatatcaaagagaggattgttcttaaagttctcccacagtgaagctcgggtacctctgcataacatcacaacaaaatgagtaattgggatccatacatcatgttttgagtgtatagcatagaaaattctacacacactcttacctagcatagtacccaccctcagggtcattgccgttgtcatagaacagtcccctgaagtaaacaaagattgaacgcggagtgtcaggtggaatcaagtgagcctgcattttctgcggaggtgcatagggtggtataatgatagagccctctttcagacagacatggttcttctgtccaaatgtttggaccaaagtagcacgtcgcagcaatggaagaattccacgctcaatagccttttcttcctgatagtggaagcatgctgcaaaatcatgcggaacaacaaagaagtgatctgctccatcagttctgttccaaaagggccatttaagtcaccacgggtgatgaggagtgcaatccaatatatttcaaacaaatggcccttttggaacagaagtgatctgctccattctagt

SEQ ID NO: 47517 - DNA, 620 bp, Setaria italica
  misc_feature (1)..(21): n is a, c, g, or t
  Peptide Sequence Number=SeqID_113491
nnnnnnnnnnnnnnnnnnnnncttttctacaagaacacacgcattccattctttaatcattcaatttgtacaattacacagttacaatccggtccacagaatcagcattcagatttcagtggcaccaaaggactataacacacttggtaattggtaaatatataccaactgattctatggaactccgccgccgctccacgtagaagtcagaatttcacagtataattagcagggaaggacttagtcttgcagtggagcttccctgctaccaagacttcagatctccgacaggcccagcggtccagttgaggtgcttctctcctggttgcaagtatactctctgcgtgtgtggcagcttgcgagcaaggccatttaggatctgatggaacgcgtccctaggttgggctggctgtgggaataacatggccttcttcatagatggattggcaagcaatctttgcttcctcagaatgtcttctactggaatggaggtgaggattgaatctagctttggaacatcctcctcatcgacaaaaacaccaatctcctcccatgggatcgcatcagcaaatggtaaaacgatgtcatcagctatgatgactggaatgcagccgaaaacc

SEQ ID NO: 47518 - DNA, 489 bp, Setaria italica
  Peptide Sequence Number=SeqID_113492
tttttttttttagtaattaagtactaatttattagcaagataagcaccatttcatttctatcaaaagataataagttacatgacattcataaggactagacaaggccaaggtgtattttgcacctaaagcacagcatgtcgattacatgattacatcacatttcacgaagtatagactaatcctatggggtttccatccaaagcttatctgagaagaagatatctcttcgctaccatggcttcagatcccccacaggtccagcagtccagttgagacgctgatcgccaggttgtaagtatgttccctcagggtgtggcagcttgcgagcaagaccgttcaagatctggtggaatgcatcccttggttgggctggctgcggaaacaacatggcctgcttcattgatggatttgcaagtaacctttgctttcttaaaatgtcatcgattggcattgatgtgaggattgtgtctagtttagggacatcccct

SEQ ID NO: 47519 - DNA, 1616 bp, Setaria italica
  Peptide Sequence Number=SeqID_113493
tggttctactaagtctagtaagtactagtcgtcgtttgtctattattctttctattagtccgtaggggtttccagcactgagaagaagatatctcttcgctaccatggcttcagatctcccacaggtccagcagtccagttgagacgctgatcgccaggttgtaagtatgttccctcagggtgtggcagcttgcgagcaagaccgttcaagatctggtggaatgcatcccttggttgggctggctgcggaaacaacatggcctgcttcattgatggatttgcaagtaacctttgctttcttaaaatgtcatcgattggcattgatgtgaggattgtgtctagtttagggacatccttctcctcaacaaagacaccaatttcctcccatgggattgcatccgcaaatggtagcacaatatcatcagctatgatgactggaatgcagccaaagaccacggcctcaaccaacctagggctccatggtgcccagcccaatggacacaggcagaagacagcacgctgcatgtcttcatagtaagtggcagggtgatctgttgaaatgtcaaatagagggttgctcttgaagttctcccacagcgaagctcgtgcacctcttgcatagtatccaccctcagggtcgttcccggtgtcatagaaaagtccccggaagtaaacaaagattgagcgcggagtgtcgggggaaattaagtgagcttgcattttctgcggaggagcatagggaggaataatgatagagccctctttcagacagacatgattctcctgtccaaaagtttggaccaaagtagcacgtcgcagcaatggaagaattccacgctcaatagccttttcttcctgatagtggaagcatgctgcaaaatcatgcggaacaacaaagaagtgatctgctccatcagttctgttccaaaagggccatttgtttgaaatatattggattgcactcctcatcacccgtggtgacttaaatggcaagggcagtccagcattagttaaatcacaagtagtataaactggcgtatagaaccaatcagcctctttgggatttagagtccgcacagcacttgagagcaagaaacgatgcataaaaatttctgcagcaaacatgtgattaagacaccgtggatccttggtaaccatcttcttgttgtacttcctcggcaagtcataaatgaagaccttcaacctcccaacaggattatcttctaacacatcaccagcacttcctgcgatgcgctcgatgttccgatgagccaccccgcctgccacctctgctcccgcggctgcggaggccgccggcgacgagaggaggagacaggagagggaagcgacggcaaggaggaccttcgccctcgccgccgtcatagtcaccagtcaccacctccaccaacgaactaggcgacgagattcagccgagatggtgggaggtaagagtgagagcgggatcgcgcggaagctacctgaagaaatgagtgtgtgatcagacaggagtttgaaggagaagtgagagattaatctgctgctgtatgtgacaaggggacaaggagccaaacagggaggggttttgttgcttgtggggacaggtactcagagaggag

SEQ ID NO: 47520 - DNA, 1346 bp, Setaria italica
  Peptide Sequence Number=SeqID_113494
gctgttttagtgtgctagtccggctaaactatttaattgatctgtggtccacatagcaacctgttgcttgtttatttgaatgaacagttagctattcattgcatgtcgagaaacctgaatgcatgagctacaattactctttttgcttggcttgccctaatctggataagtctcatgcccaaggccaaattttagcataatatctggttattactttgattagtgatacttcaattcagtagctcttgtggatttttcttgtgttcttgacagcttgataattagtgcttggtactgaatagtacttgttagattatcagcttttgctctgttcaactcggttggtttttagcaacagctgaaacatcttgtttgtccttgtctcatctaacagctgcacttagcattgcatctgtttccagagcttcagttcaatttggctaaccaaattggcagctcaatttggtttcagttattttgattcttgaagtgttacttatctgcagtagtgcatcttttcaagctcattagctaatcatttaagcactagttttttttttcctttagcttggtttttgaacctcaatttgtataggttaaaggaactagcttgtgcgtttctcagttggcatagaacttgctaatgttatgatatatttacatggttctgtgcaatttgctaatgttgtgtttctgtagccaattgcatgatcttgttcctttgttctatgagatggtttaagcctacaattttttccaagttttactatgaaatcatatattacttgtgctggaaatacaacttcatgtagtagtgcaatattttgttatttcgatatatattgattagaaatagatagaaagagatgtacaatcacatgaataataggatcaatttgcggtacaacagctaagcatgtatctgctgattttgtggtgcaatacgttcaatttatggtctacttgttttcagttttggggattcttggtcttattgtttgtgacttgtgtcctgtaaagttccatttgttgttagctttggatttggtcaattttcatatctaaatgcgatatgcatgggagtgggctgcacaccacataatgtccctaacactctcttgcatactgagcctgggaggaatcagctagtatttgtataattaaatccaaatgaattagtgtgtatgacagtgaatataataaacaaggctccatgtcatcctttagcttccaatttgttgtcaatgttagttcaaaaaagaataaaatcgcacataacttgtaccagaattatatcctaacatcgtagtatgattttttggttattttaactataaattttgtaa

SEQ ID NO: 47521 - DNA, 582 bp, Setaria italica
  Peptide Sequence Number=SeqID_113495
tttttttttttaccattccaacgggttaatttagtttaattcgcttttgcagacatttcagtgtaattcctagcctttttacaggtaaacgagctattgtacaacttgtgaacattgacatgatggcatcccaacgttttgaaacatgccttacaagttacaagttactagatacaccgtagtctctcaagcgaccattcaagaggtacccatctgtgcattatttatctacaaagatgcaccaacgattgcttgcgaggagctccacacattcgcgctcatcagagggccgcctgcgctgcagctaaccttgcaattgggaccctgaaaggtgaacaagaaacgtagtccagtccgacctttgcaaaaaatgcaacagaagaaggctcgccaccatgttcaccacaaatgcccaccttcaaatcaggccttgaccttcggcccctctcagtggcaatcttaaccaactccccgacccccttctggtcaagcacctcaaatggatcgtgctggagaataccctgggacatgtaaagggggagaaagttagcttagaccaaatagcttatctcccttagacta

SEQ ID NO: 47522 - DNA, 472 bp, Setaria italica
  Peptide Sequence Number=SeqID_113496
aaaccgcgctcctcttctggccagctgataatcctatgtttaccctcttcctcatcaaccgcaactatcacaacctggtaatcagatccgagtctggcaaccaaatgcagcataccattaacaatggcgctgaagacccaggtttggatgcttacatctgaccaacattcagttgacctgccactccatactctactttcagacgagtaggtgtgcacctgtaacaaagtcatgttagtgccaaacatgaactggaccaacttaaaatcctgaggagacggctggatcgaaaatcaaatagccggcgatgaccgaatagttcaattcatcatcgcactgagtgcccgtgccaggcaccagcacccattccttggtggcggggttgcacacgatatagtcttctcgttcgtgtgcttctgaacgccggctgtgcagaaagagcacaagcccattgcaggaacccatgaggatg

SEQ ID NO: 47523 - DNA, 265 bp, Setaria italica
  Peptide Sequence Number=SeqID_113497
gtgctgtaggatcagcaccaacagcgagcaatgttcttactaactctcgaccctctttctcgtgctcctttttaagagctgctgccatgcataaagctgtcccaacagggctgggtacatcaatcgcttctgctatctcctctaaagatgcaacttcaacccatcttctcaccacagcagtgttccatgtttcaatacatagatgcaatggcgttttatgttgagaatttggtatgcccatcgatctgcacgcctcctattttcc

SEQ ID NO: 47524 - DNA, 1374 bp, Setaria italica
  Peptide Sequence Number=SeqID_113498
cttccacatagacattcagcaaaagcaccagcaaatccatctgtgcctttaatgaactggcgcacggtatcacgatacttcccgttccactctgaccaaatgttccagtgaggaaattgacctacttgatagaggcctcctgcatcccatgcttcagcaatgagcttgacacctccaagaatcgggtcattgctaatcatgtcaacaagtggtggtctaacaagaggtgtccctgttgtagtcatgtcaccccccattggaccaccatacacattgactggatcccataagctgcatgctctggtcattatagacgcgaggtcaaagcgaaaaccatcaacatgcatttctgtcacccagtatctcaagcaatccaggataaattcgcgaactactggatgattacaattgaaggtatttccacaaccggaataattatagaactctcccttaggtgcaagcatgtagtatgtactattatctatccccctaaaggataatattgggcctttctcattaccctcagctgtatgattgaagacaacatccatgatcacctcaattccccgtttgtgagcctctcttacaaaaactttgaattcgttaatggcatcacgtccagagttgccacgggacgaatatcttgccattggtgagaaaaaatttattgtagaatatccccagaaattcatcttggaagaggagctgaagtactccagctcgttgaactcatgacagggcattaactctacacaattgactccaagttcctttagatagtcaagctttgacacagcaccaatgtaagttcctgggtgttttgtgttgcttgaatcatgctttgtgaatccacgcaaatgcatttcatagataacaacgtccttttgatgatacttcaggggtaggtcaccttgccaatcaaacgtactgtatggaagagggaccatgccagccatttgaggccagcaatcgccatcaggccctggtacaccatattgacctcggcttatcactgccttagcatacggatccaccacgacattggacgcatcatagtactggccacgctcgggggcaaacatgccatcaaacctgtacccgtagagcatttcgtgcacctgctccccttcgatgaacacgtgccacacgttccccgtccggttgagcaggggatcaagcgggacctcctctgtcaccgtatccgcctcgagatcgtccggggtgaagaggcacagcgacgcggcggtggcgccggcggagtagacggcgaagttgaccccgccgtcgagcgcggtggcccccagaggcgcgggcattccggcgagcaccctgcacgcgccgccgagcgcgtacctctcctccaccgcctccgcc

SEQ ID NO: 47525 - DNA, 539 bp, Setaria italica
  Peptide Sequence Number=SeqID_113499
ccccacaattccagctaagattatgattttccccatctctgttgtcctcaccatttgacaagttgtacttgttattgtatgtcaccaaatcagccagtgtaaacccatcatgggcacatacaaagttgacactgtgccaaggcttcctcccacctgactgatgataaaaaagcaagctattgtgaatttcacaatttcattattactagacaaagcgaagcattcagcactttacaattaatgtcttccctccaatatacatgaacatagtaatacatcattcagtgtcacttcttctcatccagtaaaaaaataatgcattcctttttgaacaaaaagacaggagcacagctgacccatttaagaaggaagcaagacggttttacatgaaaaaaaataaatatatggctagtcacccaaagaaaggcacgacatccttacttgcaggttggatactaaaggttatactaatgcaaagaatgtggaactttttgtaaatgcttgtaaggtaaaaaatatatactattatcataattttg

SEQ ID NO: 47526 - DNA, 1458 bp, Setaria italica
  misc_feature (1)..(22): n is a, c, g, or t
  Peptide Sequence Number=SeqID_113500
nnnnnnnnnnnnnnnnnnnnnnttttttttagggtgtaaaagagcgggagcacttctgccaaatgatcaatttttcaggaagcatactctacacatttaccattacttaattaccaggcaatactctcctaactctgtcgcgacgaacatatcagagaaccaccagctttacatacgcataaaccaccgacaccagcaaaacccaacagtttctatggcatgctagagagaactataccctgtatactctttaccactgtaccagacctctttcaagcatctggatgcaacacgaggacgatggaagagtagctgagcatagggtagaggttggagttgaggaaatgggagaactggttgatggtgagtgcccggtccggcaggtcatcggcgaggaagtcatacggtgcagccttgcctgtgtccaccactggctcccatcggaaccccgggcgctctggaagtccgacaaccaccggcaggtggctggtgttgaaggccacgtagatttcacctttggtttcatccttcatggagaaggcaacgaatcggctcccctccgaccagtcaggcttcccaggctgatgaccgtgccaatgcaactgttctgaagttgggaagtcctcaaggccaagagattcgcattccttgcggaatttggtcatgaggcggcagaatctgtacaagtcagaggattgctcttccttcttatcccaacggaagtaattgacataatggtcatggcagtatgtattgttgttccctccctttgtatgaccatattcatcgcccatgtagaacatcggaactccttgagaaaccattagacaaacaaagaaattgcgcatttgcctcttcctcaatctcctgactgataggcttgcaaattctccttcctccccacaattccagctaagattatgattttccccatctctgttgtcctcaccatttgacaagttgtacttgttattgtatgtcaccaaatcagccagtgtaaacccatcatgggcacatacaaagttgacactgtgccaaggcttcctcccacctgactggtataattgtggacttccacatagacattcagcaaaagcaccagcaaatccatctgtgcctttaatgaactggcgcacggtatcacgatacttcccgttccactctgaccaaatgttccagtgaggaaattgacctacttgatagaggcctcctgcatcccatgcttcagcaatgagcttgacacctccaagaatcgggtcattgctaatcatgtcaacaagtggtggtctaacaagaggtgtccctgttgtagtcatgtcaccccccattggaccaccatacacattgactggatcccataagctgcatgctctggtcagacaaagaaggtagtaccctagttagtaagtacaatagcctttaagtaactaaaccaaaccaaaataaaacaaaacaaaa

SEQ ID NO: 47527 - DNA, 371 bp, Setaria italica
  misc_feature (347)..(347): n is a, c, g, or t
  Peptide Sequence Number=SeqID_113501
cagctgttaaatttcaagaaaacgtaaggaacacagaattgacctgttccgtgattccatggattcacactcaccgcagcaatcaggtttaaatacacttcgtgtgggaaatatgtatgtgtggacccactgtcaaagatcacttgagtcaacttcccctgcacattgagctgctgatccccgtggtttacttgctggagttgggctctgcgtacattatctgctggaccatttcggacaggaacccatgtcattccccatctaggaatgtaatcatcaccaagaaacaaataaccaccactactgggatctgtcgtcatacagtgaccgaaaacattggaaataanccctcggctggctagctgtgtagg

SEQ ID NO: 47528 - DNA, 1288 bp, Setaria italica
  Peptide Sequence Number=SeqID_113502
ggcgcggtcagacgatctcaggtagtatgtgtgtaatgtttacaaaagttggttgtgcaatactttcctcaggaagaaaggaattctgctttgttcgcttgggtcggtgcagtctgaatcaatccatcctagctgattctcatcattgtcataggcaatcaactttccacgaagagaaacatctgcaagaaataggagggaaggataaatttagaaggaatgaattgggcagtggaaatttaacaagaaaatgaacactgaatacctccaactattataactgaatcataaccgatcgctgtcccatcgagcacccccaggcagacattgcccttatcctgaaatgaatcccacatgaactgacgatcaagtaatcttcaggacgaatgttgaaagttctggagaagaaaaattgtttcttgaattgcagactcaagggcttgaaaaaatagtttcacatcatccacagacctgaagaaaacatacataaaaaatccaagaaaagaacagaggtttatttatctggaataatatgcttgtcgatttaatgtcctagctgacaatttagcaaaaaaaaatctattaatatattttcatcatgttacctcactgaaaaatcagctttcatacagaaaggcagcgttttatctgagtcatcgtgtacaaatctcggagatgcaccattcagctgttaaatttcaagaaaacgtaaggaacacagaattgacctgttccgtgattccatggattcacactcaccgcagcaatcaggtttaaatacacttcgtgtgggaaatatgtatgtgtggacccactgtcaaagatcacttgagtcaacttcccctgcacattgagctgctgatccccgtggtttacttgctggagttgggctctgcgtacattactgaaactcacaaaaatggaaaagagtttcagttatatatccatctaactttcgtgatgtgaaatttatataatggtgtatacatgtgctattttggttcacagtaatattggagagagtaaagcaatacagcagagcagttaggcaatattttccctttgtggttgttccatgagagtgacaagaattggtaagatttttgaagatatgctgcaaacacagaatatcgcattgactaaatatgatgcatgacatccaagggaagaatgatagccacatgcacacggaattagttctccatagaacagatggaacttactctgctggaccatttcggacaggaacccatgtcattccccatctaggaatgtaatcatcaccaag

SEQ ID NO: 47529 - DNA, 1677 bp, Setaria italica
  misc_feature (1)..(49): n is a, c, g, or t
  Peptide Sequence Number=SeqID_113503
nnnnnnnnnnnnnnnnnnnnnnnnnnnnnnnnnnnnnnnnnnnnnnnnnttttttttttttaggttctaaactgctgtcgattattccttgatatgcttcaccactttagtcttacacaacgtgagtgagatataccttacaacatacatagaatacaggcttctgcttctttcgactatatacagaccgagcaaaaatatgaagtacatgatgctagctatgctttatctacctttcctttctctttctccctatctcataatcattttccctatctagtaattacattccttcacacgattacatcagaatttggacgcagaattgcacgtccataagaacaggcgcggtcagacgatctcaggtagtatgtgtgtaatgtttacaaaagttggttgtgcaatactttcctcaggaagaaaggaattctgctttgttcgcttgggtcggtgcagtctgaatcaatccatcctagctgattctcatcattgtcataggcaatcaactttccacgaagagaaacatctccaactattataactgaatcataaccgatcgctgtcccatcgagcacccccaggcagacattgcccttatcactgacgatcaagtaatcttcaggacgaatgttgaaagttctggagaagaaaaattgtttcttgaattgcagactcaagggcttgaaaaaatgtttcacatcatccacagacctcactgaaaaatcagctttcatacagaaaggcagcgttttatctgagtcatcgtgtacaaatctcggagatgcaccattcagcgcagcaatcaggtttaaatacacttcgtgtgggaaatatgtatgtgtggacccactgtcaaagatcacttgagtcaacttcccctgcacattgagctgctgatccccgtggtttacttgctggagttgggctctgcgtacattatctgctggaccatttcggacaggaacccatgtcattccccatctaggaatgtaatcatcaccaagaaacaaataaccaccactactgggatctgtcgtcatacagtgaccgaaaacattggaaataatccctcggctggctagctgtgtaggaaggcttatttcccggctgcccaggcctagcactccatcagtattttctagtgtgtccaaaatgtttcctctctgatcatatccacacccaaacacgatgtctagattttccctttcaccgtcttcactgatgagttgcatattatccctcacataaacgcccatagaggagcttctgtcagcatagttgatatcgtagttgcactgatttgggtcgcgttgaactcgttcacaaagtggatcactggcaggaactatgttggcttgtgcgggcctatatggagaatgagctccctttgcacagcttctggatggcgtgtcgcactggatccatgttatgtcgctgccagtatcaacatcaacaaaataaccccttggaggattgccaattgacacagtcgtgtagtatagcccggtcgagaacacattgccggtggacgggaacgccgcggccgtcagattctccgccgcgccgccgctggcccgcttcctggcctccccgccgccgcggtgcggcttcgggtacaggcggcagcaggaaggacttgcgtcctccccgtcctctcctcctcctcctcctcgctcg

SEQ ID NO: 47530 - DNA, 993 bp, Setaria italica
  misc_feature (908)..(993): n is a, c, g, or t
  Peptide Sequence Number=SeqID_113504
gtatcaagcaccgaactctactcctcccctgcttccgtcccgtccacgccagagcactccactcccacgcaaaccctagcagcggttctcccctccctgcgggagccccgccaggcggctttggtccaagccgtcggagcaactccgatccagctgcggcgggttggggccgccggctccggtttgtggcgccggatttgggatcggcgcgatgtcgtgggccgggcccgacgagatcctcctctccacctccctcgccggcttcttggacaagaagcttattgtcctgcttagagatggacggaaactgcttggcaccctgtgctcgtttgatcagtttgcaaatgttgttcttcagggtgcttgtgaacgagtaattgttggggagcaatattgtgatgttcctcttggtctgtatgtgatccggggagagaatgttgttttaatcggagaattggaccgcgaaaaggatgaactccctgctcacatgacatgtgtttccgaagcagaaattagaaaggccgagaaggcggaaagggaagcaagagacctgaaaggcacgatgaggaaacggatggagttcctagacttcgattagttcccttgtggtatgtcagttgctgccccccaccccattgtggccgcgttgtttttagtggcggcttgtgttatacatgtcggcagaagaaagcctgatgattgcgctgtatcccagtcgaatgcttcttgtttaaccagaacgcttttggcccttttgggttgatgaaaacagattcttccgtagcagtgtgccgttcttttttttttgttgttgttgctacagttcattcagagccctcccttgcaagttgtaactttgtcacctttctgcctgcatggaggtgaaggagatacgtgttgctaaaccnnnnnnnnnnnnnnnnnnnnnnnnnnnnnnnnnnnnnnnnnnnnnnnnnnnnnnnnnnnnnnnnnnnnnnnnnnnnnnnnnnnnnn

SEQ ID NO: 47531 - DNA, 1385 bp, Setaria italica
  misc_feature (1361)..(1361): n is a, c, g, or t
  misc_feature (1384)..(1384): n is a, c, g, or t
  Peptide Sequence Number=SeqID_113505
aaggatagcaatccattttacaaagctgttggagatgctctaatacaaacatagcctaaaaacgggtagggatgctatattgccagtgctcacatccagttcattagctcgctacagccatgcaaaggactggcgctgcaccactgcaagagaccagagttgttagtacatagcatacacagatgaaagaacagaacatcaagaggacgcatgacgtgatggtactgcatgtcaagaaaaaaaaaatctgtaagcgttgtattaaccacaggtccacaacagcaataaccatgaccaaccaacaagattcctccgttcttcattttctcaattctgtatggaagccccaagaattccatcagttctataaacaaaggcacaagtcattcaactgattgctactaattacactgcctattagcttcatgttcccaccgtaagctctcttggcttctcaaacgcttgtatgcactaagcctttgaagccatgacagtaaccaaaacaatctggaaagaataaacccacgaccaaggtgagagatgtgtttataccccaggtgcaaaaatgcttgctcctgaagcagatgccatgaagctcgagacatggagagcccctctatgcaaaatgggacaagctcaacacttcaactgcaggaactggagcctcatgattggatgctactgctattgcttgcaagagttgttacttgactttgattcttctaaaatctggtttatatatctgcggaacttctcagcttgagggccaggtcttacaatgttgacgttgctccactgggaacaaggatcactgaaccacctcctcctgcctgtgcaccaggcaccaggaacaggtcggtgacgccatcgccggagtactttaatcatcaaatcttgtccaacaagggttcattctccttaaacttccgggcaaaaggaactccgctccccactagctcatcataatgtgtaacatttaggaaatggggttccatctgaggtggatcgtcccactccatataccgcaagtcattgttcactgtgaaattgcggaagtccgagttgcatgcaaccgaatggaaatacccctccagaggtagcatcacatttgtgaagtacatgaggagtgttctagggagattctcccaaccaaaaacacaatactcaataaagcgtctgtttaaaatgacccatggagaacctgtgaaaaatttgaaaccatcaggagtgtcccgtttctccgtggcttggaagaactgattcctccctgccaagtatattccggcatctactataatcggttgcactctctgagactctttccatccaatgtcactggtgtgatcaataaagttgaggtnccttggaacagaggaagaaaacnt

SEQ ID NO: 47532 - DNA, 837 bp, Setaria italica
  misc_feature (1)..(1): n is a, c, g, or t
  misc_feature (561)..(561): n is a, c, g, or t
  Peptide Sequence Number=SeqID_113506
ncaacggcaatgtcactagctcacgagttacagatcacaagatggactctcctggctaacaatcttggtggacgatctcccacttacattcacccagggttctctaaaaaaatgctccgtgcagaagaatttggacatcgtacaaccagcagtccacagccaaggtcctggtttcgctggtcaccatgttgtacaccatcaaaaacatttatcaggatggctagcacatctattccacctttgcaactttcctttgttcaatttggccagtcaagtcacattgcatctcagtccaactgactgggaccaatgtgccacccgctatactttgtgctgaaacaacgccaagttcattcttcgcagtggaaagataataggcccttgcatcaccgagagaaagaaccacagctctaacaatgtccccaggccgatatgactggtacatatccaccttgtcgatttcagtcgcacgaacatcttgctgccttatcaggccagtgaacttttctttgattgcctttgagtcaacacacatgatatcagcattggccattctaggcntaaccttgttactcgggcgatgacgacgcttccaggctgcggcacggctccatgggccttgtgccccaccacctccaccgtagacctctggtcgtcggagccaggtgcgggcggcacgatgcggcggtggcctgtgaccgacgcgcgcacggagcgaccatccgcgtaggctccgcgcccagccacgagggttaacgagttaccgaggagctcccccggcgtgaccacgtcgccgccgccgccgtcgtggtccatcgcggtggccgccattggcag

SEQ ID NO: 47533 - DNA, 577 bp, Setaria italica
  Peptide Sequence Number=SeqID_113507
ccgccagtggaagccattaacgtcatgccaagcagaaagacacagcaacacatctcaacaaatgcaaaaccagaatttccactgtatcaaaactcggctcaacggcaatgtcactagctcacgagttacagatcacaagatggactctcctggctaacaatcttggtggacgatctcccacttacattcacccagggttctctaaaaaaatgctccgtgcagaagaatttggacatcgtacaaccagcagtccacagccaaggtcctggtttcgctggtcaccatgttgtacaccatcaaaaacatttatcaggatggctagcacatctattccacctttgcaactttcctttgttcaatttggccagtcaagtcacattgcatctcagtccaactgactgggaccaatgtgccacccgctatactttgtgctgaaacaacgccaagttcattcttcgcagtggaaagataataggcccttgcatcaccgagagaaagctttggcatcatttaaggatctcaacttctccagccagcctaaaaattattaaacttaattcctaaactaggtcttagt

SEQ ID NO: 47534 - DNA, 523 bp, Setaria italica
  Peptide Sequence Number=SeqID_113508
ttttttttctattgtaacgcgacagctacatgtcatctcacattcgtcagcacatagcccgaagaaagggcattgttacaacttacaagcaggttagaaactaaaaactcttatcgctagggtacatgctaactgagctatgacctgatggtatctcaccattatctgattatctcaacatgtaaagcagcagcacagctgcatccagaaaacaacattaagttacattcatgatctcaacatggcaatagataggtgggagtcaaacagattagatggtatgcctcattttccatctgaggattgcgcaactgaacctaaacagtaactgtccaccgaacagtcacataacaaggaggatggtagctttgaagcggcggcggtctacgggtggaactggagattctgacttcatctgatatatatacatgggtcacatctaaagaagccgacgatcttaacttggtcaactttgtgtaacggtctgttttcttctacttgcgtcttcttcagcatagttcta

SEQ ID NO: 47535 - DNA, 676 bp, Setaria italica
  Peptide Sequence Number=SeqID_113509
ttttttggttcagaaaagaacgagcaccacgcttgcacagaaatgttgataggagctacatcagccagcttagtgcgaatcagagtttatagtctagttggaaactttctaaattacaaggtttggctggtacagcaaaagggaacgacagaggatcgtgatccactgaacatagtctcatgagttgatgcaattacacaatagttctgtctcatgcaaagagggatcctcagttctcccgagagctcttgatctcatccatcagaagatgtggacaatgtcataggcaaatgtccaaaacaacacgaaggacataaggcctccaagaactccttcaattataatcctgttccaactgtcaaagtaggtatgaacagaaaatttggccttcaccaaaatccccagagatgcaaccatcatcacaagaaagtagaacacaaatcccatcaagcctgtaaatccccagattccagcaacaactccactaatgattgcttagaatgtccggctgtagtttatggatttgacgttgctgacgaggttctccgcgtggatgatcgggacgtcgtcggcgaacccgctgcccgccgccgccgccatcgttgtggtcagttcgagcagcgaacgcagtagacccggacacccggttattgttcttaactttctttttgttctt

SEQ ID NO: 47536 - DNA, 756 bp, Setaria italica
  Peptide Sequence Number=SeqID_113510
ctccgttgcatggttcagaaaagaacgagcaccacgcttgcacagaaatgttgataggagctacatcagccagcttagtgcgaatcagagtttatagtctagttggaaactttctaaattacaaggtttggctggtacagcaaaagggaacgacagaggatcgtgatccactgaacatagtctcatgagttgatgcaattacacaatagttctgtctcatgcaaagagggatcctcagttctcccgagagctcttgatctcatccatcagaagatgtggacaatgtcataggcaaatctgctcaggttaaggatgaactcgggcataaaagttgactgttcagctatttatgccataaaaaagctggaggaaatcattgcatttgttatgatacgcaaacaaaatagccacagcaatcttaccacactaccatatttcaatgctataagggatttggaagtcacaataataccatatcaactatgttgctaatgttaagtaaaccaaactaaacctatcaacccacaaacacaacaaacaacacattaaggcatagattagaagttagaacggtagtaagtcttacaatatcaaggatacgtccaaaacaacacgaaggactgcaaaatacaaagaaaaaggttgttagacattatgaaagaaaatggcatgctaagtaaatatccaaagtagatatcactactaactaccttgaaaaactgtgtaaacccatgataataggggatgctaccctac

SEQ ID NO: 47537 - DNA, 564 bp, Setaria italica
  Peptide Sequence Number=SeqID_113511
aaatttaaagatttatttcatgtataaggtactatggtgttctatattcaacggctcactagatcctagagatgcttccatgctcctcagaaatgtagagtgttgattgttgatcaaggtatcagaaatataaaattcacataatagcattgcatagtttcgacatgcttactatatgttgaatctgctgagtgataaagaagtataataattttgtattactttttcacaactccaatgaggcttaccataaggcctccaagaactccttcaattataatcctgttccaactgtcaaagtaggtatgaacagaaaatttggccttcaccaaaatccccagagatgcaaccatcatcacaagaaagtagaacacaaatcccatcaagcctgtaaatccccagattccagcaacaactccactaatgattgacaagaatgtccggctgtagtttatggatttgacgttgctgacgaggttctccgcgtggatgatcgggacgtcgtcggcgaacccgctgcccgccgccgccgccatcgttgtggtcagttcgagcagcgaacgc

SEQ ID NO: 47538 - DNA, 1459 bp, Setaria italica
  misc_feature (1)..(18): n is a, c, g, or t
  Peptide Sequence Number=SeqID_113512
nnnnnnnnnnnnnnnnnntttttttttttttttttttggttagagtaacagacacttctggtctacctcttcattctgctagtaacactatttcgaatacaaacattgcacattagcaaacactggtccttgacagttcaactattgcactacacaagagttgagagaattagatttcctaggaatgtactcaaaaatatctcaactcatgatatatcaaattcacaataactgctgtgttgtctcattgttttgtcaatggaaactgaagaaatgtaacgtagcttcagtcttagcacctgagcaatgcacaaaccacaccggagcatagcaaaaatgctagcatgaaaagtttgattgctcttgaacttcaccaacaggaagttcgactgcaaagttagcttgagcatcagcagctgagttgaattccctcaaaacatgcctgatttgaaataactgaaatgtcccttttagctccttaactttcttgcacaagccaaccatattatcattcctagcacgccagagatcttggacctggttacagacaagcttagaatcgccttgagcacgaatatacttgaatcctttcttggccgcatatttcagccctaggatcagtgcacgatattcagcagcgttgttggttgcaatacccagaccctcacgtagttgagcaatcacagaaccatctaaccgctttattattgcaccagcacctgctttcccaggattcccctttgaagcaccatcaaattcaagaatacaagagagatgactatcaggtaattgttcctgctcatcaactttgggatgcttcttcgatggtccagtttcaatctcgtgtgaccttttcaaagttgaggatgcagtcccatcaggttgctggaaagggcagggcactagatcgtcgaacaattcatctcgtacatctgctgcgtcaatggcgtagagggcgttccttagcccgcgcgcagcgagatattcctcggtgtctttaagcagagagtagccttttgaagacagtgacagaagggtcgcaaaccgaattgctgacttgagcttggcattcgctgagggtcttgtagataccgatgacgtcccccttgcggacgacgtagaagggctcgccggcggcagaggagtccattggcgtctttgcggcggatctcttggtggagcgccgggaggaggaggaggaggaggagaagcgtacgggcggctgcgggatggaaggcggcggcacgggaggcctgagagccaagaagagggggtagtgcctcctccacgccgctctggaaatcagcagtccacggaagaaagaagagcaactccgaatcaccattagagaggcggaggagaagcacgggacggcggccggggcagagctggggcttaccaaccgccgccgcgcgggtgcaggcgctccgcttcctcctccgcgacgaagtactacgta

SEQ ID NO: 47539 - DNA, 364 bp, Setaria italica
  Peptide Sequence Number=SeqID_113513
aactgtatctgcttcctagtggtgtctaagactcaagctccagggatcaggaaattaattgactgaaagaatggaaggatctacggatcatcaaggtcatctttagattcgacaactctgggacgatcacgatctgcagctattgcttggagctcactcagatgttctggtatcagtgtgcccagctgggggttatgcgggttctctgcatatgcgacgtggtaagctgccacacacgcctgtggccacgcgatcatcatccggcacagtatctcttggaagataatggtatgccattttcattaaccctgaatccctcgcagtactagtagaagaatcatgtaataaacgaccgagaatgaat

SEQ ID NO: 47540 - DNA, 504 bp, Setaria italica
  Peptide Sequence Number=SeqID_113514
caggaaaattaattgactgaaagaatggaaggatctacggatcatcaaggtcatctttagattcgacaactctgggacgatcacgatctgcagctattgcttggagctcactcagatgttctggtatcagtgtgcccagctgggggttatgcgggttctctgcatatgcgacgtggtaagctgccacacacgcctgtggccacgcgatcatcatccggcacatgtaataaccgattaggaatgcatagatggatacaggcagagctaacttcttctgatctttatccacggtggctagtgcccatgaaccagcaaccagtgaggccaacgcgcctgctgtcacggaagagaggaagcagaacgaaccagtaaggtctgaatcaacaagattttctatcccacggagaacaaaaagggaccacacatcccgcgaagccacacagaatgccttcccccgcgcccccacatgcacaaaaccccagcggttagcacgtcccagcattt

SEQ ID NO: 47541 - DNA, 536 bp, Setaria italica
  Peptide Sequence Number=SeqID_113515
gcaataactgaaacctggtaaaactcgtcgtcggtgtcgcagccgacgtccgtcgcggcgcccacgcccgaggcgtactcgtcgtcggcgtcgttgacgacgtcagtagtggtgcccacgcccgaggcgtactcgtcgtcgacgtcgttgacgacctcaatcgcggtgcccccgccgaggcgtactcgccggcgccggagttctgacttgtgggccctgcacatgctcgcctgcatgcagccgggcgaatgacacagtaaatagctagtgggggatttcgaagtaataagactaatagttgattgttaaatcgcgttgttgggttaatctgacagtacccggatcaaacctgtgagaaagatggttttgaaccgaatttagagtctgtcattactcgttcagttggtcaagtttcttgtagactgtagaacagtgacaagaggtgtagaacgtctcatctttgctctgtaattcgacaaccatcttcatcagcaatatagtagagacgttctacacctcttgtcactgttctacag

SEQ ID NO: 47542 - DNA, 698 bp, Setaria italica
  misc_feature (22)..(22): n is a, c, g, or t
  Peptide Sequence Number=SeqID_113516
ttaacgttaacgtagtagacgngcgcactccagaaggggtcctttcttttttttcacaatacttaattctctagcatatatcattcgcatctcatgagttgccattagattctcctataccacagaatggcagctcctagacagttcaagctgaagagatctctacgaattctacatcagtaccgtgctggtttacatgagatgagctacatccaccagaaccaggaggctacagaagccagaagacaaatagcaaactagagcaggctaaaaaaattacgaattgtcagttcctgcacgcggctacagctcttgctaatgtgattcatgacctcaagaggtcagtacagcacgaggagggtgggctcctgattatcctactgctccttccagattctcccggtgacccgcagcttgagctccttcctgtcaccgcctgagaaaacagggccatgttccgctggatgatcagcccatcatagctgtcacggaccttccgatggctgtctctgatgctacggggcactccttgccagatcatcttgcgcccagtgcctcccacctccaggctgtagctgtagttcttcgcttccacgtcgtctcccatgaacctcaggaaggcaatgtagacaggtgccatgcccagctgaaaggcttcaaagtgtaagcagaagtattggccaaagcagctaaacacc

SEQ ID NO: 47543 - DNA, 491 bp, Setaria italica
  Peptide Sequence Number=SeqID_113517
agcctgtaacagttacggagaaaaggaacactaatttgtatcaatcatgtatactggcattcctatcttgttgatgggtaagagcacataagaaagggtctggccaataaacattaaacgcacaagagcaaatgcaggattaagtgcaaactctagaatttacattacctgtatgactagataaacagccaccaatgaacagtttccaataaggcacaacacaccaagatgccatgtttctacaccatactccagcatggttgatgttaaccactggaccagatagggagtgctgctccatgtgcctggagtaacaataccatttgccgtattggtgcctcccgaaccaatcaaggatggacctctatgctctgccctcagttgggcgcctcagacgtatacaactgtgccgagaactttgaggatgccgtctttcgtggagatgttgatagcttcaacgctgaatgcaggattaacaccccaaaattggt

SEQ ID NO: 47544 - DNA, 854 bp, Setaria italica
  Peptide Sequence Number=SeqID_113518
tttcaggataaatctatacatgtgacctttgctgttatcttggagaaaagaattgagacaaccatttgctgaaataaatctatacatgtgacctttgctgttatcctggagaaaacaactgagacaaccatttgatacactgagatttaaggatccatgaaggaactttcctgtgtcttggggactcttggaggtccaagaagaagagggttcaaacaaccatcactcgaagttcgccgtgcttcattgtagcgagcccaagtaacaatgtatagaccagcaattataaagactcccccaataatgctggaagaagtagaatacaagcgtacaaggttaggaccgattctagtttgttacataataagttcattgaggttataaggagagaagaaagaatatcaacaaatatatctgtaaaaacttcaccagttttatgtttcatcaagcaccacaaatgttgtttatttcacttgaaagagtatcatgcaacaactgataaaacatatatgcaaaccagttcaaaggatccaagggttgaaaaataacccaataacaatgttttcaaacagcaaattttggcaaaattatatatggcagtgtgttgaatcaaacctcccgacataaactggatcaccaagaaaaatagttgagaggatagtggaacatgctggttggagtggattatagagagaaactagagaaggtccgagaattttgtttgcccacgtcatggtcgcatagcacatacaagaagcaacaattccagcatatagaatagctatgatctctgtttttgtcaattgcccatcattggcgcccattggttagtactccagttaacaccataaaga

SEQ ID NO: 47545 - DNA, 1709 bp, Setaria italica
  Peptide Sequence Number=SeqID_113519
aatgtgcaagtaattaagaaatttggtcagataaccaggacaggttcctaaatcttagcatcactgcgatgcattatgcaagtgatcgatgcagtcttggcaataaggcatatagagatacttacagcatatagaatagctatgatctctgtttttttttactttggttactatattctattagaacatattatcaaaacaaatatacaagaatacaaaaaaaatttcaggataaatctatacatgtgaattttgctgttgtccggagaaaagaattgagacaaccatttgctgaaataaatctatacatgtgacctttgctgttatcttggagaaaacaattgagacaaccatttgctgaaataaatctatacatgtgacttttgctgttgtcctggagaaaacaactgagacaaccatttgatacactgagatttaaggatccatgaaggaactttcctgtgtcttggggactcttggaggtccaagaagaagagggttcaaacaaccatcactcgaagttcgccgtgcttcattgtagcgagcccaagtaacaatgtatagaccagcaattataaagactcccccaataatgctcccgacataaactggatcaccaagaaaaatagttgagaggatagtggaacatgctggttggagtggattatagagagaaactagagaaggtccgagaattttgtttgcccacgtcatggtcgcatagcacatacaagaagcaacaattccagcatatagaatagctatgatctctgtttttgtcaatgcccactcatggagcccattggttgcaagtactccagttaacaccataaagatggaggcaaaaaaatatgaataagctgtcaaggacaagcttgcaggatattttatcatcacaggagcctgtatgactagataaacagccaccaatgaacagtttccaataaggcacaacacaccaagatgccatgtttctacaccatactccagcatggttgatgttaaccactggaccagatagggagtgctgctccatgtgcctggagtaacaataccatttgccgtattggtgcctcccgaaccaatcaaggatggacctctatacaaagccatcagaatggcaccagagacgcatacaactgtgccgagaactttgaggatgccgtctttcgtggagatgttgatagcttcaacgccgacaatcgcagccaagacaaatgtgatcactggtatggagggctggaaagcagcggcataggaagcattggtgttgtggaggccgaccaggaagaggagcgggttcgcatagagcccagtgaagccaagaagagcaaaggaggcgaggagctgaggggtcaccggaggcctctcccttctctcgcggaggaaggcgacgggggcgaggacggcgagcgcgacgaggtcgcggtagacgcagaagacgacctggttcatgcccacgtcgagcatggccttggtgaggacatggtagccgctgtaggcgagctggacgaaggccatcccggcgtgcgcccgccacgcgtccttgttgtcagccagggcactcagcagccgccgcctgatcgcgctccacggcggcgagcgccgccgcttgagcagcggcgtcggcccgtcgtctccctcctcccccatcttccggttctcctctgctctgcgcgtctgcagcagcgctgattcgattcgctctt

SEQ ID NO: 47546 - DNA, 384 bp, Setaria italica
  Peptide Sequence Number=SeqID_113520
ttgtgatcactggaatgctctggtctgtctccatgcgttgtggcgttaatctttgtcgaaagatgaagttggcatgtcgctacgagttggagatcaattagcaacaatgctgtatgtagctggtcaggatggctgaagaagtcgtttggactcatcagggccacatggctggcgcccatcatcataggatccatcatctcactacgatcgacagcagggtatccatgtgatgacaagttaatcagataatcattggctagatagcttccaaattaaagagctggcatcctgtgatctggttgcttctccattaattgttaaaaagaaaaatcatcataccctcttgttttccttattatacaggtggttacaagatcagctaag

SEQ ID NO: 47547 - DNA, 1056 bp, Setaria italica
  Peptide Sequence Number=SeqID_113521
gctgcaaggaaagactaccccctacaacgctagaaggcttcttctatggctgcgtatacgaatcctgcaatgaggaccgcgacgatctgtccagtgatagttgggacgaaagcggcagtgagggcaacgatgatgatggcagtgaggatgacaaggaaggcggcagtgcgaacaacggcaaaggtggcagtgaggacggtgatgaaggtggcgaatgcaagggtgagaagtcgtcctgccacgcctgtgggcatttcataaacctgttggggagatctgtgcctctcgtcgacccttcattctctgtcctgaggaagcaacctgggattaagaatttcaccctcttagattcctgcaatgggcttctcctctttgggcaggcatggtgttccagattcagtgctacaacaagctatattgtgtataaccctgccactgaacattgggtgcccgtgccaagctccggcttctcatcgaatccactggaatacggtgaagactgtgatgacgatgttgaggaatcatgcgtattgacttgtttgatttttgacccagccatctcctcacacttccagttgattgagttctgccataatccgggagttgctttggtgctagcctactcgtctgaaactgagagatggggttgacagaccaagggaacggcggcgatggaaaaagggaggtaaatgggatttgcataaaaccatgtcatccatgagaggtagcacatttttcaacaaaatgctgcatttgatcgtcagcctctactctattggccctgagctgatagctgctattgatgggaaagggaagacacgtaaggtcatccaatgggtagagaattgtggttttcctgtctttgtgggtcaatccaaagggctcttgcattgcttgagtgtgagcgggcatccagatggcgattcttgccataatagaactagaagactaataccaatttagggttacctttagtaaaggtaacttaaattaagtaaattaagttaacttaaagttaaaagttaaagtttaaggttaaaaccttttaagttaaaa

SEQ ID NO: 47548 - DNA, 309 bp, Setaria italica
  Peptide Sequence Number=SeqID_113522
ggggaaatgaagaagtcttgctgctggtgaagaggtgctcctcgccgcggtctttccaccaagagacgacctggccccgtgcaggctcacctgcaatgcaaatcaaccaatccaagcagcggaaaacccccgtcacaatcacaccgaaccaagcaatgccagacagatacagtggcgagtggcgacgtggtcggcgccgtgcgaagctctagttaggtcgcgtcgatgtagctgcgcaggtccagcttgggacgacgaacggcgtgcgaatccactcctctcttgtcggtgagttgtcaccgacggcgg

SEQ ID NO: 47549 - DNA, 331 bp, Setaria italica
  Peptide Sequence Number=SeqID_113523
tcgtcgacctgaacctcgacctgtccgtcggcctgccggcggccgacacgcccacctcgcagccgcagccggtggtgtgcctctgctaccgcctgggacctccgcgccggcgaggcctgcggctgccaggcgactgatggaggagtcgctgtgtttagatatttcaggccgttggagcagggccagtacatatgaatcacccagagagaggactgatggaggagtcgctgtgtttaagatagcttcatcgcggcaatttgtaagacaggcagttttctgagtaacggacagcactgttcaagggagggaaatgaaaaaaggaggttaaaac

SEQ ID NO: 47550 - DNA, 2111 bp, Setaria italica
  Peptide Sequence Number=SeqID_113524
ccttctccttcatatttcctcgctatactctcgcatggtcttcgatcttgccaagttccagggggtcgccgaatttaggagggaatagtatggcgtgagtcggtgattggattagtctgtatccttcttgcatcaaatggtagagcaaggcaaaccacgagggcactccggcgaaggcgaagaaatcgcctctcgtggaggctgacgagattggccaggcgagcgaggtggtgcttgcaagagaatcaccactggcgcccaagaacgaccaaggatgtggcgtcagccatagtgatggggacgatgaaacgcaggaatcagatgggtgcgtgcaaaatggatgggtcgactttgggcattcgctgcagctgctgctgttctcgcggcagtgggatctcgctgagagtcttgttgctctagcagatcagcagtcactgctggattatggcctgtcagttgcccttgacgccatatggttcttgcggacgaagcgggaccttgaggggatcaatggtctgatagcgaagattgtggcctcgggagcaaaggattttgcaagagcaatcctcaggacgtcactgcttgcatcttgtgttgcagcttgccaaagcaaggctatctctgtgggtgatagcaaggagatcgtcgccgatagattgcatgaccgtctgcgggattgtcctggtgccgaccatctgaaaaattgaggcaggtgtcaaagttcagaagtttatggaatgggctttgcagtgtattcatatgcatcattgttctgaagagacacaaaggtacagatggaacagcaacactctccaagaggtacagctccatttgtcagcatttagagccttcttggacatagctggtgacaatctcagtggcaagattttcaccgaggcatttgatgcggcctgcttcccccttacactcttctcaagtttattcgaacctggatggtcttctgggagttcagcagtctcgattaagggccttttatcattgctggttgaagggggtgcggacaatgtaaatcagtgtttcctggaagcagcacgttttggaagtactgagcttgtacgcattctgctggagattgggtatcagaatagcttggctgtggacattgatatggctctagtttatgcttctcattactgcaagttggacacaatggcatgcttggttgacgaagggaacgcatcctctttccttggtcctatgataaaagctgctgagcgtgggtgcttgcaggtcgtccactggtttgtcagtcgaggtgtttctgagattgagacgtgccttgccctcacaaccgctgcctccagcggccatttcatggtggcctcctacctacttgaacagatcccccagcaggtcctcgaagctctcagcacacagatcctgaaagctgctcgtggccagggcagcaggtcacttgacggtgtcgccttcctcctgagatccaacttcctaaaagatgccgccgcgacatacgaggcggcagacctcatcgcgaggggggccaccaatggcgagcccccagacctggtcgccttcctgaaagagcactggtcccaggctgccttcgccgaaggggtgagcgccggcgaggcgcatttcgtgaatgtcatgagggttctcaggagaggcgcatcccccatctgccttgacaacctcccatcacagatggtactcggcatcgcctacctgccgctgtaccaggcgtgtgtgagcgagtcaggtgggcagctgctgcctcagagactgaggggtgagatggtggaggcgatgagccggctcggagagccgattggtgctgagagccaggggaaggatctggtaatggctctggaacgccacatgccgtctttcttggttggatcttgagaggtttcccaagtgtaaataagctttattataagcattgcatggtccctaggtggtgtaagagtgtgcggagcagtgtgtagctgccaaactcccagtcttccagtggactggaggtagcaatagttttggtgcgtcacaggcctgatgatcgtgtacagaattttgttgtcttctgtttcagaaagaagagaagctgcctcttgattgctgttgtaaaaaaa

SEQ ID NO: 47551 - DNA, 345 bp, Setaria italica
  Peptide Sequence Number=SeqID_113525
ttcccttctccgacacgcgcctcccgccccgctctgctccgccgctcctcctcgtcccccgcgtaagccctcggcttctcgcagtcgcaaccatgaccgacaggggcgacgtgctcgacctcgccgccatcgacgccaacaccgagctcacgccggagcagaaggccgccctcgtgatgtcgctgaagaacaagctggaggcgttggccgcgaagcacacggatgtgctcgagagcctcgctcctaagatcaggaagcgcgtcgatgtgctcagagaaattcagagcaaacatcatgaaattgaagcaaagttcattgaggaaagagctgcactagaagctaaat

SEQ ID NO: 47552 - DNA, 419 bp, Setaria italica
  Peptide Sequence Number=SeqID_113526
tagtctagtatttttagcagattgagatgcaggatgaagtggtgatttagcagtaaagatgtcaaaagatggagccctttgcttatgtctcctttgctgcaagaactcttctatatcactttctatctttggtattagttgcttcattgcccgtattagccgcttctgttcttccattgacatgctgaccaaaaagcttaacattgatgcaggatcataatgggaataaattgatgagaaaccaaccaccacaacctccttcagttttttgcttttatccttaaacaaaagggcaagttttccaaaccatggcttaaggaactgactgctagaatagctttcagaattgattgtgcattttacaaaagaggtaatttgacaaactcgagaactgccagttttgacttgggagtatttct

SEQ ID NO: 47553 - DNA, 502 bp, Setaria italica
  Peptide Sequence Number=SeqID_113527
ctcaaaaatctgtgccaaaccacggccgacgatcaatatactagtacagaaccaagcaattctctcacctagcactgcaagtctgcaagaatcaccccaaagctagagacaatctacaggctagtactcgttgaagtgtatggcgccgagcttccagacgaggaatgcggtgccgaacatgatggtggtgatgagcgtgaaggacacgaggacgaggaagacgtccaccccgaacggcagctcgaaggtccacccctccttgggcatcccgcgcttgctgtcgtcgaacaggttgcccggcgcctcgggcagccgcgacccgcgccgcccgccacctgccccgcccttcttcgcgtccgcctcgcgcagcgcgtccagcaccccgctgccaaactccggcttgcccgatttcgacggcgtcgacgacgccccctttgccgccgacggctccgcgtacttgcccagcacgcgcgccgcgcgcagtcgctcccgacgaccgtac

SEQ ID NO: 47554 - DNA, 620 bp, Setaria italica
  misc_feature (582)..(582): n is a, c, g, or t
  Peptide Sequence Number=SeqID_113528
aaattttgtttcttggactcttctccttgttaggttgcgtcctctgcttctgattggaggccgccatggatgaggtcccgggaaggagtagctcagtgagagctacaaggagcatttttggggaaagcatcggcgggagtgggaggaagctggagaaggacaggccaagggatgttctaggactagagaatttgtctccagaaatcaagcagctcgcgaaatccagcatggataggctgaatgaacgcaaggccgccgtggacaaggagagaacaggcgccgagtccgagctgtcgagggcgcgcgccgtggccaaggagctggagcgccagatcgagcagaccaaggccagggcgacgtccaagagatcagaggcccaggcaatgcgggcgacaggggcaagcaagaagggaacggacgcgccgggctcgcaggaggagcgcgacgccgccgagatcgaggaggtggcgcgggagctggaccgtgccaagcaggagcttcgcaggctgcggctggaggtgaggtccgcggcggaggcgaaggccaaggccgagagcgacatcgtggcgtcggcgatcaacntccagttgaacctgcgtgccgccgacgagatgaagcgg

SEQ ID NO: 47555 - DNA, 971 bp, Setaria italica
  Peptide Sequence Number=SeqID_113529
atgggaataacagcagctacagattatcagcaggatgatctgctgaaacactaaatagcctagccccatgcatttctggggctgtttctgagtcaataaagcaccaccacctgcagcagaatggagtccccagctaaacttgggggcactcaactacattgaagataataaagacaccatacatcggtctctttgcgataagcaccggtgggtgaattttattcgcaggccagcttggtgtcgaagctgctcaggcagatggcgaaggcctggaatgctgacagtgggtagcggtagtccatggtgaacatgtccttggcaaccttcccgaactgcagtatgaccttgtcttgatccggcgcaggtgctggggctggctgggatggggtcggggctcccgcggcaggttgtgtcgccgcgaccagttggaagttcttgaccgaggcgacggtcacccggccacggaagttgaggcaccagcactgaagttgctcatgccatcttggagccttgttgcggaggatcaaaggcctgtcattgcactcttcatcgtcaaacaatgcccggccttcactccctaggcccaagcctgttgcaacgtcagagaaccgggcactgctgaaatgcatagaatggtccataacagatgactttgacaaagagacactgctgaaggatccgccaagagagtgggcaacaatgctatctggctggcaagggacactgccaccggcctcaaggcatgaggctggtatggagtgcattacacagttcatccgccttggacctcgagttcccaagacattcagctcgtatgagacttgtgctatgctgtacctgctgcgagaaacctttgttgatgccttcttggagtagaatccttggcacaaagtttgtaatctatgatactcaagaccaaccaataacaaataagaacaaagaactaaagtaagaactaaacaaacaaagaa

SEQ ID NO: 47556 - DNA, 1419 bp, Setaria italica
  Peptide Sequence Number=SeqID_113530
ttcccggttccttacggttaagttttgttaggttcttaccttagttctacttgtaagtttgtcttctattgtcctattcttggagccttagttagacggaaggaatacaaaaggcctgtcattgcactcttcatcgtcaaacaatgcccggccttcactccctaggcccaagcctgttgcaacgtcagagaaccgggcactgctgaaatgcatagaatggtccataacagatgactttgacaaagagacactgctgaaggatccgccaagagagtgggcaacaatgctatctggctggcaagggacactgccaccggcctcaaggcatgaggctggtatggagtgcattacacagttcatccgccttggacctcgagttcccaagacattcagctcgtatgagacttgtgctatgctgtacctgctgcgagaaacctttgttgatgccttcttggagtagaatctctggcttgttttccctgactgtgtagcactagctgcattgtatggtggctgagtatcatagattacaaactttgtgccaaggaaatttgacctcaatttcccaatgtatgtgttggtattggtagacctagatacattgccagaattcattgatattatatattctgtacatgttggacggatgtttctttttgctgacagaaggaatttgccattttcgacaagcacggttgagctaagacaaaggtacaggtagtagatttgtgtagatttatccctcttaatgaaacactggatagtcccatctcgaggtccaggctgcttcagggaaacaggaaaagtgatcttcccagaaaactctgggctcttgacaatctctctacacatctctctccatgttctgcagacggctgcacaaacaaccacattcttcctagacggccatgtatcctcactggcctccaacctctcaatcacatctcgaagtagttcaggaggcaagctagcccagcagctgctctgtaccacaggcacggggtcttgcagctcatggacagcgccatgagatttccctctgcgatgacccagaagcctgacctcgaatcccctcctagataagctcccgaagccatccctcacatcacgcacgatgctacgaaatgacatctactccagaaggaaagaacactgctgaagtaccaaacaggatctcctagagatggacaagcatctcccttagctagctcgggctggctgtaggagctgacgactgcggggaacggcgcggcgggagcctggggcccgggccgagcccgagctgcgctaggctgccgggccggattcgtgcggcgccgccatccgggtcagaggagcgaggggggagaggaggaatggagagtggtggtggctggtgggagcctgggggattggggaggagagccaggcagccagccg

SEQ ID NO: 47557 - DNA, 489 bp, Setaria italica
  Peptide Sequence Number=SeqID_113531
gcgcatccttgcatagttgcattgttaggtgttcaaaactgatcggccttttgttatgcttaataaatatgattttgtggctgcgcatatgtttttgcaacaagcttgttatgtcatgaaaacattgacgcttcttctccttttttgaataaacagcattggcacttctcgtcaacactaataatatgatgcctttttaattcaataagttcagcctgataaccttcttgccatagagattatgggcaatgatagcactcctgatttaaattctttcccttaacgattggaaaatgctggtaggaaaaaaagtgttggttgcttgaagtctggagtattaccaatcgttactaaaaacaacttgatacccattatgataacataagattttctgtaatattttgaactgttgctaatgtttgctgtatcatgttcattttataaccatttcttgatgttttcttctagcggagactgtaatatacagaa

SEQ ID NO: 47558 - DNA, 267 bp, Setaria italica
  Peptide Sequence Number=SeqID_113532
ttccagaataatctattttggatcacacggtgaaagcagtttaacaactaaccgaactgtatgctcctgaaaattccaaccacgtagaagagtggctccacataaaacagaggcagcagaaacgttatcgtcatctgatccattaactgcaacttcaaataacttttcgacctctgccaagcttccatcaagtttatgagctgggagcaggagttgatgccaacatattaaccagtgactgaaacaaatatagctgatattgagata

SEQ ID NO: 47559 - DNA, 445 bp, Setaria italica
  Peptide Sequence Number=SeqID_113533
ttaagacaacttaagcaagaggactagtattaacgagaacaaagcgtctaacagttttaccgtaaaatcaatcaacacacccattgcacatacacgttgtcagattatgtacagacggcggcagcgacgagccggcggacaacgccagccccgccgcgcgcatcggcgtcaccactcgctgcccaggatcagctcggcggcggtgcccatcgcctctggcccggcgcgtcggaggagcgccacggcgagctcgtcctcgccccactgccgtagcccgctgctcagacgcttgagcaccggcaggtccacctcctgcacccagcacggggtgcactccaccaccagacccaggaacccagcgacgtaggcgcgccacagggaggggtcgcagcccagggagatcttgccgtccagcgcactcgccaggaactgcaggtgcgaccgc

SEQ ID NO: 47560 - DNA, 3124 bp, Setaria italica
  Peptide Sequence Number=SeqID_113534
taacgtaacctaacgaaccccaaactaagaaccgtaagacccgactagactacaagaacgcttgagcaccggcaggtccacctcctgcacccagcacggggtgcactccaccaccagacccaggaacccagcgacgtaggcgcgccacagggaggggtcgcagcccagggagatcttgccgtccagcgcactcgccaggaactgcaggtgcgaccgcgtgaccctctcacggcgccgggacaccggcgtggggtcgatgccccaggcgaacatccccgagtacaccgcgaggtaggccagcgcgtggccgcccagcttgtacaccatgcctccactggcccacccttgtccaggtcctgcacggacaggaaccacgaggggagcatctcctggatcaaggactggacgagggctgtgccgccggacagccagaccagcgtcgcccccagtgatgccgctaccttcacctgcgtcattgcagcggaaagagaaacctggccatgcctcatcccgtacttggtcttcttcagtttgtctgaccgttgtttgggcacggttgtttcagcgatatccttcactgagagcatcaggaggttgagtatgtcttcggcgagtatggaacagtccttgatgcaccggaatatccggaggtagaggattcctggcgcaaccggtgagaaaccaccagggcagtatccgtgacccagaaggctggcgacaccactacagccgcataccgatgtggatgacataccaagggtagcagcaaagcagcttcggaggagctggacaaccgcatcgttgttgtggtggaacaccgtgcgtgaagctgaaaatattaggaaatcgctccaccgcttcaccttctgggtccacagtgctgcaacaatagccatgcttggccatgggcagcttgcggcgaggttctctagagctgggccagcaaggtttaggaaacgctctgatgccttgtcaagcttgtatgtgattgtgaggctcacaaaagcagccaatggcaatggaagtgtacccgaagagcttcctcctgcaactagccttggaacatcaacaccggtagtggctacaattttcttgatgtgctcttcgaccatggatagattcacagaggggctaggccaatctgatccattcatgaatgctggcttccaaacaccccgagttacctcagctgaaaagtagcttactattgtagcaagagatgcaggcaggaaatcagccagatccttcaggcctgtagccagttcacgtggaaatagtcttccatgggaacaagcagtaagagcagcatcaaccacaaatggaacagcttccagtatctcccaagcaggcaactgaggccaaagatgtgaatcatcaccaccaggaccagaggagttacttatgctgctacttccagataaagaacctatagatgtgcctcctttattggcctttctgaacatcagattgagaaggctatccacattgttacgtacaggtgtcccatgagcaagtccagagagagttgaggccagacaagcttggtgctgccgataccataacttcaactttggaaacgaatccataaaaataggatgctcgcatgatgggtgtgaagtaggaatttgtagttgcctttgtccatttcgttgctttgccaaactgctggatgataaaacctgggaatttcgcaacagcagaagatactcaggagttagctgtgagccaactggagcaccatctcccattacacaatactcaagtggtggatggttaaacttccagagtctcaacagaagaatgaatgcagttgagaagactgtgtgagcagatatttcctctcctgttctcagagtccaggaaacactaggagaaagacatccaaaaacttcacatattgccataagagcagcagcaagctctggaatcaatccatggaatgagaatattggagcgtagtccacagctgatattcctgaaagaataacattgagcattggaccaagctttatcaattggctctctcttccagaataatcatttggatcacacggtgaaagcagtttaacaactaaccgaactgtatgctcctgaaaattccaaccacgtagaagagtggctccacataaaacagaggcagcagaaacgttatcgtcatctgatccattaactgcaacttcaaataacttttcgacctctgccaagctgggagcaggagttgatgccaacatattaaccagtgactgagtcaatggcgcacccttcatgaaagatgaccacccagcaagttgactagggagtgtatgagaaacggagttgacatgattactgatataaccaggccaatagtaagctgacgtatccaacaaattccttgagatacatgactccacaatcaaatgtcgcatatttccagcataattcatcccattgacattttcaatgtagccattattaatactgattcctgaaatgaacattgcagctttggtagcagcatggttggctgcttggatgacacatggaggaggagcaagcaaactttcataatcaccaagtatctgcaagcttagcatcaattcgtcccgtagattaccaattgatttcttttcttttgcatgactgttgagttctttttcattgcaaagtgaatctgcttccccaattatgtcagcaaccacaagtgttgtgatagacaacaacatgcatagtcgtgtgtctaggtgaggtacaggaccttcaatcggttctctttccctttgtacaaggcgaagtgaagccacccaaagggccaagaaagcatcatgccaagtcgatctattgactgattgaagagccttgaccaaaccacttaaaatctcaatggaatttgttgcagcaattgaaccatcaaggcaatcttcaagatacaaatcgataggaatccattgtgcagaatagctcgcaccaaggcatcgcccatttggtgaagatagagggttagaagccaatattgggtggaaccctttacgcatattatgtttaatttctccatatacattgcaatcaccaagaatcaactgctgaaatggttccaaggatattgctgaattttgtaaggtagatgagacatacgtcactgaga

SEQ ID NO: 47561 - DNA, 325 bp, Setaria italica
  Peptide Sequence Number=SeqID_113535
ggccatcttcgagaagcagctgaggctgtccggcgaggcgaggaagcggcacggcgccggcgaggtcgcgaactacatcgccgtcgacgcgtaccggctcggtgagttcccgttctggctgcagtgggcgtggtgcatgccggtgcagctcgccctcgccatcaccatgctcttctggaccgtcggcgccggcgcgctcccgggcctggcccccgtcgccgtctgcggtgtgctcaacgtccctctcgccaggatgctacagcgctaccagtcgaggttcatgtcggcgcaggacgagcggcagcgcgccacggcggaggtgctc

SEQ ID NO: 47562 - DNA, 1175 bp, Setaria italica
  Peptide Sequence Number=SeqID_113536
ttttttttagttaccttaatttagtcctaattaattccctactaagttaattaggagaaggaatgtaaatgagtcagaacacgaatagtagatgacatacattgcagcttagaagtctaaacccggtggcggtgggcaatgaactagcgcccatgttcagaaagccacacgcagcgttcaagtaacaattgatacaagcttgcaacgcacaagagggcacagcaatagttcaccagcccattcattcttgacatccagctgctaaactactcgttcttcttagccttcaggttccctttgggtatcttgctcaagacaccttggtcgagcttctgatactgatcttgcagcagaccaagaaggctgtagaggaaattgtcgacttggtcttcatacttctcgtagagcactggaagtgtgtgagcacaaacaaatccaatatatataactgtcaggaaattgcaccaacttccaatcactgcagcagcccacagtccagcaatcgccactacaaaatgcttcaagtttctttcacaagacagatcttgaaggaagctcaggaacttgtttatttgcgcaccaattgcaacagcaatgttcacaaacagctcatcaggcaactcaactcggggcacttgagaaggagatccgcttagcatgtttgagaaattggaccagacaaactggacgaccattccaagaacaagggcaaatgaaacgattgtcaggaagtggtaatcaagccactcgaagaaaacccagatagctgttgcaacagccagaacgcttgatgatatcttcttgttcctccataacaggcaatcagcaggttttccaccacccagagctccatgcagggtcttctgacgaccaaacagcttgttcttcactttgtcagagaccgagcctggaccaaattgcccagacttctgcttaggaagattgtcagcaatggtgtcaatgatgctgctcataatcttttcagttgcactctcagaacgttctgacatcctcaataactttaagctcacggggaaagagcagcgggggtacgaagacgaagcgacggtgagccggcgcgccctctccgatcgcgaggagcaggagtcgagcacgagcagcgtgccgtggaaaaggctggttggtggctttgggggaagaaatcctactagcag

SEQ ID NO: 47563 - DNA, 735 bp, Setaria italica
  misc_feature (25)..(25): n is a, c, g, or t
  Peptide Sequence Number=SeqID_113537
ttcgatggcatactaagattttccnaaggagtccttatcaactgcaattacggattcaactcacgaactagaagtatcaaaagatggatgttgtatgagaaactgactattagatggcatctcaaaatatacaaaagaaaagtttccatttgatacatggtggaacagaatggctcccctaaacatcataaggtcactgctcgcaccataagagcaagttatatgacgaggttgacagctttaatccttcgatgttatgaccagcaagcccagtgcacccatcagcaggtacttaataattggcttctcagtcatgacaatcgtaacccagccaacatatggaagaaagcctacagcacgtcccatgatgtgatgttgctggagccaaagctgaccgtgtgcatataaaagtcggtcatccccaaaattattgtcaccttttgtgaggatgtcaacttctgcagtgtcctgacgttcatggaccttaatcacacggtgaacaattggaatttcacggccatcgacattaaaaacaactatctctcctgtgcggatagggtctttgctcatgtgcaaaacaggatatcaccccttttaaatccaggctccatgctaccagagagaacaactacaactggggactcgctgcccgtacaacaaactaatacaaaccccttaccaataatagaatacaaatagactagaaggtaaacaaatacaataaccgaaggacta

SEQ ID NO: 47564 - DNA, 956 bp, Setaria italica
  Peptide Sequence Number=SeqID_113538
tttttttttagaaatttaagatttcctttggtattcagcatggctgttggtgtacaaggcattttcctgtaattaagtcatgaagagtcaacttcatcaaatgcaacaaccaacagctgattcaattcatcaactagtctgtaactacggaaaagtggatgctgcatgagatctggctatccaattagagggcaggcgcccgccaaatagacaaagaaatcttctcatttgatacacggtgaagtacagaacagattctcttaaagccttccggtcagccactgctctatgctgttgcaccacaagagcaaaatctacatgctgcggaagtttgacatctttactcttttgatgttatgaccagcaggcccagtgcgccaatcagaaggtacttaatgaatggtttctcagtcatgataattgtaacccatccgacatatggaaggtagcccacagctcgtcccattatgtggtgttgctggagccaaagctgcccatgtgcatacaatagtcggtcatccccaaaattattgtcacctttggtgaggatgtccacttctttagtgtcctgccgttcatggaccttaatcacacggtgtacaattggaatttcacggccgtcgacattgaaaacaactatttctcctgtgcggataggatctttgctcatgtgcaaaaacaggatatcacccctcttaaaaccaggctccatgctaccagaaagaaccactaccactggggactcactccccgtcacaactatcaatcccttccatatgatcaatgccgaggtaacaatcatgccgaggctgatgatctgcgagagcacgttgcggacctgcatcgagcggatcgactccagcgtgtcgccgacgaaccccatctgtcccgacggcgaactcacgacgggattttattttatttttgcgggcaactcacgacgggatttgggaagg

SEQ ID NO: 47565 - DNA, 1481 bp, Setaria italica
  misc_feature (1)..(41): n is a, c, g, or t
  Peptide Sequence Number=SeqID_113539
nnnnnnnnnnnnnnnnnnnnnnnnnnnnnnnnnnnnnnnnntttttttttttttttgttttgaaaggcaacacaccatggtgatgaattgatgccaatttttattagagtttcaccacccatgatggatgatgaattagtttacacacatcaccgaaatctaggaataaggaaacacctaggaacaggtccaaacataacatggatcatactgctagcacagcattacaagcaacagcattctagtagtaaatacaacaacgcaaggttctagcaaacatctgatcaggggtgttctcagcagttgcacaaactctataagtccgcatgacatcctgctagtccgctacaagcattccatcactgatgaatcttacttgccctcctcgacaattctgacgacatttttgacaccatccctcatctcctttgggatggctccaccttctgggagatcaaacttcctgcggctaagtgtccttggcttccctggtggctgagggtcaacaatctccaacatcccctcaagttcctcaagcatcgatctcttggcattgcgaaccatgtagtccggtccctcaagggcatcaacggtcaagagcagcacaatgattttctcagcgaacctctggcgctcttcagagtcatgggcaatgcggcggcggtatgagatgttgtagaagaaggacctgatctccttgagcttggctttggccacagcaaggtcgcggaggcatcggagcacctgggagcgatgggccaggtgcgccctgtagctcatctgtatcagcaatgcagcatcttgttgggatagttccttcttctttcccttggcatggctcatttcaaatgccttcctgatggcgacacatcccttggtgttgtcctcgatctcgacgatctcgacgttgcccttcttcttcttcatatccttgggcttgttctcctccttgactttgttgacggcggcggtggcggccttgtcttggtcgtcgtcgtcgccgtaggtctcctcgacggagtaggagttggaccatggctcgagccaccctttgcccttgatctccttggcccacttgaccttggtggtgccggcggcggatgccttggactcccacttccacttgcggtcgaagccgtcgtcgttgggggtcttgagctcggcctcccacttgtaggccttcccgccggcgggcttgtcctcggcgacccacttgaccttcctgccgtcggcctcggcggcgtaggtgtacttgcggcggggcgccgggggtggtggggcgagcgcgcgctcgagcgcggagacgcggtggccgagcgcgtcgaggaggaaggggtcgaagaaggcggggcacgggggcgcggcggcgcggggagggaggaggaggtcgaggtcgaggtcgaggtcgaggtggaaggtgtcgatcggggatggggaggtgaagccgagggggcaggaggggtggtcgtcgaggaagcggt

SEQ ID NO: 47566 - DNA, 323 bp, Setaria italica
  Peptide Sequence Number=SeqID_113540
aaagtgataagctgccatcgttcggacgcttggcgcgcgcccagtacacggtcgttggttcttcgttcctgcctctgttgttgttgaggttaaccccgatggatttggtcgccggaggagtgctgcacgggcgcttgcctatcagggcaccgagatttcctccagtgctccgctcgttgcccgcccctaccgtggcggtcagtgcccacgcccatgcccgccaatcgttcgtcggaatgcgccagcggtggtgccgttcgccaagaagaagaggaaggggtatagagacgacccgccggatgaggaggcgggggcggcggagg

SEQ ID NO: 47567 - DNA, 443 bp, Setaria italica
  Peptide Sequence Number=SeqID_113541
ctctcaaagaacaaactactaaccagagataatctagccaagagaagaaaactagaagacaatacttgtcttttctgcgctgaaactgaaactgttcatcacctgttttttgggtgtgtggttgcccaacagatttgggtaggactagctgagatagatggcacagatggctttagggattttgaatctgtggctagattttggataagtgataagaagcattgtgtgatgaatatgttttgtgccgcggccatgtgggccatttggaaactgaggaattccttatgttttcagaactacaggtggaaggatctctcgcagctttggtggagtatgtcaggaatgctcaagaattggtccctgctgtgccctgcaaaaacatctggagagatacaatgcgtggctgagcagcttggaggcactggtggcgatggccggggagg

SEQ ID NO: 47568 - DNA, 503 bp, Setaria italica
  Peptide Sequence Number=SeqID_113542
caagattcctccactctcccccacacgccttttgaggcggcgcctcggcctgcactgttggtggggaaaagaaagcctccgtgacgcgttccgttccgtcacaggcgtccagtagtaacgcccacccgcgtccgtcgcctttcctgtgccgtttcatttgccccgtcggtcgatttcgtcgccggttcggttgcacggcatggccgatttgattccctgcccggcggccggcgcgccgccgtgatcacggcgcctgcaattactaccccggcgcgggtcatgggaatatgcaccggatccggggtgtaaaggcgggggcgggtactccttgctgggagagcaaacgcaatgcgaaatcctgtactgtacgtggtaaaggtgatttggtacggagctggaaatggagggcagggatcacttcatcctgtcctggtgtgggctagtgcgcctctttctgtgattgaagcattggagagccccttcctagttcatgctatggtcca

SEQ ID NO: 47569 - DNA, 1204 bp, Setaria italica
  Peptide Sequence Number=SeqID_113543
cagtctcagttttttttttttttttagttatataatattgtgattcttaattaacatttccacaagccaaaaagaccaccaggtgattgtgattcttaagtacatccgcaagccaacaagccaaaggtagaaataaaaacgccgttagaaatcaggatcaaacatttcttttttgtttttttctccttgggtgatcaagcatctatatttcctaatttttgtttgccttttcttttttttccctccttttggattaagctgcgattctttttccattttcagttttcttggcactaaaaaggtagatgatgcaaccttcgatgccgcatgctaggaaggtccaaacggttcatatttgcagacaggacaggtcttattgaccttgagccatttggcgacacaagctgcgtggtagtaatgcttacacggcaacgttatcatactttctcggtgtctgaaagtagacaggcagatagtacagtcttcatggtttgtcttcctgtagaaaaaccctgatgccttgtacttccatttctgcagataggagataagctcatcggataaacctctgtcctcagtgcccacagattccacgagtgcttgcctttgctcataagtcatgttgtctggatcatcatcattaccgtcctgcctgtcagcctcttcgtcgttatggtcatgatcatcgtcatcgtcagagtctgatggagagggtacgcagctgatatcgtcatcttggtcctccatctcctgcagccgcttggcgtactcaaagtccgaggcgatctgctcttccgttcctgaaattccggaagcagtcgctgcttctgctgcagcagtgctgctctccccatggtgatggtagtgctgtgactgtgaattatcagatggggcacctatcatgtgattgtggttgctgtatggttcttccaagaacgatcggtgcaaaccctcctgattaggaagaagatcagcaatcacaaactggagcaggtcgtcgtctaggtcttcaaggtctgcttctcccgtgctgcgcgtgggcgagttggcgtagtgcacggtgatccttctcagggcgccaggctgccccacggtggccatggctggccggccaccgagacaagcgtgaggcaaagctagagccggttacctcggcttgtgcctcttctccgtcagccaggcgtctcgaggtttgttgaatgga

SEQ ID NO: 47570 - DNA, 714 bp, Setaria italica
  Peptide Sequence Number=SeqID_113544
tttttttttttttttactaattgaacacgcgtgcacaaaatcaaactgatttgagttattacagcaaattcaacacagaattttacattcgtgcaaacgtaaaaattacaggaacatgaacatcttaaaaacattaaaataattactatgtttttgacaaatgtaacataaaaaatagtaaatttttgcccaagttgtacgcaaaacatgacctacatatgtgaaatgtagatctgttttgagttttggactaaactttaaagctactggttgaaggcaacaaacagacaaaaatcatgtattcatgtgtgcttgttgggcaacttcatatacctatatcagtgagaaccacatgatcaaattggtgaagcacaagttcaacgatcaagtcttatctgtgtgaaagcctgcaactcaaaaaattaaggataagagtactgcattgatctcaattagttaactgtatttgagataacttaatactgaacagtagcaagctgcaaaaacattagatctgatcattgtgttctaaacctattattaatagcattgatctcaattactgaactgccagttaatttagcttcagttaacatgtgaatgaacatatctaagtcaaaagatttgacttgacctagatcataattggaaaaaaacacagcacaacccagttcatgtcaacaccttacactaggcctcactcagttcataaaa

SEQ ID NO: 47571 - DNA, 1466 bp, Setaria italica
  Peptide Sequence Number=SeqID_113545
ccacgcgctagcgccacaccgcttcctccccaagctcgcgtctcctcggctctcggagtcggagctaaggagccggaggcgccccgcgggcaagcaagcgatggcctcgccggcggcggcgacgcggcacccttcccccaccgtactcgcctccacccctcgccaccggctccgcctccaccgccgtggatatccaccttcaaaactgggctaccaaacatcacggttaaaggtcaatgcactttttgggtggcttagggggagacacggcaatgcgtgaattgatccctcctgctgaatcatatacgctctcagggtcagcctcagaggtaggtgcggagccacgtgaggtgtctatttctgtggcttcctctatcatggacatccctgctgcagattgggatgcctgtgcgtgtgatccagctgatcctgaaaagttcaaccctttccttacccatgcattcctctcaagcttagaagaatcaggttctgcagtgaaggaaacaggttggttacctttccatgttgttgcacgggatgagactggacatattataggtgttgttccactttacctaaaaagccattctagaggagagtttgtgtttgatcagtcatgggcagaagcttactacagctatggccttgaatactacccgaagctccagtcttgtgtgccatttactccagtaactggccaaagaatattacttcgaagtacaccataccgggatcaagtttttgatgcactaatcaaaggtttgaagagcctgactaccaagatgaatgtgtcatcattacatattacttttccatctgaaggtgaattcagcaaattgaaggataatgggctgttacaaagaattgggttgcaatatcactggagaaatcggaattacaaaagttttgatgagtttctgatggatttgaagcagcccaaacggaagaatatcagacaagaacgtaaaaagattcctgctcaaagtttgcaaatgaagagacttcgtggagacgaaataaagagcagccactgggacaccttctacaaattctaccgtaacacaactgataatcactggggcagaccatacttgacaagggaattttttcacctcttaggagaaaagatggggggcaatgttatgcttgttgttgctgaaaatgacgataaagttgttgctggtgctcttaaccttattggaggtgatacactgtttggtcggctatggggatgcctgccagatgcttattttccgaacttgcattttgaagcttgctattatcaggcaattgaagcagccatagagttaaacctgagtaaggtggaggcaggtgctcagggagagcacaagatccagcgtggttacctcccagtgacaacttacagctgccactatttttcagatcctggttttgggctgctattggaaattttcttgcacgtgagacggctcaggttaaacatt

SEQ ID NO: 47572 - DNA, 244 bp, Setaria italica
  Peptide Sequence Number=SeqID_113546
gcagagcatgatgactgactgagggatagctgaatagctggtaaggcaagattgctgcttctgttgcgaacaaaccctgctctctgttggtctttccacaaacacgcattggtttcaggctggggggaagacaggactttgttgttgtgggctaacctattgttagcgcatttttcaccgttcaaccaattgttcatactgtacatacacatgtagttctgcttgtggcattgtattctaggga

SEQ ID NO: 47573 - DNA, 362 bp, Setaria italica
  misc_feature (90)..(90): n is a, c, g, or t
  Peptide Sequence Number=SeqID_113547
agtataagactgctagtataacgatcactgtttctaaacaaaataggggtttagggaaaatgtaaatttcatatcatctaagggactaanatttttttggttgtcacccagtgcatgtagatgcatgctgttctgaatcgtcttcatttcgagtcacggttcctcggcgcgccattctgctcccgctgctccagctgatagaacgggatctgctcgccctgctgcttgtgcatctccatcatctggtcctggcaacggagctgcatttgctgagatagattgctggacgagcttgtgtcgccgagtttcaggcgctggacttcagtcgtcaacgcctcattcagtgcgtcgcgcagctgccg

SEQ ID NO: 47574 - DNA, 593 bp, Setaria italica
  misc_feature (230)..(230): n is a, c, g, or t
  Peptide Sequence Number=SeqID_113548
tactttaggtaacttaggtacctaaagtactttgcaaagcgagatagcactagcttcaatttcacccacatgagaggcacaatggggtacatggcaccagaatgggcattgaacttgccactcaatgcaaaggttgatgtttacagctatggggtcgtgcttctggagattttgactggaattagggtttcaaatggcataatgttaaaggaaagacaaatagattttcnggagtttgtccaggaggctaaacatattctatcttccgggaatgtcagtgatattgttgatgataggttgcatggccattttgatacggagcaggcaattgcaatggtgaaaattgcctttcatgcctcgaagaaagaagcaagaggccacaatggatgaaattgtcaaggtgctcatgtcatgtgatgatgaagacgactaccatcctgcttattcatattaacttgcaacagaatcaaagaattgagctgcaggcataacaagtttcatgctaagtgtacctttgatcatgttagtataggaacagtgagacaagatgaaaagagctggctgaatgaatgtactgtaaaatgtggagatta

SEQ ID NO: 47575 - DNA, 536 bp, Setaria italica
  Peptide Sequence Number=SeqID_113549
ctcgctcataaccaaccaccactcatactcctcctcctccttccctcccctttcccttccgtgttccaagagaggcgcatgctccggttgctagcttcagttccatccccgtagctccgccccttctccaacaatcgcctttcagaattcgttaatcatccgatcgatcggccgtgcagaagaagccggaggctaacagagtcgtcatcaggtaggctaagctagtgtccaagagaagagagatacacacgcagaggaggacacagtcaagctgccacactgcggcgtgacttggactagccagtgtgaccggccggtagctagcttgcttcttctcggtctctactccggcacaagacaaactaccagcaggtcttgttgttggtgccgtgccaatcgaatcaactcccatcatcagctgagagccaagacgacagacatggcggcgtctgcccacctgttcggactcggcgacgcgcagatgcagccgcggccgccgcagcagcaggcggcgccgcctcctcctgccgcgccgc

SEQ ID NO: 47576 - DNA, 1340 bp, Setaria italica
  misc_feature (1)..(82): n is a, c, g, or t
  Peptide Sequence Number=SeqID_113550
nnnnnnnnnnnnnnnnnnnnnnnnnnnnnnnnnnnnnnnnnnnnnnnnnnnnnnnnnnnnnnnnnnnnnnnnnnnnnnnnnngtttttcaagaggaatacaacagatcattaaaactctattgatgctcaataacatacgaagaaaacagccataacacaaatattctcgaaaaaaaattgtactatacatatgaaccagctactccgcagaccgcagacaacctctatcaaccaggatggatagaaagatgtgtactctacatgtcaggcaccagtgcaccaactcatcatcgtggcataacgatgttccaatcgtacgccttcacatcaaaggtggactcgtgaagagcttgcctaagttctttggcgcagctcgggttcttggcaagcagcagcgcgaagccaccaccaccggctccgaccagcttgtagccgcagcagtaagggtccgcgaaagcaaatagctcatccacaaacttgttgctgcagaaagggtctagctcttgatgcagcctccaggcctccagcattatgttgcccagctcatctatatcaccgttcattagggcttccctcccaatttttggccaactcagcaagcctcttgatgctggatattaggatgttatcgcggcggaggtatcgggttacaactttctgcaggacttggtgggcgagccttacttggccggtgaacacaaccaggagacgttgctctaattcctgaatcaactcaggagaggccaacagcgggacaacttgcaaccgtaatggttgtcctggaaaactctgggtgcatttgattccaggatataggccaccgatttgatcttgccatccaccaccggtgcccattatttgctctaccactaacacagctctagcaacattatcatcacttccatcatcttccataacttgaaatagacccttaactacagcagctgctaatatgctagaagttcccagaccacttccgcgaggaacatttgcccatgtccaaatgttcaggcctgattttgacaatattttgtggccaaggataccagtaacaataagagcagacttgactaaacggaacgggtcactttctttgaatggagatgaaatagatgccagatcatcaatatacaggttcctgccagcatcatcttcgattgaaactccaaggtggtcttctgttgtctctatcatagcaccaaccggaaggcttccttccaagctaattgccatattcaaaacacaacctggacgctccaagctccatggaggtgtatcactccaacccccaacaaagtccacacggactggtaattctacaaaggccttcctaggatgc

SEQ ID NO: 47577 - DNA, 392 bp, Setaria italica
  Peptide Sequence Number=SeqID_113551
agtaccgaccgtgatgcccctgctgccccccgtctcgaacaggtcgctcgtctccgcgaacggcgagctgatggcgctgatctgcgtccacagaacaaaacaaaaaacaatcaagaagagccaatctgtagaagaccagtcgagcaactagaaacgcattatctcgaggtgaatggggccaagccgggaacgtgttgaaaacgcgcgctaccaaacaggcagtcacccgcggggttattgatggttcgccattgatgcaactatgcaagcaaaagtttctttacttgcgggcgatgacctcacctcactgagagtgatctagcaggcgacgggcacaccagcaccagatttttctaaggcagccagtatttgccgtaaccaaccatgctatt

SEQ ID NO: 47578 - DNA, 228 bp, Setaria italica
  Peptide Sequence Number=SeqID_113552
gtttgctgcaggccaagggacattgaagatttgtcaaggcagcagtaaagatggttctcaagacagagctgtgccgtttcagtggtgccaagatctaccctgggaagggtatcagatttatccgtgcagattcacaggaagcagcacaagaaggacatccatgctgaagctgctaagaagaggcgccgcaccaccaagaaaccgtactccaggtcaattgtggtgcca

SEQ ID NO: 47579 - DNA, 251 bp, Setaria italica
  Peptide Sequence Number=SeqID_113553
ggcggcggaggcgctagggtttgctgcaggccaagggacattgaagatttgtcaaggcagcagtaaagatggttctcaagtatgtattttccctccttgctcatatttatgttgttggttatatcctctatgactatgatggatggatattttgatacgtaatatgcaacggaatttctgttttgcaggacagagctgtgccgtttcagtggtgccaagatctaccctgggaagggtatcagatttatccg

SEQ ID NO: 47580 - DNA, 478 bp, Setaria italica
  Peptide Sequence Number=SeqID_113554
tttattttcctttttctttctttttggaggggaaatcaataaggttggccgccggcctcaggcggcgttgacggcgatcttcatcccggcctggcagtggcccgggaagctgcagatgaagtagttggcgccgcgcttcagcgtgacccggtcgttgccggaggtgagcgccctggcgcccctcggcgcgccgcacgagccgtaccccgccgcgttcacggccaccacgttgtgcgccttcgggctgtacctgaacacgagcacgtcgccggcgcggaagcgcttgcccctgggccagttgacggtgttgaagccccagccgctgctgtcgccgaccgtgtacacggccgactcggcgacctcgccgtggaggagcacgcagaggaggaccagcgccaccatggcggcgacgctgccgcgagcagcactgcctcttccctgagccatgtctctgtgtctctaaacgctagcagttgcg

SEQ ID NO: 47581 - DNA, 800 bp, Setaria italica
  Peptide Sequence Number=SeqID_113555
acaacaaagaattataaaagctgctgctgaattaatctctcttccctctcaaaaagagctatatctatgggcctaggcaggccccaatcatacttcatcacttcgaaggggaagtgaagaactaccaaggggctccatctacttggccttgccgttctcagctgcggcggtggtcgggttcagctcatcccaggcctcgatccaggtgaccatggcatcggcgagcttggcgaagtagggatcaatcttgcccagcttctccttcacctgcccagagaggtagatgtagcacttctggactgtgtcacactccttggggatggtcacgttctggaagaaggggatgatgtcctcctgccagaagatgcccttgtattccttcttcaagttgacgaaggggttgctagccttgctgtgccagatgtatggcaggccagtcttgacacccaggctcaagtggtcgcagatgacctgaattttatttgcacagtttaatacaatgacatcaattggaaaacatatgatttgtaaaggaagcaactaatgcaactgcagcagagagaacagagaccacacaccttcacacaccacccagcccacatgtcgtcgtagcggccaataggctggccatcacccatgagaccaaagtacatggcagggccaatgagatccctgtcgaaggcaaggttcatgccgcacatggggaacaaggttcccttggggattgtcatgacagcatcaacatacctgaaaccaaaaaaaggagttagccacaacccatgatgcagacaaaaatagtt

SEQ ID NO: 47582 - DNA, 1556 bp, Setaria italica
  Peptide Sequence Number=SeqID_113556
ggagaagctgggcaagattgatccctacttcgcctgcccagagaggtagatgtagcacttctggactgtgtcacactccttggggatggtcacgttctggaagaaggggatgatgtcctcctgccagaagatgcccttgtattccttcttcaagttgacgaaggggttgctagccttgctgtgccagatgtatggcaggccagtcttgacacccaggctcaagtggtcgcagatgaccttcacacaccacccagcccacatgtcgtcgtagcggccaataggctggccatcacccatgagaccaaagtacatggcagggccaatgagatccctgtcgaaggcaaggttcatgccgcacatggggaacaaggttcccttggggattgtcatgacagcatcaacatacctttcatttccttcttcctttaggcttgaccagctgtgtgggagcatcatagtcagggatgttcagccacaggccgtgggagacagcagtgtgggcaccctccctgaggctgaaggggtacccacgcacaaagtcagcaccctcacggtacgggtcgtacagggtgttgaagaagaatggggtggatgggctgaggaggttcttgatgtgctgctcaagagcgttgatgtccttgcccgatgggtccttggcaacctgaatgacaaacaaagacatatggttaatgtgacaaaatagcataagtgcaattatgttgcttgttgtaaaatcacgatgttgctacttataggatgacaaaaactcgcaatttgagtgcattgctcgatattactgccaatgtttcagacagatcacgatgttgagttccaccctcaacattatgatctagtggtgtggatcttacaaggtgaaaggtgaaaatttcaaacaatgtctaagagttgaacctggtaaaaggtgaaaaaaatttcacccaggtgtgaattataaagagctaacctaagttgacctgaattgtgcttactgctcggatcagatctgattcgagtatcctagtactagatccaatgacagcagagcattacaataagtttttggtctaatgcatgccaagttgtgatccgcgacgggatcacataaacaagggcccctgaccaaatgaaaaggacccctctaacgacaaaggcactagctaccagtactaagcggcaaaatcataacaaccacgggcagaggaggggtggctgctggctctgttccctcggaacgaagccactacagttactgagcacagcatgatgtcacggatcgagatccgcaatgccaaaccaccacccaagctacggatcaacggaattgaccgcgcgtgccgagatccagatctgatccggccggatctgggcgaattcgagcgaattggccccagatccggcgccaagatcccgcctttcgatcggatccaagcgtcaattcaacgagaattaaacgagaacagtaagagaagagagaagagtgcatacgaagcaatcgtcgtcgatggtgtagatgtacttcttcttggagaccatgtagccgaagcagcggcatgcgg

SEQ ID NO: 47583 - DNA, 683 bp, Setaria italica
  Peptide Sequence Number=SeqID_113557
ttttttactacgataaattattgtcttgaattatgtaaatgatagtaacgacaaatccctttcatcaactacaaaagaacaacggtatcataacaacaaagaattataaaagctgctgctgaattaatctctcttccctctcaaaaagagctatatctatggggcctaggcaggccccaatcatacttcatcacttcgaaggggaagtgaagactccaggggctccatctacttggccttgccgttctcagctgcggcggtggtcgggttcagctcatcccaggcctcgatccaggtgaccatggcatcggcgagcttggcgaagtagggatcaatcttgcccagcttctccttcacctgcccagagaggtagatgtagcacttctggactgtgtcacactccttggggatggtcacgttctggcaggaggacatcatccccttcttccagaagatgcccttgtattccttcttcaagttgacgaaggggttgctagccttgctgtgccagatgtatggcaggccagtcttgacacccaggctcaagtggtcgcagatgaccttcacacaccacccagcccacatgtcgtcgtagcggccaataggctggccatcacccatgagaccaaagtacatggcagggccaatgagatccctgtcgaaggcaaggttcatgccgcaca

SEQ ID NO: 47584 - DNA, 1019 bp, Setaria italica
  Peptide Sequence Number=SeqID_113558
taaagacgcctctcaactctcatgcgcgccgcaccggaggcggcggcggaggcgctagggtttgctgcaggccaagggacattgaagatttgtcaaggcagcagtaaagatggttctcaagacagagctgtgccgtttcagtggtgccaagatctaccctgggaagggtatcagatttatccgtgcagattcacaggtgttccttttttcgaactcaaagtgcaagcgctacttccacaaccgcctgaagccagccaagctcacatggaccgccatgtacaggaagcagcacaagaagtcatttgtgttgaaggacatccatgctgaagctgctaagaagaggcgccgcaccaccaagaaaccgtactccaggtcaattgttggtgccacccttgaagtcatccagaagaagagaactgagaaaccagaggttcgcgatgctgctagggaagctgccctccgtgagatcaaggaacgcatcaagaagaccaaggacgagaagaaagctaagaaggccgagatggcaaaatctcagaagactgctgggaaaggcaatgcccccaagcccggtaaaggcccaaagcttggtggaggtggtggcaagcggtagatttggggtgattgaggctctctgataaaagatccaatgttatgtatcccaaaagaaaattttgtactgccagttgtagaaccatatagttgcagaaactatttgtagcatgtttccaagctttactactatgcttgcctaaatttgcatcttctaagttctaatgcatcataacttatgttttatgatctagaacttctttcttccatatgcaatgtggttggagtttggcatttgcttttaggcatcacatgtttcatgctgttgcagctgtaaaattgttgcttgataggaaactcctagagttaattgggattttttacctacactatgtattgataaggatggtatgtagcttgtatttgaattgattgatttgaggaggccaagaaatcagaaatgtcttgtt

SEQ ID NO: 47585 - DNA, 1567 bp, Setaria italica
  Peptide Sequence Number=SeqID_113559
ctcagggagggtgcccacactgctgtctcccacggcctgtggctgaacatccctgactatgatgctcccacacagctggtcaagcctaaggagaggaatgaaaggtatgttgatgctgtcatgacaatccccaagggaaccttgttccccatgtgcggcatgaaccttgccttcgacagggatctcattggccctgccatgtactttggtctcatgggtgatggccagcctatttggtccgtcttacgtacgtactattgttgggtctgggtggtgtgtgaaggtcatctgcgaccacttgagcctgggtgtcaagactggcctgccatacatctggcacagcaaggctagcaaccccttcgtcaacttgaagaaggaatacaagggcatcttctggcaggaggacatcatccccttcttccagaacgtgaccatccccaaggagtgtgacacagtccagaagaagtgatgatgtcctcctgccagaagatgcccttgtattccttcttcaagttgacgaaggggttgctagccttgctgtgccagatgtatggcaggccagtcttgacacccaggctcaagtggtcgcagatgaccttcacacaccacccagcccacatgtcgtcgtagcggccaataggctggccatcacccatgagaccaaagtacatggcagggccaatgagatccctgtcgaaggcaaggttcatgccgcacatggggaacaaggttcccttggggattgtcatgacagcatcaacatacctttcattcctctccttaggcttgaccagctgtgtgggagcatcatagtcagggatgttcagccacaggccgtgggagacagcagtgtgggcaccctcccctgaggctgaaggggtacccacgcacaaagtcagcaccctcacggtacgggtcgtacagggtgttgaagaagaatggggtggatgggctgaggaggttcttgatgtgctgctcaagagcgttgatgtccttgcccgatgggtccttggcaacgaagcaatcgtcgtcgatggtgtagatgtacttcttcttggagaccatgtagccgaagcagcggcatgcggagtccttgaaggagatgcaggaggccttgggggccgaggatgcggttgatgtcgttgcggttgtagagctcgtagtcgaagccctccggcaccttgatggtcttggccgggtcgccgtcctgcacgatgatgaggtggtacggctggaagaagggccgccacatctccaggaagtcgaggttgcggatcgtcgggatcacgatgtcgagctcgtccttgagcagcggcgtggaggggacggttcgccccggggaccgtcaccgtgcccgccattgctgctggtgccgccgcgaggttccgcgcctcctccggatctcgatctctccggcccccccgccgctcagctgccgggagaagaggaagaagagaactgagaaaccagaggttcgcgatgctgctagggaagctgccctccgtgagatcaaggaacgcatcaagaagaccaaggacgagaagaaagctaagaaggccgagatggc

SEQ ID NO: 47586 - DNA, 322 bp, Setaria italica
  misc_feature (314)..(314): n is a, c, g, or t
  Peptide Sequence Number=SeqID_113560
cggaaggattcttcagtttgtccagaggaaggacgcttgccggatgcaaagcaaggtgcttcgcacattcgagacgtcttctaccggatgggcttgtctgacaaggacatagtggcactttctggtggccatactctgggcagggcacatccagagaggtcaggatttgatggagcatggactaaagatccactgaaatttgacaattcctatttcgttgaactgctgaaaggtgactctgaagggctcttgaagctccctactgacaaggctcttgtggaagatcctgaattccggtgctatgttgaaaaatntgccaagg

SEQ ID NO: 47587 - DNA, 1103 bp, Setaria italica
  Peptide Sequence Number=SeqID_113561
cgtttcagcttccaagaacgaacgaccacctggacgacgtgtgtatctgcaccttcttcttcctttcccctttcaagagaagccgattgtcttgccgagcaaccacaggaacagcgtccactcgagcatgaatatcgtgtgcaggtacgaccggtccagcgtgaagccgaacacagtgatcccggctctgttgttctccaggtatgtcactagcgcctgcctcttctggaaggagatgacgtgcgcgtgcggcagatggatcttggtgttctccagcaggtcctcgtcgtcgccggtgtactcgtcggactccgtgtcgctgtcactcgaggggtcctgctcgatcatggagttctggttggacccgggctccccttcctcgtcctggacgggcgcgatggtgcagcaggcgtgccacttggtggtgtggccggtgagagcctgcgcctggtgggtgatcttcgcggcactgttcaggattatgatgagcccggacatgagcacgactgaacatagcgcgagctcgccggtggtgaggaggttgtcgacggagtcacgtcgcgtggtgaggagcacggatgcgaactggctggcggtggtgatgagcagggcggcgacgatgaacttcctgaacctgtggctgatgaccttgagctgcctgcggatgtcgaggtgctccctgaggacgctggcgacgccggtgcgcccctcctcgacgtcctcgagcagggaccccgcgaagtcctcgagccggagcccctggaggtggcagatgaggcggaagaggacgcaggtgaggaggtagaccgcgctgcggtacatccacgacgccatctcgagggagcacgcgaggacgtcgctgaggacgtcgttggcgaagaaggggacgcggtcggcggaggtggcgtaacaccaggccttgtacgcggcctcggcgacgaagcatggcgcgacgagggacgcgaggaggcggaaggagaaggccaggcgcgccgtgtagtggaaccggacgcggtcgctcttggtgcggagcttgtcgaggtagagcaggcggcggaggccgatgcggcggaaggaggaggagaggcagaggaagcgaccaa

SEQ ID NO: 47588 - DNA, 273 bp, Setaria italica
  Peptide Sequence Number=SeqID_113562
tctcggctcataggttcctaggttccaagaaaagcggttttccgccctgcttaatatctcacaagacttgcaatggtgcttttctttattctccatagggagaaagagcatttcctaatccctatgtttaccttgcaataaaatcaatgcacaaccatactaacgtaagccttatccattcacaggaacaaaaagataaaattagatgcatagggccaaaacattaatctgagatgcctgagtgcacttaaataacctaaatttcttccaaag

SEQ ID NO: 47589 - DNA, 603 bp, Setaria italica
  Peptide Sequence Number=SeqID_113563
attgccaatgatacgggtactttcaaattcatctggatatcctgggcctcgaccatagcacagttcattcatgccattacatgtactgtgattgaagtcacaaggaaggccagtgtctatacaaaatgctcccaagacattcggactaacatctccacaatttgactggcagaatgcagaaacaaatttaggcttcttttgttgagtgctcctaatgcgtctggtaatacttgaacttggtatttcccttccacctgaggccttgtaggatgatgctaatcgtattaagtcatcagttatctcattgggttcagaaactagtgcagagactcttctcggatttccagagcttacatgagcagcctgatttgggctgacgttttcttctgcccaatcttccataaaacgtgcagctgcacctttgttatcgccacttatcaaagaatttgtacgactcattgatgttccatgggttgcaaaccaattgaaactcccaagtggaccaagttcgttgtctagaaacttgataagggtcatttcttatcaacaaaggtgacctccttgatgctggtgtaaaccgcagccctagcgcatacctaaacc

SEQ ID NO: 47590 - DNA, 318 bp, Setaria italica
  Peptide Sequence Number=SeqID_113564
gtactttctccagttttgcttctggcgcatccagctttgcttcttcaagatccttttgtccctctagtaatcgaaaagatcagatcatcaggtgaacacctctatactagatcagttttagttttattgagaaaagttggttcattgatcccgctgccacctttctcaaggaggtgttcggccagatcctcgtatgcagagttcctagtgtttttgctgtaattgactactccggagttagccagcttctcctggttgtcgatggcattggaagaatggacaagtgacccaaggatggccgcaaccagaaagcacccg

SEQ ID NO: 47591 - DNA, 1282 bp, Setaria italica
  Peptide Sequence Number=SeqID_113565
taagacatctggcaaaaagaaaaacaaaagatgatcctaatgtaatcagcaactatgatagttcatttacgtgatagtggacctagcatttcagctccacgtcagctgctctgcttggtgaactgaccagacaaagtgggccccaccaccaggctcggtcccaatccccattctcctcatcacacatccgtccccagttccctgatcatgtttgctttcagaacagagcatttgtgatttatccatcttagcttgaacagagcatctgaatcactgtcatcgggccggttgcagcggtcagagcggcttccggtggttggaggaggccatgagcacgaccatggcgacggcgaacatgagcagcatgctcgccagcagcgtgtacgtccgccgcgacgaccgccggtactcaccgaacagcaccacgccccagaacgtgctgaccagcggcagcgcctgcacggagtccgccgccgcgtaccccgccgcctgcccggccatgaacgtgaacgcgttcccgagcccgcacaccatccccgccagcagcgcgaggcccctgccctcgccgtcgcggaggtacgccgccacggtggacctcggcacgccgaccatggggtggtagagtaaccacacgttgaggccgacgctgacggcgaagcaggccagggagaagtagaagtaggccgtgtaaaccaccaggtgcggcacgccggcggggagggcgtgccactggtcgttggtggcgatgttgaacgccggcgtgaagagggcgtagaagacgccggcgaagacgacgatgccgaggcccagcagcgtgttggagcccagcactttaattgacctcttctcctccagatgaaccaggaactctgcagttccggcctgtactttctccagttttgcttctggcgcatccagctttgcttcttcaagatccttttgtccctctttctcaaggaggtgttcggccagatcctcgtatgcagagttcctagtgtttttgctgtaattgactactccggagttagccagcttctcctggttgtcgatggcattggaagaatggacaagtgacccaaggatggccgcaaccagaaagcacccgacaccggggaacaggacctccgccttgttaatccggccgtcgagaaaatagttgagcgttgtccctatgacaaccttgaggcttgatgccatgacctcggtgaccgaaagcccgacgaacgcccagccatactgtgtcgctaatgtcccgaggctaagcgtgacaccgcccgccatt

SEQ ID NO: 47592 - DNA, 608 bp, Setaria italica
  Peptide Sequence Number=SeqID_113566
tttacaagtccttttcagcattagcatgcgtgtcggcagtgctccttcctcggcgtcaattattcagaaaactgtgcgcccggtaaaccgcccatcctttccactgttccagggcacgctcgggatcggtgaaacgatcatgcccatggcttcaccaatggatcccatgatgtaaaaatgtcagtggagctgaacagttgccggttaactctgtgcaagttcttcttactgttctctgatgaacactctgcgaatgaagtcctggaatcttctcgagtagagctttggatccacggcagaaatgcagccagggttgacctggaaggacttgtaagcatgctcaagcttcttggttatgtcgtagtcttgaagaatgtcgattattccaagaagaggtagacatcccatgatcctccgcttggcgtggttatgaacaagtgtctttcattttaggagaaacttgtctaggactctccttgacctgcgctccgcctgtgcgggcatgttcttgcctaactggaccaatggtttccgagagtcaacaatgaaatctctgtccttgcatccagattccataaagcaaagctcacaaacatcacctccacctt

SEQ ID NO: 47593 - DNA, 686 bp, Setaria italica
  Peptide Sequence Number=SeqID_113567
agtgtctcctcaaacttatagcagttcttcaggaataacaatagttaccctcctatcctgtttcatttctttttatggatcgcctttcagagctaagcttaaccttgtcactttctgggaagtctgagagacaccgaaccacccttagagcgaaccaatgctgatgccttggcaagctctctgcctgcaagccaagcctgtatcatttcttcagtcttctgctctggtgcaaaacccttagctttcatctcttcgtaatactttgccgcctcttctagtcttccatttaggaataatccatgtatcaacacaatgtaggcactccgatcagggctcagcccatttgcaggcattgcactccatagcttctccacactctcatgctgcctccatcggcagaatttcctgatcaacataatgtaagtgtccatctctggctcacagcgtaactctttcatcttatctaatagatcaaacacctcaatggggtccctggccacattaagcaacgcatgaaaggtcctcactgaaggagacaacccccttcgtaacatagcatcaaacaattccattgcctcctgaacccgacgagccttgcaaagaggcccaataagagagttaaaagtggctgtgtccggggcaaccttcttctcctccatggtccggacaagcatcttgcctcgtcc

SEQ ID NO: 47594 - DNA, 271 bp, Setaria italica
  Peptide Sequence Number=SeqID_113568
tttcttcttgtcttttattgaggggttgaatcagtactctaaggcaggagatcccaccagtggagttgaactagattgagtctaaataaggaaagaaaggattcccccttacgctcaagaacatcaaagaaaaattacttgatagaaagaattgagtcaaggtgcgaagatgctcttcaagggtgagacaagagatagaaagcgcatacgacgagaggatagataaaggggcgggaccacgcccacgagggaggggctctgcactatagtg

SEQ ID NO: 47595 - DNA, 244 bp, Setaria italica
  Peptide Sequence Number=SeqID_113569
tgcatctgatatttggggacctggatgggaagaacactctacagttgactctttaccatttgatatgataaatactcatgaagatcaacgatttgctggaaacagctcacagcaggtggatgtgagaactgttgatgatatgctgaactctcctgattatgaaatccagaattcaatgagatatatatctgctcaatatagaaaaacaactacaggaagatagaaaagggggaattggacaaaa

SEQ ID NO: 47596 - DNA, 726 bp, Setaria italica
  Peptide Sequence Number=SeqID_113570
cctccctccaacccatccacctcacgaggaatccgcactcgcttttgctcggcaatttattgctcagggttcttgctgggtggtggtggtgggtggtgggagcagtagttcacaagagcgagttgttcttgtgtgcgtggttctatgcctggttgcttggcgaggtggggaggaggaggcggaccagtgggagttgaggggtgcaggtaccggcattgctgaggaggcacggggagatcaggtgatgtcggaggccgaccgggtacgcctccgcgcggcggcgctggcgctgcaggacgatggggtaagggacaagccagacgccaaggcgaacgtcttcgcggatcttggctcgccggtgtcgccgctccgaccgcgggcgagcgtggcgacgtcgtcgtcctcgtcgtccgggtcggccaagtcgccggtgccgtcgaatgctgggatggcgggtgggaggaggcactccggcgagctgatggcggagtgcaacccgccacggatgacggggcaccggcggtgcggatctgggccgttgatattctccggcggcagcagcgggggaagcggcggcggcggcggggaccgtgggagcacggcgagctcgccgatgctgaatgcgctccccgccgggaacatctgttcgtccgggcgcgtcccggcggcggcggcggcgccgcctccgccgcgctcccgtccggacgtgctcggatccggcaccgg

SEQ ID NO: 47597 - DNA, 203 bp, Setaria italica
  Peptide Sequence Number=SeqID_113571
ttctattgtaattagtcgttgtatttgacaattgccaatcaaaatctttctgcaggtgttgttcagggaacatactggctcaggctttgtgccaagttgcatctaagtgaggatgaccaagagcacttaatcctagcatgtcagtgctctagagatggcgactttgcgtttcttcacttcacatgggtggcctttcactttta

SEQ ID NO: 47598 - DNA, 656 bp, Setaria italica
  Peptide Sequence Number=SeqID_113572
acttatcctaaagaagtgccatggacttccccttgcaatatgtacgataggcggttttctatctgataaacctagaactgcacttgaatggaagaagttgaatgatcatatcagtgctgaattggagatcaatacagaacttcaaatgataaaaacaatccttatgaagagttataatggcttgccatatcatctcaaatccagcttcttgtatatgtccatttttcctgaagaccataaaataaggcggaaacgtttggtgaggcggtggattgcagagggctactcaagtgaaatgcgtcacatgtctgcagaagaagtaggagacaagcactttgctgaactttatgataggagtatgatcctaccaacaaatagagtaactcatagcaccggagaaattgattcttgtcaacttcacgatctaatccgcgacatcagcatatccaagtccatggaggaaaaccttgtatatatactggaggaaggctgcagctcgaaggtacaaggcaccattcggtcaccgtttcagtaagtagcaattgtgccagagaaaaggatgtgtacgagagcacattggactttggccacatacgatcactcactgtatttggagagtggagatcatttttaattctgacaagatgaaattgctt

SEQ ID NO: 47599 - DNA, 321 bp, Setaria italica
  Peptide Sequence Number=SeqID_113573
acgaaattacatggaaattcaccctgagtggtcagtacaccactgcttctgcatataaggcccaactcctaggtaccgtgaagacgcctaatcttgcaacagtgtggcaaacctgggcaccagcaaaatgcaaagtttttgcctggctaattctccaaaatagggtctggacttcggacagattagcgaaacggggctgggaccacaccccaacatgcaccctgtgccgatgcacgatggagactgcacaccatctcctagccgactgcagatacacaaaacagatctggaaactcgtagcccaatggttgtcacaggaag

SEQ ID NO: 47600 - DNA, 254 bp, Setaria italica
  Peptide Sequence Number=SeqID_113574
aggtagtacaaatagttaacttactaactaataaatacagcaaattaaagtgcagagaaataagacgaggttgttgtatatcgatataagaaaataatgaagtagttaaagggactgtcagtggcagagaatagttcctcaactacgtcctttggatttataagatggttcagtgtttccaaaaagtcgatgtatgtatccggttagatatgtcctgtaatcttatgtggaattgaagcaaatacgtttcgatg

SEQ ID NO: 47601 - DNA, 412 bp, Setaria italica
  Peptide Sequence Number=SeqID_113575
ggaggcaccccgagctgcgcgtcaactgcgcgcaccccggctacgtgaagaccgacatgaccaggcactcgggcctgctgacgcccgaggagggcgcggccaacgtggtgaaggtggcgctgctgccggaaggcgggccgaccggcgtgttcttcgcgttgggccaggaggcgccgttcgtgtgacatacgctgccatactgactgctggcagcgcacggcccatgaccactggcccctcgtgccgtccgtgcccgtcgttctccaagactccaacggcatgttagctagtattacctatatgcaacttcaatctgctggtttcagattgcgaataaaaccaaggaatgctgctggctctccgttgtttctattaataagcttcgctaaaaaaaaattccaaaatttggcgc

SEQ ID NO: 47602 - DNA, 782 bp, Setaria italica
  Peptide Sequence Number=SeqID_113576
catcaggaactttggcgaacatctttacaccatggagtacagcagtcaaagaacagcacccagctagctgctccagttaaatctctgaaaaacttcctggcttccagccaatcctgggtggtcttgcggaagcagttaaaaactacagctttctttgtaccagatgtaatacaagaaactaccttatcattttcactatctagagatgagcagacttgtatatgcacaacaaacggcaccactagtttttttcttacagacttgcagctagcttacatgaacggtcccattaatccctaagcttcccacgacagggtctcccgaaccatgaaagacctgctaatgtaaacctatgcctccagatgggccggcctcggttctaccagcatgtttttgctggttttcgctagaccctctgccttgttccctgcgaccttcagcctccccgtcaaagaagttctggtctgatgactctgttctccaagaaaggaatgcccatcatgctggtgcaaattgaaagcagcagaccttccagaagtcctttgtcttgcatggtaactagttttctcttgccttggaccattacttgacgcatcatccatataatagggtgaacccctagaataagaagatgaaccgatatacccaacctctgataatctcgattcagcttcatcaacctcgaccatcccccaatacccttggccctgatcatattttgagtttctaccatttccaccataagaagtttttgccatgcacctggagtccgatagaacgac

SEQ ID NO: 47603 - DNA, 694 bp, Setaria italica
  Peptide Sequence Number=SeqID_113577
ccggatattggtgctagctgttgacagtatgtgaacattgcataccatttgctgaaaggaagagctcctggccatgttcattgtccctaatcaaagaggatatagcatacaatgactttgcagcttctgctgcagaactggaataacccatgctcactaatctttccaatgctccataaccaaggatctggttttggacaagagcattattctgactggctttacccagcacccatgctgatgtagtccttattccttcatctgcattgttaagttcctgaatcaacggaagaaggcctccaagtttgtcaaggtcattagcattgtcgatgggctcaacgagaactaaaagctcttgcagtgcacgctggcggtcctccagagaaacagaggaattatttaagtcagcaatagcaatcttcatcaagtcagcatctgatggcatctttaacttctccatcagctccttaatctccatctgccgcttgagtaactcatccgctgataacctctccaattctgcagctttttctctcaacttatccgggtcagagttcccaatcgcccactgcagcatgccatccagcgaatcgaactcgcgcccctggtcccccgtcaccgactcctctcctccgccgctgccgcgagcttcggcctcagcgagaatctccccctcgtccttgcccgtggccca

SEQ ID NO: 47604 - DNA, 479 bp, Setaria italica
  Peptide Sequence Number=SeqID_113578
tctggaaaaagattcttacactattgattcaattgttgccgagaaagtggcatgttctgaatggattgactttgaatcagataatgatagaagaattctattagatgacgagaagcatcaagatcaacatgaacaatacaaagttgatcaaacatatgactatctcccacaagattatgaaatgaccgacctagactactgtgctctaataacaatagaaacatctttcaaagatgatatacttgtgaagatagatgacatctttgtcagacaagctcaattgtcatgcttgctagattcagaaaaaattcctaaatgatgatgtcatcagcgcgtatatatgttgcataaaggatcaagcccatttagaaagtaggaatgatgttaaattttactttgagaatccctttatttctatattgctaaaaagggatggcaagcttggagtaggtgaagatggtaaccatatcacaaagatt

SEQ ID NO: 47605 - DNA, 412 bp, Setaria italica
  misc_feature (355)..(355): n is a, c, g, or t
  Peptide Sequence Number=SeqID_113579
agacggtcgtcggggtcgtgccgtcgtgcgtgcccgctgcccaggctgctgtactttttcggccaggcgatcgcccattcgcccgggcaacacttgcacatgcgctctgttttcccggataatgcttccgggccaaaaatccactgcgacagtggagtgtaacttcgtgcacatgggggacggatgctgtcacgctgccgctacctacgcgacatgatatgggttcacaaccgtaatcagtctgtcgagatgaaacgcgcacgggccaaaccctttctgtaaatagctgtgtctacaaagattgctccgttgcctatcttgcggttaacaaaaaaaaaaaaaaaaaaaaaaaaanaaaaaaaaaaaaatactagacggatacctacaaacctagactacatagcacagacag

SEQ ID NO: 47606 - DNA, 1041 bp, Setaria italica
  Peptide Sequence Number=SeqID_113580
gctccctctgagctaaggctctcccaccaaccacccactctcccccccccacctgcccgccggcgatggccgcaatgccgccgccggccgtgggcttggccgtcctggtgctcttcgccgccgtcctgccggccatcctcgcggatgacctcaactccgacgcgcaggccctgcaggcgctgcgctcggcggtggggcgctctgctctgccgtcgtggaacagcaccacgcccacgtgccagtggcagggcgtgacgtgcgagaacggccgcgtcgtcgagctccgcctccccggcgccgggctcatgggcagcctcccgtcgggcgcgctcggcaacctctccgcgcttcgcacgctctccctccgctacaacgcgctcacggggcccgttcccgacgacctctccagcctgtccgagctccgggcgatctacctccagcacaacggcttctccggcgaggtcccggcgtcgctgttcgggctcaagaacctcgtgaggctggacatcgcggacaacaagttcaccggcgagatctcgccggacttcaacaagctgatccggctcgggacgctgtacctcgacgggaacagcttcaccggcgagatccccaagctggacctgcccgcattggagcagttcaacgtgtcgtacaaccagctcaacgggtccatccccaccaagctccggaagatgccgaaagacgccttcctcggcaacaccggcctctgcgggggcccgctcggcctctgccccggcgagaccgcgcccacgccggccggatcaccggaggcccagccaggtgccggcggtgccgccgacatcggtggcggcaagaagaagaagctctccggcggcgccatcgccggcattgccatcgggtgcgtgttcggcgtgctcctcttgctcgccctgcttttcttcctctgccgaaagaggtccagcgctgcccggcctgcggcggcagtggagaagggtcgcgacatcggcatggagccgctggatgtcgagcccaagggacagaacggctcagcagccggcg

SEQ ID NO: 47607 - DNA, 515 bp, Setaria italica
  Peptide Sequence Number=SeqID_113581
agggacgaatgaagctgcatctcccatatactctcataagaaagttcaagcttatatttaataagattgtaggagaggtaaaagtaaatctttttcatatcaaatccaaattgaaccgaaatattcctcaacaactaaaaagggtatatagaatgttttccttaaccaagcaacccaaatgcagagcagcagcatccagagaaaacattgcaattcttggtcttggaacaatgtcacgatctgcaggtctggctttcagataaatgcatctgctccgaagagcatttctttgggccgcattttctaccaaggaagcacattcctgtgtctggaactgaactatagcaaacgcctttgaggttgcagtgatgttcctcggatgcctgagcttgagagcatagacggttccagcgccggcaattcgctccaaaaaatccttgacatactcggcactgtcagttagagcaaatcctgacacctgaatagtccttccatggtgcatatcacaacttctg

SEQ ID NO: 47608 - DNA, 275 bp, Setaria italica
  Peptide Sequence Number=SeqID_113582
agcagcagatggcggcgcagcatcctttccagaagccgtcgccgccgcggctggtggtctcatgctgctgctgctgctgctggccgtacgcgccggcgtcctgggtcggcgggtacgccggcggcggcgcgacgtaggctggcggcgggggcgcgccgtaagcctgctggcccgggggcgggtagcctgcttctgcttggtagctcatgatcagctgcaaagagctagcactgtgttcgtcgtctctctggttcgatgggactgcgtggacgaaa

SEQ ID NO: 47609 - DNA, 443 bp, Setaria italica
  Peptide Sequence Number=SeqID_113583
ttttagttgctgtgttgagatcgatcgatcgatcctgtgatcggagcatggacgggtcagcagcagcatctgctgctgcaggagatgggggggagggggagggtcgaagaaggaggagagcttgccgccggggttcaggttccacccgacggacgaggagctcatcacgtactacctgcggcagaagatcgccgacggcagcttcacggcgagggccatagccgaggtcgacctcaacaagtgcgagccgtgggatctcccggaaaaagcgaaactcggagaaaaggagtggtatttcttcagcctgagggacagaaagtacccaacgggtgtgcggacgaaccgtgcaactaatgctggctattggaagacaacgggaaaggataaggaaatctacaccgggcaactaccagccacgccagagctagtagggatgaagaaaa

SEQ ID NO: 47610 - DNA, 398 bp, Setaria italica
  Peptide Sequence Number=SeqID_113584
tgagagctaatggttccttgatggttgacttccacctgtttacttagctgctggcttcgtctcctcagtgctgtatgtcaattgtaccagcgagaaagaccttagtaaagaggaagaaataatcagcacaatcctttttaaaattccatttttctccacatgctcccacagaccatcaaccgtgaaaagcaggaactgggagtcaaatctaatgcttgccgtgtttgcaaaagagcgagataagatattgctctagatcccagcatcaggtacttcttgacaattcgcagaacatcctgtccttctgtacccatatcaaccaaaattcttaagcaaaacatttttgacaattcacaggacaccttgtccttctatacctttttctaagattactgaaa

SEQ ID NO: 47611 - DNA, 469 bp, Setaria italica
  Peptide Sequence Number=SeqID_113585
gacgacgaataaaatgcgaggccctgccgcggttttaatggcgggaggacgtgtgcccagagcgagtggtgtcgcttcctgcagcaggccagccagcaggcagcagccctcactctggctgtctccactccacacagtgagtgagagagtgtcacttggctcgatcagctcggtttgaactttcaaattttggcttctttcccgtctcctccagcagtttgaccaagtgcgtgcgtgtacatgtgcatgtgctagagaaccagtggggcaggggggtgggcccaagcgtgtctgagccgtccgatcagaaaacgacggcgtccggtggtttggttgaccggagccgccgttttctcgccggacggctcattgatccggggagttctgaaccgttcgtctcttggctaagcgtgttgtgtcttcgaacttgtgttcctgtactattattagtctttgttttgttaagtct

SEQ ID NO: 47612 - DNA, 509 bp, Setaria italica
  Peptide Sequence Number=SeqID_113586
cccgtagtctagtcttcgtccgtcgtcttccccgtcgtcttcgtggttcgctcgacctcagcggcaacagcatcgagggccaggtgcccaccggcctcgccgcgctggggagccggctcgaggtgctgaacctcggcggcaaccggctctccggcgtgctccacccggcgctgctccgcaacctcaccggcctgcacctcctcgacctgtccgggaaccagttcacggagtccgagctgccgccggagatcggcgagatgagcagcctccggtggctgttcctgcaggggtcggggttcgccggcgcgatccccgaatccttcctcggcctggagcagctgcaggttcttgacctgtccatgaacagcctgacgggagccgtgccaccccgattcagcgtcaggtttcagaagctcatgaccctggatttgtcgcagaacggcctctccggaccgttcccggaggacgattggtaagtgtttgatgctccagaggttcgaggtgcacga

SEQ ID NO: 47613 - DNA, 839 bp, Setaria italica
  Peptide Sequence Number=SeqID_113587
acatcccaccctactccgccatccagcaccaccgctcgcctcgacacaccccgccaagcgcaagagctcgccgagttcgtctccatggcggccgcggcggtggccgtatccacctccccgtgcagcggctcagggcacctcggtctgttgcaggcgtctcaggcccaccatctccgccgcacgctccttggggggcgaatggccggacgatgtgggcgcagcaggctggcggtcttggccgccgcaggcaagccgccgggagaggcagaggagcaggtccctgcgtgggccaagcccggcgctgacgagccgccgccctgggagcgcgaaggcggggccgtgcaggggcaggaagccgggcaggtgccgttctacgcgtacctgctcgcgtccgcggtcaccgccatcgccgccataggctccatcttcgagtacacgaaccagcggccggtgttcgggatcgtcggctccgacagcgccctgtacgcgccgctcctgggcttcttcgtcttcaccggcatcccgacctccgcgtttctgtggttcaaggccgtgcagacggcgaacagggatgccgaggagcaagaccgcagagatggatttctgtgactttaattcatttgccggtgcagaagaacaagcaccgcatcaacgtagcattgggtgatgtaatgtatctgtgttctacaaatgaagagagttgacgaatttgcggcatgtaaaaaagaaaaatgtgcagattaatgaggggggttttatatgcatgaagttcctgagtggcatctgtcagcatatgaatagaaaacatttgtttctttggttaaaatatcatgtgtttt

SEQ ID NO: 47614 - DNA, 479 bp, Setaria italica
  Peptide Sequence Number=SeqID_113588
gccatcagtactgggcagtgatcttaatgcaaagccagagacctcagtggtaaagatcctagatccctagcaagcattgttatacttgacgtgatgagcttctttgatcctttcactgctgatgtgattcttatatatattgtgacctatttactttcagcatgagtccactggtgacccagaacatggatcatctttctctggattcttgattggaactgacagtttagggctcagcggcttactcgcaaacagcctggatgcattccagaacttctctgtttcctaaatctcagacaaggacgcagggttaattgtatggccaaggtgaaggtataggtcaactgggtttctgtttcattgagagaactaattattttggtcttgctgaagcggcttatgtagataaattgcccatcttagtcatgtaaacattttacttatttctactttgatacttggaagaaatatatattttg

SEQ ID NO: 47615 - DNA, 558 bp, Setaria italica
  Peptide Sequence Number=SeqID_113589
cagatccctgctacatgtgattcatttgacgctgctattgcttctctgattgcctgccagcaagctagtagccagccaagggtgtcaaatccatccctttgggaagctgaagacacttgccacgcatttgccttccagaatcaagcttcgagaagggcatcaagttcaattcctggcaacggtggtgctgctatgacctcttctgtcttgggtgcaattccagaaactggcacagatgatgatcagcaatgctctactaatggtaaagaaagggaagcaagcactgagccatcagtactgggcagtgatcttaatgcaaagccagagacctcagtgcatgagtccactggtgacccagaacatggatcatctttctctggattcttgattggaactgacagtttagggctcagcggcttactcgcaaacagcctggatgcattccagaacttctctgtttcctaaatctcagacaaggacgcagggttaattagtaataggaccaaaggtagaaaggtaataaggtacaaactagggtttactagtttaacaatagaa

SEQ ID NO: 47616 - DNA, 237 bp, Setaria italica
  Peptide Sequence Number=SeqID_113590
ttcagttcagaggcaccccagcagagctcaacatctctgcctcgtgtgtcctccatgacagagaatctccactcaaggaaaatggtacagccaaagaagtttcgtggagtccggcagcgccactggggctcctgggtctccgagatcaggcatcccctccttaagaggagggtgtggctgggcaccttcgagacggcagaggaggcagcgagggctatgacgaggctgctgtgctga

SEQ ID NO: 47617 - DNA, 2889 bp, Setaria italica
  Peptide Sequence Number=SeqID_113591
gacagagctacggtggcatgggtggaggcggcggtggcagcggcggctatgaccctggctacggtggcatgggcagtggaggtggcggcggcggcggctatgacccaggctacggtggcatgggcagctatggccagagcttcttcaacataagctacgcgcgcagccagccacctccaccgtccgtcgcgcgcgagcaacgcctgcaggctactaacgccagggtccactactattccggcgatggtgaaccacagccacccccacgcggctatggtggcgggtacccctacccaccgcagagctcgagctcttataatcagtatgcctacggtggttactttggtgccggcggtgctccagcaccgccggcagacatcccctcttcctcccgggagccagccgcaccgcccccaccgccatctcctccgagggtgtctacctgggacttcctgaacccgtttgagacttatgagagctactacgagcagccaactgccgcagcagctccatatactcccagcaggagttcgaaggatgtgcgcgaggaggaggggataccagacttggaggatgaagacatggaggtagtcaaggaagcatatggtgatgagaagcatctagtgaagggttacggggggaatgggaaggcggcaaaggaggagggtagaagcagcacaggagatgagctaccccgcaagtccaagtcatctgaggccagcagtagtggaagcagcttggagcatgatgtgcatgtagtggagaagagtgttgtcggagaacaagttcaacgctcggagccacggcagcatgtagcaggtctgccatcaacaggacctgagaaaatatatgttgatgacactgaggtggtggtggagatcaggactcaatttgagcgtgcctcagaatctgccggtgaggtatccaagatgcttgaggttgggaagatgccttactatcagaagagttcaggtttcaaagtctccgcaatgatgatttgcgggataccgactatggaggaggagttcctgcggttcgaagaggacaaggcgatgggatgtggcaacctttcctcaacgctacagaagttgtacatgtgggagaagaagcttcttgaggaagttaagacagaagagaggatgcgggtactgtatgacagaaaacgtgaggagctaaagatgttggatgagaaaggcgcagaagctgataagcttgaggccactgaaatttacatcaggaagctatcaacaaagattagcatagctattcaggttgtgaatactatttcacaaaagatcagtaagctgagggatgaggagttatggccacaaacatgtgagctaattcaagggttgatgcggatgtggagcgttatgttagaatgtcaccagatacagttacatgctatatcccaagctaaaaacatagactccatgatagacgctgccaaatttggtgatgctcatatggatttgattaagcgcttagagcttcagctactggattggattgcttgttttgccgcctgggttaatgctcaaaagaactacgttaatactttgaatgactggctgaggaaaggagttgactacgtccctgaggaaactgaggatggggcacctcctttttctcctggacgattaggagcaccaccgatttttgtcatatgcaacaattgggctgccagtgtggcaaggatatctgagaaggaagtagtcgaggcaatgcaggcctttgcatccaaggttctgaacctctgggagaggcacagatcagagcaacggcagggtatgatggctaataaagtatggacagggaccttagggtgatggagcgggatgaacagtcaatgcgcaaggctctggaagcacaaaataagaagcttgttctcatttcaaatcagagcggtgtatccttatctgcacaggtgttacacgaggcaggccctggtgctgaaattggtagtttgcaaacaagtctgaggaatatttttgaagcaatggagaacttcactgctgcatctgtaaacacctataaggatctccatcttcgtgctgaagaagagaaagctcgagttgcccaagagagcggcagagtttcctagttcctttttgctgattttgttggtacatgaggacatgagcatttttcagtgcagaggaactgacgcaagggtttcctgtgactgagcacagtcgcacatggcagtggtgcgatgctagcggcatctgatgcacctgaccaatggatctacttgtcccaaatcttgggttttggggctgctggatatgccttggtatgctcagtgaggctaacaagctgcagcatggggattttaatcaaatgccatggcatattcttcgcattggatgatcggccatgctcatgctcagcttgttatcgtgaaaaattattaggaaaaatagacaagattcctgaagagacatgagaagaggcacttgtgcatccgagtggatcaacaatggtttccagttcactggaaaaaagaccccattaaatcactggatgactcagagctgcatgaacttggagttgggtcaaagcatgggagcaatgagatgatgtcatgaatctcagcagacttagcagaggtgctctgaaaggtcggcgtgctggcatgccaatgtacagacagaggcgatgggggatgaatcagctgccgagacaatgttgctttcagcttcctgcgcgggcatcgtggccacacggcaccggaagtactctcgtagggttaccaccagaggtttgattgatgagcttgtaggattagatcagatgtcctgacccgttatgcagatgcgctaacccctccggccatcatcgaattttggttctgtttatttgttatacatattaattcattcgtag

SEQ ID NO: 47618 - DNA, 331 bp, Setaria italica
  Peptide Sequence Number=SeqID_113592
gttcctaggaacttagatagtgatgttcttgatgaagtaattgagatatcaagtgatgaggctgttgagacagcaaagcagttggcagttcaggaaggattattggtatgataacttgacatcttgatgctttgtagtgtctaggacattatttaggcatgccattctttttgggacattgtccctgagttgcaagcatacatcttcctttaatccttcttagaggaaggaagctttgttaactcaacatataagctcaaagccacctaccagtcctacttttcaactaaacgaaaagaaagactaccaagcattcatcttctgatgaaag

SEQ ID NO: 47619 - DNA, 1698 bp, Setaria italica
  Peptide Sequence Number=SeqID_113593
ctcacccgcggcccggggttcctcacgcgcatcggctccgcttccgtttcctcatccgcgcggtgccgcgccgtcgccgccgaggtcgagggcctcaacatcgccaacgacgtcacccagctcatcggcaagacgccaatggtttatcttaacaacatcgttaagggctctgtcgccaatgttgctgctaagctcgagattatggagccatgctgcagtgtcaaggacaggataggatacagtatgataaacgatgctgaggagaagggcctgattactcccggaaagagtgttttggtggaagctacaagtggaaatacaggcattggtcttgcctttattgctgcttctaagggatataagttgatattaacaatgccttcatcaatgagtatggagagaagggtcctactcagagcttttggtgctgaacttgtccttactgatgctgcaaaagggatgaaaggggccttagacaaggctacggagattttagataagactcccaattcatacatgcttcagcagtttgataaccctgccaacccaaaggtacattatgagactactgggccagaaatctgggaggattcaaaggggaaggtggatatattcattggtggaattggaacaggtggtacgatatctggtgctggccgtttcctgaaggagaaaaatcctgaaattaaggttattggtatcgagccttctgaaagtaacatactctccggtggaaaacctggtccacataagattcagggaattggggccggatttgttcctaggaacttagatagtgatgttcttgatgaagtaattgagatatcaagtgatgaagctgttgagacagcaaagcagttggcagttcaggaaggattattggttggaatctcttctggagcggccgctgctgctgccataaaagttgccaagcgaccagaaaatgctggaaagctgatagtggttatattcccaagctttggtgagaggtacctttcgtccgtcctctatcagtcgataagagaagaatgcgagaacttgcagcctgagccatgagtgagccctcggtcttaacagcataataaatgtttctggaataagatgcttggtcagcattagtgcctctgagaagtgttacaccactccacttggcatcatctggcgctatcatccttttgccaccacgataagaattagtgaggcgtgtggagaaacatacatgactctccaactgttttcccccctttagcaaaacagaaacaattcgtacatgtctatacgattcggcctgatttgattggcaactgtaatcatcatcttcttgtccatggatttttaaagttatcaaaccagtgtcagttggctgaggcaggtggatatgttgtgttcttttctgtgtgtatgtatcactaccatgcatctcaaacaagtgtcaactgggccgaagctgggtcgtgtatcgcagcattctggtatggattttggcatatggcaagcacgataaagcgtgttccaggtgacaagagggaacagctagtgtgcaatcatgtgcatttccaccactggtttgttttttttcttccatgtgataatgacacggactctgaagtgctagtatcttcctttggatgatttaatgattggcaaattaaataaaatcagagctgtaattaattagaaactaagaaaaaaaaaaaa

SEQ ID NO: 47620 - DNA, 303 bp, Setaria italica
  Peptide Sequence Number=SeqID_113594
gaattcgtcaccagcatcagttttttaacacaagaacaaatacattggatcgccactagtaatgcaaggcggcacagccagaaaatcaatcacgccttgctacacgcgagagataccaaaccaatcacagttcacaccacgctatgatacacgcatcagttaaccatggagctcaacgaagcaccacaccaatcatgacaccctgaggcactgctgcttgaacatcttgctcgtcggctgcccgctcaccgagtcctccacggtgaggccctgcgcgccgaagcagatgttgatcagcctccc

SEQ ID NO: 47621 - DNA, 2646 bp, Setaria italica
  Peptide Sequence Number=SeqID_113595
taatccagtgccctgagctttgcatttgcagctcacaggcactgcatggtttgggttggtccttgttcctcagcagttgagctgcacaaaccaacttctcttgcacaagttcttggcatagcattgcatcacatgccatgtgagtagctgaccatagctcactcttaagcaccacaccagcagcggcaaaccaccgctagatctcccagggattcggcgatggagcagtcctgctacttccctctgcggtgggagagcaccggcgaccagtggtggtacgcgtcgccgatcgactgggcggcggccgacggccactacgacatcgtgcgccagctgctgcacctcgaccccaacctgctcatcaagctcacctcgctccgccggatccgccgcctcgaggcactgtgggacgacgacgcccgcttcgccgacgcggccaggcaccgcgcgtccgtcgcgcggagcctgctgctcgagtgcgagtgcaggaaccaccaccccgccggcggcggcgagaacacgctgctccgggccgggtacggcgggtgggtgctgtacacggcggcgtccgccggggacgtggcgttcgtccaggagctgctggagagggacccgctgctcgtcttcggcgagggcgagtacggcgtcacggacatgttctacgcggcggcgaggggagggagcgccgacgtgttcaggctgctgctcgaccacgccatgtcgccgaggtgctcgacgaattgccgcgacggcgaaggtggctccgggcgcggctccgtgttccggctggagatgatgagccgggccgtccacgccgcggcgagaggcgggagcgtggagatgctgagagagctgctcgaggagcggcgctccggcgtttccgtgtacctcgacgtccgtggatccaccgtgctgcatgccgctgctgggaggggccagctgcaggttgtcaagtaccttctggcctctttcgacataatcaattcaactgataatcacgggaatacagcattacatgtagcagcctatcgagggcaccaacctgttgtcgaagcattggttactgcatcgccatcaaccttgtcagctatcaacaatgctggtgatacgtttctccattcagcagttgcaggattcaggaccccaggattccgacggcttgaccaccaattggagctgatgagatatctcatacgcgaaagaacgacagatatccagaagatcatcaacctgaaaaacgacgccggacttaccgcccttcacctagctgtggttggctgcgcgcacccagacctcgtggagctcttgacgaccaccccgtcaatcgacctcaatgctgaagacgccaatggcatgaccgcactggcactgctgaagcagcagctgcgttcagcaacgtccgaccgcctcatcaagcagatagtctctgccggaggaatattgaattccagcattctgagaacccggtcagcaatcgcgtcccagattaagatgcaggggggttcgcaagcagtcccggaaccactttcaaggtatcagatgcagagatcttcctattctcgggtatcggagctgcagagtctcaaaggccaagctcttgctccagcaatggcaaggatgaccctgctcacgcagatgcaagcggcggggaaaaccatagatcgtcggagaagaggctgagctctgcgagccgtgccaaggaccgtctgaagatgatgctgagatggccccggcacaaggagaagatgtccaagacgccgaagaaatcggaggagagcagcccgctggactccatcaagaggctgggcgagcacggcgtcgagaccccggctcccctgaggcagaagttcaccaagacgacggcgctcaacggaaagcggacgcttgcggtgaagagctccaccccgagctcctcgtcggccaccaagaagaagctcaacacgaagctgatccacggcatcatggaggcgatgccgcagctggcggctccgtcgtccgcggcgcggtcccgggccacgagcgacactctcccgaggtcgtccatgtcgtccaccgcgccgccaccgacgctggcgaagctgaaggacatctgcctggacgacgagatctccatggtgacgccgccccccgtcgggaggctgaaggacatcatcctggacagcgacgacgccgcggaggagccctcgtgctccaactcgtccatggacgatggcagcggcggcgacacgggagagagcgcggcccggaagcacgggtgcggcaacgggaggctgatcaacatctgcttcggcgcgcagggcctcaccgtggaggactcggtgagcgggcagccgacgagcaagatgttcaagcagcagtgcctcagggtgtcatgattggtgtgctacacgcgagagataccaaaccaatcacagttcacaccacgctatgatacacgcatcagttaaccatggagctcaacgaagcaccacaccaatcatgacaccctgaggcactgctgcttgaacatcttgctcgtcggctgcccgctcaccgagtcctccacggtgaggccctgcgcgccgaagcagatgttgatcagcctcccgttgccgcacccgtgcttccgggccgcgctctctcccgtgtcgccgccgctgccatcgt

SEQ ID NO: 47622 - DNA, 405 bp, Setaria italica
  Peptide Sequence Number=SeqID_113596
agaatcgtcagaggggaaacatcaagatgctcggcacgctacaattgtcaaggtcatccgtaatttgtgaaggttggaggaaaaatttaacaccaacttatgcactttacaaggatagcacattcaaagatggatccagtggtgttttaaatgtcctagatctgaatttggtgatgatcatgggtcaacaatgtaaatctattccatgcaggtatataatatgatagctcatggtgtacatcatatcatcttatggtcaaccaactgacctagatggtcagacatattatcgtcagcctacaccagatatcttcagttgttagctagtgtgttctgaacctgacagacatattgaaagtaatcctgagtgaccctgcaggtgatcaagtgcacacatactaaaaa

SEQ ID NO: 47623 - DNA, 723 bp, Setaria italica
  Peptide Sequence Number=SeqID_113597
ggaaatgattttgaatatcgatttcttggtaaaaaaccttcgcccaattttgaattatcaaagcaagagctttatgtaagagtagaagctccaaaaggggaattaggaatttatctggtaggagatgatagtcttttcccctggagatggaaaattcgtccacctggttttattaatttgcaaattcttcctcagctagttaaaaaaatgaaattggctgatatcatgacgatattaggtagtatagatatcattatgggggaagttgaccgttgaaatgataatagaggtagaaactatcaattctttttcgaaatcggaattattaaaagaagtctacggactgatatggattctacccattttgaccctcctactgggaatcacaatagaagtactcgtaattgtgtggttagaaagagaaatatcggcatcgatacaacaacgtattggtcctgaatatgctggcccgctgggactgcttcaagctatagcagatggaactaagctacttttaaaagaggatatcctcccatcccgaggagatattcctttatttagcattggtccctctatagcaatcatatccgttttattaagttttttagttatccctttgggatatcgttttgttttagtcttgatcttagtattggtgttttttattggtattgctatttcaagtattgctcctattggtcttctcatgtcgggatatagctc

SEQ ID NO: 47624 - DNA, 381 bp, Setaria italica
  misc_feature (345)..(345): n is a, c, g, or t
  misc_feature (376)..(376): n is a, c, g, or t
  Peptide Sequence Number=SeqID_113598
ctgtgctgtcagtgattttatgacatctttggcagtcttcaatttggatgcttcctcagtagcaagggtcatcgcttcatgggcttttgcctctgatttctgcagctcagcatcttgctgttcacgttcctgtcgcaagctattaacctctgcttgtagtttttgaacctcttgcttcagaagttcatttgcatccctaaggctctccaagctttccgaggacagcgagctggaatagttcagatatggcatcctcaaaaaatggtaaaagtagatcttgagtcataagggtattgattagccactgtatatgagttctggaggtcaggtgcactgatgaaaggntgtcttaagctgcaacgctactggaacttgngaagt

SEQ ID NO: 47625 - DNA, 349 bp, Setaria italica
  Peptide Sequence Number=SeqID_113599
gtcggtctaaggcggcaaggtggcagaaagcaagacgaccaccgatttggagctgggggcggcggagggcgcggagcgcagagcggcgggagcggaagaggacgaacccgtagcccttggatctgcccgactgcttgtcggagatgacgcggcagtcctcgagctcgccgaagcgtgagaacgcggagcggaggtcgtcggcaccggcgccccacccgaggccgtggacgaagagcttcctgctcgcggggtcggcctccgcggcgcggcgcacggccgccatcgtgacggggctctcctccgcggccgtacggagcagcgacacgagctgctcccgcgacagcggctc

SEQ ID NO: 47626 - DNA, 444 bp, Setaria italica
  Peptide Sequence Number=SeqID_113600
aggtaggaagtactactgaataccggtcttgcagccgattgtagtccagacctgttgtgagcccatctttgaacttggctcggccagcaaaatacacttgaatcggcagttgacccatgccgagttgacgtgctgcagcagagggattgtagaactcatatgtaggagcatctttccctgaaaagaagttggctggcaggattcccggtttgattaactcatcggtgaggtcctcgtcgaatcggccagtggtcgagtcgaagcaagtggggagttcgaagattgggtcatctcgccgataaggaaaccagacggttgcatcttcattaaagctgttgtaaaagcatcgaaagtactcggccacttttgtagcagagtacaggcaacccgggaaggccgacgccgcttcaccaaaagatgtgcatcggcgtcgagcagtgggat

SEQ ID NO: 47627 - DNA, 388 bp, Setaria italica
  Peptide Sequence Number=SeqID_113601
cacagtatctgaataccatgtgtacgagttctttaggatatggaactgttctcgagaaagagctaattttcttgtccatgagttcttcacaactcattacttccatcattagcacactccatagcatatcttgggttgtcatctattaaaacctgagcgccaaaagatctgcaaatctctgatttttggtcttgactgaccctccaaagcgaaatgattaccgaaatgtatctgctcaaataagcctggataatacctctcgatccaatctaacgtgtgactcttaattgcatcctgccgagatgttactactgacaagctacagaaagaagaaaggttttggagagcatctcgagccccagggatgggttgtataccatcttggaag

SEQ ID NO: 47628 - DNA, 1847 bp, Setaria italica
  Peptide Sequence Number=SeqID_113602
caagaaatccgctttgccatctcctttccgcatataccccgagattttccacacgaaatttccccaggcttttccctcgccgcgatctcgcttgaaagagatgccccagatcacaagaacggtgtgaggactgaggagagggagggaccgaggcgccgacctcgcgccgggggtttcgattcgtcctcatccctgaatcctgatctcgcgtgttcaggtttcttgggctggccgggggaaggaatgctggtggcgacatgctaagccgcggagccgtgcggtcgctgttggatcgtctccggccaccacctcgggggtggaagcagaaccctagccccgccatgccgccggccgccgtcaaccgcccctgcctctgcaggtgcagccattccgttgcgcacaacgagggtcgcgcgacgccgctggggaagatggggttccttaatctagcgggcgggcggaggtttgcgccgagcggcgcgctcagcttgaaggggtgcctggggtggcaggacggcggcagcggcggcggcgggttcaagaggagggtcgacggggaggcggcggggttcaaggcgcaggtgctcaccaggcagcggcagctgatgcgcgatccggaggtcctgccgctggaggaggcggccgccagcgcgaagaccctgagcgggaacggcgcgtgccggcgagggaagccgctggggttcccggagcaggctgtggcggctaagatggtggttgctgttgatgtggatgaagttcttggaagctttcttgcagcactgaacaaatttatcgctgatcgttattcttggaatcacacagtatctgaataccatgtgtacgagttctttaggatatggaactgttctcgagaaagagctaattttcttgtccatgagttcttcacaactcattacttccaagatggtatacaacccatccctggggctcgagatgctctccaaaacctttcttctttctgtagcttgtcagtagtaacatctcggcaggatgcaattaagagtcacacgttagattggatcgagaggtattatccaggcttatttgagcagatacatttcggtaatcatttcgctttggagggtcagtcaagaccaaaatcagagatttgcagatcttttggcgctcaggttttaatagatgacaacccaagatatgctatggagtgtgctaatgatggcatgagggttttgctcttcgattatgataactcatacccttggtgcaaaactggagttgacgagtcgcatccgctggtgaccaaggtccacaactgggaagaagtggaggagaaacttctttcttgggtagtaactgagagctgacattcttttctggtgtgagaagcactgtttgagatcaacaagtgcttcctattgcttgatttatgaagaaacatgttaggggtgaatacaactttatttccgatactcaaagatgtcagcgcaaactaggacatttcttatctttagtaagggactggcgagtgaacatcgctacatgctggttgaggcaaaccagtttagcattgccctgggtcaagcaaagcatagacgcttctgttggcaaagatcgggttcttccatccttttgccctaagctgggtgtagaatgtatatattgacattgccatatggctaagatgaattgagatgctaataatgaaccatcccaatgctgtctaaaaaaaaaaaaggtctgctcatctctgaaacctcacttttgggtagctgattatccctgctggttgcattactggttcctgtttgagttgttgccaatgtggtggttagtctagaaccaaataatgaactgaacaatcttgg

SEQ ID NO: 47629 - DNA, 268 bp, Setaria italica
  Peptide Sequence Number=SeqID_113603
caagccacgcggcatggcggcggtgcgcgcatccccacgcctccgctcccttcccctgctgttctcccagccagacgccgccgccgcagtccggcgtagtttctcctgcgccagcgcctccccctccccggcacccacccgggccatggcgtccccatcctcgtcatccgcaacccccaccccgtacacgacgctcgtggggcgcgtgagctgcgagcgcgagatcaagcgcagcaagttcatcgccatcgccgctcccgtgtcaacg

SEQ ID NO: 47630 - DNA, 351 bp, Setaria italica
  Peptide Sequence Number=SeqID_113604
ctaaagaagatggttattacaggaggggtcttccgcttcacaaccaggctatgtatttatgtactaagagcgcggagtatcggtcgacgttcatggagatggcaacgaaagagggccgaatgagctggatacaactctactgggacatgaccaacaagaagtgattgtgccatgactgttagttgtagtgatgtgtatgtgagagtttggaaaataatatttgcacttgtgttggaacagtattgttagcttctgtaacatgtcctgatcgttgaacctttctatgttactgatcgttgaacctttctatgttactgatcattgaacctttattttagtggtagatcaatt

SEQ ID NO: 47631 - DNA, 688 bp, Setaria italica
  Peptide Sequence Number=SeqID_113605
aatctagtggtgttaagagctgcaacaaacaatttctcggaagaaaacaaacttggagagggaggttttggagaagtgttcaagggtacattacaggacgggcagagatagctgtgaagaggctttcacaggactcctcacagggattccaagagcttaagaacgagctcgtgctggctgccaagctcaagcacaggaacctggtgcagctcctgggagtgtccctccaagaggagaagcttcttgtctacgagtacatgcccaacagaagcctagatacctttcttctcgatccagtgagacgacaccaactagattggagtaagaggtttacaatcatctgcggcatcgcacggggacttctctatctccacgaggagtctcgcctgaaggtcatccacagagatctaaagccgagcaacgtattgcttgatgcggatatgaaccccaaaatttcagactttggcattgccagggcttttggcggtgaccaatctagagatataacaagacgacccgttggtacgcttgggtacatgtccccagagtatgcctactgggggcatgtctcgaccaagtcagacatgttcagcttcggcgtcatagtcttggaaatggtgaccgggcgaaggaacaacagcgcatacgactctgctgtagactccgtgtctgtgctgagccatgtatg

SEQ ID NO: 47632 - DNA, 390 bp, Setaria italica
  Peptide Sequence Number=SeqID_113606
aaatcgacttgattacagcaggagccggaagtgaaaatggtacaaacattgccagctgatttgctaattccttgcttaacatggttctggaagacatagctttcatagctaccagactgtcattgcctagctggagattaacctgaccactgtgggaactaatcaattgtttttccacactgaaaagctccaaggcttcagcttttgcagcaagtgactgtggataatatatatgtacacaatcgccatcaaagtcagctgaaaagggactacacatgagaggattgattttgaccgtatggtcgtcatgtacatatgcataaaaggcctggagggaatgcttgtgagtactgggtggtctattaagaaaaaccacatccccatcaacta

SEQ ID NO: 47633 - DNA, 391 bp, Setaria italica
  Peptide Sequence Number=SeqID_113607
cattgttccccttggggaagatcagcacacgccatttataccctccgacgacaaacacgtcggagtagtgcttcttagtgttgaggcggctgaagctctcgatcgtccaggtgaagcgcgacgtctgcgggtcctccgccggctgactctcagccgtgttggcgggctccgtctgcgcgacgacttccatcggctgcggggcgggttcggggccggcgacggggagctcctggtgcggcacgagcatctcttcgtcctcctgctgctgctcgagagggggcggcgtcatcatagtcatggggtcgtcgtcgccggcgactgcagtggactcgcgagaggcggccgccaggcggcggcggacggcggcggggagaggaggagggaggggggg

SEQ ID NO: 47634 - DNA, 384 bp, Setaria italica
  Peptide Sequence Number=SeqID_113608
atgcagatcgtagtattagaaacctttatacgcttcacagtgttcttgttcatagtggaggtgtgcttcagccttttcctttttcttgtgttctttctcttcttgttctttcttcaaccttatccgcaaatgctccgcaatatccttctcatcaacattacacattattttctccttgtcactctcacgaatgtagacaagcatgtaggcattggaatactttgtgaacttgaacggcgtgttattgaaaccagggtttatttgaggcaactcttcctcacccccatactgctcttcaagtcccttatttcttcttcctcctgccactcctcgtccttatcgccaaccaccattgctcctttcccccaagcaacacaactccag

SEQ ID NO: 47635 - DNA, 772 bp, Setaria italica
  Peptide Sequence Number=SeqID_113609
ttttttttttttcttttcgaaatggcatcgacgcgctgcaatgcaattcttccacgcattcatgagatggaagctgaaaattggagcccatttacagtcaaccaccgccgccacattagtacaagaaaagaaacgccgggtcaagccacaactatacccgcctgtatacacgcacgccccctaccaaaatcttatgtacccaactttgctctatgaatgaagcaatatctactatccacgggaaacccttgtacccaacggaaacggaaatgtaaatcaatatgcactgcgccactaacaggtgaattgctactgatgaaggtggcttcaagcacagaatagagggccgtggcggacagcacccccgaaatcgccaacaacttgaagtctccacctggcagtctatattccctaccctccctttttagttgctactctcgctcgcattgaggcaacttggctttcaccacgagaccagctcggttgtcagcattttcaattgtaaattctgactggcttctcatacgcatggcggttctgctgattcactgtataggccctttttggtgcagtatcagtgtgttccatcccaagatattgctcccaagctccatagacctccctcctctgaaaacggggagctataacatctgaatcctggaggtaatctggccgattcatcgatataaaagcaaatttccacttggaaaaattcctcggcggagacttgaagtttactctttatgcgcttcttgacttctgctaaagtctc

SEQ ID NO: 47636 - DNA, 917 bp, Setaria italica
  Peptide Sequence Number=SeqID_113610
aggtttgtccagagaccgaaagtgcacaacctgcctattgtgaacatactccaagaatgaaggaacatctggatagcgcacttgtgtatcaccatcaggaacaggagccttttggaaacagatgatgtctccatcttcaagctgactagaacggaaagttagtttcttgtcaatatgttcacacatcacatttggctcaaacttaatttcctcgtatagctctatttcttcatttggagaaaaccctgccatttcatttagcttcgtcaatatttcagatggctttcccaaagccttcacgaaaagtctaccaacaaacctgagttcttccttctcagcatcataaagcttgaagaaaagtagtatgtcttctttgctcttctctggtggacgaattggacgtaactccggtccaagttcaacttccaggaacagcttcaactcagcattgtgtgccttatttgagacttccctaagctgcccgaccgattgtgcttcttcatgggcggtcaacggacgatttggccggtatgtatggttctgcctcttagcccacaaccagaagcgctgaaactgtacaggtatgccatattcctttgcaacttcctccttgaatgaagtaaaaggcaactgctcttgaatgcggaagctgcgaactttttcgtggtccaccaggtcaaaatatatgttcttaccaatctgatcctttaaatcttcatctcgagcaatctttatgatagtgtagaggtgtgcttcagccttttcctttttcttgtgttctttctcttcttgttatttctccctcctctccagctgcctgcgcctggctaaagcttgcttgctgctcgacctctctcttgctcctccataatcaccacccacctaccacaccaaaacccaaaacctaaaaccaaaac

SEQ ID NO: 47637 - DNA, 2898 bp, Setaria italica
  Peptide Sequence Number=SeqID_113611
agtaccaagtaactaagaaataacaaatttaaatagttactactaatacttactacaatgaggtggaaagatcttataaatcttgtggtaaaatacttcaagcaagcggagctcagcatcaggattagacagttcaaccttggttttcaagtcagtaatcacgtcgctgatggtgctattctttggaagtcttatgctatgaactacaacctcatctttcgttgcatgatggaatgcaactttaagtgttttcaaacactgcaattctggcaatggaatgtccagaacctcataatacaagatatcagaagtctgattataatggacaagcatgtccagtagatgttctactccccgatatctgataggctgcggtttaggttgctgagaataacaattgtgagatgtaagccgaatctttgatggatcatccaaaccaagttgatgcgcaactttctcaacaacatcatcataagtatgaagctttgacaattccaaagaaaaatcatcatccttaggtttgtccagagaccgaaagtgcacaacctgcctattgtgaacatactccaagaatgaaggaacatctggatagcgcacttgtgtatcaccatcaggaacaggagccttttggaaacagatgatgtctccatcttcaagctgactagaacggaaagttagtttctggtcaatatgttcacacatcacatttggctcaaacttaatttcctcataaagctcaatttcctgatctggagaaaatccagccatttcatttagcttcgccaagatgtctgaaggtttgcccaaggccttcacgaagagcctccccataaaacaaagttcttccttttctggtttgtacagtttgaagaaaagaagaaagtcttccctgcccttctcaggaggagggagaggctgcaaatccagcccaagttctacttccaaaaacagcttcaactcagcattgtgtgccttatttgagacttccctaagctgcccgaccgattgtgcttcttcatgggcggtcaacggacgatttggccggtatgtatggttctgcctcttagcccacaaccagaagcgctgaaactgtacaggtatgccatattcctttgcaacttcctccttgaatgaagtaaaaggcaactgcttctgaatgcggaagctgcgaactttttcgtggtccaccaggtcaaaatatatgttcttaccaatctgatcctttaaatcttcatctcgagcaatctttatgatagtgtagaggtgtgcttcagccttttcctttttcttgtgttctttctcttcttgttctttcttcaaccttatccgcaaatgctccgcaatatccttctcatcaacattacacattattttctccttgtcactctcacgaatgtagacaagcatgtaggcattggaatactttgtgaacttgaacggcgtgttattgaaaccagggtttatttgaggcaactcttcctcacccccatactgctcttcaagtgcctttttcgtatcttctttcgtaacccgctcatcatcaaatttgtaccactgatctgagagtgtcggccgaatgaaagcataatagtgaccaccatgtactcctccactatgaacaagaacactgtgaagcgtataaaggtttctaatactacgatctgcatctggagaaagatattttccttcatctctatcaagatcaagttgtagcgggaactcataacggtcattaatcttaaccattgtatctcgcatgtaatcatattcaaaacgcttcagttgaagttgcaaaacaggagggaaatcaaggaagagcacacctttctttgcatcctgtaagccatattgctccgcatgatatttgttatcaccctctaaacgctccacttccacatatttatcaaatgatgcataaacgtcacgacaacctttcacatcaagttgcagatcataaaatgattcttttctgctagatttatagtccacattgatgcactcgatataattaatgtggtggccttcaaataattgttcaattgttccttccacaacagttcccttcatcttatcttcaagcttctcacaaagaactctgttgagctcttgcacatcatgctgcatgaaagaatcataagtatcccatccaaaggatttggtcaactctttcgtagccacactgttgtcactatactggagcttgtaaaaaaggctctgaagggctagaggaatactcccagatggcatgtcattctcagttgttggcatatgatatacagcctttctgaagtatggtatatggtacaacgtttgtaggagagagttcatataacaggtagcaccttgattcttgagacctacataacctgtttcttttttcgaatcgtaagtccaataatcaaccattcttcgcacagccacctcagcttctactacaacagtgtcattcacaagatagcccctgcttgggtcatacaggtcactcaaaggcataaatgatgtgaaaccccagtcgctctcacgtgcattaaattggtgctgggtatctttccgtatcgtatacttgggatggatttggttcacaacggccaagctgaactgagcataacggctccacccgtacgggaggttccccgaatccgcgacatccaaatacatcgagaagtgatccacattgttccccttggggaagatcagcacacgccatttataccctccgacgacaaacacgtcggagtagtgcttcttagtgttgaggcggctgaagctctcgatcgtccaggtgaagcgcgacgtctgcgttatttctccctcctctccagctgcctgcgcctggctaaagcttgcttgctgctcgacctctctcttgctcctccataatcaccacccacctaccac

SEQ ID NO: 47638 - DNA, 1631 bp, Setaria italica
  misc_feature (1)..(17): n is a, c, g, or t
  Peptide Sequence Number=SeqID_113612
nnnnnnnnnnnnnnnnncgtcgtcgtcgtaccttacctgttaagacttactggaccctcgtacggcatgttgaagcaaaattttcccaacaggttttatctgtgaggtgctaatgcaagtttgcaaacaagacagcctacgctggaactcaaaactgtactatctgcgcagttatccttacatttctcatcaccacggaaaattggaaccaataccaaacccattatacaatctctcccattgttccccaagctacaagagaggcgccaattcagcaataagtctcggctataatcctgtatacatgccccctaccaaaatcttcttccttatgtactagccttttgctctacaaattaagcaaacacctatcctagcaggggccatcatactcgacacaatgaaaaaaccaacacacatgcttggttgctcggaagcaagatgggaatgcctcgaaaagaataccctttggccaatcgacaacaggagtaatgccgatggttcacgccattgctgagtcatgcaggccttggcacacaagcggcattatattcatctgccattttttcttagtgacgtcccttatcgtctttggcagaccgactcgaacgaggcctttgttggagttaagtccatatgatggtttctcaattataaattttcacaggcttctcataggtgtgacgattctgattggctgtgtaagaccttttcgatgttgtatcagtgtgctccaagccaaggtattgttcccaagcaccgtatacgtctctcctctgaaaacgtgcagatacaacatcagtatcctggaggtactctggccggttcatggatatgaatgcaagcttccacttggagaattcctcatcggggactctaagttttctttggatgcgctccattacctcagcagcagtctcaccttcacggataaccatcaaaaaaggatctccaaaattctgaatctgctgattctgattagggtctttcatgaaatggtaaacatgaatcaatcgatcatgtgggccaagattcttctcttcctctgggatctcctcagcccgtagtgtccagtactgatcatttatgttctctatcttctcatgaggtggaaagatcttataaatcttgtggtaaaatacttcaagcaagcggagctcagcatcaggattagacagttcaaccttggttttcaagtcagtaatcacgtcgctgatggtgctattctttggaagtcttatgctatgaactacaacctcatctttcgttgcatgatggaatgcaactttaagtgttttcaaacactgcaattctggcaatggaatgtccagaacctcataatacaagatatcagaagtctgattataatggacaagcatgtccagtagatgttctactccccgatatctgataggctgcggtttaggttgctgagaataacaattgtgagatgtaagccgaatctttgatggatcatccaaaccaagttgatgcgcaactttctcaacaacatcatcataagtatgaagctttgacaattccaaagaaaaatcatcatccttaggtttgtccaagacggaagactacaagacaatacaaggaattaagaacaagttacaaaccttaggtta

SEQ ID NO: 47639 - DNA, 435 bp, Setaria italica
  Peptide Sequence Number=SeqID_113613
tgtcgttgttgtctaattgtgcgtgtgcaatgcaagttaactgttgtaataaattgaatgttaatagagcaaaagtttggaatgcatgaccgatcattttcctacatgtggtccgaaggatgagccatcattcttctcgatcttatgcagggatgtgaatacatatatgaatccattcatttctacagccctaggccctagcaggtgtatcagctcattaactgatagttcctattccattctatcttttaagaacacacacaggattaatgttctaaaaaagcagaatacatttgtctaattcttcttttctagaaagaaggccataggcatgcacgaaaatgagacatgatttttaatatgcatgctgttcgttacatttcaatatgttccaactagtttgcttgaaattaactttttttttaaaaaaagttg

SEQ ID NO: 47640 - DNA, 237 bp, Setaria italica
  Peptide Sequence Number=SeqID_113614
agcgggtaatgatcaatctctctaaagaactgagaagatatcagataattgcaagcatacaagggtcacaccaccagttgcctcaaactccctatcatggtaactatattataatccttgcattaaattatgaagctctgtttaagatgatgtccattcttttgcttgcactgtcaaagatgtggatggttatgttcctgaatctgtaagcttattgaacagctggtaaaattgttg

SEQ ID NO: 47641 - DNA, 161 bp, Setaria italica
  Peptide Sequence Number=SeqID_113615
aaaacactgccgctgtccattttgaatgctttagttaccaacattgaaatgtgacagtattggatgtttgttgagaactcgaatatcaagggcctaggaagttgaacggaaccggaggtcaaaggaaaacagctactgatgctttttcaaaaaaaaaaaaa

SEQ ID NO: 47642 - DNA, 156 bp, Setaria italica
  Peptide Sequence Number=SeqID_113616
gcgggtttggctgcggcaacggctgtggctgtgggtttggatttggttgcggcagccaaacccgcaaccagggctgagcccaccacagcccctaccgcagccccagccacagcctgggctcaacccgcagccccagccgctgccgcaaccagaccc

SEQ ID NO: 47643 - DNA, 126 bp, Setaria italica
  Peptide Sequence Number=SeqID_113617
tagtagtataggctagtactgcggatgaccatatgtggatttagctttttcttgtaccatgattgtgtgcctgatagattgcttagattctttacgagagtgttagtactagcctatactactaca

SEQ ID NO: 47644 - DNA, 448 bp, Setaria italica
  Peptide Sequence Number=SeqID_113618
tgtaccccgtagtcttgtctaattcggtaacttaagtcgtactagtcggtaagtctatttcttgtctaaaggtccaacaccacaggcaacgttgggtgcggaaacgacctcctaactacgaaaatcctcggcgatgaagtccgggtctttctctgaagcaacaaaacaagggtgagtacaaaagtaatcaacaagtccaacctcaaccacgaagggggaaacaagcaagaatatgcacaggatataacaaggataaggataaagtttatttgcagtaaatctagattttaacacatgcaagggttcattttcaaaagagttttcacaaagcatttcttttggtaaccgaatcattaagtggggttgatcctacacaaaggatccaagttttaatactaccggactctccatccgcaatagctcacggcacaactgccagacacttccg

SEQ ID NO: 47645 - DNA, 344 bp, Setaria italica
  Peptide Sequence Number=SeqID_113619
acgatgcaggtctcttctttgatgagatctatcagcttgttggggtgaaatttggtgattattacaagtccattgatcagcttgaccaaatagagaagaatttggtggactccctgaagcaagcggcctatcagaatatagatggcattcagtctaactacaagatggtgaacaattatcctgtaccccacagatttcctgctcagggcacttccctgttgagtcctgttcttccaatcagcagatactgaattgtggtaacatcttctgtgaatttcatttgtagctgtaccataacttggcatcttttgtcattgataactttttttttaggctaggtcaac

SEQ ID NO: 47646 - DNA, 262 bp, Setaria italica
  Peptide Sequence Number=SeqID_113620
ggttcgggacttcgggtattgacttcctcttcatgttggcctctcggatgctgctacttatgatttttagggttcttgtcttgtggagtacaaaaccgtaatttagcctgtaatttgtgctgttgttcagacttctccagcatcctggtaggagttccaggatagatatttgtgtgccttcagttctatactttgcagtgtttctggtatcgggccaccatttcaatcttccaaatgtgttgtacgtgatgtgcttgcgttg

SEQ ID NO: 47647 - DNA, 207 bp, Setaria italica
  Peptide Sequence Number=SeqID_113621
tctttctcccttccgtacttgtgatcacaccaatgtcactggttggtatattgctggccatgacgctggcaaggcgctcgcactggggtgactgcctctgcagcacaccagtggacgacgctttcaggcagcggggctgaggacgtccgtgtcatgaccaggaagagcgttgacgatgcccggtcggtccttgtccttgggttcgtt

SEQ ID NO: 47648 - DNA, 374 bp, Setaria italica
  Peptide Sequence Number=SeqID_113622
acttctccgtgatgaaacttctcgcagcgagtgggacatcctctccaacggcggtgccgtccaagaaatggctcacattgctaacggccgggaccatggcaactgcgtctcccttcttcgtgtcaatagtgcaaactcgaaccagagcaacatgctgatcctgcaggagagctgcaccgacgcgtcgggatcctacgtcgtgtacgctccggtggacgtggtggcgatgaacgtggtgctcaacggcggcgacccggactacgtggccctgctgccttcaggcttcgccatcctcccgacgggccaccaggcgctgctaccccaataggaagaagaagacggacaagacctaggaaggactaggacggacggga

SEQ ID NO: 47649 - DNA, 195 bp, Setaria italica
  Peptide Sequence Number=SeqID_113623
acaaggtaggactacgactacctagaacaagtaggacgttaccaagaataactaagtggactctgtgcccacagccaagctctcgctggggtcagtggcaacggtgaacagcctcattgcttgcaccgtggagcgcatcaaggccgcagtctcaggcgagagcaatccccaatagcttcgttgaatactaaaaat

SEQ ID NO: 47650 - DNA, 338 bp, Setaria italica
  Peptide Sequence Number=SeqID_113624
cgctggacagcctgcgccccggatcagtcctcaagtgccggcgccggccatctggctgcctgatccaggaaatgcccaatggctactcgaaggtgacttgggtacgagcacgtagaggtggatgacaggtcggtgcacgaacatctacaagttgcttgtgaactcagggctcgcctttggtgcacgacgatgggtcgggacgctggaccgccagtgcgagcgccttgccagcgtcatggccagcaatataccaaccagtgacattggtgtgatcacaagtacggaaagggagaaagagcatgctgaagctggcagagaggatggtgatgagcttctgg

SEQ ID NO: 47651 - DNA, 292 bp, Setaria italica
  Peptide Sequence Number=SeqID_113625
ggaaacgaatgagacggcaagaaattagggtttgcgaggtggtcagaggagaatgatgatcccggcgaggcacatggccgtcgatgatgatcggccggggctccgacccgctgggggacgagttcgagagcaagtcaggcagcgagaacgtggacggcgtctccgtggacgaccaggaccccaaccagcggcccagcaagaagaaacgctaccaccgccacacccagcaccagatcccaggagatggaagctttcttcaaggagtgcccacacccggatgacaagcagcgca

SEQ ID NO: 47652 - DNA, 251 bp, Setaria italica
  Peptide Sequence Number=SeqID_113626
attattctatcacaaaacaacttctgtcatcctaactaacttcggcgtactctgaaaaaatgtacagaatggtgataccagaggtttggttgacgtaaaacctagaattactgatgagtcattggacaagtcaaaggtatggaaacttatggagataactgagtcaactcagtgcagatcaattaaactggcggataacatgagagcaagcaagatttcaagactgatttacacaaattctggtgttgcta

SEQ ID NO: 47653 - DNA, 241 bp, Setaria italica
  Peptide Sequence Number=SeqID_113627
caaccggtcccaccgctggctgggtggatgtcaaaccctccagcagtaacacaccctgccgtgtctggtggtgctattggatttgccgctttattgaagcatcctaggacgcccacaacagctaatcctagtatggattatccatcaggagattctgatcacgtctcaaagagatctagaccagttggcatggctgatgaggtgaatcttcctgtgaacatgttgcctgtgacttacccgc

SEQ ID NO: 47654 - DNA, 433 bp, Setaria italica
  misc_feature (422)..(422): n is a, c, g, or t
  Peptide Sequence Number=SeqID_113628
gcagttgagaagatgaactgctttagatggaaagatatagccacgccttgatctttccatctaaagcagttgagaagatgaaggcgtggctatatgataatttgggatctagagttgactatgacgcaccaggtcactggtgcactacaatggcatatagcgcagatggttcaaggctattttcttgtggcactagcaaggagggtgaatcacatctagtagaatggaatgaaagtgaaggagctgtgaagagaacatatcagggattccgtaagcgatccatgggtgtcgtgcaattcgataccacccgaaacaggtttttggctgctggagatgaattcatggttaagatatgggacatggacaacacaggtcttttgaccatattgatgctgatggtggcttacctgcaagtccacggntacgcttcaac

SEQ ID NO: 47655 - DNA, 228 bp, Setaria italica
  Peptide Sequence Number=SeqID_113629
cctataacggtggcgatgatattaggcaacacttggagattgatgcacatgttggtggtgtaaatgacattgcatttgctcatccaaataagcagctatgtataattacttgtggagatgataagacaattaaggtgagttactgcgatggcttagctaatcatgttgctaagatatgaagctctttgagtattgtatgctatactaggtatgggaggccactagtgg

SEQ ID NO: 47656 - DNA, 236 bp, Setaria italica
  Peptide Sequence Number=SeqID_113630
acttgtccacaccacctcctaatggtgcttcaagttcagatcaaccagaaagataatcaggagaagttgaaggggtagtgtttttgtggcatgagtcactaaccaagatgggcttcaaagggtggtgcaactaaccttggccaagctgcttccaagggtctagttgagcttgctttattgagcgcaccgtcaactagacccttggaagcagcttggccaaggttagttgcaccacc

SEQ ID NO: 47657 - DNA, 204 bp, Setaria italica
  Peptide Sequence Number=SeqID_113631
ctccaataacacaatgccacattctcgtgtgatagtcaactgatctatgcaagctttatggatgctactgttggtatatttaatgcatcgagtttgagactccaatgccgcattcttccagcttcatatcttcctccaagtatcagctagggttgaattgtgcccatgtgctgctgttgtcctagggaacagctcctcctgcct

SEQ ID NO: 47658 - DNA, 479 bp, Setaria italica
  Peptide Sequence Number=SeqID_113632
gtgcgggtgtgtgagggcagcttctgacagagcgcttcaggccatcgcttgtaactgtggccagctgcaatcgttgaacctgggctggtgcgatggcatcactgacaagggagtgaccagcttggcgtcagggtgccctgaactccgggctttggacttgtgtggctgtgttctcatcacagatgagagcgtagtggcgctagcgaacggctgccctcacctgcgttccctggggctgtactactgccagaacatcacggaccgcgccatgtactcgctggccgccaacagccgcgtgaggagccaggccgggctgggacgacggcgaagaaggggacaagacggacaaaggaaccgggaaccgggaacgggactaagacgaagacctagaaacaatacaagaccaagtagacaacggacgactagaaccccgaccggacggtagacaaggaccgtagtagacgaactacgttacccga

SEQ ID NO: 47659 - DNA, 326 bp, Setaria italica
  Peptide Sequence Number=SeqID_113633
taacgggaaaccgggaaacgggaactaagacgaagacctagaaacaatcaagccagtgcacggcgctgaccccgccggcggtgcaggccgtgtgcgactcgttcccggcgctgcacacgtgcccggagcggcactcgctcaacatcagcgggtgcctcagcctcacctccgtgcactgcgcctgcgccctccacccgcaccgcgccggccgtgccatcctctccaaccacgcctactgaaacccggtggatcaggcagccgctggggagtgggaggggaggggggcatgggcgttttctcgggtgtggtttggcgtggcgttgaag

SEQ ID NO: 47660 - DNA, 443 bp, Setaria italica
  Peptide Sequence Number=SeqID_113634
tgctccaatttcagtgacgctgctttagtgttcctcagtagccagtgcaaggatctcaaatgcctgaatctgtgcgggtgtgtgagggcagcttctgacagagcgcttcaggccatcgcttgtaactgtggccagctgcaatcgttgaacctgggctggtgcgatggcatcactgacaagggagtgaccagcttggcgtcagggtgccctgaactccgggctttggacttgtgtggctgtgttctcatcacaggtatgctaattcatcgatgtttgccgtgtttgattgattgaatttctgcacaactttgttggtttcttggaacttgactctcgctttgatctgttccgtatacagatgagagcgtagtggcgctagcgaacggctgccctcacctgcgttccctgggctgtactactgccagaacatcacggaccgcgcc

SEQ ID NO: 47661 - DNA, 319 bp, Setaria italica
  misc_feature (314)..(314): n is a, c, g, or t
  Peptide Sequence Number=SeqID_113635
ttctttaagtcgtaagttccttgtaactattctagtcctagttgtctacggcgctgaccccgccggcggtgcaggccgtgtgcgactcgttcccggcgctgcacacgtgcccggagcggcactcgctcaacatcagcgggtgcctcagcctcacctccgtgcactgcgcctgcgccctccacccgcaccgcgccggccgtgccatcctctccaaccacgcctactgaaacccggtggatcaggcagccgctggggagtggaggggaggggggcagtgggcgtttctcgggtgtggtttggcgtggcgttgaagngcggt

SEQ ID NO: 47662 - DNA, 227 bp, Setaria italica
  Peptide Sequence Number=SeqID_113636
tgttagcatgagcttgtattgatcctttacttttgtgatgctgcaggccatcgcttgtaactgtggccagctgcaatcgttgaacctgggctggtgcgatggcatcactgacaagggagtgaccagcttggcgtcagggtgccctgaactccgggctttggacttgtgtggctgtgttctcatcacagatgagagcgtagtggcgctagcgaacggctgccctcacc

SEQ ID NO: 47663 - DNA, 210 bp, Setaria italica
  Peptide Sequence Number=SeqID_113637
caaactcattgttcagattgaaaaggaacgatgaattctcacgatcgtagatctttccacgcttatctgcttccttgtgggagattagttcccagtgtactcgccaagatattcatgtttgttgacactattcttaaatcttcagaatagtgtcaacaaacatgaattctcacgatcgtagatctttccacgcttatctgcttccttgtg

SEQ ID NO: 47664 - DNA, 267 bp, Setaria italica
  Peptide Sequence Number=SeqID_113638
gttcgggtagggagagtggaatcacatggaaagaggagaaggcgccgagaaagccggcgttaacgaaaccgcagcctcggcacgccgctgcggggctaatgaggcgacgcgccatcccaactcaaccaatcccaaacgtcgaatcgaatcgatcctaaactggtaggtaggtacgcatcagttagtacagtactcctcttttggcacacgatgcagcagcatacaaagcaaatccaacaggcggattgaaggaattcactaggtcgg

SEQ ID NO: 47665 - DNA, 239 bp, Setaria italica
  Peptide Sequence Number=SeqID_113639
agttttatcagcttcaatgcggcaagtatattttgccataacatctggacgatcctgaaagtaggtaatcttccggaacccttctgcttcacactgagtgcaaaagttgccagtcgacttgtacagtatagaagttgtccatcttgatataggaatgggggcaataggatgtgccataggcccagcatcctgagggaattgatagattctgagtttggagacatcagcgatgcgtttta

SEQ ID NO: 47666 - DNA, 430 bp, Setaria italica
  misc_feature (36)..(36): n is a, c, g, or t
  Peptide Sequence Number=SeqID_113640
ttgaagtccgctacgagactgagcatcacttacgtnccaaacttggccagcttcccatctgttaaattcatccgagtcattggcaagtaagaaaaataggtcgctctcactcagatcagaatcaagacggacaggagcgctatatcccctcaataaagaaggaactggcttctcaggaacattttgaaatatgaactcttcttccttcttttaaattgaagcacagtggtgaagactggctgaccatcactagagagtgtttggagagttccatcgctgtaaacagaagttaggggcatatcttttccagtagagtcaacaagtccaacagcaacaggtatgaacatatgatcctagttctcagacattctctttaaaacttagccaagacgtgccacccacttccttggtcctaacttagtactaaggt

SEQ ID NO: 47667 - DNA, 244 bp, Setaria italica
  Peptide Sequence Number=SeqID_113641
ctagattggaatatgttcaagctcttgttctccattgctcccatattgaaatcaggaacaacaacaatgttgaataaatcgagatcatactcgagaccaaaaaacctcctcatcccacttcattgctgctttaagagaatacatagcatgtgctgtttttggtaaatcttgggcaggagtccaaattctgaagtagttaacaattagacggaccggtaagaacaaataagtaaaacaaaaataa

SEQ ID NO: 47668 - DNA, 102 bp, Setaria italica
  Peptide Sequence Number=SeqID_113642
tcacgacaagttactctattcccagtccagttgtggaaatactcatgtccaacgacacccaatctagacttgtgttggcatcacctgagactgccactgatg

SEQ ID NO: 47669 - DNA, 232 bp, Setaria italica
  Peptide Sequence Number=SeqID_113643
ttgttgttctttgtttttttggttaaattctttgggtctaggtagttcctaaatttctgtagtgttacattgcggccggtgcatgtaacaatgaatcctcccggcatcccaactgaccagcaactagagcaaataggtagcttggtttcttgaagggatcctcccacaatgcataatgctttccaccctcaaggtctccctgctgaataagattcccattggacaacaatac

SEQ ID NO: 47670 - DNA, 400 bp, Setaria italica
  Peptide Sequence Number=SeqID_113644
cgtgatatagcttgtcacttctcagtgttcatgaaataaggtgtcattgtttcatgggcactgattccatgaatgccattctttttcttgtgttccgtatattacagctcgatgttgtaaatagcatttcatgtttaacttccttgtagctagtagattggtctcaagactggtgattatgtgacaggtgtattgctggaaagggttacgctttttcggccaggcaggacttggatggatttgcccggttttctgactacgggattgaaggagttgtaccttcagagctcctgccacctgaagtaaatgccaagttctcttcaaagcctgctgaaaaggttaaacgagtgaaaagggaagattcgaaaggcgcttcagctcacccccgctgccacctcca

SEQ ID NO: 47671 - DNA, 413 bp, Setaria italica
  Peptide Sequence Number=SeqID_113645
acaagacaaccaatatggtagtagcagtaaacagcggactggtatccaaaaattcccgcagaactttgatcccctatacatatcaaaggcagcaattgtttctttaagagagttacaactaattaactttcgattaataatgtccttgtaaatgcttgatcgcgctgagactgaaacagagaatctgacagccgatccttcctttgctgtgatgttcctcttcacatcctggagtagccctcgtattgcgccatgaatgagtcattgaaattcttgaagctcgacatgatggcagggaagtcttcctactagacaaggaaaggaatacgtacgtaccggaaggtaggaaacaaccccttaccttactagaaccaaaaaccaagaatacccggaaacaagtaggaaaataccca

SEQ ID NO: 47672 - DNA, 276 bp, Setaria italica
  Peptide Sequence Number=SeqID_113646
gaagacttccctgccatcatgtcgagcttcaagaagcttgaggcagtagaaaacatctggtgctttgccagctcttttcgctgcctcgattgctcttggtggcaggcgtatttgggggaatgagtacatagctccttctgtgaaattacacacgacatttcggcaactgttgaaaccatctgtcatcatgcgtgctctcctcctcaaagaatcgaggatggacttgctttcagcagcaaacttcaggtatgagatatctccaggtttaggagggtt

SEQ ID NO: 47673 - DNA, 310 bp, Setaria italica
  Peptide Sequence Number=SeqID_113647
gttgttgctggaccattatgccatacagctatcacaaacatcttccagcaggttacaagacaaccaatatggtagtagcagtaaacagcggactggtatccaaaaattcccgcagaactttgatcccctatacatatcaaaggcagcaattgtttctttaagagagttacaactaattaactttcgattaataatgtccttgtaaatgcttgatcgcgctgagactgaaacagagaatctgacagccgatccttcctttgctgtgatgttcctcttcacatcctggagtagccctcgtattgcgccatag

SEQ ID NO: 47674 - DNA, 168 bp, Setaria italica
  Peptide Sequence Number=SeqID_113648
aagtaatgggtttaaagaagagcaaaaggataaagaatcaaacaatggctctgtttcacttacaaaaatttgcccagggacattcgggctcagtgctattgatgcaaccttgtagatctcatctactgtctgcaagctcaaatcggaagagaggttagcatcagatca

SEQ ID NO: 47675 - DNA, 139 bp, Setaria italica
  Peptide Sequence Number=SeqID_113649
cagaggaagacttccctgcaggaaggatcgtcgtccggaggtggaacaccccttccttctgaccaaaaccagatcccggaacagtggaaattcttgaagctcgacatgatggcagggaagtcttcctctgcaggaagga

SEQ ID NO: 47676 - DNA, 272 bp, Setaria italica
  Peptide Sequence Number=SeqID_113650
gtttgttctttcgttccgggtttacctttgttccctaacccggtccgtccgtccgttcggtcggcgccggggtgctcatccagaccaccagcctcatgtacaccgtgcccatggcgctcgcggcctgcgtctccaccagggtgggcaacgagctgggcgccgggaagccccggcgtgcgcggatggcggcgatggtggcgctggcgtgcgcgctggcgatcggcgcggtgcacgtggcgtggacggcggcgctgagccggcagtgggtggag

SEQ ID NO: 47677 - DNA, 290 bp, Setaria italica
  Peptide Sequence Number=SeqID_113651
taaaaaacttaaaaaccttaaaaaaacaaaaacaaaagaaaagggaaaatttaaagaacaacctagactagacaagacgactaccaacagatgccgcagcagtacatgagcaacatgggctgcgctccgcgcccgggccttccggcgagctcgtcagccatgatgaagccgctccatcagctgataccaactcagcagcagcagcagatgtggcagtaccatgtttctcagtaccagccgaggccggacgccacgccgccggcagcgtggtacggcatgcctacgctgcg

SEQ ID NO: 47678 - DNA, 461 bp, Setaria italica
  Peptide Sequence Number=SeqID_113652
agtcatactgccaagtgctgctaaagattgtctagccaagctacctgcatagataaagtagtgggacgaaccaacagcattccatatgtaaatccagtgcctggtgctacagatcaatccagcagcataaacccaccgtcaacagaaaatgagcaaatgcagggaactgttgtgaatttgccaagcccgtctaaagactcttccaataacagcacgctaaagcagcataaagtgcaatttgatgatagccaaagttatccagcacagaaaccagaggctcctctttggctggtactgcactgttatctgtctgaaagtactgatgtactttccgtttagtcctattacttcatggtttcctcaaaatggtttttatacaggtaaattctaataaatctgatatcgcaccacatgagagggaaaaacgccaagaattagtctagtcttacttacttaagtta

SEQ ID NO: 47679 - DNA, 257 bp, Setaria italica
  Peptide Sequence Number=SeqID_113653
cggggtggttgcacggggaggccgcgcgcggggaagaggaagaggagatgaagtcgtggagtccgttgagagggaaaacgccaagaatagcagcacacaagaaattgtgcctctggtccagactccactgccgcataccccagatgggtacttaataaagccctcttcaagcaaattagctgctcacaaaaatactatttctgaagcctccaaatttattgcacctggaaatcagggcaagtcttatctgcagcatt

SEQ ID NO: 47680 - DNA, 538 bp, Setaria italica
  misc_feature (457)..(538): n is a, c, g, or t
  Peptide Sequence Number=SeqID_113654
aacctaaaactaccaaattctaccttgattgactggtggctgtctatccgtcgaacaatgatcaacgccaaagccagaggcctggattccacagtcattctagtgtgctggaggctatggaaagagcggaacggccgagcctttgcgactgacattgctaggacgccgcaacagctcctgccgctcatcatcgatgaggcgtcgctctgggttcaaagtggtgcccgaaaccttgaagctttcggttggaagcctcctgatcgttagctaccgttagctactgtcgcaagcctaggcctttatttctagaaggagttttttattaagcaatgtaatcacactgtctaaatcccctaccgtgtgcgagagctcggttaatggcccgcgttgtacaaacgttattttaccttcctcttaattgaatgatacgcagttctcctgcatattactaaaaagnnnnnnnnnnnnnnnnnnnnnnnnnnnnnnnnnnnnnnnnnnnnnnnnnnnnnnnnnnnnnnnnnnnnnnnnnnnnnnnnnn

SEQ ID NO: 47681 - DNA, 333 bp, Setaria italica
  Peptide Sequence Number=SeqID_113655
caacaaatggataccaattatgatataagtagttcagaagaaaatgagcttccatcgagaggtactaaaaacagaagacataggcacgccctttgttcacaattgccatataagcgtcgattgttggcctatttctgtcaatggatcttttactttgttccactagatacatcatggaagctctaaagatggatgaagccatgcacgccatgcacctggtcttttccagaacattttctgccaatccaggcaatggagtctgctctatccaaaaacttttgccaaaaccacgccttgagggttttctttgtttaccttctttcttgtttttta

SEQ ID NO: 47682 - DNA, 363 bp, Setaria italica
  Peptide Sequence Number=SeqID_113656
aaagaacgctagattagaaattttggatgaaagtaattgcccggtgtttcatcatcaaattctatcagtaaattcaacgaaaaagcaacctggatcaccaaaccttccagctagaaaccgcgtaacccaatgtggatttgataacgagggcatacttgattaggagaagtaaaccaatcttgattcccttcccttagcttatttgcatcttcctcagtaaggcatccccacacaaacctgccgctggtgcgttgcttccgggaaccctcgcctgcccatggagtgcggtggaagtggggaggagtccggcagcggcgtacattccctccctcgcggcctcgccgccgtcactttgctcgccac

SEQ ID NO: 47683 - DNA, 303 bp, Setaria italica
  misc_feature (26)..(26): n is a, c, g, or t
  Peptide Sequence Number=SeqID_113657
gaatctgtcgcttggtttgacgcccntaccctttcatcactgccttcagagtttgcctatatgacatgtaaacaacatatccaatgaaattatgaaaagcatattgcaaaagagtccagtaattgccagctaggttgcaactaccttcatggctttgtcaaccatctgcctggcttgggaaagcgatctttgtacaaaggcagctatatatgactctagctcatcgttgtgaccaacagtgttgtctgggccacctctagattttgtagggccatcggacgtagacaacctttcaccatttta

SEQ ID NO: 47684 - DNA, 344 bp, Setaria italica
  Peptide Sequence Number=SeqID_113658
tgtcggggggtaggggtaggggtattggttgtcttattgtactattgttattctaattgttacttggtattgggttgtctaggtaagtattcttatgggagataaattttgcctataaggtgaacatttgatgttgaggtacaatttcacattgactaagtagataaatgaacatacaaactataatttgatttaatagattgatgcacaatgaaatagaaaacaagttatcagggtctgcttaattaataataaactaaacatacgaggataagcacacctcagcaaagttcctttggactgcaaatccagcatagaaacaacttctggtggcagcctgtatc

SEQ ID NO: 47685 - DNA, 480 bp, Setaria italica
  Peptide Sequence Number=SeqID_113659
cgcgggtcagtgcagaaactgattgttgatccagccattgcagttaaacaatctgctggctgatgttatcacgctttatctgttccccggagcctgtcctctcgactgaagcactggtggcatggctcgtaacctgtcggtgacctcggtgaatgagggccgaacatcaggattggccgaccaacattgttccatcagctttcgccaatcggggtcacagttttcaggtattggaggccggagagtgttattgacaataccgcctatgatagcaccacaatgcatattagcgtatggttcctcaccagtcaaaatttcccataaaacaataccaaatgagaaaacatccacctacagtgtgcagtacttgttacatatcaaccacatcatggttgcacatgcaatcaatgatctgaagtcctgtcctaagaaaaaggatctggagtctgattaaagaccttaccttctccgacactctgc

SEQ ID NO: 47686 - DNA, 242 bp, Setaria italica
  Peptide Sequence Number=SeqID_113660
ttagttctaaccgtttgtcttccttagttattctattcgttcctttttgttgtattgtacattaatcacctcttgtcgttcttcagcagctattacaacctgaggaataaccgagctggatgatggaatgcctgatggcatgttatcagtcacatcctcaactataacaggcacattcatatgaccattatcgtgcatcctgtgtggtagcttcatgctttcattagtgatgatggtatggt

SEQ ID NO: 47687 - DNA, 211 bp, Setaria italica
  Peptide Sequence Number=SeqID_113661
gtgtgagtagtagaacaaggctgtggtctgggaggagaacactttgtacgagtacctgcttaaccctaagaaggtattgttacttttctctttagttactgagatgctttagctagtctcttcagtgtttctttgttggtatggaaggttaaggggatggaaatgatgctctgtcacagttaactttttgtgaaaaatgacctccgtagat

SEQ ID NO: 47688 - DNA, 388 bp, Setaria italica
  Peptide Sequence Number=SeqID_113662
ttggtgtgatgctagaagagggaaggaggggcgtctggtatgctgtagaagataaagaagctaggatggagtccaagcactcgtgcttatgtagcactggtcgatttatggtgttgggagcggatggttgatgaagctgagaaaatgatggaaggagatggtttagctgctgatcagtatacttgcaatgtgctagaagatgctttggttgcggacgttgaacctcctgaagtggaattcgtggaattcagctgaggatgggcagcctccgcgaaatgttgaagtgcctcttttactaaaggggttttccgaagaactaacatttgttgatcccaggcaagccccggtgcatttatacctatctattttggagtcattattttctatt

SEQ ID NO: 47689 - DNA, 407 bp, Setaria italica
  Peptide Sequence Number=SeqID_113663
taaccaagaccatgtgatggcgatacagaacaagcccagctttaagaagaagggcaattcttggaagaagaagggcaaggctggaacgtccaagccaaacccaccgcccaaggttaaagctggacctggacctgctccagacaaagagtgcttctactgtcatgaacttggtcactggaagagaaactgcaagcagtacctagcttcgttgaagaacggcggaagtaagagtacttctacctcagggaatgataagaagtagaagcgtggaaagaggagaagttgatttccgcatgggcaataatgcaagagttgctgctttgaccgtcgggacgatgcaactccacctcccggtcaggatttattatggagttgaataattgttattttgttcctagtttaagtcg

SEQ ID NO: 47690 - DNA, 258 bp, Setaria italica
  Peptide Sequence Number=SeqID_113664
cgaacgcagagcacgagcgagctagcgcccgcgccggccatcatcctcgccgtcaaatccttttgcgccaccgcccaacaacagcccctgtagcctcaccatgacgccctaaggctgaccgtcgcccagtttttcgccgtcaagcttcaaaatcgccgccgttactgtccgccggccgccgtcacccaatccccaagacgtcacaactcctgaagtggaattcatggaattcagctggagacggacatcattcgcgaa

SEQ ID NO: 47691 - DNA, 321 bp, Setaria italica
  Peptide Sequence Number=SeqID_113665
cggggacctcggtggcggccgcggccacgatgctggcggcggcggcggccatcttcatcaccttcgtcctctgcttctacctcttcctctgcgccaagcgctaccgcggcgcggccccgacgatcggtggaggaggaggaagggccggcgaagccgcattaagctttttcttcttgatttgcttgttgcgttcctcatgttcctcatcttctcgagccatttgaggcatcggaagaagaaggaagcaagtgtacagagggatctgttgatctgtaatcaacagctacatatagtgctagaaatctaacaaacaggattcat

SEQ ID NO: 47692 - DNA, 340 bp, Setaria italica
  misc_feature (277)..(277): n is a, c, g, or t
  Peptide Sequence Number=SeqID_113666
ttaagaaccttaacaaatttaacctaacaaataacgtaacgaccctacccaagaagtgcttcaggaagttcatgtgcttggggatgcggtgccaccatgtgaaaatctcattcaggtaaccttgatctccaccgttgtacgacgtgatctcgttgatgtggtccatcagcagctggaacgtgcagttggaaggctctatgaccatgacaccggagttgaagagcgttgcgttgtgccagttgcagtgatctctggcattgcgaacaggaagtcaacnttcctaagaatgagaaggtcagcatcgatgaagatgatcttgtcgtagtcagtcagctgccac

SEQ ID NO: 47693 - DNA, 274 bp, Setaria italica
  Peptide Sequence Number=SeqID_113667
ttccccgagatgccggcgaacgcgaaccgctccgagatctccacccctgtggcacaccaccgacgacggcaggcgggtcagatggggcaagagagacgacgatggccctgtttacttgctgggtaccgatgatgaagacggcggcgggccaccggccggtggtgaggcgggagaccggccggccgacgtggtccagggcggtcgccggctgcggaaggaggatctccaccgcggcgtccatgatgggcggtcccactcccactccctcctcgcc

SEQ ID NO: 47694 - DNA, 255 bp, Setaria italica
  Peptide Sequence Number=SeqID_113668
cctgcctctcctgcgccgccgtcttctgcccctcccacgccgcctcgcacgcctccgcctccgcgggtcccggccaccagatcgccgtcgacgtcgaccgcgccgagctcttctgcgccgcctgcggcgaccaggtctacgatcccgacttcgaccacgccgtcttcctcgcccaatccaccagctccccaacccaccaaaaccctagccgccgccgccgcggcatctcaggtaagcaggagcgtcctcccccgc

SEQ ID NO: 47695 - DNA, 434 bp, Setaria italica
  misc_feature (40)..(40): n is a, c, g, or t
  misc_feature (80)..(80): n is a, c, g, or t
  misc_feature (115)..(115): n is a, c, g, or t
  Peptide Sequence Number=SeqID_113669
gttttgagattaatgtctcatgtccacatggcatgctagnggaagtttgtggttggataaattagaaggccgttgtgccngttgggcaacggtgactcctaacattagagataanacagcctgcaagaatagctactaatcctggatgtgaaggagtttctgccattaacacaatcatgagtgttatgggggattattttgtggataccaacccgcagtccaggggagcctttaagattcaggaggtgcagtggatcaggaagtgcatctaaggtaataacatagcttcatccaatcatgggtcgtgcataagtgatagtactggtctagatatctcaacatgccagtacctggtttagattctcaatatgttctattgtctttacccttagttaactaaattaattagtactaaagtacttaagttaaaggta

SEQ ID NO: 47696 - DNA, 218 bp, Setaria italica
  Peptide Sequence Number=SeqID_113670
acagaaactaattcccaccctttgcagcaatttaggtttgactccaagcttttgtatgtagagtcaggaggtgcagtggatcaggaagtgcatctaagattccgaaaagccttggaaggtacagatgttgtccaagaagatacttcggttcaaagctcgcatctgaaagacactacaggtatgccatgaactctaacttccgtacaaatgtcttctgg

SEQ ID NO: 47697 - DNA, 192 bp, Setaria italica
  Peptide Sequence Number=SeqID_113671
aaacaaaaattaaaataaaggaaaggaaagtaaacaaaacaaaaagaactagacaataggacaatagaagacttattgaacgtgttgaagagtctggagtggatgctcttgagattaatttctcatgtccgcatggcatgccagagaggaaaatgggtgctgctgtgggacaagactgtgatttgctagagg

SEQ ID NO: 47698 - DNA, 134 bp, Setaria italica
  Peptide Sequence Number=SeqID_113672
catctctgcaatcccccatcccacccaccgtacttcaacttgtgactaaaccgcgttcatcatgttcgaggaaagaatgtaaaacatttgcttcattctggtgtgctaaatttatttaacatgatgaagcaaat

SEQ ID NO: 47699 - DNA, 372 bp, Setaria italica
  misc_feature (221)..(221): n is a, c, g, or t
  misc_feature (336)..(336): n is a, c, g, or t
  Peptide Sequence Number=SeqID_113673
gggcaggcagtcctgaggtatggctgggcggacacccttgttcaccacagcgaaagcggcttgtactgctgtcatgttggcgaaagggagcatgccagttataagctcccacagcacaatgccaaagctgtagacatcaactttctggtcgtatggcctgtgctgaatcatctctctgcaagaatgaaaatcaaggtgtcaagaatccttgccatttttangtatatgcgagaatagcttcagatttaaacaacacaaaaaatataaccaataagcagctgggtatgtaagcctgccaatagcatcacaatggaccaccattacaagaaagaaacngaaagacatgagtcaataacacacagtaactgtttc

SEQ ID NO: 47700 - DNA, 305 bp, Setaria italica
  misc_feature (301)..(301): n is a, c, g, or t
  Peptide Sequence Number=SeqID_113674
aaagggagcatgccagttataagctcccacagcacaatgccaaagctgtagacatcaactttctggtcgtatggcctgtgctgaatcatctctggtgccatccaacggtaggttcctgtttcaggtgtcatcccctcagttttgacttcaatccgagctaactccaaaagtactagactaatacttaaataagaatttaatacaaccaagacaaatacaaagaaggttagtactagaattttaagaataccctaatagaaatagaaacccaaagaaccaatagaaaacaataaggaccaanacca

SEQ ID NO: 47701 - DNA, 340 bp, Setaria italica
  Peptide Sequence Number=SeqID_113675
aggaaatggtaagacaggttatgctaatcaagcaaacaacatgtgcttttaggactatctggagtcgggggcatatttaatgaggaggttctcaaggctatgaaagaatctgattttcctcgccctgcagtttttgcaatgtccaacccaactactaaagctgaatgtactcctgatgatgtattcaagcatgttggagagaatgcgatatttgctagtggaagccctttcagtaatgtttcattgtctgtgatgtatgatgccaggcactcagctgctgcttgaagcatgccatctgaaatatgccgagcacctgaaaaggagagctaccctaaaaacc

SEQ ID NO: 47702 - DNA, 230 bp, Setaria italica
  Peptide Sequence Number=SeqID_113676
gctatgacagggatggtcaaggatcgcctacactcatcgttgtgggtgctcatccagaacccgaaacccaccaccagtagtgccagtatctgtccaagaataacaatgcaagattcgtaagcaatacctgtccctatgttcatatgttaacatgaactatcaatcaatgtgggacaaattgggaagcagtgcagcttaacacaggaaatgcacggggcacagccaccaga

SEQ ID NO: 47703 - DNA, 271 bp, Setaria italica
  Peptide Sequence Number=SeqID_113677
ctccgagcaaaaacatccggtcctcccgtcaccgccgacctcgcctgcgccgccgccgcagttgcctctcgcggtgcccggacgaatcttgcggccggtgcggtgggataggaccctaccaacccggcgagacccgtgtatgtgcctcctagccctagacgtcgcacaaggctttagctgtctacgacgcgccgccgagcaccacgccgccgggcacttactctatcgttccctctctctctgggcaggattttttgctcacctctcttcg

SEQ ID NO: 47704 - DNA, 276 bp, Setaria italica
  misc_feature (268)..(268): n is a, c, g, or t
  Peptide Sequence Number=SeqID_113678
ctccgagcaaaaacatccggtcctcccgtcaccgccgacctcgcctgcgccgccgccgcagttgcctctcgcggtgcccggacgaatcttgcggccggtgcggtgggataggaccctaccaacccggcgagacccgtggccggttctctctcctagtgtggggtggagatccatcagtgcgagactgcgaggggctgatttccttctggttttggttttcatcttcgtcaccgtacaaacaagatagcacttgctcgtacctgtttanggtgaggg

SEQ ID NO: 47705 - DNA, 247 bp, Setaria italica
  Peptide Sequence Number=SeqID_113679
cagtggaactgtgagcctgtgacaaaatttactgaaacttcaaaattttacaagtcctgaattacacgaggtccagtcattcgtgttgcctgatcaacaacttgacacggcgccatgcatgctcctaactgaatatacactgaacctttacagcaccatgcacaagagggggaaacagagaaaagctactgaaggccagtattattgtcagacacagggcgaactacacgtccacctggactgcctt

SEQ ID NO: 47706 - DNA, 258 bp, Setaria italica
  Peptide Sequence Number=SeqID_113680
gggggaaagtgtgcccaaattttaactggtccaacaaactaactggttgggcagaaccaggacatctacaacaatcctgaaacttgcaacgtgcacaggggaagtgtgcccaatttcaaatgggtccagcaaactaactggttgggcagaatcagggcatctacaaaaaatcctgtaacttgcagccagggaaaatcagtattcgccggtattgttcctttcggttggttttgtaagtttgtattgggtattgtagtt

SEQ ID NO: 47707 - DNA, 208 bp, Setaria italica
  misc_feature (170)..(170): n is a, c, g, or t
  misc_feature (203)..(203): n is a, c, g, or t
  Peptide Sequence Number=SeqID_113681
gatcccatatctttattgtcctgtcagctgaacctgtacagaaccactcattgcctggatcaaatgctatagaacgcacccaacccaagtggccactaatgacccgatagttcttccaaggagcatgccatgcaggccttggagagtgaggcatgcatatatgccctttntacgatgtcagtggatctagacttgtgtcttgngaggc

SEQ ID NO: 47708 - DNA, 383 bp, Setaria italica
  Peptide Sequence Number=SeqID_113682
tgaggatcgacaagaggcaccgcgcgatggccaactgggtgctgtcgagagacatgactgtgtctgaatttcttgctgctgatattgacaacaatggaaatatgtcacgaaatcagaattcgcggtttacaagctcaaggagatggggaagatttctgagaaagatatcatgatggtctgcgatcaattccaaaggctggacacaggaaactgtggcaagattacgctttcggaccttctggagagccaccacttggtcacagaacccagagacaaaaaaagggagaaatcataacaggtgtgtccgggcacacaaactgtagagcagtattagaattttaagaatacagaatataaaaagggtgacaatttaggtaagatct

SEQ ID NO: 47709 - DNA, 456 bp, Setaria italica
  Peptide Sequence Number=SeqID_113683
gcgcgatggccaactgggtgctgtcgagagacatgactgtgtctgaatttcttgctgctgatattgacaacaatggatatgtcacgtaagtccacgagattttagttcaccagttttttcttgcatttactactacataagcagatgattacattcaaattgtttcttacttttttgctgtagaatatcaataatccaccgataaccatgcaaataggtgttcaaaattgattatcctccagagaggcttattggctatatatccacaaataaaaggcatctagttcgacaatcggagatcacagcttaatagcactatcaacttatcgtcaattagacaaagtaattattagaaactctccagctatggatgaacttagggccagacactaggcagcagtcatatatcattaacattggttgttcactaggttatctattactctattctgtttg

SEQ ID NO: 47710 - DNA, 472 bp, Setaria italica
  Peptide Sequence Number=SeqID_113684
ttagttttaggttaaagttaaaaggtttaccttaatttaatttaatttagtttttaattttagttaccttttactaagtaatttttacgacatcttccgacaaagcgccgttcaaggcgtttcgagacagatcaagccccaagatgttctgaatgccccatagccccatgggaattgttgaagtgaaccggttgtttgataattctaaggtttgcaggttgctcagatttccaatgctatctggtatagggccatgaagcttgttgttggccaggcccaaagccaaaacaggttttgctaattttccaatgtgtacggggatagtcccagacaactcattgctagacaagtcaagacctttgagattctttattccgtaactgatatcggaatttccccgcttaataggttgttgcgaagatcaaggaccagatgctactctgatttgcaagcatatctgggatgtgcccag

SEQ ID NO: 47711 - DNA, 393 bp, Setaria italica
  misc_feature (254)..(254): n is a, c, g, or t
  Peptide Sequence Number=SeqID_113685
aagttaaggaaagaaaaggtaccaataataatagttaattgccttcagattttcgacatcttccgacaaagcgccgttcaaggcgtttcgagacagatcaagccccaagatgttctgaatgccccatagccccatgggaattgttgaagtgaaccggttgtttgataattctaaggtttgcaggttgctcagatttccaatgctatctggtatagggccatgaagcttgttgttggccaggcccaagccaaacnggtttgctaattttccaatgtgtacggggatagtcccagacaactcattgctagacaagtcaagacctttgagattctttatttccgtaactgatatcggaatttcccccgctttaatagggttgttgcgagatcaagg

SEQ ID NO: 47712 - DNA, 301 bp, Setaria italica
  Peptide Sequence Number=SeqID_113686
taacttagaagacacgcatcaacaacagcgacaagaaccacgatgactactactgtcagggcaagcagcagaggctttgtggcgctgtgcttcgcatccctcctcctcttctcatcgtttgctgctgccgaaacctccgatgcttacacgaggatctgtatacccgggccttgcccgaacccggcaggtccagcagtgccaggatacggtggtagtccgccagtgccaggatacggtggtggtcaaccagcgccaggctacggtgggaagccgtgaagaatgccgtcggtcctgcgccaac

SEQ ID NO: 47713 - DNA, 241 bp, Setaria italica
  Peptide Sequence Number=SeqID_113687
aaaaaacaaaaaataaaaataaagaaagacaacgacatcaacaacagcgacaagaaccacgatgactactactgtcagggcaagcagcagaggctttgtggcgctgtgcttcgcatccctcctcctcttctcatcgtttgctgctgccgaaacctccggtacccgtggcaaaactcatgcttacacgaggatctgtatacccgggccttgcccgaacccggcaggtccagcagtgccagga

SEQ ID NO: 47714 - DNA, 274 bp, Setaria italica
  Peptide Sequence Number=SeqID_113688
tagtaatactagtttaggaaagtaatactagacaaggtagacttacaagtaatttttacctggaaggaaactacactggtcagtctgcaactgttttgagacttctgcaatgtctttgagaaagaatttttctcggcagatgatgcagaatagctaaatccaccgtgtggcataagcccatgtgattagtaaacctctagtgtagtgtgcagaagtggtgtcttcatagcttttgtacaccactgtggctaatagattgccttttctattgtcc

SEQ ID NO: 47715 - DNA, 247 bp, Setaria italica
  Peptide Sequence Number=SeqID_113689
gtgcagaagcacctgatcctttgtttgttatggaaactttggaactcatggaggagaaggccattggcatgagtaagggtatctaccgatatgtcattcgagccctgagcagaggagggtatgtgaaggaggcactccactggttgatgcttctaggggagaaagaaagcacccatgccactttgccgttttttaatatctttctaaatgcctgtggaagtagtgcaaatctgaaggatgttgaatg

SEQ ID NO: 47716 - DNA, 252 bp, Setaria italica
  Peptide Sequence Number=SeqID_113690
cgcgcataaaaaatagcagtttcttggcacgcacgctcggctggagaagaaggatgggaggctgttcgtgacggacctggacagcaccaacggcacctacatcaacgagcgccgcctcaaccctggcttccccatccccattgaccccggcagcctcatcatcttcggtttgcaccgatgactcactccgattcagttattcagagaagaaaagcaaggctcttattggttgtcaactgtggaatttgctta

SEQ ID NO: 47717 - DNA, 234 bp, Setaria italica
  Peptide Sequence Number=SeqID_113691
tactaaaaccaaaggcctcctcccctgctgaccagcagcgccggatctgatggaagccgcagcggctaccacctcctccctggtcctcttctccactactcccaggagatcagtcacaagctttttgaagacttcccctcgttgcttcttcggcctcgttgcaactacagctgctccatctccagcgcaaagcagcagcatctggtttgccaggctgtgccatggctgatgaac

SEQ ID NO: 47718 - DNA, 256 bp, Setaria italica
  Peptide Sequence Number=SeqID_113692
cacccgcttcttcaggtgcgtgttccagacgttcttgatctcgttgtccgtccggcccggcaggcacgccgcgatcttggaccacttgttgccgagcaggccgtgcagcttgatgatggtctcctcctcctcggcggtgaagttgccgcgcttgaggtccggccggaggtagttgatccaccgcagccggcagctcttcccgcaccgcagcagacctgtgccgtgcaattcaaaaccaccattacgaaccccccat

SEQ ID NO: 47719 - DNA, 255 bp, Setaria italica
  Peptide Sequence Number=SeqID_113693
ggggcgcaggtagttgatccaccgcagccggcagctcttcccgcaccgcagcagccctgcggccctggggagcgacctccagcacccctcgccgtgggccttgatgtaggcgatgaggcgctggtcctcctccttggtccaggcgcccttgttggtgtgcgcctgctcgcagcacggggacctccccatgccggacgcggccgccgcaggtagatcctcctcctcctcctcctccctccttcgatcctgctccgg

SEQ ID NO: 47720 - DNA, 272 bp, Setaria italica
  Peptide Sequence Number=SeqID_113694
taaaacttaaaaccgtaaaactaaacaaagtaagaacgtaatagtagtgtccttcaagaatcatcctcacctccgaccccaagctccccttcaaagtgttcagcgtgcccgaggcggcgcccttcaccgcggtgctcaagttcgccgccgaggagttcaaggtcccgccccagaccagcgccatcatcaccaacgatggagttggcatcaacccccagcaaagtgcaggcaacgtgtttctgaacatggttcagagctgcgtctcatccctc

SEQ ID NO: 47721 - DNA, 212 bp, Setaria italica
  Peptide Sequence Number=SeqID_113695
ttacctaattacgttaggttagaatgaatggcgttggcatcaacccccagcaaagtgcaggcaacgtgtttctgggggttgatgccatcatcaccaacgatggagttggaggtgtggatgtatctttctagatgatacagtacattatgagcaaaactcgagcgaataaagtttgatgttagctgtgcttggttgtaaaatttgacatgaat

SEQ ID NO: 47722 - DNA, 392 bp, Setaria italica
  misc_feature (387)..(387): n is a, c, g, or t
  Peptide Sequence Number=SeqID_113696
agaacatgcagtgtgcaccttcaccctgacactttgaatacaacaacagtctgatggtgtcaggtacaaaaacacggtacctggtacccaagttacacatcgtttgcttatttatcagctggttcaagcaaaaaaaaaaaggaaatgtgggaaccaagtttatagatcacaagggaagaacaattcagcgataaaggctctccgatctcaagttctcagcaatctcagtctcccagcggtcgccgttctcaagcagtttctccttgtcgtacagcagttcctcgtgggtctcagtagcaaactcaaagttaggcccctcaacaatagcaataaacaaaaactaaaaagggaaaaaacaaaaaaaagaaaaactaaaaattaaaaaanaaaaa

SEQ ID NO: 47723 - DNA, 178 bp, Setaria italica
  Peptide Sequence Number=SeqID_113697
cttgggcgtcccagcgttgaagtaggtccggaggtgcccctgcatcgccgatgcgaaggggccaagctgcgccgtctgcctcgcgcggagcgcctgcgcagcccggcagctcaacctccctccctctcgatccaaccccatcgcatccgccgcgtcgtcgccatggtggagcgaacca

SEQ ID NO: 47724 - DNA, 243 bp, Setaria italica
  Peptide Sequence Number=SeqID_113698
attagcagcgcaatcagttcgcactgcagatgaattaaacgccacaacaatttcaagaaccgttctcacgtggtgtcagaaatgctgcccaaaatcaatgtctagagcaagaattgcagaggcgaaggaattgggccacacctattgtccagaaagacgtgtccgtcttcacggggtaagtcaggtcgtggttgaggtatggcgggttgccgcggatgccgacctcgacgtggcccgcctgga

SEQ ID NO: 47725 - DNA, 336 bp, Setaria italica
  Peptide Sequence Number=SeqID_113699
cctgaacatgtctctgcatattacccttgatattgaacttacggtcgcatccttcaatgggcacacaaatagtttcccttgatgagtaagtagatgtctgttcaaatggtccttcctactatagcttaagggcaaccatcaatgtggcaggcaaagggcctctcgagtgaatggctctgcatatgttgcttcagatgggctggcttcttgaagctcatgccacactccttgcagtcatgggtgacctccttgcgcgaagcaccgcctccaccttcctggtaatcctccagatcacccacttcatccttattggttgcttggtaggtactattgggt

SEQ ID NO: 47726 - DNA, 403 bp, Setaria italica
  Peptide Sequence Number=SeqID_113700
taagtttgtctacttttgtaattattgttctattaagggttcctattagtatttgtattggtttgtattgttcgttggtccttatggctttgtgcttttaccagaagctataattatattcatgttggaatgatgactgattttgctttctgggcttatttttttacattttcatttagtgctaaccaatgctgtggatatctacatgacatgcatgcatgattgcatcccagaatgcccttcttttgcatctgcttgtaggcctatgaaatgaacaaaccttgattttgtttgtctgcttgcatgtatttcttaatttctcaatgctagttgtaaacggccatctgaaacttgtgtgctgaacaaaatcttgaacattacagaatgatgtggttaccatatt

SEQ ID NO: 47727 - DNA, 254 bp, Setaria italica
  Peptide Sequence Number=SeqID_113701
tgtcacctcaagcttgttctttctgccgcctcattcagctccctctttgccacgataccattgtatctggtcagtggataatagttcatagtttttcatgttatgttcaattttcatttttttttgtgtttgtgcatgatccttattgacaaaacttgtgttgtgcaatgttaaaatcacagctttcatactaatcatttcaatttgttatttttcttaatacatcttccatactaatcatttcaatttgttat

SEQ ID NO: 47728 - DNA, 208 bp, Setaria italica
  Peptide Sequence Number=SeqID_113702
actcagtgtgagtagtttgcatcccagaatgcaatcatgcatgcatgtcatgtagatatccacagcattggttagcactaaatgacatgcatgcatgattgcatcccagaatgcccttctttgcatctgcttgtaggcctatgaaatgaacaaaccttgattttgtttgtctgctagcattgagaaattaagaaatacatgcaagcag

SEQ ID NO: 47729 - DNA, 152 bp, Setaria italica
  Peptide Sequence Number=SeqID_113703
cttgttgagcgcagcaaggctgatcactttgacgcccatcttgtccgccctcagaatggccagctcgatctgccggttgatgcccttcttcgccgatggaatgaagtactggaagccgtatctggggacgctccaggtctggtggagccggc

SEQ ID NO: 47730 - DNA, 225 bp, Setaria italica
  misc_feature (37)..(37): n is a, c, g, or t
  Peptide Sequence Number=SeqID_113704
tcctacatgggaaaccaaccaaagtctgttattgaancctttgttctgctgctttcacccttcgcaccacacttggctgaggagctttggtttcgccttgggcatccacaatcattggcatatgaacagtttccagaggtaacatttaatctatcctgcttcagggcatcatccctttttgttgggtgacttacattgctgattcatttgaagatgaagatttag

SEQ ID NO: 47731 - DNA, 448 bp, Setaria italica
  Peptide Sequence Number=SeqID_113705
gggggtgtgtttcagtgcatgggttttgtccataaccggactcgttgtactctcttttctctcgtaatgaaatgacacgcagctcttctgagtcgttcgagaaaaaaagataccatgaatccatctatgatgtgcacttgtggaaaagtttagtattactagtgtcaggaatgccaggactaccataaagcactgccatattatttcccattatgattaaataattgcagatggggtctattacctggaatggaccaaatatctcctttgtcacaagctcaaaattcccacttttaaggatttcctccagaggaacaaatacagcagttggcttcaaagcaccgtatatttttggaatagagtgattttccaaaggttcaccaccaaaaagaaccttgatcctggtatttgagaaggttgttctatgtgctctgtcattgcttctgtg

SEQ ID NO: 47732 - DNA, 452 bp, Setaria italica
  Peptide Sequence Number=SeqID_113706
cccccttttattgtttcagttcttctcttctagctgccaaatactaccaataaccttacaatagtacgcagagggagcgaccagttcttggcacgggcccgatatcgtatatgatctccctgtggcaggaccagacaagtttgatggcttctggagttccgatgcctgcacctcttgggtccccggctggaccaaaccagtggttctgcggagcgccagttgtccttgctctgattccagcgtatgttgtcccattgactgatctcccaagcacgtcctgcaggaataatggatcatttgaaactacagcagctgtcagatgcgcattcatcctttcacaggcttctaataccaagtcaagctgatcctcagagtattctgtgaccacctggattatgaaattaggtagatccgtgtttaatatagaacatcttaacaataagtaacgctag

SEQ ID NO: 47733 - DNA, 386 bp, Setaria italica
  Peptide Sequence Number=SeqID_113707
aaactaaaggaaagttaaaccgaaataagaacctaagaacaacctacttagggtaccccggactaggaaccaaaaccagtggttctgcggagcgccagttgtccttgctctgattccagcgtatgttgtcccattgactgatctcccaagcacgtcctgcaggaataatggatcatttgaaactacagcagctgtcagatgcgcattcatcctttcacaggcttctaatccaagtcaagctgatcctcagagtattctgtgaccacctggaatggaccaaatatctcctttgtcacaagctcaaaattcccacttttaaggatttcctccagaggaacaaatacagcagttggcttcaaagcaccgtatattttttggaattagag

SEQ ID NO: 47734 - DNA, 367 bp, Setaria italica
  Peptide Sequence Number=SeqID_113708
tctgcggagcgccagttgtccttgctctgattccagcgtatgttgtcccattgactgatctcccaagcacgtcctgagaacagggataaggaaagggctctaaggtcattcaagtgtttgattattgacagcaacacaactgaagaactttgcaatatcgtggggaaatcccaacttcatcaaccggtttcatgacagaaatgaagagttccaataacaaagtcgatgaatataagaatgaaaacatccccaacagagaagaaaaccaacttgcctgcaggaataatggatcatttgaaactacagcagctgtcagatgcgcattcatcctttcacaggcttctaataccaagtcaagctgatcctc

SEQ ID NO: 47735 - DNA, 380 bp, Setaria italica
  Peptide Sequence Number=SeqID_113709
aatgtcttatttacggaactgtgatgggcagctgggagcactgcttgcattcactccaccaggaattaaagaggccttctgcaaacttgtgacaacatcaccgacatgaaactgcacgatttcctccactttgttaggggcaccatttaacttcccttgctcccatttaatcttgcctccagttgggtcttcttcaatctcatctgagatatcctgaggaagacgagcaaaatagatattcccaaacttatcagctccagccatagtgtcaaaatctatgtgttgagctgctgtaacccatctgggaacactgtcatcagcaaagatatacaactggttttcatcccgtctgtacttgcagtagtgaaacgactcttgca

SEQ ID NO: 47736 - DNA, 229 bp, Setaria italica
  Peptide Sequence Number=SeqID_113710
acagtgtgcttcaaactgtctttgcagttcagcttcactgaaaataagcagatctgtaagccaaatgatatcttccacataatggtggatgctcctgacggagatgcatctccaagtgagagaagaagtgaacatcttccctggaggtgaatgcgagcagtgctcccacactgcccatcacagttccgtaaataagacattcacctccaccaggaattaaagaggcctt

SEQ ID NO: 47737 - DNA, 255 bp, Setaria italica
  Peptide Sequence Number=SeqID_113711
cgcattgactgtttgttactcggtagacactgcggtaggcggtagctgccttggcaacgatgtaccatagaaagggtacatcacgagcttgctcccaacttgttgaatgccgcatcacatcttgaagtgctgcaacaggtcaagctggatccaacttttgaagcatccgaggaccagacagttgcattgccgctaccctggttctttcaaactatactgtgggctcggctcagatgatcttgttcctgatgtctt

SEQ ID NO: 47738 - DNA, 172 bp, Setaria italica
  Peptide Sequence Number=SeqID_113712
cgactgtttgttacttggcttgatgtaattgaagttattcgtggatgcttagtcgagacatcagctgaaatcagctctaagggatacaatgcagtaatgtaatctatgcttgagtggctcaaacgcagactggcgagttagcataagaaaggaatcaaaacacaagcttgct

SEQ ID NO: 47739 - DNA, 268 bp, Setaria italica
  Peptide Sequence Number=SeqID_113713
ttcgttaccttctaccgtacgttcgggtacccttcgttcttccttaccttgtctagggcccgctcacgcggctgctcggcggcatcttccacctcttccccgccgtattctccttccacgcccggcgagaataatcagctactaggatgcaacatggtctcatgttctctcgtctgtctctacccagccttcctggaaatggattcatacaatggtcgtacttgtactctacaacagatgtggtgatctctgtaagtccaaggttgtt

SEQ ID NO: 47740 - DNA, 241 bp, Setaria italica
  Peptide Sequence Number=SeqID_113714
catctcatctccagatactttggtttaggaggtgcaccataatttccttgagctgcagacagccccagtgcatgtgcaaacattcttctaattttgctttatggtgaagataccatgttcagtagccatttatgaagctgttatggcttttaaacagatgactgggaagtcccagcaatgcataagaaatcagtctttatttgccaaatgcttttaattcataattgaatttttgcccacc

SEQ ID NO: 47741 - DNA, 265 bp, Setaria italica
  Peptide Sequence Number=SeqID_113715
aaatgtttgttgcagaaatcgcactgtttctgccatatgccttgagattcttttaattttattttgaaacttgttgtgtatccctgctatcgtaaacatcatgaatatgatcactattacctgcttccaaggctgtgttttggttaacattatttttccaattaataaagtttttttaaattggtggaacatactatatttgtgtgctttacagattgagaatcaagatctacctggacttagcttcaagacacacccttatatt

SEQ ID NO: 47742 - DNA, 467 bp, Setaria italica
  Peptide Sequence Number=SeqID_113716
ctctaagctcgtacctgaatactctccctctttggatgaggaaggtgtctgtagggcagcatttgaccttgcttctgcttttgatgaagccatttcccttggaaacaagaaaacgttactgttgctcaagttaaacagtattgtgagatggagagccatgaagagaagctgtacaaacttgtcatgcagagcaaaataaatgaaactaaggatcacatgaggaggagagttactgagatcgagaaaagcaaggccttggtactgttaagttgaaatttggtaaacattaaccataataactctaaaagatttgagtccacacaaaatatttacttatctgagctcttcctcatttgctactccatttgtttcctcacatgggatcttaatctaataatcactgtcttctgttaggtatattccagttctgtagttgctgataaatttttgaaagataggtctaagtt

SEQ ID NO: 47743 - DNA, 246 bp, Setaria italica
  Peptide Sequence Number=SeqID_113717
ccatggcgagacctggagcatcctggtccggcaaccacatcctatgcacgtccggttcgtcatccatggcgaaaactcgtcccttgcagtttagaatccttgcgagttcacctatcgcgtgcacaacaatgtaaaatgcaatcaagaaaatgtacacatacatttcaagaaagttaagatgctcgcttacttggaagatctggcttcaagtcagttgtcagttggactgggatcagccggtccttg

SEQ ID NO: 47744 - DNA, 269 bp, Setaria italica
  Peptide Sequence Number=SeqID_113718
cccgagtggatcaaagaaagggtgaaagacttggtgaaaaaccgaaagctacttgtggaagcgccaggcgctgcccgatgatgaagcacagataggtatgttatcttgcactttgaggagctgatcatggaagccatcagcttcatttggaaatgcgatgtatcccacacgccaccccatcattccataggctttggagaacgagaagaggttgacaatatgattatcttctaagcaatagtgctccattccatcatacataaagtatt

SEQ ID NO: 47745 - DNA, 410 bp, Setaria italica
  misc_feature (63)..(63): n is a, c, g, or t
  Peptide Sequence Number=SeqID_113719
aaatacttatagagtgataatttttcacaagtaatcatataacctttgtgatatatattgagngaactgaaaagagccttgaccttatggttgtagtcaaagggacatcagtcattcgaactctacttcctagttcctactcttgaatctgtgtccagatggcatcaattttcattcaatatttgtggggtcttttacagatactttatgtatgatggaatggagcactattgcttagaagataatcatattgtcaacctcttctcgttctccaaagcctatggaatgatggggtggcgtgtgggatacatcgcatttccaaatgaagctgatggcttccatgatcagctcctcaaagtgcaagataacatacctatctgtgcttccattctattcgggtctagtcgtct

SEQ ID NO: 47746 - DNA, 405 bp, Setaria italica
  Peptide Sequence Number=SeqID_113720
tagtaactaaattagttactaagggtcggggtaggttgtcctattcttaccttcttgggtcctaagtcttacctagtactaactttcttcagatgatttcgaagtcgtcaggtggctcgcaaacaagcatgggatcgctgtgatccctggaagtgccagtgggggccctggatacatccgtgtttccttcggtgggctcaaggaggaagatacaaggcttgctgcagagagactaaggcgtggcttgcaggagctagtgactgatggaatggtacagtaaccacccattggcgtaagtaaagcttaacattcaagtttcacagaactccaattttcaatggtataaaaaatttctgctgggcttgattcgagagaagaaaaggatattatttcaagaatacatcg

SEQ ID NO: 47747 - DNA, 364 bp, Setaria italica
  Peptide Sequence Number=SeqID_113721
tgacgtgcgattcgtttccaattccaaatttccaatgcatggtggtgcaattctaactgcaggatgaggcttgggctgctggtgggagcggcgtcctgctcaagaccacaaacggagggaagaactgggtgcgtgacaaggctgctgacaacatcgctgccaacctctactccgtcaaattccttgatgacaggaaaggctttgtgctcggcaacgacggcgtgttgcttcgatatcttggctgaaatgagctgccaaaatgctgcgagctcggtctcgatcgtgttagccttttttgtattatgatgatgacgatatatacttgatcgatgtacgtatgtatacaacgtgttaacggctttaa

SEQ ID NO: 47748 - DNA, 158 bp, Setaria italica
  Peptide Sequence Number=SeqID_113722
acgaccaatacgaaggggaatagaacggcaaggagctcgacggccgcagcatcaccgtcaacgaggcccagtcccgcagccgccgttgcccctctcgtcctgcctcgatggactcctacagcccgggcggacgaagcgccggcgctctccgagtggga

SEQ ID NO: 47749 - DNA, 214 bp, Setaria italica
  Peptide Sequence Number=SeqID_113723
catccccgagccaactgagtgtcatggggatgacactcagatgcgagaggagtttcatccccgagccaactgagtgtcatggggatgaaactcctctcgcatctgatggctcggttacctagtttgcagtcttggtaactgtgcatgaaactatgcactgagactggccttattatacatgcaaccataaataataaggccagtctcagtgcat

SEQ ID NO: 47750 - DNA, 214 bp, Setaria italica
  Peptide Sequence Number=SeqID_113724
ttgtaggaccctaggacggaccgaccgggactacgtaggtacttagttactaaagtaagaagactagacttttaaccgttacctccgtaccgttggtcacacgatcaccttagtccagtcttattggaagtttcataaagagtttcacgggcattaaattctataccacatcagcaattttgctgacgtggtaagatcattgggatgagagagg

SEQ ID NO: 47751 - DNA, 427 bp, Setaria italica
  Peptide Sequence Number=SeqID_113725
tgtgcagcactccagtaatgtttcccatacttaccttttattgatgtttgaaccttgctaccgcacgacatatgctttttatatgcgagaatatttgataggggatcattattgaaagagtttaaactaccatatattttccttgttcactcttctgtgaataatgttgtttaacattttatggtgctacaatttcttttgttttctcacatatataatatcctcatatctgatgtgttgcgatttgcttcaaacccagagggatacaactggtttaactgctgagaacagagagctcaaacttcgattgcagtccatggaagagcaagctaaactgcgggatgctttgaatgaagccttgagagaagaagtccagcgacttaagatatctgcagggcaagctagttaacatgaacgggaacatctt

SEQ ID NO: 47752 - DNA, 234 bp, Setaria italica
  Peptide Sequence Number=SeqID_113726
cgaacaggcagtcggcagcgaggtccaaggagaggaagatcaagtatacaagcgaactggagaggaaggtccagactctgcagaccgaggccactacgttatcagcgcagctcacactcctccaggtatagggttatatttgctaaaatcagttaaattcgttgatgaattggtgtcctctgtgaaaagttacatccaatcagattcattcttttttgtgtgcacctgggtaat

SEQ ID NO: 47753 - DNA, 258 bp, Setaria italica
  Peptide Sequence Number=SeqID_113727
ttcttattcttatttttcttatttgttcttagttcttagttcttagtctagttctagtcttgtcaacaacagcagcagcagcagatgtcatactttggtggccaccaggctcagcatcacaaatcaaaaccatcatcaccagagtccatccaacggggggcagtcactgaagtggtcagtccctaaacgactccatggatttcatttgaggacaatgtccgggccaaagttgtcacataccaactgcagttcagcatt

SEQ ID NO: 47754 - DNA, 261 bp, Setaria italica
  Peptide Sequence Number=SeqID_113728
aaattaattttacctaagtggcaaaactatcgactatgtttgaacagatggactgggattcaaatccttagtctagaaattcctagaacagcttacatcttccaaacaggcacagtatagaaagaaaagctcaccacagtgtctgggttactatggaacggcttcaaatcgacctctgaagggtataccacatgtttgtcaatcttctcaacagaattgtcaagggtggtaaaacgcttcagatgaaatgcaataacatct

SEQ ID NO: 47755 - DNA, 196 bp, Setaria italica
  misc_feature (149)..(149): n is a, c, g, or t
  Peptide Sequence Number=SeqID_113729
gactatactttcttcatcaaaggatgagcccttgcccttagacatgggatcaagggtacacttatgcaagttatcaagcaagcaacgtaggaattcatgtgcatctcttgctgtcccggtctaaaatctgaagatagctctggaaaatnttgttaaggaaccacatatgacacaacttgacatggaaggactatag

SEQ ID NO: 47756 - DNA, 432 bp, Setaria italica
  Peptide Sequence Number=SeqID_113730
ttatcaagtgaattgatgtcaactccactgtttagtagcttatccatgaggggtatctgcagtgccaaggcgtagctatggagaggatgccattttggctgcaaaataacacaactgcaggaatcagaatcaacatcctatatttcatagaagccattaaatcaacaccaaagatatcccgattgcaagaaatgtatcatacacaaaagatggttcctaaatattaaaacagtgagggaaacttaactgatgatattttactgacatcaggggtctcatgttgatccaagatagccttttcttcaggcgtcaagaggagctcgatttctaaaggaacaaaataatagttatagaattgattctgcaacatcagagcaatgcctcgagagaacgaaatggcaagcattaaacttgtagttgtattaattttct

SEQ ID NO: 47757 - DNA, 262 bp, Setaria italica
  Peptide Sequence Number=SeqID_113731
caagatggcctcctccataccacttgtggaactccagcttacgttgctcctgaagtgcttagtaggagaggctacgatggctcaaaggctgacatatggtcttgtggagtaattcttttgtgcttgtggctggttaccttccgtttcctattgtaccctaaattctttatttgttagttctttgtttattttaggttttaagttttatttttttcgtttttaaagttttttcttttttagtttttttagttttttttacgaa

SEQ ID NO: 47758 - DNA, 404 bp, Setaria italica
  Peptide Sequence Number=SeqID_113732
taatctgtcttcaacgtgagccctaggggttcaggggtcttcttagtccactttccaacctgttaaagaaaagaagtcaaaaccatgtctgaaaaagtgaaaatatgtgtctgagcaaataaaactgcatccctaaataaaggcaacaagtgcaatctagttttacagtgtaattcaaatccaaaattctaaaaaaagtattgaagagggtaatccatgtagtatcatagaagtagcacaaaaagttgaaatttttaattttttaaatgcatataaaaaactgcacctgctatgttgccctacagaaatgcatgcaattaataatccgtattcttcacttcaactaatatgtgcagctcctaactgcagtcagccaaaagtgcctaaggtgtcttagttgttta

SEQ ID NO: 47759 - DNA, 254 bp, Setaria italica
  Peptide Sequence Number=SeqID_113733
taaacgactccactggatgcggaacgccataatagtaccccggatacgagcacggctccggcggctccggcttcggcttcggcggctccggcttcggcttcggcttcggctgctcttctggcttcttttctccatccttataatctttcttctcctcagacagcgagacggtgatgacgtgcaccgtgaaccagagctttcgcagcttggacacgacatcgacagggtcgacgcagccgatgaccgtcatcttc

SEQ ID NO: 47760 - DNA, 502 bp, Setaria italica
  Peptide Sequence Number=SeqID_113734
cgaacaaggccagggccggcatcccctaccgcaacttcctgtacatctgggtcgtctgcctcgtggccggtcagtcgtcgttcgcacacccttatttcgatctctctcgactgttcctggcgttacgtttttcctctcctaggttcttcggtgggcgcgcggcacgctagctgtagcgccagacgtaacaccacccacatgcaccaccctcgggtgggtacgtacgtgttcgtgtactgtagagcactcgcgtatatacgtgtgtctatatacatcccaatctatccacccacccgtgctgcacgcgtgcaccgatgacgacttgagtgggttagcgaactaacaattttgtattagaatgcaaattaatcgcgaacgtgagatccgaatgacggtagctttggtccatccagatgatcccgtacgtacgtacggcggcagtaataaaagtccggagaaactgccggagaagtaaaaccagccattaacctgcaaggccaag

SEQ ID NO: 47761 - DNA, 440 bp, Setaria italica
  Peptide Sequence Number=SeqID_113735
aaaatactacaattattagtatatatatatatatatttaatattaggagaatattgatttattcttttttatggaaactgaagaggtgctccttgtgtaaattttttctaaaagaggtatattgaagcgaatcaccagatttatcaagatacttactcaatctaatttatccttgcccgtactgaattcaaatcagtgtttagtactaggaattattatttctagtaccaaattcaaatgtatgtttgatttgtaggtcttatccatacttctccttgcaacatatcccttcatggccaacctacaagggctggagctcaagatacttctcaacatagcatcgcttttgaagaacatgtttgctgtaagtccagtttctgccaacaagtttgccgggccatgttggtcccttttctttttctttgttttttaatttttca

SEQ ID NO: 47762 - DNA, 198 bp, Setaria italica
  misc_feature (1)..(58): n is a, c, g, or t
  Peptide Sequence Number=SeqID_113736
nnnnnnnnnnnnnnnnnnnnnnnnnnnnnnnnnnnnnnnnnnnnnnnnnnnnnnnnnnggtcaagcaaaatctcatttcaattttatgatatcatcaataagcatctggtccttatgttcagtaatcagatgtaaagggttctctgaatttttgcataggcaccgaaggaccagatgctttatgatatcatcaataag

SEQ ID NO: 47763 - DNA, 205 bp, Setaria italica
  Peptide Sequence Number=SeqID_113737
ggtttggagtggattctttagttcctgcgttttgcgaaggaaatgaaccctttccataggaacggcgagctgcgttccttcgttccaaacggcatatgacgtcatcaaaacataggttttcatgggctcagaagcacttaagtggactgttcttaccaggtgatcagatcctgttcctgatgctaaacatggtatccgttattgg

SEQ ID NO: 47764 - DNA, 265 bp, Setaria italica
  Peptide Sequence Number=SeqID_113738
ttacggtctcggaatggccggcggcgaggacggtacagcggcggcgccgctgctggcggcggcgggggaggaggaggtgccgcgaggggtgccccgggtgccgggtggaggaggcgaacaaggccagggccggcatcccctaccgcaacttcctgtacatctgggtcgtctgcctcgtggccgctctgccgatccagtcactgttcccttatctgtacttcatgatcagggacttgaaagtcgcaaaagaagagcaagacattgg

SEQ ID NO: 47765 - DNA, 253 bp, Setaria italica
  Peptide Sequence Number=SeqID_113739
caacgtcgtcgccggcgtccgtgtccaggaggtaagaacgcactcgaatctcgcttaaaaaaggaaatttcgtttcgagcctagagacacggccgcctttcccaggtacggcgagagcgcaggcgaggcaactgaagacgcgttcgcgacggccggacacgccgtcgggacggcgtggaacctgttcaagatacggaaggccgtcacgccgtcgtcttcgctgcccgggaacattgggtcaagacgcgccgtt

SEQ ID NO: 47766 - DNA, 194 bp, Setaria italica
  Peptide Sequence Number=SeqID_113740
ttttttttttttattataataagagaccataataatgtaatgaaaaaatacgtgtatatatatcatacgccaaaagcaatacacgggtaacatcatcaaccgacaaatcaaaggagcacaacctccaccgccaccgcgcccgaacacttggcgcccactcgcccgccgcacgcaagcttcgtccgccgtcgtcg

SEQ ID NO: 47767 - DNA, 251 bp, Setaria italica
  Peptide Sequence Number=SeqID_113741
tagcatctggataacatttgccgtaagcgaaaatagcatcagaacctgccgaaggtgagtttgaagcttgaatttcatcgaaaagacaggcctcaggttcacagtcaccaatgactgaagaggaaggatgcctcatagggtaagcatttgattgtgaaactatattgtatccaagaggaggaaacaccgtttcaaacaatctttcagactttgtacagtcatctagtgcatcacccttgttaacaatttca

SEQ ID NO: 47768 - DNA, 221 bp, Setaria italica
  Peptide Sequence Number=SeqID_113742
aattcaaccttcaattccccatcccaattacagcgtgcaattttatgattgagcttgattcattttatgaaaatcttcaagcttcttctcttgagtcattgcaatgcccacggtgtagcaggtctggcactggtatgcattttcatggcagttactacatatgccatgcttatcagtgacagacctgctacaccgtgggcattgcaatgacttctaagagt

SEQ ID NO: 47769 - DNA, 454 bp, Setaria italica
  misc_feature (298)..(454): n is a, c, g, or t
  Peptide Sequence Number=SeqID_113743
tctagtttgtcttggttaccgtccttattgttgtctatttttcttgacttctgactcaattgctgccaatccttttctcatgtcatcatcattttccatgttgtcaaatgaaaaactgggttttgccatgaagtggaattcaaaacgaccatatttgctgtatccacactcattgcagaggaaagagtcaagattttcatagttaatgtttctacattgtcggcactggtatgcattttcatggcagttactacatatgccatgcttatcagtgacagacctgctacaccgtgggtcnnnnnnnnnnnnnnnnnnnnnnnnnnnnnnnnnnnnnnnnnnnnnnnnnnnnnnnnnnnnnnnnnnnnnnnnnnnnnnnnnnnnnnnnnnnnnnnnnnnnnnnnnnnnnnnnnnnnnnnnnnnnnnnnnnnnnnnnnnnnnnnnnnnnnnnnnnnnn

SEQ ID NO: 47770 - DNA, 250 bp, Setaria italica
  Peptide Sequence Number=SeqID_113744
caatctttgcggttttaccttgcatgtttggcccaggcaaggacaccatcatctgctggacagcatccttctgctgcgagtctatctcctgttcacctatgctcgacacaagtttaatgagaggtctttttaaatgcacataggcggtaccagcaactgatgggatttaaaagcctctcattaaacttgtgtcgagcataggtgcattttctgactctgactcaattgctgccaatccttttctcatgtc

SEQ ID NO: 47771 - DNA, 246 bp, Setaria italica
  Peptide Sequence Number=SeqID_113745
ttgtcctaattaacttctttgttttcaacacccatgtctccatcaggttgccatctagccaggccaaaatctccaaccagaggttcaaaatcatgtgtgacaaggatgttgtttggtctcatgtcacgatggattatacaaccaaccctgcattcttcatggaggtatcgcagacctctggcggctcctactgcaatcttttgtctggctagatggcaaccaaatgtgccaataactcttgtttca

SEQ ID NO: 47772 - DNA, 395 bp, Setaria italica
  Peptide Sequence Number=SeqID_113746
agaaccatacccaccttctgccaagaatttgcttgggaaaaaccaccagttgcaagctccagttccgcatagctgaaccaccgtggtggtttcccaaatacaggtgtcttatgctgacatatagaacacaaaggcggtggtccgggaggagccctcctggacaatgagacagcatctctcacattccctctgaagtttaagtcagacctgcttcttattgcattgatttcagtcaagagatccagtttggcaatcttctcgagcaaagaatctgctgtaggtgtccttctagggcgatttcctagtagtcgagtggatgcaggaaccctgtaaacttagtacaaaccaataccaataggactagaaagacgaatagaaggacaagactaggaaga

SEQ ID NO: 47773 - DNA, 417 bp, Setaria italica
  Peptide Sequence Number=SeqID_113747
ttcagagaaccatttgttcacaagcagaaaatggagatgtcccaggatctgaacttgagacagaggatgttcccacttcagtactacttccaaaaggcgtctccaagtctggactgctatttggggttacagccggtcctcgagttgaactatgtgcctccttaatatcagtagcggttttaccagtagaaccatccaacacaggtggaagtgtacaggttgatttagactctttctcaggagatcgcacaagattcaatcggaggactttaggctgagaacgcttcattacaacgatattgcactgaagctcctccacacaacgcttctcttcatgcttcaactccttgtctagcacaacccagcttgtttctggctctccttctggtgttgtggctgccgagtgtaagcgtgcac

SEQ ID NO: 47774 - DNA, 242 bp, Setaria italica
  misc_feature (5)..(5): n is a, c, g, or t
  Peptide Sequence Number=SeqID_113748
ggagngaagttggtggtggactgcacggcgaaggggttgtgtttgtggaggccgatgcggatgtgcggttggaagaattcggcaagcctctgttgccgccgtatccgtgtgtcgaggagctcctgtgcgatgcaggtgaaacaagagctgtggtcggcaaaccgctggtcctcatgcaggtacacgtacatgttgcttttctagttgcatgtgctttagaatgcaatgtcacaatctaccgc

SEQ ID NO: 47775 - DNA, 258 bp, Setaria italica
  Peptide Sequence Number=SeqID_113749
tgaagaaaacataaggaaccaagagtgctgtcatcatgttggtcttccagtttgtgcggtccaatatcaagaggtacctgcagtggaagagaaataccttaattactaacagtctcatgtgaaactagcatataaaatcctccactcttggtattctacaaagttgttttttttaaaaaagagagtaatcagatggctcattaagagcaccggtaatgctgatcagaaggaatccaattctgtttgtttgcattcagt

SEQ ID NO: 47776 - DNA, 271 bp, Setaria italica
  Peptide Sequence Number=SeqID_113750
aggttgggggcgacaactgtgagcaggatgattgcaccgggcagctccaaccaatctggtgcacaggatgaaacattgttgtgacatccatgtaaaaatttaatcaccttcacaaaagggacactaaaagagaagggaagtatccaggaattctgatagggtgcaatacatcataataagaaaaacaaatttttttagcaaaatggtacctgggaagtggcgtgggaaaaagagacgcagaataaccgcaataattgcaatccattttccg

SEQ ID NO: 47777 - DNA, 273 bp, Setaria italica
  Peptide Sequence Number=SeqID_113751
cctgatactcgattcgcaaagcatcagaccgtggacccgcaaaaggtaggggatcagggatccccccccttttcccattcgcgaaaaaggaaggaacccagagagaaagggagcggcggtccggtgcggagacactcacactgcggcgacgaaggcgagccacttgaggaaggaggtgccgaagccaagcccgccgccgaggacgaaggcgtggttggcgagcttccgcgcggcgacgcccagctcccgcaggtcggcgtcgatgagcgcctg

SEQ ID NO: 47778 - DNA, 227 bp, Setaria italica
  Peptide Sequence Number=SeqID_113752
ttttttttttttttttttacatcaagccacagcccacagctaatgattttattggcgtttatgtactccaaagaaccaaatgctgacatcaagctacaacaaacaagatagcgaaactgtccaccaacagcgcaactcaaacatacataacgtttcctctctggtgattcttgtatcatctgaaggggatacgttatgtatgtttgagttgcgctgttggtggacag

SEQ ID NO: 47779 - DNA, 239 bp, Setaria italica
  Peptide Sequence Number=SeqID_113753
gttgtagcttgatgtccaccaacagcgcaactcaaacatacataacgtatccccttcagatgatacaagaatcaccagagaggaaacatctgcacaaggaataagcagggaatggaattgccgttgttggtggaccaggtttcgctatcttgtttgttgtagcttgatgtcagcatttggttctttggagtacataaacgccaataaaatcattagctgtggccaacatctcgatttac

SEQ ID NO: 47780 - DNA, 251 bp, Setaria italica
  Peptide Sequence Number=SeqID_113754
ttaatatgtccctcatggagatgatcaaggcttcaaaatcgagtacaggcctagaggactggtcaaaccttccaaagaagtccgatgctggttttctccgtaaacgagatggtgacatggtgaattacctcagagttgcacacaatctactcggaaagctccaacttatcttgctctccttgtttggagtgttctactttattcttgagcacgcgaggagggtcctaagagttttgaagcctgtcagagtt

SEQ ID NO: 47781 - DNA, 254 bp, Setaria italica
  Peptide Sequence Number=SeqID_113755
cttccaaagaaagtccgatggtatgtacttactgccaaatcgcaatttgaatgactctgatatgaacgtaaaaacatcaaaataaatatttttcttaaactagataaccgaagtgatttctggtgtttgctggatcagctggttttctccgtaaacgagatggtgacatggtgaattacctcagagttgcacacaatctactcggaaagctccaacttatcttgctctccttgtttggagtgttctactttatt

SEQ ID NO: 47782 - DNA, 315 bp, Setaria italica
  misc_feature (66)..(66): n is a, c, g, or t
  Peptide Sequence Number=SeqID_113756
gggccagcttcttctccttcggcaacctcttcgccaagctccgagcctgatcaaactgattccggntccaattgtgtaatttggtgtagagatgaactgaggactagagtagtggaacaggttacaggatgtctgatgcaaaacgatgcagatcagatgatcaggtagcccaatgcaccgatgcacctcaacaagcagtctgcattgcacagaaccaccagtctggtagaggctccttatgaactctacaaccacagctgctacatgccacatacagttgctctccccctgtcccactactctagtcctcagttc

SEQ ID NO: 47783 - DNA, 311 bp, Setaria italica
  Peptide Sequence Number=SeqID_113757
tttttttttttttttagtactaaccttctaaactaaagtctagttcttgtctatttgcacagaaccaccagtctggtagaggctccttatgaactctacaaccacagctgctacatgccacatacagttgctctcccccctgtcccactactctagtcctcagttcatctctacaccaaattacacaattggagccggaatcagtttgatcaggctcggagcttggcgaagaggttgccgaaggagaagaagctggccctggccaagccaccggaggccggctcgggcgccttggcgacgttggcggggac

SEQ ID NO: 47784 - DNA, 444 bp, Setaria italica
  misc_feature (320)..(320): n is a, c, g, or t
  Peptide Sequence Number=SeqID_113758
atgttttcatttcagtctggccattaaccgcactaggcatcgaaccaaagttttcaatgccccactcagctaaagtgtatgaagttgtggtggcaaatggcctaatcggaagtgtattatcagactacttctgggctctttctgttgtttggactactcccttggtggccaccttaggcatgtctctcacaattccactagcaatggttgctgacatgatcattcatggtcgtcactattcagcagtatatattcttggttctgtccaggtacgaatgttcagcagctcagtattttgttatctggatttatgtcaaacntctaccatctaccacaataactaatttaactgcactaaaagtttttcttaacagagctaacttgtttgttggcaccccatattcgattctgtgtgcctctttcgttccagctcactgttgcatg

SEQ ID NO: 47785 - DNA, 154 bp, Setaria italica
  Peptide Sequence Number=SeqID_113759
ccaagactccataaatgctgcaatctccttagtggaaagctgcttctccttaatgatggcatcttgaaggagaagcagctttccactaaggagattgcaacttatggactgtatctttgtcccttgtggtttgtgacagagtaaaacaccaatg

SEQ ID NO: 47786 - DNA, 404 bp, Setaria italica
  Peptide Sequence Number=SeqID_113760
gcgtgtttggatcccgaagctcatcaaagaaaggatggatcaatgcttccaatgcagtggaccgaaggttaggtgagtactgcagaagcctggacacaagatcaactgcttcagcaggcatccttttatggaaaatcttatgccatgggtgagctttgatttgtgggaatttaaactcggtataatttggattcatgcatttgatttcttcacgtgtgggtgtacccagaaccttgatgatttcaactagctgatcaacaccactgtctccagggaatagaggctgttgggaagaagaaaaaaaacagattgtaggcagagacaagctggatagtccaccatgaccatgtaattgtgtgatcccttacctgtcctagaagcagctcagcaagaacacatccggc

SEQ ID NO: 47787 - DNA, 263 bp, Setaria italica
  Peptide Sequence Number=SeqID_113761
tggaccgaaggttaggtgagtactgcagaagcctggacacaagatcaactgcttcagcaggcatccttttatggaaaatcttatgccatgggtgagctttgatttgtgggaatttaaactcggtataatttggattcatgcatttgatttcttcacgtgtgggtgtacccagaaccttgatgatttcaactagctgatcaacaaccaactagtactaccaagggaaataagaaggactagaacaataacgtacaactagaaga

SEQ ID NO: 47788 - DNA, 257 bp, Setaria italica
  misc_feature (238)..(257): n is a, c, g, or t
  Peptide Sequence Number=SeqID_113762
agaagattgtggaacaagtccccaaggccaagattgagatgcttgagcttgaccttagctcaatgtcatcagtgagaagattcgtcgagaagtttaatgcgctggacctcccactgaacattcttatgaaatcttaatgtcgctgtggaatgtcacaacattaatgatatgttgcgatctaagggccagtttgtagggaagattgctctgtgaaatttaggatcatgttcaatctttnnnnnnnnnnnnnnnnnnnn

SEQ ID NO: 47789 - DNA, 424 bp, Setaria italica
  misc_feature (348)..(348): n is a, c, g, or t
  Peptide Sequence Number=SeqID_113763
gaagagaatggtttaaggtcaacaagtgtatcatcttcaacatgaatacttgctgggcttgcccatttttcttcatacacagcaacccttacaatttgtatgttagctcccccttcgttgaactcaattgtatgcacaatccgcaatctcttgtggcaacctttgacaagacactaagatacaaatggacatcataagttataaatgggtaaaatagagtaccagacccacatgcagcattaaagaagcaaatcacagacatctagacacaaaaatggtacacatatctaatggccacgggaggctatttccaaaagtatattgctcaaacttgaatgttgcaccaanaactggttatttagtagcataattcacatatatatctccataagacaagttgggaagatgactgattgctccatgt

SEQ ID NO: 47790 - DNA, 415 bp, Setaria italica
  Peptide Sequence Number=SeqID_113764
tagtagaagtttttcacctattggaattgactgccaagtgttaaatcctatgctgtgaacatcctccccttcgattagaaaatgataattattgaacttgaaaaggtatctgtatgctgagtttttttaagaggacaaatggacaatgatttaatgcatcaagtttgagatccctaaccactcgtgctgctcctctgtgctgattttatgctaattcttgcaatgcttgcagcttgaagcgtgtgcacatccattctttgatgagttgagagaaccacatgcaaggttgccaaacggacggccatttcctccactgttcaacttcaaacaggagctagcaaatgcttccccggagctcatcaacaggttgatcccagaccatgctaggcggcatcttggctcactttcttgcccg

SEQ ID NO: 47791 - DNA, 240 bp, Setaria italica
  Peptide Sequence Number=SeqID_113765
caagatctatagcttctggaggcatccgcttgtggaaaatacttgtgccatggatgagctttgatctgaggaaatctaaattcagtgtagttcggattcatgcatcggatttcctcacgtgttggagtaccacatgcaaggttgccaaacggacggccatttcctccactgttcaacttcaaacaggagctagcaaatgcttccccggagctcatcaacaggttgatcccagaccatgcg

SEQ ID NO: 47792 - DNA, 364 bp, Setaria italica
  Peptide Sequence Number=SeqID_113766
ttccctggtgaaagtgctgtggatcagcttgttgagataataaaggttcttggtactccaacacgtgaggaaatccgatgcatgaatccgaactacactgaatttagatttcctcagatcaaagctcatccatggcacaagattttccacaagcggatgcctccagaagctatagatcttgcttcacgtctgctccagtattcaccaaatctacgatgcactgctcttgaagcgtgtgcacatccattctttgatgagttgagagaaccacatgcaaggttgccaaacggacggccatttgctagctcctgtttgaagttgaacagtggaggaaatggccgtccgtttggcaaccttgcatgtg

SEQ ID NO: 47793 - DNA, 159 bp, Setaria italica
  Peptide Sequence Number=SeqID_113767
ctgcaatgttgtctccttgaagcattgcttcttctctaccacaagcagagatgaacttttccttaacttggtgatggagttcatctctgcttgtggtagagaagaagcaatgcttcaaggagacaacattgcagtgatccatggatcgcatgatttaca

SEQ ID NO: 47794 - DNA, 348 bp, Setaria italica
  Peptide Sequence Number=SeqID_113768
cccgctttctgttaccaccactgtttcctgttgctgtcgtttgggcaatagcatgtgactgctctttttgctactacatcaaagtttctctggttgcaggcaggcagatccagtggatatgacttgtgagtgcacactacatactccacagaaagacaacctacatttttcttggctgttgaaaagagcatcttgatgatgaacaggagtgttacaacatatgtgcgtgcgcccagttggtgcccggtccagctgcgaccccgttagaataatgatgttggtgactatctttgatacatttggagtctctgctaattttgactctaagggttcgaattttgattccaa

SEQ ID NO: 47795 - DNA, 230 bp, Setaria italica
  Peptide Sequence Number=SeqID_113769
gtgccggcagtcgcagccagcggtgcgatcgtcgccaacactctggtctcggtgtcacagcattcagagcttcttgacgctgttggaatttgagtggcaggcatgtcctgtagcatatgcgaactgatgaattctagctgcgaggcccgtttgacccggtcaacgaatgacagtagcatgacgtgagtgatgaacagaacagctatcccggtgggccttttcagtgcccg

SEQ ID NO: 47796 - DNA, 220 bp, Setaria italica
  Peptide Sequence Number=SeqID_113770
agtgcagactgtccttccctgcatgtggtacataactcatctccctggcagccatcatcggcagaagtgttggtagtggaaaaacatcacaaggaggcttccacaagatctttcaccttccaaactaacatggtctacttgaatatgctgtgttggtagtggaaaaacatcacaaggtaggcttccacgaagatcttcaccttccaaactaacatggtct

SEQ ID NO: 47797 - DNA, 417 bp, Setaria italica
  Peptide Sequence Number=SeqID_113771
gccacgacccagagttcagcaatgtctggcaagtacatcatcgctgcccttgctgcctccgccgccatcgcatatgcttccgatgtcctagtggcacagaagaaggtttttggaggcacaacaccgaggacggtgtcggacaaggagtggtgggaggcgacggacaagcagttccaggcctggcctcgcaccgcagggccgccggtggtcatgaaccccatcagccgccagaacttcatcgtcaaggatatcaagccttgatcaggttcaggtggtgatggtcatggtctgatggcccaaactggacacgatgatgtaactagaatggttagtaagactaacaaggactagacctagtagactagtagttacccggaattacgtaagtaacttaggtactagaaataaaatacaaga

SEQ ID NO: 47798 - DNA, 243 bp, Setaria italica
  Peptide Sequence Number=SeqID_113772
acttatcgagtctgctgttatgcaaaagcatcaccccaagcaagatgtcccatgtgagggttaggttcttcaccttcccaaatatagaccttcggatgtccagcaaattctttaaatacaatatcagagacctgccagcagatggttaaacctgaagcttacccacttaaactatagtaaaactgtcagatatccatctcaaaaaacaaattgccaaatatcctaccttccacggtgttctcc

SEQ ID NO: 47799 - DNA, 337 bp, Setaria italica
  misc_feature (155)..(155): n is a, c, g, or t
  Peptide Sequence Number=SeqID_113773
tccacgagatcgacccgaacgagtacttcgcgtacacgatcaccggatttgccggacacagcgatcgtgatctcgtaggccaggctcctgttcttgtcgtcgaacacgagcttgctcgggctcaccgtgacatccacgccggaggggctgacgancttggattcgtataccgcgctggagttgctgccgacgttgcgcaccaccctgtggtaggtgactgaatccttgtaggaggagaagacagccgcgaaggcagggtagttgaggtcgccggagcgtcgtcgtaattttccttcgtagtctagttcggtcgtactagtagttcttgtttccttta

SEQ ID NO: 47800 - DNA, 226 bp, Setaria italica
  Peptide Sequence Number=SeqID_113774
agtaagtacgtacggtagccggcgtcgtacaccaggccggggtcgagggcgctgttggggtcgacgtggccggcgccgcggacgaacggctaccctccgtccctgatctccatcttcacaaaggacagctctgtcgccgactgctcgaggaaattcgcgcgctccggcgacctcaactaccctgccttcgcggctgtcttctcctcctacaaggattcagtcacct

SEQ ID NO: 47801 - DNA, 264 bp, Setaria italica
  Peptide Sequence Number=SeqID_113775
ccgtttttgcgtgggtattcggcggctgcggctcccggttcgcgcggcgggggaggttgcgcttcggcggttgcatccaccacctctctacctcgccgctgtgctccaggtgaagccatttttgcagcgggtctattgctaagacgaagaggaggggtgatagcgggttcccttggcggagccctcggccatgctgaatgttctctcccggtgcgccattcatgagaaccttggatgtggcagtgcttagtaaagtcatgaccc

SEQ ID NO: 47802 - DNA, 247 bp, Setaria italica
  Peptide Sequence Number=SeqID_113776
aagattggtgagggaggttatggtcctgtctacaaggtaatagcagaaccttagtcaatttgatggtagaccagaatacattattggtgtctgaaaccagcttaccactgcagggaacgctcagggatggaacagctattgccgtaaaggttctgtctttgcattctagacaaggtgcaaaggagtttcttaatgagcttcttgcaatctccgatgtagcacatgagaatcttgtcaaactctatgg

SEQ ID NO: 47803 - DNA, 343 bp, Setaria italica
  Peptide Sequence Number=SeqID_113777
aaaagaagtgcagcattccaagaaaccccgtagaatagaatagttagactactacaaacctggctgagctggaaccattatcttcccgaaccaccttcaaggggttctctagtgcttttaggatgtacttcatcggcgggcgtttggaagaccgtggattcaagcaggacttggcgacaattgccattgcccagacttcctccagatggtcctcatcaatgataagtgttggatcaatgatcttgctcataagctccttctcataaatattgacataccgcagcgtggtatcaagccattcgcttgtagcagcatcgttcgatgcactgatgccaagtcttcc

SEQ ID NO: 47804 - DNA, 474 bp, Setaria italica
  Peptide Sequence Number=SeqID_113778
agtatcagttgctgcttttgccatttctgccacagttatctcagcaattgttggagtaacgattgctactggtaagtcatctctctttccatattaaagattgatgtgctgttgacatgttaatgcaaaccaccttcaggtgtaacggccttaagactttacctgcaaactagtattgaataccgttctgcatttctgcatctgaagttaatttagtcaatgttaatatgttgaatatacgacaaacatttattgtttactgaattatatcaaattattactcttgcctgtgaaacgaaattagattagaaatagatactcctgtactttcatggctgactttagtagcggctactgtcactgggttgcctatgtgtgctctcctagagagcaataggatcgtgcgctaaattgtatttcaacaatttagaatgagtttggtcaatgtagttattcttctaaactattcaaagg

SEQ ID NO: 47805 - DNA, 393 bp, Setaria italica
  Peptide Sequence Number=SeqID_113779
caagaacatcctgcctcagaatagtttcagggcaagaagttcagcccaggacggagatcgggtgatccttctgaatcctgggacatcatctgaagggcagcaggataacccaactacagcaagatcgttttcttttagaaaggttatcaactctttatcagcaaaacggacccattctctgccagtcacgcctgtaggaactactgataaggtttcatctccatcaaatcacctagaaagtcttccatcgacatctaaccgagaagttccaggctcacttcagtgagtacatcaagaagggaattgaggctgatgacatggaagctttgtacaagaaggtccatgctgctatccgtggtgaacctacatggccaagataaccaagcagccacc

SEQ ID NO: 47806 - DNA, 307 bp, Setaria italica
  Peptide Sequence Number=SeqID_113780
tttaagttttaaaattttaaggaaacctaaagacaacaatacatcacagctttgtctaatttgcagattgttatatccaacactgttaactgtagtctgtttgatcagccatacaattttattcaaaaaaaaatcagccacacaattttatccatgaacatcgtaatttgttttgcctttttcttgaccctatcctggaccaggttgctaaatcatattgcacaacgacgatctagcagcttcatcatccgaaagtgatgacactgatgattccgattacgagaatgggcacccaagattttggacg

SEQ ID NO: 47807 - DNA, 228 bp, Setaria italica
  Peptide Sequence Number=SeqID_113781
gagccgctcccagccagaatggtatcttcagggagattagatcactgcaagagatgagttccaaaatgctccaaaagcgaaagaattggagaaaagattccccaactcatcccctgtgatacacacttcatatagatgcacctttgtcagacttctcaaagacaaatacaaaaataccaaaccggggggaacggaaaggacaacaagtttaggtagaaggacggaaga

SEQ ID NO: 47808 - DNA, 325 bp, Setaria italica
  Peptide Sequence Number=SeqID_113782
tctaggaaggttatgactgagtggaacaagacgaagagacaaataccaggcaaaggacgcggatgtgaactctgcgagcataacttcaacttatgtgctgttagttgccagtggccacttatgttgtatcttagatcattttattttgcctagtcattgtaatgcataaaattcacctgggttcctgctgagaacttggctatcaatgcttgtcaacctctgatttgcagcatcagttgtgtagacggtagaccgtacataccaatttgttagtttgcccctttgcctcatcacagaggttgacaagcattgattagtcctaagt

SEQ ID NO: 47809 - DNA, 213 bp, Setaria italica
  Peptide Sequence Number=SeqID_113783
ctttgttacttggtcatccaacgatcatcttcatctgtgcccccatcactgaggcctccaaagtcttccatatcttccatgtctcccatctcttccatgtcatcaccttctacatattctacctcaccttcttcttcatacctacttacttacaaagaaaccaaacttaagaaataactaactttaaccaaatttaaacaaaagaaaaactaa

SEQ ID NO: 47810 - DNA, 410 bp, Setaria italica
  Peptide Sequence Number=SeqID_113784
atttggatcaacttttgtatatggatatcagaatattgccttcgaggtgatgaaaaatggatatattgcaactgttactctcttccagtcatgaggtatgtcctgtatcagttgctcataatatgtatgtgggcattggtgactatgaattcaaattaaataggacaattttccaattgaacagtgtgctacttggggtgctgctccgagttctggctgcatagcattttcatgtcactgctggagggaacatctctgatggttcatggaatgcaatgcagccgggcagtcaatgtggaccagcaccatgacatgtaatttgttctgtagaagaagccacccattgtacaggaactaactgtactctgcaacctcaccttctgtacataaatgattctttattttgttga

SEQ ID NO: 47811 - DNA, 345 bp, Setaria italica
  Peptide Sequence Number=SeqID_113785
cagacacaaggctccatgaataatccatttggatcaactttttgtatatggatatcagaatattgccttcgaggtgatgaaaaatggatatattgcaactgttactctcttccagtcatgaggacaatttttccaattgaacagtgtgctacttggggtgctgctccgagttctggctgcatagcattttcatgtcactgctggagggaacatctctgatggttcatggaatgcaatgcagccgggcagtcaatgtggaccagcaccatgacatgtaatttgttctgtagaagaagccacccattgtacaggaactaactgtactctgcaacctcacctttctgt

SEQ ID NO: 47812 - DNA, 254 bp, Setaria italica
  Peptide Sequence Number=SeqID_113786
aagcaggttgaccagatggtaatacactctggatcagacacccgcccaaggacaacactttgtggggattacttctacaactatttctcccgtggaattgatatcttatttgatggacagacacataggataaagaagtttgttttgcacactaacttccctggccattcggatttcaattcctataagaaatgcaacttcgttatctatgacgctgaaggagatcctcggtgattgtggtcgagctgcgatcc

SEQ ID NO: 47813 - DNA, 255 bp, Setaria italica
  Peptide Sequence Number=SeqID_113787
gtacgatggagtcggcgacggagagcagccactccatctcccgcgtccacatggccttcctcgccggcgcgagcggctccagcctccagagctcgccgaacacggtggctgggcacgcatacggggaccaccaagacaaaccattacaaatcttgggaatgcaggttaagagctagcacggcggcgggccggagcctaccggagaggttggtgatggcgttggagatggcaagcgcggtgcagacgcccttgccg

SEQ ID NO: 47814 - DNA, 254 bp, Setaria italica
  Peptide Sequence Number=SeqID_113788
ttggaggtgttctcttcttggggttttcttgtttcatcctacttctaccctccgttgtgacggaaagcatccccgtcacaggttccaattcatgtacagtccttacagaatgacaatttgttctgccatgctgacttcagtccgtacctagaagctgccgcgatgagagcatggccaatttttaattggttgtatctaaaaatgtaacttatactatatgttccaagttctccaagaaaaaacttgctcaaaaa

SEQ ID NO: 47815 - DNA, 289 bp, Setaria italica
  Peptide Sequence Number=SeqID_113789
ggcgacgaggcgggcgcggcgacggagacggagacggcgaggtgggaggccatcgcggcggatggggacgggagtgaggagggaggaggcgaggggaatcggtgtggaagggaaggtggttgggagggagtatgttggcatcaaagatttcgcaacgaacagtagcgacaattggaggtgttctcttcttggggttttctgtttcatcctacttctaccctccgttgtgacggaaaggtactgtcagctcctccacttttcatttcaaaaaaaagctcttccacttgga

SEQ ID NO: 47816 - DNA, 250 bp, Setaria italica
  Peptide Sequence Number=SeqID_113790
ctgcactttacgtgatgacggtactgtcaactggactaggtagaatagtacccaacttgatatcaaggaaacacactaatagtgctgctacagttttgtacttgttctttggactacggttgttgtatattgcttggaagtctgacccaaagggatctcagaagaaggaaatggaagaagtatgtgctcttttttccgatgtagcctcagcttatgcatagcgtagctcagtgctgcagcttttgctgta

SEQ ID NO: 47817 - DNA, 437 bp, Setaria italica
  Peptide Sequence Number=SeqID_113791
aggcccattttcatttctccaggtaagtggcaaatgatatatgtatttcttgcaaatcaacctaggatttgtttccagtatgcttttcccgattcatcatcgatgtttatctgaaaaaatacaagaaagttaatccgaggcagggactcagagtgcctgaaacatttagaagaaatccccagttttcaaagtggtgaggcagtgtgacaaatataagtgatttctcaacaacagagcatcataacaatttcaagagttctatggatgaaatcacatggcaatcggacatgtgacaagtgctgattctcaaacagttatcccaacccatttttggtaacttaacaactatgccacccttacacagctgtctaggcagtaccaatccaggaggttgtactggataatagaggaaatagtaatctcatcatgaacatcaa

SEQ ID NO: 47818 - DNA, 395 bp, Setaria italica
  Peptide Sequence Number=SeqID_113792
ttatgaatgaatggattgtcaaattataatctctttctgattgtttttcttaactgacgttcgaagaatttaacaattctctcaatttaatattgctatacatgtctatgtaacccatagaagtgatcacttttttgggacggatctgattaaaaatctgactatcgagattttctaatttggtgtccaaactttttcaggtacacttcaaggttcattttagcatgtgctttattattttgcatatacattgcgagtaggaaaaaaacacagatgcatatataaaaaaatcatatgaatgggtcatgcaggcacaggtaactgcaagcaacaaaatgaatctgccattttgcagttctgctggtttaaaaaacttgggcctaatttaacctagt

SEQ ID NO: 47819 - DNA, 294 bp, Setaria italica
  Peptide Sequence Number=SeqID_113793
gctcgttggaaattttaacggaagtgagtaacagagctaacggaagtgccacaaaaggcataaaagatgaatctagtgtcgaataagggaggtaaaattttttgatgtcatatagggaataagaatttgtttcagtgtcatataaggaattctctcaatttaatattgctatacatgtctatgtaacccatagaagtgatcacttttttgggacggatctgattaaaaatctgactatcgagattttctaatttggtgtccaaactttttcaggtacacttcaaggttcatttt

SEQ ID NO: 47820 - DNA, 251 bp, Setaria italica
  misc_feature (40)..(40): n is a, c, g, or t
  Peptide Sequence Number=SeqID_113794
ggttgcttgtaatgaggtctgggatgaacttctgaccccnccttttgtatttccttgacttgaaacctctttgggtgtctctgcttgaagttgaagggttgaaggtgtagttttggaaacaaaatagtatagctctgtgtcatttattttaaagaaaaatagtgcttctatcatgctgcataatgagtatttgtgcaccatataccctcagtggccaattgatagtgtctgctctaagagtacaggggcac

SEQ ID NO: 47821 - DNA, 418 bp, Setaria italica
  Peptide Sequence Number=SeqID_113795
aaaaaaaatgcattgcagagaaacctcctctactaatagaatctatgtgcccaatcaacaagtcaactttccaccaacccccaagatctcgtgctccagagcattgaggaccaataaatgatcatgaacaatatacgaaacagcactacttatttttcatgcacaactacactgaacaaacagtaaaacagaaaaatacaatgtagtcttacacgataagcaaataagctctccttcttactagtcttgaacaacgccagctgaaactcctcctgtcatgccaagacaagagcatcaggaaccgaatcacacctcaagatcatatgtatagagaagcatcattctattccccgaaaaatggctgggcctgtacccactaaccttgttgatcagcccatcatcaatcacggcactgctg

SEQ ID NO: 47822 - DNA, 475 bp, Setaria italica
  misc_feature (42)..(42): n is a, c, g, or t
  Peptide Sequence Number=SeqID_113796
aaatagctaggcaggtatgtgaaagcaaaacgtttcaagtgnaccttgtgaatgatgctctctatgacttcatctgaaagattcattcctgactcagcaagtgtagcaacaaccatttgcttaacctcttgtctttcaatgaagccttgttgcttaaggtcatatagctggaacgaaactgcaaggattgtagagacagctctaagtttttttgtacctcagttacaaacatagaaggaacaaaagcaggattaatatagataaggcacgaatatatgttaaaaacaaacttatggaattcccctgtttcctacattgctgtgcaatatcaaagaaccgaactggagagagttacagcccatattgacatttcctccaagtcaagaaagaccaaatattcacagatagcaagatgatccacagaagggaaaacttcagtatggattatgactagcagctttttgttgcactcaca

SEQ ID NO: 47823 - DNA, 390 bp, Setaria italica
  misc_feature (171)..(171): n is a, c, g, or t
  Peptide Sequence Number=SeqID_113797
tcgtttcacggagcactgcagtcctcatctgatgctcatactcaggcagaagaagtttgattattggcatgctcagtttgcacggccttggatcacgtcaagaccaacctcagcggaatcggtagcctgaagctccacctggatgccatccagctcccgcttgaaacctcnccttggagctcgcatagatcatcttgctcctcacgcgcgcggtatcaggagaccatgcgatgaagaaaatcttgctcttctggcagttctcctcggtcacgaaatcgtagtcgaagatggcgtatctgcaactcaattacgacaagggaagggttagacaagacgaaagtacgtaacgtaagttaactaaagtaactaaacgggtttaagttaacttaa

SEQ ID NO: 47824 - DNA, 224 bp, Setaria italica
  Peptide Sequence Number=SeqID_113798
accaacctcagcggaatcggtagcctgaagctccacctggatgccatccagctcccgcttgaacctctccttggagctcgcatagatcatcttgctcctcacgcgcgcggtatcaggagaccttcaccattgcagcccatcatttcaagcacattagcagccagccacacccagaacagaaggcaacagtcaaaatgccaagtgagaaagtacataccatgcga

SEQ ID NO: 47825 - DNA, 203 bp, Setaria italica
  Peptide Sequence Number=SeqID_113799
ggaatcggagcttgcactcgtcatccacggccatcccggatgctgcgttcgccatctgcgcagcgcagggcggagacgatcgcggcgacgaagcaacgggatcggcggcagggaaggatcagcggcgcctgacttaactaacggaacttaactaaactaaagaaacctaaaggaaaccttaaaagaaaagttaaagaaactaa

SEQ ID NO: 47826 - DNA, 249 bp, Setaria italica
  Peptide Sequence Number=SeqID_113800
tgtaaacttggttgtaattgtttgcgccaccctctcttccttggtgactggtgccaagttatcagaagacagagaaatcttccttggtgactggtgccaagttatcagaagacagagaaatcttcttttttggagaacactacgaaataaaatgattctttttgacttgagaagcatgacttgtactatctaacagtcatgttctgcgttgctgagaaattcgcatcacatctataattttccttacac

SEQ ID NO: 47827 - DNA, 150 bp, Setaria italica
  Peptide Sequence Number=SeqID_113801
cgcaacatcaccctctcttccttggtgactggtgccaagttatcagaagacagagaaatcttccttggtgactggtgccaagttatcagaagacagagaaatcttctgataacttggcaccagtcaccaaggaagagagggtggcgcaac

SEQ ID NO: 47828 - DNA, 496 bp, Setaria italica
  Peptide Sequence Number=SeqID_113802
ttcttaccgttgtattgtccttcgtagttcttcctaagttaattggggtaaaggttcttctaaaggttcccagattgaaaacattcgacaaaatggttcaaggagctcaaggagcgtgaagagaagcggaaatcattcagcaggaggcgcaagttcaacgaagacaaggacatcgactcgatcaacgaccggaacgagcacttcaacaagaagatcgagcgggcctttggcaagtacacgcttgagatcaagaacaacctggaaagagggactgccttgccggattaataagcttgcgcaactctgtcttctggcgttggagctaaccactcaactctgagcgagtggacctgttgtttttcgtggcagtgattacttaccgtgcttgtaacttgtggctgacagtttcatttggaattgtaaggtacccactgggttgtaatgccggaggctgatgctatgtacaaacagtttttgagttatgtattcatgttag

SEQ ID NO: 47829 - DNA, 231 bp, Setaria italica
  Peptide Sequence Number=SeqID_113803
tgcttagaaacacctctactctcaccacgaggctccatcctcttcttctcagccacaaccgccttctattggtgctggcacatctgacgccgcagatcagcaacctgatgataatgatgctgagaaggaggaggacgctggtgctgacgatggttacccgcagatgactgaaaagcagaagaagctcttcgagctgcgccttaaaatgaacgaagcaaggaaggcgaacca

SEQ ID NO: 47830 - DNA, 359 bp, Setaria italica
  Peptide Sequence Number=SeqID_113804
gtttctctggcagcacacatctgcatcagttggaaaccaatggtacacatcaaagatgcttctggctgctattgatgaaagtcacaggggaatttatgattttatctacctgccaattgacttcaagaataagtgcaatgttggttatgcatttattaacatgatcaatcctgagaatattgttccattttacaagacatttaatgggaaaaaggtgggagaagttcaacagtgagaaagtggcatcacttgcttatgctagaatccaaggaaaatcagctctagttgctcatttccagaactcaagtttgatgaatgaagataaacgctgccgccctatactcttccactctgatggt

SEQ ID NO: 47831 - DNA, 461 bp, Setaria italica
  Peptide Sequence Number=SeqID_113805
tttatttgttcttacttaattggttagggttacttttcttattggtaccctagtcttatttcttccttgcacacatgagtgctccatctcctcagcaaaggggccatatgttccatcgaatgagtcatatggctccgattccatcctcatttgattcagctggtgaacggatgcggatccgaagaaacgaatcaaatgtaaatcaatctgacaataaaaggctgtttgagcttgacattgaccgcatagtccggggcgaggactcccggactacactgatgataaagaatatcccaaacaagtacacatcaaagatgcttctggctgctattgatgaaagtcacaggggaatttatgattttatctacctgccaattgacttcaagaataagtgcaatgttggttatgcatttattaacatgatcaatcctgagaatattgttccattttacaagacattt

SEQ ID NO: 47832 - DNA, 457 bp, Setaria italica
  Peptide Sequence Number=SeqID_113806
acggaaacaaaccttacgaagaaataccttaattagttaggaaaacaatcgatagcaatattgaggattctgaattgaaattcatatttgagcaatacggagacatgcatacacttaatgcttcttgcaaacatcatggttttgtgatagtatcttactatgatgtaagatcggctgaaaatgctgtgagggcccttcaaagcaaggcaatcagacataggaaacttgacatacggtactccgttccaaaggactatcctttggagaaatatatcaaccatggcaccctaatacttaaccttgacccctcaataacaaatgatgatcttcaccggatatttggtgtctatggtgaaatcaaggagattcacaatacttcagacaacgatcgtcacaaatcgatagagttttttgatctcagagcagctgaagctgcacaatatgccttaaacaggag

SEQ ID NO: 47833 - DNA, 347 bp, Setaria italica
  Peptide Sequence Number=SeqID_113807
gtatttttatttctaatattgaaccatctgttgtattttctgacctgtataagacataatgcaaggttccgtcaaaatggcatccatcagatccactggcccagaaagtggaactgttcaggttttgcgttctagaggtcagacaccgataaaccaattcagagagggaagaagttttctaggtcttccctcaactaccataccaagtaggtcctctcctgttggaattgcaactgcaggatcagaaagcagccactatgctcttgatgagcactgccattcactacaaaaagatgaatggacagaacaatgagcgaatggattagtggcgttcaagagagtagcgg

SEQ ID NO: 47834 - DNA, 261 bp, Setaria italica
  Peptide Sequence Number=SeqID_113808
tcgccgataacctcaccacctccgcgcttcgttccgacgaccttctggactcccgcggttgccgtccaccgcagctgaatctgccgccgccgccaccggattccgtctcgaccgtggccatgccccggtctgccaccggatcccgtccatcctcgaattctacccctgtgcccgtccctgccttggccgccctcctgttcctctgcccccggccggccgtccgccgattcagtccctgccatggccatccgctcgaagatg

SEQ ID NO: 47835 - DNA, 256 bp, Setaria italica
  misc_feature (227)..(227): n is a, c, g, or t
  Peptide Sequence Number=SeqID_113809
gtctaacctcaccacctccgcgcttcgttccgatgaccttctggactcccgcggttgccgtccaactagaccctggtctgccgtggccatgccctggtctgccaccggatcctgtccgtcctcgaattctacccctgtgcctgtccgtgccttggccgccctcctgttcctctgccccggccggccgtccgccgattcagtccctgccatggtcgtccgctcgaagntgaagatgagctgctcctgtgtggaggac

SEQ ID NO: 47836 - DNA, 478 bp, Setaria italica
  Peptide Sequence Number=SeqID_113810
tagtaaagtttactttaaattggtaaaaaactattggttgtattgttattaaatttgtaagtaaagtactattggctgctttgaagcagatggtaaaccactcttccatgtcgttgctgaatgtttgaggtaaagtgaagtgctaactacttcttttcttttgccaggtggttaaattatcaagctggcgaaagatcaagtttgctgaaatcaagactcttataaatcaagcaccgaaggttgcactgctctgtgtctcgaacaatccaaagagccatccaccaatgagggtcgtggtgaagatgctgctggaagccaagggaagagggacaagccgatgttgaagttggtacctccggacatctgacctgaagcaaacccgtctgaagaataatgaataaagatgtgttgctcttcttggataatgtactccataccaattaacatcatatctagttctgatagcagctagctagtt

SEQ ID NO: 47837 - DNA, 257 bp, Setaria italica
  Peptide Sequence Number=SeqID_113811
tcacctgtcttggcagcgcaccacatggctgccccatctcaactccttcttctcccctgcggacgggcgaggcaaggacggccgggcacgcaagctgccggaccaggcaaggacggccaggcgcgcaagctgctgaaccaggcgaggagggccgggcggccgacggcgggtcccagagtggagcggccaacggaggggatagtgggagggtgcggaggggagacaccgctcctgagcggcagcgcgtgttggagccg

SEQ ID NO: 47838 - DNA, 457 bp, Setaria italica
  Peptide Sequence Number=SeqID_113812
ctcctgttcacggtcgccacgtttcaggctcctcattgccacagtttcagcaagatctctaatgtagtcctccaagctgccacttttcttttccggaggactgtcaacagagatttcccaggatggccttttggacaagttatgagcactactagcagccatgaggtcctggtacacgtcctgtgcattggcctcagtccccacgctaggtgtcgccttacgaatacctcctaccgtcagcaaggtgcccttgtcttgggtgtcacgaccacaagccccatgatataacaagccattagcacttatctcagcctcagaggcaatacaagactgatgaatgtgttggcctccaaagtaaggttcacagtcaggcctaagagcatatctaactgatctagtggtgaactccctagatttccttgttggctcatagggcttgagactgccaatcagtgcg

SEQ ID NO: 47839 - DNA, 273 bp, Setaria italica
  Peptide Sequence Number=SeqID_113813
ctgctccaagttgtcacttctttttttggtgggactgtccacagagaattctcggaccggccttttcgacctggcacgagcaactaggcacgagcactactagcagggggggtcctgctccaagtccacgaaattgccctcagtccccatgctaggtgtcgcctcacgaatacctccggccgtcagcaaggtgcccctgtcttggggttcgtggccaaacaactcaaacaactcgttgaggaaaggtggaggcttcacagaactcgactggga

SEQ ID NO: 47840 - DNA, 364 bp, Setaria italica
  Peptide Sequence Number=SeqID_113814
taagtacttttaacttaaattagtactttagttagtactaattagttagtactaaggttagtaatttaaacttagttaattaacaacatccagtctagttaactgtcctctaattatccttacaccatcccattggcgccgcgtccgccattttttctggacagaggagagctcacactccttgtcatggtcaccgtgttcatccgccacctccagcggcttcgtggtgtagaaatggaagcagatgaggaagtagccgaagttgagcagcatgatgcaggtgacgagccagtagtagttgtcgatcctgccccggttgatgttgtcctggagccaatcgccgcggccgcgcgtggcgcgctgc

SEQ ID NO: 47841 - DNA, 335 bp, Setaria italica
  Peptide Sequence Number=SeqID_113815
ttcggcgcagcttttgccctgcctggaggttacagacaagatgatggcacgccgatccttgctgggaggtatacttttcatgcattcgtgatggccaacacatttgccttcgttttctccgcgatggctactgtttgcctcatgtattctggttctcctgtcttcaacacaaagatctgcaaatggcgttcgatctatgcgtatgcattcatggagatttcagtcacatgcttggttgctgccttcgctcttgctgggtttttggtgctgggttcagttgctcataagacagcccttgcgatttgcttcatcagcccctctgtagtgctattcaa

SEQ ID NO: 47842 - DNA, 161 bp, Setaria italica
  Peptide Sequence Number=SeqID_113816
cagcttttgccctgcctggaggttacagacaagatgatggcacgccgatccttgtctgtaacctccaggcagggcaaaagctgcgccgaacgccacagtcgctattagaactgagccaacacatagactttgggttgtctcttttatattctccaactcct

SEQ ID NO: 47843 - DNA, 458 bp, Setaria italica
  Peptide Sequence Number=SeqID_113817
tcttctactagtctagttctaagtagtcgtagtttcttagttagtcgttgtcttgattcttgttctgttgtttttagttgggaagcctttagtttgatcatggaggatgagaggaacacccagctgcaccaccagggcggcgaggcccaggagaaggccgccgatcaggtggaggtgaaggacagggggatcctggacacccttctcggcaggaagaagcccgaggaccaggagaagaagcaggaggaggagctggtgaccggcatggaaaaggtcacggtggccgagcctgagaagcacgagcacaagaaggaagagcacgaggccgggagaagaaggagagcctcctcgccaagctgcaccgcaccagctctagctctagctcgtcgagcgacgaggaagaggaggtgatcgacgagaacggcgagatcgtcaagaggaagaagaagaagggcctc

SEQ ID NO: 47844 - DNA, 334 bp, Setaria italica
  Peptide Sequence Number=SeqID_113818
ttcccggttacggttcttaaggttagttaagttaagggttcttttgttctttgggtctaagtattctattggtactaagtattacccgggtacaacaagggctccggcgaggaggaccacaaggccgccggcgctgctgccggcgagcacaagaccaccagctcttaagctcgcccgcgtgtcctgaccgggccttgatcagaagcgtttggcgtgcgtttggttctgcagttctgctttgctttagtaagtttggtttcaagatgggttgcgcggtcaaggccccggtgtgttgatgcccgtaccggccagtgctggtagtgagcgttgctgc

SEQ ID NO: 47845 - DNA, 197 bp, Setaria italica
  Peptide Sequence Number=SeqID_113819
tcgtaggtacctaggtagtaagtaagtctaggtaggtaggtagtcttggttgtaccggcatggaaaaggtcacggtggccgagcctgagaagcacgagcacaagaaggaagagcacgaggccggggagaagaaggagagcctcctcgccaagctgcaccgcaccagctctagctctagctcgtcgagcgacgaggaa

SEQ ID NO: 47846 - DNA, 414 bp, Setaria italica
  Peptide Sequence Number=SeqID_113820
aaagcgagtctacaacaagcaagtcaagagcgaagttactaagtaagcgtgctgatctgttctgttgtttttagttgggaagcctttagtttgatcatggaggatgagaggaacacccagctgcaccaccagggcggcgaggcccaggagaaggccgccgatcaggtggaggtgaaggacagggggatcctggacacccttctcggcaggaagaagcccgaggaccaggagaagaagcaggaggaggagctggtgaccggcatggaaaaggtcacggtggccgagcctgagaagcacgagcacaagaaggaagagcacgaggccgggagaagaaggagagcctcctcgccaagctgcaccgcaccagctctagctctagctcgtcgagcgacgaggaagaggaggtgatcgacg

SEQ ID NO: 47847 - DNA, 163 bp, Setaria italica
  Peptide Sequence Number=SeqID_113821
cgtttggcgtgcgtttggttctgatcaaggccccggtcaggacacgcgggcgagcttaagagctggtggtcttgtgctcgccccgccgtgtcctgaccgggccttgatcagaagcgtttggcgtgcgtttggttctgcagtttctgctttgctttagtaagtt

SEQ ID NO: 47848 - DNA, 244 bp, Setaria italica
  Peptide Sequence Number=SeqID_113822
aaggagaagctgcccggccacaaggaccacgccgagggcgagcaccacacggccgtaccggccccggcgccagcgcccgtggagacgcacgcttacaaggaggacgaccacaagccgtacgtcccggcgccggctcccccgcccgtggagacgcacgtccaccaccatgaccacgccgtcgttcgtcctagtaagtattcgttaggttacgttacgttcgttaagttaaccgttacgttcctta

SEQ ID NO: 47849 - DNA, 409 bp, Setaria italica
  Peptide Sequence Number=SeqID_113823
ctttgcagctgcgtcaatgtactgctgacaaacccaatttgggttgctgttacacgaatgcaaactcacagaaaggcaaacatacagcaaagccctcaggatttgatatgtgccaatgacaaggctctcgaagcttctacaactgaaaacaccccttacaaaactatcgatgtttttcaggaactgtacaaagaagctggagtgttgggcttctggaaaggggtaattccgtctcttattatggttagcaatcctgcgattcagttcatgctgtatgaaactcttctgaagaggatcaagaagagacgggcctctaatttgaagggagctgatggactaactgctcttgaagtaagcatttgtttttccactggtagtaatttcctcagttgatttatttaggaccaat

SEQ ID NO: 47850 - DNA, 329 bp, Setaria italica
  Peptide Sequence Number=SeqID_113824
ctgaatcgcaggattgctgtatgaaactcttctgaagaggcccgtctcttcttgatcctcttcagaagagacgggcctctaatttgaagggagctgatggactaactgctcttgaaatttttcttcttggtgccgttgcaaaacttggtgcaactgtccttacatatcctcttctagttgttaaggcaagacttcaggtgaagcaaagaattgatggtgacaagaggcatcactacaaaggtacatttgatgctatcacaaagctggtacagtatgaaggtctgagaggcatgtataaaggaatgggcacaaaaaattgtgcaaagtgt

SEQ ID NO: 47851 - DNA, 310 bp, Setaria italica
  Peptide Sequence Number=SeqID_113825
aatttgtgcagaagaaggggccgaccgtgagtgaactccctgaggtgttcctgatggagccattcctcatcttcctgcagatactgaacaagctgtttggctatgagccctaccctgggttctgcaagaatgtggacaagaagatggaggctgatctcagggagagcagagagctcgagcagaggaagaccagctgatcgatcggtaatttggattgatcgaccggacttgtacgcccaataagttttaaataaacaaataactaaataacaatagtaagtaagtaatagttagaccttaagcaatttgt

SEQ ID NO: 47852 - DNA, 393 bp, Setaria italica
  Peptide Sequence Number=SeqID_113826
taacctaagtctaaattgttacctaaagtacttttgtagtaacttgtctacgtttcctagtaagtaacgggttcgtccctaagttgccttcgaccccaagcaggatcggcaggagaacttcgcctcttttgtcgccctgcgcaacctgagctggaacgaggtcctgaagaaaggcaccaagtaccactgcgaggacttcagccgcttctgtgaccagaagatgagctgcatcgtgtccaccctgaactggtcgtggccgtgggctgagcagctgctgcagtgcttcttcgtggcgtccaagtgcatctggctgctccacctgctggcgttctccttcagcccaccgctgacgatactgcgggtcgaggagaacagggccttcgaccagatcta

SEQ ID NO: 47853 - DNA, 258 bp, Setaria italica
  misc_feature (44)..(44): n is a, c, g, or t
  Peptide Sequence Number=SeqID_113827
aaatttactcctacaaccttatcaaattacgctcaacgacaagncccgaaactagtgctgtaccatcttgaagctctgatgaaccaagcaatgtaccaagactttgagaactgcacgttccagaagaacgggtcgcccaagtgcctcgaccccaagcaggatcggcaggagaacttcgcctcttttgtcgccctgcgcaacctgagctggaacgaggtcctgaagaaaggtctaacctaagttaacctaacttgtcta

SEQ ID NO: 47854 - DNA, 425 bp, Setaria italica
  Peptide Sequence Number=SeqID_113828
ttttgttgtttatcaaactgtaaatctaaaacatatgtgccaacgcagacctctgaagcaaatcgaattgattatgttaaaggtagatgtccaaacaatcttctcaagcttaggagctgctttctgttcaaaatggatgtcagaaatatgtgagctctcaatgacaagaacctcaagtttactgaatccattcctgaatgttaggttcttgtcggtataggactcgctcccaagccttaagaaacgcaagttgaaaaggttgcctaggatccgtatatcaatgtcttccaagaagattgaaaacgagcataggacttcgtttagcttgccaattacttgaagcagacggtcgaggaaatcttgcttgccattgataacaatacctagcttcttcaacttctgcaaccgaccaacattgttcaggg

SEQ ID NO: 47855 - DNA, 396 bp, Setaria italica
  Peptide Sequence Number=SeqID_113829
tttttagtttagttttattcttaaacttgttaaattcttaaaaactattattgttgtcctaacgtctagtaccttcttgtaagtcaaattcgaattgattatgttaaaggtagatgtccaaacaatcttctcaagcttaggagctgctttctgttcaaaatggatgtcagaaatatgtgagctctcaatgacaagaacctcaagtttactgaatccattcctgaatgttaggttcttgtcggtataggactcgctcccaagccttaagaacgcaagttgaaaaggttgcctaggatccgtatatcaatgtcttccaagaagattgaaaacgagcataggacttcgtttagcttgccaattacttgaagcagacggtcgaggaaatcttgcttgcca

SEQ ID NO: 47856 - DNA, 358 bp, Setaria italica
  misc_feature (29)..(29): n is a, c, g, or t
  Peptide Sequence Number=SeqID_113830
cgagtcaaagtggacgtttattactcganaggtatgatgtgaatggctagtacattactgtacatgatgattccaatatacgtattttagtctcattcagtaatctacagtagggatggttgaactgcctttgcacttctgcaggagcaccccccacttaagcaggccatggttcaccttgcacccctgtgcaaccggtgattggatgaagctacttcttgaagaaagtaaagtggcgtatgaggaacaatcaccgcgatatctaccggcatggttatctgtggttggccaggcggtttggactgaaaatccctcttgagctttcattgcaagtcataggtttctacccttttttcta

SEQ ID NO: 47857 - DNA, 208 bp, Setaria italica
  Peptide Sequence Number=SeqID_113831
cggtgattcaagggctgtgctttgccgtggcaagcaacccgtgcctctgtcagtagatcataaacctaacagggaggatgagtatgcaaggattgaggcagagggtggcaaggtcatacagtggaatggttatcgagttttcggtgttcttgcaatgtcacggtcaattggtatgcctgtccagcacactgccttactgatataatag

SEQ ID NO: 47858 - DNA, 110 bp, Setaria italica
  Peptide Sequence Number=SeqID_113832
gttctggcacaacttgccgcagaagcatcacttgtacctgtggcacctgagaccgtgggttcgacggcggtggtcgctgtcatctgctcctcacatatcattgtcagcaa

SEQ ID NO: 47859 - DNA, 435 bp, Setaria italica
  Peptide Sequence Number=SeqID_113833
ttgcagaactcccacaaaccgagcagtagtggcgtcgagatgaagtactcggtggaccgacagccgccttcaaatatgttgggacattaggaggcagggactcaagatttgcttcttgcaacacatccatgaaagatcttgctgccctcttctccaaagctttcccttgccttgtcttgcgtttcatgatcttggactgcttcttttgcatgagcacagggtcttcctcatccgtggatccatactcatcatcattaagatctaccacctcaacccccagcattatcactctcaagagcttcaagacgagctaatgcagcctgggcgcggttgtcagagctggcgagcgcggatgccatgcgcgtggccatgcggcgcgtgcggctgctcgtccggcggaacggcccgacgttctcttcctcccgtccatctccc

SEQ ID NO: 47860 - DNA, 324 bp, Setaria italica
  Peptide Sequence Number=SeqID_113834
tttagggtaactaatttaaggtaaggcagggactcaagatttgcttcttgcaacacatccatgaaagatcttgctgccctcttctccaaagctttcccttgccttgtcttgcgtttcatgatcttggactgcttcttttgcatgagcacagggtcttcctcatccgtggatccatactcatcatcattaagatctaccacctcaaccccagccattatcactctcaagagcttcaagacgagctaatgcagcctgaaatggatatgtttcacaacagggtagcaaaacatcaagaagattatttcaggcacaactatagatcag

SEQ ID NO: 47861 - DNA, 427 bp, Setaria italica
  Peptide Sequence Number=SeqID_113835
atacgtcggttggtatccgcagaataaccatgctgaaaactactatttgtgtgctattttgcgtgtgattgtatatgtctagtaccttggtatcatgatatgtgagaccgcgtatcagaccatacgcgagaagaaactatatgcagtgcagcagcacttaatcgaacaagctgaaacccatatcatcgtcagattcttccttctcttcaaccttctcttcctctttcctcttcagcaggtgctgcaccaccagctgcagcaaccggagctcccatggcaattgcaccaccacctgaaggcaccgaggcgaactttcccttccagctgcaatcacttctgttatgtccttgtccttgagttctgtgagcaggaagtccagtttctcttcatcagcttcagccccaactgattccagaatgctcttaac

SEQ ID NO: 47862 - DNA, 323 bp, Setaria italica
  misc_feature (323)..(323): n is a, c, g, or t
  Peptide Sequence Number=SeqID_113836
atcagtgtgagtagtcgcggtctcacatatcatgataccaaggtactagacatatacaatctgacgatgatatgggtttcagcttgttcgattaagtgctgctgcactgcatatagtttcttctcgcgtatggtctgatacgtcggttggtatccgcagaataaccatgctgaaaactactatttgtgtgctattttgcgtgtgattgtatatgtctagtaccttggtatcatgatatgtgagaccgcgtattcaggaaactttgatgtttgatgtaaatctgcataaattgaattcccgaaacgttaacaaaaaaaaaaaan

SEQ ID NO: 47863 - DNA, 229 bp, Setaria italica
  Peptide Sequence Number=SeqID_113837
cggagggtggcagctggccgttgttgacggcgttcggctggctctcctggctagcgcctttgtcagcggagttctctactggagcggcgtctggtttggttccagatgctggagcggcggcggcagcggcagcatctgatttggtttcaggcgctggagcagcagcttcagcctcagcaggattggcatcttccttgttctcttcaacagcgtctttcttctcctccaa

SEQ ID NO: 47864 - DNA, 361 bp, Setaria italica
  Peptide Sequence Number=SeqID_113838
tttgactttgattactgcttccatctccaacttcagtctttttgaactcattgttgaagttgctgcccaagaggtccttttgattttgcagggccagttcatactcgagattaactacatcaacagcaccatccccccttgcaacagcacaaactttgtacagccctcccaaaatgccctcttcagaaactgctagcgaatgaacaaaagcagggttgaaacattgccctgcactaccagaagaactgccattttgcaattcaggtgatccgtaatcaatagaaaatagtgttcgccctttggagaaatcccatgcagcgagctttcgtagttctaaggtcctacctagttgtatttgtct

SEQ ID NO: 47865 - DNA, 369 bp, Setaria italica
  misc_feature (18)..(18): n is a, c, g, or t
  Peptide Sequence Number=SeqID_113839
cattgccctgcactaccngaagaactgccattttgcaattcaggtgatccgtaatcaatagaaaatagtgttcgccctttggagaaatcccatgcagcgagcttcgagtcaaggccaccagtgattgctgccgaatgaaatctatctattagtgagtatgaaacactgaagaaattcagcattaaccaatccaagaatttttctagtatctgctccctaataagttaaccaaaaaaggagcaacaagactacaagattaagccaaaaagaaacagaaattgtagcactaatctgtccaaggtctccaaggaatgaattgtacactgctgcaaatacttgtgttgggtctttcccttctaattcttttta

SEQ ID NO: 47866 - DNA, 379 bp, Setaria italica
  Peptide Sequence Number=SeqID_113840
tgttatgatagacagcattggtgctttctactggatagatcgtgcttctcaacctgtccgagagagtaaagggaagtcactgcagagcgttactgaaactgttgtccacgagatacgcacgtttttgcaacttcaacctgcattggtgttggtcacgaaggcacccatttatgcagaaggcactacaacagcaaatgacttcaataggggttcttcgaagtacacgctggaggattcaaccgttttgagatattcaagacaggaggaagaaagaactctctcttatcgggaatatatgccatcaatatggcagtcctttgttacacacaggataaatctgcaagtagaagaagcagaagttccctctgtgcaggaaaat

SEQ ID NO: 47867 - DNA, 456 bp, Setaria italica
  misc_feature (125)..(125): n is a, c, g, or t
  Peptide Sequence Number=SeqID_113841
ctttgaagactgtacagtctcaatcaaggagttgaagttcttggtgtcggtatatattttgttattgatagacagcattggtgctttctactggatagatcgtgcttctcaacctgtccgagagngtaaagggtgatttcaaaattgtagattcggcatacatattttgtttggttgtcgtttcatctatgaagtcattgttgacatgtgactaatcaaaagaacattctactctactttgttctaatgatctttcctgcatatatgagtaggacagcactttcttctgaaaaaaaaggagagcgagtagtttggctaggaaatttagccactacaatactgttttcatatgaaaataatgtgacagactgacagttacatcatgttatagaaatgctaagtgctaacaggcagcgatggtaccaaattctattttaaccgaatcagttcagtttt

SEQ ID NO: 47868 - DNA, 252 bp, Setaria italica
  Peptide Sequence Number=SeqID_113842
atatatcataagaagaagaagaagtaatatacatgtagcagtagtaatttacaaaaacttattctatatatgtgtatagtacctaaattacatgaacaagagaatgctccagcatgtgttgtacagatatcacctttccagtgtacttactacttactagcagtttcttgttcatgtaatttaggtactatacagatatcacctttccagtgtacttactacttactagcagtttcttattctatatatgtg

SEQ ID NO: 47869 - DNA, 244 bp, Setaria italica
  Peptide Sequence Number=SeqID_113843
gccgatcatctcaccacgccgccgcgccatcgccggatctccgccgagccaccggccgatcatcctgttcagagtgtactgcctgcttgatgcaaatgaccaagtttttcaactggtgatgggaagtgtctctttctaatcttctccactcattgaagcggcacctcacttgcttgttgaatgtgttctgaaaaaggcaaacacgtacagacaatgggctgtggtcaccccattgcggattccg

SEQ ID NO: 47870 - DNA, 216 bp, Setaria italica
  Peptide Sequence Number=SeqID_113844
gttcttggagctaggatttgattttagttttttaggaggtcgatcgatttggtggcatgtatatagcatgagcagtggaggagctcctctttgggagggagggtagagagggtgtgggtggtggcttggttgttgggaatgaacaagaattaccaaaagaagaaatagactaccaagacaatagtagttagtaacaagaataatacaaccttacca

SEQ ID NO: 47871 - DNA, 179 bp, Setaria italica
  Peptide Sequence Number=SeqID_113845
actaggtcttttagccgtttaacattgcaaccaatctttcatataagtcagcttcctccgtcgttaaaggactgcggtaacccctattctccaacgcctccactattctaacaaacttttaaaagttcacaaaagaataataataataataaataatcattagatacatcagcaattaa

SEQ ID NO: 47872 - DNA, 189 bp, Setaria italica
  Peptide Sequence Number=SeqID_113846
tggtgcaattttatacaagttctgtgggtaactgaagaaatcaagtggctgtacaggccttcaggtcctaaggttttgcatgacgcagtcaaataaatacaagtagggtttacttatcatttagtcttcgtctaactagtatttccttgttaacttttttccggttaaggtttgttatttaaagttctt

SEQ ID NO: 47873 - DNA, 466 bp, Setaria italica
  Peptide Sequence Number=SeqID_113847
attgttgaacgcagtactgcataccagccatggatttggaattctggaaaccatgaaatagaatacaggcctgatctgggagaaacttctacgttcaagccatatctgcatagatatatgactccatatttggcatcaaagagtagttctcctatgtggtatgctgtcaggcgtgcatctgctcatatcattgtgctgtctagctactctccatttgtaaaatacactcctcagtggtggtggctgaagaatgaactcaagcgtgtggacagggagaagacaccttggcttatagttctcatgcattctcccatgtacaacagcaatgaggcacactatatggagggagagagcatgagggctgcttttgagaaatggtttgttaagtacaaggttgacttggtgtttgcgggacatgttcatgacttaatagaagaagaattactaattaattacgtactaatta

SEQ ID NO: 47874 - DNA, 314 bp, Setaria italica
  Peptide Sequence Number=SeqID_113848
aatagaccaaaataataggagtcatatatctatgcagatatatgactccatatttggcattaaagagtagttctcctatgtggtatgctgtcaggcgtgcatctgctcatatcattgtgctgtctagctactctccatttgtaaaatacactcctcagtggtggtggctgaagaatgaactcaagcgtgtggacaggggagaagacaccttggcttatagttctcatgcattctcccatgtacaacagcaatgaggcacactatatggagggagagagcatgagggctgcttttgagaatggtttgttaagtac

SEQ ID NO: 47875 - DNA, 113 bp, Setaria italica
  Peptide Sequence Number=SeqID_113849
aggagaactactctttgatgccaaatatggagtcatatatctatgcagatatgctgtcaggcgtgcatctgctcatatcattgtgctgtctagctactctccattttgtaaaa

SEQ ID NO: 47876 - DNA, 407 bp, Setaria italica
  Peptide Sequence Number=SeqID_113850
aaggggcgtctacagtaggtgggactttgagacggaagaggagtgggcgacatacaatgatcagaaagaagccatgccgaaggccgccttccagtttggggtgaagatgcaggacggcaggaagacgaggaagcagaacaaggaccagaagctcactaatgatctccacaagatcaacaagatccttgctaggaagaagggcgagaaagatggaacggatgatggcggccattacgatgatgatttacctagcgcgaagaagcaacgcggctgatgtagttcatttctcggtcctcgtggcagaaagtgtaaaatgcgccaatagttacagtgccatgtttgataaatcatcttcatcatcgctccctgcaatctcattatgatactcctggtaaccaggataacac

SEQ ID NO: 47877 - DNA, 358 bp, Setaria italica
  Peptide Sequence Number=SeqID_113851
aaacatagaagaccatgtcaaacaattctcattttcacagaagtcgtgatttggatagctcatgaactggtatacccgcttattcatttacataaaatgccatcgaaattagaggtaataaatagacatggaccttatcccataaaaaggaattattccttcaagaaagtatagcatcacataaccaacctccgagatatttgcttttctcaattgaaatcttgtgtgcatctgccagcctcaaatccgtcccaggaggtgccacagcatgaaatgaaccaagctccgtgggttcatagtctgggttttgatcttcacgacgctccttagcacgatcacgatacctgggtgtctctgg

SEQ ID NO: 47878 - DNA, 341 bp, Setaria italica
  misc_feature (99)..(99): n is a, c, g, or t
  Peptide Sequence Number=SeqID_113852
tcagcatccagctaaacatggcactgtaaagtctgtaacattggcgcattttacactttctgccacgaggcccaagaaatgaactacatcagccgcgangtttcttcgcactaggtaaatcatcatcgtaatggcctccatcatccgttccatccttctcgcccttcttcctagcaaggatcttgttgatcttgtgcaggtcattattgagcttctggtccttgttctgcttcctcgtcttcctgccatcctgcatcttcaccccaaactggaaggcggccttcggcaataggcttactttactagaatacgttagtaattttagacccaactacctacta

SEQ ID NO: 47879 - DNA, 346 bp, Setaria italica
  misc_feature (111)..(111): n is a, c, g, or t
  Peptide Sequence Number=SeqID_113853
tccttgtctgcttgagtcatgaacctagatcctgggctatactaggatcagctaacacatcatattcctgagtgctttgttgcacgaactgttctggataacccatctgcngttctgcatacgcatagcctgaccaatcgccttgatatccagctgctaccatttgggcttgaacagcatcatacccactctgacaccagaaaagacattaagtattgaccaagacggataaagtatagaataaactggaaacagtttatagaagctgcctttgccatgaatatggataagtaataaatgaattgttagcctcttaacattcaacgtgcattctccagaaaaaaaa

SEQ ID NO: 47880 - DNA, 164 bp, Setaria italica
  Peptide Sequence Number=SeqID_113854
tagacagatttgtcagctgcagtgcggaaggagactgcctgatcttcttttgtcgccctcagttgcagataatggcttcaggaagataagcctgtaaagttataaaacacttgactttgcatccttcccatcctctgcatcaggcttcttttcaatttcacttc

SEQ ID NO: 47881 - DNA, 320 bp, Setaria italica
  Peptide Sequence Number=SeqID_113855
tgacttcctactaccatacccaaaacctcatgaaccgcctcgaagcctgcacttgttgtacctacatgcccattaagatttcttccttatgaaaagcttctcgctagaaggtacagttctaactaggctatctaaatcttatcagtaaagcctcttagcactctcatcgtggcctacttcggggggcgtacgcactaattacattcaggaccatatcaccatccttgagactcttgtcaatcaaaactccctacttcatttctatttgcagctgtccctgtgtatcaaagctttgtaaattcggttatttgtccctacct

SEQ ID NO: 47882 - DNA, 317 bp, Setaria italica
  misc_feature (1)..(101): n is a, c, g, or t
  Peptide Sequence Number=SeqID_113856
nnnnnnnnnnnnnnnnnnnnnnnnnnnnnnnnnnnnnnnnnnnnnnnnnnnnnnnnnnnnnnnnnnnnnnnnnnnnnnnnnnnnnnnnnnnnnnnnnnnnnggtcctacaattgggtgaaaagagtttggttgagaggtggtctcttaacaattagaaaggaagcaagaatttttcacagaaataccaataaataataccaggcttttgcaaaggattgcctgttccgagtctgatatcagagcctgaaaataaccacgttaacttggttccatgatatcatttcataaactctctattcgtggccttactttgggt

SEQ ID NO: 47883 - DNA, 331 bp, Setaria italica
  misc_feature (274)..(274): n is a, c, g, or t
  Peptide Sequence Number=SeqID_113857
ctgttaaactggtcggcagaagacatcactgtcatctttagcacggaatgatgttgttttgagatgactaccagaaaggagaatatcatattgattgtggaaatctgtatttttttcataatcattaagcgtgttctgctggtgtaagatgttagctgataatgtctaagcattagaatgcaacaattcagtttcactgttgatttggagacaatatctggagctcctaagaattgtttggctgtattatccaacaattaagatttttagggtncctgcatagaataatgatgtgtagatcatgtgtattgggctggttcagatggtgcaa

SEQ ID NO: 47884 - DNA, 216 bp, Setaria italica
  Peptide Sequence Number=SeqID_113858
agaatagaactaaccaagaaaaggaagaaataatacaataattagaattagtaggaaaatactgtatttttttcataatcattaagcgtgttctgctggtgtaagatgttagctgataatgtctaagcattagaatgcaacaattcagtttcactgttgatttggagacaatatctggagctcctaagaattgtttggctgtatttatccaaacaa

SEQ ID NO: 47885 - DNA, 270 bp, Setaria italica
  Peptide Sequence Number=SeqID_113859
ccgtgaaaccgcagggatgaacattcaggagctccaacgcccggtccttctgaattcccctgtgagcatcagcaggaatgaaccttcaggctgtgcgaggaaagacaccgtcttggcaaccttctctaagcactccttactcaggtaaggagggtccgcgacgacgacgcggtaggcgtgcttcatcgccggcgggagctcctccggccggttgtagtcgtagaaggtgaagtcgccgccgtactgcccgaaccgctcgtcgtactccag

SEQ ID NO: 47886 - DNA, 414 bp, Setaria italica
  misc_feature (1)..(31): n is a, c, g, or t
  Peptide Sequence Number=SeqID_113860
nnnnnnnnnnnnnnnnnnnnnnnnnnnnnnnaggtaaaagacaaaatgtctgcttaaatgtcaacaacaccaacaatgtgacttcttaactacacattaagaatgttgctcgtcaagcattcaacatgtacaccaccaccaaacgcctgtcttggaagtaatatgtgtatgtacagcaacggtaggctttacacacttttgaaggcacactacacacttgatagaacgagagaaccaagcaaccatagattgacgttttcactttctgctcggtgtatctcgggacgtttcttaggctccaaagcacccgatgagcttcttgggagcatggccggtggcgcggtaacttaggcaagaccaatactacctacggaccttacaaggaacctacctacgaccgacgactttagacta

SEQ ID NO: 47887 - DNA, 218 bp, Setaria italica
  Peptide Sequence Number=SeqID_113861
caaaatgtctgcttaaatgtcaacaacaccaacaatgtgacttcttaactacacataagaatgttgctcgtcaagcattcaacatgtacaccaccaccaaacgcctgtcttggaagtaatatgtgtatgtacagcaacggtaggctttacactactttgaaggccgaggagatggctgccaagtaccgcgccaccggccatgctcccaagaagctcat

SEQ ID NO: 47888 - DNA, 344 bp, Setaria italica
  misc_feature (223)..(223): n is a, c, g, or t
  Peptide Sequence Number=SeqID_113862
acctacaaatacttacttacaagttagacgacttactaatgttcgctttctttgtgttctcccatgaaagaatagcagatattttttggcagccttgttctcagcttttgtcttctcattctcttcccatgctttgatcaaagagttccttttctcagtttccaccttgcaagtgcgagatctctatcattggagctcccttgcttctcagctgcaggtttcnctgcagcaggttcatctgcaaccttctcgacgatggccagggccttggagtcgtcggccggcttctcctccacgaccggcttctcctccgcggctggcggttcgctggcgggatgacagcc

SEQ ID NO: 47889 - DNA, 239 bp, Setaria italica
  Peptide Sequence Number=SeqID_113863
gttaaggagaaaccggttcagggttatgatatcagttttctgataacaaactaccactgcgaggacatgcataagcacaagctcatagacaaaaacctaagaaatttctttgcaagaatgttttccaactcatctgcttgcttaaccttcatgcttatacgtgtttaatagagacttcaatcaattcaatacgtataagcatgaaggttaagcaagcagaatgttttccaactcatctg

SEQ ID NO: 47890 - DNA, 371 bp, Setaria italica
  Peptide Sequence Number=SeqID_113864
tgaagtaggaggaacagacctacttgcttgggctaacgatgcaggggtggaaagtagcatgatatgaaacagacaaaggaattgcattcatagagcgaccgaaaggcattcctcggccagagttcttacttcccacctagtatggcaggtaaatatctctatatcaattaggcataatttagtcgaaccatgtactcgaacatttcaattttgtcgacatacaaggaaaatattattagaaggtgcaaaagcaaaagattttgttgagctgaatgcgataaggatcaaagatttgcttgttactttactgagtggaagacagaggctattagccaaaacacacatacttgttaatttgtgtcaaggagaca

SEQ ID NO: 47891 - DNA, 474 bp, Setaria italica
  Peptide Sequence Number=SeqID_113865
acactgctcttgtccaaattgaccttttggagttttgtttgagcagtcaagcttgatttggtccgcttggtttcaattgtttctctttgagctaagctgttccatagaacagatagatgattcatactgtggtttacttaagatgcacatgcgatcatttgataatttgacaactgttggatataggtaattgatttagcaacttctcttgcaaaagttgcggatgttgatagaaaccttgggaatgaaagcactgcagtcaagggtttcaaagaagcaattgaatgccttgagaaactgaagcttggttctgagcaagctagtcttgagcaaaggcgctctctgttttagacttcctacacaaccaattagcagataagtaatgtaccagcatcctaaaatcatacccataagaaacatattcagcatgatggtgttgaagaacttcagtattcatgtattgcatacagaagg

SEQ ID NO: 47892 - DNA, 364 bp, Setaria italica
  Peptide Sequence Number=SeqID_113866
aaaattactagcaaggcgtgtatatcacgttttaaagactgcccgctgtgtggtgctgatatagaggggattgagcctgatgccgagcttcaagctcttgttgatcgcttcattgatggtcatgccagaatcaagcgatcacacgctgccagggatgtggaagcagcgggtggcaataacaaagtcatatatgaggatgtttccatggaaagaggagcctttctagtgcagcaagctatgagggcttttcgtgcccagaacatagatctaggttatcttctgacgacttcaactcctccctgatgtcatctgcgcacatagtgagccttgattttgcactttcaattgttctgggcacgaaaag

SEQ ID NO: 47893 - DNA, 425 bp, Setaria italica
  misc_feature (418)..(418): n is a, c, g, or t
  Peptide Sequence Number=SeqID_113867
ttgattggtgcatactctctcagtttcactaataaaattggcgaccttcggtactatgatgggaacctgcaatctgcacgaagttattatgcccgttcattggatgttcgcagaaattcagtgaaagagcactcagcagtggcctcccaggtaattgatttagcaacttctcttgcaaaagttgcggatgttgatagaaaccttgggaatgaaagcactgcagtcaagggtttcaaagaagcaattgaatgccttgagaaactgaagcttggttctgagcaagctagtcttgagcaaaggcgcctctctgttttagacttcctacacaaccaattagcagataagtaatgtaaccaagacaatacctaaaatacaataaacccaaataaaagaaaaaacaaaataaaattaaacaaanaaacaaa

SEQ ID NO: 47894 - DNA, 278 bp, Setaria italica
  Peptide Sequence Number=SeqID_113868
taaaattggtgaccttcgctactatgacgggaacctccaatccgcaagaaactattatgcccgttcattggatgttcgcagaaatgcagtaaaagaacactctgcagtggcttcccaggtcattgatctagcgacttctcttgccaaagttgcggatgtggagagaaatcttgggaacgaaagcgctgcagttgagggtttgaggaagacaaattacaaatagaccttagaagaaagttagaaagaactaaggaaattaactaagaaaacaaaagaaa

SEQ ID NO: 47895 - DNA, 240 bp, Setaria italica
  misc_feature (214)..(214): n is a, c, g, or t
  Peptide Sequence Number=SeqID_113869
ggggcggcgtccgtcgcgcagaaaggcgaaggcgagtagccacggcttttcgtgcccagaacattgaaagtgcaaaatcaaggctcactatgtgcgcagatgacatcagggaggagttgaagtcgtcagaagataacctagatctatgttctcagcttggagctgtgttagggatgcttggggactgctgtcggaccttgggagatgctccgtnagcaatcacttactatgaagaaagtt

SEQ ID NO: 47896 - DNA, 263 bp, Setaria italica
  misc_feature (250)..(250): n is a, c, g, or t
  Peptide Sequence Number=SeqID_113870
cctaacatgaaaatcaggttgatctccctgtataaaaaccttagccgatgggattttgtgtcactgctggctagcccgccagtgtcacatattttgcctgtactggaaaatggtaaacttttagagtttttctcttgctctgcaaaatagtagtttgaaccaataagacaatgaaaatgcaagaaacttgcatgagtaggagaagcaaataacaaccaaagctaacagtttgtgatctggagatctttanagaagccatttag

SEQ ID NO: 47897 - DNA, 420 bp, Setaria italica
  Peptide Sequence Number=SeqID_113871
gcgagacataatatctggtcttatgtatcttcactctcatggactgattgaattcattaaaaatactggcaatgtcctcgctcgagtactaggcaaatcacaatcaacatttaggatggtggcatgcccagagattggtttctgttgttgaataaagctccagaatgttattcatggtgacattaaaccagacaatctcttggttaccagtactggcaatgtgaagataggagatttcagtgtaagccaggtttttgaggatgatgatgatatgctttggagatctcctggcactcctgttttcactgcaccagagtgctgtcaaggttcagcctaccatggtcgggcatctgatacatgggcagttggtgtaactttatattgtatgatttctgggcaattattcctattttctttgga

SEQ ID NO: 47898 - DNA, 390 bp, Setaria italica
  misc_feature (350)..(350): n is a, c, g, or t
  Peptide Sequence Number=SeqID_113872
ttaatttaacaatagacaatttactagatcgcctgtttttctatgccatgctgtatgctgtgtgcttcccagcttgattgagacactgaatcttgtatttttttttccctaatacacagaatgttattcatggtgacattaaaccagacaatctcttggttaccagtactggcaatgtgaagataggagatttcagtgtaagccaggtttttgaggatgatgatgatatgctttggagatctcctggcactcctgttttcactgcaccagagtgctgtcaaggttcagcctaccatggtcgggcatctgatacatgggcagttggtgtaactttatattgtatgatttcngggcaatatccatttcttggagatacattgcaggaaactt

SEQ ID NO: 47899 - DNA, 248 bp, Setaria italica
  misc_feature (11)..(11): n is a, c, g, or t
  misc_feature (49)..(49): n is a, c, g, or t
  Peptide Sequence Number=SeqID_113873
ttttggtacanatttacatattattttactatgcatttcttgatcgccngtttttcttatgccatgctgtatgctgtgtgcttcccagcttgattgagacactgaatcttgtattttttttcccttaatacacagaatgttattcatggtgacattaaaccagacaatctcttggttaccagtactggcaatgtgaagataggagatttcagtgtaagccaggtttttgaggtaaggtctatagtcct

SEQ ID NO: 47900 - DNA, 188 bp, Setaria italica
  Peptide Sequence Number=SeqID_113874
tgaagatactcagcatcatctctatcatagaagctcctatcaggatcatccccattgtagagagatcccagttaaagagactaaaaagtattccgctcagaggatgaaaatggttataagatggtcaatcagtatgtccatttgggaaagattggttctggaagctatggcaaagtggttctatacag

SEQ ID NO: 47901 - DNA, 365 bp, Setaria italica
  Peptide Sequence Number=SeqID_113875
ttttaggttaccttaagtaaaattgtaattttcctattctaagtcctttagtcttcaagcagccctgatagctttgtcagttccactgggatacttcctgtaatgttcttcccagacaatgtgattgagaatacccttggagcatcttctgaactgtcattgcacccaggaccatgatgctggtaagcacggatcgccaccctcttgtgcccaacctgcttgtgaataccgtgataccatgctggccatgatatttgcatcttgagatcccatagtaatttggacatatttgtatatctccaaggcattcaaataggcccctttgaagaatcatccgtcttcttgaacccgaaggagaaaacaaa

SEQ ID NO: 47902 - DNA, 242 bp, Setaria italica
  Peptide Sequence Number=SeqID_113876
tttagaataaagtgaggctataagttatgcaactgcctctagcatctcaggattcgttttcccaagcacctgtagaagacaccaaataaggctagtatgggaacagacctcattcaagaattctcggatgccttgataagagtcatttgtgagaagtttgactgcaatttctctcccatcagccaactttccatagtatactatgccaaaccctccagagccaattcttctctcaaacttgt

SEQ ID NO: 47903 - DNA, 258 bp, Setaria italica
  Peptide Sequence Number=SeqID_113877
cgatggggtactggtgggaccgcgtcgtgctgccggtgcggagggtctggctcggcgtcgcgtcccgcttcggggttcgccagacaggtaagggtggcggcggaggtactcgccggctttgataagatccctcggcggcgcccaggatggattcgtctaactctggcgccggttgcttttgcttgctgtgcagggctgtggaggctgcggcaggaggtgagcacgtgcgagtacgaggacgtgcacgtgatgtgggag

SEQ ID NO: 47904 - DNA, 228 bp, Setaria italica
  Peptide Sequence Number=SeqID_113878
gaaactctgctggtagttcattgggcaaagtactcagaagactcggcttgctgcctctgctggcgtcaggggccattcctgaagaaaaacacttgagagaagagatccaagaatcagatatatacagcttaggtgtactaatcatcgagatcacaacaggcgagaggaattttcaagcgaaaaagcatgtctgcaagggactttatagataaggttcgtgcaaagtgg

SEQ ID NO: 47905 - DNA, 251 bp, Setaria italica
  Peptide Sequence Number=SeqID_113879
taaggaaagaactaagtaaaggaaataaagaacctaacaatactagacaacgacaaggacaacccccgtaacgccctgtgcacagcatgcgccagggtgttggcatggtggatatcagcttcaagggccttgagagaccccctgagggacaacggcctgccgccatggaacatgtctccccaagaagtcgaagcagcctcctctttccgtctcctccacacccctatcacgagctcccaagcctataagac

SEQ ID NO: 47906 - DNA, 421 bp, Setaria italica
  Peptide Sequence Number=SeqID_113880
aaattaaagaaacttaaagaaacggggaaaaactaacaataagacaagacaaataaatacaactaaagacaaaggggaaggtactaactacctggggcaatgaaagtagtggtaagattggacagcaagttaatataaaagtctcccgacccaaacttgttgagtctctttcctctttacatgtgaaggctgtggcatatggatcaaagcacatttgtgcggtaacagtttctggtgaactttttgaatggggtgaaggagctcatattggtttgttgaatgactgctatgcaaggaaccaatggtttccgcataaattgttcagtctactggatggcatatctgttgcgaagattgcttgtggtccatggcacacagctattgtaacatcgtctggtcagttatacacatatggggatgg

SEQ ID NO: 47907 - DNA, 340 bp, Setaria italica
  Peptide Sequence Number=SeqID_113881
tatttgtcttgtcggggaaactcatgcagcaataatcactaagcaaggggaggtctactcctggggcaatgaaagtagtggtaagattggacagcaagttaatataaaagtctcccgacccaaacttgttgagtctctttcctctttacatgtgaaggctgtggcatatggatcaaagcacatttgtgcggtaacagtttctggtgaactttttgaatggggtgaaggagctcatattggtttgttgaatgactgctatgcaaggaaccaatggtttccgcataaatgttcagtctactggatggcatatctgttgcgaagattgcttgtggtccatggc

SEQ ID NO: 47908 - DNA, 418 bp, Setaria italica
  misc_feature (349)..(349): n is a, c, g, or t
  Peptide Sequence Number=SeqID_113882
gggtacacagttttgctgccatcatgatgtaccacttcaactggttccacttcaaacttattctcacaatactcagagaacatggtaaccattgtattcaaaacaatctttgctttggtaaggtcagtagctgtacattcaataaagacatttcttgtcgcaagggtgatagctgttgctatcatagataacagggtacaccggagaattctcaattatatgcaaaaacttcttcagtttcatgtccgatttatagaattccatcagtttatcagctctgaagctttcctcctgctttaatgggacaaagttgatttcatgtggtggtagagcctcatatgagaaaggngcttgcagggtatcgagatcatgggtaccaatagcaaccagagttctcttcctgcaaatattttggtgg

SEQ ID NO: 47909 - DNA, 427 bp, Setaria italica
  Peptide Sequence Number=SeqID_113883
gcactacaatagggcttcaatgtccatctcaacgaaagtgcagggatccggaatgccgaatttccttagcacctgcaatgaacacagaatgcgactcagcatggacaactcccaagtagccaacctgcttgccatcacttgtaacaattttgcattgtcttttcgggaagaactcaggttcatttgtaggaaaatagtacttctcgccaaagttgacatgcggagctctgacaactttgacaatactatccaccaatcccataatttcctcaaatccagaaaccctattgcagtacaaagctgcaagccggcgattattagaggcaccaacatcgcgtgaggggtccagcgtcactacatcaccaacttcaaaaatctttatgggtcttggatggtctatattatgtttcagtgttttcagttaaac

SEQ ID NO: 47910 - DNA, 351 bp, Setaria italica
  Peptide Sequence Number=SeqID_113884
tctattttgttaactattgtaaaggttctagggttactactagtttttgtcttgtccatcatgatgtaccacttcaactggttccacttcaaacttattctcacaatactcagagaacatggtaaccattgtattcaaaacaatctttgctttggtaaggtcagtagctgtacattcaataaagacatttcttgtcgcaagggtgatagctgaatgtgcaccattgatgataggaggtaacgataatacagtcctgttgctatcatagataacagggtacaccggagaattctcaattatatgcaaaaaacttcttcagtttcatgtccgatttatagaattccatcagtt

SEQ ID NO: 47911 - DNA, 334 bp, Setaria italica
  Peptide Sequence Number=SeqID_113885
tgggtctattgttttggttatttctttgttactttttcttttccctattagttaaaaaacctaattgtctaagttgttgaaccttcctcaccaaattgcagctcgggtcgtctacttggtggcacccagcgcatgcttactgaacaaaaccagcaggtagcgggtatcagcttcagccattcctttgtttactgttggcagcactacaatagggcttcaatgtccatctcaacgaaagtgcagggatccggaatgccgaatttcctagcacctcagcatggacaactcccaagtagccaacctgcttgccatcacttgtaacaattttgcattg

SEQ ID NO: 47912 - DNA, 295 bp, Setaria italica
  Peptide Sequence Number=SeqID_113886
actgaatgcatctctcaggatcctgtggtattgaacccgacgatgtcgaatccttaagtcacccatcttgtcatacttgagggagaaggtcatcaaacgatacatgtagcgactgtgttggggcacacatgtgccttctggcttctcaagcagcacctgatcatctttgtgttccttgacctcctgacaagctttgtcttccttaaccaagacacactccacaaggcagaatttgcgctggcaccccaagtagatgaggctagcgcttacatgcttttcagctgggttcttgctg

SEQ ID NO: 47913 - DNA, 280 bp, Setaria italica
  misc_feature (201)..(201): n is a, c, g, or t
  misc_feature (223)..(223): n is a, c, g, or t
  Peptide Sequence Number=SeqID_113887
ttaatttggttcttaaagttcctaattctaccgtactaaaattccacgcactgactcccgtttcaaagctgaatgtggccgcatctaaatcttcactcttgatgctgacgaggatggtatgtccatggctgtgggggtgcatggcataggaggtgacgtccattatagcgaacggcggcatttgaggtcgtgccaaaaccngacgtccttgctatcaaaaccntattcatacagcgatgactcaccaccaccagattcagcatcagattgttccggacgg

SEQ ID NO: 47914 - DNA, 237 bp, Setaria italica
  Peptide Sequence Number=SeqID_113888
cctcgtcgcggcgccgatcgtcccggtcccagtacctggagtcccgcgcgctacggcgccgcgacgaggactacacggaggacgagaaggagaagatctcgggtggaagtggaactgccaccgatgctggcggcagcggcgataaaggtgtgacagccgaggcaggtgttgaggataaaggattgactttggagaccgccgcaaaggatgttccggaggtggctgaaggtgggaaag

SEQ ID NO: 47915 - DNA, 135 bp, Setaria italica
  Peptide Sequence Number=SeqID_113889
ggtctagagatctcgtttggagatttttgtttatcccaaggaaatgtaagctgggtctttctgatggcttgaatattcattcaacaaggtagaaagaaaattaattttactttagtaccttaaaaactaaaaaaa

SEQ ID NO: 47916 - DNA, 463 bp, Setaria italica
  misc_feature (142)..(142): n is a, c, g, or t
  Peptide Sequence Number=SeqID_113890
acaagactccaagagctggctggcaaattgatccttttggtcattctgcagttcaagcttatttgcttggagcagagcttggttttgattctgtacatttcgcaagaattgattaccaagatagagcaaagcggaaagcagntaaaggcctagaggttatatggcgtggctcaagaacttttggttcatcttcacagatcttcacaaatgcgtttcctgtccattatagcccaccagatggctttagcttcgaagtcctggatgaaaatgtcacacctgttcaggatgacatgtcactgtttgactataatgtcatagaacgtgtgaatgattttgttgctgcagccatagcacaggcaaatgttacgcgtacaaaccacatcatgtggaccatggggatgatttaactaccagtattgcttgtaattccttggtttccggtaattattggtactaaacttta

SEQ ID NO: 47917 - DNA, 239 bp, Setaria italica
  Peptide Sequence Number=SeqID_113891
agaatattcaattctatctcaggagtggatttaccaattcagcaaagctttttttggtatagatcaagtgaaggcatctggagcttatatttttagacctgatggtaacagaccaactactgtttcatcatcatcggtgccactgaaagttatccgtggacctctggtcgatgaagtgcatcaacaattcagctcgtgggtttatcagattacacgactctacaagaacaaggagcatg

SEQ ID NO: 47918 - DNA, 200 bp, Setaria italica
  Peptide Sequence Number=SeqID_113892
tgaagttggaccagggcctctaaagatgtccttttcctcagcatctggacaactcaagagaatattcaattctatctcaggagtggatttaccaattcagcaaagctttttttggtatagatcaagtgaaggtgatgacgtggattcacaggttttactaaggaactgaacttttttctcagttaaaggaaatatagcca

SEQ ID NO: 47919 - DNA, 232 bp, Setaria italica
  Peptide Sequence Number=SeqID_113893
cattttttgactcaacgcctaggggagatgaggaatggtgagacatcatctctacagcatcaagtgcaagctgtctcaccttttgttctccagcagtatgctcctgatagtttggagaatatgcttgtagaggtctcttcaagcaatctcattgctcaactaaaccaagaaagaactacttagaaccttaataaatagaatacctaaaactactaaaaaggtttactaagaa

SEQ ID NO: 47920 - DNA, 227 bp, Setaria italica
  Peptide Sequence Number=SeqID_113894
gtgacaatggaagatcagagggagatagagatcaggaccacgggtgtttggtacctagtagtcgtacctttctgagtggaagcaaggtgaggagccccacgaagctgacggcgaggaggaatcccgtcatccagccgatggcgggctccttgtagctcccaggcacgttgcccggcgtggtctccccggagagctcgtacgtcttcttgttcatgcccagcaagaaa

SEQ ID NO: 47921 - DNA, 292 bp, Setaria italica
  Peptide Sequence Number=SeqID_113895
ttggcttgctgatccccaagtgaagtattatgaaaacctcaagagaagaaacagaacaaaagagagcacggccttctaaataggtactccatctacatggttaactgtccaacccattcatcaaccattccatagtcaatgcttagctccctcaatggtggaatgttctccatggcaaagatcatgaggtgggggtaagacgcattgtaatgatcaaacagcacaaactggacaaacacgtttggactgtttgatcatgaggtgggggtaagacgcatttgttaatgattct

SEQ ID NO: 47922 - DNA, 261 bp, Setaria italica
  Peptide Sequence Number=SeqID_113896
gccctacgaacaacaatacaaattaagacaaaagtttaaaactacaaggaaagaagtaaggaataagtctggcgccacatactcaggattcacatcagatatatcaccccaatccaaccacctaggagggaacctatttggacgcaccaagcaatcaccattagcggccacaatctctgattgctgctgagtaaggacaatcccgctgaattcacaaatgaatgtccctgccttaataagatccaaagaccgaactcccca

SEQ ID NO: 47923 - DNA, 230 bp, Setaria italica
  Peptide Sequence Number=SeqID_113897
ggtatctaccgcagcgtcgtgtcccgcgtgtatatctgagccaggtgtgtgtcacaggatatgtttctatttaattttctaataggatgtctgcatgttttctatgtgctatcgttatgggttaaatgaacatatcctgtgacacacacctggctcagatatacacgcgggacacgacgctgcggtagataccgaaccaacagtacagttgtgacgctgagaacactggt

SEQ ID NO: 47924 - DNA, 191 bp, Setaria italica
  Peptide Sequence Number=SeqID_113898
ggagatgacattggaagaatatgagaaagtactggaagagaagaggaaagctttacttggattaaagactgaagtgagaaaggttgaggtggacaaggagttgcagtccatgcaacaactttcagtgaaaagggctccgatgagatctgagacacgcaacaggtgataggcaaggcacacgaggggatagg

SEQ ID NO: 47925 - DNA, 288 bp, Setaria italica
  Peptide Sequence Number=SeqID_113899
gcggcatttgaagatcctcttccgatcccacatgatgattctcatggagcatttgaaggagcgtttgtgagagatgttgattccctctcttggatgggcaacaatacccttaaactttttccagcgcagacgggcacacctgagtgctggacatttttcagcactgctgcttatggaaagagaaacaaagtcccgcaggaaaatatcccaaaagtcacagcagaaaagtgaaggaagacatgcttgaaggagtagaacatgctttggggttatccaaaggatctcttc

SEQ ID NO: 47926 - DNA, 303 bp, Setaria italica
  Peptide Sequence Number=SeqID_113900
tttacaacggacgaactaccgaaggaaggaagttaggtaggaacaacggtagaatagaagcgtggacgccgaggacgacgacgtccgcggcgtcgcggagggcttcacgagcaccacgggcgtcttgctctccagccgccggtggtgctcccgcaccagctgctcggccacaccgtcgagccgctcgccgttggtctgcgccatgagcttcctccccccgggaacagcacggactccacgccccgctccgtcagcgccgcctccgccgtctcgccggcggcaatgccgttgccctggatgcgg

SEQ ID NO: 47927 - DNA, 451 bp, Setaria italica
  misc_feature (394)..(394): n is a, c, g, or t
  Peptide Sequence Number=SeqID_113901
tagtacaaatagacttagaattactactaggccgaaattcgggaaaacaccataaagttcttcatggagacggagttctgtgagttctccccggaactggaagaccactttgagatctttgagcatatccgagggttcaacgtaactattgtcacttcagccgacacaaaagatgagacctcactactgtggagtggcttcatgctaaatgatgagggggaaaccaagtaaggtaataccgtaatagtgcctatctttctctacgctgtaatatccctgacattgtactttctgccctgcttgaactgaaccttcagttgactgtttggcagtggctgaaggcagtcgctgatttcaaaatggttctggagttttggtggttcttgctcaaggngtagaatgcagcatccatctgtttgtagactgagtgaagcctgcgtgattgttattt

SEQ ID NO: 47928 - DNA, 378 bp, Setaria italica
  Peptide Sequence Number=SeqID_113902
gggcttcttacttgtctgtatacgccccagtagtcatttttggccctggtgataagctactggttccatctttggttgctgctgcaagggcagggaagtccaaatacattattggtgatgggaacaattactatgatttcacctatgtggaaaatgtggcatatggccatgtttgtgcagagaaaactctgtcatctgaagatggtgccaagatagctgctggaaaaacctattttattacaaacatggagcctatcaaattctgggagtttatgtcattgattttggaaaggtacttaggaataatagaaaaggaccttacaaagtaaaaaaataaacctaagtaactaactaagttaaataagaaataagaaccaa

SEQ ID NO: 47929 - DNA, 383 bp, Setaria italica
  Peptide Sequence Number=SeqID_113903
aagtttaaggaaccaaacaaaagaaattaagaaagaaaacttaagaaggacctacaaaattttacaacaatacaacgacaaggtggaaagaccccaatcaatgtagcccattccatcagctcgtcatggaactctttagtcgctgcgctaagatctctttgcagaggaaatgactggccactgttttttcaaggttgcattatctctactagttgtcagcatccttagttccatgtcgtcgcaggctgcattcaaaatggtactgctctggtttttcacaggcttcaaagcatatgagaaatggggaggacaccatcgacagcatggcgggcacgcttgctctattcttctgcacttttggttctaccaagaaatcttctagc

SEQ ID NO: 47930 - DNA, 230 bp, Setaria italica
  Peptide Sequence Number=SeqID_113904
tcccctgtgtgccttgcctatcctctgttgcgtgtctcagtagcaatgtttacagtatgtcaattaactatatccattatggcacggatacacttccaaactgcaggttctgctctgccttccaggtactatcattctctcattattggtgttactgccatcagcgcactaatgactcttggtgcccacgttagagtccatcggatcaacccctggcattgcagcaccag

SEQ ID NO: 47931 - DNA, 263 bp, Setaria italica
  Peptide Sequence Number=SeqID_113905
aaaacaaaactaaagttaaaactaagaactaacaacaagaataactaactacccagcagcggcgaagcaacggggtagggattcttgcgcgggcgtccacgcccccgcttgaccccagatggcggcagcattgcaatcgctctcggcagctgcaaagaagaggaagccactggcacaagtgcgttcttccgcaggcgcccacgccctcgcttgaccccagatggcggcagcgcaatcgctcctggctgcggcggaacagaagg

SEQ ID NO: 47932 - DNA, 289 bp, Setaria italica
  Peptide Sequence Number=SeqID_113906
cccttctccgtaactactaccgactaccaacaatactacgaacctacaaccggacggacggggaaacaaagatggtggcgtttctgggccggcggattggggtggcggcggcggccgccgcgttcatcgccctcgcggcgttgggatcggcctcgtccacgcccaagtccttcgtgaaatccaccgtctccgcccacgacgtcgtcatcttctccaagtcatactgcccgtactgtaaaagagcaaaggccatatttaaggaacttgagttaaagaaggagccctatgt

SEQ ID NO: 47933 - DNA, 237 bp, Setaria italica
  Peptide Sequence Number=SeqID_113907
acttactaccgtaactactaccgactaccaacaatctcgacctcaccggcggcggggaacaagatggtggcgtttctgggccggcggattggggtggcggcggcggccgccgcgttcatcgccctcgcggcgttgggatcggcctcgtccacgcccaagtccttcgtgaaatccaccgtctccgcccacgacgtcgtcatcttctccaagtcatactcgcccgtactagtaaaagag

SEQ ID NO: 47934 - DNA, 334 bp, Setaria italica
  Peptide Sequence Number=SeqID_113908
ttacatggaaatctgtactttgaccaggaacaaaaaggtctggttgttggtgctcttgtattttggttatttcttcaatctgaaatagcttactgagtaatgattctgtttgattatgtttttatgtcctttctatttatgcagtgacttgtgcttccatgggcaacaatttgttgaaccaaaaggttattgtacaggccaatatctttaaaagtggtggagctgctgcttgaatcgatgggagatggaggagttggcgtgttgctgcttgtgatttgtgtgctcgagaggagctgctgcttgcttgcagtggagaaaagaagcaatccttagg

SEQ ID NO: 47935 - DNA, 318 bp, Setaria italica
  Peptide Sequence Number=SeqID_113909
agttttttgtacctctttatattgatgtacaaatttactttcatcaatttattggtatgcagtagaagaaggtgatcattttctgtccagtttgattttggtcttcggaagctcattacatatgcctacagtggtggagctgctgcttgaatcgatgggagatggaggagttggcgtgttgctgcttgtgatttgtgtgctcgagaggagctgctgcttgcttgcagtggagaaaagaagcaatccttaggcgaggttatgatatggaatgtgggggacaggaactgcattggcgtcttgataagacacactattaag

SEQ ID NO: 47936 - DNA, 397 bp, Setaria italica
  Peptide Sequence Number=SeqID_113910
tagggacaatagacaataatagacaataggaaactccataaataaaggtttaagaacaaacaaaaataattactagtaaaaaatgaagagaccatgcaggggcaccacactaggctcacaggataatctatctaactaacatatttcttttttaagaaccacaaaagagaacaaagcacaaccaatttctggactgctgcagtttgttttgtacagttgctgatatgtggttctaaactaaggcaagaaagcaattcagtcgggaaaattcctaggcataaattagtactgtagtagctatctgttttttccttgcaaattgagtttttggttgtgcaatgcagaatctgtatgtcaaattgacgaattcgcaaggttcaacaattcttcctccaac

SEQ ID NO: 47937 - DNA, 347 bp, Setaria italica
  Peptide Sequence Number=SeqID_113911
ccatccatggtcacctccacctgctagtcattctccacatgatcccactatgcatggtggatcccctgttccatcccctcctattctaccagagccacctttgcccaccgttcttttgctcatgcacatcctccaagcgaacatggaacacggaccaaagtcctgctccaagtgagcagggaacaagagcaggtcctggtgggatgtcacaagtggctcctgcacctcattcatgtgagttatttctccatttatattttcgtaactttggaattttttgcagtcaattcatttatacgctgttgagtgtgctcaaagtaagtaaatgttgttcacatcttaaagaa

SEQ ID NO: 47938 - DNA, 423 bp, Setaria italica
  Peptide Sequence Number=SeqID_113912
tgtttggttctttaaccttagttattgttaaaattagtattggggttgtctacgttcttggaagagaggacggggctcctccggtggtgtcatctggttgtagccggggcgcgatcagctcctgaggcaggcggccaaaagcacaaggaagctcacccctgcctcggcgcgctggtatactcttctcgttgttagtggatgtaaatatgggttggaaatgggaaatgggatggatgggtactaggcaaaccgcaagaggggcggcggtgccgcgcgtggtggtcaaagccacgagggggtggcaggcccttgtgtagcgcgtgcgcgcctgccccggtttgccgtgtactgccttgcctgccgctgctgctgaactcattactagaggatcttctcaaagtgtaaaaggcctttcgtttcgca

SEQ ID NO: 47939 - DNA, 133 bp, Setaria italica
  Peptide Sequence Number=SeqID_113913
tccatatgagaagtagtcctgccttcatttgatcctttcactctgaactatccaatctacaaaatacaagacagaaccaacgagttaaaggatcaaatgaaggcaggactacttctcatatggattgagaagt

SEQ ID NO: 47940 - DNA, 445 bp, Setaria italica
  Peptide Sequence Number=SeqID_113914
tatacacccaaggtgcaattacaacacaaaatcaaataggaagctacctgcgaaaaggaatttcttgagaatgggtgataaggcggattggggtgatacttttttaaggcatttgattgatgcttgcaaagaagagattgaagcagggaataggctgatggcaattttcactactaccggttggaagaacggttgtttccaagtttgcagaaaaatccggtgatagaacaaaaaaataattgaagaacaagttagatcttctaaaaaaggagtatgtcacgtttatggagttcaagaattgtgcaattggtcttggatgggatgaggcaaaacaaactgttgactcctcagacgaatggtgggacgaacaccttgctgtaagaactatgtttcttgataattatattcttcccattctttgtacaaagctgaatacagggaaacg

SEQ ID NO: 47941 - DNA, 190 bp, Setaria italica
  Peptide Sequence Number=SeqID_113915
tttgtctttaattgagtgacatcagaagcgggcagtgaagcagttaagattatcaggaactcctaatcattttcactgttggaaaaggttcggttgctatgttgtagcgaatcgattagatgctgaaaccagcaaggctgcaacccaatccgaagcaatcaatagttcaacacttcacctctgtttgttc

SEQ ID NO: 47942 - DNA, 190 bp, Setaria italica
  Peptide Sequence Number=SeqID_113916
acacctatggtttggcgttaccatatccaagaagaaacattccatgctaggaacttatttcagtaacacattataacctatctgtgcagctaatgccttcttgttgacattttaggtagaaagtacaattgagtatatttgtcgctatgaagcagaaggtgcaatccttgtgttccttactggctgggat

SEQ ID NO: 47943 - DNA, 205 bp, Setaria italica
  Peptide Sequence Number=SeqID_113917
tgttgtggtatatgcatgatgacatgcaaatgatgtgcttacccattcaacagaagcttggcgacgagctggtttggagctgcacatactgctaatgatctctagaaggatgacaccaaaactgtacacgtcatactttgttgacaaaattaccttcctactaattattatttcttggttaggttcttatttatttatttccctt

SEQ ID NO: 47944 - DNA, 231 bp, Setaria italica
  Peptide Sequence Number=SeqID_113918
atttgactccgtggctagagaaaattcgcagtcgctttcttccttgcttgctggctttagctttttgctgcaggttgctccatctcgccatctgtgtgcgttgtgttgtgattggaaccaactgaatataatcttcagaagccaaagaagatctgagcttgctgttgaggctagcaattaccatggagctcgccattgccaccgccagcagcagcttggtcaccggcttgg

SEQ ID NO: 47945 - DNA, 404 bp, Setaria italica
  Peptide Sequence Number=SeqID_113919
tatatccaatgtggagttgttttcttctcatatgcctcaatcgttgttgtattagcagagacaagtgaaatatgcataatcataaaacaactccacattggatatacgatcttggccgaaaagaggaattttgctcaggtttttggaaatgacaggaaatattggttcatccctgcatactcagaagaagatttgagaagaattccagctttacagggtcttgattatcctgtgagaccagattttgatggtcaagaactgtaatgaagcaattttgccagtgcccttctcttcccattggcattggatgtgtttccatgtcagttttgatggttttttctggtcaggtacctcagtgttggatatctgctggtacaactgacagcattgctgattgtgttatg

SEQ ID NO: 47946 - DNA, 360 bp, Setaria italica
  Peptide Sequence Number=SeqID_113920
atgcaacaaatcaaatgagcctgtcatgccgttcaaaatatgattttagcaaccatgagtgatgcatttctgttgcatgtttgttgcaaatgcaacgaaatgggaatttcgaaatcctcctgcagccagaggggatctgtaatgtaaattaatctttacggcctttttggatgggccgaatctcagcctaatccacgtggataggccaggaattcggaccagacttttctggtccatccacgtggattggactgggatttgcaccacccaaacagggcattagtgtgtttgaaacggtacttgtatagttgtattggataactcaacagaagtacagaatacatctcaaagcctatttca

SEQ ID NO: 47947 - DNA, 180 bp, Setaria italica
  Peptide Sequence Number=SeqID_113921
ttttaatgcccgtagtgcatcaagatttggtggttaagcaaacctggcaaccatcatctctttaccaccagatagtgagaggccagcggttttaatgcccgtagtgcatcaagatttggagaaactcctaatggtgatgaattagatgtctcccggaacagtatgggagctggcaatggg

SEQ ID NO: 47948 - DNA, 248 bp, Setaria italica
  Peptide Sequence Number=SeqID_113922
gcaatctatcaccaaaggttgctttctgcgctgcacatgttccatcaaacttatatgcattatctagttagctaccctggtgcattacatgctatgatttcaggtcgatgagaattttcttttaaggacctttggtcggtttggaccgattgctagtgtcaagattatgtggcctagaacagaagaggaacgcagaaggcaaagaaattgtggttttgttgcctttatgaatagagcagatggacagg

SEQ ID NO: 47949 - DNA, 376 bp, Setaria italica
  Peptide Sequence Number=SeqID_113923
gcgaacacagccatcatgagaggcttttgggtgttgcccgcttgttatcccagatggctgaacctgtcatgaaggcagcaattcagataacatttttacttgctagatcattcttcatcgatctttgtaccgcagtgttttctttgcttgcacgaataagggtcctgatccaacagatgttacttgatgttgtttcattatacaataaggttacatatcttactgataggaagcaggctgttaagattagcatcggtggagtgcaggtctgtttcgcttccacactagcagttatgtaattttgtataccatgcagaaaactctaactagtactaaagacctagtagttttacaactactacaacaacaaagacta

SEQ ID NO: 47950 - DNA, 379 bp, Setaria italica
  Peptide Sequence Number=SeqID_113924
taaaggttaacaataatacttaactagaataaggaaagacaaggactagttaaagattagcatcggtggagtgcagatacactaaaccttgaagaaacgaacctgtcagccaaacaggcagacgctgctctggctgagcaaccggacaaaatgaaccattgcagtggtgctggaggttctcagagtgggaggcaactggaaaatgaaagtggtgcttgttcagttcctgacacccttaatacttgcatgcattcagttccacaccggaacctcaagcatgagactaggaagagagtagcattcattgctgttggaagtccaaaggtccctagtgcagcctcagaaacaaatcatcaagaagtaaacaagaagcaaagac

SEQ ID NO: 47951 - DNA, 250 bp, Setaria italica
  Peptide Sequence Number=SeqID_113925
gttcttttaggttatttcttatttctactagtagtcttctaaattctattcttgtattattctattggtttgtctgcacgggaaacaagtgagcaacaccatgagcggactgtgcagttgtggagcattgttcaggagtggcacgcgcagtttgacaagttcatgacataccagaaggagtacgtaggaagcctctacagctggatcaagctaaatgtaattcccatcgatgcggacctgaagccaaact

SEQ ID NO: 47952 - DNA, 263 bp, Setaria italica
  Peptide Sequence Number=SeqID_113926
ttcaaatggaaaccatatgctaaaacaagcagatcttcaccacagatttttgtgcaagaaaatcaaaaggaaacaataagtgaatctaccataaacgaaacacattatacaaacctgaaggatccaagacgagcagtcgtgtacgtcgcttgccttagcaaaccagcggacagacccttatagaaggaacggagcccctcgttagcaagcatgttcttcgtgacctgaccagcggagccctcacccaactggatcctcacctg

SEQ ID NO: 47953 - DNA, 138 bp, Setaria italica
  Peptide Sequence Number=SeqID_113927
gttaatcgctccatgctatcgtaataacattccagctgctttgatatgtaggtcttatatgccaatcttcttctcgaacttctggatctgattcaagaagaagattggcgattaaccccattttgatatgtaggtctt

SEQ ID NO: 47954 - DNA, 379 bp, Setaria italica
  Peptide Sequence Number=SeqID_113928
tgctggagcaattggtgcttgtgttggtagtcctgctgatttggcactcattcttttcaactgctttgttggttagaaccctgaaggatccaagacgagcagtcgtgtacgtcgcttgccttagcaaaccagcggacagacccttatagaaggaacggagcccctcgttagcaagcatgttcttcgtgacctgaccagcggagccctcacccaactggatcctcaccttgaccatgtcgatgggctggatgacgcaggtggcgagcatcccggaggcgccgccgttgacgaagggcttgatcgtcttccagacgccggtggccgccaccgccgcctgctgctgctgctgcttcgcgtccgccatctctccctcttgcgg

SEQ ID NO: 47955 - DNA, 262 bp, Setaria italica
  Peptide Sequence Number=SeqID_113929
ccaatggctccataatagtatacatatcgaagcagatggaaatacgcaaacataagtattgcaaaaatcagtaacataaaaaaatcaggaaaaatcctatacgtgtagggcaaaatgtcagttacataaaaacaggcattcgatttcattaacatagcacaaaatgcacaaggatatcaggtaatagaaccttaccaattacagtagtaatttctcctgcgccaaatttgtccctaaatagctcgacactctggtcatagga

SEQ ID NO: 47956 - DNA, 256 bp, Setaria italica
  Peptide Sequence Number=SeqID_113930
ttggcatgtaagctaaggtaaaaactggtccagacttgtccctaccaaaaccaactactggagtgtcaaagcagctggaatgttattacgatagcatggagcgattaaccccattttgatatgtaggtcttatatgccaatcttcttctcgaacttctggatctgattcaagaaaatccaggtcatcatgacatggggcgcaaatacctagaacaacaagtaacaaccgggaaagaccaagtagttaagaaactta

SEQ ID NO: 47957 - DNA, 201 bp, Setaria italica
  Peptide Sequence Number=SeqID_113931
cctatcccctgtgtgccttgcctatccccttttgcgtgtctcagtgctgatttggcactcattagaatgcaagcaccaattgctccagcagtcagaccaataaaagctttctgaattagtggcaacggcttcccctcattcttttcaactgctttgttggttagaaccctgaaggatccaagacgagcagtcgtgtacgtc

SEQ ID NO: 47958 - DNA, 135 bp, Setaria italica
  Peptide Sequence Number=SeqID_113932
cctcagcatgcagtttgccctttgactacgtgaagaatccagaaatagcactggctccaattacagtagtaatttctggattcttcgcctcagcatgcagtttgcatcttctgaatctgtgtcttcacgtagtca

SEQ ID NO: 47959 - DNA, 257 bp, Setaria italica
  Peptide Sequence Number=SeqID_113933
tgccaggccttcctttgcctgttgggccgtctcgatcgtcggcagcctcaccgacttccccaccttctgctatacgagtgagctgctcttcttcccttgtctgaatttatttatttacatcatctgtaactgtaagcctggctgttccaattcaccatagaaactactaaactcaaaagaattcaattcacaatgaattttagctcggaagaattcaattgaccatgaattttagctcgaaagaattcaattcacca

SEQ ID NO: 47960 - DNA, 253 bp, Setaria italica
  Peptide Sequence Number=SeqID_113934
ttttgtatggaccggcccacgtggaatgtacggaatgcatctgcaaatttccgcttcattgctggaattggaagagacatggttgtgtctcacacctttgggcccttagcactgttggctttccaaacactgggtggctatgtccttgcaagacctaatatcaagaaatggtggatttggggttactggatctctcctctatcatatgcacagaatgctatttcaacaaatgaatttttggggcgcagttgga

SEQ ID NO: 47961 - DNA, 347 bp, Setaria italica
  Peptide Sequence Number=SeqID_113935
gcggaagaagacccaaaccgtgcagcaccggctggcatgcggcaatttgagagttctgaatggggaggaatccagcacggtggagcgccaaggagtccagcgtgacggggtatgggaacatccatgtttcttgacgtgcactgtaaaatcactgaatacctcaacatctgggtggcttggtacctgaatgtccgaatccaatttcaaatctgcatgccgtgcctgagatgtccgaggcagagggtgatggcaggcttagccagcggaattgaggccgtggaggtggcctgctttgcctcttctgtgacttgtggccaagatgggagaggaggctaccatggctgctg

SEQ ID NO: 47962 - DNA, 415 bp, Setaria italica
  Peptide Sequence Number=SeqID_113936
ctggatggcgcggactgacagcggggtggagcagcggcagcgcggtgctgggatcaatgacggcgtgaccccacggggcgcactagcggcagagcagctcagcagcaggtcgaatcagcagcgtagccttgacgtgcactgtaaaatcactgaatacctcaacatctgggtggcttggtacctgaatgtccgaatccaatttcaaaatctgcatgccgtgcctgattgaaattgaaacttatgaataaagcaaacatggtgtagccaaatccatggcctctgtcgaatcagaagccaatgcacttctttgagatattcctattgtttccaatcttagacgtttcttccagtccttcacgcaaaaaatccaactttctacacaccattgcaggggtgagccagctgacggagccac

SEQ ID NO: 47963 - DNA, 328 bp, Setaria italica
  Peptide Sequence Number=SeqID_113937
caacaagtggagactattattgggggtgaatgaatagcagggtgatgctcatgcacatattatacctgtatacatggagttagatgtgtccccagcagtacgattttctttatttgtccaccaaatgagtctactcggggtctcaggacatcttcaactatgtctgtatcatcaatagcatcaacactgaatttgaccaataatgtattgggtacgctgtatgaattcttgcagaattcacggttttcaggtggtgttggttgaattcagacacaccttctgtaacctgtacataatatagggaacagcgatcatcatgacaaatatg

SEQ ID NO: 47964 - DNA, 446 bp, Setaria italica
  Peptide Sequence Number=SeqID_113938
agggaccgaaaaagtactaccaaactacttaattgaggattgatcttggattttgtgattcatgaatcaccattcttctgatttttggcattgctgttcctcttttgcacatcaatgcttatactatgtattgctgaataattctcattattgtcttgctgtttggcaggttcacaatttcagcaacctaaggttaatcgcatctcatttgaacagaaagtgtctgctaaaacaacattgagagtacgtattactgagttgttgtctattttgatcttactacgtgtagactgaagtttatgggattaaaaactaatcagaaatcaggccttgtatcaaactatacgttctaatatttgtacattttacaactattgcatagtggaacatcagtgtatcttaaaagctattttgttattgtctccatattgttaattttaaatttt

SEQ ID NO: 47965 - DNA, 247 bp, Setaria italica
  Peptide Sequence Number=SeqID_113939
ttaaaaaacctaaaaaacctaaaaacggtaaagaacttaaccgaagtaaagacaaacgggactagctaacaaaccatgatcacccttcgccagtctcactagcactagctactcgtttctgttgtaatgaagaaggcttctggttgtggctgccatttggaacataacatgtgactgtcatggtagtttatgttctctttctgatggacttctgagaaagatcatgttggacttgagactcaaaatt

SEQ ID NO: 47966 - DNA, 180 bp, Setaria italica
  Peptide Sequence Number=SeqID_113940
cgcgaggccgcctcccgccggccgcagtctgcctcccgtcggcctccgtccgcccgtgattactcccgtcggcctccggcgtaaggagccccagctcctgttcaggtattatgaactatgcagcaggcattgagttgcatccacaatgtcccaacttggaacatgttcattgcctggagc

SEQ ID NO: 47967 - DNA, 221 bp, Setaria italica
  Peptide Sequence Number=SeqID_113941
gtccctactcgctggcgccagtgacgagtttcgcccctgccacgtggatccaggctgcagcgagttcccgttctcgatctccccttcttcttcagttcgtagccgctgcgacgagttccaggcccctgcgacgagttccttgagttaatccccttccccgttctcgatctcctcctcttcttcagttcgtgactgcttgttgcttgatttctttgctaccc

SEQ ID NO: 47968 - DNA, 282 bp, Setaria italica
  Peptide Sequence Number=SeqID_113942
tggtctagatgtgtacgcacacaacattgagacagtgaggagtctgcagagaattgtgagggatcctcgagcagggtaatgtactcaaactggctttaatggcatattacagactagttagaatgtaatgctacaagaaactttgaagctccattagctcaagttccatgaaacactttaagattaccagattacaatccattgtaccccacaaccaaccaacctcccccccccccaccccccaccccccgcgaaacaaaaaaaaagaaaattaaaagaagc

SEQ ID NO: 47969 - DNA, 394 bp, Setaria italica
  Peptide Sequence Number=SeqID_113943
gtacgcacacaacattgagacagtgaggagtctgcagagaattgtgagggatcctcgagcaggatatgatcagagcttggcagttctcaagcatgcaaaaagttgcagggagggcatgattacaaaatcttctatcatgcttggcttggagagactgatgaggaggtgaggcaaaccatgatggacttacgggccattggtgttgatattcttactttggggcagtatttacaggttagctcaatacccacagcacattctcattgagtccagctatcccttcttcctttgattaacgtggcaagaacttaatgtcacagccaacagagagacatttaacagtaagagagtacgtgactcccgagaagttccagtttggaaggaagtaacggaa

SEQ ID NO: 47970 - DNA, 295 bp, Setaria italica
  misc_feature (198)..(198): n is a, c, g, or t
  Peptide Sequence Number=SeqID_113944
ttgcagggagggcatgattacaaaatcttctatcatgcttggtcttggagagactgatgaggaggtgaggcaaaccatgatggacttacgggccattggtgttgatattcttactttggggcagtatttacagccaacagagagacatttaacagtaagagagtacgtgactcccgagaagttccagttttggaaggngtacggagaatcagtggtttccgttatgttgccagtggacccttggtaagtgatgcattctggtactctccaattttcccctgtatatggcaaataa

SEQ ID NO: 47971 - DNA, 329 bp, Setaria italica
  misc_feature (241)..(241): n is a, c, g, or t
  Peptide Sequence Number=SeqID_113945
tccgtagtctttgtattggtaacctagtccctattttggtttattggggtctttggtaaatttctagtctttctagtattgtttactagtctaaagtagtcttctagtctaggtttacattggggtctatttgactgatagaggaatgacgccgcctaggaatctttctttcacatacaacatttctcataataggttgaggagaggactgaaggtgcatcaggtgcaaattttgaacctnacatgattcacagagatgggttagttaatagagctaaccaggggaagccggtcaatgcggtcagatatatatcctcggaggacctttt

SEQ ID NO: 47972 - DNA, 387 bp, Setaria italica
  misc_feature (77)..(77): n is a, c, g, or t
  Peptide Sequence Number=SeqID_113946
gctttgctttggcagacaagttccatggtttaatctcacgcttgaacttgatgcttagaataatcgtgcaatgtgcngaaaacgcagcatgatttgcatatagacagtgcaacacggcagggaccatctcatgatcgaaactgaaaaatgggagaagggtgtgaggcacaggtgcataccttgagtttacaattgcagagcctctccacgatcgaactcacactgccagtctgcaacggagttgcagcgcacccctcccagcaatataattccctaatgctacctgaaatcttcacaagctcacgacattcctgcacccattctcgctctagccttcggctgtttcagctcatgcaggcatcggcggaccgcacctcgccatcgcct

SEQ ID NO: 47973 - DNA, 337 bp, Setaria italica
  Peptide Sequence Number=SeqID_113947
aacaataagaagaacttaactaaaaggaaagaacaaataggactaacatcatctctatattatcaaggttgttaattatgaaagattcctgtgcgacgcgtgaacgtcagcttgtagagtacttgaagcgatgttttccaagcaacatatctctatcaactaataaggaacttgcgtatgccctagcttcacttccaccttatcaagtaccattttcagatgttacagttatgcatcttcatcacgaggtacctgctggtgagatatggcgttgtctgaacgcaacatagttggtttggcagtttccagtgcatctgaggccacaagatcaaccccc

SEQ ID NO: 47974 - DNA, 285 bp, Setaria italica
  misc_feature (239)..(239): n is a, c, g, or t
  Peptide Sequence Number=SeqID_113948
tctaagtattctaaccccctttacttgtcgtttgggtcttaggtctattctattaagtaggcgtttgacgttcaaaaaggcctgttatatgtaataactcctgtccctctcgaacgtctgcaaagtgtagatctcttgcagcagggattcattgagataccaactagtcttttgcaggtccgcggatatgtgtctccatacatgtcgacaaatgtactgcacaagatatcagaaagggntttgatgctggtgatggttagctcaggcaggcaccatgctgtgtcc

SEQ ID NO: 47975 - DNA, 270 bp, Setaria italica
  Peptide Sequence Number=SeqID_113949
cgggagaagttcagcacacagcttgcagaagcgacgactcctcgaacctcaacggagaaggaaccgaaggcagagatcgccacggtgcgagggcaggcgaaggcaaagaagcttgcaccacagagggccgtcgtgaagccagcggcgcagaaggtgaagcaacaaccgaagcagccggagtccaagcctgaagttaggccagtgttcggcggcctcttcaagctaaagtaaacggttgttattgttggtacgtacgttactttgttagtt

SEQ ID NO: 47976 - DNA, 235 bp, Setaria italica
  Peptide Sequence Number=SeqID_113950
cttggtggaatcgaacagcttcctgagcgtgctcggaataggctcgaccgtccccaagcaggagagccgccgcgagattgagatttgcgagaccaaaggctcatccactaagcacttgtgcaacatcagcatgccgctcacagtggacagactgaggaccatcctgatcttctcaagtactcctgccaagtagaatgcagggtgcgtcctagtaaagcctgctcggtatttacgg

SEQ ID NO: 47977 - DNA, 246 bp, Setaria italica
  Peptide Sequence Number=SeqID_113951
aaaggttgaattactcacatgatacagtaggtagcatgtaattgctgtcataatatacacagctgaaaagtgtagccacaacctggcaaccaataatttgtaaaacatatattctcggttgaacaaatgctaagcatggagcaccaaacattaagcagacactatggactcaacggaaccgttgcatgtcatcacaccagattgtaaagattcctaaaaacttatctccgatctttagatccacta

SEQ ID NO: 47978 - DNA, 140 bp, Setaria italica
  Peptide Sequence Number=SeqID_113952
ctcagttggcttgtctgactgcctaatgtaaattgcatttgcagcaccatatcgagatctgaatgaaaacaaaaggcagcaggaatttcctgaagagatatgatacaataactatcgatcagagtgtgattgaataccat

SEQ ID NO: 47979 - DNA, 392 bp, Setaria italica
  Peptide Sequence Number=SeqID_113953
aacaacatcagtagctcatgatgtccatcaatcatacacttcctagctacatatttggattgtttgacctccaaaacaataaagccatctccatataataaaaacaaatcaaacactggatcagcactttgatcaccttgttgtcgataagctgctgcctggcaccaccatgaagttcctgaaaccaacattggtatgcaatcagcaacattctacaaacattgactttgaggataaaagaaatacaatgatctctacattgtatgagcaacagtgtgaacaagcatcttgtatatgttaccctgctacctagaaaacgatattgcagtgaatcttttgaggaaaagctcagcaatagagccctcatctactaactcagcactgtctacaat

SEQ ID NO: 47980 - DNA, 209 bp, Setaria italica
  Peptide Sequence Number=SeqID_113954
tccagaccatgtgagttatcaaatactctggattgacaacaaagatccttgataaaaggtctcggcattctggagatacatggacatagtcgggaatcgcatactgagccccattattttctgcaaattgacataagcattaagctgtctggatataactgcagccagtggaactgccaagtttggcaaaaaaaaaaattcctgaactg

SEQ ID NO: 47981 - DNA, 465 bp, Setaria italica
  Peptide Sequence Number=SeqID_113955
agcaatcacaagcttaacgaatctcggaacgagtactcgattaccactaccaccaagcattattgttctacgtaccttcttggagcagtagggatcagtgacctaatcatcatccctggctgccggggtgaaggaagcttcttgctgagctcagtgagagctgtccttgcgaatggtcgaggttatctacagggaactgatgatcggcggcttctttcatggcgaaaccgccgccttccggcgagtagaagacgagctgaggccccggagcgagagacagcagtgatgagaacggcgagtggtgagccaccgtctgagccatcatggcacttcgcctcagacggtggctcacctggtcgtggacggaattgccattggcccaaggctcgccggccgtgtagtacaagccgtgagccagcggcatggcgccgttgacgaggccgacgggatttgttgaggcccatg

SEQ ID NO: 47982 - DNA, 404 bp, Setaria italica
  Peptide Sequence Number=SeqID_113956
actgcataagcacatgaagttgtccattcaaatacgttattttacacatgacttgtttggtttgtgcagttctttgatgctaatggctacccatgtcccttgagaaggaacccttcagatcacttcttaacgatgataaataaagattttgaggaatttgatgaagggtccacacttatgttaccatgcgcggatgaagtcatacaaactttagtagattccttaatatctcgggggagtttaggaatgaaaaatgaagcatttacaatggagggtgcacctttaactaagaaaaggcaagctactttctttaccaaatgtgcagtgttaaccaaaaggtcatgtactaaaatgcctatatagataccaaatcgcaaccaatagtagcccagaatctacgaata

SEQ ID NO: 47983 - DNA, 434 bp, Setaria italica
  misc_feature (383)..(383): n is a, c, g, or t
  misc_feature (410)..(410): n is a, c, g, or t
  misc_feature (426)..(426): n is a, c, g, or t
  Peptide Sequence Number=SeqID_113957
ttaactaaaacttaacttaatttagtaactaaattgtattgttcaattggaggattcccatcatttgtcgaggacatgaagatattcagaaaagagcagctgagtggtcattatgatgctactgcattcgtcatctctaacacactttcatcaacaccatacttagggatcatctctataataccaggtgcaatagcttattacctgactgggcttcaaagaagctttgatcactttgtctacttcgcggcagtgctatgggcatgcacaatgctggttgagggattgatgatgattgttgcagccattgtgcctgattttctcttggcataatcactggatcaggaatccaaggactactaatgctaaatgctggtttcttnaggcttccaagtgaccttccaaaaccntatggaagtatccganatactata

SEQ ID NO: 47984 - DNA, 272 bp, Setaria italica
  Peptide Sequence Number=SeqID_113958
aggcctttttgcaaggcatgcaatgcaattcgttgctcttttttatgcaaggaagtaactgctcatggtgtgtgttggttttgtaataacaagcttaacgaatctcggaacgagtactcgattaccactaccaccaagcattattgttctacgtaccttcttggagcagtagggatcagtgacctaatcatcatccctggctgccggggtgaaggaagcttcttgctgagctcagttgagtagtcttgttccttttgtcgttaatttggtta

SEQ ID NO: 47985 - DNA, 297 bp, Setaria italica
  misc_feature (266)..(297): n is a, c, g, or t
  Peptide Sequence Number=SeqID_113959
gccccgtggtgggcggaatccggagctgggatccatggaggtcaatcctcttctccaaatccatggaaatagaaagatggaaggcttgagaagatacaaggctagagaaggtgtaaggcttgagaaaagatggaaggcagtggggtgtaaatttttcattatattagtttggccatttatcttaatacttcaatttatcgtgtgaactgaattttgggcacttcaatatatcaggtggcaaactttaaaaaaaaaaaaaaaaaaannnnnnnnnnnnnnnnnnnnnnnnnnnnnnnn

SEQ ID NO: 47986 - DNA, 196 bp, Setaria italica
  Peptide Sequence Number=SeqID_113960
gaacgcgttgcatgcatcgccgggtggtcggaatttaaccagccacacggccgacgagtatctaacaacgcgttccccggtgcatgcagtggccgggctcgttctgcgacacgcggcagagctgctgcttcccggacaccgggaagccggcggcggacttcggcatccacgggctctggcccaactacgccaagtg

SEQ ID NO: 47987 - DNA, 255 bp, Setaria italica
  Peptide Sequence Number=SeqID_113961
ctagcagacaccgatactgttgggggagaatcgccgggagcagaaaggatcatcgatcgatgaagcttgccatcgccttcgggctcttgctctccctcctcgccgtctcggcggcggcggagcgcttcgatttcttctactttgtccaacaggggtgctgcttcccggactccggcaagccggcggcggactttgggatccacgggctgtggcccaactacgcccagtgccatggccgctacggcctggcccgcg

SEQ ID NO: 47988 - DNA, 271 bp, Setaria italica
  Peptide Sequence Number=SeqID_113962
ttaacttagttcttaagttctttacttaggtatttacgtaggtagtattgtctttacttctttctatacctattcagtcatcccttccctcgctgcgcagatcctccccgttccggcgtgccctgctaggtaggaagagatctttcatctgtgccggcggctctgaagatgctgaattcgacagttctccgccgcctggtggtgacaaacgacagcaggaggttacttgcaaaaatcgcaatgctccaggcgcaaaaggtgcgcatctcag

SEQ ID NO: 47989 - DNA, 297 bp, Setaria italica
  Peptide Sequence Number=SeqID_113963
cggccgaatgcagaagacttaatacaataggaaatacaaagaaaaggaatgctgatcttgtaatcagatcggtggacttctcaagctagactccatttctttgataggaaataggattatggctctagtaatgttgagatgaaggcaccaataggttctttccgtggagaatggaaattcttgtacatataaataagctgaatgttcatttccaactttccatggtgattatgtgcatgcaataagatattccttcatgatgtacagtcgaaggattattgaataatttatttggca

SEQ ID NO: 47990 - DNA, 408 bp, Setaria italica
  Peptide Sequence Number=SeqID_113964
ttattttcccggtttagtttacttttcttttacttacttaccttatttgttcttattcttaattagtcctagtcctagtactacctaattcagagcttggatcagggtcggctttttgtgcaccaacagaaaaaggggagggagcaaccacaagttacacaccgacctctatcatcataagaaaacacacagtaccaccacagcatcctcaagccagcttcagttgcttcgttcttttcgagacatcttcttttcactcgcttcgcatatcataaaagagagaacctggtagtatccaaggtctggaaggtccatgttggtcaatttcaatcccactaaacactcacgagcaagttcatgcgcacaagaccacatccacctcagaggtatactatgtgctgtgcgacc

SEQ ID NO: 47991 - DNA, 498 bp, Setaria italica
  Peptide Sequence Number=SeqID_113965
ccaattagtttttccctgaagattatagattatattgcccacttatttgttgcagatctatatagtcctaaattgtttaggaacctttgttattattttcttgcatgttgttgctacaaattactacattcgcaaataagtgatcttttgtgttgcgtgcagtgaaagcatctaaactttgaccaccaatacctattaatatagttagatcgaatatttgaaaatgatatgagcctatttgtcttgaatgtagtttgtaaatatgttacaatagaaacttgcagttaaaaggtacatattagtgactctatggatgtttaaaacatcacttatttgtgagttggacagcagggagtttttgttggtataagagtctgatacagaagctctgctcttgtttaaataatgactgattactgtcaaatgtgcacagatatattacttatgccaaagaagaagaggccatccggtgtattcaaactgtacataattttgtct

SEQ ID NO: 47992 - DNA, 252 bp, Setaria italica
  Peptide Sequence Number=SeqID_113966
acttgcagtcttgtcaaaacttcctacactatcagttcttactgaacccattgcaccaggctgatgacttcccattccaggatgtccagaaacattaccaggtgtacatacagtccctagcccatcttgacatccacttaacaaggcatgagtcttattgattgaagaaaacccagtctgcatctctgaaggtttagtgggattgaaattgaccaacatggaccttccagaccttggatactaccaggttct

SEQ ID NO: 47993 - DNA, 236 bp, Setaria italica
  misc_feature (47)..(47): n is a, c, g, or t
  Peptide Sequence Number=SeqID_113967
gatgtctatctacttcaccttcagttgctttgctcttctacatgcanctttattttcaactcgcttcgcatatcaatgaacagaatgaacctggtaatttcaaagggctggaccatagctcaggttcatgttgctcaatttcaatcccaataaacactcatctgccatcttcttacttgtggcgtctgtggtgttgtgaaagtaactggttggccggcacacagtctatacctgat

SEQ ID NO: 47994 - DNA, 251 bp, Setaria italica
  Peptide Sequence Number=SeqID_113968
gatgggtctaatcaggtgtacggctcaaaatacagtaggaaatctagaaggggacttgggcctatccagagatgaaaatccagaagaaaatggaaagctaacccatctagcttctaagtcaccaatatcacctaagaaagacacgacagtgaacattaccagcaaaagcccttcagattctgtatcaagtatagaaatatcgaaatcagatgtgaagactggtgatggtgactgctcaattaacaatattg

SEQ ID NO: 47995 - DNA, 188 bp, Setaria italica
  misc_feature (26)..(26): n is a, c, g, or t
  Peptide Sequence Number=SeqID_113969
gctgatgatttctcttacagtgcggnggtttccgccaagcatacagtcaagaatggaacacctgtatgttctctatgctgaaaattcaaaatgcattggaagacatttcctcttcttcgttttttttttgtcattcatgctgctttctagcatatgttaaactgtttatatttccttatgtattggct

SEQ ID NO: 47996 - DNA, 145 bp, Setaria italica
  Peptide Sequence Number=SeqID_113970
caaaatgtttccttggttatcttgtctagcaaacgaaaatcttgactctttgctgccagatcctgatctccatgaagacattgcaaaagaagcatcgtgattcgaatgccaggacaacagctactgtaatgatgtcaccccagta

SEQ ID NO: 47997 - DNA, 457 bp, Setaria italica
  Peptide Sequence Number=SeqID_113971
tcgtagggtaagttcttccgtccggtagttctaaggtaccttaggggtttttgtaggtatttcgttcggtaaggggtcgtctaggggtagaggagcgcgaggaggggaagatgatcgaggtggtgctgaacgaccgcctggggaagaaggtgcgggtcaagtgcaacgaggacgacaccatcggcgacctcaagaagctggtggcggcgcagacggggacgcgccccgagaagatccgcatccagaagtggtacaacatctacaaggaccacatcaccctcaaggactacgagatccacgacggcatgggcctcgagctctactacaactagctgccctgactccacatgcctttgttatcaggttgatctgaattctgaagccatgggtgcaattccagtcgcagcctcctaagctcatacatataagcaacctgagtgagctatgcaagacatgg

SEQ ID NO: 47998 - DNA, 344 bp, Setaria italica
  Peptide Sequence Number=SeqID_113972
ttcgtaggtaaagttagtttcttcgttcgggggtttctaaggtagtcttagggtttcgtaggtattcatcggaagaggagcggggaggaggggaagatgatcgaggtggtgctgaacgaccgcctggggaagaaggtgcgggtcaagtgcaacgaggacgacaccatcggcgacctcaagaagctggtggcggcgcagacggggacgcgccccgagaagatccgcatccagaagtggtacaacatctacaaggaccacatcaccctcaaggctacgagatccacgacggcatgggcctcgagctctactacaactagctgccctgactccacatgtcccctctt

SEQ ID NO: 47999 - DNA, 427 bp, Setaria italica
  Peptide Sequence Number=SeqID_113973
tattgtctttgtctagggttactacctaaattgtagtcggtcccgttggttggtacgtccctattgatttccgggcaatagcagcacactctggactctggacagtgccattattttccttcttccaacatggagccaccacaccaatgaccaatgtacatagcggatggcaggtacgatctgcagtgtaaagctgcaacatcaggatccaggtctgaaaggttcggtttcgatgccgaatcattatcggatctcgcagctgctacagtaatccggcaatccgaggttggagcggcggcatggcacgaccggtgcgagtgaattctcctcgttccggtgcttgctgcagcctggtagctgtacgactcggcacgagcacgccatgaatgagttcattgattccttgttgtgaatctgggaccatcca

SEQ ID NO: 48000 - DNA, 367 bp, Setaria italica
  misc_feature (328)..(328): n is a, c, g, or t
  Peptide Sequence Number=SeqID_113974
atgcttgcagggtacaccaaatgagcggcccgtggtggacgcccatgattccgggcaatagcagcacactctggactctggacagtgccattattttccttcttccaacatggagccaccacaccaatgaccaatgtacatagcggatggcaggtacgatctgcagtgtaaagctgcaacatcaggatccaggtctgaaaggttcggtttcgatgccgaatcattatcggatctcgcagctgctacagtaatccggcaatccgaggttggagcggcggcatggcacgaccggtgcgagtgaattctcctcgttccggtgcttgctgcngcctggtagctgtacgactcggcacgagcacgccatgaa

SEQ ID NO: 48001 - DNA, 175 bp, Setaria italica
  Peptide Sequence Number=SeqID_113975
tcctcaaagtaagggttcacttcatatgttgctgttcccttcccagatgctgagttggtagcagcttcaggccatgcgcatggcttggaaggtttcctcctctgtcatgattcatcaccgtaccaattagttcatggctacagctatggtggaacggctactgcttacctaaaaa

SEQ ID NO: 48002 - DNA, 327 bp, Setaria italica
  Peptide Sequence Number=SeqID_113976
tcctccagtagcctagtaggaatgagtagggatctccgcacatcagtgcttggcgctgacgagagcgatgtggggagatccctactcattcctccagtagcctagtaggaaaggctgcaattttgacggccattttcttcgtagctcttctttggaataagatgatgtggaccacttcaaactgagagcataaatggactcagatccatgacttgtatgttagttgttgaagggtaaagtttggtcgtagtgcaaggcatgcatctgcggaattgagtgaaccatatggcccgtcgactcgattcgttgcttagtaagaattagtag

SEQ ID NO: 48003 - DNA, 159 bp, Setaria italica
  Peptide Sequence Number=SeqID_113977
ttttggtaattaagtattgtattgttggtaccactttcaaactgagagcataaatggactcagatccatgacttgtatgttagttgttgaaggggtaaagtttggtcgtagtgccaaggaagagctacgaagaaaatggccgtcaaaattgcagccttt

SEQ ID NO: 48004 - DNA, 399 bp, Setaria italica
  Peptide Sequence Number=SeqID_113978
tagtcctaattaacgtttgtttgcattttgttcttttcttttagccaaagcataggcctgatgttgtgggcttgaagtagtaccctgaatctgagaagggtgtgaattcccaaacaatgtgtaatgattgtgacatctgatgtggctgttggggtagctgaacaggtgaagctgcaacgctcgagaatgatggattcatgctgctgaactggacggtagcttggctacttccttgtgcaacctgcatgtcaaactccggcatctgcctatgctcttccataccctgaacaggctacaagagaatttatcatcagcaacgccacctatttttttttataagggcagcttctctttaagcacagttatttaaaatttgctacaagaattacttgaaccacc

SEQ ID NO: 48005 - DNA, 142 bp, Setaria italica
  Peptide Sequence Number=SeqID_113979
tctcagattcagggtactacttcaagcccacaacatcaggcctatgctttgggcttgaagtagtaccctgaatctgagaagggtgtgaattcccaaacatgtgtaatgattgtgacatctgatgtggctgttggggtagctg

SEQ ID NO: 48006 - DNA, 236 bp, Setaria italica
  Peptide Sequence Number=SeqID_113980
agatgtttaagcattatagttccattcattatagaaagcagtaatgcaaacacctaagtttgaagatgtcacatgaaacacctctcatatgcattcatgtctatgaatcagagaataagtaatgagttaacaaacactaccagtagatcttcatatttcttgttgaattctgcttcagtattagatgaatcccattcaacattgtactcttgggcaatggctttcaggactttcag

SEQ ID NO: 48007 - DNA, 227 bp, Setaria italica
  Peptide Sequence Number=SeqID_113981
ttgaaatcaacactggcggcttatctctggaggccgaagcaaccagagagctttcaataacaggagcctggacctggtggactgaagatgctgagccatcctgcataccagcacagaacagatggagtgacttttagttctagagtatcctgatcaaacttaactgaattatttagctctcaacaacgctaactgtaggcatacagaggcgtgaaaattaagtttag

SEQ ID NO: 48008 - DNA, 267 bp, Setaria italica
  misc_feature (211)..(211): n is a, c, g, or t
  Peptide Sequence Number=SeqID_113982
ccagagagctttcaataacaggagcctggacctggtggactgaagatgctgagccatccagtagatcttcatatttcttgttgaattctgcttcagtattagatgaatcccattcaacattgtactcttgggcaatggctttcaggactttcagctttgattcacctgacggagccttcaccgagagcttctcaattatctatatacaagntattcaatattttcgaggtaaagatgctcactttgtgaggaatacaattctgatgt

SEQ ID NO: 48009 - DNA, 210 bp, Setaria italica
  Peptide Sequence Number=SeqID_113983
taaatttttacttagtactttactaagttatttagtattgtaattccctatttctaactatttgttactcttgggcaatggctttcaggactttcagctttgattcacctgacggagccttcaccgagagcttctcaattatagtgcgattgacaccgctgtcagggcgcaattccatagcaccagcaacaaactccttaccatacttgg

SEQ ID NO: 48010 - DNA, 243 bp, Setaria italica
  Peptide Sequence Number=SeqID_113984
gggtgatcctagactttctgtaaagttaaggaaattatctaaactttttactcacaccaaaagctgattcgacaaataacaaggtgaaaacacaccaaagagcagatctgtacaaacaaggatagaaaactaacacgaacttcacagatgcatatctggagttctagtcctccaacaaccatgattcttaacttggtagaaaccttattaaattatatagaactttattattgtcgtctcaag

SEQ ID NO: 48011 - DNA, 388 bp, Setaria italica
  Peptide Sequence Number=SeqID_113985
attagaaatttatgtaaaaatctgtatcatgactgaatgtttatcaaaatatcttcttatacgtctactgaatttatcttcaatgtatttaggagggacctataatgtactgcagccgcactatttttgaggatgctactcctgaactggttagagatttcttctgggatggtgattttcgtctaaaatgggatcccatgctcgcgcactcgaaaactttagatgagttccctcagaatggaactacaattgtccactggataaaaaagttcccattcttttgcagtgatcgtgaatacatctttggagggcgcatatgggaatctgggaagacttactattgtgtaacaaagggtgttccttatctatctttgtccctaagtaagta

SEQ ID NO: 48012 - DNA, 251 bp, Setaria italica
  Peptide Sequence Number=SeqID_113986
caggacaatatttgagggcgaacaagatactgtcactgagaaggacctagaacatctcctgcaacttttagataacaaggagagcggggatacagcatggcagaatttgatggagcgcacaacctccaacatgacctacaaggcctggcggcatgagcctgaggtttgtttcccagtggtattgtaaaaagtgaaattattgctaagaatttaggatattatagaacgtacagctatggtaaatgagaggt

SEQ ID NO: 48013 - DNA, 382 bp, Setaria italica
  Peptide Sequence Number=SeqID_113987
acatttgagtcatgcgttggtcatattctggccatcaatcatgaagatgagatctcaatatattcctgaggaagcaagaagcacaatcatgaattttttccgtcataccactcaacctgtttgtttgtgtggtgctatacaatgtaaatgcattcccgatcactgtcatgtttggcatgtgctccattttccttttcatggcagcaatcttgcagagacggctaatggttgtctctgatcttcacaagtcaacaaaagcggtagagatgactgcagaagatgagcctctgaacccttagaaaaacaacaaagaaccaataagaaagacaaaatacggaagaatacaaaaaataggacccaaataccttacttacccaactaa

SEQ ID NO: 48014 - DNA, 322 bp, Setaria italica
  Peptide Sequence Number=SeqID_113988
aaaagattgcattgcttggagccattacagtcattgtttgagggttcaatgtatacttttgtcttcctatggactcctgctctgagcccaaatgatgaagaaattcctcatggcttcatatttgctacattcatgctctcctcgatgcttggtagctcaattgcttctcgtctattagctcggaagctgaaggttgaaggttatatgcaaattgtgtttgcagtatcagcctttactcttttcctccctgttgttaccaatttcctagtacctccctcctcaagacgaaaaggtaaggtaaagaacaaatttaacaaattaa

SEQ ID NO: 48015 - DNA, 238 bp, Setaria italica
  Peptide Sequence Number=SeqID_113989
tgtggaggaaatatacgaggagggctctgcaatgcttgctcgaaggaaatatgttcaagctgcatgattgtgctgtctgccagttggagatgaaacctggtgagggcatctctgttcatggtaacatgccaaagcattcaagagttgacccctggggcggtccctttctctgttcctcttgtcaagtgaaaaggagccatggaagggaagctgcattcgagaagtacggatgtcttta

SEQ ID NO: 48016 - DNA, 242 bp, Setaria italica
  Peptide Sequence Number=SeqID_113990
ttgggcgcatggcaggtggcctcgatggagtaggcgccgtcgaaggacgcgtcggggaagggcatggagaggaagttgccgcagacgacctcgcagcgggagtcgaggccggccttgcggttgtgcgcgcgggcgcggttgacctggtactcgttgatggtgatgccgacgacgttggagccggagtgcgcgccatcgccgcccactccggctccaacgtcgtcggcatcaccatcaacgag

SEQ ID NO: 48017 - DNA, 241 bp, Setaria italica
  Peptide Sequence Number=SeqID_113991
ggtggccgtctccttggggcggcggaagaaggaccagtactgcgtgtacttgtcctgcaccttgtcccgcgtgatggatcccatcttgagatccaccgcccgcttgcccttcacctccgccgcgcccatcacccagacgaaccagtacaccagccccaccccgaccaccgccgccgtccatttcctcctcctccctcttcctccccctcccctctcgcgccgctcgtcgctgaaggaggga

SEQ ID NO: 48018 - DNA, 166 bp, Setaria italica
  Peptide Sequence Number=SeqID_113992
tttcggtggaggattatcgggttggagagagagacgaggttgggatttaaattgaaagctacgaacaagaagcatggttcctagtatcttctctaacagattcaaattcgattcctgaagctctccgagtagcatctgctcttcttacctctgctgctcctcctcg

SEQ ID NO: 48019 - DNA, 369 bp, Setaria italica
  Peptide Sequence Number=SeqID_113993
tttgctcgctcttctaccattgattttgcctgctgtcgagctatgttctgcatctgtccaatgccagcctccactgcttgagcaaccttggctgacttgttgacaccatctgctatctcatgactcaagtcactaagttcaagggtgaggtcactgatttccatgccagagagccttacagcggccatggtacttggtaactcctctagagctgcgtcagccagcatagaaaatgaattcgtggctctcctcatagccagcatggtcggaatcgccacgaccaccattcccgtgaacgccacgcacgtcgtgacagcgacagcggccaggagaagaacacggtcgccgcccggtgccgcgcggccacgc

SEQ ID NO: 48020 - DNA, 393 bp, Setaria italica
  Peptide Sequence Number=SeqID_113994
gtcatacacattatgataatcaataaatggaatagatgagacaaagataagtatatggtttgttcacggtaaaaaaatacattttgcctgctgtcgagctatgttctgcatctgtccaatgccagcctccactgcttgagcaaccttggctgacttgttgacaccatctgctatctcatgacagcatggtcggaatcgccacgaccaccattcccgtgaacgccacgcacgtctgcaccgcacaaaccaacgtgacagcgacagcggccaggagaaagaacaccgggtcgccgcccggtgccgcgcgggccacgcgcaagcgtgctgggaggggaagactgaagttcgtgcccacgctcgatacgtactccccatccccgcgctccagctgct

SEQ ID NO: 48021 - DNA, 260 bp, Setaria italica
  Peptide Sequence Number=SeqID_113995
gcagatgaatcaaatgaggggccattctctgctttgacgcgacgagatttgcactctttcgacaggcgatcttccacaagtttgcgcttcaagcacatggatttggactctcgtggagaagccatggaaggcttgaagaccaccagaagtccagaacaaatgggaagaaatagaaaaacaaaccctaatatgatacaagatttaagttctggtgtttatctttcaccagaagaccgaacatttaccagtgtcggtctttg

SEQ ID NO: 48022 - DNA, 393 bp, Setaria italica
  Peptide Sequence Number=SeqID_113996
ctgaaactttgttcttctttttaatcaggcaggtagcgtcatattcctcccaatctgatttagttgagcccaggtaatttgagaatgctttctgaccccacgggcagtttatcggattgacgattggagcaaatgccgatactgacttgtatttatcagtgtttttcaagtaaattgtcagtgcaccatggcctcccattgagtgcccaaaaatggatgcctgtgtagtgttgagctgttcaaagtgatcgctcagaacttttggaagttctttcacaacatagtcatacatgcgccaatttttccacttttcatttgtggcgttcaaataaaacccagcacctagtcagaaaatgggaaaaaggtgttaaggacatctcaacgaatgtgcag

SEQ ID NO: 48023 - DNA, 403 bp, Setaria italica
  Peptide Sequence Number=SeqID_113997
ccgtgggcggcggcggcgcgctgagcgccggccttaatgatgaagttctcgtcagtgcaggtgaggcccgagagccagtacagcacctgcaatgaagaaatccgacaccgcgtcacattccgcagctcagactgaccccgagagaagcggagtggaagggcgtagcactcacgggaattttggacgccggggacggggcaggtagacggagaaggtcatggggcagccgagggtggcgctctggtggcggaaccggaggttgcgacgccgaacatcttgttgctgctgagctgctccagcgccgccgcggaggaggaggtgtcgccgccatcgctcgatccacggcgggccttcgccttccggtacggtggggatgaggagaagggaggtggcgactggcgtt

SEQ ID NO: 48024 - DNA, 348 bp, Setaria italica
  Peptide Sequence Number=SeqID_113998
agatttaatgttgcttcatgactcacggagcgatgatggaataaaaagtttctttcaggaggttcatgaactttacatcaaggtaaacaatcagttagttatattcacagttatttgttattatgttttcattagctttgattatctagtggcatcttttcagaatcaacattttgatgaatgtgcagattataaatatcacatttttttccagctgcatcattcgaaaactttttttgcaatgcagtattcttcatctcttccttgtgctataatggagttctcttttgtaaattgtttttgtgtgcagatattcctcaacccgctctacttgccgggttctcgcat

SEQ ID NO: 48025 - DNA, 201 bp, Setaria italica
  Peptide Sequence Number=SeqID_113999
agcaagtcgcacgaccagcaatcgtaggccatgccccttcccattcttggaattctcaagctataatggcttccatattttgcgtgcagatttacagaacgatcagcacacaaaaacgcaagtttagaatagtcatcaccaaggatctgaagaaagaaacaaccaacttgttagggaacaaatgtgggcatccataagcat

SEQ ID NO: 48026 - DNA, 444 bp, Setaria italica
  Peptide Sequence Number=SeqID_114000
aagtaagggaataaataagaacaagtacttagggaacaattaattagtacaagctagaggagattcagggattaaaagttccttgttaacgattccagattctggcatctgagccttattgataccattatttgttgaggttgggaggagcacgttattgtcatccttgcttgccaacatatgatcatttccatggaccaaatatttgctggaagtttctgcttgcaggctatttttcctggagaaagaatggttggatgcagttcctttacttacatcattatttactaccttatctctgtaaccgctaattgtttctgatggcatgtcaatactttcaagtgacacatttaggtcaaaaaaggcccttccgttgaactgaggattcggctaccacatcccttgaactgtctgcaactgagttgggtgtgatcactgtgatag

SEQ ID NO: 48027 - DNA, 242 bp, Setaria italica
  Peptide Sequence Number=SeqID_114001
gttgcggagggaggtcaccacggggccggtactcctcggggcccagcccgtactgcgacaggatgtcagcgatctcggcagcctctgcgagagagaggagatgatggtcagggagccatgtgagattatgaatgaagctgtggaggtcgtcggcggttgcttaccgacgtcggggacagtgtcgatctcgtcctgctcgcgctgcagctcgcggttgtagtggtctgcctcgctcttcgccg

SEQ ID NO: 48028 - DNA, 279 bp, Setaria italica
  Peptide Sequence Number=SeqID_114002
cttggcaaactttgtcacagtcgccagcatcatcccctttggcattcacgcacctgtggtactcaacatagcgagtaaacaatgccttgtctggtttgttgtagggaagcggaagtccgcaggtgctgtttttatctcaatctcggccatcgtggtgcggagggggggctggagacggcggcgggttcccggcggcgcgcggtgggcggggaaggtggtggccacttggcttccggactccggtcgggtcaacctcgatggcttttgcgagccggaacc

SEQ ID NO: 48029 - DNA, 223 bp, Setaria italica
  Peptide Sequence Number=SeqID_114003
cctatcccctgtgtgccttgcctatcctctgttgcgtgtctcagctggaaacgtcccgttctccctctgctcattccatttctcaacccattctccggggcaaagagacctgtagtacttggcaaatttgtcacagtcgccagcatcatcccctttggcattcacgcacctgtggtactcaacatagcgagtaaaacaatgccttgtctggtttgttgtaggg

SEQ ID NO: 48030 - DNA, 127 bp, Setaria italica
  Peptide Sequence Number=SeqID_114004
ggaaacgtcccgttctccctctgctcattccatttctcaacccattctccggggcaaagagacctgtagtacttgggttgagaaatggaatgagcagagaggtcctggaaacgttcccgtttcttct

SEQ ID NO: 48031 - DNA, 381 bp, Setaria italica
  Peptide Sequence Number=SeqID_114005
acaagcacttgagatcccatcttggcaagttgttgcacaagatagcgtccaaggaacccagtagctccaaacacagtagctacaattccactcacagatgacctccctccggtgcccttgcggacgagataccccgacccctcgaccgccggcgccctcgcggacactgaggaagttaatgtgcttaacttctgcaagttggggtgtgcgtcgtctgtgtgcaacaacatcaacgctgctctgggaaatgaagaggcgaacgatgccgttgagagttgcgaccaagcctgctctagcttctgcagcgtgcatgttggcagcgccaccgtggttgcttaagcaaatgcatccaactagatcgtccttgtgctgaataattgg

SEQ ID NO: 48032 - DNA, 397 bp, Setaria italica
  Peptide Sequence Number=SeqID_114006
ctagaataacggattacattatgctcgacacctcccacaatcatgtgtcatcgttggaacgattcctctcttcacttgttgcatccaactcaaaaattagacaaaaagcatctgagcgttcttcttattgatgtaaacaaacaaggagcaggagccagagcacggaatttgggtcctgcccgctggtgaggcagccggctggagcagctgcggccgcgacagatggccggacaacaaacacaacaatgcatctctgcaactaaatgattataaatctacagcgtcttcatgaacgggaggaggctacatctcggagctcctcatcttcttcgtcttctacggtttgttaaccttaaaagttccggttcccgttcccttttccggtttaagttactta

SEQ ID NO: 48033 - DNA, 181 bp, Setaria italica
  Peptide Sequence Number=SeqID_114007
ctacaattccactcacagatgacctccctccggtgcccttgcggacgagattatgaaacaaggaactacagcttcgaagaagtaaaccatcatatggctgggcaacttgcaatggttgcaggcctcatgatcgtagcctcaggaaattctttcaagatcgattcctctcctgcagcttttg

SEQ ID NO: 48034 - DNA, 374 bp, Setaria italica
  Peptide Sequence Number=SeqID_114008
gggatttgacattatcaaggcccattaccatactgaatggcaaatctgactcaggaggtggtttatcatcctacatactaccagcagctgcagttggagcaatgggttattgctatatgtggtggaagatgttatgtttgtcacaaaacgcaatatggctaatgctgttcagagcatgtcaaagcagttggagcaagtttcatcagcattagctgcaacaaaaagacatctaactcaacggcttgagaatttggatggcaaaatggatgaacaagtagaggtctccaaagccattagaaatgaggtcaatgatgttaaagatgactgtcacaaattggatttgacattgaagcaattcaaactaaatggttgct

SEQ ID NO: 48035 - DNA, 363 bp, Setaria italica
  Peptide Sequence Number=SeqID_114009
cgatttatcattaaaattgggcaacagtgggtgcccatttaataacacgtgaactgctagatgtaaaccaagcaacaagagaagaaaaggttgcgttcggaataatccttttacctattctgctttgtgtttcttacctcatgcagggattgtctctctcagatgttatgtttgtcacaaaacgcaatatggctaatgctgttcagagcatgtcaaagcagttggagcaagtttcatcagcattagctgcaacaaaaagacatctaactcaacggcttgagaatttggatggcaaatggatgaacaagtagaggtctccaaagccatagaaatgaggtcaatgatgttaaagatgacctgtac

SEQ ID NO: 48036 - DNA, 254 bp, Setaria italica
  Peptide Sequence Number=SeqID_114010
tttagctttgttggaatgcgaggatgcgctgggaaggaagatttgtggggctatttacgcgtggcctgccattgcgaatagtgatgattggcaccctaactggagctcagtggggtatctatgacgctttcaaagtcatggttggactaccaactactggtggtgttgctccaacacctgctgccgctaaggcctgattctacactaccgaacatctaacagcaattttggcgccaacaagggaaaaaggagct

SEQ ID NO: 48037 - DNA, 244 bp, Setaria italica
  Peptide Sequence Number=SeqID_114011
taaactaagtaagggtagtattgtttaagtactaatttaacttagtaattaattagttaggaaaacagcacgtatccttgataatcattcattaagcttgttcaaacacatctgttctgttaagtaattgtagttgcaatggaatgacttaacatggaaatagcagaagtgcagtgggaccagatggacttcttgtctgaagaagttgtcacccctgtgcccaaaatcagcagccggtcgcagt

SEQ ID NO: 48038 - DNA, 414 bp, Setaria italica
  Peptide Sequence Number=SeqID_114012
gacaatggtttgcagcaatattaaatacacctatacacaacgtattatctatcacaagctgtctgaaaacatgtatccaatttggattccaaaagtccaatgcaaatgtggatctgccagtcaggagaatcaactaccaagcccagctatcatcgccgtaaatgtggctactgcaaatccaagcacccgccagcaaacacctgtggaggtgtgtgtcctaggagctctcgcagtggtcttgtctcagccagtggatgttctgatggaagttcatacacaatttgattcaagacctctgcttgcttccctgcatgtagcctgacaccaaaagcatcatacatcacctgcaaacaattgcaagaggcaaaaaagttagcctagtcaataaataatgaaaatacaaatagacaataa

SEQ ID NO: 48039 - DNA, 510 bp, Setaria italica
  misc_feature (407)..(407): n is a, c, g, or t
  Peptide Sequence Number=SeqID_114013
agacccgacctaccgacctgaaccccgcctcgccgtcgccacctccgcctccggccggccctgccgcctccgcctcaccgccggcttgcaggaaggaatggagggggaggggcatcggtgggaagggtagagtagtcattttgtgcaacaggtgctaaattttagctcttcatccaaacacttcaaaaggctaaagtttagcactctatttgaggggactaaaatttagttcatggctaaattttagcgacctcctcccaaacagggcctaatgtttagctgttcaagcttgttatgaattggccttgctatcctcccttcgagtgcgctttatcccttctaccaaccatgacctcgcaaagttaagagccataaactctagctcttgatcgattcatgttttttanacaaaatatgcactaatcgagcagtagcagacggatgccatgaacgaccatgtatgatcaggtgccccgggataccaagatgccacaacctaattaatcagat

SEQ ID NO: 48040 - DNA, 256 bp, Setaria italica
  misc_feature (226)..(226): n is a, c, g, or t
  misc_feature (234)..(234): n is a, c, g, or t
  Peptide Sequence Number=SeqID_114014
ggcagctggccgagactgtgaccatattaaagggccggcccagctagcaatggtagtagtacttgtacggttcgtgcatctacctaatgtttagctgttcaagcttgttatgaattggccttgctatcctcctttcgagtgtgctttatcccttctatccaaccaaccatgacctcgcaaagttaagagccataaactttagctcttgatcgattcatgtttttanacaaaatntgcactaatcgagcggtagcag

SEQ ID NO: 48041 - DNA, 300 bp, Setaria italica
  Peptide Sequence Number=SeqID_114015
cttgtccataggggcggcgcaatggtaacaaagtactgcttacacctgcactttattagcaagcacccagacgttctggagacgtacatcttgcacttggggcacctttgccatttcttcttgttagcgagctttttaagcgtcagatcatcctcccccttctcatcatctccaagcttcctaaactccttgcatttgatcccatcatgccacgcgacgcggcatcgtgacaacaagaaacaagtacggtaggacaagtagtagggacaactactagtttaccctagaatactttaacca

SEQ ID NO: 48042 - DNA, 376 bp, Setaria italica
  Peptide Sequence Number=SeqID_114016
acgaaagaaagaagacgtaggaagaacctaacaaagaatactaacaatacttacaaggtgctcaagcaggtccaccccgacatcggcatctcctccaaggccatgtccatcatgaactccttcatcaacgacatcttcgagaagctggcggcggaggcggccaagctcgcgcggtacaacaagaagcccaccatcacctcccgcgagatccagacctcgggtccgcctcgtcctccccggcgagctcgccaagcacgccgtgtcagagggcaccaaggccgtcaccaagttcaccagctcttaggcgatgcggttgtcttctcgtggttggttcacccctgtagtaggatggttgttgcagcggcggtagttgccc

SEQ ID NO: 48043 - DNA, 196 bp, Setaria italica
  Peptide Sequence Number=SeqID_114017
cttatctggtagcagtagtattgtcatcagcactgttgaatggaattatggaaatggaaatggatggttagtgtgtagatgacaatactactgctaccagataagttaaactgagagagccaggactacacacaacccaaccaaactagtactagcaccaccagacacggaacctatctaagatgagagagccagg

SEQ ID NO: 48044 - DNA, 214 bp, Setaria italica
  misc_feature (188)..(214): n is a, c, g, or t
  Peptide Sequence Number=SeqID_114018
gcggtggatgggggaatttggggagaaatgctagccgaggattgtgttggctgttgttcatgtgcaacctgctcagcgcagttacgggatttggttccgacggatggtgtagttatatattctggatgtattctctcatgtaggaagtacctgttttgatttgaacagagatgttatctgatggaatnnnnnnnnnnnnnnnnnnnnnnnnnnn

SEQ ID NO: 48045 - DNA, 272 bp, Setaria italica
  misc_feature (193)..(193): n is a, c, g, or t
  misc_feature (255)..(255): n is a, c, g, or t
  Peptide Sequence Number=SeqID_114019
tcgccgccgaggccgccaagcttgcccgctacaacaagaagcccaccatcacctcccgggagatccagacctcggtgcgcctcgtcctccccggcgagctcgccaagcacgccgtctctgagggcaccaaggctgtcaccaagttcacctcctcttagattgccgcacgttgttgcggtctttgttctttccnccgatgttttactgtttagcgcagtgttaggttgctagtggaacaatgtagaattgttaccngtgctgaaggatcaatg

SEQ ID NO: 48046 - DNA, 297 bp, Setaria italica
  Peptide Sequence Number=SeqID_114020
ccgggaggtgatggtgggcttcttgttgtagcgcgcgagcttggctgcctcgtcctccccggcgagctagcgaagcacgccgtctccgagggcaccaaggccgtcaccaagttcacctcgtcgtagacgataggattcccccttgctcgtgtggcctgtttttcctggtagtgatgcctacttccaggaatttgggtggaatggatgatgtagttagatgttgcgggttcctgatcgtgttctttctgtatgaagtggaattaagtttgttatctgatggaatagtagtggtgcttg

SEQ ID NO: 48047 - DNA, 147 bp, Setaria italica
  Peptide Sequence Number=SeqID_114021
accaaagacaacgaccgtagtacaagaagggacaaccaaggccgtcaccaagttcatcagctcttaggcgatgcggttgtcttctcgtggttggttcacccctgtagtaggatggttgttgcagcggcggtagttgccctgctttcc

SEQ ID NO: 48048 - DNA, 303 bp, Setaria italica
  Peptide Sequence Number=SeqID_114022
ttgttcttgtattgtattgtattattgtatttcgtttttggtcgttgtagttcgtagttccccttgtttcgttggtcgtcgttgtttgagggatgtcggtggcgtgtgtatgtacgagtcggcggcgggtggaggtgtgcgcgcgtggttggatacgtgcgtcgacgcaccactctttgtggtggagatcatgtacccgctgcgcttctgtttatcaatgagatgatttatttgattcttttcatcttatatacaatatacatgagaattgcgtattcaaaaaaaaaaaaaaaaaaaacaaat

SEQ ID NO: 48049 - DNA, 332 bp, Setaria italica
  Peptide Sequence Number=SeqID_114023
aagtagggtagaatagactaaaggcttggcctttgttagatcttactgaaacgtaggatcagctgcatttgggtggtgaacaggaacctgcttggctgggacttggtcatccgtgccatgccgattggctcgtcattctcgatcctcttggcattgcgaaatgcagcacagcccgcgacatagacgataacaaggatgatcagcaccacaatgtttaggatcgccaccttgcgccagctcttcttgatgcccgccaggacacccgccttgcacgagtcacactggaagcagagtgtctgctggtcgttgttccacctgttgcagtcgggatc

SEQ ID NO: 48050 - DNA, 270 bp, Setaria italica
  Peptide Sequence Number=SeqID_114024
cgtcgtggggctcgtcctcatggtcatctccctcatgggcttcgccggcgcctgctaccgccagacttggctcctccgcctctacctcttcgccatgttcttcgtcgtcctcgcgctcctcttcttcatcgtcttcgccttcgccgtcaccgaccgcggcgacggccaggtcgtcatgaaccgacgcttcctcgagtaccagctctccgactacagcggattggtcttccgtcgtagtcgtcgttcgtccgtacccctagttacttgggt

SEQ ID NO: 48051 - DNA, 190 bp, Setaria italica
  Peptide Sequence Number=SeqID_114025
taccttactttcccctaattaactagttcttggtattgtcttgtctaagtcctaacctattctattctattgttgtcgtttcaccttacaataacgagacatactggacaccaaaccccggtgtcccagttatcagtgatcccgactgcaacaggtggaacaacgaccagcagacactctgcttccagtg

SEQ ID NO: 48052 - DNA, 229 bp, Setaria italica
  Peptide Sequence Number=SeqID_114026
ttttcacatatactatattaaagtgtgccattaatcttatttatgtgatatatattggtaaacttgtgatggagtttcctagagttaaagaagcatcctgaatcatgtgataaatggtatgggcttctacgaggaacactcagggctccagccatcggctggatgatgtacaacgttctggtgagcaacgagaagtccatccagtctcagtacaagtcccatgtctatg

SEQ ID NO: 48053 - DNA, 180 bp, Setaria italica
  Peptide Sequence Number=SeqID_114027
ttttttttttttaattactattcctaattggtttcaaggcacaaagtttggcattgtatcagaaatatctttcagcataagtgccttaccagggcagaattaagcatgccgccggacctcttgtccggtgacccaaattcaaccatgttctccctgagacacgcaacaggggatagggag

SEQ ID NO: 48054 - DNA, 365 bp, Setaria italica
  Peptide Sequence Number=SeqID_114028
tccccttgtcttacggtcttttttgtctaaggtagttgttcttttcctagttcccttggtaagtacccctaccaataagacaccacgaggaggacgagcaccaagacgaatatatctttctgggttccttaaaaattccacaatttcttccaactcttcttttgcctcatctactccagccacatcagcaaacgtaactatatccgtactttcggaaacttttgctccgctggaatttgaattcttcctattcctcagctgacctgctgaatgctgagaaaagcttatcggcaaccgctgcaaaactactgcaatcaatacaacataaataagagccaccagggcagaattaagcatgccgccgg

SEQ ID NO: 48055 - DNA, 244 bp, Setaria italica
  Peptide Sequence Number=SeqID_114029
tcccagccaacaaagcagcttcatttactaagtttgcaaggtctgctccagtaaaaccagttgtcattgcagcaatatcggctagatctacatctttactaagaggaagctctcttctgttcacatgaactttaagaattgattctcttccaaacctatcaggagcttctaacctattaacttactacggttctaaattcttccctagggttcgtccgtaagggtctaggtattcctaattact

SEQ ID NO: 48056 - DNA, 375 bp, Setaria italica
  Peptide Sequence Number=SeqID_114030
cggcgtcgcatgcggcgaatctggctagggcggccccgtgtctgtccaggcgactgtggctgcggctgcagagctcaggagcaggcaccgacggccactcgagcaggaccttggacgagggattcttcttatcaaccctaaagggcctaaaacacagagtcatattttcaggctgcaccaataatcttccaattccatgcttggcctatgatgagatggatctattgtaattctaggtattggacttgcatgaccgcactgaatactaatatcagttcatttcttgaatgtttgggccagcatcaaatacgcaatggagagggtttctgctgcagagaaggttgtgataggcagcaagggggagaaaaaaggcca

SEQ ID NO: 48057 - DNA, 139 bp, Setaria italica
  Peptide Sequence Number=SeqID_114031
tctgtccaggcgactgtggctgcggctgcagagctcaggagcaggcaccgacggccactcgagcaggaccttggacgaggtaggctactcgtctctctcagttattttttccttgcttgtgatttgtcctttttgtgtg

SEQ ID NO: 48058 - DNA, 260 bp, Setaria italica
  Peptide Sequence Number=SeqID_114032
gtgtgaggagatgcgagaggaggagcagggaagtgtctagaagcggatagggtgaggctgacactatcagccagaagcagatacttgatgctagtgatgtaaagtgttgggtcagggtatgtagaaaggaacatgggaaaaggagaacatgatagtatgtcgaagaagggcaaacggaaacaccgggatggtgagacttccttaaatggttcttgtgatgatcaaaattgtttcaaggggcgataagaagaagaaaaagg

SEQ ID NO: 48059 - DNA, 269 bp, Setaria italica
  Peptide Sequence Number=SeqID_114033
ctcgccggcttcgtcctcgccacactcggatcgaggtggtattaaatctccatggtctcggaggaaaagaaaacgagcactttctcgtgaacagtgggacagtctattttcagcaaatgggaagcttcgtgatggtgggaagaagtttctcaagaaagttcgcagtggaggtattgaaccaggcctgagggcagaagtttggcccttcctacttggagtgtgagtcactctacttcttttatccattgagtaaatttattactgctcta

SEQ ID NO: 48060 - DNA, 174 bp, Setaria italica
  Peptide Sequence Number=SeqID_114034
ttactagtttgttctatccacagtgatagtgctatcatatttgtaacataagaaatggattgaagggcccttgaaagtctctatacccggtgcagtgcatgatgacatcagctttgattgaactgccatcctggaacaccacactaccatcctcctctgcacggtcaatcagga

SEQ ID NO: 48061 - DNA, 243 bp, Setaria italica
  Peptide Sequence Number=SeqID_114035
ttagaaagcaggaaacaaatgacgaagaacatgatcagtgaagtcctgaaagacaattttagcctaaattaggaatgaccatgcaggcatcacctagtgggggctgcaggttcttgtggttgacgccctccattatattctttcacgttctgcttctaccaactcagctctctccctgtctcgttctaatcttctgaagatatctagcttatagcacggagatcaatctctacgcaattctct

SEQ ID NO: 48062 - DNA, 322 bp, Setaria italica
  Peptide Sequence Number=SeqID_114036
cggcttcgcctttttggggaaaagaaaaccttgatttgagcgttagatagacacaaacaagcaggttatttgccaagctgtgctctgtaaggaaacacaaatcttgttataccacgattagactcctgataagaatgcctttcaaagtagaagcctagaaggcgtctctgtgtcatgctgttcgattgataaggaacccgattatgtctaagttactaattaggtctaagttaaccctattatgtctcttctgagcaattgccacactttgtatagattccagacttcttcacttccactgaggcgaaggcgttcattgata

SEQ ID NO: 48063 - DNA, 441 bp, Setaria italica
  Peptide Sequence Number=SeqID_114037
ttcttcctaagtccttgttgtccttttcggttgtacggtcctagtaaggtaatttcttggtcttggacaagagcagaggcatgatttgtatggcgctatcctccaaagcattggtgataacagggatagacgacagaagatactggcagcacatgccaacttcagaatcaaggttccagtctgtagcttacctccagcaaatctggtggttcgaggtggtcggcgaagtcgatttctgtttccctgtcggaacctatagcctgtacttcagggtccatctcgggaagttctacaagcgatttggccgccgccattgcagctcagagcatgtccatggttggaacaagaagcctgtccgcttccagctctcgacctccgacggtcagcaagtattgtcccagtgctacttggaggagcctgggagctgggtcttgtaccacg

SEQ ID NO: 48064 - DNA, 349 bp, Setaria italica
  Peptide Sequence Number=SeqID_114038
tcagcagatgaaactgaagttctccatggcgcagatcgactgcacgcacacaaagggtggcctgtgtgtcgactcagtgcttatctacccgaaggggaaggggtttcagcagggaagggtggtcaggtctcagagatgagattgtagatgttgtggaggttactcacattaggatgttagattgaatgcagcttgtagcctgatcctattttaattcggctcaagtatgcattcaatctaacatcctaatgtgagtaacccccacaacacaaacacatcacatgtagcattattcatgccccaagagaacatcaccaccattaccaacaccaagaacacaacaccatcg

SEQ ID NO: 48065 - DNA, 255 bp, Setaria italica
  Peptide Sequence Number=SeqID_114039
ttcctatctcgccgacggccgaccgcacacacgcgtcaagcgatttcccgggcgatttgcattcccgtggagtccatcgccggaagctgcgattggggattggggggtctgcgtggcgcggaggcggcggcgggccgggaagaaggagatctacgccaggctctccaagcctgtgcctttcggtgacggccagaaggaattctggctggacaagagcagaggcatgatttgtatggcgctatcctccaaagcatt

SEQ ID NO: 48066 - DNA, 223 bp, Setaria italica
  Peptide Sequence Number=SeqID_114040
ttctttccattggcttcctccgccatcggaaagaaggaggaggaggaattcagcacgggccctctgtcagtgctgatgatgagcgtcaagaacaatacccaggttcttatcaaatgccctcacacgaccaagtaacttcttgttgttccggcagttgataagaacctgggtattgtgagggcatttgatcggcattgcaacatggttcttgagaatgttaggg

SEQ ID NO: 48067 - DNA, 230 bp, Setaria italica
  Peptide Sequence Number=SeqID_114041
atgcaggggcgacacacaggatgtgaagatggtgcagtggcaccctctcctcgatattctggtctccgtcagctatgataatacaatcaaggagtgcggaaaaaagggtggagcgcctccatctatgttcagctactattaaaattgattgatatggcagcttgtatgatataggtctgggctgatgacggggacgatgagtggcactgtgtacagacattaaccgaagc

SEQ ID NO: 48068 - DNA, 378 bp, Setaria italica
  Peptide Sequence Number=SeqID_114042
taatggtatgcatgctgccttgtcagttagtatttttttctctcttctcattgttaatcatggtgtccttgatgcatctggtagtgaaaaatatttgatctgggcatctttcttcctgattgctacatcgtgctacttgagcgattatgtgatgaagtttgatcctgaattctttactttgctccaatgcagctaagaagcagagaaccatacaaatggtggatccgcaaaaatctgccgaagcaagggaacaaccggaatttccaacctagtggcaagccaaggaataacagcaacatcaacagcaaccggaattggtcaagatgaggcaccaattccattgagcagcagtgatcatagattgcaaccatcaaatcc

SEQ ID NO: 48069 - DNA, 250 bp, Setaria italica
  Peptide Sequence Number=SeqID_114043
gggctggcggtttctatacatcaaccgaaattcagaccaaaccaaactttgcagcaatcaaataagtatgtacagtttgtttgacaacacgaaatgctcacctcagacgaagccgactgtggcctgccttgagctggtgaggactcttgatgctgcctaggccttgcctgtggtctcccagggcctaactctgcgtttgagggtcttgcaagcatttcagcaacaaattgctctttcttctggccattcg

SEQ ID NO: 48070 - DNA, 192 bp, Setaria italica
  Peptide Sequence Number=SeqID_114044
tcatacagttggcccattgaaggaggccttctagctggttcttggttgatcggatactgctgaagcaagggaacaaccggaatttccaacctagtggcaagccaaggaataacagcaacatcaacagcaaccggaattggtcaagattaggcaccaattccattgagcagcagtgatcatagattgcaacca

SEQ ID NO: 48071 - DNA, 232 bp, Setaria italica
  Peptide Sequence Number=SeqID_114045
ggatcggagtactgctggccacagtccctaccggaattgttcatgacgcctcagacagccgaatggtagtgctcggtgttgcgaaaaggtcgcgttcgtccatgggggtagaagccacccctcgatcctcctgctccaaactggaagggcccatggactgaggtgtttggtctacaacagcctctcggcggcgagcaatccacacatcaactgtatgcttccaacctctgga

SEQ ID NO: 48072 - DNA, 401 bp, Setaria italica
  Peptide Sequence Number=SeqID_114046
tacaaaaataaaatatggcacatttatgccaacgcaaggatgtcatatcaagctcagacacttgacacataaatccttccatagtaaaatcacattctgttcagtggacgtaaaaaaaaaggccaatctgaaaaaatgaaacaagaactcacatctttgatgctttcatttctgtaattgataacacgatcaactcctaaggaggccagaagttcagccttactttcacctccgcatgtggctacaaccttgttgcctgctagtttcgccagctgaacggcgaattgtcctgttccaccggcagctgcagtaactaaaacaacttgcccagatgtcatttggcctgcctaaagccagcaaaaatcaaccgaatcagtccaggatggaaaacagatattccg

SEQ ID NO: 48073 - DNA, 484 bp, Setaria italica
  Peptide Sequence Number=SeqID_114047
tttagtttttttttttttttttttgtttgtaaacatctttccattccagaatccttcatcatttcctcgtggatgcttacaatgatcccagaatctggcagagacaccatttgatcctagacaagttttacacattgtgtggaagtggaacgatatcacacggttgcagagatcaccttttccaataggatcctaatctctgggattataaacttatctaatttccatgtccatgtttgccctttagcaaagtcgtacatcttataaactatgcacaaaactgcgctatacaccaacatatgcaaattattcagttcttacccctggggaaatgcagtgtgttaagtcacaggcagggaacaaagaacaagaagggactcagggctgtacgtgtacctataacagcctagcctactttgcgaaccgtggaacgaacaaattgaacgtcaattagtaccaataaggttaataagacttaagacaa

SEQ ID NO: 48074 - DNA, 394 bp, Setaria italica
  Peptide Sequence Number=SeqID_114048
cttggatcattctaagaatctggcagagacaccattttatccaagacaagttttacacacaaggtggaattggaacaatagcccacggttgcacagatcaccttgtgccaataggatcctaatctctctgggattataaacagatctctgtggatgacaatacacgtcattgtccataggttatagcttagaaacaacctatggacaatgacaatacacgtcattgtccataggttatagcttagaaacaacctgactgtatgatggatcgatgcacacaacgaccttgccaacactcttgccagaatgaagatattctactgcatctggcaccgaagcaacacccaggaacatcttggggtctagggaaaccttcagctttcgagaggcatac

SEQ ID NO: 48075 - DNA, 363 bp, Setaria italica
  Peptide Sequence Number=SeqID_114049
taactaagtaaggaataagaacaaataacaacgtacaattagtaccaataaggttaatagcttagaaacaacctgactgtatgatggatcgatgcacacaacgaccttgccaacactcttgccagaatgaagatattctactgcatctggcaccgaagcaacacccaggaacatcttggggtctagggaaaccttcagctttcgagaggcatacaggtcaaaaactttgtcaagatgatcttgccacagatgagcatactgaacaaggaaaaatccagccacagtttgacttttagctagaattttctcacataatccagtgtaattctttggcttccaccatcctctccttgatactgggag

SEQ ID NO: 48076 - DNA, 362 bp, Setaria italica
  Peptide Sequence Number=SeqID_114050
tactaccttagaaataaactaagggaagaatacaataaccaaattaacaaatgaagatgcccatggactgcaagtgcattcaagcacaagtcgaacatttccccacctacagattcatatatgatatctacacctcttggaaactctttcttcagaacatatttgatgctttcatttctgtaattgataacacgatcaactcctaaggaagccagaagttcagccttactttcacctccacatgtggcaataaccttgttgcctgctagtttcgccagctgaacggcaaattgtcctgttccaccagcagctgcagtaactaatacaactttcccagatgtcatttggcccgccttttcaag

SEQ ID NO: 48077 - DNA, 375 bp, Setaria italica
  Peptide Sequence Number=SeqID_114051
tcaacatttgagtagctcatgtgaaacagactgaaagaaacaacgtataattgatcagggaagatatggcaaaaaaaactgatatctgataatagaaataataatgttgttacgtgcaaatcgagagttgtgagacttggaagctgtttgtcaattcttctgaaaacatggtaatacaaatcccatgcctaaagagcataatagtcatcctcagacacatcgttaacagaagtcaatacacaagttaccaaaaatgacagtctttatctactttgttagctcagcatcctcacctgtttcccgatatttcaaacaacattcatgagcttccagtaattcatgtccataagcctgaattagagcatataatttcat

SEQ ID NO: 48078 - DNA, 420 bp, Setaria italica
  Peptide Sequence Number=SeqID_114052
aggactacttaccgaaatagttaggttacgggaccttgaatttgcctcgatcacgttcagcttagcaggagtgtgtccttcttcgcattccgggctgagctcgtacgttctgttggcaaggttagctctttttcagggaatttttctcgattcattgaagcctcaaagcaatctccaaagtcaatgtgtaatatttttccactgaaataaaagaacacccttataacaaaaaataactgtatcatagatacggttaattgaagaatagctctgtagatgtaccatgctcataatagccaggcttctagtgtagtttgtacgccgctcaagccatacttcaaaagttcggcttttcaaccacagaaccttcgcaaggtcatttccttcagtatttgcaaagcatgctgaaatacttccacc

SEQ ID NO: 48079 - DNA, 135 bp, Setaria italica
  Peptide Sequence Number=SeqID_114053
gaatgagcgcattaaaggaacaaaacggtagtctctgtcttcgttgggaggaagaaccaactctctgacagcaagtagggcttgccacaccgttttgttcctttaatgcgctcattccacatattgcgaataagt

SEQ ID NO: 48080 - DNA, 234 bp, Setaria italica
  Peptide Sequence Number=SeqID_114054
cctatcccctgtgtgccttgcctccctgttgcgtgtctcagcagcaatcgggctttccaccggaagggtgcagtaatcaatcacctcttccagttctgaaagctgttgaacccgcaccatattattataagcacgctcataactctcaagtaccagtgctgcaagttctgtagccaaacaccgccgagctcgctcaacaaatatccgagcttcatcatacttcttggaacgaac

SEQ ID NO: 48081 - DNA, 434 bp, Setaria italica
  Peptide Sequence Number=SeqID_114055
aagcccaatgctcactgccatattgggtcgagctaccagctcccgacgctgacccagaagagaagtcgcgccctgttagcttgtgactcatccgtgccatcacggctacagcacgctcattcaaaacctcattggcatcaccaagttggttgacagcctgtagaagttccctttcacgtgctcccgctgaggttgcacgagttcccggttggcaggtgcttcttcgctactgacgactgtttgagcatgagcattaccatagttggacacttgaggaacttcattgaaattgaacagacgccaattgattaatgggtcatgtacaaatgcctccatcatggccatgacgctgtgtctagtttagttacgaaaggaacaatagacaatacaacaattttacgacaaagttagttacggaaatagtaaccctacga

SEQ ID NO: 48082 - DNA, 479 bp, Setaria italica
  misc_feature (5)..(5): n is a, c, g, or t
  Peptide Sequence Number=SeqID_114056
ttttntaggtaattttttcttcgtatttctatttgtaagtccttctaaagtctaattcttcctaaagttctaattgttgttaattattttttcctacttattagtcgtattcttaactattgtagtatttgtctttggattgtcgatctcccaaaccaagcaaatacccaaccatgctcataacagccaggcttctagtgtagtttgtacgccgctcaagccatacttcagaagttcgacttttcaaccacaggaccttcgcaaggtcatttccttcagtattttgcaaagcatgctgaaatacttccacctttgcaatgaggggtaagtgatcataatcgggtgcaaaaagccaacataagcctgtgctcctgatttaagaaaatcttcctggcatctctgtactcacggatcagagcatgaagcgtatcgcaatttggaacccatcccaaattaaaccactgttaggcgacaaaggt

SEQ ID NO: 48083 - DNA, 338 bp, Setaria italica
  Peptide Sequence Number=SeqID_114057
aaaccaagacaaaataacccaaaccaatagactacaataaacaagaccaaggcttctagtgtagtttgtacgccgctcaagccatacttcagaagttcgacttttcaaccacaggaccttcgcaaggtcatttccttcagtattttgcaaagcatgctgaaatacttccacctttgcaatgaggggtaagtgatcataatcgggtgcaaaagccaacataagcctgtgctcctgatttaagaaaatcttcctggcatctctgtactcacggatcagagcatgaagcgtatcgcaatttggaacccatccaattaaaccactgttaggcgacaaaaggt

SEQ ID NO: 48084 - DNA, 367 bp, Setaria italica
  Peptide Sequence Number=SeqID_114058
cacctcggtccgtggcatgaatatgattgacatatcaagcttgctcttgacattatcaccaataggtttgtagtatgatggccatccagtaccactgtcaaacttggtcgatgatctgaaacaacagcaacgccgcagtatctttcagcacagaaacaagtatctttcacttttcaaatgaagaaatatgaagctgtgttcccttcgctgttcaatgtggattgcttactcaaacagaggagtgtcacagcagacacagtgataaatgcctggtgttttagtgttccagtattccccagtgaatgctctctccgtgcccttctgccgagtgacgtaatactgctctttagtcagccgcttcttccac

SEQ ID NO: 48085 - DNA, 506 bp, Setaria italica
  Peptide Sequence Number=SeqID_114059
aaacaaaacttaaaaacaaaaagggaaaaacaaaaagaaactaaagaaacaaaaactaagtaacaaaacttaaaagaaagaacaattagactcaagcagagtccagaaatgtggagctcacaaaggaacttcaagctgtccgtggccaacttgctgctgagcagtcaagatgtttcaaacttgaggtcgatgttgcggaactacgacagaagcttcaaagtatggacgcattggaaaaggaggttgagctgcttcgacgacagagagccgcgtcagagcaagcagcgctggacgcaaagcagcggcaaagttctggcggcatgtggggttggctcgttggaacccctcctgatgataaatctgaatcgtgatgggcagtacttcagttcatacaggccgtgattcatatattatacttgtaacatttatataccgttgatattcttttacagtttttatcctcgtttctgggtattcgtgttcattttgattcacagaagaataag

SEQ ID NO: 48086 - DNA, 145 bp, Setaria italica
  Peptide Sequence Number=SeqID_114060
ttctttccttactagttgtctaacaactgaccatgtcagagttgacatgttaagaacgagttccccttgccagtgagggcatgactctagtgcatagcagttacaatggatatgattatctcatctcatttggaggatacaatgg

SEQ ID NO: 48087 - DNA, 202 bp, Setaria italica
  Peptide Sequence Number=SeqID_114061
cgcaagcagtacgaggtggtccaccttgtcttggtacttgtcgtacaggatcggcaccgtgtggagcatcaagacagcaatgtatatcaaggtgaggaagtcacagcagctgccaactgaagaagtttctgggtgtgattgtggggctttggattctctcttcagtcacagcagctgccaactgaagagagaatccaaagcc

SEQ ID NO: 48088 - DNA, 264 bp, Setaria italica
  misc_feature (22)..(22): n is a, c, g, or t
  Peptide Sequence Number=SeqID_114062
agttctcttttagttttttttnttttttttttttgtctataaaagtttacaaaaaaattaaatagatgaataatactagatttcaaaggtacatcgaaaatccagtttaaaacacaaataccgatcactaactctaaagtgataacgatgatgagaggaagacatcacatcaagcccaccagtatgacatcatagagaagcggggcctcttttctactgctcggtgttagcactatcaaggccttggccctccggaccttgggc

SEQ ID NO: 48089 - DNA, 322 bp, Setaria italica
  Peptide Sequence Number=SeqID_114063
taaaggtacctttaggtccccccttcccgggtaaccctttgggctggggtcttctggctgcttgtgctaggactcctcctgcacctgctcctctgcagttcctgcttgttgcgtgtggctgtgctgcagcgccggggaggagcaccagcacaccaagagaactccacaaccacaacgctgctccttaggcggcggggttgatgcagcttggtgaagaggtagaagacagcagctcagcacggtcgtggttgcagctcctggttggggcatatcgtcgaacaagttgcaggcgtgctagtgggggtggacgaggagccatgtg

SEQ ID NO: 48090 - DNA, 434 bp, Setaria italica
  Peptide Sequence Number=SeqID_114064
tgtgaagaccatatggtcatatgagcgcttcttctgcaacgacgtgtctgttgcaataccatggaacgcctcacctgcaaagagttccatttctctggcttgcaacatcccttcttcgcggcaagagcgcattctttgcggagtcggtgccaaggggaacagcgacatggcctgaagagcagctaccatccaattcagtgacaccatcatctaccttgcgtaaatctcagtacaagttcttgaagacttcttgccagagtgcggcctctcatgcttggggtcaggtcatagtcactgcaggttgggatggccacatcaggtcattccagaattatggtttgcctgtgcaagtgtgacacggtacaaggcatgcatcttttcactattgcttgatccgtggatatcccagggacggcagctgagaagtccattgc

SEQ ID NO: 48091 - DNA, 476 bp, Setaria italica
  Peptide Sequence Number=SeqID_114065
aacataaatgtgtgcaaacttgtggaataagttagcttttaacttgtttttgacactctggccaagaacgacaatgcttatgccactgtaagatatgagagcaaaacaaatggcatagtatatcgtctggcaccactaaacacaacaccactgccttccaatgcacaacttccttacaggatggtacaacaagagttggttttcttcgcctgcttgtagaacatctgcatacaagccaagcaagtgtcagcatagcatatcataaacaagccgccaattggttagtcagcataggcagccgtaggcctaatgtcgctggacactgctactagtaccttgtttcagaaagttctctaaacaaagtaaggattgttactgttaatgccctaggaagtgtcaacattattatctttcatattcatctattccaagccaagtcaagccaatcaagttactataaatgccctaagaagtcc

SEQ ID NO: 48092 - DNA, 411 bp, Setaria italica
  Peptide Sequence Number=SeqID_114066
cccccaatctcggacagtttgtggcatctcttgcttgatgaacatggaactccttgtatttggctattgcaggtcatcgttgaaaggttttcaaggagtaatttaccacaaatggagaagaggaagttagttgctactctctttgtgcccattacattgctagagatggatggggtgtttgattgtcaatgatcccatgccgtgccatgattgatgtcttacagtaatatcattgatcattcatttcaaagattcaaatgcagtaagacaactttatttatggtgcaggtacctggttccctgtgacatgcccgttgggcagttcattttcatactacggtccaggttacacctatctccaggaacagcgctatttgtgtttgtaaacaacacaattaaccccaaacaaga

SEQ ID NO: 48093 - DNA, 222 bp, Setaria italica
  Peptide Sequence Number=SeqID_114067
gagggtccaggaatccgccgccatgatcgccaactaccccgccaggatccccgtcatcgttgaaaggtttcaaggagtaatttaccacaaatggagaagaggaagtacctggttccctgtgacatgcccgttgggcagttcattttcatactacggtccaggttacacctatctccaggaccgtagtatgaaaatgaactgcccaacgggcatgtcacaggg

SEQ ID NO: 48094 - DNA, 180 bp, Setaria italica
  Peptide Sequence Number=SeqID_114068
ccaaaacaagaaaatagcaacttcacctgaacattccccatcgttcttttcacacttttcagcttcctgggtctattcgaaaatactcacattaggtgtctctgtttatgaacgagaccgcaggtaagttgtgataactgctaaaattatggatcaactcaaactctcttcagatgcatg

SEQ ID NO: 48095 - DNA, 147 bp, Setaria italica
  Peptide Sequence Number=SeqID_114069
cgacagcatcatccaattcacaaattttactttccgccgtgcaagaatcatacttaactaccaccacaaatggcatgtgcaggacctcatcgccggcggaacagagagctctgcggtcaccgtcgagtgggccatctcagaagacta

SEQ ID NO: 48096 - DNA, 317 bp, Setaria italica
  misc_feature (61)..(61): n is a, c, g, or t
  misc_feature (157)..(157): n is a, c, g, or t
  Peptide Sequence Number=SeqID_114070
ccaaggctcttaatgaatgccttattccacggatcccttgccaaggagcatccatcactcngtaagcactgcttcctctcctcctatcttcatccctcagtagtccataacgagatgacatgttaataatcctcccatgggatgaagataggagganggaagcagtgcttatagagtgtccaaggctcttatgaatgcttattccaggatccttgccaaggagcatccatcactctgtatcaattgtgtgcatcctggctatgtccagacggacatgaaccgttctaaattcttacttacttctactaacttagtaa

SEQ ID NO: 48097 - DNA, 310 bp, Setaria italica
  misc_feature (292)..(292): n is a, c, g, or t
  Peptide Sequence Number=SeqID_114071
ttagttgtagtacttggttgtaacttagtattaaagtcctattaaactttctttgtattgtctttgtcttgtctattattgttcttccccaaaggatgcatcgctgtggaagaaactcattcccttggccaagaaaaaagaagatgcctctctggcaagacactgcattttaaaagcaatgagagcagatccagaagatgtagatctgaagtatctttgcggtgatatgtatcgcaaccttcgtgactatcagaaagctgcagagatatatgagcagatagttagaatttancctgccaatgttgccgtt

SEQ ID NO: 48098 - DNA, 253 bp, Setaria italica
  Peptide Sequence Number=SeqID_114072
atagtttatgtgctatatttgacagtcctattttctttcaatattataatttatagttgactccattctatctctgattattaactttcttgattatttgtttcacttttttctttgaagatactgatatgttatttaatttcaatagacaaaaggcaaacagagcgaagaaacttatagagaaaagagcagcttcaaatgaggaattaaaacctaatgatttgcgaagaacaaagcaagttcctcctgttcc

SEQ ID NO: 48099 - DNA, 262 bp, Setaria italica
  Peptide Sequence Number=SeqID_114073
aatatattcttcggacaagagaagaaaagcctgactgtgttcccctataatcatatccgggcatcgattcactgctataagtcagcatcagtcagctgcccgggattacctggaagcttataagttggacccagaaaaccctcttattaatctctgtgtaggcactgccctgattagtttagctcttggcttcaggcttcagaattaagtaacctagttgtctattcgttccttaagtctttttgtcgtttccttattatta

SEQ ID NO: 48100 - DNA, 370 bp, Setaria italica
  misc_feature (339)..(339): n is a, c, g, or t
  Peptide Sequence Number=SeqID_114074
agctgccttcaggacagggtcaggtttcagcttctactttccttgccacagaggaagataattttcacaaactcttgccgcatgggccttgtcagagtttgtgaaaattatcttcctctgtggcaaggaaagtaattttcacaaactctgacaaggcccatgcggcaagagtcctggagaagctcgggctagaggactgcttcgaaggaatcatctgcttcgagaccctgaacccgtcaacccaacaagatgccaatgaccagaaccagaagaatgcaggtgaagctgacactgatggtggcagcagagctggctctgacggcctccatggactccagngacggcttgcacaggattcccctgcgaggag

SEQ ID NO: 48101 - DNA, 263 bp, Setaria italica
  misc_feature (197)..(263): n is a, c, g, or t
  Peptide Sequence Number=SeqID_114075
gtagtacatatgttatatgtatcctgtgctgtgcgaaatgtgctggaacgcaatgtgcctgatcagtgatcaagcatggtgatataacaaccaatatgtggaactaataagtttggataatgtacttctatgtggaattcctgtgcttttttatgatggcacaacccgttgcgaaaatgaatttgttgtgctaaatnnnnnnnnnnnnnnnnnnnnnnnnnnnnnnnnnnnnnnnnnnnnnnnnnnnnnnnnnnnnnnnnnnn

SEQ ID NO: 48102 - DNA, 383 bp, Setaria italica
  Peptide Sequence Number=SeqID_114076
gtagaaatacgcactaccttcttttcaaacaggttttagaagttgcatttccactgtcagcattccaggtcgagtttatgtgatatgaaattggtgaacagaattccgatcagcacaagtatcactgcgcgtggacgagaggcatatatatgcaaccttcaggcttcagctacaatttggcatgccattatttcaaattctattatacgggttacattcagaatcattactgaaaatcactgcgtggcaatgacgggcagatgaaaggcagctgcaattgggcatttctcttgttgcatcaacaatctcctgaatgccctttccttttgatttacattttggagggttgcttacataccatcaggacaagctggtattggtat

SEQ ID NO: 48103 - DNA, 329 bp, Setaria italica
  Peptide Sequence Number=SeqID_114077
ggacgcggtactccacgtgcagccttaccacggatcgctcgcctttactaatcccgcgaccgactataatgatgtcactgcctctgttgttatgacagctagggagtgttgtattgttgcccaagagcatctcctccggcgaccatctgaactccaggagtcgcatggataagtgctgggtttgatggcgctactgaccaagatgcaggatttactgatataaacccaatcacaaagtcaggatgttgctcagcaatctttacagctgcagcagtgtaagctccctgagcaaggtttgtccggtccgtaacttctattttctagtcgta

SEQ ID NO: 48104 - DNA, 160 bp, Setaria italica
  Peptide Sequence Number=SeqID_114078
gcagaagtagtgctcttcctttaggcaaacccttagcttcaagccatctacaattccaggtccaggtactatatgtacagtaaccatgcaatacgaaggaggaatattccgcatattggactgggctgatattgttaatgcacatatagtacctggacct

SEQ ID NO: 48105 - DNA, 192 bp, Setaria italica
  Peptide Sequence Number=SeqID_114079
atttgtcgagcacttgagtcagctctgagtgtgaagcaacttgcagaataggaatgacatcttccactagagtcttgtctacaaagttaagaagccgccgctggaacagcgaaatgagctcggggatcttgaatttgaagaatagccgtggatacacagcactccacttggctgctatgaggagagaaccag

SEQ ID NO: 48106 - DNA, 342 bp, Setaria italica
  Peptide Sequence Number=SeqID_114080
cagctccggtaatggcaccagcaaaagcaccaataagtgcattctctggatcattcaactccctctttgcctggataaattgtgaaaataaatatataaatatggtaagcacaaagacttctcaaaagctttagttggagtttatgttaggcaattgtttacagcaactgctgcttagtgaagacgacataatatgaatgaccaatcaagttattcagtcctaaaaagatgtgaacagatgttgatggaaatacaggagcagacaaccttgcatctagatggcatactaacatgtggcaaaagaaatacggtaagtgcgaagaattgttgaaagttcacgtt

SEQ ID NO: 48107 - DNA, 264 bp, Setaria italica
  Peptide Sequence Number=SeqID_114081
tttttgtatgtctagttacacagaagaagattcaacggcaaaaaggagatgagatgcaacataaatcaatctagcgatcttcactcattcatccttgagggtccctacctcgcggttcctcctctcagctagcatcgacttggttttctccagcacaccaaagaagatggacccaccgatgccgatccacagcactcgtggctctaattgtacccttttaaaaattgtcctatttggttcctttccttcttcttgtaggtattt

SEQ ID NO: 48108 - DNA, 302 bp, Setaria italica
  Peptide Sequence Number=SeqID_114082
cagtgcctcttttagcatcttggtttcttcttccattgttaatagaggcactgacaaagcgaaacagtgagctgcaggcatcaagaagcatgtatgctaaaacagcaggcaagctccgaagcttggaggttcaaatgttgactggaaaccaacataagagtccatcaactccaaacatggatattcactttgatggtgcactgagccaaaatggaaagcaacccacctagcatgacttcaatgtctgaagatggtgttgatgatgaaggaagttgcacggaatcttgggccaatgctctagt

SEQ ID NO: 48109 - DNA, 254 bp, Setaria italica
  misc_feature (36)..(36): n is a, c, g, or t
  Peptide Sequence Number=SeqID_114083
caacctgcttgaccgcaagctgagtattattgcagnacccaaggcatcacctgagagaatacacaagcaggcttgccccactagctctacagaaattcatggtctccaccatccccaacaattggcggagaaacaaagccggggatttagtcggttcttcacaaagggcaaagagtgaaaaattctcctggctgccgcatcaggtttgttaattattggcgccaaatgggtggggatggtggagaccatgaatt

SEQ ID NO: 48110 - DNA, 140 bp, Setaria italica
  Peptide Sequence Number=SeqID_114084
tatcatttgacagaactttgtcaactaatgcagagaagtgttgtgtcaaatgataatggcctaaatgaccttgtcatggcactatccgtgatcttgtcagaaactggtcagattacggatagtgccatgacaaggtcatt

SEQ ID NO: 48111 - DNA, 362 bp, Setaria italica
  misc_feature (174)..(174): n is a, c, g, or t
  Peptide Sequence Number=SeqID_114085
agaggcatattgaggaaggtactactacaaagaaggcgaaggagggtgactactcggaattcagcagccagatttcggatgtgtaagcagctgcagttagctggcatgtgtcttcagagctgacacctgtgaagtgagaggtgtgctttacaatcttaggtctcttatgtgtanctttttggaacaaattgcgttacttgcgacttgcaggtgcagttcagccttgcttagtatggtaaccgtaatggtagatgatgaagcaatttacctgactctgtcatttgcaaggctatttttttcagctcaaaacacagttcaattgcagggtttgcaacctgcgctatacaaaatagccttgcaaa

SEQ ID NO: 48112 - DNA, 272 bp, Setaria italica
  Peptide Sequence Number=SeqID_114086
gctttccaacaaacgagccctttgcattcccaggacttcgcagtgacatcgaagccctcgagaaaggcttgtttgggagccttggtagtgtcctaaatgaagctgagcggatgaccaatgatttcttcaaatcttttggttttccctctacccacgacagggaatcaagcccatttccaagacaacctgcagagaggcatattgaggaaggtactactacaaagagacctaagattgtaaagcacacctctcacttcacaggtgtcagctct

SEQ ID NO: 48113 - DNA, 444 bp, Setaria italica
  Peptide Sequence Number=SeqID_114087
cggcggagaggatggcccggctttcgatcgccaccggcgccgccaccacgtgcggcaagtgcgacggtggcgccccgaccgtcgcggcgtccgggggcgctggcatgtgtcgggagtgcttccgggcccacctgttcgggaagttcaagctcgccgtcaccagcaacgccatggtgcgccctaccgacgccgtcctcctcgccttctccggcggccccgcctccagggtggccctgcaattcatacacgcgatgcagtccaaggcgatccagagctgggagacgagcaactcgcaggccctgccggccttcggcgttggcgtggcgttgtcgacgagagtgtcgttttggcgagaccggagcatgaaactcagacggcgactgaagatatcaaatcaatcgtgtcgagtttgtcacccggcgataagcaagtgcacgttgcccc

SEQ ID NO: 48114 - DNA, 232 bp, Setaria italica
  Peptide Sequence Number=SeqID_114088
taacgtacgtaattagtactaagttacctaaaggtacgtaattacctaaggtagtcttgggtagtacgtagcaacttcgcaggccctgccggccttcggcgttggcgtggcgtttgtcgacgagagtgtcgttttggcgagaccggagcatgaaactcagacggcgactgaagatatcaaatcaatcgtgtcgagtttgtcacccggcgataagcaagtgcacgttgcccct

SEQ ID NO: 48115 - DNA, 265 bp, Setaria italica
  Peptide Sequence Number=SeqID_114089
acaccggcgggttaggagaccacctgataactgttggttgtggtgtgcacagtattgtgatgaatactatactgagccacaaaatgcattcacgaatctcaaaggagtggactttgaacttcaagctgatttcacctaagccttcaatctcaagaccagaatcttcaatatccataagttcctttctaagcccctctttcccgtctgtggcggctatccccctcctcccatcttcctcctcacccttctagggtttatcctctac

SEQ ID NO: 48116 - DNA, 246 bp, Setaria italica
  Peptide Sequence Number=SeqID_114090
atactatactgagccacaaaatgcattcacgaatctcaaaggagtggactttgaacttcaagctgatttcacctaagccttcaatctcaagaccagaatcttcaatatccataagttcctttctaagcccctcatctgtacaccctagggcatatgcgttcactccagcactgacaaactcttctaggttccgccagcttccggccgctgcccctcgggaggttgaattgcctgccacttctgatg

SEQ ID NO: 48117 - DNA, 175 bp, Setaria italica
  Peptide Sequence Number=SeqID_114091
cctttgagattcgtgaatgcattttgtggctcagtatagtattcatcacaatactgtgcacaccacaaccaacagttatcaggtggactaactacctctagtgtgctgaaaaactaactgcatccggctagcaactagtgacggttcctctgaatttcctctgagacacgacaaa

SEQ ID NO: 48118 - DNA, 166 bp, Setaria italica
  Peptide Sequence Number=SeqID_114092
aatatccataagttcctttctaagcccctcatctgtacaccctagggcatatgcgttcactccagcactgacaaactcctgataacaatgacagtcacagtaattactaattgctgcatataaaagttatgtaagggaagatttcaacaagaatcaatacttctag

SEQ ID NO: 48119 - DNA, 243 bp, Setaria italica
  Peptide Sequence Number=SeqID_114093
tgaattgtaaactgcactgcatcctaatttactatgcaaaatagaagcaccctttccagacagttttaggtcccagcaagaaccgggcctcacaaaaggaacagttgcttgtagcatcagcatgactaagtgctcatcagactccaagcgatcagcatcagaagtggcaggcaattcaacctcccgaggaggtggagagaatcttcaatatccataagttcctttctaagcccctcatctgta

SEQ ID NO: 48120 - DNA, 215 bp, Setaria italica
  Peptide Sequence Number=SeqID_114094
caaaatgcattcacgaatctcaaaggagtggactttgaacttcaagctgatttcacctaagccttcaatctcaagaccagaatcttcaatatccataagttcctttctaagcccctcatctgtacaccctaagccttcaatctcaagaccagaatcttcaatatccataagttcctttctaagcccctcatctgtacaccctagggcatatgcgt

SEQ ID NO: 48121 - DNA, 168 bp, Setaria italica
  Peptide Sequence Number=SeqID_114095
ccgtcatgcacgagatcgggcttcgtttccggctctcccatcttcttctctctttctcctgtttcttgcaacaggaaccgtgactgctcctgtttccgttcgtgcgcacgccgctgtgcgccatccaccggccgtgcgcctggctcctagcccggccaccgccgcctg

SEQ ID NO: 48122 - DNA, 240 bp, Setaria italica
  Peptide Sequence Number=SeqID_114096
aagcacaacaaatggagttgaggaaaatggcaaggatcatgaagtagcagacagtgagagttattcaggtagtggcagcattgatgggcgggaagatgaggaggatatattatcggaggataaatcctcctcatcttcccgcccatcaatgctgcaactacctgagaactctggactccagtatcaagcgaaatacaacagttataaaaaagctgaagacaataaatgatgaacagaagg

SEQ ID NO: 48123 - DNA, 235 bp, Setaria italica
  Peptide Sequence Number=SeqID_114097
gatgactgaaatacatctaggcaaagccttcaaacaagctaaaacaaagaagctggaggagccatcttgaacttgcacaactccccaataaaccttatgttttttatttttgttttcaatgttgatttgatccttcttatttattaaaaagttgaactcttcttcaaacatagacagtagcatacttggaacatctttcatacaagtcgatagttgttgcaaccaaacgagaata

SEQ ID NO: 48124 - DNA, 261 bp, Setaria italica
  misc_feature (205)..(205): n is a, c, g, or t
  Peptide Sequence Number=SeqID_114098
taacaagtagtactacaaaataacaaactgatgaatctatatgcttgtagctggttatggaactcctgaacaagatgtgttggatccaccggaagactgcttcaggatcaggttgatcattacacttttacagacctgtggtcactacttcagtaagggatcttcaaaaaggagctcgacaaattcttgctacactttcaaaagntacattatgagtaaaggccccttacgcttgacatagagtttgacattcaggattta

SEQ ID NO: 48125 - DNA, 206 bp, Setaria italica
  Peptide Sequence Number=SeqID_114099
aaactacaattcgcatggctaacatgctggagatagtaagaggcttggatggtgcaagaggttatccaaacttgcaccatccaagcctcttactttctcgagacatgtgggcgttttttgtatcgctctcctgaaactacaattcgcatggctaacatgctggagatactgatgagattgaaaaatgtcaagaatttggatccacg

SEQ ID NO: 48126 - DNA, 241 bp, Setaria italica
  Peptide Sequence Number=SeqID_114100
ccagctctgccgcgacggcgtcatggctgcggtaggttgatcttggctcgcgccttagcgcgccacacacgaggacgagaacggccgcgatgagcaagaagccgaacgcacagccaatcacaatgcctgcgatggcgccaccggcgaggtggtgcctgcctcgtccgcggttgtctggcgaggccgccggtgcttcgggcgcgagcgcgggaggccgcgtcggtgattccggcgtacttgg

SEQ ID NO: 48127 - DNA, 201 bp, Setaria italica
  Peptide Sequence Number=SeqID_114101
tggtcttgtcggttaggtttgtattctttggtcttcgtcgtcctttagcgcgccacacacgaggacgagaacggccgcgatgagcaagaagccgaacgcacagccaatcacaatgcctgcgatggcgccaccggcgaggtggtgcctgcctcgtccgcggttgtctggcgaggccgccggtgcttcgggcgcgagcgcggg

SEQ ID NO: 48128 - DNA, 346 bp, Setaria italica
  Peptide Sequence Number=SeqID_114102
taatttaacaagacttcagtcattctttgtgtgctcagcattctcattgttatttgccaatgcagcagcgccacgctgaaccatttgcaattggatttgcaacatctgtgaagaagaggtataacttatgagttctgttggatacagattcataatatcaaacgaaagaaagctcttaagcatgtcactgaaaaatatggtgaaagcaataccaattatcgttcatgcatgaatgcaacaacaggctggtaacatctagcagctaagtgctaattaccagagaagcatttgcatcttgagaaaaattgcagattacgtaacgtgtaccaagctgacgactaaactg

SEQ ID NO: 48129 - DNA, 360 bp, Setaria italica
  Peptide Sequence Number=SeqID_114103
ttcttggtcttcttttattaaagtttttctttgttgtcctttcttgtctagttgtaacttttcaagatccctggtgcttgttcctgaactaatagcaccatgtgcattaaaaagcctgaggtgctaaaccatcgttggtgttttggaactgcagttcttggtctttctgggattgattggagcaacttgcttcagattgtggtatactagatgcagactggggaggaactgacctatttagggtgtttgctggaggataagcaaaagatcttccatataaagaagctgctgctgctgccgcttcaagtctttgcttggcgcctgctcatgttctcacttgctgctccttctgaggctgga

SEQ ID NO: 48130 - DNA, 234 bp, Setaria italica
  Peptide Sequence Number=SeqID_114104
tcattcatgttggaagtgatctttctgtagcgcacataatctgctatgcgaattttgaagttgcggaaggtctcatatagctcacgaattaagtgcagtgggacaccatagttcctgataccaggataatggatcaacagccatagtttacactagagtctcagaggggtagtaccataataagagaacttacaggaagatagctatgaagaacagcatgtataatgacaagtg

SEQ ID NO: 48131 - DNA, 158 bp, Setaria italica
  Peptide Sequence Number=SeqID_114105
gcagcagcgccacgctgaaccatttgcaattggatttgcaacatctctatctggctctttataaagtttcttgtgccttctgcagtgaattttcaaagaatacccctaggtagacttagactacctagtaaacctaaattaacgtaactaaacctaaa

SEQ ID NO: 48132 - DNA, 337 bp, Setaria italica
  Peptide Sequence Number=SeqID_114106
ccattagcatgtcggtgacatagaatatatacttcacaaatgttgatactgtggatgttgccagtatcatatacctgaaacatgattttacatgttaaagctactatgagtattttgaatcttgaaataatacattaagaaataattgccaggcatttagaaattagaacaatagaatcatatcttcaggccatcttaaggttagccaatagggtacttacctgaaaggcacgccccttgctttggaagcaacaagcaaagaagaatatctatagctggagcctggagtttcatgctaaatgggcctaatattttgcagttgtcttattactttaaa

SEQ ID NO: 48133 - DNA, 258 bp, Setaria italica
  Peptide Sequence Number=SeqID_114107
ccgggtagaactgctcctggctactgaaggcatagtacaccgccgatgccatcgccagcaggctgaacgctgtgtacgtctgaagacggatcatcttcgccttcagagctggcactggcacagccccaccaccactggatctggcggggagaagtccttggcggcgccggaaggccggcggttgcgcctctcgctcggatgagaggccactagtcggggtcttccctagttattgtttgggttacgtttcgttacgtt

SEQ ID NO: 48134 - DNA, 200 bp, Setaria italica
  Peptide Sequence Number=SeqID_114108
atggggattccgtgggaaatcgcatatcttcatgatggaacaagagcacctcacatgcagtcatcgcaccatcaccatttcttgattcaactggacggatgcaccagctagagtagtacaagtccaccagctagagtagtacaagtccacgcggcgaggtttgttttgtcttggaacagagggacgaggcacaacccttg

SEQ ID NO: 48135 - DNA, 389 bp, Setaria italica
  Peptide Sequence Number=SeqID_114109
tggtaaggtaggtaattgtctaattcgggtcttccctagtccttctattcttgtatttctatttcgtcttccgagacaagtactggtgatggagcttcacccaagacaagtagtgtatctggagcttcacctgtatcagatgttgagaatgcttctgttcctccagatctcgaagatagtaacttggattcatcatctgcaatagttattgaaaatggcaagagaggtgatgaaagaatattgatgtgggataggttgcaagcatttgataacgtggatctggacttctttctaattctgtcctttaccactgttaaatgtggcaagagtcatttaaggagtcactagttcgttgtgaaagttgcatgatctatattggagagatagag

SEQ ID NO: 48136 - DNA, 248 bp, Setaria italica
  Peptide Sequence Number=SeqID_114110
tgatactatggccctgctaaacaattagtgtaaaagaatcacagatcagttggtagcggtagttctgaccagaaactgatgaagatgaactcgtgtaataaaaggatcagggtcagagttttccgagttctggctttctcattgctttgggcgtggaacgctgtttcagggcgctgtgacgcacgaggacttcgagggccaccgtggcaccatcaaggccggcgacgtgcagtggatgacggccgggc

SEQ ID NO: 48137 - DNA, 244 bp, Setaria italica
  misc_feature (26)..(26): n is a, c, g, or t
  Peptide Sequence Number=SeqID_114111
aacccaccggataaggataccatggngaaactccacgccaaagcgaagattcactgatcagtgcgtgggtcttgttccgctacatgtcattgggctctatgttggtgtggcaacagttggtgcatttgtcatcaggtacacacggatctttcctggggataaatctgggtgctgacggccatactcttgtgacctacagccagctctcaaactggggccagtgctccttctgggaggatttcaa

SEQ ID NO: 48138 - DNA, 250 bp, Setaria italica
  Peptide Sequence Number=SeqID_114112
tacaaacaactttttagtaataagaaacatgatagattcaccatagtaggcaacaaatagaaaagtatgatccaagaaggtaaatactttgcaacagcttttctctaggtccatgaaagctagctggtgctgtgacctttcttttggcgatgcatgttcagcaagtcctttaatatggatcaagtaaagcatatcattaataaccattactcgaagtggactcaatatgcttgtttcctgcaagtcaagc

SEQ ID NO: 48139 - DNA, 222 bp, Setaria italica
  Peptide Sequence Number=SeqID_114113
tatgcttcatttcttgctgtgtgtacccaggagctgaagcaagtcaactggtcaaggcccacaaatctgcacgggcctttgggctcatgtttcagggtggcaacgcttctgatatgtcgcaggtcctcatggatgcccagacttggttgcatcggctgagcttctcactcatgcgagctataaatgatttggcccatggctcttcttcacgcctcatgctca

SEQ ID NO: 48140 - DNA, 258 bp, Setaria italica
  Peptide Sequence Number=SeqID_114114
ttgttaggaactccagcaataggagcaacgaatgacaaataactgctctccaaattttggagggctttttcagctgcttgaacttgggcttcatctcttgtttttccagtgcctattccgattttttcattactaaacagaacctctacagaaaattgcatacttttgacattgcttacagtagatctgaattccaccttggaggggcattggttcggacagagatgttgcgaagcttctggctgcggaagaggcatt

SEQ ID NO: 48141 - DNA, 279 bp, Setaria italica
  Peptide Sequence Number=SeqID_114115
gattctcatcaaactctctgaaaaaatccaccacgaatattgcaagcaacatttcttgcaacacaaagaactggaacagcatttgccatctcagcttgtggggcatagtatggagcgtatgcagggactacatgaaccctgtgctgatctttatcatcccaaacattaagtcggtcatcaattaccatggccatctttggatggcattccttcggttcttcgtaaaaactatttcttgtctagttagttactttttttggttaacctttgttacttttt

SEQ ID NO: 48142 - DNA, 491 bp, Setaria italica
  Peptide Sequence Number=SeqID_114116
aacgggtaaagtggacgtccaacaattgaccatcaacaatgcttagcaaccactcgaccaacaaacttgaaataagaaaggtgctccgtttgataaacagagttaggattaggctgaaaagtcgcattgtttccaacagtggtgaagagaagagctcctttgtcaaagataactcttgagagcagctggtaccactccctagttagtcctccagcatctataccctcttctccttgaaattgtacggtcaagcgacctttgaggtcctgggtacgacgtaacctcaactgattatatgaatactccaaaacgtaagccctgcgaacactaatgcgtagaggagccgaaagatgctgatcatgttgctgtcggatgcgcgaccggaagtaagcacgcttgttgtcaaaatctaatacaagaccttaggtaactttacaaacaatacaataagaaaagtagaatttacttacaaagttaaagtactttaggta

SEQ ID NO: 48143 - DNA, 407 bp, Setaria italica
  Peptide Sequence Number=SeqID_114117
tgtcgtcttgtagttgtccttggtaggtaagttggttggggtagtactagtaggtattgaagtcacctaacttccagagtgtccaccaatggagcaggggaagtgaatgttgaattatgtacaagttttgcctctgttgcacttatacaatcacttaattcttgccacaaaggttcaagaccaacattcagatcccacaaaattgactgctcttcctgtcccatatcttgttcatgtctactatcaatcacatctgaagtcaacgtagataagacttgcagcacccgcaagatagcagctccagccatagaacaagtactgagcccaagcatttgagtgttcttcagtgttacaagctcatctactgccgaagaacttaaactctgagcaacaccagctaactcaat

SEQ ID NO: 48144 - DNA, 365 bp, Setaria italica
  Peptide Sequence Number=SeqID_114118
caacaagcgctgagtgcctggaggaaggtggtggggagacagaggatgaagcaccaacttccagagtgtccaccaatggagcaggggaagtgaatgttgaattatgtacaagttttgcctctgttgcacttatacaatcacttaattcttgccacaaaggttcaagaccaacattcagatcccacaaaattgactgctcttcctgtcccatatcttgttcatgtctactatcaatcacatctgaagtcaacgtagataagacttgcaagacaacccgacaaagaataagacaagaactaaccaaagaaccaaattaaaagtaaaaactaaaaagttaaacttaaagtaaagtaacctaaaagtaa

SEQ ID NO: 48145 - DNA, 373 bp, Setaria italica
  Peptide Sequence Number=SeqID_114119
ccctatttaatgataaagaacttgaactattgatcagtggtcttcctgaaattgacctggatgatttgaaggctaatgcggaatatatagttcaagttctttatcattaaatagggatattaggtcccttggaactaactctgtgaagccctcaaggaaagcattaatctgaggacgaattgctgtggtcagtatatgttcagctacaaggtcaacatattcttgtttagtttcctcagtgaccctgatgtttcttccacccggttttagctcataatcagtaacctcagtcttctcatagagaatatgttttttcctcgtcaggatccatgctgaatgtcaaatcaggaaggtcacttacatcattctccag

SEQ ID NO: 48146 - DNA, 357 bp, Setaria italica
  Peptide Sequence Number=SeqID_114120
aaacaaaaggaaaaagaaaaaccaaaaactaaagaaataacaaaataagttacaaagttactttaatcattaaatagggatattaggtcccttggaactaactctgtgaagccctcaaggaaagcattaatctgaggacgaattgctgtggtcagtatatgttcagctacaaggtcaacatattcttgtttagtttcctcagtgaccctgatgtttcttccacccggttttagctcataatcagtaacctcagtcttctcatagagaatatgtttttcctcgtcaggatccatgctgaatgtcaaatcagggaaggtcacttacatcattctccagcatccacttctaaattttttg

SEQ ID NO: 48147 - DNA, 244 bp, Setaria italica
  Peptide Sequence Number=SeqID_114121
tgcgtagaggagccaaagatgctgatcatgttgctgtcggatgcgcgaccggaagtaagcacgcttgttgtcaaaaatctatcagccttggtactttcaacatcatagaaagtgatttctcaagtaagcttgggttttgtcgaatgaaaacattgagtagccgtcgatgtttttctgcaacctttattaaaagttaacatttgtctagtatttcctacctagttctttctagttgttatttgtt

SEQ ID NO: 48148 - DNA, 251 bp, Setaria italica
  Peptide Sequence Number=SeqID_114122
aaagaaacaaaaaataaaggaaaagaactaaagttaaacaaataacaagacaactacttagtcgacagagctctactcctactgtacccgccccacatcctgattgactattccaagaaaatgttggatcccaacttcaccctgagcattgccaaaaggctccttggcccgatccatgtcatgtatagcatctgtgaccatctcaattgccttcaaaatctgtacatggcaagcagaaaaccatgacccag

SEQ ID NO: 48149 - DNA, 230 bp, Setaria italica
  Peptide Sequence Number=SeqID_114123
gatgtttcttccacccggttttagctcataatcagtaacctcagtcttctcatagagaatatgttttcctcgtcaggatccatgctgaatgtcaaatcaggaaggtcacttacatcattctccagcatccacttcaaatttttgtagtaatcaggatgtggggcgggtacagtaggagtagagctctgcgacaagagtgctgatgttaatttacatcctaaccttttaac

SEQ ID NO: 48150 - DNA, 260 bp, Setaria italica
  Peptide Sequence Number=SeqID_114124
ggatggaagggtggttggtgctgcgcgcggtgcggcggtggggctggccgggccgggtttgtgggtgcgtggggatgatatgatttgatttgaccaggatcgcataacgccatttgtaaaatccgccaccttcttcttcttcttcttcttggggtttgtgccgttgtgttaaggaaagaaagaaaggaaatgtacaagaagattgtctcgcagataacgaaagaatagagcaatgattatgcacgcactacaaaaaaaaa

SEQ ID NO: 48151 - DNA, 147 bp, Setaria italica
  Peptide Sequence Number=SeqID_114125
gcgtgcataaatcattgctctattcttttcgttatctgcgagacaatctttttgtgccgttgtgttaagggaaagaaagaaaggaaatgtacaagaagattgtctcgcagataacgaaagaatagagcaatgattatgcacgcactc

SEQ ID NO: 48152 - DNA, 427 bp, Setaria italica
  Peptide Sequence Number=SeqID_114126
gacgaaactaccaagtaccttccagcgtcacaaaaagtgcatcaagatgaagcataaaaaattatacaaacaataatatttcaaatggaccagcctgaaactaatcttcacgaatcactccaggttaacctacaaatggctacagctggcatcgtcctgaaagattctggaatccaattgcatacagatcatcgtattgctccaaggctccgtgatctcaaaccagcgattggttcgaatccgtctctgggaagcagatcacagcaaacgcagtttcccagtaactgaatcgatgtcagctttcctccctgcacaaggtaattattgcagcacaaatccccaattcatgaaaaagtcttgttgcattggcaaacaaaagaagaaatctaaggattccaaatccagtaacttaacttctaactaacta

SEQ ID NO: 48153 - DNA, 258 bp, Setaria italica
  Peptide Sequence Number=SeqID_114127
cggcgggatcacgtagatggaattgttgctgaccaccggccgaacgtagtggatttccgtgggcgcgccgggcgggtaggccaaggcgtagtccagcctctctttcctccatctatcgctcctccatctgtcgcgccctgcacgtgagcaagccgtaatttgtcaccactcagaaactttgcaagatagtttaaggtttgttggacatacctgacacaagccagagctaacactagctacaacatgtctacaactcga

SEQ ID NO: 48154 - DNA, 263 bp, Setaria italica
  Peptide Sequence Number=SeqID_114128
gatgaagaggaagaggaacctgaaagtgctttggaggctttagaaaggaagcgtcaaaaggaaatagaggaatggcgggaaacagcagatagctagtggggaagctcaggaaaatgccaatttcgttcctgttcgtggtgattggtactgtttctttaccttatgatagttgagtctagtaccttgataccataagtttgtggcctttgtcatggacatggcccaatctgttcaccatttcatggcctctgatatcctattta

SEQ ID NO: 48155 - DNA, 261 bp, Setaria italica
  misc_feature (224)..(224): n is a, c, g, or t
  misc_feature (251)..(251): n is a, c, g, or t
  Peptide Sequence Number=SeqID_114129
aataaatatcattatcaataatgatcttttttttcttgtttcaagagcacgttggaattaaacaaggttaattcgatttgttttcatcttagtttttgctttatgacaacatgtgtggagaataaatatcattatccactctgaaatgtttttacttgagtctaaataatctccattgaagaaatcaggcaccacaacgaagtatcctgcctcgctaactttancggctatctgtctgcatcattaaaagntccactggta

SEQ ID NO: 48156 - DNA, 257 bp, Setaria italica
  Peptide Sequence Number=SeqID_114130
ttgggtcttaagcttggctattgatacatagtatttgataacttgatgtactccactcaccaccccagcaataacctccaacagcaatggactttccttcctttttcaaagcagcaaagagtggtttggcatcttcggcagcttttaccttccacatccatcggatactcaaaccaatttattttcaactcatgataatgcagtgtattataagatattgttaaccatggattttcattatggtgagaataagatag

SEQ ID NO: 48157 - DNA, 441 bp, Setaria italica
  Peptide Sequence Number=SeqID_114131
aagatttcagtgccaaggtatgtgagcaaatcattgtcaaattagttggatgggagcctgctgatgttcaggttttagacataaaaccatgggctatgcatgctgaagttgcagagaagtacattggctgcaacaatcgtgtaatccttgttggtgatgctgctcaccgtttccctcctgctggtggttttggaatgaacaccggtgttcaggatgcgcataatctggcttggaaattgtgcttactcttgaatggtgttgcttcaccatcaataatgcaaacttatgaatcagagcgccgacctgttagacacttctcacagcttgtcagttaacatctccttgacaaagttaattaagtttgattcacatgcttgcttttttgtcaggttgctatttttaattacagggcttagtgtggagaattttaaggcggcaatt

SEQ ID NO: 48158 - DNA, 298 bp, Setaria italica
  Peptide Sequence Number=SeqID_114132
aagaggatcttggcttctgctatgaagaaggagcaatacatgctgaaaattgcggtgagaagactcagaaaggagtaaaactaaagcactcgagggcatcaagaaagtacatcccatccgcaaaggttggttcgcggctaccccacatgctagtaagagcactgcctgcttcaagtgagggtgtgttctcaacactggatctggtaagcagggataaacttgagtttgttctcatcatcgcaccactgaaagagtcatatgagatcgcccgtacaaccctcaaggtagcagatgagtt

SEQ ID NO: 48159 - DNA, 247 bp, Setaria italica
  Peptide Sequence Number=SeqID_114133
ccttagataggatttgggggtttctgttttgggcagtatctcgctgtcgacgcctcgacggcgacagcgcggcgcctccgagatgggctttcctttcagcacaaggagctggggttgacagtatgtttgaagagtatgttgcttgtcgagagggcctcatcaaagcatttgattcaggtatcactatcagtggtttgtcaattttggtttcttgtttgattggtatcactatctttgttattttaat

SEQ ID NO: 48160 - DNA, 434 bp, Setaria italica
  misc_feature (428)..(428): n is a, c, g, or t
  Peptide Sequence Number=SeqID_114134
tctccgactcagtcgcactagttgtttgagaattcatgaagcttctgtctcagcttcctgaattctcaaacaatagcaagcacgttccattacccaagctcagtgatgacaaagaaggttcatttgatgacagagacagagagcatgcgtatgaagatgccgatgaagacggtaaaacagatgattcggtattcaacaagcatctaggaagagatggcaacagattcatggactcgaaacatggcaaaggtcatgatccaaaggggcagtaccatgccatggtcagtgagaatgttctggcttctttcgaagagagatctctgaagtcagtgggaggttgatagcgctggaagcggaccggagctcctggagcacagcgtgaactcgctgagaaatggcaaggcaggcgaggagctggatccgagcancgctag

SEQ ID NO: 48161 - DNA, 339 bp, Setaria italica
  Peptide Sequence Number=SeqID_114135
caagcagtgataagcagccttagtacattaccgctgcaaacagacgacgagatctgctgctacctgaaaagtcaccgtacaatggccgacagaggctcatgcctgtggcggtggcttggcgatgacgacggggaagtcgatgacgaccaccttctcgagtgcggccatgaacgtggcggcgaacgcggcgtgcttctcgtgggccatgtaggcggtgaggtcgtcggcggaggcgaaggtgagcgagaagacgtgtgtgaagaccctagacgtacaagaacaattaacttaaccttaaggtttaacttaaagttaacttaaaacgtttaaacctttaaa

SEQ ID NO: 48162 - DNA, 257 bp, Setaria italica
  Peptide Sequence Number=SeqID_114136
actgaacgtaagcctataacacattcagactcctacacatccttgacgaaaggggggaaatggaggaggaagtgcaaaggtaactcgatcatcatagtgttaccactcgaaggatttgaccatgtccatctgggcggcaaggtcggccatgcctttgaggacgtcctccaccacgacgccctccttgaacttcaccaggcacaggtgcttcacctccccatgccgcactccgaatggctttgcagagaggtattcgg

SEQ ID NO: 48163 - DNA, 254 bp, Setaria italica
  Peptide Sequence Number=SeqID_114137
acacgtaggcggtgaggtcgtcggcggaggtcgaaggtgagggagaagacgtgggtgaagccctgcgtcagcatctcctggttcagcacgtcctgcccccactcgaaggatttgaccatgtccatctgggcggcaaggtcggccatgcctttgaggacgtcctccaccacgacgccctccttgaacttcaccaggcacaggtgcttcacctcccccatgccgcactccgaatggctttgcagagaggatcggag

SEQ ID NO: 48164 - DNA, 171 bp, Setaria italica
  Peptide Sequence Number=SeqID_114138
aggatccgtcaatccatcataaacgccgaaaagagagaaattacaagtgaattgtacaggtacctgctaccagaaagatcactgaaatttattccaataggaatcaagcaaccaatagggacttgaactgggtgattatttgccttacaggcacagctacactacatgtac

SEQ ID NO: 48165 - DNA, 250 bp, Setaria italica
  Peptide Sequence Number=SeqID_114139
tcgtcaaaggataaatcaagggaactgctgacttcatgaaatccatctttaagaaactcaaatattttcttcacctgaaaagttctatagttagtaccatttccgttgtcatattactgcttttagaaatcaatacagaacagaaaggaacctggttgggctggcgaagttgacaactatacacagacaaagcatgtgaaatgcggccacctgatttcatatatgcccaggcagtgcgagcacagatagg

SEQ ID NO: 48166 - DNA, 243 bp, Setaria italica
  Peptide Sequence Number=SeqID_114140
agtaaatctgactggcgtggtgcctcaatcacagtaactgtaccttcagcatggttacaatctgctctaccctgaagtttccccaaaaaaatgtgagtgttggggaacagccagatccatgatcataaacaaagatatagaacaaaagcaagttacctcaattgctaaagatgttaaccattgcttgggcaagtgtctggtcaaatgttcatcaacaattgcgagcgccggtgagaacaattg

SEQ ID NO: 48167 - DNA, 136 bp, Setaria italica
  Peptide Sequence Number=SeqID_114141
cattacaaagagttagtatggatgggttatggatgaggcagatttggacctaagccctgtttacctcctgctgtggatgccggtcagcaatttgaaatgccagaagctcatggaaaaggcaaccataatagtgctg

SEQ ID NO: 48168 - DNA, 256 bp, Setaria italica
  Peptide Sequence Number=SeqID_114142
ggtccgtagtattacgtttctttaagtagttgttctagtcttagtaaccttttggtctcaatcttgaatcctgaactgaaagttgtaggtatagtcaaggtgcttgcattcacaaactttgctgcagagatgtaatggccattggtgcccaaggggaaaagcaaggtgccctgttcttgcatgcaacatagaacaagcttattgaagagtgcaagagaggcattgccatagataatttcagaacaaccatctaccg

SEQ ID NO: 48169 - DNA, 460 bp, Setaria italica
  Peptide Sequence Number=SeqID_114143
acgaaaattactaaacggaactttaagaacaataagaagtttaagacgactgctttgtgacttgtgattgttgggataaacaaaactacaaaaggaagctctgcagttcgccagttcctttgttgacgatactaggaaaacgaaactacaaaacgaagactaggagcagctagattcaagtttgagacaacataatggtgaattaaaaggtggtgcaaaagctgcctctgctggaaggccttggaatcttgcatgccttgttgaaggctttgtcagcagaagtgaagcctgtgagtttgaatcgaagtggaaaaacatctcccggaaaatggcacggaaaaggactgagcatagcgtggagtcggtgttgcaacatcgacaggcagcattgagcaaagtggaaacctgtatggattgtagccacctacaaatcaaatggacactcaagttgagattagta

SEQ ID NO: 48170 - DNA, 357 bp, Setaria italica
  Peptide Sequence Number=SeqID_114144
agcatccacctgggccgtggtggtgatggtggtggtggtgcttcttaggctgcggctgccgcagaggcttgcgcatatcgaacgcgtcctccccatcggcgtagtacttagcctcgatgtcgtggatctggtacccgagggttgaggtgtagaggttgaaggcggcgcggttggatcggcggacgtggagggatacgtactcggcgccgaagacctggtccatggcggcctgcgcggcggacatgagcttggtggcgagccccagacttgacggtagggaagacggaaggaacggacgaagggaaggtagaatagttaggtaccgttaggtacttaagggtacttaccgtaagggta

SEQ ID NO: 48171 - DNA, 407 bp, Setaria italica
  misc_feature (1)..(72): n is a, c, g, or t
  misc_feature (116)..(116): n is a, c, g, or t
  Peptide Sequence Number=SeqID_114145
nnnnnnnnnnnnnnnnnnnnnnnnnnnnnnnnnnnnnnnnnnnnnnnnnnnnnnnnnnnnnnnnnnnnnnnnaggtttattaacatccaatatgatagtcaccgaaatgtcagtanatttgcatgccattctcaccgtttacagacatggtcaacagatttaaatcgaccagacatacaaacacaataatcacactacaagacctttgcgttctattagaaatagaaaactagaatcttttatcaaatggagagcgcaagatgtgggtagtcccaggggcctggcaattcctctctgtaggttcacttatctcatttgaatgtggaccccaagtaggttctccctggaacagggacttggaagttgcctgcacctcaaatatttgcactctaattacgttaaggtta

SEQ ID NO: 48172 - DNA, 265 bp, Setaria italica
  Peptide Sequence Number=SeqID_114146
ggcgtcaccggcgagtgcccgtgcccgtggtgggcgcggtgcatcggcgaggacgacggcgcctgccgccgcggcgtggagtaggacaagggccgcgccgtgtcgatctccagcgtcttcacgggctcacggtggtccatggacgcgcgaccgggggccgcgccggcggcgccgcggatggtgctccggctcgtgtcgaaggacgcgcgcgacgccatccaacgctccgcccaccgcggctgcccgtccacgtccatctcctccg

SEQ ID NO: 48173 - DNA, 284 bp, Setaria italica
  Peptide Sequence Number=SeqID_114147
ttagttttttactttttaaaccgtttttaccgtttttacgttttacttttaacgtttttctttaacgttctctacgacttcaacatcgacctcaatcagtggagcccgcaaggatgtggagggttcgctgttcgtcgtcaagaggaacttgcagccgaggttccaattcattgtcatgaacaggcgcaacactgataatctggtggaggatctattaagcgattttgaatatgaacttcagccccccatatttgttgtaccggaatgctgcacaagaagtaaat

SEQ ID NO: 48174 - DNA, 436 bp, Setaria italica
  misc_feature (1)..(1): n is a, c, g, or t
  misc_feature (198)..(198): n is a, c, g, or t
  Peptide Sequence Number=SeqID_114148
naaccttgtcagcatgcagatgcaggcataatgcaggttctttacacatgtcatttttactaactttttgtcgtttatttcttttttaccctatttctgtatgctacacataatttcttactttgcaaaggttaagtacacactaattagctattgggtccttttaatagctgcacgccataaatttgcatgcatttnttttaaaatttctgtaacattatgcattctattaattgatttcctcccatgacacagggtattggggtatgtttctaattggtgtttctctgggttactatctgtttgttgataccagtttaaaaggcaagaacaggaacactcaagtggtaaaagtctgggttcttgccgcatcattttggattttggcaatcatccttgatagctatattgagagggtttctcggcgaataggaaa

SEQ ID NO: 48175 - DNA, 244 bp, Setaria italica
  Peptide Sequence Number=SeqID_114149
agcaattcgtgagcaacctgacggggtcctccttgacggagatcgcggctctctccaccatcgtgccggtgacctgattcaaatctcttgccaattttttctgtatgcgcgcacacggagttgagatttgacttcccttttatggtgcgtaggcattggtggttctgaggaagtggagcagcggaggagggatgcagcgaaagaaaaatggtgatagagttcttcctgttcgtaaagattggat

SEQ ID NO: 48176 - DNA, 365 bp, Setaria italica
  Peptide Sequence Number=SeqID_114150
gatggaatatatacagtctttggtgttgagcgcaaagtaaatgagggctgcaaagcttgagagtctaggtctccgccagctttatccaaaggtcccaatattgacttcaaaaaggagctgaggacccttaacagagagcttcaactgcatattttggagctggcagatatttttagtggagagaccttctcagtacgctcgcagggtagaagatatttcactcatattccagaacttacaccatcttctcaattccctacggccacatcaggcaagggccacattgattacaacaatagacttagaagaaagaaccaaaaattaacaaagaacgaaccggaaaaagaacaaaagaacaaaattaa

SEQ ID NO: 48177 - DNA, 310 bp, Setaria italica
  misc_feature (262)..(310): n is a, c, g, or t
  Peptide Sequence Number=SeqID_114151
gttcactgctaatcttagatggaagccaaactaattaaacttttaagctggtgccaattggactgtttgaagacagattagtgctttatgggttagagattgtatgtaggagtttgcgtgcagagactacccagagacgggtgttgagatatttctggcttctttcggtattttgttatggtcttgtggtatgtacatattttggtggtcgatgcaaaacaataactaccagttaacggactgttggatgttgctgttaagnnnnnnnnnnnnnnnnnnnnnnnnnnnnnnnnnnnnnnnnnnnnnnnnn

SEQ ID NO: 48178 - DNA, 171 bp, Setaria italica
  Peptide Sequence Number=SeqID_114152
ccactccggtgcggcgtggggtaactggggttcgtcgccggcctgacgctgccgtccgctgcatggtggcaatggccacatcagcataccctcctcctcctccattttaccgactttacaaggactacgagcaggatccctcatccgcaccagaacctccacctccaccgc

SEQ ID NO: 48179 - DNA, 255 bp, Setaria italica
  misc_feature (93)..(93): n is a, c, g, or t
  Peptide Sequence Number=SeqID_114153
tggaatctcccttttacttatgttttacacttccatgtgcgcattgaatgggaacttaccttaatctgcgttttacagctccggtcagcagangtttcctgcaagaatcacagttttagtttatggaaatggaaaggacaagcctcctacggggctgatgtttgataaacagcagatcaaggggctctatttcaaccaaactccttccaaggatatggcgctagctgcggtgtccatgaggcccatccctctagc

SEQ ID NO: 48180 - DNA, 264 bp, Setaria italica
  Peptide Sequence Number=SeqID_114154
ggcgataatgcaggttatttttggttcggccacagttgcggaggtgcaagtgtttcatatgcgttagaacactgcccccaaaagatctcaaaggcggtgtttcttactgctacgatggtaaaggatgggcagcggcctttcgatgtgttctcggaggaagtatggaatctccctttatatgtttacacttccatgtgcgcattgaatgggaacttaccttaatctgcgttttacagctccggtcagcagatgttttcctgcaag

SEQ ID NO: 48181 - DNA, 258 bp, Setaria italica
  Peptide Sequence Number=SeqID_114155
cgtctatttcaaccaaaactccttccaaggtacactgtgtattcagttgaaaggtgtactgtattcaccccagtcataccagtacttattttcagtggacttgctaacgagtttgcacacacttaaaatgcaggatatggcgctagctgcggtgtccatgaggcccatccctctagccccaatcatggaaaagctctccctcacccctgaaaactatggcactgcccgccgctacttcatccagacgcttgacgacca

SEQ ID NO: 48182 - DNA, 407 bp, Setaria italica
  misc_feature (337)..(337): n is a, c, g, or t
  Peptide Sequence Number=SeqID_114156
aatcccaataggagcatccatagtaactccacaggcaatcaaagacgatgtgtgcgaaatattgaaatgcaaaggccactctatcctatcatcatcagcccgccacagtatctcaggtttgccaaatttgttcttcttaaactcaaacaatcttggatcgattttacaatctgtatctagtatctcgagagggtggtgcgcaccagtgcaagggacagcacagcaactttctgcaaattttcccattcatggacaaagcattcttcctttcagaaggggaaaggagctccatgtacatcttcaattgggaggcgtcattcaactcatcaggggaaanataccaaatgtgcacctctctacaacaaattaactcataattagtgttcaatcgccttgatgacatcaac

SEQ ID NO: 48183 - DNA, 249 bp, Setaria italica
  Peptide Sequence Number=SeqID_114157
ggagtggtcgatggggatggtgtatccccgctttacttggcggttgcatccaaccgggctgacatggtccgagtcctgattagggaatctcccgacggcgtgaaatcatcggcgagcttctcggggccagatgggcagactgcattgcatgctgcggtctacgtcagcagaggtgaatccctgcaacgttgggaacaaacacttgccagcaaggtctacaattatggaagaactgcccgtcaccatgga

SEQ ID NO: 48184 - DNA, 254 bp, Setaria italica
  Peptide Sequence Number=SeqID_114158
tgttgcattgtatgtatacatacagaattcttccagtgtaacaaatattgtcctctgatttcattttattatccctgaatttattgcacatttatttttaaggcatatagttccccacttgaagatcctggaatcagtgcggcagaaaagaaactcattactagtcaaagcacagcaggcgagcctgtcaaaacaattccgtggaaactaatattatcaaaccacctgtttgggcgcttatagtttctcacttc

SEQ ID NO: 48185 - DNA, 330 bp, Setaria italica
  Peptide Sequence Number=SeqID_114159
actcggacatgcaacacatgttcatgtgcaggctgatgaaaacaaacaggatgtgtttttggtattttctagaaaaatctagcatacaaatggaatgattgcgtagcgagaacgagggtaatctagcatacaaatggaatgattgcgtagcgagaacgagggtaatcttcaaatttctgaagataccatttatgagtttgtaccgctgcaaaggacaagtttgttatcacaaaaaggtataggaaccacaccgaaatgtctgatccaccactagctatcagcatgcccaaatatattactagctcagcaaggtaatgagggcaaagaaca

SEQ ID NO: 48186 - DNA, 174 bp, Setaria italica
  Peptide Sequence Number=SeqID_114160
ccatgacatgatggtgaacagattatatgagcagcttccaagggacggtgcttcttctcgcacaagttcaacgggacggtgcttcttctcgcacaagttcaacggggtttattacactcgagaagaacgggaagactcttgaactgtttcctgatcagcagaaacttcaccagg

SEQ ID NO: 48187 - DNA, 258 bp, Setaria italica
  Peptide Sequence Number=SeqID_114161
ctggatcgagtttggatacatcaaagccatgggctcattgggcctgtgcacagcagctcaatgagcccatggctttgctggatcgagtttggatacatcggctactcttatttgggcctcgcctcaactctcaggcttctttccatacattttctcccatccagacacttgtccaattagctctgtatactgttatcagaccaacgttggttggaaaaggaaaatgtacatgtggatgcaatattgtctgattagtaa

SEQ ID NO: 48188 - DNA, 252 bp, Setaria italica
  Peptide Sequence Number=SeqID_114162
aaggcttgcgtcctcattcaagaattgaatgccttaaagtccatggcttttgtggtgataggtttccaagctggtttaagccagaagacctaccaactttaataaccctggagctttccgagtgctggcacatcagttcacgaatccccttctttgctgacggaacacaagttggtttaaggggtgatgatggaacgcagcatgcagccggcagcatcagtcgcagcaatggcattgcgccgtttgcctttt

SEQ ID NO: 48189 - DNA, 296 bp, Setaria italica
  Peptide Sequence Number=SeqID_114163
ttttcggttttgggttcgttcctttccggttagtcgtactacgtccggttctagtctagtcgttgtccaccacggagtccccggcgccgcggcggtgccggccactcctcagtcaaactccagctcggaaccgtccgggaacgcccactcgtcggccgagcacaaggagaaggcggcgcccgaggccgccgacgcggaggtcgactcgtcccgcaccgtccaggagagccccgcggcgaactcgcccggcgccgcgtcggaggccgcggtggacaagccggtgatcagcgtcaaca

SEQ ID NO: 48190 - DNA, 204 bp, Setaria italica
  Peptide Sequence Number=SeqID_114164
tccatcaccagtctgttcaagaagcttgtggagctgttgtccagttctggcttgtttggctcggcgcactcgaggtcggagacttgggaggagtagagtgtggtctcgccatggagcagcgcaagggagatgcggttgctgcgccggcggccgcggccaacgggaccggggagctgatcgggtacgtcgacgtgcacgtgcgga

SEQ ID NO: 48191 - DNA, 140 bp, Setaria italica
  Peptide Sequence Number=SeqID_114165
actcgcccggcgccgcgtcggaggccgcggtggacaagccggcggacagcaggagaagccgtctcccaaggtgttctacggcagccgggccttcttctgatctctaccggaggatcgccagaagcactagccacacccaa

SEQ ID NO: 48192 - DNA, 265 bp, Setaria italica
  misc_feature (238)..(265): n is a, c, g, or t
  Peptide Sequence Number=SeqID_114166
accctgtaattggaggtgtagtaaggctgatgcagatcaataataatacgcttgaaactacagaagaaattttgcatgtttcagtccccaaagctttcaagtgggcatatagttgccggcttagttttaagctatgtactctgctttacgatctacgtgcacgaccatggatagcatggtttattggtttcctcgtttcttatcacggtaacaagttcttttactccctctgttaacnnnnnnnnnnnnnnnnnnnnnnnnnnnn

SEQ ID NO: 48193 - DNA, 424 bp, Setaria italica
  Peptide Sequence Number=SeqID_114167
ccaacattaagaagacatacaagacacccatatatgcaagagtgacaatcctgatgctgcttggtacaggcagatggaagcctgtgttactccattgccagaagtaagcaaccagggagaagtggcaggtggagccgtagagagatggccagagagggcattcatagttccccccaggattagaaggggcatgatacccggattagatgcaaagaagtttgatgaggacaagaagttgtgggagaagagaatagcatactacaagcgcaccatacccatagcagagaatagatacagaaatgtgatggacatgaacgcaaacatgggtgggtttgctgcttctttggtgaagtaccctgtgttgggttgtattgtaattgtttgttcccttgtttaatttcttgaccgggacacccttggggtc

SEQ ID NO: 48194 - DNA, 389 bp, Setaria italica
  Peptide Sequence Number=SeqID_114168
aacaaagaagttgtgggagaagagaatagcatactacaagcgcaccatacccatagcagagaatagatacagaaatgtgatggacatgaacgcaaacatgggtgggtttgctgcttctttggtgaagtaccctgtgtgggtgatgaatgttgtccctgttaattctgaccgggacacccttggggcaatatatgagcgagggttcattggcacataccaggactggtgtgaagctttctcaacgtatccaagaacctatgacctcctgcatgctgacaatttgtttagcatctaccaagacaggtacggaaattccttacttcaccctttcttttagccatgctcaagacattatttcttcctatgttcttcttgttacccttgttttg

SEQ ID NO: 48195 - DNA, 455 bp, Setaria italica
  Peptide Sequence Number=SeqID_114169
gcctttctgctgagtaacttggtgggaattcgaatggttagaggtaaaagaggatgccttggcgctgttcaaattagtacttctggttctggtgtcttatgatgattcaactgacgagtacgcttgtggtttcagttttcattttgcctgtcaggacactctaaacttcggtttacttcacagtgaaaggcgtcgttcttcccctttattttgttttctaaaattcagattattttacattttcagatattaattaatttaattttgttgtggagttaccggtgattccatcgattgcagaattggcgatgtggcctagaaccaaactgctctaactgaaggcgtagaggtaacttatccagacaaagttacagttcaaattgttaatttcttcaggattagcctacaagttttcagtcatgcgacggaggtggggaataaagtgaaaaatctag

SEQ ID NO: 48196 - DNA, 372 bp, Setaria italica
  Peptide Sequence Number=SeqID_114170
ggctaatgttgcgcttatctcaagcaaattccctgcttcttccaaagacatcacttgagggataccatgctaaagtatctgaaggcaattgatgtccaacttgggttggcaattgacagtccaaaggctaccctggcagtgaaaaggaggttagcatgtgagatggtcaagtgctggcagcaggcacacgaaagtatggcggattttacctctaattgatagctggggtgagaagcacaggctatttgtgaagtggaagtacatcgaagcaaaagctgccgcatactattatcatggtctcatccttgatgaaggcaacacggagaaaatcccaacaggatggctgtcgcagcattgcagtctgcagaggag

SEQ ID NO: 48197 - DNA, 256 bp, Setaria italica
  Peptide Sequence Number=SeqID_114171
ccggtgattccatcgattgcagaattggcgatgtggcctagaaccaaactgctctaactgaaggcgtagaggagatgggtgcttcaattctaagccaaatgatgctggtgcgatcagaagaagacctgggaacataggtgaggtggctgtgtttatacctggattgcgagttcctgagagtttggagctatctcagccgcttaagttgtattggtcctttcctaaggtcggtcttgtacttgttaacgtttttgtt

SEQ ID NO: 48198 - DNA, 293 bp, Setaria italica
  Peptide Sequence Number=SeqID_114172
tattaacttattattacatgcaagacggtaaataaaggagttttacagaagaaaggtactatgacattttttctagatgaagtaaaataacatctttgtattttatccatcaaacactagacagatgtgaaacgagagtgaattattactgggcgtccacatagatactcgaagtcaaatcttgccacaccattacagctttgaggaatctcaaatagacctcccaaacattacaggaatggtgacagaaataatgtttcctcctgtatgaggctatgtggcatgacataact

SEQ ID NO: 48199 - DNA, 495 bp, Setaria italica
  Peptide Sequence Number=SeqID_114173
ccatgtctcactttgtttgtgtttcttccaagagcacatttcagtttgttgtacttctataggcttcaggctaccagtagcatttgcattttcatgcccactaacaaaacaaggactttgaagctctgtatgctaaattcacattcccttgcacctattacctccgaccaaacagactgaaaaaagcagtaaaaacagcatgagaaaaaatataccttgtcacggatcttcatactcatagctggaatttctgatatgaaaatagtatggtagttcctggctattgctatataatctgcagctccaacctgaaaaataagtacagggttgaccaaagatttagaaatgagctagtatgttctcaagataacaaaaatagctaactataattacatgatctgagcaccttgtattgggtttataaatttatttaccgtcttgcatgtaataataagttaatagcatcataattcagttcaaagttcaagataaagg

SEQ ID NO: 48200 - DNA, 379 bp, Setaria italica
  misc_feature (323)..(323): n is a, c, g, or t
  Peptide Sequence Number=SeqID_114174
agtaccaacatgcgattgaagttaatctagcttgttttcaccggtacagagatgctttatccaatggacatacctcccaaacattacaggaatggtgacagaaataatgtttcctcctgtttggttagttatgtcatgccacatagcctcatacatgcggcaagtgtcagaagtgacaggccaaaaatagtggacctgccaacaatttagaaaagtatttattatatcatgataaacattgagaataataaatacaacatgagtaaacctgcagctgcaggggctcagaagagagatatatctaaccagtttgtgttcaaatntataaatacaatacagaccactcaaatataaagctcatgatgacagctataactta

SEQ ID NO: 48201 - DNA, 353 bp, Setaria italica
  Peptide Sequence Number=SeqID_114175
gctgcctcatccattgatgatcttttccaaggaactgaggaagctagacatacaagacggcagtgatgattgtacagctcatcgataagggtgataaaccttcttgccttgtcacggatcttcatactcatagctggaatttctgatatgaaaatagtatggtagttcctggctattgctatataatctgcagctccaactgggcgtccacatagatactcgaagtcaaatcttgccacaccattacagctttgaggaatctcaatagacctcccaaacattacaggaatggtgacagaaataatctgcagctccaactgggcgtccacatagatactcgaagtcaaatcttg

SEQ ID NO: 48202 - DNA, 245 bp, Setaria italica
  Peptide Sequence Number=SeqID_114176
aacttaagtttaagtaacttactacttactaccgaatacaagaccaactccttaattttgcatcaaaaggaaggcttgatatccagctgaaagcacttgtctgaacagacttgtcatcatcacgtctcttccatacatcatgcatatgatcatgtatttcaagcatggcctcatgaaagtgaaacctcctcctgtgcttgataacaccttcagtggccccatagaacatgtccatcaacattgtc

SEQ ID NO: 48203 - DNA, 242 bp, Setaria italica
  Peptide Sequence Number=SeqID_114177
caatggatgaggcagctagacatacaagacggcagtgatgattgtacagctcatcgataagggtgataaaccttcttgccttgtcacggatcttcatactcatagctggaatttctgatatgaaaatagtatggtagttcctggctattgctatataatctgcagctccaacctagaaaaataagtacagggttgaccaaagatttagaaatgagctagtatgttctcaagataaacaaaaa

SEQ ID NO: 48204 - DNA, 371 bp, Setaria italica
  Peptide Sequence Number=SeqID_114178
gtcctgtttcatagcttgtggtcagtcagtataaacttgcatagccttggcctgttggtctcttacgaagagactaccaaaggtctgttactcggttgttgaagtattattactcaaaagcaagcctttgtgtcccgacaagtgatgcgtaactgcctcccttagcaaccagttcggcgtgtgtccccagttcagttatcttgccctctgagcaaacagcaattcgatgtgcattctgcacagtgcttagcctgtgggcaatcaccagagaagtccttcccttcatcaaaagattgagagcttcctgcacaagccgctcacttgtcgcgtccagtgcactagtagcctcatcaagtattagaataggagca

SEQ ID NO: 48205 - DNA, 181 bp, Setaria italica
  Peptide Sequence Number=SeqID_114179
agaagggtccccggttcttcccgtttggttggtcctggtttcatagcttgtggtcagtcagtataaacttgcatagccttggcctgttggtctcttacgaagagactaccaaaggtctgcatgattttcgtaagaacaaattattcttctgtttgacaatcatctagaaagagttggacag

SEQ ID NO: 48206 - DNA, 435 bp, Setaria italica
  Peptide Sequence Number=SeqID_114180
gggggggggaggttgagtatcatataagtttatttcaatgtatgttctgagtctttttctggttgtttgccgatggccttttgccctactcaacatttcatttgaggaacatcttcgtaatgtaggcaacttaacatcagatttgttacctttttagcaggtcattccgatctcacatgatgttgtacatagttgccttcggcgccaactggagtcctccttgcctgtacattccctgaatacaggttttgatgtggagaatatggcgctggatgttgcgcgagtttatatgtggcttctctatccactcagaaaacttgccgtaagggtgaaaaacagcgcacgacaagagaaatagagaatagcatactgccaacatgggtgagccgtgagccgtggctcattccattttcttgctcttgcttcgtccacctt

SEQ ID NO: 48207 - DNA, 137 bp, Setaria italica
  Peptide Sequence Number=SeqID_114181
aacgaaaaatttggtacaatggcgggaagataattcgtctgaggagcatagtgacctactgttctatgagtcaaatcctgatgcagtcaagtacaagccattaagaggatttgaagaaaacagttggttcgcatact

SEQ ID NO: 48208 - DNA, 264 bp, Setaria italica
  misc_feature (253)..(253): n is a, c, g, or t
  Peptide Sequence Number=SeqID_114182
gtttgcaacgaaaatttggtcaatggcgggaagataattcgtctgaggagcatagtgacctactgttctatgagtatgttgaagctgtaaaattaacaggggacaatcttgtgccagcgggtcagttggtgagcgctatcagcttcctcataagggaatcatccctagagaacttggagtggttgctaggtacaaggggcaaaggaaaattgcagatcctggtttccaaaaccctcgatgggttgatggggancttttgatact

SEQ ID NO: 48209 - DNA, 128 bp, Setaria italica
  Peptide Sequence Number=SeqID_114183
caatgattatgcttctcattcatcagctgaagcttttgaacgaatgcctgctagattagagaaaacagaccgcttctcattttccttcttattacttgtaacttaagttccttattttaagttagttt

SEQ ID NO: 48210 - DNA, 246 bp, Setaria italica
  Peptide Sequence Number=SeqID_114184
acacaaagtcccgaatctgttctctgtacccacttcgctctcccggtgaggaagtcgccggcggcgccgccgtccaccgtctcagctcgccggactcccgacagcacatggcggaccgctaccgcggctacgctgctccctacgcccacgacagagttttcaggcagagttatacactgcaaagatgaatatggaaatatgtgtatgctttgatagcacatgccttgatgagatccacgaggttgg

SEQ ID NO: 48211 - DNA, 220 bp, Setaria italica
  Peptide Sequence Number=SeqID_114185
aggttggagtagtcaaccgagcgtttggtcttctaggattctcggatgggaatgtgcaggaagcatctgaattcgatctagtttttatgcatgttgccatggagaatacaagcagcaagttatggaaaacccatccttatttccagaagacgacccatagctcaaaatcacagatacatgaatacgggaagaaatagctgaaccaatgggcgcagcttcc

SEQ ID NO: 48212 - DNA, 251 bp, Setaria italica
  Peptide Sequence Number=SeqID_114186
gccggtggtggttcaagtcaactgggctacctctttggaaatgatgaggccccaaagccagcagtggcaccagctgcaccagccgcatgtgctcctcctgctgggaaaccagctcctcccaagcctgatgtgactaagcaggttgctgcaggggtcaccagccaaaccaacaactataacttggtgatcgccagcaccgtcagcatcacttcccaccgaacaggtagtccagggaagagccaccaccggga

SEQ ID NO: 48213 - DNA, 355 bp, Setaria italica
  Peptide Sequence Number=SeqID_114187
cgccgccgctactgctgcacctcgtggtggtggtggcggcggcggcggtgtttcagccaggagtagtagtccatggagcgtcctcggctggggaccagaaatctcatccatcttcatattcggcgactccatcgtcgatcccggcaacaacaacaaccggttcacggaggcgaaggccaacttcccgccgtatgggcaggacttccccggcggcgttgccaccgggaggttctccaatgggttggtaccccggggacctcttagggtatgttggcttgttaggctatactactgtttatacctatctgctactgtcggtggtgttactgcacacaagagattagtttactcctgg

SEQ ID NO: 48214 - DNA, 388 bp, Setaria italica
  Peptide Sequence Number=SeqID_114188
aggatctcacaggaaatagagatactaaatgctgaacgaagtgtttctggatcaaaaattgcttattttgacatatactacaacttacttgatcttattcagaatccagctttgtatggtaagtcttatactgtaacccaatattgatgttctgaaattataattgtagacaacgaaacttcttaccagcatgggctaaacaatgtatagctgcaaaatatgaaaactatccattcatcatatgagcatccagtagttggtattgtgtcttctttctgcaggtgttagttgaggcgttctcatacaaccatttctatactaaacaatgaggcacaatttttgtagggttcaaggacgtaagcgaaggttgctgtggtagcacagtgtt

SEQ ID NO: 48215 - DNA, 186 bp, Setaria italica
  Peptide Sequence Number=SeqID_114189
ctttgtattatgtttttatttgcaactgtttgattgcaaatttacaggtgcaatcgtgtgcacccaatgtgagggacgtggggtgaattccgttgaccattttaatggccgatttaaagctggagctttgtgctggctttgcaggtataacaaaagtagttgcctcactaagaacggtcactagat

SEQ ID NO: 48216 - DNA, 378 bp, Setaria italica
  Peptide Sequence Number=SeqID_114190
atggtacaaatgtcattcttttcatttatgctatgtggtaggttgagtaatgggtattggtgtactggctcttcttgcacctatggttgctgggcggcattttgtgacactacatcaatacccattactcaacctaccacatagcataattgtaaaaatagcattagcatttagcagattcttctttctttcataccatacatggtagatggtacaaatgtcattcttttcattttctccctcctgctcagatttgtactcgagcagtatatgttgaattttcgcgcaggaaatgtaatgtgcagaaaagaacattaccattctttgaatctttgttatactgaagaagttgtagcagtaggcccatcatcgtaaaaa

SEQ ID NO: 48217 - DNA, 286 bp, Setaria italica
  misc_feature (261)..(261): n is a, c, g, or t
  Peptide Sequence Number=SeqID_114191
aagcatgctggagaaagagctcaaaatgttacaggatgaatgcaacagaatggaactaaagatgcaggaataccaggaaagagagggtacattgaaggcaagggagttagagttgctatcacttgagcgtactcaaattacagcagacagaggtataaccgatgatgcaatttcaaaagatcaaatggaagcccttagttgagaagataaataagttaaatatgatgtcaggcgagtcacatttaacttatttatcttctnaacaagggcttccatttgagaagat

SEQ ID NO: 48218 - DNA, 444 bp, Setaria italica
  Peptide Sequence Number=SeqID_114192
tacttacctaattactaattgtcccatgtggtggaaggcgcgctgctgccggaggctctggtcgatggcgcgcagccgcggggtctcgcccttggtgagccccgagctggtgccggcgtccttctccccgaggagctcgcacgtgtgccgcagctgcgaggcgatcgcgtccttgaggcaccggaagtgccgggacatggccttctgcgcaagcgccgtgtagggggtcgcggcgccgaagcccatcaccgagtcgaagaagttcaccacccgtacccgagcgacgccgataagcacctgttggcgaggcagacggggctgtccaggaaccaggtctccaactggttcatcaacgcccgtgtccggctatggaagcccatgatcgaggagatgtaccagcaggagtgcagggagctcgagggctcctcggccggcggcgggggg

SEQ ID NO: 48219 - DNA, 304 bp, Setaria italica
  Peptide Sequence Number=SeqID_114193
cctcccctcgcgctcccacaccaaaccctagcccgagcacccgggcccctccccgccccccacctctcgccggcctccggagctctctctgtgagcggccgggatccgcagggctccggttgggtcccggaggcgtcccggctcttggtgggaggggccgagaaaatggcggagaaggagggggccaaggtgggggcggaggaggtggaggtcaagttccggctcttcgacggctccgacatcggccccgtccgctgcaacgccgccgccaccaccgtcgccgcgctcaaggaccgcgtcgtcg

SEQ ID NO: 48220 - DNA, 324 bp, Setaria italica
  Peptide Sequence Number=SeqID_114194
aaggggatgcaaaaattattgttgaccagatattaaatgttgttgctttttgccatcttcagggtgttgttcaccgtgatctgaagccagagaatttctattcagcactaaggatgagcattctcctatgaagataattgattttggcctctcagattttataagaccagatgaaaggcttaatgatattgttggcagtgcatactatgttgctccagaagtcttgcataggtcatatagtacagaagcagacattgttggtagttatttggttgtttattctactttattattatttacttttgttggttagtctagtaccta

SEQ ID NO: 48221 - DNA, 220 bp, Setaria italica
  Peptide Sequence Number=SeqID_114195
caaggggtggaagatacaatgaaggggatgcaaaaattattgttgaccagatattaaatgttgttgctttttgccatcttcagggtgttgttcaccgtgatctgaagccagagaattttctattcagcactaaggatgagcattctcctatgaagataattgattttggcctctcagattttataagaccagaccattctgggcacgaactgaatcaggg

SEQ ID NO: 48222 - DNA, 364 bp, Setaria italica
  Peptide Sequence Number=SeqID_114196
cagcagcacctgctgcccctttggctgaggaagtcgtcaaccacctgctggaggagcagcaacaggtgcaggtgcggatgcactaacaggtgcaggcacaggcacaggtttgggcaggagaattgcttcaggtgcaggcacagcagcaggcatcgaagccaatgcagcctcggcagatgaggcaggagcatcagtaactgggatttgcgccggttcaactgctgctgggcagaggacatatcactaggaactggttcagattccttgggttccatggtttcacattcaagcctgccgtgccatccagacaaaaattacaggagcactgttatattgaatgcagaaggccttgtgctgttagctt

SEQ ID NO: 48223 - DNA, 367 bp, Setaria italica
  Peptide Sequence Number=SeqID_114197
cctttttatctgattgtcaatagtcaaaacaatatgcatttgttgctgcatgaaaactttgaagtagacataagcagttattggtgtgtttgttgttcctgaatgaattgctgtcttctctttcaaaagaatgaattgccatctctttattcatggaaacattattgctctgtgcaggggccagtgagggcatatctaggatcagcacatcggcagtttaccagtagtactgaagtatggttgctccatgttgaacatgtaatcagtgccaatgatgtatctgtttggagtggcttgataataacacaactgcaaccttgagcaagaaaagcttttgttgattgattaattttgtatttcctaaaaa

SEQ ID NO: 48224 - DNA, 372 bp, Setaria italica
  misc_feature (213)..(213): n is a, c, g, or t
  Peptide Sequence Number=SeqID_114198
cattgaaatgtggagtctagactgacaacacaaatctgttgttgacaaacatcctttttatctgattgtcaatagtcaaaacaatatgcatttgttgctgcatgaaaactttgaagtagacataagcagttattggtgtgtttgttgttcctgaatgaattgctgtcttctctttcaaaagaatgaattgccatctctttattcatggaaacnttattgctctgtgcaggggccagtgagggcatatctaggatcagcacagagcaattaatgttcatgaattgccatctctttatcatggaaacattagttgcgtctgtgcaggggccagtgagggcatatctaggatcagcacatcggcagtttaccagt

SEQ ID NO: 48225 - DNA, 224 bp, Setaria italica
  Peptide Sequence Number=SeqID_114199
taaggaattggactgaaagctaccaggcactttgctgtgcaagaagcgcgtgctcgcgcgcaaggcgctcatgcagcgcgttaagtcccaggagctcggcaagaagctccgcgagatcctcatcaagaagatcaggggccagtgagggcatatctaggatcagcacatcggcagtttaccagtagtactgaagtatggttgctccatgttgaacatgtaatcag

SEQ ID NO: 48226 - DNA, 462 bp, Setaria italica
  Peptide Sequence Number=SeqID_114200
aggactaatcagatcctattccttcttagaggggtggatggcagtgaccgtagaaaccattgaatcaacaccgcattgtttttcacgaatggacccctgcagagcttgtagtaaccattctcacccccagttctcgccccaggagttcttgatgatccaatagggctttccttgaagcggattggtgcgtaaccagcagatccatagccaactaggagaacaccatggtcaagatgccttccacaaaatgtatgggcacgaaacaccaccaatgtatgtctgcatgaaaattgcattgataccaattgcaagtggaccatgtttaaccaagttagcagcaatttggtcttcatccacagatacaacactgaagtttttcacttgggctacaattttggacttgtcaaaacttgcaaggtgaccgaccaagtacccaagtagtaaagggtaaatactttacta

SEQ ID NO: 48227 - DNA, 451 bp, Setaria italica
  misc_feature (8)..(8): n is a, c, g, or t
  misc_feature (28)..(28): n is a, c, g, or t
  Peptide Sequence Number=SeqID_114201
taattccnatgatggcctggttgcatgngttctagcaaagatcataacatatagcaatggtatatacaaacgaggactaatcagatcctattccttcttagaggggtggatggcagtgaccgtagaaaccattgaatcaacaccgcatttgtttttcacgaatggacccctgcagagcttgtagtaaccattctcaccccagttctgccccaggagttcttgatgatccaatagggcttttccttgaagcggattggtgcgtaaccagcagatccatagccaactaggagaacaccatggtcaagatgccttccacaaatgtatgggcacgaaacaccaccaatgtatgtctgcatgaaaattgcattgataaccaaattgacaaagtaggaaccaatagtttaaaccaaagttaagacaagacaaatttaggtacttacaataccaacaa

SEQ ID NO: 48228 - DNA, 492 bp, Setaria italica
  Peptide Sequence Number=SeqID_114202
atatgttatgatctttgctagaacacatgcaaccaagggccatcatatggaattatgtgaaactgttttcgatggctgtattgtatgtttgggttaagttattgtggatgtttgtcacaccagaataattattcgggcatcagtagctacgtgttatcattggtaacgtttgcaatatggtaaatataaacgaggactaatcagatcctattccttcttagaggggtggatggcagtgaccgtagaaaccattgaatcaacaccgcatttgtttttcacgaatggacccctgcagagcttgtagtaaccattctcaccccagttctcgccccaggagttcttgatgatccaatagggcttttccttgaagcggattggtgcgtaaccagcagatccatagccaactaggagaacaccatggtcaagatgccttccacaaatgtatgggcacgaaacaccaccaatgtatgtctgcatgaaaattgcattgat

SEQ ID NO: 48229 - DNA, 335 bp, Setaria italica
  Peptide Sequence Number=SeqID_114203
tcctattggttgtttcttccttagtttggctatggatctgctggttacgcaccatggtcaagatgccttccacaaatgtaatagggacacgaaacaccaccaatgtatgtctgcatgaaaattgcattgataccaattgcaagtggaccatgtttaaccaagttagcagcaatttggtcttcatccacagatacaacactgaagtttttcacttgggctacaattttggacttgtcaaacttgcaggtgccgccagtcccagtgtaagggtaatctttctcactctctaggccaccagatttctgtagatagctgaaagctgttgtcatcaagcc

SEQ ID NO: 48230 - DNA, 425 bp, Setaria italica
  Peptide Sequence Number=SeqID_114204
ttttagtttttacgggttttaaggttttaccgtttttacggtttttaggggtttaaggttaatttgggttcgtccttggttgcgccgacgaccccttgagcaggtcgcgggcggaggagcggcggaaggccgaaggaactggcggcggaactcgtcgggggtgaggtcggagaactgggtgaccccgtggacggccgtggggtcgagccgctggtggcgccgcgcgcggcggaggttggccttgaacacggacatccggtgcgcgcgctcgccgtcgtcgcggtaggacttgccgaaccggcggacgaagctggcgaagtgcgcctccgcgttcagctccatctccagctcgtcgtccgccgcgccgtcccctaccacctgctcgatgagcgggtcctccgcggcggcggaggcgtcgtcgggct

SEQ ID NO: 48231 - DNA, 361 bp, Setaria italica
  Peptide Sequence Number=SeqID_114205
ttgaatcaacaccgcattgtttttcacgaatggacccctgcagagcttgtagtaaccattctcaccccagttctcgccccaggagttcttgatgatccaatagggcttttccttgaagcggattggtgcgtaaccagcagatccatagccaactaggagaacaccatggtcaagatgccttccacaaatgtatgggcacgaaacaccaccaatgtatgtctgcatgaaaattgcattgataccaattgcaagtggaccatgttttaaccaagtttagcagctaattttggttctttctattcctactagtattactaactacttgtaagttttttctactttgggtcttactaatttttgt

SEQ ID NO: 48232 - DNA, 495 bp, Setaria italica
  Peptide Sequence Number=SeqID_114206
gtagaaaccattgaatcaacaccgcatttgtttttcacgaatggacccctgcagagcttgtagtaaccattctcaccccagttctcgccccaggagttcttgatgatccaatagggcttttccttgaagcggattggtgcgtaaccagcagatccatagccaactaggagaacaccatggtcaagatgccttccacaaatgtatgggcacgaaacaccaccaatgtatgtctgcatgaaaaattgcattgataccaattgcaagtggaccatgtttaaccaaagttagcagcaaatttggtcttcatccacagatacaaacaactgaaagtttttcacttgggctacaaattttggacttgtcaaaacttgcaggtgccgccagtcccagtgtaaaggggtaaatctttctcactctctaggccaccagatttctgtagatagctgaaaagctgttgtaaatcaaagccaccattgcatcctgcatcgcacgagc

SEQ ID NO: 48233 - DNA, 361 bp, Setaria italica
  Peptide Sequence Number=SeqID_114207
attggtgcgtaaccagcagatccatagccaactaggagaacaccatggtcaagatgccttccacaaatgtatgggcacgaaacaccaccaatgtatgtctgcatgaaaattgcattgataccaattgcaagtggaccatgtttaaccaagttagcagcaatttggtcttcattcctactagtattactaactactgaagtttttcacttgggctacaattttggacttgtcaaacttgcaggtgccgccagtcccagtgtaagggtaatctttctcactctctaggccaccagatttctgtagatagctgaaagctgttgtcatcaagccaccattgcatcctgcatcgcacgagcgtggt

SEQ ID NO: 48234 - DNA, 198 bp, Setaria italica
  Peptide Sequence Number=SeqID_114208
cacactcgtgatcgcagtcgaccatctgctgctcgctgagcacctcgagcttgccggtggcgaggtagtgcgccccctccagcgcccccgacgcgctgaaggaccagcacgacccgcacgagccctgcatccaaagaaatccagatcaaaccaaatcaaatcgacgacctatgcctatcgatcgaatccaatcaattg

SEQ ID NO: 48235 - DNA, 196 bp, Setaria italica
  Peptide Sequence Number=SeqID_114209
tatatacaaacgaggactaatcagatcctattccttcttagaggggtggatggcagtgaccgtagaaaccattgaatcaacaccgcatttgtttttcaagaactcctggggcgagaactggggtgagaatggttactacaagctctgcaggggtccattcgtagaaaccattgaatcaacaccgcattttgttttt

SEQ ID NO: 48236 - DNA, 334 bp, Setaria italica
  misc_feature (13)..(13): n is a, c, g, or t
  Peptide Sequence Number=SeqID_114210
ccattgaatcaanaccgcattgtttttcacgaatggacccctgcagagcttgtagtaaccattctcaccccagttctgccccaggagttcttgatgatccaatagggcttttccttgaagcggattggtgcgtaaccagcagatccatagccaactaggagaacaccatggtcaagatgccttccacaaatgtatgggcacgaaacaccaccaatgtatgtctgcatgaaaattgcattgataccaattgcaagtggaccatgtttaaccaaagtttaagtctaagtactaaatttttaggttacttttacttaatttaccttaacttaagtta

SEQ ID NO: 48237 - DNA, 242 bp, Setaria italica
  Peptide Sequence Number=SeqID_114211
aatcaacaccgcatttgtttttcacgaatggacccctgcagagcttgtagtaaccattctcaccccagttctcgccccaggagttcttgatgatccaatagggcttttccttgaagcggattggtgcgtaaccagcagatccatagccaactaggagaacaccatggtcaaaatgccttccacaaatgtatgggcacgaaacaccaccaatgtatgtctgcatgaaaattgcattgatacca

SEQ ID NO: 48238 - DNA, 227 bp, Setaria italica
  Peptide Sequence Number=SeqID_114212
aacaccgcatttgtttttcacgaatggacccctgcagagcttgtagtaaccattctcaccccagttctcgccccaggagttcttgatgatccaatagggcttttccttgaagcggattggtgcgtaaccagcagatccatagccaactaggagaacaccatggtcaagatgccttccacaaatgtatgggcacgaaacaccaccaatgtatgtctgcatgaaaattg

SEQ ID NO: 48239 - DNA, 249 bp, Setaria italica
  Peptide Sequence Number=SeqID_114213
ccgtagaaaccattgaatcaacaccgcatttgtttttctacgaatggacccctgcagagcttgtagtaaccattctcaccccagttctcgccccaggagttcttgatgatccaatagggcttttccttgaagcggattggtgcgtaaccagcagatccatagccaactaggagaacaccatggtcaagatgccttccacaaatgtatgggcacgaaacaccaccaatgtatgtctgcatgaaaattgca

SEQ ID NO: 48240 - DNA, 220 bp, Setaria italica
  misc_feature (8)..(8): n is a, c, g, or t
  Peptide Sequence Number=SeqID_114214
cctcttanaggggtgggatggcagtgaccgtagaaaccaattgaatcaacaccgcattgtttttctacgaatggacccctgcagagcttgtagtaaccattctcaccccagttctcgccccaggagttcttgatgatccaatagggcttttccttgaagcggattggtgcgtaaccagcagatccatagccaactaggagaacaccatggtcaagatgcc

SEQ ID NO: 48241 - DNA, 226 bp, Setaria italica
  Peptide Sequence Number=SeqID_114215
aatctttctcactctctaggccaccagatttctgtagatagctgaaagctgttgtcatcaagccaccattgcatcctgcatcgcacgagcgtggttctgacggatcacactcgtgatcgcagtcgaccatctgctgctcgctgagcacctcgagcttgccggtggcgaggtagtgccgccccctccagccgcccccgacgcgctgaaggaccagcaccgacccgca

SEQ ID NO: 48242 - DNA, 213 bp, Setaria italica
  Peptide Sequence Number=SeqID_114216
taagggtaatctttctcactctctaggccaccagatttctgtagatagctgaaagctgttgtcatcaagccaccattgcatcctgcatcgcacgagcgtggttctgacggatcacactcgtgatcgcagtcgaccatctgctgctcgctgagcacctcgagcttgccggtggcgaggtagtgccgccccctcagccgcccccgacgcgctgaa

SEQ ID NO: 48243 - DNA, 198 bp, Setaria italica
  Peptide Sequence Number=SeqID_114217
cactctctaggccaccagatttctgtagatagctgaaagctgttgtcatcaagccaccattgcatcctgcatcgcacgagcgtggttctgacggatcacactcgtgatcgcagtcgaccatctgctgctcgctgagcacctcgagcttgccggtggcgaggtagtgccgccccctcagccgcccccgacgcgctgaag

SEQ ID NO: 48244 - DNA, 233 bp, Setaria italica
  Peptide Sequence Number=SeqID_114218
gccgccagtcccagtgtaagggtaatctttctcactctctaggccaccagatttctgtagatagctgaaagctgttgtcatcaagccaccattgcatcctgcatcgcacgagcgtggttctgacggatcacactcgtgatcgcagtcgaccatctgctgctcgctgagcacctcgagcttgccggtggcgaggtagtgccgcccccctcagccgcccccgagcgctgaaacgg

SEQ ID NO: 48245 - DNA, 205 bp, Setaria italica
  Peptide Sequence Number=SeqID_114219
ctctctaggccaccagatttctgtagatagctgaaagctgttgtcatcaagccaccattgcatcctgcatcgcacgagcgtggttctgacggatcacactcgtgatcgcagtcgaccatctgctgctcgctgagcacctcgagcttgccggtggcgaggtagtgccgccccctccagccgccccgacgcgctgaaggaccagcca

SEQ ID NO: 48246 - DNA, 273 bp, Setaria italica
  Peptide Sequence Number=SeqID_114220
ccgccgccgcggcggtcgcggcgctcccgccccgcagatcgccatctgccgggaggagggacgcgaggtgcgacggcggctgggaggaggacggcggcggcggcgcgggcgcgtcgttggagagggagagagagagctggagcgagtcgaggcggggcttcttacccccgaccacggacgagtcgtcgccgggcggatccccgcgcttgggcgcggagaggtggaggaagtcccgctcgacgcagagcttggcgctggcggccgcggcggcgg

SEQ ID NO: 48247 - DNA, 332 bp, Setaria italica
  Peptide Sequence Number=SeqID_114221
gacatacctgaagtaagtttaggcaatgctcaaagccatctcctagttaaagtaaacaagagaaagtaacgatcacctttgtgccatcattctcttcatcactttcaccatcttctaatccaaaatctttcatagacagattttcttgattttcttttttggatcctttgcacctcctcctcataatccaactcatcatcaccactttcaccaagctgtttgtcatagtatgcccctttacctctgccccaaacattttttggtctttttcatcttcctcctgctcatccatgctatcatcacctccagcaatttgttttcacaaccctcgc

SEQ ID NO: 48248 - DNA, 207 bp, Setaria italica
  Peptide Sequence Number=SeqID_114222
gaaacaaacttgtttttattagatttagcagcagctgccacaagcttgctaggtttcatcatttgattattcctctgcacttcatcatcaaagtcatccaatgtctgcaggtctctttgattactagttgtcctggtttttgacaacttctactaggacttacgaatacttagtacaaaattaataagaagacccctttttacttta

SEQ ID NO: 48249 - DNA, 428 bp, Setaria italica
  Peptide Sequence Number=SeqID_114223
acggaatagaataataataactttaaagaacccgcaatgagaatactgatggtttcaagcacaacttcagagtgactacatcagcgacttcattaacaacacaaacggtagctagctatagaacgactgcacaacatcaagcgctcgcacagatggtccgcctagtagccatagctggtcctcctcatcatcttggtgaactcgtcaaagtcaatctcgccgtcaccatttcgatccgcctcttgcaccatgtcttggatctcgtcaagggtgagatttacacccagctctttggcaatcctctgaatgtcgatattagaaatctttccatttctatcttggtcgataatgcggaatgctttgttaagtctcctctttgtctatccctttcttccgtacttttggtcagtcatcatgtgctcaactcc

SEQ ID NO: 48250 - DNA, 214 bp, Setaria italica
  Peptide Sequence Number=SeqID_114224
catgcccttgtctttagagtaatactcctaaagaaattatgatgtgggaagatggagaagatgaataaagccactcataatttgtagtaccttcagcgccccgtgttgccaaagataattaagtacctagtagtaattaaagaacgaataagtaacttaagaaccttaacaaataagaaaaacaaaaagaaattaaaaattaaggtaaaagtaa

SEQ ID NO: 48251 - DNA, 131 bp, Setaria italica
  Peptide Sequence Number=SeqID_114225
gctgcttaatggagttgctttcagcttccctttatatagacttgcataacttctgcagggaatgtgagcgatgtggtgtttcaaacatcaaaatgagcaccagatactaccatcctctatggtggggaaga

SEQ ID NO: 48252 - DNA, 430 bp, Setaria italica
  Peptide Sequence Number=SeqID_114226
atatgtaggaggctggccataattgtagctagtagcatcagtggacgcagcagtcccaggggcagactgttgttgaggttgctgctgctggctataatagtcatacccagtgccagggggagttgtatgagattgctggttttgagactgatcccaccccgcagtctgatagccaccagatgttggaggatagctaccataaggttgctgaggtgcaccatactgtggcggtgcccaggataagctccaggctgcatataaccataaccaggctgctgggtggtgcaccaggtgggccccagtttgactgaggacgaggagggcgataaccctgctgagaatagccacctgacatttgatttctggcacgattctgcaaaatatagtttgcacatctgtatatagtatacaacaaaagaacacagcatag

SEQ ID NO: 48253 - DNA, 348 bp, Setaria italica
  Peptide Sequence Number=SeqID_114227
aaataaaactaaagtaaggaaacggtaagaaaccccaaaggaaataaaagaactaccaaggactagacaataataaaccaataaaccaggctgctggggtggtgcaccaggtgggccccagtttgactgaggacgaggagggcgataaccctgctgagaatagccacctgacatttgatttctggcacgattctcactggtaacctcaatcaccagctgctttgcaatttcaatttgttcctgtgtgccatcaatatgcacagttctttcagttgaagtgtcaccagcgggcagatgcaaaggaataacctgaattcgagctccagatttggcttgcatggactttta

SEQ ID NO: 48254 - DNA, 394 bp, Setaria italica
  misc_feature (48)..(48): n is a, c, g, or t
  misc_feature (391)..(391): n is a, c, g, or t
  Peptide Sequence Number=SeqID_114228
ccaactggggcaggtgcagcagattgatcctgggacgtagcagttgcngttgcttcagtagagtacgccggaggctgccctagcttccactgccataagcgtcaacatagactgctgctggccataacctggatggcttgcaggagggggcaccagggtaaggcggaggtgcaccataaccaggctggctgtaaccatactgtccataaccagcctgagcagatccaggaggcggagcctgtccatatggtgaagatgcaggaggcttctggccctgcggagaaggctgcccgtaagcgccctgaccatacccaccttgcggtggcggctgcagcaagcttacccggtcgtctaaggtttctttgttcttttcctttattttctttggttnttt

SEQ ID NO: 48255 - DNA, 297 bp, Setaria italica
  Peptide Sequence Number=SeqID_114229
taagttaagtaactaaccgaactacaagtagtagaagtagttggctgtaaccatactgtccataaccagcctgagcagatccaggaggcggagcctgtccatatggtgaagatgcaggaggcttctggccctgcggagaaggctgcccgtaagcgccctgaccatacccaccttgcggtggcggctgggtgccatagccagactgtggcggtggagcgccatagccagatggagcagaaccttgcgccgggtagcttgctgcagcactagtaggtggttggctggcataaccagggt

SEQ ID NO: 48256 - DNA, 172 bp, Setaria italica
  Peptide Sequence Number=SeqID_114230
atgcaagccaataaccagacccaccttgttattagcaattttcatctggaacgtctcggcacctggctgtggtgcattatagtttcaccaccctttccaataaccagacccaccttgttattatcggaaaagctggggaaactatcaggtatctccaactggtcttgtctgt

SEQ ID NO: 48257 - DNA, 570 bp, Setaria italica
  Peptide Sequence Number=SeqID_114231
ataaataatgagttcatttttaagtgccttatagtagtttccgaaaatatcaacatcatacagttaaattttgaaacacaacaaaagtaacatttcacagatatcgccttagaacccgtgccccccatcccgatgaaccagcgttattttctttcttcaggatgcacgcagcctgtttcacctaagaacactgtacttctggtcgacggcggctgacgacctaacacaaacagattcaacagcgagctccggcgagtgatttgatcatgtgacgaggttcaatccctcggtgatgagcgagtcggcgatgacctggttggccgcctccgaagggtgtacggcgtcccagaagacgtaggacgtggcgttggggcacgtccccaccgacttggggttgcagaggagcaccgtcgtttccaccgtccccgtcccgcagcacccgcgcctggcctccgtgaagccctgcgcctgcgggtcggtggcgaggtcgtgcagcggtcgttgttagtattgttcgttaacttacggttcgtttatttttctttttgtttttaggtttttccggttttt

SEQ ID NO: 48258 - DNA, 485 bp, Setaria italica
  Peptide Sequence Number=SeqID_114232
atttcacagatatcgccttagaacccgtgcccccatcccgatgaaccagcgttattttctttcttcaggatgcacgcagcctgtttcacctaagaacactgtacttctggtcgacggcggctgacgacctaacacaaacagattcaacagcgagctccggcgagtgatttgatcatgtgacgaggttcaatccctcggtgatgagcgagtcggcgatgacctggttggccgcctccgaagggtgtacggcgtcccagaagacgtaggacgtggcgttggggcacgtccccaccgacttggggttgcagaggagcaccgtcgtctccaccgtccccgtcccgcagcacccgcgcctggcctccgtgaagccctgcgcctgcgggtcggtggcgaggtcgtgcagcggcgtgtagatgtcgaacacggcgaatcttagaaggtaccgggtaaccggacgacgaacaagacgacctaccaacggtaga

SEQ ID NO: 48259 - DNA, 463 bp, Setaria italica
  Peptide Sequence Number=SeqID_114233
ggggttgatgtagtagttctggacgaagtcgctggcgccggcgctgatgatgtagagcgcgccggagatgatggagtgggcctgggcgccgccggccaccgccgccagcttcgactggtactcccggaagtactgcagctgctgggacagcgggatcgcgtgatacatgaagacgacccgtagtaggtcgtaagtaccccggatcctgcagacgcgaagttggcgccgatcagaaggttctgccctgacgcctgtgggctcaggtacgcagcagggtaggtagtgaacccccagtgtatcagcggtgatgtcggtggcgagcttgccgttgcagaacctccccgtggcgacgtggttggcgaagtccctgccgtagggtgggaagttggccttgatgatggtgtggaggtagtcgttgttcccgagtcgaccgacgagtcgccgaacgtcatcaccgccggca

SEQ ID NO: 48260 - DNA, 349 bp, Setaria italica
  misc_feature (154)..(154): n is a, c, g, or t
  Peptide Sequence Number=SeqID_114234
ctccggcgagtgatttgatcatgtgacgaggttcaatccctcggtgatgagcgagtcggcgatgacctggttggccgcctccgaagggtgtacggcgtcccagaagacgtaggacgtggcgttggggcacgtccccaccgacttggggttgcanaggagcaccgtcgtctccaccgtccccgtcccgcagcacccgcgcctggcctccgtgaagccctgcgcctgcgggtcggtggcgaggtcgtgcagcggcgtgtagatgtcgaacacggcgatcttgaggtccgggttaccggtcgtcgtactagtcgtccttccttacggtttggttcgttttctttatttcttt

SEQ ID NO: 48261 - DNA, 258 bp, Setaria italica
  Peptide Sequence Number=SeqID_114235
taaactaaaggtaaaactaaacccggaaaagtaaactaagaacaagactagactagggaacaagacgggaatcgcgtgatacatgagcgccgtgtggtcgtagtacccggatcctgcagacgcgaagttggcgccgatcagaaggttctgccctgacgcctgtgggctcaggtacgcagcagggtaggtagtgaaccccagtgtatcagcggtgatgtcggtggcgagcttgccgttgcagaacctccccgtggcgac

SEQ ID NO: 48262 - DNA, 221 bp, Setaria italica
  Peptide Sequence Number=SeqID_114236
atgatcatcagaacaccattgaagcagcttaattggatgatctggaacatgtcgatcgatcagtgatgagtgttgctgaattaccgagacggtgttgctgaagatggcgacgaggcggtcggagaactggtcggcggtctgggtcttgaagaggaaggggttgatgtagtagttctggacgaagtcgctggcgccggcgctgatgatgtagagcgcgccgg

SEQ ID NO: 48263 - DNA, 409 bp, Setaria italica
  Peptide Sequence Number=SeqID_114237
atacgccactgtacgttgttcatgtgatgagcgttgatgcaatggaggagattgccaaggctaaaagagaaggggcaggagagtcattggtgaaccagtggtttctggactggtatgtgatgagtcctccgatccgggaagcagggcatggtaaagcactccaagctgctctctcatcaggaattttacagcttgtaggtactgatcactgcacattcaattccacacagaaagccttcggctctgatgattttcggaagattcccaatggcgtaaatggtcttgaggacggatgcatattatttgggatagcatggtggagactggcaagatttctgtcaccgactatgtcagagtgacaagcacagaatgtgccaggatcttcaactatataccctcagaaacggag

SEQ ID NO: 48264 - DNA, 235 bp, Setaria italica
  Peptide Sequence Number=SeqID_114238
agctggttttcgtatgaccacataggacctgagaactggatgacccttttgatcatgtactgaatatcttgcttgacttaaatttagtaacattcagcatggactaggttgatgaaaacttaaaactttgcagggcagagagtcattggtgaaccagtggtttctggactggtacttgatgattcttggctttgggatcctgacttcatagttgcttcaaagtaaacgagaaaca

SEQ ID NO: 48265 - DNA, 248 bp, Setaria italica
  Peptide Sequence Number=SeqID_114239
attttcggaagattcccaatggcgtaaatggtcttgaggaacggatgcatattatttgggatagcatggtggtaagttctgtttttagaacagtttaaaagaaattgacaatcagtaatccataggttctgtattcagttcctctgctctgatgcttatgcaacacaaacaggagactggcaagatttctgtcaccgactatgtcagagtgacaagcacagaatggtattacacattaactttgctgt

SEQ ID NO: 48266 - DNA, 158 bp, Setaria italica
  Peptide Sequence Number=SeqID_114240
tttgctcctcttcggtcgtgttctgatcttcttccttctttccattttctttaacctctgcatgtacatccgtagaagaaagtgtcaaggagagtcaggaggtattgaaaggtgaagcaaaagataatgtggacaagcaagaaatggatgatagagaa

SEQ ID NO: 48267 - DNA, 161 bp, Setaria italica
  Peptide Sequence Number=SeqID_114241
tagtagtagaaagaaggacaaagaatagaaagaataaggaataggaagccaacggaagtggataagcaagaaaagcaggatgggtcgaacgaggaagaaaaaggtggtgttgaataagctgcatgtgagtgatggagaagaaagtgtcaaggagagtcagg

SEQ ID NO: 48268 - DNA, 507 bp, Setaria italica
  Peptide Sequence Number=SeqID_114242
tagtttaatttctaaggctaataaattatttgtctggagtcaaataaaaaattcaccttgaatgactcctaagattgttagataaatagattgggctttatagcatattcgcaatatgatgaagtagaagtccccgtgccaatagtaatatagtatttgtgacatttcttctgttctactttatgcttagtacattagacttctgaatttttatgcttgtagagaacgagttttatgaacacattaattttggtatcacaggacaccagatatgtcagccatgcatcatgactcctcacatgacctcaaaattctgggagctaagctgaaggatattgtgggggtatggcttggtttgtgccaatttggttcacaaagattcagtgactattgatcacttatgaaatattttatctcatgtttaggtcgcggatacttccctggaagtaagatacattactcgtacacatctgcgaccttgttgcagagcgtggggcacggttacgg

SEQ ID NO: 48269 - DNA, 237 bp, Setaria italica
  Peptide Sequence Number=SeqID_114243
ggggatgttgtaccatctaagctggagcagccatttgtactgaggacaccagatatgtcagccatgcatcatgactcctcacatgacctcaaaattctgggagctaagctgaaggatattgtgggggtatggcttgtttgtgccaatttggttcacaaagattcagtgactattgatcacttatgaaatattttatctcatgtttaggtcgcggatacttccctggaagtaagatac

SEQ ID NO: 48270 - DNA, 224 bp, Setaria italica
  Peptide Sequence Number=SeqID_114244
aaagccatggacttcgaaagtttgaaccctggagaacagatatacggataacgatgtagttgcagctgtaatattgggcactggtacaaatgcagcatatgtggagcatgcaaatgcaattcctaaatggactggttacttcctaaatctggaacatggttaattaattacggtattttgtaagtcttcccctatttccgttatttaatttaccttattgtttc

SEQ ID NO: 48271 - DNA, 220 bp, Setaria italica
  Peptide Sequence Number=SeqID_114245
aggcaaactgtgtgaatatatgtggctgacttgtatatgctttctgacagatatacgaaaaattgatttccggcatgtatctaggagagattgtgcgaagaattttactgaagttggcgcatgatgcttccctgtttggggatgttgtaccatctaagctggagcagccatttgtactgaggacaccagatatgtcagccatgcatcatgactcctcaca

SEQ ID NO: 48272 - DNA, 203 bp, Setaria italica
  Peptide Sequence Number=SeqID_114246
ggacggcaggagcatggaaatggaggttggacaatgccattcgtgttctgcccattctttccccttgtatggtgttgtaaaccaatcaaattttttaaccgttttgtgttggcaataaaagaggaggacacgaacgaatttaaccatgtgttctcttcactgcttcctcaaatatatgactgagttgtattattttgacaaag

SEQ ID NO: 48273 - DNA, 190 bp, Setaria italica
  Peptide Sequence Number=SeqID_114247
acttttttgcaagcttccatctttcttcggggtacttggtagcctggtaccaagatggtgtttcagttggtacgtctgatgttcttcaaggtttcagacaagtccctacaccttgttctttcgttctccgatgttagacaaaagacaataaacaaagaaaacgtaagaactaaattaaacaaataaacaa

SEQ ID NO: 48274 - DNA, 239 bp, Setaria italica
  Peptide Sequence Number=SeqID_114248
gaggtaccacagcttggtcatcgaggaagaaaccttcccacacgatgctctagaggccactgcatggactgaagatgggcttatcatggctgctcgtcacaagaagtacaagcacatccaggtatttatacttcccaatccttcacgtgcacggcagttgatgcttacactgaccctttaagccatgatgacgaagtttacctggagctgtatacttgtcgtgagtgctaacactaact

SEQ ID NO: 48275 - DNA, 143 bp, Setaria italica
  misc_feature (143)..(143): n is a, c, g, or t
  Peptide Sequence Number=SeqID_114249
cctgatgctggtctgaagtggtttccttcaatgtacagttccttcagaaatggatgcttatataatccttccgggatccctcctgaacttggaactctaaagaatctacgacaccttgatgttggcaacaaccacctgacagn

SEQ ID NO: 48276 - DNA, 232 bp, Setaria italica
  Peptide Sequence Number=SeqID_114250
ctacagggtcaagcttctccaaaagaaacaatggaaggatgagatccgcaggttaaaggagatgaagaagagggggaaaactgatctggatgatgattatgggtatgcattcttctgctcctttgtgagcctcaaaagctgagctttggtcaagggcttgaagggtggaagctgatcatattcttcttcttcatcatcttgttccacatcagaataatcatccaattcaata

SEQ ID NO: 48277 - DNA, 428 bp, Setaria italica
  misc_feature (399)..(399): n is a, c, g, or t
  Peptide Sequence Number=SeqID_114251
taaggaaccaaagtactaactagtacaaaccctagggtactttactttagaatagaagttgcgtcaggacctagctctgggtgctaacttgcagtcccaattctccatcgggataggttcaaaaatggcacttcacctcgggctgaacaacaagctgagcgggcagatcactgtcaagacaagcacctcagagcaggttcagatcgcgcttttgggtctcatgccagttgcagcctccatctacaagagcttccggccaagcaaaccataatttgcttattagctccgcgggaagaccggaaacatttccgtttaaaaaaaaagctccacaggaagaggatcagtctaattacttaattccatcattgtgtcttttctcttgctttccatctgaacctntttcacgttccctgtttcgtacccctgta

SEQ ID NO: 48278 - DNA, 345 bp, Setaria italica
  Peptide Sequence Number=SeqID_114252
agctgatcatattcttcttcttcatcatcttgttccacatcagaataatatgatcagcttccacccttcaagcccttgaccaaagctcagcttttgaggctcacaaaggagcagaagaatgcatattttgatgagtatgactacagggtcaagcttctccaaaagaaacaatggaaggatgagatccgcaggttaaaggagatgaagaagaggggaaaactgatctggatgatgattatgggtatgctaatatcgctggtgagaatgatcaggaccctcctccagagaatgtatcagttcccttactgacataggtagactgcctccttcatttgattgtgataa

SEQ ID NO: 48279 - DNA, 243 bp, Setaria italica
  Peptide Sequence Number=SeqID_114253
tgagctttggtcaagggcttgaagggtggaagaatgcatattttgatgagtatgactacagggtcaagcttctccaaaagaaacaatggaaggatgagatccgcaggttaaaggagatgaagaagagggggaaaactgatctggatgatgattatgggtatgctaatatcgctggtgagaatgatcaggaccctcctccagagaatgtatcagttcccttacctgacatggtgctgcctcctt

SEQ ID NO: 48280 - DNA, 182 bp, Setaria italica
  Peptide Sequence Number=SeqID_114254
tttaatttaaagtttgttaagttcggtttggttaggttattgtattggttgtattgtattaattggggtactaaggggttttgtattatgtcttaccttggcacccactggtggaccctcatatgggaatatcatattttcttcccaagatggttctggaatactcaatatggactggggca

SEQ ID NO: 48281 - DNA, 150 bp, Setaria italica
  Peptide Sequence Number=SeqID_114255
ttggtgccgagaagcctttagaggttgaaatattgctgatgtcgtagaagacattggtgttgtgaagcctacagagattgaagatgttgttcttgtagaaggcatcgatgtcaagcctgaatcagtgagtgaggttgtgcatgatggaag

SEQ ID NO: 48282 - DNA, 487 bp, Setaria italica
  Peptide Sequence Number=SeqID_114256
gcatatatcttgatgcagaatttactccttttatcttggtcgttggctacgcttgtctggcctctataatttgctgactgttgtgcacaaaggtaccacaataagccactaattcttcctcttcgatttatagtaattttgggggcctctggaattcttaggcctcaattgtgtgctgaaatcacatagaatctgtaccttgtatttacatgacaatacatctgttgaagctttgcatacttatttattgtgcatggaagttactgggttgatttttgctaggtttcccttcacaatgctagtactgcagaaggcagtaaggatggtatgggaacttcctgatgtgatgagaatttcttatgcatttgtggtggtcatgctttgctggatggcattatggtcctttggaatttctggtattgttgcctttggcattccaaatggtgggcaatggtggctgcttttgatttttcagtcagtttatttt

SEQ ID NO: 48283 - DNA, 208 bp, Setaria italica
  Peptide Sequence Number=SeqID_114257
ttatgactgttcgggtgctatcctcctgatgagcacaattttaggtggattagtaactggaacttgtacgggcgtttggacgtatttcaaacaaagtgacaaggctgttatggttggttcaacctctatgctgatgggtatgatactggtaagtgcatgtatttttgtatgaatttgcttggctgaagtaactaagaaaaagacattt

SEQ ID NO: 48284 - DNA, 397 bp, Setaria italica
  misc_feature (291)..(291): n is a, c, g, or t
  Peptide Sequence Number=SeqID_114258
aaagatcgatcagacctagcatatataaagcattaaaagtatgcaaaatctaaccagccatcagataactggtgaacacttaaacaaggtcaaggagccgatgaagacgacctaaccagatctaagccgtttgataactgagagcgcttgataaaacaaagagatcgatacgatgcaacttaataaaatcaaacaactcgataactgtgagcaacgtcgaaaacaagcagaatattagacaaagcctagaaagttctacttgcaatctaagataactcgataactagccanacaaccgaatatcagaatataagacttaacttagaaagttctgatagaagctgtgccgatgcagccgtgcacgcatgaaggaactcgtcgaaactactctactcct

SEQ ID NO: 48285 - DNA, 252 bp, Setaria italica
  Peptide Sequence Number=SeqID_114259
gtgtgagatctttgaaaaagggaggcaaagggtttgatcttcttcaggagatcttacagcatcttcgagacctgagaaggattgagcaacgtgcaaggaactctggggagctttcaccccactatctgcatctttacacggactaaagatcagctgcaggccctgtgctcatgtccgaccgaaccaataataagctacgaaagaacggaaaagacaataacaaacaacggtaaagaaaaaaaagggaattta

SEQ ID NO: 48286 - DNA, 264 bp, Setaria italica
  Peptide Sequence Number=SeqID_114260
tattggtctcacgtgcagcatcaatcattatagtcggtgatgaaatattgtttggcacaactgaggataaactaggaactgccttgtgcaagaagcttcatgcaattggctggcgggtttctcatgtagcagttgttcgcaatgagattgattctgttgctgaagaagttgaacgttgtaaatctacggatgacatggttagtgtctataggctttcaattgtataaagttttcaagttagttgtgtaatgaaattcatgttgt

SEQ ID NO: 48287 - DNA, 393 bp, Setaria italica
  misc_feature (57)..(57): n is a, c, g, or t
  Peptide Sequence Number=SeqID_114261
tggagatcgaaatgagatggcattgttgccagaaggtattactgaattattgcatcncaaaacgctaccattaccattgatcaaatgcagaaatgtcatcactcttgctgtaaccaatgtggatgaactagacactgagtgggattgtcttctagacactcaggagagtggattagtgcaggcaaaaccttttgtatcaaagcatctcagcactacactttcagatgttcaaattgctccggttcttgcaaaactgtgcttagagttttctgatgtttacatagggtgtcatcggatatctagagctggtcctttggttgtaaatcttactggaaaggtatatgatggattctctggactgtacagatgactacttcgatcccacacatgatc

SEQ ID NO: 48288 - DNA, 150 bp, Setaria italica
  Peptide Sequence Number=SeqID_114262
tagacaagacctttaataagaatacaaagggtaataacttaccaattagggaagcatacatgatactgttccaaatgcacttcttagtgattcatcaactgagaaaagcttcagaccagcatacatgctaacagatggaaggcttgaaag

SEQ ID NO: 48289 - DNA, 258 bp, Setaria italica
  Peptide Sequence Number=SeqID_114263
ccttctgttattccacccctgaaaaccttaaatcattaagccatacaaatagctctcaaaaacaactgacagataaattcatcatagaactacaagataaatattactacaaagtaataacacttgcagatgactattcttgctgtatatgtttagtagattactgaccttgggtggcatccattcaacaccgtggagcagggaagactcaccatagcaggctcgaaccgctgcaacaaacagagtactcctaaaaaa

SEQ ID NO: 48290 - DNA, 306 bp, Setaria italica
  Peptide Sequence Number=SeqID_114264
tattcggtcataggccgctcctttctcaccgcctagtgctgcaagacccagctccaagttcttcaggacctgatacagttagggggatccagtcagaagaataacccataccggcaatttctgtgtgaaacgtagagtgttaacaaacatgaatgtatgacggcaaggggccatggaaaaaaggcttactgatctatcagttcttggtgtttcagtggactcaaaaccaagttcctgtgcattcacaataaccctgaagctctctctaggaataccatcagtctctgatgaatttatgctgtttgg

SEQ ID NO: 48291 - DNA, 263 bp, Setaria italica
  Peptide Sequence Number=SeqID_114265
ccttgtgttcatgtgcaaggctatgtaacaaatacttgtgaactttgtaggtgaagaaatcaaccctgtgtatgctgaactttcatgttcccttcatgacaatttgctccaagatggcatttcggattttgatagcacagaggttgttcacagtgttatatatgacataattcagaaaggtggagattctgggaaaattaccaagggagccaaaaagttaaagatggaaaaggggatccttttggataactatgttcagaggg

SEQ ID NO: 48292 - DNA, 280 bp, Setaria italica
  Peptide Sequence Number=SeqID_114266
aggttacaagtttttagtcaatttttctttatgatgcaaccatgcaagttttttttgtgtctatttttttatcatactgctgcctcctttttaggtgtagcattttccagctgcagtcgtcaacaaaaatcttctgcatcctcaggtgaagaaatcaaccctgtgtatgctgaactttcatgttcccttcatgacaatttgctccaagatggcatttcggattttgatagcacagaggttgttcacagtgttatatatgacataattcagaaaggtggag

SEQ ID NO: 48293 - DNA, 404 bp, Setaria italica
  Peptide Sequence Number=SeqID_114267
aaatgattgtcctctgatataattccaaaagtactctgcagtatcccgaatcatgattgtccacttacaccttgatatgaagcagcttgcatctgccactattagaagggccccgtgaagatctgcagaaaggaggttttcggacaattgctttttcctgtggggaagacagggtcacagggcatgctattagctcatataagggacagaaaaggcaccatgatggattcaggtacaagttttcaaaaaactcgagttgatctcctgctctgattgtgcttgttttgggcttatggccctcaggctcatattttctatcttgattttaattgttcgactcttcaagtttgttaatatttcataaaagtgcttatagcattatactataattaatagttcttctt

SEQ ID NO: 48294 - DNA, 295 bp, Setaria italica
  misc_feature (219)..(219): n is a, c, g, or t
  misc_feature (280)..(280): n is a, c, g, or t
  Peptide Sequence Number=SeqID_114268
tgtcttgttaaatcagcttggaacggtaaagaacgaaaaaaagactaactacctaaagggtagtagactacaaagcttatgaaagttgatggtttgacaatatatcatgtcaaaagtcatctgcagaagtaccgcacggcccgctataaacctgacctgtctgaaggtacatctgaaaaaaggccaccactgaagagctgtccctggacctgaaaacgngcatggatcttactgaagcgctgcgccttcagatggaagtccagaagcgtcttcatgaacngcttgagattcagag

SEQ ID NO: 48295 - DNA, 432 bp, Setaria italica
  misc_feature (372)..(372): n is a, c, g, or t
  Peptide Sequence Number=SeqID_114269
tacttttggtattgtttacgttcttagtacttcaggagtcaagacattttgaataccagtttcagagggagagactatgatccctatggccctgaagtcatcgaagaatttctttatcaaatactgtttcaaatttatatttagtcttgatctggtgactacaggaaaacccagatttgtggaaatggtttactggtcaggagcagccaccagaggatttgaattctaatccggtatgttatactgcaaccattgttctgctacttcatttttttcaaggaacgactgctgctttactggacagttcatgatcaaataggtgttcactgccatcaagtctaaggtcacagataacctgtccaagcatgcctntcctgagacccgatcaacaccaggtcagccatgggtgcgaggatgggatgacataaagaa

SEQ ID NO: 48296 - DNA, 263 bp, Setaria italica
  Peptide Sequence Number=SeqID_114270
gccgtcgccgatctctcttcgtcctgccgcgcggcgagccaaacagccatggcggccgcgctcctccgccgcgcgctcctcctccgccgcgtactcccctcaccctctccctcgcccaccctccccgcggcctccgcccaccgcctcctctccgcgttcaccacctcccagcagaacgccgccaccaccgtcgacctctcctccgacgagagccgccgccgcctcttcaacaggctggtgtaccggagcaagcagcgggggtt

SEQ ID NO: 48297 - DNA, 242 bp, Setaria italica
  Peptide Sequence Number=SeqID_114271
tagtaacggaacggaacttaaccccaataggtagtctcgtgcagatcccctatgtacaacgagagggaggtgtacaagctatccattggtgcagcgtgtgctctcacgtggccaccagaccgtattataatacaagtcttggatgattccactgatccgattattaaggaactagtggagacttgaatgcctggattggggcggaacaaaaaaattacatcaagtatgagatttccaacctg

SEQ ID NO: 48298 - DNA, 202 bp, Setaria italica
  Peptide Sequence Number=SeqID_114272
caatgctgaacagcaatagttttttccaaggtgtctgaattctgaacattgttcttgtgtgccttgcgattttatagaatttgaactgggatcaatgcaacacttgtttcttttgcaggtgtacaagctatccattggtgcagcgtgtgctctcacgtggccacagaccgtattataatacaagtcttggatgattcatgat

SEQ ID NO: 48299 - DNA, 177 bp, Setaria italica
  Peptide Sequence Number=SeqID_114273
gtctcaccaaaggcgaaaaataatattatcgagggaacacaagaaaggaccaatacatgaaaagctccgcagctgtcttaagatggaactgggatttttcatctttgggtacagaagaatctgcttcgctcccttctgaaaattccacgttgcccaaatgaagaatagcagctacaa

SEQ ID NO: 48300 - DNA, 243 bp, Setaria italica
  Peptide Sequence Number=SeqID_114274
attccagacaacttttctggaatctaacaccctcctcgtcactgaatgcaatgacctccactggtctaattagcctgtgcagtttcccagtaacttttctgggaagcgctgctgtagctggtacactacctgaatcaattttacaagtatcagacaagagcggcactacagtacaagatgttctgaaaatgaattcttttgaggctactgctgctgctatcagtcaagccaggacagggcctt

SEQ ID NO: 48301 - DNA, 466 bp, Setaria italica
  Peptide Sequence Number=SeqID_114275
cgccatggtttcaaattgcagagaacgcacactttgaaaccagtggtgaaatagaacgaaggtaataaaaatacaacaacgccatggttctggccgcatcaagtgacgaccataccaaggttgaattggtcgagccaccagcggatgctgccgtgggggagagggtcacctttgctgggtactcgggtgagcctgagtcttctctgagtggcaagagcaaggtctgggagaagctagccgctgaccttcacagtaacggcgagcttgtggcgtgctacaaagatgtcccgttcacgacttcggctggggtgtgcaaggtgaagacaatagcaaatggagaaatccgctagacgccgtgcgaaaaggcagcctgacctaactgctgtctgatgtcactgaaattctagctgattgctttttgtgcaaaaaagatatcctttgatttgaaaatctgtatagtgaaaaa

SEQ ID NO: 48302 - DNA, 440 bp, Setaria italica
  Peptide Sequence Number=SeqID_114276
tgtctgctggagcctttcatgcctcctttctaataaggtgctacatcaattgaacctgtccccagaagaacatctctcattcagtgaagaaaaaggagaaagtgtgaaaggcaaaaaactccttgggattttctaccagcagggcacaaaaatagggaggcctgtacctctgtttgaggaattggaagatgaaaaggtgagtgagcatagggaaaaatatgcaggcagtcaagctgagaggagctcaaaagcagtggcggatgctgaagctacgaaaattgctaaccagctaaaaagcaccacattatctgagggaggctcaaaaaaggaacaaaagaaacagtctggtaactcaaaatctaaggcagcagaggcagaagtctcagttgtctaaagtttggttatttatttttcgttttagtttttgggtttttcttttt

SEQ ID NO: 48303 - DNA, 280 bp, Setaria italica
  Peptide Sequence Number=SeqID_114277
aaaaaaaccaagtaaatgggttgaacaatatatcgatgcaatggaaaaggttaagctgaaacaaggactgaagattgcaatgggtatctctagtgagggaaatgcttatttgcaagtaattcttttttcccttctttcatttaccgtttttttccctctactaacatttatttatctttgatttgctaatataatgtagaacagtgtattttggcaactttataaagaagatccagtaagctgtgcaattgtgatgaaaacttcagttggtcttgtctat

SEQ ID NO: 48304 - DNA, 365 bp, Setaria italica
  misc_feature (293)..(293): n is a, c, g, or t
  misc_feature (340)..(340): n is a, c, g, or t
  Peptide Sequence Number=SeqID_114278
aaagaaacaaaataagtttaagtaaggacttaggacgacctacaagaattagtctacctgcatcacggacaatgggtgcacatagtgcatcttgggcagcaggggctgtgagtacagatgcatcatgttgagcagcgatgagcatgtgaaccggacagcaagctgcacctcacccatcttcttaacgccagcaggtgtcagaacaataagagggtacgagtgggtatacactcgatcagtttcaagtgtggagagacggatgcggaccttgccaattcgggtgtccccggggnaccattagccttgtcccccaccattcagatggcagttgtcaaatacnccaatcgtgatcacagtgcatgggt

SEQ ID NO: 48305 - DNA, 325 bp, Setaria italica
  Peptide Sequence Number=SeqID_114279
ccaatcccacaatatccaagcgctagtcttgctgtcccatctactttcatgcccaaagtatcattgacatggtgtgcaaattccatattgcagttccatccatcacagtaccacctcaagcctgctgttcaatgaagaaaatctttcatcggatcgtcgtggtggattttcttcatacggtaggcttccatgtcctccgcggtgacctcatcattccacttgtacattataatctcttcctttcatcctctcctctcgtctcctttctattccttcctttcttttaaagttactttcttagttcttaagttacttttacttttaa

SEQ ID NO: 48306 - DNA, 242 bp, Setaria italica
  Peptide Sequence Number=SeqID_114280
ttgtttattaattgtatttgttgtcttattagttatatcacatacacaagcctgctgttcaatgaagaaaatctttcatcggatcgtcgtggtggattttcttcatacggtaggcttccatgtcctccgcggtgacctcatcattccacttgacattatactttctcttcctttcatccctctcctctcgtctcctttcatcctccttctttaaagactcagcaagcttcttttgtcaagac

SEQ ID NO: 48307 - DNA, 234 bp, Setaria italica
  Peptide Sequence Number=SeqID_114281
gggatatgtacactctaacaatcgcatatctggaacttaaaactagcaaagaaaaataagacacaaatctaatctgattctgtaaagcaagatgaacaaactcatctccaccgggtgattgctgcaagcctgcaatcatcacctggatgccctggactggaagaggtccagccgacccttggcgttcggcagcagtgcctcaacgcgcaggtcctgcaccatgtgtgcctgctt

SEQ ID NO: 48308 - DNA, 309 bp, Setaria italica
  Peptide Sequence Number=SeqID_114282
aaccctccttgttcaagagcttcttcaaatggctaaagcctgggggaaaggtcctaatcagcgactactgcaggagtcctgggaagccatcagaagagtttgcagcgtacattaaacagagaggttatgaccttcatgacgtggacgcttatggacagatgctcaagaatgctggtttcagtcatgtcattgctgaagaccgaactgatcaggtttgtccctctaaatttcctcgggattttacagaaggagctggataaatttgaaaagagcaaagatgattttctgtctgacttctaagtacctaag

SEQ ID NO: 48309 - DNA, 222 bp, Setaria italica
  Peptide Sequence Number=SeqID_114283
gggccccagcggctcgcacacggcggacagcccttggtcgcgttcacccggcgccccgtcttcctcgtgaacgacaccgcggtaggaccctgcagcggcggcggctgcgccggcctcggggcatggcacgcccgaacgctagctctgctgcagaaacagagcacggccgagacgcgtgagacaggcgggtcatggtgtaggtggagcggcccggggcgcgcc

SEQ ID NO: 48310 - DNA, 462 bp, Setaria italica
  Peptide Sequence Number=SeqID_114284
ttgatgtatctatctgatgaagagttgagcagctagttcaaagaatggtaaatggttgaaggtcggtggctatatcttctttagggaatcttgctttcatcaatctggagattcaaaaaggaaagtgaatccgacacactatcgggaaccaaggttttatactaaggttgagaaggcatactagctcttcccctttgcttctgtcacttgagtattggacttgtatgaaggacttctaccccactctttgattttcttagtttcaataccattttctttgaaatagctgattgattttcatttcatgaataggttttcaaagagtgtcatgcatttaatcaagacgggaattcctttgaactttctctggttacttacaagtgtatcggtgcttatgttaaaaacaagaaaaaatcaaaaccagatatgttggctgtggcaaaaaagtcaagtctacggaag

SEQ ID NO: 48311 - DNA, 255 bp, Setaria italica
  misc_feature (1)..(66): n is a, c, g, or t
  Peptide Sequence Number=SeqID_114285
nnnnnnnnnnnnnnnnnnnnnnnnnnnnnnnnnnnnnnnnnnnnnnnnnnnnnnnnnnnnnnnnnnttttttttttttttttttttttacttgtaaaagcctgcggcgttctgtttgttattgtggtagtaggatttcccctagcatctcatgtttcttttccgtggagaaaactggtcgtgtcctgcgatcctgcgatcgcactgtcgcgtgctgtagcattgcaacctatctgtgaagtctaaagaaccatgc

SEQ ID NO: 48312 - DNA, 369 bp, Setaria italica
  Peptide Sequence Number=SeqID_114286
ttttacgttctttattgtagtcgtctatttttggtagtaaggtttattgttgtagtctacttggttggtaattgagactacaaaagagtttgtggataagctggatcttaaacctggacataaggtgcttgatgttggatgtggaattgggggaggtgacttttatatggctgaaaagtatgatgctcatgttattggtattgatctttccataaacatgatatcatttgcacttgagcgtgccatcgggcgcagttgctcagttgagtttgaagttgctgattgcaccacaaagacgtacccagacaacacatttgatgtcatctacagccgagacactatccttcacatacaggataaaccctcctt

SEQ ID NO: 48313 - DNA, 192 bp, Setaria italica
  Peptide Sequence Number=SeqID_114287
cctatcccctgtgtgccttgcctttcccctgttgcgtgtctcagcgccactgctgtttctgttaacgggaagatggaggtggaggagaggcaggcgcagaagagctactgggaggagcactccagggacctcaccgtcgaggccatgatgctcgactcccgcgccgccgatctcgacaaggaggagcgcccc

SEQ ID NO: 48314 - DNA, 360 bp, Setaria italica
  Peptide Sequence Number=SeqID_114288
tttagtttaacttttgttttatttttaatttttaaattttttttagttttcttttaaggtttttcgtttttcctttacggtttattttagtttgtttagttaggttaactaagttctaagggttagtacttttgggtctcatcggggattatcccagtggcattctagtttctccacttgcgtgaaaccaaattacaagataagtccatcccggtatgagtaatcaatacgtcgcatgcagtgacctgcaactagagggcctgatcaccgccatcttcctcctttgctctgtgtaagaaatattgatttgctcggtatgagtataagatttaacttgactttgagctatatgatgaatgc

SEQ ID NO: 48315 - DNA, 210 bp, Setaria italica
  misc_feature (5)..(5): n is a, c, g, or t
  Peptide Sequence Number=SeqID_114289
ggaangtttttcagcaaatgaactagtgccatttgcaggagaagtttgactaattctcttgaagtcagtatacatctttattcaatatgctagatcaatatacacatattggaatagtagcgagctatgactcagatatgtgtatattgatctagcatattgaataaagatgtatactgacttcaggagaagttgactaattctcttgaa

SEQ ID NO: 48316 - DNA, 343 bp, Setaria italica
  Peptide Sequence Number=SeqID_114290
taagtaaactacgtctaagttaggtaactacttcttctttcttctttgttaacgttagttgcagcagaggtttacttacttacatggcaaactccatgggttgcctcgtcttgctctgccttgtttctcccctcctctttgccaatgccgtccgcagccacccatggggcggcttgttcccacagttctacgaccattcatgccccaaggcgaaggagatcgtacagtccattgtggcacaggctgtggccaagggagacccaggatggcagcatccttggtcagactgcatttccatgactgctttgtcaaaggctgcgatgcatccgtgctgttggacaac

SEQ ID NO: 48317 - DNA, 254 bp, Setaria italica
  Peptide Sequence Number=SeqID_114291
cgccatcgcagcccgtgactccactgtcctggttggtggcccatactgggacgtgccacttggcaggagggactcgctcggtgcaagcatccagggctccaacaatgatatcccagcccccaacaacacgctccccaccatcatcaccaagttcaagctccaaggcctcaacgttgtggatgtcgtcgccctctctggtgacttttcatgctatttcataatttctcctgtactttgttattcaccgacttaac

SEQ ID NO: 48318 - DNA, 121 bp, Setaria italica
  Peptide Sequence Number=SeqID_114292
tggtgcaccgagacatacctatggtgtgaccaccagagagggcgacgacatccacaacctcttccccttggactttgtcaccccagccaaatttgacaatttttattacaagaacatcctg

SEQ ID NO: 48319 - DNA, 327 bp, Setaria italica
  Peptide Sequence Number=SeqID_114293
cgccattactttcatggacatgaagaaccttgcatactaagtcaaaagtagtttcagactttaaactccttaactgcaattcaagttctttcatacctatggtgcaaaatcgttagatagaagcagatatcgcaaaagttgctgataaagcatgtattcatgaacatacaaatggttcatgaatctctgcgcagagacaaacatggatacataatttacactacaataaagttatataccctaaagaagcagaatagcatatatataaccaaatataggatagcaggtagttaaaggtaacatgagtttactgtaagaagctgacaa

SEQ ID NO: 48320 - DNA, 254 bp, Setaria italica
  Peptide Sequence Number=SeqID_114294
ttccttctccgggatcccggctgagtccatgctttctcaaagttctgatgtaacttcgcatcagactgaacttattagaacccagatggtgcaagtaatcccatgtgaagatccccgtctcgacagtactcagcgaacgccatggcctccctcgccgccgtctccgtgcagccggtcgccgtgaagggcctcggcggcagctccatctccggcaggaggctcgccgtcaggccggcgccccgcgccgcctgccg

SEQ ID NO: 48321 - DNA, 358 bp, Setaria italica
  Peptide Sequence Number=SeqID_114295
agaacccagatggtgcaagtaatcccatgtgaagatccccgtcttgtgcaaatcatcaaagagtatcttctgcaatatgacatgagaaaaacatgccatgagataatatgaccctcaccggactcccgtagttccctactgattcagctgacatgattccaacgtgccgtcgccccaaatataaccttttcaccgcccactgatctgattttgctatcagctgcagggctgtatactctgagaaactctgctgacagatgaaatgagctaccatctgcaaattcaacctccacggatttgggcgggtgcagcgcgagcttcgtcaggcgcgggggattgtcgtccgtccgtccgtcta

SEQ ID NO: 48322 - DNA, 373 bp, Setaria italica
  Peptide Sequence Number=SeqID_114296
tcacatttgatcacaaaccctgataagagtttgagtttagataatggcattaggtgtaacgaaccctatgctgaacccgaatgagatgcaggtcagttcctcgttgctgtctcccagcagcttcatagtgagagtgtaagaacccggcggggtgaacgatggcaatgtctgtttgctagctagcacgaattcaccagttgctgggcaaggagtctcatcacagaagttgtgagtttctgagtgaacgtggaagatgaagtacgcgacatctatcactagtttccctgcagtgatgtttttatctgtattcataaacaaaaacatcccgtaaataccctgtttgtgaatggcacgaagcagatacactgacaag

SEQ ID NO: 48323 - DNA, 367 bp, Setaria italica
  Peptide Sequence Number=SeqID_114297
cgtggaacagtcaaagacaggtatcgccagattggaaatgcagtggcagtacctgtcggccgtgcacttgggtatgccctggccatggccattctgaacaagactggagatgagcctctaatggtgttgccacccaagtttgcattctctcatgatgtacaaggtctttcaagtccaaacggtcttcagagtggcaacatctaattttgacttgacttagcaccccccccccctcttcatgcgttagtctgattgaattgttcgtcatgtccggtcatgctcgtgaatatcaataggacaggacatttgcttatttatctgtgggagttggatggaaggaatctgggttccccaatcagatggtttc

SEQ ID NO: 48324 - DNA, 249 bp, Setaria italica
  Peptide Sequence Number=SeqID_114298
gtagaatttaccccactttcctctgcctactcatgaggcaattgtgaagaatggttgcccattggctttcgagcgtaatttggttgggtggcccgacggcatgccaatgcaactagaaaaaccaattgttcttgaagatgctttatctgatcttccggaagtaagtaacaatctctagagattccagacctaccttgtcatgataaaccttaccttgtccatagttgaactagtactttcctagaccat

SEQ ID NO: 48325 - DNA, 472 bp, Setaria italica
  Peptide Sequence Number=SeqID_114299
catagagtcatagagtaggtcgtacttaccgggagccatgcacaacttatgaaaggcaaaggtatcaaaaaagtgagatacatatacatggcaataaatatggaaaccttccaaacactgacttctcatgaaacagatgtggatattgtttgacaggctgtgctaggtagcccccaattgctgggccaattataacacccattccccatgctgtgctgacaattgatatacccaaagcttgctgttcaggttgacaaacttcgatggagtaggcctttactggtgcaaggaatccattcagggcaccaagaagaaaccttgttgcgatagccatccaatatttcacactcagtccaaacaaagtgttgaagacaatgactgaaaatactgaaattgcaattacaggctttcgtccaatacgatcagctactataccccagatcagaagactgaggcaatacctctaccgatc

SEQ ID NO: 48326 - DNA, 491 bp, Setaria italica
  Peptide Sequence Number=SeqID_114300
catatgcagtgtcatggagggagaagacacagtacgtgataatagatgacatcaatgccagttttgagtaagctcttcttaggtggttctgtgctttcttgattagtagaaccttctaccatttcaactgctctctcaaggcctttgtgcttatgtagggtctcctgtttagttactcgatgaatgccaagtaaatgaaaatagcagtagagatatgctcatatgtgcaaaattatctagcttttgtgtttttttaaggtaggatagaacattcatatggagttggcaatttcagtattccaataagacatattatttgtaaattaatcgtaaaatacatgaaaactcttaatgtcaacactgaaacacaaaaaaaagtgtctacagagtaggtcatatttaccgggagccatgcacagcttatgaaaaccaaagtagcaaaaagtgagatacataaacatggtaataaatatgggaacctgcatgatgtt

SEQ ID NO: 48327 - DNA, 177 bp, Setaria italica
  Peptide Sequence Number=SeqID_114301
taagtaactacaaatgtctttttaacagaaaaataggcaataataagtatagataaactgcaaatagttcaaataattgcaactttagcaactctactgatgaaatttgggttgagtagataggtccaaaagttttattaacccaacgatacgcaagagttgattatactagaaggc

SEQ ID NO: 48328 - DNA, 242 bp, Setaria italica
  Peptide Sequence Number=SeqID_114302
cggcgagcgtcgtggctttacctactcagggttccagttggtagccgagatgttagcttacctcctcctgtcagcatcttcagcagcactttctcgtaatggtgtttggatgtctcggtttggaggggatcaattcacaaagctgatcgacgcatcagcctctatggcattcctcgctttcattgctcttggtcttagctcaataatctctgcttactgtgtcttcagcttggtttcgtaaa

SEQ ID NO: 48329 - DNA, 448 bp, Setaria italica
  Peptide Sequence Number=SeqID_114303
cttactagcgtaatgtatcataccatatattgttgttgctaacacggttttttgtctgatgccttatatgccttcttgttgcttgtttttggattgaaggcacactgtattttgtttgttgtggttgtctagaatcttatttttcccctttagagagggtctctgacaagcaattttgaactatttctgaaatgagcttcatcttgcacatgttttggtgcagattaaggatgctgtttttaagactctgattgcaaatggaatgttcaataatgctcatataaggctcacactcacccgtgggaaaaaggtaatacagatcaagattcaccaggatgttgtttttacagtatgttatttgtcaccttctgggcataacctgcttgctcagctctcctgcgtgttcgagtaaataaaaaactgcttgctcattctattcactggctat

SEQ ID NO: 48330 - DNA, 452 bp, Setaria italica
  Peptide Sequence Number=SeqID_114304
gtgagaagtatatttatgagttaaaatgacatccctgaactgggtctaatggtattatcagcctagaggtaagctagtggcagacaaaaatgaactggaatttgtaaaatttgtattcgatcactaactcttcaacagttagtgtaaactatttgtctatttcctacatcaattacaattttcatttgtgtcaatgtcttgcagtttcattatttccaatgtttcatctgactctgattcaacattgattccagtactacgaatactgttttactacttctgtcatttgaattaacaattatacatgactgtggttattcttgtgacttgtttcagagtatagattccaagatacatcacaacaatcttatcaacaatattctggcaaagatagaaggtaatcttgcccaggctgaggatgcaattatgctagacaaggatggttttgtatc

SEQ ID NO: 48331 - DNA, 253 bp, Setaria italica
  Peptide Sequence Number=SeqID_114305
tggggactctgtgaggatctgggacaattcctttccagccacaaatgttgaaatgggaagctggccccaaggaatttgatggtatatgggccccctggtggtataggagtgtgcacaagtctacaggtttctctaagttccgtcaatatccttcggtaagcatacatcaaacatctctcttttccagtatttcatgagtacttctgtcctggatatttgcacagacagccagttctaccattgattaaaattt

SEQ ID NO: 48332 - DNA, 292 bp, Setaria italica
  Peptide Sequence Number=SeqID_114306
aaataagaacttactaaactaagtaattaagacctagacccaacacccaatgacatgctttgttcttacagctgtgattgtcaaatgcaggtgtggacaactggaacaatgggtgaaattacaccggttgtaatgattgatgggcgtgaaattggcgatgggaaaattggtccagtcacaagacaaatccagaatgcatacaaagtcctgacagcagggcaaggggtaccaatacccaggaacggcgatgcataatcgtcactcaggcattccttatctacattagatccaa

SEQ ID NO: 48333 - DNA, 414 bp, Setaria italica
  Peptide Sequence Number=SeqID_114307
gggtacaacgacatgtacatacaatgctcagtgactggcaaaattgcaaactacgctgtaaccacttcctcttactctgaagagcctcggtatgtgtcgatcttaccaggtccaggactaacaattgcaagaataactagcgcacccaataccaccagcagcatacccagtgagttcataaacatggcttctgtggagaagcgcccaatcattttggtgctctgcataaagattgacttctctaggagtccgctcacacttgtggcgatagcaagaacatagatgaatataccaaagaagacatgccaaggaaggaagaagaatagacaacggaccaacttacttagaataccaaccaagggtaaccaaaaaggtaccaaaaataccaagtaagacccaactagacaaagacta

SEQ ID NO: 48334 - DNA, 217 bp, Setaria italica
  Peptide Sequence Number=SeqID_114308
gcgctagttattcttgcaattgttagtcctggacctggtaagatcgacacatacccagtgagttcataaacatggcttctgtggagaagcgcccaatcattttggtgctctgaataaagattgacttctctaggagtccgctcacacttgtggcgatagcaagaacatagatgaatataccaaagaagacatgccaaggaaggagagatgcacggcc

SEQ ID NO: 48335 - DNA, 122 bp, Setaria italica
  Peptide Sequence Number=SeqID_114309
tgcaactcatggacagcaccatgagatttccctctgcggtggcccagaagtttcacctcaaaccctcttcgagacaagcctcccccgtcccaggactcatctgtttagttcatctggactgt

SEQ ID NO: 48336 - DNA, 208 bp, Setaria italica
  Peptide Sequence Number=SeqID_114310
cgcgcgcgttgagcccctggtcgagcacgaacggcagcatcaccagcgggagcccgcaccggaagaggccctccgccgtggagccccacccgcagtgcgtcaggaacgcgccaaccgcggcgtgcgccagcacgcgcgcctgcggcacccaccccgtgcagaccacgccacgccccgccacgcgccgctcgaacccgtccgggagcag

SEQ ID NO: 48337 - DNA, 443 bp, Setaria italica
  Peptide Sequence Number=SeqID_114311
ttcctaattgtccttgttgtctttgtctttaattgtcttggtagttgtcttcgtagtaaaaagttaattaagtcgttattctggttttatatggactagagtatgcgtatgcattggttgaccttagacgaacttttgaggagtcatgtaaatcaaattcttgcaatcctgaagtccagtatgcagatgttctatgttcagttatgagtccgtcatcaattactactgaggaaaacaattgtcatctatcgagtggaacctcttgtagtggagatttgtccataaacagtgatctggcggcattgaataatcgttgtggcatagaatgtaccagttccacacacaagtacagccttggcggtgttacatggactgtttcagttcaggagaaaatggaagactattgatatttggattggacaagacaactcagcatttgccaa

SEQ ID NO: 48338 - DNA, 432 bp, Setaria italica
  misc_feature (255)..(255): n is a, c, g, or t
  Peptide Sequence Number=SeqID_114312
tattggttgtttctttttctattctattgtctaatttctagttctaagtttccacacagaacttctgaatttcattgggatagagtgttttgatatccatgggaaacaaaagcagcagaaacgaactacaacattctttaacttttgcaaggcagaaaagggcatcttattgtgcacgaatgtggctgcacgtggacttgatatccctgatgtggattatatcgtgcagtatgatcctccagatgagccaaaggnttacattcacagagttgggcgcactgcacgtggtgacaaaggcaaaggaagtgccttactgttctactaccagaagaattgaaatttctcatttacctgaaggcggccaaggggttgaccctggactgaatatgagttcagtcaaaaaatgtgccaaatctgcaatcacacctcgag

SEQ ID NO: 48339 - DNA, 298 bp, Setaria italica
  misc_feature (249)..(249): n is a, c, g, or t
  Peptide Sequence Number=SeqID_114313
taccgtagactacaagggtgacgccgacagctcgttggacaggctgtggcagaagaggaaggctgagatcaagcagtagatcttgctcgtagtttcaccctgaatcgactcttgagggatccttccttagctatgttttgatttcatgtctccagaccatttggatgcaatgctgtgatttcagttggtatcttacatctaaagacttaatgatcgtttgttgggttaacctaaaaaaaaaaaaaaaanaaaaaaaaaaaaactaaaagaagaactagaccaaggacacacagggata

SEQ ID NO: 48340 - DNA, 425 bp, Setaria italica
  Peptide Sequence Number=SeqID_114314
gtcttcggtctcccgctctccccttcgagaaatcaagtcgctgctgctgtagtccccccaagccgtcaccatgcagaacgaggagggtaagatggtggacctctacgtccccaggaagtgctctgccactaacaggatcatcatcgccaaggaccatgcctctgtccagatcaacattggtcacttggatgagaatggcctgtacgatgggtcacttcaccacatttgctctctctggattcgtccgtgctcagggtgacgccgacagctcgttggacagtctgtggcagaagaggaaggctgagatcaagcagtagatcttgctcgtagtttcaccctgaatcgactcttgagggtatccttccttagctatgttttgatttcatgtctccagaccatttggatgcaatgctgtgatttcagtt

SEQ ID NO: 48341 - DNA, 345 bp, Setaria italica
  Peptide Sequence Number=SeqID_114315
ttgtttctttcccgtcttcttccccttcgagaaatcaagtcgctgctgctgtagtccccccaagccgtcaccatgcagaacgaggagggtaagatggtggacctctacgtccccaggaagtgctctgccactaacaggatcatcatcgccaaggccatgcctctgtccagatcaacattggtcacttggatgagaatggcctgtacgatggtcacttcaccacatttgctctctctggattcgtccgtgctcagggtgacgccgacagctcgttggacaggctgtggcagaagaggaagctgagatcaagcagtagatcttgctcgtagtttcacctgaatcgac

SEQ ID NO: 48342 - DNA, 250 bp, Setaria italica
  Peptide Sequence Number=SeqID_114316
agaatggcctgtacgatggtcacttcaccacatttgctctctctggattcgtccgtgctcagattattccagcatctcttggaccttatcagctgaagtgcacttttcatgatttattttatgccctcagtattggttatagtccagtgttgaattttctgctgtagttcggaatcagaatttgtaatgaatacacagtttttacatctatgtggtttcatggactcaggtacacgaaaaacaaaaaaaa

SEQ ID NO: 48343 - DNA, 397 bp, Setaria italica
  Peptide Sequence Number=SeqID_114317
taaaggtttaaacaaaattaaaagttttaaggtaactttaaactaaattacaactacaacaacaatgataacttgcttatcgtgctgattgtttgcctggtgtgctttgtctgagactgtgcggtggttccgtggttggcacttggtactgagatattgggatagtccatatgaattcatagttagaccatctagttctctagttatacagatccattgtaattagatctgtttccaattggttgcatcttttcttctgtgaacatcagtagtgctgccgtattcccccaatctccatcatgcagaacgaggaggtaagatggtggacctctatgtccccaggaagtggtatgtgcagcaatcttatttgcgtaaaagctttgtgaatagcatgcta

SEQ ID NO: 48344 - DNA, 340 bp, Setaria italica
  Peptide Sequence Number=SeqID_114318
tcatcattgccaaggaccatgcctctgtgcagatcaacatcgggcacttggatgagaacggtctgtatgatggccacttcaccacgtttgctctctctggatttgtccgtgctcagggtgatgctgacagctcattggacaggctgtggcagaagaggaaggccgagatcaagcagtagtggatcttgcttgcttttagtttccccagaaatcagaattgactcttatgataggtcagaccctgctttggtgaagttttgatttctgtgttgtgaaatcggatacgtattgtcttgttacgtttctagtttggttacttgttaagttaagtttatttgtt

SEQ ID NO: 48345 - DNA, 313 bp, Setaria italica
  Peptide Sequence Number=SeqID_114319
ggaaggggaggatgaagatgaagatgaggacgagagcgaggaggaggaggtgaaggaggataaaaagaagaagaagaaggaaaaggagcaggcgaaggagatggtggaggaggataaaaaggaaaagaaggaaaaggaggtggggaaagaggaaaagaaggtgaagaagaagaaggggaagggagcgggattctctcgaacaagctctgctctgagctccccatctctgagctcactgccaatgccatcagagagatgaactacacccacctcacccagattcaagctagatcaataccacatctgttggaag

SEQ ID NO: 48346 - DNA, 370 bp, Setaria italica
  Peptide Sequence Number=SeqID_114320
aagtaactaacccgactctccccttcgaagaaaatcaagtcgctgctgctgtagtccccccaagccgtcaccatgcagaacgaggagggtaagatggtggacctctacgtccccaggaagtgctctgccactaacaggatcatcatcgccaaggaccatgcctctgtccagatcaacattggtcacttggatgagaatggcctgtacgatggtcacttcaccacatttgctctctctggattcgtccgtgctcagggtgacgccgacagctcgttggacaggctgtggcaggaagaggaaggctgagatcaagcagtagatcttgctcgtagttcacctgaatcgactcttgagggattccttccttagc

SEQ ID NO: 48347 - DNA, 142 bp, Setaria italica
  Peptide Sequence Number=SeqID_114321
taagtatctctttcaggatacccaaattattcagttccccttcttttgtcgggcatttataactagaattgttgtgcaggagaaaattgttagcgataattactatctaaaccagtctgcaaaagaagcctaccgatcctac

SEQ ID NO: 48348 - DNA, 113 bp, Setaria italica
  Peptide Sequence Number=SeqID_114322
atttcagttggtatcttacatctaaagacttaatgatcgtttgttgggttccttctgagtatgatgtgccttggtaacaatgttgtcaaatcaaagtatcttaattcccttaa

SEQ ID NO: 48349 - DNA, 182 bp, Setaria italica
  Peptide Sequence Number=SeqID_114323
ttccttagctatgttttgatttcatgtctccagaccatttggatgcaatgctgtgatttcagttggtatcttacatctaaagacttaatgatcgtttgttgggttccttctgagtatgatgtgccttggtaacaatgttgtcaaatcaaagtatcttaattaacccttaaaaaaaaaaaaaa

SEQ ID NO: 48350 - DNA, 235 bp, Setaria italica
  Peptide Sequence Number=SeqID_114324
ctataatgttctgtacataagcataagagaagtgtggtccttttcatggtgatcaggaaactaacatgataaccaccatatctcaaacttttagaaactcatttaattgaaagacaaaataataaacagatcacaaaataaaaacatgtccatatggtgacacatacgctttctccaagttccttatgattgcattcagcacaccatcaatgctaataagctcattcgcagcctt

SEQ ID NO: 48351 - DNA, 235 bp, Setaria italica
  Peptide Sequence Number=SeqID_114325
aaaagctaccagcctaatagtaagaagttctgaaagataaacaactacccacgccacctcagttgctagctcttcatccgctttctccaagttccttatgattgcattcagcacaccatcaatgctaataagctcattcgcagccttgggatcaggccccttgataagatttgatggtgtgctgaatgcaatcataaggaacttggagaaagtgctgaaagataaacaattaccc

SEQ ID NO: 48352 - DNA, 171 bp, Setaria italica
  Peptide Sequence Number=SeqID_114326
ctgactatgaactaaggatatgctggtaaactgtcagttcacgcttcacgcactcacattttccaactacaggcatccgatgcattggtatcaagggctaagttacatggccaccgatctgatcagcacatccttctgttcgaggaccgtgagagtacatttcacaattca

SEQ ID NO: 48353 - DNA, 339 bp, Setaria italica
  misc_feature (77)..(77): n is a, c, g, or t
  Peptide Sequence Number=SeqID_114327
agaagaggagacaagaagaaaatgcaagctgattaccaagccaaccaaggggtaccgagaatacctctgccattgcngtggcaggctgcaaattgtataccccaataacttttgacttatttagaaaggagtgtgaactaagtatggactgtatggcctatggttgtggtgagtttggctctctttctgaatatatgattactgtcaagaacaaaactaaaggaaccagcttgtgcgatttagaactacaatacaaaataggtaacggttagacaatagtaacttagacaaaaaagtttagaaaaataactaggaacttagtttaattagtacttagta

SEQ ID NO: 48354 - DNA, 165 bp, Setaria italica
  Peptide Sequence Number=SeqID_114328
tacttagttaattaggtcccttaattggttgtggtgagtttggctctctttctgaatatatgattactgtcaagaacaaaaactaaggaccagcttgtgcgatttgactcatcaaatggtacggttgcatgtacttgcaaaaaagtttgaaaatctggactgtta

SEQ ID NO: 48355 - DNA, 441 bp, Setaria italica
  Peptide Sequence Number=SeqID_114329
atgttttcagataccatattttgtcatgaagtttggcatatcactgcactaagttcacactcttctggtagtaagtttaccttgggataataagtttgctaatgtttatcgatattgacaaaataaaatgttagtggcttccttgaagacccagattatttgctaccctatttttgcattaccactacaagattccttgaacagctgctttcatatgtgacaaaatgatattcaaagaaggatgccctctgtcttgtctatttacagttttgtgtggcgaaagaagatagagcgtgatgtatctcagggacaaaaggtggacatttctgtcaaatcagagaagaagagacagctagaaagaatggtactacgatcatgaatttctctactagttctatatacctgttcccgtttctttttagttaaaactttgaagcttaa

SEQ ID NO: 48356 - DNA, 384 bp, Setaria italica
  Peptide Sequence Number=SeqID_114330
cgggcgggcctgttcggcggcggtgagtggaaaagcgagggaggaggggggttagccggaggcgccgggacgtcaccgaggagcagatcgtggagtacatggcgaagaaggcgcagaagaaggctgagaaggtggcgaagaagctgaaggcgaatgcggtttcagggtactccaatgattcaaacccctttggcgatcccaacctgacagagaattttgtgtggcgaaagaagatagagcgtgatgtatctcagggacaaaaggtggacatttctgtcaaatcagagaagaagagacagctagaaagaatggctgaaatagaaaaggttaagaaaagaagggaagaaagagcaatcgaaaaggcacagcatgaaagaggaaaat

SEQ ID NO: 48357 - DNA, 346 bp, Setaria italica
  Peptide Sequence Number=SeqID_114331
tgggtacttaaaattgaagcaagttgcaagagtaactacaacagtgtgctgtagtaattcatgattgaatcgtcaaactaggagaaatggggaaaaaatttgaagcagatgctgccaaaaaattacccagtaaaagcttaaaagagcgtcacaatgatggaagtctctaaacaaatcaagacaaaataagttaaaactgacctttgcacaggttgaggctcatcatcactgccattcaattcatgtgacgaattgtattcaggtaaagagctcttcacacactcaggatcagaagagcccatagtctgctgaaactggcattgaagcttccgaaactaggccatta

SEQ ID NO: 48358 - DNA, 368 bp, Setaria italica
  Peptide Sequence Number=SeqID_114332
aagaacgaaaaataacaaggaaacaagaactagttagaagggaataagacaactgaagtcagtagaactccagaagcaggggtagcaaccgaagcagaaacagatgaagcaatcacaggtgagttattcccctcatgatcctggccagtttgtgcaggaatcactggaatattcccatacttgtgtgcagattcagcagcaagaaaagggacagccgttcatcagcatccgttgcaggttgatacgattgcgtagaataacttgtagaaaaatcaattggtgcttgtacctgagattcagacttatctatcaccgcaatctcattcccatgtgattgtggtgccaatccatatgtcatgtaagatggt

SEQ ID NO: 48359 - DNA, 177 bp, Setaria italica
  Peptide Sequence Number=SeqID_114333
tgcaaaagaagtttagcagcatcccatgtaagagtagcatcacatgcctgagattcagacttatctatcaccgcaatctcattcccatgtgattgtggtgccaatccatatgtcatgtaagatggtgcggtacaaactgacgtagattggggaacccctgaagcggctgaatcatcc

SEQ ID NO: 48360 - DNA, 515 bp, Setaria italica
  misc_feature (277)..(277): n is a, c, g, or t
  misc_feature (292)..(292): n is a, c, g, or t
  Peptide Sequence Number=SeqID_114334
cgtaaaccagttgctttcatagtattacggctaatagagttcaggcagtacaattcaaccaaaaaagttcccaacttctagcttccgaggttcttcaatggcaacatccagacttagttggcagcagcagcactcttcttgggggtagcctcagtcccttctctgaagttgctcttgaaacggcgaggcacgtgtcgcaggtacctcatccttcctgttccagtggtcttgcgcctgatggccttcacgctccagttatacttgcggatgcgggcgnggggtacccgcaggnggagcaggtgctcttctggaggtggaagctgcggcggccgcaccggatgcagagcgtgtgcgtcttgttccggcgcttgccgaagctgccggtacccttcccctgcgagccacagcaacaacaacaacagccgcgagacgaagcaacacgttagcgacggaaggaggcggggaaggtggaggcggcgcgcacgtaccattccttcgttgctccgctagggttc

SEQ ID NO: 48361 - DNA, 241 bp, Setaria italica
  Peptide Sequence Number=SeqID_114335
tcgagcacgcagcagcagcagagggccgccaagcatcctttcaagaagccgtcgttgccgcccttctcctgctgcggcggcggcgcgccgtaggccggcggcgggtacgcctgctggcccggcggagggtacgccgtgcccggcggcgggtaagctcctccctgctggtagctcatggctggctggctggctggctggctggtgactggaactccggaagccaagcaaggactgatcactg

SEQ ID NO: 48362 - DNA, 269 bp, Setaria italica
  misc_feature (16)..(16): n is a, c, g, or t
  Peptide Sequence Number=SeqID_114336
acttttctaaatgcanagtttttactatgcatctaaacatacactatatctaagtgcataaagtcaaaaagacatagaatttgaaacggagggagtacaagacttcatccgggacatgcttttatttacttgacctgtatgaatggtccatgcgaacacatccatgtccaattatttggaggcttggcgtttatattctttagccaattctgggaacctccgccactcccgcacccgccgccgcgccagcagtaaaccctagccccgtc

SEQ ID NO: 48363 - DNA, 256 bp, Setaria italica
  Peptide Sequence Number=SeqID_114337
cgtttgcctctcaatttaggaacacaaagtaaaagcaacaaaaacaccagtttcatgacccaaagcctcgcctaacataactggagtacacgcttagttggtgccagcagcagctcccttcttccttgatacggcctcagttccctctctgaagttgctcttgaacctccgtggcacgtggcgaaggtacctcatcctccctgtgccagtagtcttcctcctaatggcccagggaggatgaggtaccttcgccacg

SEQ ID NO: 48364 - DNA, 202 bp, Setaria italica
  Peptide Sequence Number=SeqID_114338
cctcagtccctgaattcaagtaaacaagttatcaatttgtagccagtcaatcttcatcaaagaaaaaagatattttccatgcccaaactcgcagggatcagtcaggtaccttctctgaagttgctcttgaaacggcgaggcacgtgtcgcaggtacctcatccttcctgttccagtggtcttgcgcctgatggccttcacgc

SEQ ID NO: 48365 - DNA, 228 bp, Setaria italica
  Peptide Sequence Number=SeqID_114339
gtctatgttattccatatcctggacaagcatcgtttgcctctcaatttaggaacacaaagtaaagcaacaaaaacaccagtttcatgacccaaagcctcgcctaacataactggagtacacgcttagttggtgccagcagcacctgctcctcctgcggctaccccgcggcccgcatccgcaagtacaactggagcgtgaaggccattaggaggaagactactgggcac

SEQ ID NO: 48366 - DNA, 135 bp, Setaria italica
  misc_feature (121)..(121): n is a, c, g, or t
  Peptide Sequence Number=SeqID_114340
agcttccgaggttcccaacttctagctagaagtctggatgttcccaacttctagcttccgaggttcttcaatggcaacatccagacttagttggcagcagcagcactcttcttgggggtancctcagtcctctct

SEQ ID NO: 48367 - DNA, 250 bp, Setaria italica
  Peptide Sequence Number=SeqID_114341
ccaaagcaagccagaggtttctgctcattatgcatttcttctatctggaagaacactgaaaggatctttgtttggaggatggagacccaaatctgatctaccttcattggtgaataagtatgcagacaaggaaattcaagttgatggcctaatcacacatcgcaagcacttgctttctagcatcagttcgagtgcacggttgatgtcaccgaatggtatatcatgcgtgactaggccatcaacttgaatt

SEQ ID NO: 48368 - DNA, 427 bp, Setaria italica
  Peptide Sequence Number=SeqID_114342
aaataacaaaagtaaaacaaaataagttaaggtttagactacctaactcttggataaagtgcccgcggatccagaaaaccctcacaagaacagggtaaaaccggccaaaaaaagcatcagtggctgtttgatgtaaataaatagctatcagttgggaagttggcatcagagtgcatttttagtgaaggttgggtggagctggtattgttttgattctttagttgggtgattttcttttcccgttttgggtgatgaggatgaatatgcgttgctcttgcaattgtttaagtcacgagaaccgcttttgcgtctttatcaccagcaaaagcttgttgattgtatagtgcgcttgaaatacaccatgatggttggttgattgctttgcttgcttccagattgatgagtgaatattgattaactttggcat

SEQ ID NO: 48369 - DNA, 242 bp, Setaria italica
  Peptide Sequence Number=SeqID_114343
cttaaccaaagaactaaggaaataacaaaggggactaggacgtaggggaccaaggtgtacaccatacgccgggaaaatgcaaggtggggattgtagaaagaaggttcatggaggataagaaggcagcacttgtcaagacattctccatggttgctttatttaaggtatacttttggcttatcaagtaacaatgttggtttgctcctactcttggataagtgcccgcggatccagaaaaccct

SEQ ID NO: 48370 - DNA, 430 bp, Setaria italica
  Peptide Sequence Number=SeqID_114344
gcatcaagagataggccgattcattcgagtccaatatttgctggcagggatattcgaagtgaaaggtgatctggggtacaatttctatggttgatgctgaaaagaggctcttggctcatgccctacaagatcctgaaaaccagcattttgtcttgctttctgagaggtccatcattttcatttatcaccatttaaatttgaatgctccccatcctaatgctttattctaattgcagttgtgtgccacttcataactttgattatatatatagttatctcatggagacaaatgtcagctttgttgactggtaagtgaacatactgaaggttatataaagtgatatgttagttttccccccctatgtggagttgaacagatatttgatttacgatatgccttttttgtatttttttaattaaccacaaatag

SEQ ID NO: 48371 - DNA, 460 bp, Setaria italica
  Peptide Sequence Number=SeqID_114345
aacaagtaagaacaacaatagtaagaattaggtaccgaaagggaaaataggacaatacctaaaagtactaatagggcggttgatacaagctttgagctgctgaagaacatttcctccattgatgagagcgttcatgttagcagcaatgcaaagcatgtagcgcagagaagaccttgcatgtggaacggcatgaagcggccctgctacctgttcgcgcgcaagttctaccccgaggcgctcgacaacctgatgaacatattctcaaactacaccatcatctgaggaccggatcagaggctccagcagttattttctttcctcccgtgtgctgttgcgtcagcgcgaccttggtacctaggtgagcggtgtaggggatgtacttggtgatggaatccattagctgatgagaatccagtgctgctccttactctggtagattactgatgatggctggactctt

SEQ ID NO: 48372 - DNA, 252 bp, Setaria italica
  Peptide Sequence Number=SeqID_114346
ttcgtacaccagcttcatccctggaacaatccatcaaatgactttcagtttcagatcacgtcttgacctcatcaagaattgtcgaagcagagtgctttatgtgcgttgcaaatcacgtaccgtcgaggtagacggcgccgttggagtggaagccgatggacgacgcgtacgtccccgccagcgccggccgtgccggagcggcggacgcgacggcgaggccgagggacatgaccaggtgcctctgcttgtcct

SEQ ID NO: 48373 - DNA, 255 bp, Setaria italica
  Peptide Sequence Number=SeqID_114347
gaatattagtctggtttgtaatgtaaattgtggattaaatgatgtttacaacatatttttaattgtttcagttttgtttcgttaatgcagcacgggtcagagatacatatacacaggatccagtgaccaatgcgtctatatttatgatgtggtatggaccttagatgcttccattggaccacttttccattgacatgtttgcacaaataaatacacaaaagtcgatgcatatggtatttgtaaagttatttgcaa

SEQ ID NO: 48374 - DNA, 242 bp, Setaria italica
  Peptide Sequence Number=SeqID_114348
aattttaaaggtttttcttttttttgcattttttctcatctatcattataactatattttcagttgcacaccaaaagcatatgaatgggattacagatggatgacatacccatcagaagcccgatatttgaaacatccatatgaccagtcactagccacattcagaggccattctgtgttgcgcacacttatccgttgttatttttccccaatgcacagcacgggtcagagatacatataca

SEQ ID NO: 48375 - DNA, 304 bp, Setaria italica
  misc_feature (87)..(87): n is a, c, g, or t
  Peptide Sequence Number=SeqID_114349
gggcactattttatctcaaactgcaaggatcagactattaaattatgggatctcaggaaaatgtcctccactaagaaagattgcacnccaaaagcatatgaatgggattacagatggatgacatacccatcagaagcccgatatttgaaacatccatatgaccagtcactagccacattcagaggccattctgtgttgcgcacacttatccgttgttatttttccccaatgcacagttttgttcgttaatgcagcacgggtcagagatacatatactactaggtattcctagttgttaccttaa

SEQ ID NO: 48376 - DNA, 233 bp, Setaria italica
  Peptide Sequence Number=SeqID_114350
gttcctggcgcctgtctctcctcggcggcgccttcacgcagggaatgactggcagtagaagggtccaagcctcaggctatcaattgtactgtcctggttggaattgcctggacagctggattgcaagtctgtgtccatgttaaagtcttcctgtggagtggccaaacatgcgttggaaacgaaagatacatcatggaggatcatctcaacaacaactgatcagtcctggttgg

SEQ ID NO: 48377 - DNA, 174 bp, Setaria italica
  Peptide Sequence Number=SeqID_114351
accgccacgcatgggctcctcctccgtcgtgttcacgatcgtcgccatcttgttgctccttcgctgcgcgtgagccggagctgccgccgccgtcgccgccggagaggagaaggggggaggagacgggtgcgagactgcgagggtttctccactcagtcacccaaccacccaacc

SEQ ID NO: 48378 - DNA, 365 bp, Setaria italica
  Peptide Sequence Number=SeqID_114352
tggtcttattggtctaagtctaaaattgtcttctttgttagtaagtaattattccagagttacttttgccaaggaaagtatatcggtgacaagcaggttttgttggatgctgcaagaaaggtgggcatagaaggcgcagaagagctgcttgaagaccctaccagaggagtcgatgaggttcaggaagaactcaacaagtattcatctggtatttccggtgtccctcactttgtgatcaatggaaaatatcaactcagtggtggccagcctccaagtacattcatgagggcgtttgagatggctgcaaaggatggagcttaacgatggtctaaggaacatctagtgtgcttgtgtatgtttgaagg

SEQ ID NO: 48379 - DNA, 242 bp, Setaria italica
  Peptide Sequence Number=SeqID_114353
ctctcccatatgtctcaatataccacccaccaatgtcatgcatgtaacaacgaggctcaaagagccaatacctgctaggtggcaaccgagccctactacatcggcactcacagggtgaaactttatctccaacttgataccagtgcatgtgtttaacctgtgtaacatatggatgcagcaaacatataacacagtaagagcccaaagacaaccgttcataagcaaattttgtacatgtaaca

SEQ ID NO: 48380 - DNA, 251 bp, Setaria italica
  misc_feature (251)..(251): n is a, c, g, or t
  Peptide Sequence Number=SeqID_114354
taactaaacaaaccaaatttaaataagaactaaagtacaaataccgaaggaagacaatttagctagtaaagagctcttcgcaggtttcagcagccaaagatacatctaaaaactgcatgtaaccataaccaaaaggtacagtatcctgggatatagcctctgagacttcaattgggagttgaaactcaacaatctcatctttaaatgtccaagcagaaaaccaccgaaattccctataatttccatcattn

SEQ ID NO: 48381 - DNA, 125 bp, Setaria italica
  misc_feature (115)..(115): n is a, c, g, or t
  Peptide Sequence Number=SeqID_114355
tgggaatgacatatgaggagttgtcagtgtatggcaggttaaggctcaagctctgcagtaggtggtgcagattcaacctcagccaatgaagagtacttaagatggattgctgccnccacacacac

SEQ ID NO: 48382 - DNA, 365 bp, Setaria italica
  Peptide Sequence Number=SeqID_114356
atgacagagttcattgagggagtcaatgagtactcgtggctgatgagtttgagtagcttccccagtacagaccatgaattgtccagtttctgtaagcagcaagcacaagttagtttgttgtttcttctttttagagcagttattagtgattaatacagataatttgtgaataaaataattgtatcatcagtaagtatccttatttcagaagctttgtgaattaaaataattgtgtcttcagtaagtatccttattccagaaatttccctttactgcttagatattaagcatttactcttcaccagcaccaatgaccccttataccaacttcaaattcagtatatgtggcaagaaataagagaaac

SEQ ID NO: 48383 - DNA, 396 bp, Setaria italica
  Peptide Sequence Number=SeqID_114357
accaatagacaagtacaaattagggaaaagaatagacctacaaggacaaatagaagctgcttcttgacgttggtctttggttgtctcaaaagataaatgagtacttcaaacgcttttctatatatctgaaaaggccaccttcaccttccagatagaaaggtgactctggaatcaagcaacaatccacgtccctgctagccagagtagcataatgcgcgataaaaccactgtgtcgtcccattagcttgacaagacctataccattctcagcacttacagcttctacatgagcagcatttattgcacgttgagcctcctcaactgccgtgtcgaaaccaatgacttgtcaattacagggatgtcattgtctaatggtctttgggatgccagcaacag

SEQ ID NO: 48384 - DNA, 393 bp, Setaria italica
  Peptide Sequence Number=SeqID_114358
gctcgccgtcccatcggaaggttgataagaaggtcgcaggttccagctccagtgctacgaaggggatgtagcaatgccgaccattcacttgaccaatggtgaaaccggtatatccagccatggttccatggaccacactgtgagccaacagtgtgcaatagacgttatcagatgcattgctagggatggcacgtatcatgtacgtcggatctatgtacttcagattaagggtcatcttgttttcttgaagtactcatttatcttttgagacaaccaaagaccaacgtcaagaagcagctcattgcctgaggcatctttcccaattgactgcatggtttcagcaataagtttctgtccggcaccctcagcaacaacaataaccatatgaccatt

SEQ ID NO: 48385 - DNA, 278 bp, Setaria italica
  Peptide Sequence Number=SeqID_114359
cgagatcaccaaggctagcccggacgaaggccgagaggaactgccgcatctgccacctcggtcttgacagcgccgccgccgagtccggcgccggcatcgtgctcggttgctcctgcaagaacgacctctcccgcgcccacaaacagtgcgcggagacctggttcaagatcagaggcaacaagatctgcgaaatctgtggctcagctgcatgcaacgtggcaggtttcagtgatatggacttcatcgagcagtggaatgaatcaagcagcaccgcggct

SEQ ID NO: 48386 - DNA, 218 bp, Setaria italica
  Peptide Sequence Number=SeqID_114360
atcgtgactcttcttcatccccgtagaccatggtgttcactcactcccgatttggttggaatgttcaggagcggtgggcggcgccacggtgctggagctgaggcaccacagcttcagctcggcgccgagcaagagcagggaggaggaggccgacgccctcctgtcctccgacgccgcgcgcgtcgcgtcgctgcagcggcgcatcgagagctaccggc

SEQ ID NO: 48387 - DNA, 237 bp, Setaria italica
  Peptide Sequence Number=SeqID_114361
cggagccggagcaggagagccttgcaggggagggcaccacctgaggtcaagagcggtgggcggcgccacggtgctggagctgaggcaccacagcttcagctcggcgccgagcaagagcagggaggaggaggccgacgccctcctgtcctccgacgccgcgcgcgtcgcgtcgctgcagcggcgcatcgagagctaccggctgatcgggaatgatgcggcggccgtggcggcgtccaa

SEQ ID NO: 48388 - DNA, 449 bp, Setaria italica
  misc_feature (365)..(365): n is a, c, g, or t
  Peptide Sequence Number=SeqID_114362
tgtcctattgtacgtctactttccttctttctattgtcgtcccggggtaaggttgtttctattccaggttggtgccgctcggcacggactgggccgccggcgcctactacggcgagcccgcggcgcggctgggcctccggtacgtcggctacaagatcctcccggaggagagctcgctctcccgcgagtaccccaccggcgaccccgtgctgacggaccccgccgccgtcgcgcagcgcggatgggacgtgaccaagaaggtgtacctggacaggcagaacgtccggctggacctggcccgattcagggaggagctcgtcagggctcaccagtacctggccgccggcaggcggcggcggccaagngcagccgtgtgatgtgatcagacagtttgaccggtttgattaaccaacaaacagatcagcaatgaacatcacctgcctgctatt

SEQ ID NO: 48389 - DNA, 247 bp, Setaria italica
  misc_feature (245)..(245): n is a, c, g, or t
  Peptide Sequence Number=SeqID_114363
tatctgcttctcgaggggcgatctgcggatgcactcggcgagcgcgtcgttccagctcgtgtccgccgtcgcgcagcgcggatgggacgtgaccaagaaggtgtacctggacaggcagaacgtccggctggacctaggacccgattcagggaggagctcgtcagggctcaccagtacctggccgccggcaggcggcggcggccaagagcagccgtgtgatgtgatcagacagtttgaccggtttnaa

SEQ ID NO: 48390 - DNA, 359 bp, Setaria italica
  Peptide Sequence Number=SeqID_114364
ccgcactgaagtagaagtccatctttctgtgatctcctaccatggggttggtccagagagaaccctgtatcttgtgtgctgcaaggccaaatggagggagtgatactgtgttgctctttttatccataatatggccatttgtttcccactggtgactggatgacaaccaccgttggtcatggtctcaagtgcctgatctgtgaacaagaaacataacagaggttaccgtggattgaaaacagtactaaggtcaccactggtggatctgtgataaagtatatagtatctaatagttttcaagaagtcaaagtcttaacatgcaaatcgttgtcaagctcaaagatctggcttgatttgga

SEQ ID NO: 48391 - DNA, 327 bp, Setaria italica
  Peptide Sequence Number=SeqID_114365
aagtcatggtgctggactccaagctgcttcagccaggagtccgccgcactgaagtagaagtccatctttctgtgatctcctaccatggggttggtccagagagaaccctgtatcttgtgtgctgcaaggccaaatggagggagtgatactgtgttgctcttttttatccataatatggccattttgtttcccactggtgactggatgacaaccaccgttggtcatggtctcaagtgcctgatcttggaacgaggaggaaattggttattggttaagtttaggtaagtctattgttcttagttatttaagtttccttttcttacgttt

SEQ ID NO: 48392 - DNA, 351 bp, Setaria italica
  Peptide Sequence Number=SeqID_114366
ccaagaagtatgtactgtactgtgctattcctcccaattgccgttgatccatgttcacagtacaatcaccttgtgcttgctgcggaatggtgacagcagggaaaacgaccgagaagctgcagcagcaaacaagcatagtgagtatttcataaacaagttctggaaataaattcagatagtgctcccgcttgagcattgggaccaagaaaaggagttttcgcttcacaaaatagtatcttactggtgacaatattcaattaatgcatatgaatatgaaaatacattcaaaagacaaattgtgcttgtgctattaatagtaacctttagaagaagcactagaatcctcttgtg

SEQ ID NO: 48393 - DNA, 477 bp, Setaria italica
  Peptide Sequence Number=SeqID_114367
ggctgctgtggtgcagttgacgcactggaagtgctacttcttgcagcaattctcttttgcctctccagcttaagcctttctagccgtttgatctgttcctcttccccaattcgagttattcttcatgttaaatcacttgtatttgtatgcctaaaccgtggtttagcccgtttaaacactgcacagtggccagttgtccccaattaaacatctgtttatcccgattaaacagacatttttcctcaataacatcgttggaggctgacccagctgccagttgcaccacctgctggttttggtaagaacctgtaaggctgctctttctttgccttttgaagatccgctttatatgctcgcaagttttgtgcacgtttctgtgcatcagtcattgggccttttgatgatgataatcgcctcactaaagcatctttccttcgtttatccaaactctcctgtgaacttcttagccgcttatct

SEQ ID NO: 48394 - DNA, 389 bp, Setaria italica
  Peptide Sequence Number=SeqID_114368
cgttcggtaattcctatttgtctacccttctagttctaaggtcttgtattgtccttggcttttccttgccaaatttcaaagtttcctgaagccttttggctctttgcttcgaggtttttctatttacctcattgccctcaactgaaactgagtacacaggctcaggtactcgagccttaatgctatccacatgcacaagcgatccagattcttgcacaggtaattgactgtagtcagaagcattctccagggatgtcaccctagcaaaaggggcctggtagggtttctccatggcagccaaggttggcctctcaaggttcatcctttcgacactcagtcaccacctcatatgaggtggtgactgagtgtcgaaaggatgaacctgagag

SEQ ID NO: 48395 - DNA, 205 bp, Setaria italica
  Peptide Sequence Number=SeqID_114369
aacttaagtaagaacttaagaactaagaacggaaataggtagaacaagacaagggaaaacgaccgagaagctttagaagaagcactagaatcctcttgtgaaataagattcttcagcatcgacccctctcccgctggggcatcatcaactgaagacgcgtcggaatccattgcaccctcagtcaaggctgatgcctggcttttcc

SEQ ID NO: 48396 - DNA, 365 bp, Setaria italica
  Peptide Sequence Number=SeqID_114370
ccaacatgggatgataaaatcagatttactacctgaacaacacccaagagttggtcaggtagtaaatctgaccaactcttgggtgttgtttttaccgctcgagagtttttcggatgatctgtttgcacctgtagcttaccttctggttcatcaggacaacaaagttccagggtcatcgcaggctccgatgccgacacagtcggtgcagcccttgagcctcccaccactgaaggaggagtagggcaacatatgtcatttacccttgacatggttcaatttttaagattttctgacacagagcaacccttgctgctgtaaggtgttgagacaataaacttgatccttatttctctttcagagctcga

SEQ ID NO: 48397 - DNA, 252 bp, Setaria italica
  Peptide Sequence Number=SeqID_114371
agcggcgcgggtacgcgtaccggtgcttcatgggggcgcgccacgccgacgagctccgggaggtgcagggtgagatcggcttctacctccagctcttccccctcgtcagctacgtcgacgccacgctcaactgggtgaggctcctcgacaaggccggcacctgtggtaagaccatgtcttgtgccgttcctatttctctcgtgcgatggatgctgcttagcaattgttcagggagtatgccttggtaattgg

SEQ ID NO: 48398 - DNA, 303 bp, Setaria italica
  Peptide Sequence Number=SeqID_114372
gacgaatgctttgtatgctatggagctggctctggctctggagcctcaccctccctccacgtgtgttttggtacttcatgagcttttcagcgtgctccctctcctcatcacttgattccttgaagaacttggcaaatcccttgagagcgacgttgtcacggtcgaagtaggcgaagagggagtggtaggcataggaggcattgtactccacattgatctgctcgttgatggcggcctcgcattcgtcgacgaacttttggcgcgcgagggacttgtcgggtgtctggggcacgagggagagct

SEQ ID NO: 48399 - DNA, 261 bp, Setaria italica
  Peptide Sequence Number=SeqID_114373
acacagcatcagtaaccaagtatgtttgaaagaacatagcaactacgggcagtggggtaattacttggtacttcatgagcttttcagcgtgctccctttcctcatcacttgattccttgaagaacctgtagagatgaacccacacaagaacatcattgaagggaagttttttttttgtaaaaaaaagcaccaataagataattagttcggacatgatgtgttcatgtgttgctgactgaggctcgcaaaatgaaacgacga

SEQ ID NO: 48400 - DNA, 413 bp, Setaria italica
  Peptide Sequence Number=SeqID_114374
tagcgacaaatataaatgctgatatcagtaaacttctctttccttgagcaccttccaaccctactccactgttgtttccttccttcagacctcttcctcaagcagcttctgatcaaagtgccacacccctgcactcaaatcatatacatctcaacaaaatcatgatgttgaacaacatactaaccgggccccttgcccactctcctcagctgggcaacatacttggagatcttcttgatgtcttcgacctttcatggaagtgcaatattttgtacatcgtaatcacttaagtgttgagttcaggaaaacacgtgcaaaataaaatagtgctctgcataatttgttacggatagaaaaagatttggttgcttttacctgatccgtaaggaattcactctcgatgaagtctgtca

SEQ ID NO: 48401 - DNA, 331 bp, Setaria italica
  Peptide Sequence Number=SeqID_114375
accatttattcatcaagattgcaacacatatcgccatgttttatttccaataatcccaagggggtggcaatggcaacagagcaccccaaaccacagcaataacatcacaagttctactgcttttcaggcatcatgttccctgcaggaggccatggaaccatctacgcaacaaaagtcctactgctactacaaccctacacccaatgaaaaagaccctcacccagcgcttggttacccccgctgcataactttgtcaatactacaactacctactttaccttagaagacaaccttaccaaaccctaactaccaacggtagtttaccttacca

SEQ ID NO: 48402 - DNA, 196 bp, Setaria italica
  Peptide Sequence Number=SeqID_114376
cgctctcaagggatttgccaagttcttcaaggaatcaagtgatgaggagagggagcacgctgaaaagctcatgaagtaccaaaacacacgtggagggagggtgaggctccagtccattgtcacacccttaacagagttcgaccaccttgtggccacagcgtgcaggttgtgcagcttctcattaaccagcttttcc

SEQ ID NO: 48403 - DNA, 309 bp, Setaria italica
  Peptide Sequence Number=SeqID_114377
cagagaaggggtaccatttatcatcaagattgcaacacatatcgccatgtttatttccaataatcccaaggggtggcaatggcaacagagcaccccaaaccacagcaataacatcacaagttctactgcttttcaggcatcatgttccctgcaggaggccatggaaccatctacgcaacaaaagtcctactgctactacaaccctacacccaatgaaaaagaccctcacccagcgcttggttacccccgctgcataactttgtcatctcactccttcttttcctttgtagtctaccttttcctaacctt

SEQ ID NO: 48404 - DNA, 130 bp, Setaria italica
  Peptide Sequence Number=SeqID_114378
ccctgagaaaggcgatgctttgtatgctatggagctggctctgggtggtcgaactctgttaagggtgtgacaatggactggagcctcaccctccctccacgtgtgttttggtacttcatgagcttttcag

SEQ ID NO: 48405 - DNA, 479 bp, Setaria italica
  Peptide Sequence Number=SeqID_114379
cccatcctgatggattccactttcatgagcaaaggcattggcaccaacaatagctttgtgtggttgtacgtgaagtccactgtgctcttgtaccattttgctcgtcaaagtaatatgttgggaattgattccagtatacagaccatttaagagttccccacgacacttaattgccatgacaacctcctccaaagatgcatttccggctcttcaccaataccattaatagtcacctctaactgacgcgctcctgcacgagcacctgctaatgtgttggcagtcgcaagaccaaggtcattctggcaatgagtggaaatgatagcattttcaattccaggagtgtttgcctttatgtcagcaatcaagttcccaaattcataaggaagagtgtatccaacagtgtccgggatgttgagagttgtagctccagcttttatgacttcctctagtatatgatacagaaactctctatttgacct

SEQ ID NO: 48406 - DNA, 390 bp, Setaria italica
  Peptide Sequence Number=SeqID_114380
aagtccactgtgctcttgtaccattttgctcgtcaaagtaatatgttgggaattgattccagtatacagaccatttaagagttccccacgacacttaattgccatgacaacctcctccaaagatgcatttccggctcttcaccaataccattaatagtcacctctaactgacgcgctcctgcacgagcacctgctaatgtgttggcagtcgcaagaccaaggtcattctggcaatgagtggaaatgatagcattttcaattccaggagtgtttgcctttatgtcagcaatcaagttcccaaattcataaggaagagtgtatccaacagtgtccgggatgttgagagttgtagctccagcttttatgacttcctctagtatatgtaattta

SEQ ID NO: 48407 - DNA, 388 bp, Setaria italica
  misc_feature (34)..(34): n is a, c, g, or t
  Peptide Sequence Number=SeqID_114381
cgtcaggtgatattatttcataagttcctttatntttaagcatcccatcctgatggattccactttcatgagcaaaggcattggcaccaacaatagctttgtgtggttgtacgtgaagtccactgtgctcttgtaccattttgctcgtcaaagtaatatgttgggaattgattccagtatacagaccatttaagagttccccacgacacttaattgccatgacaacctcctccaaagatgcatttccggctctttcaccaataccattaatagtcacctctaactgacgcgctcctgcacgagcacctgctaatgtgttggcagtcgtctaagtacctaaggttcttattttctttggtttctttaattttgtttagttttggtttaa

SEQ ID NO: 48408 - DNA, 382 bp, Setaria italica
  Peptide Sequence Number=SeqID_114382
atatttaagcatcccatcctgatggattccactttcatgagcaaaggcattggcaccaacaatagctttgtgtggttgtacgtgaagtccactgtgctcttgtacctattttgctcgtcaaagtaatatgttgggaattgattccagtatacagaccatttaagagttccccacgacacttaattgccatgacaacctcctccaaagatgcatttccggctctttcaccaataccattaatagtcacctctaactgacgcgctcctgcacgagcacctgctaatgtgttggcagtcgcaagaccaaggtcattctggcaatgagtggaaatgatagctatttcaattccaggagtgtttgcctttatgtcagcaatcaagtt

SEQ ID NO: 48409 - DNA, 491 bp, Setaria italica
  misc_feature (364)..(364): n is a, c, g, or t
  Peptide Sequence Number=SeqID_114383
tggtccttgtttccctactactaactattgtcttatttttcttccttcttccatctggtgctatcagtttcacagttgctgtagataaaccaagtgttccacatgttgcctgtacatcagcaagggaccaaataaccttaggctggaatatctgatctgacaataatgcttctatgtcttcatcagttacacgcttttttcttctccgcaacctctttgtagcgtttaaagaagtcctcgaattccttgtcactgatttcatatccaagctccactagcttagatctcacagcatgccttccactgagtttcccaagaacaattccaaattcatttgcacgagttaaaccaatatcgtcaggtnatattatttcataagttccttatatttaagcatcccatcctgatggattccactttcatgagcaaaggcattggcaccaacaatagctttgtgtggttgtacgtgaagtccactgtgctcttgtacc

SEQ ID NO: 48410 - DNA, 357 bp, Setaria italica
  Peptide Sequence Number=SeqID_114384
ccaatcctgatggattccactttcatgagcaaaggcattggcaccaacaatagctttgtgtggttgtacgtgaagtccactgtgctcttgtaccattttgctcgtcaaagtaatatgttgggaattgattccagtatacagaccatttaagagttccccacgacacttaattgccatgacaacctcctccaaagatgcatttccggctctttcaccaataccattaatagtcacctctaaactgacgcgctcctgcacgagcacctgcctaatgtgttggcagtcgcaagaccaaggtcattctggcaatgagtggaaatgatagcattttcaattccaggagtgtttgcctttatg

SEQ ID NO: 48411 - DNA, 230 bp, Setaria italica
  Peptide Sequence Number=SeqID_114385
aagcgcataacatttcaagcttagcatatcatgttcctatcaaccaaagtttagccgactgcagctcagctatacctgtacagcagcaagggaccaaataaccttaggctggaatatctcatctgacaataatgcttctatgtcttcatcagttacacgctttttttctctgcaacctctttgtaccgtttaaagaagtcctcgaattccttgtcactgatttcatatcc

SEQ ID NO: 48412 - DNA, 241 bp, Setaria italica
  misc_feature (237)..(237): n is a, c, g, or t
  Peptide Sequence Number=SeqID_114386
taaacttaaagtaaaaagaactaagaacaaataacgaactagggacctagttaccgaacaacaacatgctattttctcctctccatctggtgctatcagtttcacagttgctgtagataaaccaagtgttccacatgttgcctgtacagcagcaagggaccaaataaccttaggctggaatatctcatctgacaataatgcttctatgtcttcatcagttacacgtcttttttttcnctgc

SEQ ID NO: 48413 - DNA, 242 bp, Setaria italica
  Peptide Sequence Number=SeqID_114387
attccagtatacagaccatttaagagttcccacgacacttaattgccatgacaacctcctccaaagatgcatttccggctctttcaccaataccattaatagtcacctctaactgacgcgctcctgcacgagcacctgctaatgtgttggcagtcgcaagaccaaggtcattctggcaatgagtggaaatgatagcattttcaattccagggagtgtttgcctttatgtcagcaatcaagtt

SEQ ID NO: 48414 - DNA, 216 bp, Setaria italica
  Peptide Sequence Number=SeqID_114388
tggcaatgaacgtgtgtatcctcgggcgccgcgcgtgcctgacggcctcccaggcggcgtcaatgccttcctattgcaccgcgagaggccgcagatgacgggcacgtgcccatcctccccgacgggggtgttgccgacctcgatggcgatggagcgcacggcgtcgaggtcgtcgggggatgaggccgggaagccggcctcgatgatgttcgtacg

SEQ ID NO: 48415 - DNA, 383 bp, Setaria italica
  Peptide Sequence Number=SeqID_114389
ttcccaagaacaattccaaattcatttgcacgagttaaaccaatatcgtcaggtgatattatttcataagttcctttatatttaagcatcccatcctgatggattccactttcatgagcaaaggcattggcaccaacaatagctttgtgtggttgtacgtgaagtccactgtgctcttgtaccattttgctcgtcaaagtaatatgttgggaattgattccagtatacagaccatttaagagttccccagacacttaattgccatgacaacctcctccaaagatgcatttccggctcttcaccaataccattaatagtcacctctaactgacgcgctccttccggcatcctcgggctgaattcgacatcagggcatcccaggc

SEQ ID NO: 48416 - DNA, 233 bp, Setaria italica
  Peptide Sequence Number=SeqID_114390
gtgttggcagtcgcaagaccaaggtcattctggcaatgagtggaaatgatagcattttcaattccaggagtgtttgcctttatgtcagcaatcaagttcccaaattcataaggaagagtgtatccaacagtgtccgggatgttgagagttgtagctccagcttttatgacttcctctagtatatgatacagaaactctctatttgaccttccggcatcctcggggctgaattc

SEQ ID NO: 48417 - DNA, 279 bp, Setaria italica
  Peptide Sequence Number=SeqID_114391
tcaagttcccaaattcataaggaagagtgtatccaacagtgtccgggatgttgagagttgtagctccagcttttatgaacttcctctagtatatgatacagaaactctctatttgaccttccggcatcctcggggctgaattcgacatcagggcatcccaggctgcgggcgtacgccaccatctccctggcaatggccaccacctgctcgggcgtcttcctgagcttgtgctgcatatggatctcgctggtggcaatgaacgtgtgtatcctcgggcgc

SEQ ID NO: 48418 - DNA, 270 bp, Setaria italica
  misc_feature (1)..(66): n is a, c, g, or t
  Peptide Sequence Number=SeqID_114392
nnnnnnnnnnnnnnnnnnnnnnnnnnnnnnnnnnnnnnnnnnnnnnnnnnnnnnnnnnnnnnnnnngtttaggtaagtccgatccattataatcccaattaccagaaaagacgacagatttgggggttgtgaaatcgtcgatagacatagaaccctagtattatttccttcaataaagtatggtctataacatacaaattgtacactgcataggccaaaaccttcatgccgttcgttttggaggatcggctgcttaggacaggcatgaag

SEQ ID NO: 48419 - DNA, 271 bp, Setaria italica
  Peptide Sequence Number=SeqID_114393
tctggaccaactccgggcgacatttcgtttcagtataggctgggttgatattgaaacgaaatgtcgcccggagttggtccagagctcttacatgctcagcccatatgagaaccaaagggaacgccgagctcactttaaacacttgtgctctcaggtacttcgctgctggcttttacaacaccagcaaaactgcacatcttgttcagggcactcaggtaggctctgacgctggacacaacaacgtccattgatgccccactcccactgaagg

SEQ ID NO: 48420 - DNA, 251 bp, Setaria italica
  Peptide Sequence Number=SeqID_114394
gaggatgtcgctcatccctccgcttgcggacgcgcacatctccatgagcgcgtccgcaagcggagggatgtgaggatgtcgctccgcttgcggacgcgctcatggagatgtgcgattatctacttgacgaaagcgcagatgagctcgccgaggcggaagatgctattgagcactaatacaataattagacttagcatttagaacttgctatatcctaacatagatgatgtatttgctgatctgtaggaggg

SEQ ID NO: 48421 - DNA, 153 bp, Setaria italica
  Peptide Sequence Number=SeqID_114395
catgccttgacttctttgaaagggctataacctgaaggagcgattcaaagaagtcaaggcatgcttggagttgctgctcacatctccagtgataaccactcgagttgttgcaattgcgtcaatgccttctgtgactgaagttcattacctatt

SEQ ID NO: 48422 - DNA, 198 bp, Setaria italica
  Peptide Sequence Number=SeqID_114396
agggcactcaggtaagctctgacgctggacacaacaacgtccattgatgccccactcccactgaagtcaacaagcacaggagatgaggtaacaaatagcaagagagcataaaagacatgaaaacggatttgaaagggctataacctgaaggagcgattcaaagaagtcaaggcatgcttggattgctgctacacatct

SEQ ID NO: 48423 - DNA, 435 bp, Setaria italica
  Peptide Sequence Number=SeqID_114397
aacttaacgaaccaaagaactacctaggaagaaagacgacaagacgttagaaggacctcatcctctccgttggatctggtggtggtgctgctccagttgctgccgctgcccctgctggtggtgctgcagctgctgctgccccggctgctgaggagaagaaggaggaggccaaggaggagtccgatgatgacatgggcttcagcctgttcgactaagtagcccaaggcccagccattagcaaattcacttatggtgtccaagactatcttatgttatgtctctaggctttcgttacaagtactcaagttttgaagtttttgagatgtggtgctatggctatgtgatgaaccgcaaaccatcttattagagtgaaacttgtttctatattcttgtgttcaagcttaaaaggcccaatctttttgagatgtggttgga

SEQ ID NO: 48424 - DNA, 400 bp, Setaria italica
  Peptide Sequence Number=SeqID_114398
aaaaggtttaaggaactaaataaagaacaaaacaaaaaaacaaataactaacttacttagttaggacaatagtctcttgcgcaaaataggaagagttcgcttttgttctccttagccgtgcttcaagcatccatctgattgagggcaagctatacctgcttcttcttggaaccactgcgcttagcttggtgacgacacctctgctattcaaaatgatcccagcggtggtccaccttggggtacttttgagatggttttctgttgatagcaatcaggtggagttgggcttgaaaaatgatgtcctccgcatcgatagcggcaagcgcataaatttgatagtccaaggctcacatgactcatgacatatttggcacaccgcaagctgtttttttgatggctt

SEQ ID NO: 48425 - DNA, 207 bp, Setaria italica
  Peptide Sequence Number=SeqID_114399
ttagttctttgtagtttgggtttctatttcgtctagtcttggtagttaattgtattattctaacgtacggtattcttgcacaacatactcttgagcaaatcgaacctatccgcaactttttcgctgctctattccttgccagcattgggatgctaattaatgttcatttcctgtggaaccatgtggatatactccttgcagctgtaa

SEQ ID NO: 48426 - DNA, 177 bp, Setaria italica
  Peptide Sequence Number=SeqID_114400
gttgatagcaatcaggtggaggtacacgttcatatcaattgagttcatctaccaattgttttactatggaaattgtttgccaatcaattcatcggttcttccttttcagttgggcttgaaaaatgatgtcctccgcatcgatagcggcaagcgcataaaatttgatagtccaaaggc

SEQ ID NO: 48427 - DNA, 247 bp, Setaria italica
  Peptide Sequence Number=SeqID_114401
gtggcaaccacgagtgcgcctccatcaaccgcatctacggcttctacgacgagtgcaagcgccgcttcagcgtccgcctatggaagctcttcaccgactgcttcaactgcctccccgtcgccgccgtcatcgacgacaagatcctctgcatgcacggcgggctgtcgccggacctcgacagcctcgcccggatcagggagatccagcgccccgtcgacgtccccgaccagggcctcctctgcgacca

SEQ ID NO: 48428 - DNA, 489 bp, Setaria italica
  Peptide Sequence Number=SeqID_114402
tgtactagtagtcttggtccgtacgtaattccttccttattatttctgctgctgggatgactctaagccttcttgcagttgctgttgtatttttcatcaaggataatattccacatgactctgacttgtataacatcttaagtatggtgtccttggttggtctcgtggcttatattgtcgccttctcctttggtatgggtgcgattccatggatcataatgtctgaggtatagtaccttatcgcatagctaatatagcgcataagatgcctctctcccatttttaggtttccactgaagagcactgttcataacacagttttggagcaaacgctcttgggcacatggtgtaagcaacctgtaaggcttatttcaaactttgcattttctcagatcctcccagttagcatcaagagtctcgcaggaagctttgcgacactggccaaactggttgacatcctttggaataacaatgacagcgaatttgctg

SEQ ID NO: 48429 - DNA, 494 bp, Setaria italica
  Peptide Sequence Number=SeqID_114403
gtggccttattgttcctaacacacataccattttcaagaaagctaataaatgaatctccttgtaagttgtaacatggttcctcatggccttgaatccttgatgaatgatgccatttcattgtttattgcaaaagcatcatgtccctctgtctttgtctacaacagtgctgctgcagtcagttttagcttcttttttttctcaaacacgcaggagaactgcgtatattttgtattaaatacttagttttagcttttgtatttaaatataacaatcaaagttcttcagggctcaagaacagtgatctggacacatttgcacttggagctatccaggttcttgccactggtgttacaaccacgttcttggacagagctggccgacgaatcctccttattatttctgctgctgggatgactctaagccttcttgcagttgctgttgtattttcatcaaggataatattccacatgactctgacttgtataacatctta

SEQ ID NO: 48430 - DNA, 333 bp, Setaria italica
  Peptide Sequence Number=SeqID_114404
tagaaagtaatattttataccaaagtcctgtcttttttcttcaacttttggcaacatcaacagttagtctcacttaagatgtttttatcaattgaagagatgttttgtgctgaagctgtactcttctacactaattggcttgctaactgtttttagcaagtcattgatgattgcagcgattccaaacatcattggtggcttgcaatctcctttgcaaaagctcttcatttctgtatatgggacgattgcttgaaggatttggtgtcggtatcatttcctatgtggtaccagtatacattgcagaaatatctcctcagaacatgagaggagctc

SEQ ID NO: 48431 - DNA, 242 bp, Setaria italica
  Peptide Sequence Number=SeqID_114405
cttgtgttcgtcatcctttgggtgccagagacaaagggaagaaccctcgaggagatacaatggtcgttccgctgagctccagcattcatcaaagaggcaactcgagttgaaaacagtagactgaatcaaaaggaggatcctttcgtgggtcccaaaaatgcaagcagccatgcagagcaggtgatgattgatcgttggagtgacctcacgctgcgtgaaggtgtgcaaacatctctgccgtc

SEQ ID NO: 48432 - DNA, 413 bp, Setaria italica
  Peptide Sequence Number=SeqID_114406
atagtcgcaggcttgcaggtattgcatgtcgtaacagccttaaattcagttaagtctgtcatccggctggctgaactgagcaaactgtcagcagagagggcgggctgaaggaaggacggatggtttctgcatgccattctgttccgcagatgctcgtttgatgaagaaaagtgtagctcgctgtttgacgaagagaaggtgttgtggttgtcaaagtccgagaaggccacttcgtcttctaggccatcatggtccaatccgatgccactccaattctcagacagactcctgttatcttggcgaatgtagttcatgccacccaagggctcttcatcataagtcggggcgaacacggggtagtcctcggcgccggcggccggtgccgcgagtcccccgtgttcgccccgactcct

SEQ ID NO: 48433 - DNA, 480 bp, Setaria italica
  Peptide Sequence Number=SeqID_114407
tgtctccgactcagtctagcgactgctggctgaactgagcaaactgtcagcagagagggcgggctgaaggaaggacggatggtttctgcatgccattctgttccgcagatgctcgtttgatgaagaaaagtgtagctcgctgtttgacgaagagaaggtgttgtggttgtcaaagtccgagaaggccacttcgtcttctaggccatcatggtccaatccgatgccactccaattctcagacagactcctgttatcttggcgaatgtagttcatgccacccaagggctcttcatcataagtctgagggaattcatcaaacaagcagcaaggcttttgtttagaagatgaaccggaatggaaagtacagtagcatgaagcaaaacgaacatgatctatgggaaaatgttgtaccaccagacaacacatttaacacaaccatttaatgtttcagtactttcagtgggcacatgctagtaccac

SEQ ID NO: 48434 - DNA, 356 bp, Setaria italica
  Peptide Sequence Number=SeqID_114408
ttccgttactttcttagtttgtttgttagtttagtttaacttttctttcttatttttttccttattccgtattaaatttgccagagaggattcaacgttggaatggtttacttttcttttggggcatttttcatgcccggaaagcaagtagcccaccggaacttcctctgactgggacaaataattgttcattacaacaaatcactgggtcagatgtgggttcccctaaagcactacagtctttgggtatagaatttagaacgagtgccccaatgatgatatatctgacccagctatttcacttggatcagagagtgagaagtctggtgcatttgtagatcataatacttttttgg

SEQ ID NO: 48435 - DNA, 381 bp, Setaria italica
  Peptide Sequence Number=SeqID_114409
ctttttgatcctgacctcacctacaaaaggcagaagacttcatacggaaaatactctgcttgcagttttggagatgaaatgcaacctagcaaatgcttgtccaagatacatcccttaccggttggacagcataatccatttgatgatttacagtataattacagggttccctcagatcctggctcccttaaacaacctgtacctgatcatatcatccacgttctttcatctgatgatgaagattccccagaacctagtactagcttaaataaggcatcactgaaggcagatgaagaagtacttaccttaccccctaatttagtttagttactaacttttaccctttagtttactttaatttaggttttaggtttactttaa

SEQ ID NO: 48436 - DNA, 311 bp, Setaria italica
  Peptide Sequence Number=SeqID_114410
aaaatactctgcttgcagttttggagatgaaatgcaacctagcaaatgcttgtccaagatacatcccttaccggttggacagcataatccatttgatgatttacagtataattacagggttccctccagatcctggctcccttaaacaacctgtacctgatcatatcatccacgttctttcatctgatgatgaagattccccagaacctagtactagcttaaataaggcatcactgacaacaatggggaggagctctcatctgccttcagtgatgcctttatttaagctagtactaggttctggggaatct

SEQ ID NO: 48437 - DNA, 338 bp, Setaria italica
  Peptide Sequence Number=SeqID_114411
ttcagatattgtagatgatgaaccgctgtctctctctcttgggctccctagtgttgtggaagggggtcggggctctggagatgaagcagtttctgccggagaagccaggcataaacacttagtgctttttaggtttgcgagtgtacagttttgtgctatgtttagctgtatggagtttagacagggtagatggtatagcttttaaattatgaaacattttgccttttcttttctcactattacatgcatctgctgctgttgatagtgatgctggtctgatgatgttactgtccgccttattttatgggaaactaacaccatatatcacataaaataag

SEQ ID NO: 48438 - DNA, 295 bp, Setaria italica
  Peptide Sequence Number=SeqID_114412
tcccacattatcaacaggagaaggtcatgacatgattcggaattattcaactgctgcaaaaggtagcacaggaacagcaggtagaaacaaaatggaggaagatcagaatgaagctctcttctgtgctgcacagcagccaggtgccattgggtcaatctcagatgagataaacctaagaacatgatcttctgccctctatagaagtatcacaacgtcattttattggatacaaaagaattaattagtagaattaggtacctaaagactaaaatttaaatttacctaaatttactta

SEQ ID NO: 48439 - DNA, 334 bp, Setaria italica
  misc_feature (18)..(18): n is a, c, g, or t
  Peptide Sequence Number=SeqID_114413
agaagccaggcataaacncttagtgcttttttaggtttgcgagtgtcagttttgtgctatgtttagctgtatggagttttagacagggtagatggtatagcttttaaattatgaaacattttgccttttctttttctcactattacatgcatctgctgctgttgatagtgatgctggtctgatgatgttactgtccgccttattttatgtgatatatggtgttagtttcccatgaactctattggtatgacattaaaaggtattattattctagtaattgttgtaattgttttatttaaattttcttaattttttgttcgttttgtttggttaa

SEQ ID NO: 48440 - DNA, 169 bp, Setaria italica
  misc_feature (153)..(153): n is a, c, g, or t
  Peptide Sequence Number=SeqID_114414
taatgcaagtgaatacatcatgaagaactgcagacgcaaacaattataccaggacatcctactgcagcttcctatggaattcatcctccacattatcaacaggagaaggtcatgacatgattcggaattattcaactgctgcaaaaggtagcncaggaacagcaggtag

SEQ ID NO: 48441 - DNA, 122 bp, Setaria italica
  Peptide Sequence Number=SeqID_114415
ggaggagggtcgggctctggagatgaagcagtttctgccggagaagccaggcataaacacttagtgcttttaggtttgcgagtgtacagtttcataatttaaaagctataccatctaccctg

SEQ ID NO: 48442 - DNA, 279 bp, Setaria italica
  Peptide Sequence Number=SeqID_114416
tggtactatttcttggtagtatttccttctttaccatgtccttggttgttgacgaagttttcatcaacaaccaaggacattctggagattcctctttaccatgtccttggttgttgatgaatctccagaatgtttgaatggagcttccaatatgcctcaggaggttactgattcaaaagggacttcaccaacaaatggccattgctgcataaaaagtgaaacaaatagtcctattgccaagcaaggtgaatctggagattcaccttgcttggcaatagg

SEQ ID NO: 48443 - DNA, 380 bp, Setaria italica
  Peptide Sequence Number=SeqID_114417
gtttttgttagctgtttgtttaggaggtttaagatgcagggatgaggtaaatgatccactgccactgccgccaccacaaaaaaaaacataactctaaagtagtaattgtaatagatattttgcttgttactcagttggtgcttatgggcaattaaggtttttatttttctttctcattgttcattttcaggcacttaatctcttaatagatattttgtgaccagttaccttgttctgtttgaagattttatgctgaagcttttggtaaacgattaaacacttcttattttatgtttgtcagtttgtgaaaaagatgatggcgtcattgccttacacttgccaatcacagagcccttcaccatattttgatctatccctta

SEQ ID NO: 48444 - DNA, 249 bp, Setaria italica
  Peptide Sequence Number=SeqID_114418
cctctattccatttttcattcttttctacttttgcttttctatatgtataacccaaaatctttcttatcttatccaatttcccttccttttttaggtatgatgagaagctgatttcagcaattgatcggcatcggcattgcacagagcatccaataaaatttatatcagtgaggtcaccaaatgttgtcagatttaagatcaagccaggttcagattctggtgcttctgacagcagagcaaaaagaatt

SEQ ID NO: 48445 - DNA, 473 bp, Setaria italica
  Peptide Sequence Number=SeqID_114419
tggctggcgaagctcgtagacggaagtaagtaattaagctaaggttatgcggttttcgccttcgacaaggccttcttccgctgggagagcatgtaacagtacatgtaggggaatcctggaatgtagagaaaggttaaaggaacccatattaatagtagacttcccttcatgtgaggcatggcagtgaagattaagccaacctcgctgataagcccaatagggtagagcaccgtgaaagtggtgtacctgagccataggagccagaaaggtgtaattccaaatgcctccctcaaaaccaaagaatgaatatctgatgacctcagtgatggaccagcttaggaccaacgaagtaatgaggatgtgagaatgtgtctcaggataggtccacacgatggcccaggtaactaaggttcttgcacaaacttggtagaagttgcaatgactggagatctcacaaaccctagaatagaatg

SEQ ID NO: 48446 - DNA, 434 bp, Setaria italica
  Peptide Sequence Number=SeqID_114420
aaggaaaccaaaacgaaagtaaatagaaggaatgtgagaatgtgtctcaggataggtccacacgatggcccaggtaactaaggttcttgcacaaacttgggtagaagttgcaatgactggagatctcacaaaccctttgagcagttcatgtatcattgcagaataaatacaagagttaagaggaaagaaatattgtttttaaacataattgaaactgacatggcaatttctgaaatttaatacttgccatagatgtgttcaaaatttaagctgatccttgtatcatatattagagcatagatcgaaagtataggctatcgagaaaaagcaataacagtttatgcactcacaactttttgttgtgcagcatttgaaaggatctctttacatatgaacgaatctagtatatggaccaactgctatgcaaaatattt

SEQ ID NO: 48447 - DNA, 310 bp, Setaria italica
  Peptide Sequence Number=SeqID_114421
gccgcgctgcgtgctgcttcccgcttcatctgtgcggcgagggcagcattttgatgagccgtacatataagtacagcatgtatactgttgatctaaaaacacttcacactatgaacagtatacatgctgtacttagtgtgaagtgtttttagatcaacaggcgtgtagagtagggtcggtgtactgtaaatcttcagaatttccttacttttccactgagtttggatcctttaagttcagattgatcagtcctgtcagtatgacagtattagaatggagtaaaaacacacgaacctagatggtttgttgc

SEQ ID NO: 48448 - DNA, 425 bp, Setaria italica
  Peptide Sequence Number=SeqID_114422
cagaagaactaacatgaggtgttgagtgcatcctcgagatacactggttattgtggggctggcgaagctcgtgcggagtagtattagctaggttatgcggttttcgccttcgacaaggccttcttccgctgggagagcatgtaacagtacatgtaggggaatcctggaatgtagagaaaggttaaaggaacccatattaatagtagacttccctgtaaagttgttgccaaagtaagtcaacctcgttgccagatgagcaacatgggctcctggtttcctttaggtactcaaagtttaccttcatgtgaggcatggcagtgaagattaagccaacctcgctgataagcccaatagggtagagcaccgtgaaagtggtgtacctgagccataggagccagaaaggtgtaattccaaaatgcctccct

SEQ ID NO: 48449 - DNA, 253 bp, Setaria italica
  Peptide Sequence Number=SeqID_114423
gtagacttcccttcatgtgaggcatggcagtgaagattaagccaacctcgctgataagcccaatagggtagagcaccgtgaaagtggtgtacctgagccataggagccagaaaggtgtaattccaaaatgcctcccctcaaaccaaagaatgaatatctgatgacctcagtgatggaccagcttaggaccaacgaaagtaaataagaaaaggaaaaataaaaagtaaaaaagaaaaaagaaaaaaataaaaaa

SEQ ID NO: 48450 - DNA, 261 bp, Setaria italica
  Peptide Sequence Number=SeqID_114424
aaaatctctcctgtgaatatttgctttgaaaagaactagaatctgtacaactttccagtgaccatatagacaagcttgcatcagagcagtctgtcctctgcaatttctaaggttgatgttaaccccggattcgattaggagggagacaatctcatggtggcccttcgctgccgagtaatggaggggcgagtttcggatcccgaacgtcgagtaccgggcaaggcgagggttgagctccaagagggccctagcctcttgaat

SEQ ID NO: 48451 - DNA, 257 bp, Setaria italica
  Peptide Sequence Number=SeqID_114425
cgtgaccatatagacaagcttgcatcagagcagtctgtcctctgcaatttctaaggttgatgttaaccccggattcgattaggagggagacaatctcatggtggcccttcgctgccgagtaatggaggggcgagtttcggatcccgaacgtcgagtaccgggcaaggcgagggttgagctccaagagggccctagcctcttgaatgtctccatcccttgcggctgagacgagtcgctcgccagtagaccgaagacaa

SEQ ID NO: 48452 - DNA, 292 bp, Setaria italica
  Peptide Sequence Number=SeqID_114426
cgggatcacggaggagcggggaggaaggagacgaggggtggtggtggtggtggcctgtcgagggaggagacggcgagccgtgggacggtggcgtcgagggggtggggccgtacgagcccggcggcggcgcgtgacgcaagtccggctcgtccgcggaggtcggcggggcggcgcgtgggtcactggagttggggaagaagagcccttgggtggcgacgggtaggacggggtcggcgcgccatgcggcggcgagtggtaggatggggtgctggagcttgagggtggtgatggg

SEQ ID NO: 48453 - DNA, 293 bp, Setaria italica
  Peptide Sequence Number=SeqID_114427
aacggtaacaattgatgaacactggcagccagctgccctcatgccctccagaatttcagctgcaccttcattgtcatcatgccttgctagtaggttgatcatagtgtaaaagttggatgcatttggtcggaagccagcactcttgagcttcctgtagtacaaaattgcttcttcatatttgtctgctctaccaaaaccttctaccattgatctataggtggtttcatcaggaaactaaaacctagacaactaaccaaaggactagtacaaaacaacttaccttacgaccttaa

SEQ ID NO: 48454 - DNA, 445 bp, Setaria italica
  Peptide Sequence Number=SeqID_114428
gactatactaattacgtataagaggcatcggctcttttccgaatcacaacgccggcggcgtaggcgatgatgctcgggagcatcatcgatcagaccctgaagttcttgccctcgaaggtctggccgaactgccagttgcgcggggcggcgttccaggaggtggaggtgcggcggtcgctgccggtgacgcggaaggagagcgcgtcgccgacgaggatggcgttggactgccagttctggcccatgttcctccacatcgccgagtaccgcgccggcatcgtccccgtctcctaccgccgggtgccgtgccgcaagtccggcgggattcggttcaccatcaacggcttccgctacttcaacctggtgctcatcacgaacgtggccggggccggcgacatcgtgcgcgcgagcgtgaagggctccggcaccgggtggctgcccatgt

SEQ ID NO: 48455 - DNA, 454 bp, Setaria italica
  Peptide Sequence Number=SeqID_114429
acctcgtctagcctttgctcgacctttgttcatgaagaccttggctttactgttcaatgttttgggtgatgtatttggtaagaactctcaggtccccgaatcctgtggacgcttcagaaattacagacataattgacttcttgcatcatgctgtgatgtatgaaggccaaggggtcccgttcagagcactagcaaacctaagctggagatactgacattatgcgggaaagttatagaaattttgaggccagacgtgcaacatctcctctcgcacctgaagactgatcccaactgctcaatatatgcagcgacgcatccaaagctcgtgcaaaacacatcctaatgtcacagcttacaagtgcatgtataatgcgaagaatcctttagaaaccgactagacaagaaagtagaatagactagtaaggaatacaagaaagaaattagacaagtaaga

SEQ ID NO: 48456 - DNA, 384 bp, Setaria italica
  Peptide Sequence Number=SeqID_114430
ggccagacgtgcaacatctcctctcgcacctgaagactgatcccaactgctcaatatatgcagcgacgcatccaaagctcgtgcaaaacacatcctaatgtcacagcttacaagtgcatgtataatgcgagatcctttgaaccgctgcagaagtgatgctgtaggatcagaagaattgcagtagctgtaacctgtatcctcatctaaccggagtatagatcttgccgtaatgatcatggacatattcttcagagcatcgtcgttgtcagttgtatcctttagctagcaatattgtaaatatctgcttaaggggcatattaagacatgcatgattatagcattaaacattggtagtttaacctatttcctaggtctaaaaaaaaa

SEQ ID NO: 48457 - DNA, 241 bp, Setaria italica
  Peptide Sequence Number=SeqID_114431
ggtttgcatgcacatgcaaatgttagatcaacaccttcattgtccaacatttgcaactcatcgtttcttatcacaatcctacccaagcatagctggtgaatctgttactaatctgcgttattctcccattacataccctagtgtattgggagagccactacatggagaggtaatgttaccttttatttaattaacagcctcctccccttttatgtttctaatgtattttctccttatttac

SEQ ID NO: 48458 - DNA, 423 bp, Setaria italica
  Peptide Sequence Number=SeqID_114432
cgcattgtgataagtctgcttgaaaagccagaacttcagcaaagagtcaaggcattctgcagttctgttccccagagcattggctcaaaaatcaacatcctaaaagagttgagctccagaaagctcttggtaaccatttatcatggaaggaccgttatcccccgttcttcgatgacattgctgcgcgcttgcttcctgttatccccgctgattatttataggcttattgagaatgatgctacagatattgcagacagagttcttgcattttattcttccttgcttgccttccacccgctaaggtttacatttgtacgtgatattcttgcatatttctatggtcatcttaccaaataacaaaaactaagaaattaaggtaaaggaaataacctaacaaaaacttaagaacttaaggtaagttaa

SEQ ID NO: 48459 - DNA, 246 bp, Setaria italica
  Peptide Sequence Number=SeqID_114433
ttgtactttattttgtagccacagtttccctcagcatcgtcaatacctttgtgctggtgcttggatgctgatgaatggacatcttgaaatcaacagtgcaaatcttgtatgtttcttaattttcttttaatgtgactgttgtttgtttctctctatatgtttatcttgtgatcttcatgcaggctcgtgtcttaagggagttttcacctgaggaagttacagcaaatatctatacaatggttgatt

SEQ ID NO: 48460 - DNA, 133 bp, Setaria italica
  Peptide Sequence Number=SeqID_114434
agaattgcaattcttctgatcctacagcatcacttctgcagcggttcaaaggatctcacatcctaatgtcacagcttacaagtgcatgtataatgcgagatcctttgaacagctactgcaattcttctgatcc

SEQ ID NO: 48461 - DNA, 213 bp, Setaria italica
  Peptide Sequence Number=SeqID_114435
aatcccgtgttcatatgccagtatatattagtattatggattggccattattaatgaacactcgttcatcacattgcgtatcgctttacaggttgatcactccatcgtggagagctttgcgcaaggcggacggacgtgcatcacgtcgcgcgtgtaccctacaagagccatctacgactccgcccgcgtcttcctcttcaacaacgctaccaa

SEQ ID NO: 48462 - DNA, 315 bp, Setaria italica
  misc_feature (277)..(277): n is a, c, g, or t
  Peptide Sequence Number=SeqID_114436
tagtaccgtaagtttacgtaaggttaggtaacgtacggtacggaccgtaggaaggaccgtagaacggaggccgaggtggggttcaactgcagcaccagcgccggcgcggcggggcggggcatgctcgggcccttcggcctgctcgtgcttgcggacgaggaccggtcggagcagaccgccgtctacttctaccttgtcaagggcacggacggcagcctcaagactttcttctgccaggacgagctcaggggctcgaaggcgaacgatctggttaagngagtctacggaagcgtggtaccctgtgctcaacggggg

SEQ ID NO: 48463 - DNA, 295 bp, Setaria italica
  Peptide Sequence Number=SeqID_114437
tgtaattatggtcgatcataggctaggctgatactgatatgtgtgatactaaagagctcaaatgcatagtatttggctctaaagattctcaccactgtaaaacagcgtaccaggctacaaatctacaatagaacaccataataattggtgtttccgatgctcctgtgattctagactaacttcgttttcattttttcagctggacgcgcctcttctttcaatgttgagaggaccaccgctgtgcgtgcctacatcaacaaccgtggagcacgtcattgatctcctcctcagagag

SEQ ID NO: 48464 - DNA, 262 bp, Setaria italica
  Peptide Sequence Number=SeqID_114438
gaaggaagaagctaatagggaaagtaatcccgaactccttccggatgctgttacttacacaacattgcttaagatagatttggctagagggcttctaagaagaatagtgaatgagaaggaatgtttctcttggacaagtagagtaggtctggttgctgttaaagttgaaagcttatctggattcaccaactctcttctgaggccccatgtatttccacagattatcttgaatgatccagttgagaagtatatggttccattt

SEQ ID NO: 48465 - DNA, 353 bp, Setaria italica
  Peptide Sequence Number=SeqID_114439
cgcgcgcaccgcggcggcaccgccggtgcggaggcgcccgggtgggtggcgcccatgtccgcgctgtggctgctcatcccgctcggcgtcgtgggcgtcggcgaggccctgcatttcccggggaacatggcgttctactaccaggaattccccaagacgctgcggagcaccgcgacagccatggcgccgctcctgatcgcgctggggttctacctcagcacggtgttcgtggacgtggtgaggcgggtcaccgcgtggctgcccggggacataaaccagggaaggctagacaacgtgtactgggcactggcggttacggcgacggccaactttgggtatttcctggtctagta

SEQ ID NO: 48466 - DNA, 215 bp, Setaria italica
  Peptide Sequence Number=SeqID_114440
ctcacacttttctcccagctcagtgtttgctttgtgatccatagtttcagggcatcttctgccaagggctatctagccttgcattggacagcacatggagtcctggtgagacgagttgaattgtcgtgggctgcccccttgggccggtttgacacatagaccataatatttgtggttagatcagctagtatgaggttgaagccattgtattcatc

SEQ ID NO: 48467 - DNA, 183 bp, Setaria italica
  Peptide Sequence Number=SeqID_114441
tgcttcatctctgtatttatttgaggctgccagcttttcgagttcgacccttaatctatctggtaattcacccgtgtgatccttccatataccactatcagtgaactatgatggttgtaagctagcttgtacgagtaagtacctcgagagtggtatctggtaattcaccgtgtgatccttcca

SEQ ID NO: 48468 - DNA, 163 bp, Setaria italica
  Peptide Sequence Number=SeqID_114442
tctttccataatcaccttcacggtgatctaagatccacaaatctgcttacaataaatagtttaatcggtatcatttggggatcttagatcaccgtgaaggtgattatggaaagaatgacattcacaattgcatctgcctcaaataaatacagagatgaagcag

SEQ ID NO: 48469 - DNA, 430 bp, Setaria italica
  misc_feature (335)..(335): n is a, c, g, or t
  misc_feature (396)..(396): n is a, c, g, or t
  Peptide Sequence Number=SeqID_114443
ataatcctaaccaagctaataatcaaaataaagagcattctatggattttatctgcaaggcatctggagaggttttatctatctacaaattttgagttgaacatgaaaaaagctgtgcttaccttctgccaagggctatctagccttgcattggacagcacatggagtcctggtgagacgagttgaattgtcgtgggctgccccttgggccggtttgacacatagaccataatatttgtggttagatcagctagtatgaggttgaagccattgtattcatcagcttcttctgccacttcagttgcaacttcaagttgggctcttgttgctctgcnggtacctgagggcaggtctcccctagttcgtgcgccgggcatggcatctggctcaagcacnttggtcaggaatgcgagcctgccatcccttggtg

SEQ ID NO: 48470 - DNA, 246 bp, Setaria italica
  Peptide Sequence Number=SeqID_114444
tgaagcaagttcatgaaggagtatacaagaaccaccgcttgacaagcaagttcaagttcatgaaggagtatacaagaaccaccgcttgacaagcaagttcaaggagggaagaaaaagtgctccagaatttgtccatcaccattattcccttcggtgactgcagctgagtgcattgcgggtccatcgagaaactaaaggccgagcttagaaaaagggacaaattgaagtacatgatggtgtccttcg

SEQ ID NO: 48471 - DNA, 409 bp, Setaria italica
  Peptide Sequence Number=SeqID_114445
tctaataggaagcgtggatacctgctgttcggccccccaggcactggcaagtccaccatgatcgccgccatggccaacttccttgactatgatgtctacgacctggagctcacggcggtcaagaacaacaccgagctgcggcagctcttcatcgagacgacagcaaagtccatcatcgtcatcgaggacattgactgctccgtcgacctcaccggcaagcgcaaggacaagaaggtccacaagaagaagtccagtagcgaaagcgagtcgagcgacaacgtgaccaggctgccgatagaggccaaggaggacgacgaaagcaccaagctgaccctgtccgggtgctcaacttcattgatgggctatggtcggcgtgcggcggcgagcgcatcatcatattcaccacaaa

SEQ ID NO: 48472 - DNA, 351 bp, Setaria italica
  Peptide Sequence Number=SeqID_114446
acaacgtaggagaagctggacccggtcgaactaacaaataacaaggaaggggaccgacaatggacaagcacatcgagatgtcctactgcggcttcgaggccttcaagttcctcgccaagacgtacctcgacgtcgacgcccacccgctgttcgacgccgttgaggagctgctgcgggaggtggagatgacgcccgccgacgtcgccgagaacctgacgcccaagagcctggaggacaacccggactcgtgcctcgcggccttggtgaaggcgctggaagaggccaaggagaagaagaaggcgagtgggggggtgtcatgacgaacaagattccgaggaggaggaagagtag

SEQ ID NO: 48473 - DNA, 301 bp, Setaria italica
  Peptide Sequence Number=SeqID_114447
cgctcgcccacgacgccgagaggctgtgcggcgtcaagggcgccgacgtgcagggcggcatcgggccgttcgggctgtgggtgctcgcgtccgccgacatgcaggagaggaccgcggtgttcttcagggtgttcaaggccgccggcaaagacaagcccgtcgtgctcatgtgcaccgacccaaccaagtcgtctctcaatccagacctgtattgagagacgacttggttgggtcggtgttcaaggccgccggcaaagacaggtacaggtctggattgagagacgacttggttgggtcggtg

SEQ ID NO: 48474 - DNA, 424 bp, Setaria italica
  misc_feature (400)..(400): n is a, c, g, or t
  Peptide Sequence Number=SeqID_114448
ttccaggccttctcatcgtacaagcacatcttgggactgttgcttccatacatcacaaggttccacctcaaccttaaatggtttgttgatccactggaaaatacagccacgtgcctcaacattttttagcatatgaggaggcatcatggatttgaatgctttatgaagcttcacttttgtcaaaccaccacagaccatgagagcagctatcaagccattaggcgtaataccagctaaatgtacaatggtcatgttctgcaagccacatatgctagaaagtgaaagcagtccaatgtcggtgatcgaacagtatgacaagtttatctgtgatgagacatacatgctatcagcagaatggaaagtaaacatacatggtactaatagatttcagctacagganaaaagatgtgatacctgacggagg

SEQ ID NO: 48475 - DNA, 395 bp, Setaria italica
  Peptide Sequence Number=SeqID_114449
caagaccaatgggatctccagatacaaagcaggaaagccagtttgatggacacaaggattcaacataatgcagaggcaaaacaggcaagctgaaagaaatgaacaataccttaaatggtttgttgatccactggaaaatacagccacgtgcctcaacattttttagcatatgaggaggcatcatggatttgaatgctttatgaagcttcacttttgtcaaaccaccacagaccatgagagcagctatcaagccattaggcgtaataccagctaaatgtacaatggtcatgttctgcaagccacatatgctagaaagtgaaagcagtccaatgtcggtgatcgaacagtatgacaagtttatctgtgatgagacatacatgctatcagcagaatgg

SEQ ID NO: 48476 - DNA, 353 bp, Setaria italica
  Peptide Sequence Number=SeqID_114450
caacagtactctgactattacactacaaaattttgagctccttcatccttaggcctgacttctgaatgccactcaagaacccctccatcgccatgatgcatgcccttccttcccacaaacactacacttcaggccttctcatcgtacaagcacatcttgtgactgttgcttccatacatcacaaggttccacctcaacctacacaggacaacatctattattagccactttggtgttcacaggtttgtaatactaaacacaaatccattgaacacaaaagattataagaggagggttgtcctatgtttattgtttttcaataccatttataaacaaagcaagggcaccacaat

SEQ ID NO: 48477 - DNA, 357 bp, Setaria italica
  misc_feature (39)..(39): n is a, c, g, or t
  misc_feature (108)..(108): n is a, c, g, or t
  misc_feature (348)..(348): n is a, c, g, or t
  Peptide Sequence Number=SeqID_114451
ttatttctgtgcagtaggatagattgatggattctagtnttggacagccttgagcaatctgaataaccccttcatcactaatgcctccacacctgtacaaatcaatancttggattttgggcaagactttccaatgtgggccagaccttcatcacttatcctcaagcaaatgccaatttttaggctcgaaagattgctgcatccggcgagagctttcagcccttcatcatccaaatcactgtcagtaaggtccagctacttaccaaaataagaaagaaaacaaagtaagaacttaaacccaaaaattaaaagttaaaggaaaagtaaagaaactaaaaccaaattaanaaaaacaaa

SEQ ID NO: 48478 - DNA, 335 bp, Setaria italica
  Peptide Sequence Number=SeqID_114452
ttaaatttggttaggtattattgtccgtaaggtctacggtaagttacctaaaattaagtagtcttttctaaattgcatgactcgctggggctgttatttgatggccctattcctgaaggaggacagaattcaccacagaatattgttggaaatgttgatgagggaggcaacaacatgagcatgaccccagacatgtctggaagacctagtggaacgatcattgcaaacattgacgagacatggaaaaatgtcagcctacttcaacaaacgtcgttaggaccacaaggtatagatgatcttgatgttctgcataaccacactgaggaggtactggg

SEQ ID NO: 48479 - DNA, 266 bp, Setaria italica
  Peptide Sequence Number=SeqID_114453
agcagatcagttctttcacgcgagcttgcttcatcctgaagtttagataggcctccatgatctgctggatgtctgtagccttgcgcttcttgcgcctgtctctatgtggctccacgcaagaacttgaatgtgcctgttcatcagctctctgtgcccttccgtctgcaccatgttgttgtcgtcccagtacctacttcaacaaacgtcgttaggaccacaaggtatagatgatcttgatgttctgcataaccacactgagagtacga

SEQ ID NO: 48480 - DNA, 206 bp, Setaria italica
  Peptide Sequence Number=SeqID_114454
attgatagcatgtctggtggatggctaaatccaccagtgcggtttgaggacgagccttgccgccacaagatattggatcttataggtgacttctcgcttcttgcacagaatggtaaccagggtttcccaatcgctcatataattgcctataaggtatgttctttaaattctactagctatgttgtgtgttgtatacttccataaca

SEQ ID NO: 48481 - DNA, 236 bp, Setaria italica
  Peptide Sequence Number=SeqID_114455
ggacagtggggttgaggatggcgctcacgtcggagagccggctgaagaggtttaggttgaagaagagcgcggcgagcatgaacatgacgacggaggtgaacaccatggtggactcatttctctggtctgcataggaggcggtgaggttgtgcacaaagggatggagtagggcatcacagccatgtctagcatagctagtatttgggctgttgctatcatgttggctattggcgagg

SEQ ID NO: 48482 - DNA, 301 bp, Setaria italica
  Peptide Sequence Number=SeqID_114456
ggtgactgcaactggtatttttatgtttggtgatcttagcttattaatcagtaatcacatggatcttaatgtttgtgcgccagtatatgagacctctgatacatttttttccccaaacaacctctgatacatgttatctgctactgagcatgatattcctgtctttggtacaggacatctacaggcgacatcacaagtctaagactaatcacagcagtccaaaacccctatttaccagatggaagattcgatctcgaagcatacgattctttgaataaacatgcagatagagggtggtgct

SEQ ID NO: 48483 - DNA, 244 bp, Setaria italica
  Peptide Sequence Number=SeqID_114457
tttcagcagaattaatctttgtgtttttgcgaatttcagtggaaaaattgacgtcttctcacttgttgctgaaggcttatatcgctgagctagaatctctagtcacacagctcgaggaggagaatgccgagctgttgagaggacaggaggagcggcatcagaagcgacttaaagagcttttggaacgagtgacgccagtcattgtgaaggaaaaagctgtcacgagatcttagaagaacgaact

SEQ ID NO: 48484 - DNA, 277 bp, Setaria italica
  Peptide Sequence Number=SeqID_114458
cgcctcgcggaagacggcggaggaggtgtggaaggagatcactgccgggggtggcagtggaggtgctacagcggctcccgtgcctcaggccgtcgtccccgctggcgcgggaggcggagccggcgccggcgccggcggcccggagatgacgctcgaggacttcctggcgagggaaggcgcggtcaaggaggacgaggctaggatttcgggcccctggcgccggccgaggggcaggtggtcatggggttcctgggcggagcggagggcgtgggcgtgg

SEQ ID NO: 48485 - DNA, 394 bp, Setaria italica
  Peptide Sequence Number=SeqID_114459
tattcacgattcccatgtcagaggcttccgcatagtccccataccttggtaccacaaccataacacgatgccctcttcttgccaagccttgggcagagctcccgcaacatctccaagaccacctgttttgcaccaaggagaacattcagcagccaccacgatcacgttcatgacattctccccggccaaaggcccaggatcatcgttctcgtaattttcaaaagaaccagcaccatctgcatcagccccggtatcacccttcatttcggcaggatcgttaaaaccgatatatttcttgaaatcccaagcggcctcttgcacctcaggcacaggcggctgagtcggaggtggaattggatttggaactccaccgattattctagtccttgtgcac

SEQ ID NO: 48486 - DNA, 229 bp, Setaria italica
  Peptide Sequence Number=SeqID_114460
caccgtcccgtacgccatcgcgtacagctggttcagcccgcacggctcgaaccgcgacggcatcagcaggacgtccgcgcccgccgtgatgcggtgcgccatgggcaccgagaaccccacccacgcgcgcaccttgtcaccgttgtcttccgtccttcgtctaccgtccgtctagtctattctcctccaggtccggccgacccgtgcccagcatcaccagctgcacgta

SEQ ID NO: 48487 - DNA, 159 bp, Setaria italica
  Peptide Sequence Number=SeqID_114461
cttcggcgcggatgtcacaggtttgggaggtggagcagaacctgcagccttggccttgctgccctgcacggtgacccccttgggcgtggagctctctcctgccgccgtagctgtacctgtacgatcgcagggcagcgcccacccttgctccgcctacca

SEQ ID NO: 48488 - DNA, 147 bp, Setaria italica
  Peptide Sequence Number=SeqID_114462
ctgggttcgtacatcgtagagcagtagtggatgttgtgtggaagtatgcatttctacacaacatccactactgctctacgatgtacgaacccagtcgaaagcacacagctcaacccactaccattctacgatgtacgaacccagtcg

SEQ ID NO: 48489 - DNA, 413 bp, Setaria italica
  Peptide Sequence Number=SeqID_114463
cctggcattttgactttactcatgtcttaatcttcagaaatctttgggattactaattcagaagattttgactttactcatgtcttaatcttctgaattagtaatcccaaagattaagacatgagtaaagtcaaaatgccaggagctgcatgtccagcttccacgatatgcactcaacaaatgtcagatgagctcgcaagcattaacaaaacagtattgccctatttggatccgcggatcataagatctccttgcacaacagaagggcatcagttcccttcgtacttcgggtctgccatcacgaagtggtacgcaataaccaagacaaagatgaagatgcccaggaaattggcaaagaaacccaggtcttggtcgtcaaacatcttgcccgcccaggagatctgcttggcggg

SEQ ID NO: 48490 - DNA, 211 bp, Setaria italica
  Peptide Sequence Number=SeqID_114464
aaaatcactcaggtggaaatcacaagtacttgggttccccgcacgaacagaacagatcagtcctaagcccgaagcccctaggccatctgggtggagaagagagggagacagtgaggcgaaccttgcccgccaagcagatctcctgggccgctcgccgcgccgccttgcctctcctaaccctcgcctgctgtgtcgcagccgctccttgccg

SEQ ID NO: 48491 - DNA, 193 bp, Setaria italica
  Peptide Sequence Number=SeqID_114465
ttttttgaagcgaacggcttaaaaagcacggcaccttacccagcaaacaacaaaccaactacaggccttgaataatcttcagaaatctttgggattactaattcagaagattaagacatgagtaaagtcaaaatgccaggagctgcatgtccagcttccacgatatgcactcaacaaatgtcagatgagctcg

SEQ ID NO: 48492 - DNA, 215 bp, Setaria italica
  Peptide Sequence Number=SeqID_114466
taactaaaactttaacctaataactttaaactaagaataacctaattactttacttaggaagaacgaaccaaactacctaatttatgcagagcatccacaaccatcactctgcaacataaatagtacacagatatcaagcttggtatatcattgtttgagttaaacactcccatggaagatgttagcaatatattccacaatgatctactcccat

SEQ ID NO: 48493 - DNA, 169 bp, Setaria italica
  Peptide Sequence Number=SeqID_114467
aattcttctgtaatcagcacacttccatctttactgatcctattctttcttggagacgaaccaaactcctatttatgcagagcatccacaaccatcactctgcaacataaatagtacacagatatcaagcttaggtaataatacaattagtttagaagttaaaacaact

SEQ ID NO: 48494 - DNA, 190 bp, Setaria italica
  Peptide Sequence Number=SeqID_114468
caagcccttgagccttctgcaagtggcagctctgaaccagtaggtcttggtggaggtctgattccaaagagacggagcagagcggcaaagccatctgggagcacaactgatcctggtagggattcatcttcagtcagccaaaaacttttgtctaagtaaaacttagtacttagggtaacctaaaactaaa

SEQ ID NO: 48495 - DNA, 373 bp, Setaria italica
  Peptide Sequence Number=SeqID_114469
agacaaggtctcactcgacaatgtaaaatctttttttttgtttttataaatattgatataggaggttgaattagttgctgtccataaacatttttaaaagggaaaacagagagagaaattcatcgacggaccgaccgatcatcgatttgatgtgtctcatatatgttaattgtttataatttaaagttttgatttgtaaaacaaaaggagggagaaaaatctgagtgagcgtttgacaaaatctgacatgtagagtagagaagaagataggagtagtgggtgagttgtaagtagatgatggagctaattctttttgtttcttggggttggtagagaggttagagaagaaaatgtgtatagctgttgcagcaac

SEQ ID NO: 48496 - DNA, 449 bp, Setaria italica
  Peptide Sequence Number=SeqID_114470
taaaatttttgtaaaattattgtattgtattaacttcctttctaaaaatttgtctagtcgggtagtagagattgcagatctggaaatgctgggataactgggtcattcttaaagatgtttagaagacgatttatcttcaccctcttataaagcgactcgccctccttctctgatgaggttgctagaacaaccaaaactgggaggacacgaagtagagtatgacgctcagggaaaaggagagcaaaaatccaactccaatgactccacgcaaaatactataagaacctgtaggatatcctcgacagtattcgtccgaaacatttcggcatgtaagtttaacaagatggccatctggtgctcagaaaaatctgaaggtcatctagctcttctctcatggtgtcagtatcctgcccactggctgcttacttgagtaaatgttctcttgtacc

SEQ ID NO: 48497 - DNA, 379 bp, Setaria italica
  Peptide Sequence Number=SeqID_114471
aagttgacaactgttatggcaacctgccgatttaataaaaatgcttacatatgacccacaatagaagtagggcttcccagtagaagcacttgatctctgagaagagtgatgagttccttttgtggatcgaacaaaccgctgtgtggtattacataagatgaaattgggcaagaaatctgtctgcatctcactccatatctggacaccagaaaggttatcaaattagaataaattaattaggtgaaacagccaactttgcaagaataagcacaaacatgcatttcataatgcaacacaacccttcataatgtgatttccgagtaagattttgctatcaaattgttacttttaattagtaattgccaaaaacaatacacat

SEQ ID NO: 48498 - DNA, 441 bp, Setaria italica
  Peptide Sequence Number=SeqID_114472
cgatatttgatgttgggagctgtactatatctcaaacatgcttttttaaggaaatattgattgctccaaatcttaatgaattttatcatgtcttccacttttatatttggcagtcgtacgtggaggctagtggtcctcatgcagtaaacactgcttgggcaatgttggctttaatttatggtgggcaggtggaacgagatccaacacctctatatcatgctgcaaaagaattgatcaatatgcaactagagtcaggcgactttcccaacaagtaatttatatttatttttggcttatagaagaattataagtttagcactatgatttggttgttttcttctctttcagctaaatatttatttgattattgttcttataaaggtactacaaagaataataagaaaactttagtaacttaatttaacctttttagttaaacta

SEQ ID NO: 48499 - DNA, 352 bp, Setaria italica
  Peptide Sequence Number=SeqID_114473
gtgacagcattggtggcagcatttaaaagtagtggtaaatggagtattatcagagtaggcatgcttcacttgtccgtcatttcctggaaccagtcccagccatggagctgactgcatgaactgtgtagtatcgatttgtctcaaaacaatgtctagaatgctcatccaatacaaagcacttccaatttccttaaggtcatgaagaacttcagttttcacttcagacttcgcttcccatgtcaatatttcatgaattattttctggcaacctgctataccaccatcaaatgaaagaagcattgccaaaatctattggacttcttttcattttgtattggttggttattagtct

SEQ ID NO: 48500 - DNA, 423 bp, Setaria italica
  Peptide Sequence Number=SeqID_114474
caaaatttgccaactcaggatcatgtttttcgtgagatcaacactgaccctaatttagatatacaacaagcaagcgcattcttttattcaagtccagggttcaccattcatatgactgcaactacatactttacaactagcttacaacaacataacatatgatctatctcacatacaagaaagaacacatccacctgggaagccggtcaggtggctctttgtggcaatgtctcgaaagcagaaacggtgttcataaacttcatacggtgaagaggtgccccacttggcttgatagcacacgcaaccttgtcctctaggaggctcaataaccatgtttctccatgttgagggcacgctcgcccccttgaggacaaggttgcgtgtgctatcaagccaagtggggcacctcttcatacggtgaag

SEQ ID NO: 48501 - DNA, 270 bp, Setaria italica
  Peptide Sequence Number=SeqID_114475
gccccacttggcttgatagcacacgcaaccttgtcctcaaggggggcagcgtgcccctcaacatggagaaaacatggttattgagcctcctagctttcctcattgcttcaaggatgccctcatagccttgcaacaaatttggacttttagtcctctctgatgattgataatgtgaaattgttgcgctttctacagcagcagcacttcgagctttttgatttctcctatcaatttcttctaatgtacttagttgttcgtttacttttgttt

SEQ ID NO: 48502 - DNA, 360 bp, Setaria italica
  Peptide Sequence Number=SeqID_114476
taaagtacgtggaggccaactagctgaattagtctggccgagtaaacaagttaaagtaacatataacaattgtaaaacaaatcataaagacatatctactatgaagaatgaaattagtaaatacatatgtgtatgtccaataaacaaggcattagatatgatttgttgttgggcagaaaatccaaattcagatgcattcaagcagcatcttccaaggatatatgattttttatggcttgcagaagatggaatgaaggcacaggcactgttattgctatcaaagatctctccagatcttgttggggatcccataaaaggagaaagtttgtacgatgcagtggattgcattctctcttatga

SEQ ID NO: 48503 - DNA, 361 bp, Setaria italica
  Peptide Sequence Number=SeqID_114477
agtaaggaaccttaatactaataccaacggaacaataggcacaaaatcttgtatggacttgccttaataaagtcgtggagccaatgctgaattgactaggaccaagtaaaacaagttaagacatataacattgaaaaacatcataaagcatatctactatgaagatgaaattagtaaatacatatgtgtatgtccaataaacaaggcattagatatgatttgttgttgggcagaaaatccaaattcagatgcattcaagcagcatcttccaaggatatatgattttttatggcttggcagaagatggaatgaaggcacagatccgtgaaaatcatcctgactatgaagcttacctaccgcc

SEQ ID NO: 48504 - DNA, 216 bp, Setaria italica
  Peptide Sequence Number=SeqID_114478
taaaggagaaagtgtgtacaatgctgtggattgcattctttcttatgtgaacgatgatggcaccttttctacatatgagcataaaagagccacatctttgttggaggttctcaacccttcggagagctttatcaacattgttgttgactatccatctgttgagtgcacttcatcagtgctccaagctctcagtatgttcagatagctggatccagg

SEQ ID NO: 48505 - DNA, 373 bp, Setaria italica
  Peptide Sequence Number=SeqID_114479
aggaggccagggggtttccccaggcggcgtggctgctgctgctgcatcggcatcggcggggaggctgttgatacccgtagtgctgctgttgcggaggggttgtagtgcactgtgtccgtggcgaggtgcgacacgaacccgtcatcggcagcagcgccggcgccgcccatcccccatggccatctcgagctgctccagcttctgcgcgacgtccgccatgtccgacgagcgcaccttgtacccgagcgcggccagcagctcgtccacctcctcatcctgctcccccgcgcccgccaccgccgccatcatcttgtccttggaggagcccactggtacccggcgcccccgccgccgtaccctccccaccccggcc

SEQ ID NO: 48506 - DNA, 197 bp, Setaria italica
  Peptide Sequence Number=SeqID_114480
cggcgtcgaggagggagctgtccggggcggggcggaagcggtacacacggcgagcgagcgcctcgccgaagtaggcggcgaccttgcgcatggcgccgccctgcgacgaggccagcatggggatttgctggaccagcgaacctccacttgtaatccggccgcggccgtgctcctcctcctcctcccgtcgcgcgccg

SEQ ID NO: 48507 - DNA, 250 bp, Setaria italica
  Peptide Sequence Number=SeqID_114481
gttcttccttccttcttggttcgcaaagggacatcgttcagggtgaggcaaacccctcttggcaagccgatcagccgtccagcatttgttgtgagcaaccaaccacaagaaaatttacacttgccaggagcccaactcttccagattattacacccttccttatctcttgggaactcaactataagctgctgatatcaattccagttgatcttcttcaggagattctccaagtgcatccagttcttcatc

SEQ ID NO: 48508 - DNA, 301 bp, Setaria italica
  Peptide Sequence Number=SeqID_114482
ggacttgcaggatcgtgtcagcattcttaagcggttgtcaggtgatatccatgaagaggtggagactcataacagaatgctagaccgaatggggaatgatatggatacatcaaggggttttctctctggaactgtggacaaatttaagatggtctttgagaccaaatcaagtcggaggatgggaaccctggttgcatcattcgttgcgctttttctgctggtttactacttgaccaggtatgtacggcatcgtaagtagaccggcacatcaatattcagcatgttcttgaaacaacaacca

SEQ ID NO: 48509 - DNA, 367 bp, Setaria italica
  Peptide Sequence Number=SeqID_114483
tagtcctttgttggtcgtagttaagggtagtctattattggtcttttctttgtattcagaaaccttacagttttacatccaggttgatgtaatcgagtcccagtggaatgttctacaatctcacgtgcaggattcacatgattttacagagctagtgagctttcatcaagagtacttgtcagcactggtttcgcaatccttcctggatatcggatcagtctctagaatactcgacagcataatgaagctgtgcttgcagttctgctggagtattgagcaatatgagactcgcccaaacatatctgagatcgatcacataactgaggaattcaacaagaaatcaaattcgctgtacactatcttgagg

SEQ ID NO: 48510 - DNA, 313 bp, Setaria italica
  misc_feature (265)..(313): n is a, c, g, or t
  Peptide Sequence Number=SeqID_114484
ttgggtgttaattttagtcgcacccaatgatcaataatgtacacaatcagatgtccagacatataattatatacattattgatcattgggtgttaattttagtcgcacctgtaaagcatatctgctctattagtacttgtaaacttttgagtcgggcagttaagttgctgatattgggatatttggtttggcttaagatttgatgtatcatgcatgcttctgtgtgttaatttgttgcaataaataaggtgttaaaaattttttnnnnnnnnnnnnnnnnnnnnnnnnnnnnnnnnnnnnnnnnnnnnnnnnn

SEQ ID NO: 48511 - DNA, 261 bp, Setaria italica
  misc_feature (58)..(58): n is a, c, g, or t
  Peptide Sequence Number=SeqID_114485
ccgtcagtgttgagactgttctcggggggaggatatagtcacatcatggaccatcacnccttgacagttgtcaaactttaagatggcactgtgagctgttgacaatagtgatgccagctactaaaacgttgaaactaccataaaacctcaatgcctgcatcaggttacgaaatcagatttgtgattactttgtttctatatgtgataattatgtgcagaaagatagtgatattcttactgtaggtttaatatgtggcattg

SEQ ID NO: 48512 - DNA, 503 bp, Setaria italica
  Peptide Sequence Number=SeqID_114486
ttgtagtagtagggttctttcttcttggttattcttcttcttcttccttggtcttggattgtctataacattgctgttaagtggaggcaaatttctgaaccttgtgatccagttgtttgggtcaataagctgagtgaagagttcaattctggttttggatctcataccccaatgcttcttggtcaagcaaaagttgttcggtactatccatattaccaaagagttttggaaactgcgaagaccataatgcttgacttgaagtatgtcaataatgcagaggaccgtgcgatctttcttacagatattgaaaaagttgaagaagatagaagttgcatcgtcatgctcagatttgtaccatatagttggtgagacctactgggttgctacaagatgtgacagtatggcgtctcagggggaggcgtcttgaagggacaaggaattaccactcagaacatgggcaagacaggattgacttgcaatacgaacaccttgcacaccatcaa

SEQ ID NO: 48513 - DNA, 279 bp, Setaria italica
  Peptide Sequence Number=SeqID_114487
aagatgtgacagtatggcgtctcaggggaggcgtcttgaagggacaagaattaccactcagaacatgcaagtttccaggcacaccttttttggttctcgtttcactatattctgctgctatccagcttacttgtgttgatggtattttgcaggggcaagacaggatttgactttgcaatacgaacaccttgcacaccatcaagatgggaggagtatgatgaagaaatgactgcagcctgggaggcgatttgtgaagcatactgcaatgacacaaacccc

SEQ ID NO: 48514 - DNA, 250 bp, Setaria italica
  Peptide Sequence Number=SeqID_114488
ttttgaccaaagcattggaatttgaaaccaaattcttctgatattttacatgaaaggaggaattgtgaacttcaaattcaaggactacaactgtgcacttgaagatctttcaacatgtgtgaagcgtgacaagaagaacagctctgctcacacttatttagtaagtaaatgttttaacaccaagtatttcttttattattccctagttggttgtccacaaccttctaagcattttgtcctatgatcagat

SEQ ID NO: 48515 - DNA, 240 bp, Setaria italica
  Peptide Sequence Number=SeqID_114489
caaaagttgttcggtactatccatattaccaaagagttttggaaactgcgaagaccataatgcttgacttgaagtatgtcaataatgcagaggaccgtgcgatctttcttacagatattgaaaagttgaagaagatagaagttgcatcgtcatgctcagatttgtaccatatagttggtaattcttgtcccttcaagacgcctcccctgagacgccatactgtcacatcttgtagcaacc

SEQ ID NO: 48516 - DNA, 385 bp, Setaria italica
  misc_feature (214)..(214): n is a, c, g, or t
  Peptide Sequence Number=SeqID_114490
aacacccaataccaagaagagaacaaagctctcctggaggactgccggcagagcagaggtacccttctcttttgagctcttttagcatgttattacttgctgtaactctgtcagggttctgtcttaaacgggtgtccacgccctgcgttttcttattgaaaaaacaacgaaaatttgcatattagctgctagcacatgtttgctcgctgtaagngaatttgatggggttataagcttgctcatagtaactctgattatcgcatgaacgcaacgtcgttgctctagtaatacgccagaaagtttatgctttatttttgcaggtgaagtgcctaataatgtggcaatccaagctgctgccgaaactcaccatgcttgtagtgctgcc

SEQ ID NO: 48517 - DNA, 324 bp, Setaria italica
  Peptide Sequence Number=SeqID_114491
ttacaaacgttacttagggggaatgttttaacgcgtggccacctcccccgtactctggaggaatgtagccaattgtccccttcacaccgatcgagctacattcctccagagtacgggggaggtggccacgcgtcaacgtctggggatgtttatagttttggtgtactgttgttggagattttgactggcaaacggccgacagatcctatgttcacagacggactagatatcatcagcttcgtggagaacagctttccggatcaaatatttcaggttatcgatgcccatcttgtggaagaatgcaagaaattaactcaagaaaag

SEQ ID NO: 48518 - DNA, 296 bp, Setaria italica
  Peptide Sequence Number=SeqID_114492
tgtctaggtttcgtatttagtcttcgattcggttgttgtaaggggtactaatttggcttacattcctccagagtacgggggaggtggccacgcgtcaacgtctggggatgtttatagttttggtgtactgttgttggagattttgactggcaaacggccgacagatcctatgttcacagacggactagatatcatcagcttcgtggagaacagctttccggatcaaatatttcaggttatcgatgcccatcttgtggaagaatgcaagaaattaactcaaagaaaaagaaagtaac

SEQ ID NO: 48519 - DNA, 383 bp, Setaria italica
  misc_feature (341)..(341): n is a, c, g, or t
  Peptide Sequence Number=SeqID_114493
tttaatttagttaattaaggttatttgttttggtttgttctttcccttgttacttactattcgtacttactatttgcaaccctacacaagattgacaaaggtgcctttgggtacggctcctatttctgcttgtcgctgatggacaagctgtaccacccggacatgactcttgaggaggcagtggatcttgttgacaagtgcattaaggagatccgcctgcggctggtcgttgctccccagaacttcgtgatcaaggttgtggacaaggatgggggcgagggagctcgcgaggcgtgagctcgtaggcgacagtgcatcagcggaagctgcagcagcaaccncagtggccgcctgaggcgtgaactcgttggcagttggacatt

SEQ ID NO: 48520 - DNA, 408 bp, Setaria italica
  Peptide Sequence Number=SeqID_114494
aaccttcagtcttatcagtctttagtttctattacaatgcacactattctttttcctccaaactgaaaacactagctcgcatctaaatgtattttttgggactgaaaggcttcaatgttgatgtaaatgtattttttgatgttttgaaggcttcttttaacatcttttatgtcctgttattgcacttgtgcaagcacacgcaaatacacctaaatttggtcttgcttgctgcctagctttactgtgaatgtttgattctgacattattatgcttctgaattctgatgctgcttaactttttgcatcatagatcatggggcataatggatccaggatggatccagctagagctggcacaccatatcatccaataccgatgggaggaacctacactagccctagtcctca

SEQ ID NO: 48521 - DNA, 257 bp, Setaria italica
  Peptide Sequence Number=SeqID_114495
acatctgaagccaccatgggcgcagctataactgaacttgcaacaacatcaactttaggtccccactagttgttgcaagttcagttatagctgcgcccatggtggcttcagatgttaaagcctctcaactagccaataatttggctaccaatattgtcacatcaagcaaaaccactgctaaggaatttaaactcaatccttgtgcaaaggtcttctctccatcttttgcaagttctagacaagtacttgcagctgcg

SEQ ID NO: 48522 - DNA, 249 bp, Setaria italica
  Peptide Sequence Number=SeqID_114496
aaatgaaagcttaattttctgttgggaaacaacattgcatttatggttctatattgaataggtgttgtgctaaagaaagcaaagaagatagcaaatgggaagggagatgctaatctgttgctgggagcatttgtggatactcttgttgttcatccagatgaccttgttcaagtgattgcaaagggtctcacactacccattaaaggtgttggtacaactcctgattgcgatgcggtggctgccagtgga

SEQ ID NO: 48523 - DNA, 290 bp, Setaria italica
  Peptide Sequence Number=SeqID_114497
gcgcgcatcgcgtctccatctgatgcagcttcaatcataaaagcagcacagtcaaaagacgccatccgaatcaggcctggggaaagcctcccaaattacctgaaaccactagcaccaaaaccactctcctcgctaccaccagtgaacacacccaactcggcgcatgcaaaccctggccagcgcagctttggtgattccgcagccgccaaggacgcaatcttcggttcctcagatggcagtgatgatgattgtagttacgtattgtattgtacgtacgtactacttgtatt

SEQ ID NO: 48524 - DNA, 350 bp, Setaria italica
  misc_feature (15)..(15): n is a, c, g, or t
  Peptide Sequence Number=SeqID_114498
tatatatacatggcngccagacctcagggcacttcagtgttgcgcccatacaccgaatcgctttgtagaactttttatgaacctgaattcagcaagatcttaagtgtgcattactgtccatggctgcatcaacagttcaatcaaacagaaatgttggtcagttatctgacctgcttgtagtcaacttctgcagcacggttctccttcagtagaatcccggctgagagcacaagtgcagaggggatactcaacaggccaagagcagcctttgaacaacatgaaccaaacatatgattttataataacgagtcagagattaagttattgactaaactaaaggtctaattcta

SEQ ID NO: 48525 - DNA, 196 bp, Setaria italica
  Peptide Sequence Number=SeqID_114499
gctccagtggttggatgggtcgtcgcaggcgtacgcccccgggtcgccgcacttggaggtgaggttgaagttgtactcgccgacgcccggcgccccgcagcacgcccgcggcgtctgctccaagaaccctgaaccagaaaacacaggagaagacacattagacatggtggtggaggcggccggccaccagagagac

SEQ ID NO: 48526 - DNA, 219 bp, Setaria italica
  Peptide Sequence Number=SeqID_114500
gagatgcatcacgctagctattcaatgcaagaaaatgaaccttgcggggagctgcagattttgggcttcatgtcctggaaccacttgatctgagtgtgcaaggatcccgagctccacacggcgtgcccgaggccgcgctcctggaagaaggacaagtccagcgacgtggcgcccgtgatggcgaagttggcgccgcggtggaacgtcgcgttcttcgcc

SEQ ID NO: 48527 - DNA, 328 bp, Setaria italica
  Peptide Sequence Number=SeqID_114501
tcggacatcctccgtatattatggaagagataggcagaagctgcaagaatttcacagaacttaagatcatgggctcatttgatcacaattttgcctctgcgatctcacagttcctccaaagctgaaggttttgagccttcgttgctcgaaagtgaacatggatgcactgcaatctttactgcacaagatggaatatcttgaggttctgaatatttcccactgcctgctgttggtcgctgcggcaaacgggcggaagcaagtggttcattgagcttggtattggtcctaaatttcttcgtagtagtagtctttctacggtcttgtcgtt

SEQ ID NO: 48528 - DNA, 244 bp, Setaria italica
  Peptide Sequence Number=SeqID_114502
tttgcaagaagatccagatctttgagaagagagggttgacacttggtgttgtcatgatacttgtgcagtctgttcgtaacctggttgctctattgtctcgttgctccaagaaactccattgatgcttataaagatgtgatccttatgtcctgcccttttctggcaagtggcagtattaatgtcctaagtgtagacttgagtttcagaagaaagaagtgatatttctggatccaaaggtagatgg

SEQ ID NO: 48529 - DNA, 243 bp, Setaria italica
  Peptide Sequence Number=SeqID_114503
aatgttcaatattcatttggaatattctctgtgaaattctcctctgatggccgggaacttgttgctggcagcaatgatgaatcaatatatgtctatgacctgcatgcaaacaaattgacattgcgtttacctgctcatacagtatgacaaattgcttactttcttggcttacataagccatctaattttttacttgatccaaattatgttttgtacgtgggcccttttttagttcacatctca

SEQ ID NO: 48530 - DNA, 248 bp, Setaria italica
  Peptide Sequence Number=SeqID_114504
ctgggaaaataacgaagaaaaacgtttagatgttctaaattctgctcatttcatcagtgctacggtatgtgatctttgtagtctgcaggtctgggacagacgatgtttgtctgcaggacaagctgccggagttttgtctggacatttgcatggggtaacacatattgatagccgtggagatggccgaagtttcatatccaatggaaaggaccaagcaatcaaattgtgggacattaggaaaatgatgt

SEQ ID NO: 48531 - DNA, 148 bp, Setaria italica
  Peptide Sequence Number=SeqID_114505
cccatcagagctgttagcactcctggcctaaaagcgccgctgacatcttgtagcagctgaagctttttctccgttactccatttttcgccatctcctggtgggatatttgtattcttttcttcaatatgtgattggaattgatgcaaa

SEQ ID NO: 48532 - DNA, 159 bp, Setaria italica
  Peptide Sequence Number=SeqID_114506
cagttttttgtcattagctgcgtcgctgaaacttctgatttagtaactattgttctccacatggacatgtacgctttgacgcattcaatgctgagcaacctgttcaaacagccatctctacaacccagtcgaccattctttgtaggtaggtctttgtct

SEQ ID NO: 48533 - DNA, 442 bp, Setaria italica
  misc_feature (40)..(40): n is a, c, g, or t
  Peptide Sequence Number=SeqID_114507
catgtcgaactttgctaacaggaggatcttcttggtcagngtaaaaaggcagacgatatgagcagagttgctgggttagataaccaaggaattgttggccttcagagacaaattatgaaagagcaagatgagggccttgagaagctggaagagacagtgctgagcacaaaacacattgcattagcagtcaatgaagaacttaccctgcacacaagattgatagatgaccttgaagatcatgttgatgttacaaactcgcgtcttcaggttatcatttatccttgatttaaatagttactattgttttaccacttgaatatttgctgcaatttgatatttagttttctcaagtttgcatgaatggaacactgacacaatttctctcattcagcgcgtgcaaaagaggcttgcaattctgaacaagcgcaccaaaggtggctgc

SEQ ID NO: 48534 - DNA, 366 bp, Setaria italica
  Peptide Sequence Number=SeqID_114508
tcagagacaaattatgaaagagcaagatgagggccttgagaagctggaagagacagtgctgagcacaaaacacattgcattagcagtcaatgaagaacttaccctgcacacaagattgatagatgaccttgaaggccaacaattccttggttatctaacccagcaactctgctcatatcgtctgcctttttactctgaccaagaagatccctccctgttagcaaagttcgacatgttgaaacttgtcgcctatttgttttgctttagacttcaaatttgaaagcatgtcttggcgcttatgcatttcctgtcagtgattgactttggaggaattctggtcagcaatgactccaagctatccagcct

SEQ ID NO: 48535 - DNA, 328 bp, Setaria italica
  Peptide Sequence Number=SeqID_114509
taccctaacttaacaaaagaactagaggcgggttaccttcgtggacagtgtaccaaaatctccttcgggaaagattttaaggagagagctaatcgcccaagtgagccagcgcttgcgtcagtcctccggctccacactccagagtctagagtaacccaagccgggtcgggtgcagcctagaggttaaatttgaggatcctttatcacccctaggtgcaggtgatgtacgagcattgagcagtgaagtactatggtctctaggtgacgtcacgagaagatatttccaagcaaaaaatttaatcgagttggatgcactctttagcatccg

SEQ ID NO: 48536 - DNA, 242 bp, Setaria italica
  Peptide Sequence Number=SeqID_114510
aatcgcccaagtgagccagcgcttgcgtcagtcctccggctccacactccagagtctagagtaacccaagccgggtcgggtgcagcctagaggtggtaatggatcgtagcctttgtaccttattcacaatccaacctagttctatctatttttagctcaaaattatatattattatagcgcgattcttattaagcccgacctttaaatttacttaggtttaaattttgtaggtattcctttt

SEQ ID NO: 48537 - DNA, 266 bp, Setaria italica
  Peptide Sequence Number=SeqID_114511
gggcgattaagggggaacggagccctggagagttgcattgtgctccatcgaaattcttcatgttgttcgacacaaatggcgatggcctcatctcctttgccgagtaagtggaatgaactttagaaaaaatgttgtatcaatcactgtattcgtaatattgaacttgtgacacttggactcctgcataaatgttgtcaccagtttgttgtaaggaaaccttgaaaatctataggtgtttatatagcacctgttcaggataaacgaag

SEQ ID NO: 48538 - DNA, 250 bp, Setaria italica
  Peptide Sequence Number=SeqID_114512
attttcttaaattcttctctgtcgatcaccccactgtggtcgacgtcaaacattttgaaagccacactgaaatttgactcaggaatgctgagcaatgtcacaaaaaagatgtactcggcaaaggagatgaggccatcgccatttgtgtcgaacaacatgaagaatttcgatggagcacaatgcaactctccagggctccgttcccccttaatcgcccttcgcggactacagttgactctgatggagggaa

SEQ ID NO: 48539 - DNA, 361 bp, Setaria italica
  misc_feature (345)..(345): n is a, c, g, or t
  Peptide Sequence Number=SeqID_114513
tgtttagacggggtacgacttaactgaataagaagtaggtaggaacaatacaattttaccaatagtgttcgacacaaatcaggatgggaacctgagctcggaagagttcttaagagcgttacaaaggacgagaaactgatattcgtcaaccaacaataccaggtcctttagggttcttgtcttgctggttcggtggtaggaagtcttcttcacttcgacagatggtgttctgattgggtccccctatgatccttgatgtaaatgtcatgtgcctttgattgtcatctcgtggcaagtgcagaagatagccaccaagtagcggactgcagctgaccgtggaaccgnttttgctgtaaatatc

SEQ ID NO: 48540 - DNA, 151 bp, Setaria italica
  Peptide Sequence Number=SeqID_114514
taaaggtaagttaaccgggggtagtaaaagtattgttgtagttggtcgtcccttacaactgtacgataagatgaaggcacctagctcaccgacagcacctgatattcacacatataacatactgctaggaatgttcatcaagttggaccga

SEQ ID NO: 48541 - DNA, 264 bp, Setaria italica
  Peptide Sequence Number=SeqID_114515
tacaaagaagacaattcacagtgaacctaattgctaaaaaaacaggccactagtactattggtgcaccaattttccactgatgtgtacactttacggagaaaacaagcaaatacaaatagcattaaataccatccatatagcctccgccaaactccttgcggcaccaaagtgtagtcctccccttctctcaaggttctttgaagctctggctcttcactaccattgattgtttctgctgaaataagcttcgagttatcaatctc

SEQ ID NO: 48542 - DNA, 146 bp, Setaria italica
  Peptide Sequence Number=SeqID_114516
tactgataagtggcacaatcaaattcaacagatgatagtgcttatacctcggactgctctactaacatgattgagcaaaccattgagtaaagctcattaattttggcctttctacttattctgatatttcgttcagaattatctct

SEQ ID NO: 48543 - DNA, 464 bp, Setaria italica
  Peptide Sequence Number=SeqID_114517
gtcattaggaatacaagtcacaagggggcacccaatgagcttccggttgatattaaactggggtccgcaccaaatctatctgccctccggtgcaggatctccaacctcaaaagtttttcatgaccaacagggagcctatatgcaacaagtatatcttcatcttttatagtgtaaagtccctcaattggatttgttaggtagcgatagatacggtgatcatacacctctgcaagtaacaatgtctcggaactttttaagcagcaggcatcagtaagggctttagtaagatctcggcagtttccatttttctgtatcgtcacagtgaaaggcattggaagagcatctccagtaccaatgattactgtaactgtattcagtggtactggagatgctcttccaatgccactgaatacagttacagtaatcattcgagtaactgtacttgtcactaccattgccatcaa

SEQ ID NO: 48544 - DNA, 212 bp, Setaria italica
  Peptide Sequence Number=SeqID_114518
taatgattgatgactgcatagagttcatacatgggctgcagattacctcttgatgtatgcttcacatacttgctcatattgaggtcatggattggaaagttcacaaaagtgtcaagcttgttcttcatatagcggctgtatgagaaaccttttcaaagtagaaactaaccaaataatactacaaggacaaacctaccaacaaagtaccaaga

SEQ ID NO: 48545 - DNA, 194 bp, Setaria italica
  Peptide Sequence Number=SeqID_114519
ccgagatgggcaaccctgaagctctcgcttcctcagcacgtgaaggatcctggtagatgctttatgctagatatatcaaatagctccatgaaccttaggtcggatgcttgaggaaatcgcaacgctggtgtcttacttcaatattcgatgaataccaacgttttgctgctgccaaaacaagagtttccgatcta

SEQ ID NO: 48546 - DNA, 236 bp, Setaria italica
  Peptide Sequence Number=SeqID_114520
tggtgcatctgtactacagccatttcagttgggaacatatctataccagcactgtttatacaaatcttcaaatgaacagaagctttacccataacttaattatgacttcagaatcggaatatatctatgcctgaaacactccttatatccctctagcagcagcggcggccgctgcgacttgttctcgcggtggctggcaggctgtggagtggtggttgcttgggcgtctcgctctt

SEQ ID NO: 48547 - DNA, 133 bp, Setaria italica
  Peptide Sequence Number=SeqID_114521
ccggtggctggtcttgtgcccccccagcgcctggtaggagctgaaggacttgccgcagacggagcacttgaactccgcggcggcaaccaccgcgcgagagcagtgaggaggcagagcgcgaggttctcctcct

SEQ ID NO: 48548 - DNA, 309 bp, Setaria italica
  Peptide Sequence Number=SeqID_114522
gtggatcaaatcaaccatccatatgcatcttttcttttaattacatctaactaataactagggatggttgctttgctcattcaccaggagaaggggggaaagaggaaagaaagtgttgcaaccgagacaatggcggcagactctggcgctcgtaggcagccaaccttcaccaaggttgaccagctgcgcccgggacccacggccacaacctcatcgtcaaggtcgtcgactccaagatggtcgtccagaggggccgcgagggagggcccccaggggcaggcagatgaggattgctgagtgcttggtcgg

SEQ ID NO: 48549 - DNA, 472 bp, Setaria italica
  Peptide Sequence Number=SeqID_114523
atcgcctttcggtaacgatcagaaattcaacctgtcaagtagattctcgctttgtatccaaccacgacttccacgaggtaatgcttggattataatgtcactttacataaattcgatgttttgattgtcgtagttgggtggtaactgaaggtttaccaaatacagcagcactgcattcagaatttctaagccaaccttgatgcaaccaggtttatttttcgaagctataattgtcccttaatgcatgaatcagtggcaaacacttattttttcctgaattgtctctagaatttctacacgtcaaatgatattattcaaagtaatattaggtttgttgaattttctatttgaaacatgtgtagcaaaatcagtgaaatttattgcagttaggtactaataaaataagcattaatctgtaacggactaaggtattaattccttacctggcaaattatggataaacagaaaaagg

SEQ ID NO: 48550 - DNA, 467 bp, Setaria italica
  Peptide Sequence Number=SeqID_114524
catctagtccgtagttgaaatgtgatctgacctttggcctcctgtagctgccctcttcaagacaagctgtgggcaacatttgctagcatatgtagtaaatagatgaactgccctctccaaacaatctttgctagcatatttccattgtatgtattaacgaagcactgttatcatgctggacaatgaatgaacttacgggtgcaggggtcgtggtattgttactggcatggtgcattccattgacattcattcatcaagaaagcatatctgtgtggtaagaacaatgatttaatatcatagcagaaggatgtttacttcaattgataaagcgttattttaaatggtaaatggggatctagcctctaggataataaatcatccattgcagcaataaggctgcaagttgaaatatggaattcagtcaggcagaatatcaagcaatggtttgtttctcctccaaaattcct

SEQ ID NO: 48551 - DNA, 331 bp, Setaria italica
  Peptide Sequence Number=SeqID_114525
tcttgaactgcttgctgaagcctgtgctatcaactcctttgacatagatcctcagaacccttctgatgtggtttgcgcactggaatgggaatcgattggtgtcctaacacgcgacagagatacattggtggaagaatgaaaattttctccattcaagggtctcctgtgaggtgtccagccctctggttgcaggaacttctatgtcagaataagaatcttctgacttatgggggctcccctattcagagagagagttctacttgtgatcctgggccaaccattggaggaacttctatgtcagaataagaagttccagccctctggttgcagg

SEQ ID NO: 48552 - DNA, 473 bp, Setaria italica
  Peptide Sequence Number=SeqID_114526
tttgctcagaatcatcttcttcctcaaaatcatcttcaactgattctgtgaaggcaaattcagcaataatgggcaaatgatcgctgccaatttccctggttggaagaccccttgttctcctcaaaacacctattgggaacgtgtccaaaaactctagagcattcaagtccatgagtataccacaaataatccaccgtgccgagaaatttcttgtgaaaggaagttgcaagaggctcagcatgaagacccctattacttgaatttccctttaaattagcatatgaactactgagcttcaatggatgttcagcgaccatgacattcgaataccctgttgcatttcttacttcttcatcactccattggtacttcagtgagcttcattgtcgacaagaacttgtagatagcactatcaggtgtgctgttgaaatcaccagcaagcacaataggaatttcatcccatttttcagcaa

SEQ ID NO: 48553 - DNA, 353 bp, Setaria italica
  Peptide Sequence Number=SeqID_114527
cgaataattgacactacaccttctgaccaactggatcactagttcacttcatcgggactcatcatctgtggagagatatgcatgttgcgtcgtgctcacttcttgctcagacccgttatcttgctcagaatcatcttcttcctcaaaatcatcttcaactgattctgtgaaggcaaattcagcaataatgggcaaatgatcgctgccaatttcctgataattttatatggcatatgttagagatgaaatataatcagtatatagaggcaaaaacaaacacaagttcaagcctcactgaagtttaagcttacactattgatgcaccaaaggatacattaagaatactacaaggc

SEQ ID NO: 48554 - DNA, 240 bp, Setaria italica
  Peptide Sequence Number=SeqID_114528
gatttcttgtgaaggcaaattcagcaataatgggcaaatgatcgctgccaatttccctggttggaagaccccttgttctcctcaaaacacctattgggaacgtgtccaaaactcacaaataatccaccgtgccgagaaattttctttgtgaaaggaagttgcaagaggctcagcatgaagacccctattacttgaatttccctttaaattagcatatgaactactgagcttcaatggatg

SEQ ID NO: 48555 - DNA, 427 bp, Setaria italica
  Peptide Sequence Number=SeqID_114529
aaagaggttggagatttagctccttccgcacacctaaattccaccactgaagcaagaaatggagatgctattgtttctgcacctgatcaagccaaggactcccaaacaattcctgggcaacaagtcagattacctgcaccatcctcttatacacaacatccttcagggaaacgtcaggaagatgaacctgctgacaagttgggtgaggcgaagtcttccaaaccaccctctgtatcagtgctggacacacagcatgttgctgcaccagatcaagtagcagttgatgaagaaaaggtttctctgtcaggccactacccagcaccagctccaggtacacaatatggtacagaactacataatgcagatgttgatggacaaaaagctttactccatcagttcaagattctgtccattctgtacagccatc

SEQ ID NO: 48556 - DNA, 357 bp, Setaria italica
  Peptide Sequence Number=SeqID_114530
cgcgttgaggtagtccctgctgctgaaggatcggtaggcgctcaggccgatccgcacgtcccacccgatctcagacttgctcatgttgtcgaggtatttagcgagggaggccgtgcactcggagcccatcgtcacgtagtgcgccagacgcatctcttcgatctcagggacagtcacgtccacacacttttgcaatgaaaaaagagaaataaatagcattgattctccggaactgtacagttcttttatgccatccggctctatacacacactactcctacaaggacttcctctagaagctttaatttgttcgttgcaataattttatctaaaatactagtaatatcatccaatgac

SEQ ID NO: 48557 - DNA, 516 bp, Setaria italica
  Peptide Sequence Number=SeqID_114531
tagagcatgagtcatcgaacagggcacttggatttcagatgcacttacgctagcacttaataactctgccccaggaagaccaactatatcccagtcatcccactgcttcacacttgtaagtcctgtggtttttaggagaatctaagccagcaccacctttctttggatccaaattcccatcagactcaatttttacaggtcgattcatcttttgtactgatttgttatttggaataagttggccactttccttagctttttgggcatttagctcgtattcctttttcctcttttgctctatgtgtatctttgcttcagctagtgtacggcatccagcggaacgacattcctgagagtcaacaaaataaaagtaaacaatcacatttatatttgcacaacggaacaaattgatgctactagaaccttaagggaagacacacatgtcggtagtgttctacagaacttcctcaaaaaaccaatatcaaatgtcaagaacaagattgatcagtagcacaa

SEQ ID NO: 48558 - DNA, 472 bp, Setaria italica
  Peptide Sequence Number=SeqID_114532
caacatagaagcttttcctgaaataaaacggatggatcattcttttactgtaacaaatacaaaacgcatgaacaagaccacaggactaatatgcagaaatgagcatgagtcatcgaacagggcacttggatttcagatgcacttacgctagcacttaataactctgccccaggaagaccaactatatcccagtcatcccactgcttcacacttgtaagtcctgtggtttttaggagaatctaagccagcaccacctttctttggatccaaattcccatcagactcaatttttacaggtcgattcatcttttgtactgatttgttatttggaataagttggccactttccttagctttttgggcatttagctcgtattccttttcctctttgctctatgtgtatactttagacttaacaaagaactaaagtaagtaaacggaacaaataaccaaagaacggaaaacgaaacaa

SEQ ID NO: 48559 - DNA, 302 bp, Setaria italica
  Peptide Sequence Number=SeqID_114533
tcaagtgaatatccaaattacgcaggctaagaagttcaaatatcaacgttacaaaccagggatggcccgagggctacaaattcttacacaagtttctagctcacaaaagcagaagccgtcgagaaaatgagcaaatacagttctgtcttaaaactgaaaacataaccgttacaaccgagccggcaccctacacccccacgcccaagccagccccgccaacctacacgccgtcccccaagcccactcccccggcgccgaagccgaagcccactcccccgacctacaccccggcgccgaagccg

SEQ ID NO: 48560 - DNA, 334 bp, Setaria italica
  Peptide Sequence Number=SeqID_114534
agaaaggggccatatagaaagaaattgtttttccagtcaccagccttacagtcccttgcccagtgaccatcaattccacagttgaagcaacgacctgtccctggtggagggcctcttcccatatattcacgggaaccacctggtccacgtggaacccctttagcaaactcaacaataatgtggctcccatcaacatccttgccatctaggttgtatcgcgcatcatcagcatcacgaggatcactgaactcaataaacgcatagtcgcgcttcaacctagatggcaatttctttctatatggcccctttctccacatcggtagcatttgttttt

SEQ ID NO: 48561 - DNA, 167 bp, Setaria italica
  Peptide Sequence Number=SeqID_114535
aagaacttaacctaacttaggtagaaaccgacggaccaatacaatacaatacaacctgcgttaacctttgggactagggctacggtcatccctagggctggggctgcgcccattggctgcagggacttcgggtagccatcagatggggctacggctcctgctcctgc

SEQ ID NO: 48562 - DNA, 123 bp, Setaria italica
  Peptide Sequence Number=SeqID_114536
aggaacctcaggcgtgagagaagttattccagtcaccagccttgcagtcccttgcccagtgaccatcaattccacagttaaacaacggcctgttcctgggggaggtcctcttcccatgtactc

SEQ ID NO: 48563 - DNA, 417 bp, Setaria italica
  Peptide Sequence Number=SeqID_114537
gggaaaggtcgattcgatcttccatataggcgacatcagctatgctacaggctttctggttgaatgggacttcttccttcacctcatcaagccacttgcttctcaagtttcgtacatgaccgctattggtaatcacgaaaggtaactgctgccattagaactgatactgccaaagcaatctgagcagtgtatttgcattgcgaaatgcgccatcattggccatgaattgtgatgtctttatcagggattatgcacaatctggatctgtgtatgggaccccagattcaggtggcgaatgtggagttgcatatgagtcctacttccgcatgcctgttgtcagtaaggataagccatggtattcaattgaacaagggatgttcactttgtgtgatgtcgactgagcatgactggtcagag

SEQ ID NO: 48564 - DNA, 343 bp, Setaria italica
  Peptide Sequence Number=SeqID_114538
taaaaagaaaatcgaaacgggaaaggtcgattcgatcttccatataggcgacatcagctatgctacaggctttctggttgaatgggacttcttccttcacctcatcaagccacttgcttctcaagtttcgtacatgaccgctattggtaatcacgaaagggattatgcacaatctggatctgtgtatgggaccccagattcaggtggcgaatgtggagttgcatatgagtcctacttccgcatgcctgttgtcagtaaggataagccatggtattcaattgaacaagggatgttcactttgttgtgatgtcgactgagcatgactggtcagagaagtcggagc

SEQ ID NO: 48565 - DNA, 169 bp, Setaria italica
  Peptide Sequence Number=SeqID_114539
aagctggagatatcattcagttgctggaatgggaagccactgccaatgtacgaacaaccaccactacatcatctcagacaaggtgagtgcactttgcaatctggtttcgactccttggcttccgccatattcattgcctaatactatactgaacctctgccatccattg

SEQ ID NO: 48566 - DNA, 232 bp, Setaria italica
  Peptide Sequence Number=SeqID_114540
tatcatcaagtgttcttccctgttcagtcctaacatggcaacataagctggagatatcattcagttgctggaatgggaagccactgccaatgtacgaacaaccaccactacatcatctcagacaaggagcaaaaggtgggattgaccatcaaacttaagctgcagccaaggctggtggagggctaggtcatgtgcatggaagcaaatatcaagtaccaaacagagaagcaaa

SEQ ID NO: 48567 - DNA, 322 bp, Setaria italica
  Peptide Sequence Number=SeqID_114541
taaacaaaggaaagaaccaaataagtaagtaagaagactactactagaataaaacaaggtggctgaggctgggaaagagaatggacaacaagaaaccagtgcagtggcaatcagagtcaggaggatgcagtgaaaactgtaactaaccagccaccaacttcaagcttgaagacaggtgcggatgggaagcagcaatactggaagaaggttgagaacccacggcagcacacagacagtgccgctcaaggctcatcaaagctaactgaaaagcgtctaaatggagttcgtacctccacaggcgtggtatcagagagcagcgaag

SEQ ID NO: 48568 - DNA, 392 bp, Setaria italica
  Peptide Sequence Number=SeqID_114542
tcacagacgaagcatcatgaactaattaggaggtccaacacataacagagcagcaaacgaacttgaattcttccaacaccaaaacatgccttaatcagcattttactttaactggaaagtgcctctttgctacttgagttttttagacacgtttgccacttgagcttggttgatacgggaatgtataatttctagtacttccatagaccacccaataggctacaccagaaactgccctcaaagatatagcaggacagttcaaatgcaactgaactcccgtttattcccatacctcctaattagttcatgatgcttcgtctgtgaagcaggctttttctagtgtaggaacttgtaaattttgctttgagaagtatatgaaggaaaggcatgct

SEQ ID NO: 48569 - DNA, 282 bp, Setaria italica
  Peptide Sequence Number=SeqID_114543
tacttgagtttttttagacacgtttgccacttgagcttggttgatacgggaatgtataatttctagtacttccatagaccacccaataggctacaccagaaactgccctcaaagatatagcaggacagttcaaatgcaactgaactcccgtttattcccatacctccgaccgcagtgtagatattgagcactctgaacattaactacagaagaatccctacggtcctagtactaagttgttttggttgtcttaccctttactttaaattttcttttacttta

SEQ ID NO: 48570 - DNA, 255 bp, Setaria italica
  Peptide Sequence Number=SeqID_114544
aagtgcctctttgctacttgagtttttttagacacgtttgccacttgagcttggttgatacgggaatgtataatttctagtacttccatagaccacccaataggctacaccagaaactgccctcaaagatatagcaggacagttcaaatgcaactgaactcccgtttattcccatacctccgaccttgcaaaacaaagaaagtaggatgaagatgtaaaatggtcagcctctcctgctaattgtgaatctcaata

SEQ ID NO: 48571 - DNA, 250 bp, Setaria italica
  misc_feature (7)..(7): n is a, c, g, or t
  misc_feature (21)..(21): n is a, c, g, or t
  Peptide Sequence Number=SeqID_114545
caaatcncaaaaatcacgagngatcgtcatttacttgtaccgacatgttcttatcagaattttcattcacctttgtgtttgacatgtttgtatcagaattttcactcactttgtttcttcatggagtttgcttgccactgcatagtggcaacagtgtcagccaaaatagtttgctagctcactagcaccaccttgtacgttacttgtctttgatgaatacctaaaagtacttttactaaaaacctaatta

SEQ ID NO: 48572 - DNA, 432 bp, Setaria italica
  Peptide Sequence Number=SeqID_114546
cagaccaaaataagtttagctaagactacaactaagacaaccaaccttagaacgtaactagcttgaatgatccaaagctttcaaaaccataaagaataagacctaccaacaattagacaaaataatggacaacaaagttttgaacctaatatctgctgtttaagtatagtgctgcgaaatgttacttcatgctacaagatttcattaacgtaacgtcctgcttgttacagacacatgattattaatttaattttgacctatgagttcatcaataacataacctgtgcttttcctgatagttttggcaaagggaggcagcaagcttgagacaacaactgcacaacttgcaagaaaatcataggtatgatccagaaaaccctgaaaaagtttcaagaacattgttcattagaaacttgttatcactattcagag

SEQ ID NO: 48573 - DNA, 176 bp, Setaria italica
  misc_feature (53)..(53): n is a, c, g, or t
  Peptide Sequence Number=SeqID_114547
ccgtttattccccatacctccgaccgcagtgtagatattgagcactctgaacnttaactacagaagaatcccacggccagacaagtgttttggtgcaccttttgtttcttcatggagtttgcttgccactgacaataagtaggacaaacaagtagtacaagaccaaaaataagtta

SEQ ID NO: 48574 - DNA, 353 bp, Setaria italica
  Peptide Sequence Number=SeqID_114548
ttctacatactcaaaaaaaaattacaatccattcctttacagaataacagtacatcccacatgtccaatattttcattcagttcatcatataacagaaagattatagaagacaagcaaccacaaaatgtgcatcacgcaagtagaacgttctctagtaaacagacttcacatgcaaggaaaaaaatgcttcatgctagcaaaagtgagtgcttgggcacatgacaaaatgctgcttaccttctttccggcctcaacttcactaacatcagcaccgaccgatagaatctcacccatcagatatcgctcgaacttaacagcagactttggtaacaatacacctccagcagatttc

SEQ ID NO: 48575 - DNA, 257 bp, Setaria italica
  Peptide Sequence Number=SeqID_114549
gtgcggttggagcattggtgcccaagtctaaattttgagggtaaacttcactcaacaacagctaacaaatccgattcccggcagaaacagtgcttctcatctgtaccaaggtccacctcgtaagcattgatatctgagaagagaacctcacccatcagatatcgctcgaacttaacagcagactttggtaacaatacacctccagcagatttctcagggatctggtggagacggacgagcacccggtcggactgcgg

SEQ ID NO: 48576 - DNA, 377 bp, Setaria italica
  Peptide Sequence Number=SeqID_114550
aaactattatggtatctggcacagctggatttccctgcacaggtttttggctctggtccttgaatgattgtgggcctgaagtcgcctgcaacctaagtgaattttgagtctgcggttgatggtactgctgcataaattgttcataaactcctgaatttgatgacggacttggggaatttgcagtccttaatccaatattttccagcccagcattctgaactgaattagcactctgctgatgttgacggggcgggtagctgcttcccaagttgaagccagatgatctagccataggataatgttgtgcttgcataaatgtttaacgttactacaatagaaaggtaggtaccttagtagaatagacaataataccaata

SEQ ID NO: 48577 - DNA, 336 bp, Setaria italica
  Peptide Sequence Number=SeqID_114551
tgcatgtcagaatgattttcaattaactcattccgtctatgacatcagctactgaagactgaccaaaacaaactaacttcaaatgcaggagaacctagggtagcttataattctcgtctaaggttttgggcggcagaaggaaggacaggtctcttctccactgcttcataatggagaacgaagttgtcctgcaaagcaaaagaaccctcagatacactttccctgctaatagataatgctagaaagtctgacatgtttcattcagataagaaaaccttatggacagtatcccagatgtttggatacaaaacaatgtagaccctgttcatgaagtgg

SEQ ID NO: 48578 - DNA, 377 bp, Setaria italica
  Peptide Sequence Number=SeqID_114552
ccacgtagcctctggagcaggatctttgcctcgtcaatgttgccatcccgttggattatgaagctgggtgtctcaggcaggaagattgcgccaatggttaggaatgcagctggcacagctgccaaggagagagagattctccagccccatccatctgcaattttctcgactccgtagttgatgaggttggcgataaggatgccaatgcttatgcagagctcgaagccattgctgatggctccacggtactgcggtggcgccatttctgatagatacagtggaattgactgcaaaaggatattgccatatatatcaagttaattttcagtattgcttttatttccaagtttgattattattattacttcttcctttaa

SEQ ID NO: 48579 - DNA, 244 bp, Setaria italica
  Peptide Sequence Number=SeqID_114553
gaatgcgatttttggttgtgatctttgatgtacaaatcaatatatatttgaccgaagagatgatgttacttagataagccgtgttcccctttgcagatggcttaagcaccatgactactgctggttatgatggccctgcagcaaggtcagccaaaaggaagagaaagaatcaatacaggggcatccgccagcgcccttggggtaagtgggctgctgagatcagagatcctcagaagggtgttcg

SEQ ID NO: 48580 - DNA, 408 bp, Setaria italica
  Peptide Sequence Number=SeqID_114554
ttggtttaaaactttcgttttttaaccttatttttcgttctttctttcgttcgttactttcgttcgttatttttttttcttacttgttgtcttcgtttccggtcgtcgtcggtcggtcggtagcttcccgactacgactgagccatgtgcggcggtgcgatcctcgccaacctcaccaagcagccgggcccgcgccggctcacggagcgggacctctggcaggagaagaagaagcccaagaggggcggcggcggcgggagccgctggttcctggcggaggaggatgaggacttcgaggccgacttcgaggacttccagggcgaatccgaggagtcggatttggagcgtcgggggaggggaaggacgacgacgttgtcgagatcaagcccttcgccgccacctccaaag

SEQ ID NO: 48581 - DNA, 235 bp, Setaria italica
  Peptide Sequence Number=SeqID_114555
taggagtatgtacatagggactaggggaataaagactatgggagattgggaagcacctgcttggcaccttgggatagcatatgcttgtgtctagctcagatgcaaaagttgcattctgaaactctttggttatggcacctgttccctatttacatactcctattgcagggcttcgaattcctcaatagatatcgtcaacagcaattcaaacaactcactggtgccttctgttatg

SEQ ID NO: 48582 - DNA, 302 bp, Setaria italica
  Peptide Sequence Number=SeqID_114556
ttctaggtattgtttgttgtagtctaactattggtattcttcttggtagtcttttgattgacattgcccattggttggcgatatctattgaggaattcgaagccctgcaataggagtatgtacatagggactaggggaataaagactatgggagattgggaagcacctgcttggcaccttgggatagcatatgcttgtgtctagctcagatgcaaaagttgcattctgaaactctttggttatggcacctgttccctatttaaccgtgtttgtatgacagccattttatgagactgaaaacc

SEQ ID NO: 48583 - DNA, 247 bp, Setaria italica
  Peptide Sequence Number=SeqID_114557
gaagccctgcaataggagtatgtacatagggactaggggtaagcattgtgagctgctaatttctctgaagatacatgccgttttcactgttctgattttttgttctgtgtttcaggaataaagactatgggagattgggaagcacctgcttggcaccttgggatagcatatgcttgtgtctagctcagatgcaaaagttgcattctgaaactctttggttatggcacctgttccctatttaaccgtg

SEQ ID NO: 48584 - DNA, 122 bp, Setaria italica
  Peptide Sequence Number=SeqID_114558
ccaaggttaactttcctgatgcaccgacagttgctcagaagcgccgatctggcccacctgctgctaaagcacccaagtcagcaggtgggtagaagtatgtatttgtgttggcaaggctgttc

SEQ ID NO: 48585 - DNA, 465 bp, Setaria italica
  Peptide Sequence Number=SeqID_114559
ttggtacttttctaggtagtttcttgttgtctagtctagtctagtttagttgttgtctacctagtcttcgtaagcattggatagatgggagcaacatgcgcgatccgcatatgaacattttgagaaggatggcaaccgtgctattgtaattgatgaactcgcttctgaattgggcctcagcccttcggtgccgctgcatgttgttctgcaagattggatcaggcatacggatgggaaattgagctttctcggatttgtcaagttattgcatggcatgtccagcaggtccctgtcaaagatgagatagctgttgataatctctaacgacagcacaagttcacaccaccctagcccttgccgacttggttcacaggcaaattaacagggctacagaaccgtcgactggagcttgcatagttgcatatcgaggcgtctgagttctagcagcacctggtctgtcactaa

SEQ ID NO: 48586 - DNA, 414 bp, Setaria italica
  Peptide Sequence Number=SeqID_114560
gcacagtcacttgttcaagttcaatgcgagcgtagacatcattcttcgccagagccatgatatcactgtagaaacaggcaacactgaaagttaagatactcccaagtgaacaaccaaaatagtcaaataaactaacggaatcatctactcaagtctctcttaagttagtgtttctgaagatcgaagatagcttttattttgatttgatgaactcaattttgtggaaaaaattatataaagagccttccaaaagaaaccatgtaatatataagtataaaggtagcatactaggggatcagtaacaaagataacgtgtctttggtaggtttcaggaaaatggcaaagagcattaatgttcagaacatccaaagttattattttttaaagtagtattttatttgttccttaaaattt

SEQ ID NO: 48587 - DNA, 425 bp, Setaria italica
  Peptide Sequence Number=SeqID_114561
ctcttcattaccaagagcccttatgtttctctgcaactttctcaacatcaatacaaaatccgatgcagtgagcatgcctgttacgggttccctggatggtcatcccagagaggaaccaaagcaaggccctcgtcatgcattattttgaatgcttgtttaacaggaagctgagcgtccaaaattgctaacttgctagaaagaggaacaacatcatatatggtattatgtaataatattccagagatcccatggcggaaaactgctatttgcatgcctgggttttgtgatgaaggctccggaggcatcctcatccatattaattcctctggtagaaggcggctctggctgcacaacaggttgtgcattgttttccacaagcacttcattgctgattagtccatattcatcacgtacaaagggttttg

SEQ ID NO: 48588 - DNA, 427 bp, Setaria italica
  Peptide Sequence Number=SeqID_114562
aagactgactatgacatttgcaacaaccttttattttgtccaaatcaggtacaagaagctttcatgtatgaaatgactacacagatcctatccaaggagaaatgtaaatatgtccctcaatgagatgattccttccacaaatctggtactttgttcaataacaaccacccgccgcacccctggaatagacaattcctccaagacttcaagcaaggtacttgtctgcaaacatgtatggcactgtcttcggccctgaacttggtattgcacatccaatgcattttgcacagtcacttgttcaagttcaatgcgagcgtagacatcattcttcgccagagccatgatatcacttgttgatatgcatcttgctatccagggaatagacagatggtataaatgtacaaaggcctgagtgagtaaacatcac

SEQ ID NO: 48589 - DNA, 262 bp, Setaria italica
  Peptide Sequence Number=SeqID_114563
cgaagggttgcaagatttaagcaaaggcatccctgatgaatctggcaaggacttaaagataggaactgaagatatttcatttctgattatagtcagtgccacatccactaaattatctgaatccttaacctgaagaaagacatgtagcaccataagattaaaaacaagtatttactagaaatgttttgctacaattaatacaggctattcaagaaagactattaggagcttattacatgtctagtccctccccgcccacaca

SEQ ID NO: 48590 - DNA, 350 bp, Setaria italica
  Peptide Sequence Number=SeqID_114564
gtttataaagcaaataaagtgaaaaaaaaatctagcaaatatatagagcagtacatgaattaatggccttctctgtatggcagcaccatcaggcccgccataaaattgcagttttgcttctttccaagcagaaatgggatgcatttcaagctcttcattaccaagagcccttatgtttctctgcaactgcagagcagacaataattaaaaaaacataaaatgcttttgagtaacacagttcttcattcccacctttctcaacatcaatacaaaatccgatgcagtgagcatgcctgttacggttccctgatggtctattccctagtagtaggtaacctaaagtctaaggt

SEQ ID NO: 48591 - DNA, 327 bp, Setaria italica
  Peptide Sequence Number=SeqID_114565
aactaacctaacctaacaatacaatacaatacctacaaccctacaagcccgccgccgctcctcgccgcagcgcggccgggcccactccgacgagagcggcagcagcgatggcgtcctcgtcgagcttcccgcccaggaagcgcggagccccggggcggacccggacggcggcgtcctcgtgaacatgccagccgacgacgccacgagcggggagaccttcgaggacgcacccgacgacctcgccgccgcgggctcccgctccgcgcgctcgctggacgagtccatgaccgtcatcgacttccccgaggtgtccagcgccggcgccga

SEQ ID NO: 48592 - DNA, 307 bp, Setaria italica
  Peptide Sequence Number=SeqID_114566
gatacaagtttgtagttgatgctcctaccaaaattgcagccgtatatgctgtcatgagcatactgatgcagagcctatacacttctgtgctggcctaactgttacactcaaggattttaatgccaaaatctccgtctccatcgacatcagggatatccttgaatagagctattactgcagagaagcaacacataaataatgttgcaaataccaccgaccttgttggcgtgaagggcctcttcagaacattgtttgcttgcatgttgttgttaaagtaaagtcttaattttgttaactttaatttatt

SEQ ID NO: 48593 - DNA, 491 bp, Setaria italica
  Peptide Sequence Number=SeqID_114567
gggtagcacaaaagtgattttcaaatggtaagatgcattcttcataaaatgtgaccaaccgtgagagagactaggcacaatacgctttccatctgccagaatatttgctagtatgatcaccacagaagcacaatagcttgaaacctgaagcagagtttgcaaataaaacacaattaccatgctcttgttgcatattatctataggtatagaaatttcaggtatctaactgagtatacaaattcaataattcgtaagcgtccgttttcccatttcatgattttactgatggtaaaggttcataccgaaacaaggcagtaaaccagactgtgtaacctaaacaggattctgatggtcaaataaaaaaaaaggaagcatagtgctcacctcaaatttatcaggtaacttaattatcttataaagtacttgaatcagcttgtcacttgatgacatcacttctaaacagctgtctgttgcagataactcttcaatg

SEQ ID NO: 48594 - DNA, 335 bp, Setaria italica
  Peptide Sequence Number=SeqID_114568
cttcacgtaagcatcctcagctgacatctccacttctttgtcaactctgtggttctcaaggtcatctttcatgagggtgaacttgcctaacagaagagatacaaagtcgttgagagatgaagagttcatatcaattccttgtgcttgtgccagcaaaggtgctaagatacaccagagagcgttccgagcttggttatcatcacaaaccagtggaagaatgtcaaagagtccctcaagaagggtaaatcgtgagagagactaggcacaatacgctttccatctgccagaatatttgctagtatgatcaccacagaagcacaatagcttgaaacctc

SEQ ID NO: 48595 - DNA, 280 bp, Setaria italica
  Peptide Sequence Number=SeqID_114569
tttcgtgacatcagattctgctttgggagttttcaagcccttcaaaacatccgattctgctttgggagatttcaagcccttcttcatcacatcagattctccatttggagttttcaaacccttcttcattacaccagatcccacatttggagttttcaaatccttattcagcacacacgaccacctcttcctcctccccttccattccccagccactctcctccgtcctccccgcagaatgcccaccaccaccgcctaaaccccacccccaaaccacgcc

SEQ ID NO: 48596 - DNA, 238 bp, Setaria italica
  Peptide Sequence Number=SeqID_114570
tagcagttctccctaactcattaccatacacggaatcagcaatcttaggatgtgcagtgtttactgcgtatggtgccctgaggcatgctgctgaaatgcgcgcgggtgattcagtagctgtgattggagttgggaggggtcggatcaaggttagcagattcctgatttaaggatgcttggcatccattgtttcctcctattttaattgtaacaatagaaaaacagaaacgtgagtatg

SEQ ID NO: 48597 - DNA, 395 bp, Setaria italica
  Peptide Sequence Number=SeqID_114571
agatccaaagaagcgtcaaccaagtagccagcaataagctttacaacatcttcgttcatgagcttactagttcctgcatcaagtgtaacaataattctgaacaagccgttcatgttatgcatcgatggtttttgagcaatcgcattagataaattattccacatcaattcaaggaccagcgagccatcacccatttcagatagggaagttaaaattatacgattcaacaacttgaaagtatcccaatttgagaccttactaggatcttctggagtaactaaacccccaggatgaactctgaatcttgccattagcagcgacaagaaactgagttgcttaagtgatgtgctggaacccctcatactgttgaaggttgttgaggtcctacagtcaac

SEQ ID NO: 48598 - DNA, 216 bp, Setaria italica
  Peptide Sequence Number=SeqID_114572
tgtcgttgttacctattgtattttgttgtagtctaggttgttgccatcggttggcaccatacagtgcttaatcgaagtctctttcagggagcctgtcttttggcattcttcgacgcaagctttgtagagcggatcggcgtcgccctcggaggcggcagcggcgacggccgccgaagcgaggccgagaagcagcagcagcagcagccacggcctccg

SEQ ID NO: 48599 - DNA, 232 bp, Setaria italica
  Peptide Sequence Number=SeqID_114573
acggctacttctggatcgccctcatccaggtcaagacgctactagctcctcccgatcatcgtccatacgaaaaacatcgcagctgacagctttcgtgttcgaaatgcatgcagatgaggtcgccatggctggacctgatcacccgctggaccttggcgaagagagtagtcgccacgttcccggcgctcgtcgagtggagcaagtcgacgatgaaggggccatggtggctcag

SEQ ID NO: 48600 - DNA, 253 bp, Setaria italica
  Peptide Sequence Number=SeqID_114574
aatatctacggacaaagcattgcaatcaacaattagctggtactctggatcctcctccaggatggaaccttgattggagaagtcagtgcctttctgaagtgcaacttcaactttctacagataaaaaatgaagatgtctaatgtcacacagtgggataataagattcctaccacatacgtactcagacattgtgggatcatattatatttttttggacaaaccattgcaccattaaccaaagctatttattaa

SEQ ID NO: 48601 - DNA, 240 bp, Setaria italica
  misc_feature (199)..(199): n is a, c, g, or t
  Peptide Sequence Number=SeqID_114575
attgagttgcatgtttaaagggccaactgctgactcgattttatgtttggccatgctttcccatggaacatagaagtcagaaactgcagcagcaagaaagaacattccacggtgccgataattgctaatagctgccttgaccacagcggaatgagattggggaacttggatttctgagtcttcaccaagctcaaaaagntcgagaaatgaatcctctggaagaaatctacagtaaggctg

SEQ ID NO: 48602 - DNA, 253 bp, Setaria italica
  Peptide Sequence Number=SeqID_114576
ctacaacctcagtttccaccaatgctaaatttgaaattagaagccccaagcgtgtgcaggtgaagttctgtcatcctcatccaagtagccatttttcacctatgattgaatgcattttatcggccttcttgaacccacatgtggcacttgtaggacagaaccttgagtgaatttggctagatgttattaacaaattcatatggttctcaatctatccagatcaaatttgatgaaggtgttatcggaaccccac

SEQ ID NO: 48603 - DNA, 223 bp, Setaria italica
  Peptide Sequence Number=SeqID_114577
taactaaccaaacaagacttaacagttgaagagtctgtagcttattcagcttggcttcgtctgccttcgaaggttgacgaaaaaacaaaatctgaatttgttgatgaagtcctcaaaactgttgagttagatgaaataaaagatgctttagtcgggaggccaggaatgaatggattatccttggagcagcggaaaaggctaacagttgcagttgaacttgttc

SEQ ID NO: 48604 - DNA, 434 bp, Setaria italica
  misc_feature (36)..(36): n is a, c, g, or t
  Peptide Sequence Number=SeqID_114578
ccctgtgcttggtagccaatcagaagggctgaaagngttgcaccctgggagaatccaagcagaccttcaaacggtccattcatagtgcacatgaaggtggcagaagtgccaaatcacagaacctgcagttacaattataatattaacagaaagcagtggtggggatatttttagttctcatagacagttcaggagaaagtaatgtggcaaaaagggtgaagatggtatgggggaggcttcatcattgcaatgcaagtaaaagctgcaagttaaaggaagaactgaaatcgcaagtgcctcagctttcctttctaattggaaagcaaataagtctatattaaagttgacagcatatggccttgtgacatagcgaagttcttatgatgcttgcagtaagaacaagacaaaacaagactccacttccttttgttaaa

SEQ ID NO: 48605 - DNA, 285 bp, Setaria italica
  misc_feature (216)..(216): n is a, c, g, or t
  Peptide Sequence Number=SeqID_114579
tagacagagtcagaaatacactatgctcatgacttgaggaatccaacttatacataaattacaaaaatgttgaagaaagaatacaagtttcacaagatgtaatcatagtgcacatgaaggtggcagaagtgccaaatcacagaacctgcagttacaattataatattaacagaaagcagtggtgggatatttttagtctcatagacagttcagganaaagtaatgtggcaaaaagggtgaagatggtatgggggaggcttcatcattgcaatgcaagtaaagctg

SEQ ID NO: 48606 - DNA, 259 bp, Setaria italica
  Peptide Sequence Number=SeqID_114580
acatggactatgttatgacgatgactaaactgtaattaaaatatagatcatgtatcagaatgccatgataactacttatttcagtttggtttcatctgaagcaatccgaagcattaaccttattgaactggaaccactcaaagtacggtggtgggaatatgccctcaatctctgactttccaccagctgggaagatgccatcagggaatacctgaaaaaccataaaaaaattgttcaagaacaaaaagcagagagtacg

SEQ ID NO: 48607 - DNA, 152 bp, Setaria italica
  Peptide Sequence Number=SeqID_114581
tccctgatggcatcttcccagctggtggaagatagaagggtgccacttgctgatctgcttcttcaagaaactcccacttgtccggaagccatgcaggcacagctacctttgtcttttcttgtcctgctccatgagctcaacctcccaagcac

SEQ ID NO: 48608 - DNA, 191 bp, Setaria italica
  Peptide Sequence Number=SeqID_114582
gaagaaaattgaagaagggccagtcaactggtgaagctgctactgattcccaaaatggtgaagctgtagaaacaccattttgggaatcagtagcagcttcacagcaagaaaaagggaaggcaaacacaaaggctggttccgaagtaagtgagacagatacttcacagcaaggaaaaggaaaggcaaggcac

SEQ ID NO: 48609 - DNA, 262 bp, Setaria italica
  Peptide Sequence Number=SeqID_114583
aacaggatgcctcttacaacagatgcaaccagcaaccgtatttatagtagactgcgcaagcataagacagacggcagatattaaccccagcgctaaggctgggcttcttgggtatatgcattcaccaggagtagttgtttgaacatctgaaaccttgacgcgggtggcgtccaccgctaccgcccaccatgagccgcgatcaattcctcctccgcctcctcgacctccacgccggcgacgaccccttcctttcccccttccc

SEQ ID NO: 48610 - DNA, 184 bp, Setaria italica
  Peptide Sequence Number=SeqID_114584
ccaactatttctgagtgaactgcgtgagctgcatcaacccacctgtcattgatcttgctgcgcctgcgctgctccgtggcggagtgcttggagcgtggcgtgttgggcagctggtccgtcccagcgctgccactgcagcttccacccttggtctccaccctgacagagagttctgcaaccaaga

SEQ ID NO: 48611 - DNA, 361 bp, Setaria italica
  Peptide Sequence Number=SeqID_114585
gtttcaaaatccggaatttcttcgccagttgacatctccagagactttgcagcaattactctcatttcagcagactttattaggacagcttggtcaaaatcaatctagccaggatggcaacaattcaggcagtgcgacaggtaagtttctggttacttttgccgatcatgttttctttcacttggattagtatacctctatgtcatgtttagagggaatggttgtgagtctcctattcatgttgttttgcttgtgcagcaactttgttagcttagctttgcatatggtgcttgattgactgtattcctcaatgtttcggtcatgccatgtatttaggcataaattttaccatgagtaacta

SEQ ID NO: 48612 - DNA, 268 bp, Setaria italica
  Peptide Sequence Number=SeqID_114586
tctaatttgtcgtcgtagtattctattggtattcggtaattcctagtattctttgcccatgtgctcaatgacccaagtgttctccgacaaactctcgaagctgctaggaaccctgaaatcatgagagagatgatgcggaacacagacagagctatgagcaacattgaatcttctcctgaagggtttaatatgctccgacggatgtatgaaactgtgcaggagccttttcctgaatgcaaccacaatgggcggagaaggcaacacagcc

SEQ ID NO: 48613 - DNA, 174 bp, Setaria italica
  Peptide Sequence Number=SeqID_114587
aaatcgtggttgttcatgagatttgcattgctggcatgttcattatctcatgaacaacccagatttaatacgtaatatgatcatgaacaacccgcaattgcgcgagatcatggatcggaatccagatcttgcccatgtgctcaatgacccaagtgttctccgacaaactctctc

SEQ ID NO: 48614 - DNA, 172 bp, Setaria italica
  Peptide Sequence Number=SeqID_114588
ccccaacttcttctgagcgacgggcgcgttcgttcttgctgtaatctgctcggcgtgttggtgttactgcgttgtatctgatgccggaaagattggttaatatacacacgcaatagcactacttgtccaaattaaccaatcttccggcatcagatacaacgcagtaacacca

SEQ ID NO: 48615 - DNA, 455 bp, Setaria italica
  Peptide Sequence Number=SeqID_114589
tttggaagtgaagatattccagcttgtggctttggatttggagatgctgttatagtggaactgctgaaagaaaagggtctgttgcctgatatgtcacgtcagatagatgacattgtcttccctttggacgaagtgctcgaaggaccagcatccagtattgcttcttctctgaggaagaaaggccgagctgttgaccttgtagaagacaagcgtctcaaatggtatacatacatttttgtcctcatttgtatattgctgtgcctgaaatatccctttacgctactaccagggtatttaagcatgcggagaggatcaatgctagcaggctgatattggttggaaactccgagtgggagcgaggtatggttcgtgtaaagatactatcaaccagggaagaatacgaggttaaggcagatgaactagactgagcttttgcttattagaaggcctaattt

SEQ ID NO: 48616 - DNA, 239 bp, Setaria italica
  Peptide Sequence Number=SeqID_114590
aactcttctcatttgcggagcaatatggttatgctgattggatttgttttgatgcgtcagtggtccgtggccttgcatactacacgggaattgtatttgaggcatttgatagagaaggaaaactgagagcaatttgtggcggtggaagctgctgaaagaaaagggtctgttgcctgatatgtcacgtcagatagatgacattgtcttccctttggacgaagtgctcgaaggaccagcat

SEQ ID NO: 48617 - DNA, 348 bp, Setaria italica
  Peptide Sequence Number=SeqID_114591
gtagctgatgcggaggcgaaagcacacgatgcacatgatcagatgatggaggtagaaaggatcctcaagatggctgaggagacggagtctctcctcacagttgcagcaattgcctatgatcgatgttcaaggggagagataaccacattaaatccggcgccaaggaagctctgaaatctactggagacctctgttctcttgtacatggataggttggcctggattgttatctgcccatattgctcctgtgttgtataatttaactgtttgtgctgtacctgggaataatacgggttaaactaaaataaacaaccaagtagacaatactacctagaacaaaaaaaaaaa

SEQ ID NO: 48618 - DNA, 233 bp, Setaria italica
  Peptide Sequence Number=SeqID_114592
gatcacctgatcttcagtacgtaagaaatgcaagctcaattctgatgaccatgctctgttatttccttgccatacttgatgtgcatgtatattttgttttcatgctgtatttagatatcacttagtgtattactagaacggtgataaattgcttatgttatcattggtaccatctgcagcaaaggcatgcagtgcaaccaacctttagaagattgcttagttcaaagttgcgg

SEQ ID NO: 48619 - DNA, 215 bp, Setaria italica
  Peptide Sequence Number=SeqID_114593
caaggggagagataaccacattaaatccgggcgccaaggaagctctgaaatctactggagacctctgttctcttgtacatggataggttggcctggattgttatctgcccatattgctcctgtgttgtataatttaactgtttgtgctgtacctgggtattattcgggtttaactttaaatttaacttaccttagtttgttcatctcctagaaca

SEQ ID NO: 48620 - DNA, 198 bp, Setaria italica
  Peptide Sequence Number=SeqID_114594
cttgctgggctcgcgtcgagagggagctgaggaggaagaggagacaaaggaggaatctaagtttcagtgcaagtggactgggttcaagggataaaatgagggttccaaaaatatctggaccctcatcttccccagcgtctagctcacaggctcagcttctcccagtggccaataaagttgctgaagcttcacaagatg

SEQ ID NO: 48621 - DNA, 268 bp, Setaria italica
  Peptide Sequence Number=SeqID_114595
gccccctgtccatggccagcgcccacgccgtcttctccgagagcgtcttggccagggcgtgccacagcttgaatttccggcagaaggcgaggtcgctccagcacttctcgtcgacggcgaggcgctcctcgcggccgccgccggcggtggcggtggcgtcgctgccccagacgacggcggtggcggaaggaaggtagaaagaacgaacccgactaccaataggacgtaccgtactagaacgaaacgaaaacaaaaacgaaaaccaaaa

SEQ ID NO: 48622 - DNA, 183 bp, Setaria italica
  misc_feature (1)..(1): n is a, c, g, or t
  Peptide Sequence Number=SeqID_114596
nttttttagttttttttttagtaaagggtaaccatgccatgatgttttcattagtattttccgttttttgacaacaagtcatcacacacaagttcaaacacactttgattttggacctagttctctcagggagcagaactgtaaacctgtggcttgaacttgtgtgtgacaacaagtcatcac

SEQ ID NO: 48623 - DNA, 267 bp, Setaria italica
  Peptide Sequence Number=SeqID_114597
cgatcgatccatccacggtcggtcggttgagtcgtcgaatgggtctgctgttcgtgcaggtgctcccacggggcaacggggaccccggctccccggcggcgacggtgctccagtgccggcggtgccgcctcgacgccgcctccatgggcgccatcctctccagggaattccaggggcgcatcggccgcggctacctcttcgatcgcgtgtacgtactgcttcttctcccgctccccgatctgttcattcttggcccgtcgagttagt

SEQ ID NO: 48624 - DNA, 446 bp, Setaria italica
  Peptide Sequence Number=SeqID_114598
agactccctcaccgccgcaagtccctaccccgtcgccagcggccggcacagccacacctccttgctcccttcaattttgccgtttgggactgggaggaccacaccattgacctccccggaagcacatgcccctcgtcttcagctccgtcgcctgcaagcgccactccatgtttgttgctgctgtccaagtgagcacagggagaaccacatcttccggtgatgttgcagaatttgggatttttttggatgttgcaattgaagattctaagtgttgcattaagtgagttttgatgttgcaatctctttttgatgttgcagtctcttttggtgttgcagcctttgtgtttggatgttccattagtttttgacgttttttaaatgttgcgccaagtgaatttagatgctgggattacctttttgcaatgtcacagtcagcgaatttggac

SEQ ID NO: 48625 - DNA, 255 bp, Setaria italica
  Peptide Sequence Number=SeqID_114599
ctccctcaccgccgcaagtcctaccccgtcgccagcggccggcacagccacacctccttgctcccttcaattttgccgtttgggactgggaggaccacaccattgacctccccggaagcacatgcccctcgtcttcagctccgtcgcctgcaagcgccactccatgtttgttgctgctgtccaaattctgcaacatcaccggaagatgttgcagaatttgggattttttggatgttgcaattgaagattcttaag

SEQ ID NO: 48626 - DNA, 219 bp, Setaria italica
  Peptide Sequence Number=SeqID_114600
ttttctttagttgtcttaacaaaaagaaaaggaggcaggtgcagaagcaaattgtgatcctgcaaaaaaaactattcaagcttccatgcatgcaggatcagcgagaaaccaagaccttccatgcatgcaggatcagcgagaaaccaagaccttgcaactgggactccctaaaaatctgcgagtacgaccatggcagtgacttctcaggtgcctggcatg

SEQ ID NO: 48627 - DNA, 167 bp, Setaria italica
  Peptide Sequence Number=SeqID_114601
aggtttcaagttgccagagaaatctgatacctgttaaacttacctaagccatctttttgttgctcttgcttgtagcaatgagtggatacggtaaaaagaaacaatcttactccttggctgttaacgttagccccaagcccggggcatagttcgtctgaacctgcatg

SEQ ID NO: 48628 - DNA, 480 bp, Setaria italica
  Peptide Sequence Number=SeqID_114602
aagtaaactatcaagcaacttgattatactgctgtttgtttggcacttataataatacgtgctcattgttctagaacaacagcaactaactagttcatgggtgttgttcttgttcaacaccaggggatggctgcaatgtctatttcagcatcgttcctgaagggtggttcatctcagcccgctgtgttcttccttggcctctacatgatgggcataggagccggtggtatcaagccgtgtgtctcatctttcggcgctgaccagttcgatgacagcagcctagccgagaggttgaagaaggattctttctttaactggttcttctttgcaacttacattgggagcttcgtcgcgggtaccgcagttgtgtgggtgcaagatcactacggttggggagttggcctctggctcccaactctgttcatcgcgttggccattgcaagcttctttgcttgggtcttcctagttaagttactaggt

SEQ ID NO: 48629 - DNA, 320 bp, Setaria italica
  Peptide Sequence Number=SeqID_114603
gaagctgataggctctggggccaaaagcagcaacaagctatgttcattgggacgagacgatgcatgcgcgcacaacgaatgcacacgcacgcaggttacataggcggcggcgcgagcgataggcagccaaacaaacacttcagccgatgatctggtcgagcgcgccggtgttcttgagcccgagcacgatgccgacgccgattgattgttggtccgtacggtcgtccgtctaggtcctagtcgttgttcggtcgtagcgtgaacccggcggggtcgccggtctgcagcccggagtcgcgggactccagcttcagacccgc

SEQ ID NO: 48630 - DNA, 358 bp, Setaria italica
  Peptide Sequence Number=SeqID_114604
atgcatacatcatacgtgcaccatgcacgaacggacactaacagttccatagttgccttacactgtagcctaagagcggccaatcagcaaaccatagaaaaaatgtctcgctggcatgtgagcccgatctcttttgaaattttatttagaggtcaatataaatttccatccgatgccatacgcgcgcgtccgatgttttgctcaaacctggaggctggtcttgtagacggatccggccttgaagctagcgggaatggcgtcatcgacgacgcggtagccaccggacttggcagcgaagcggatggagaaggggcccttgagcggcgccttgctgtcgagcgtccaggtgccagtcggg

SEQ ID NO: 48631 - DNA, 324 bp, Setaria italica
  Peptide Sequence Number=SeqID_114605
cactttgattaatcaaatcataggatttgaaagaaacatttaggcaatttgccttacactgtagtctaagagtggccaatcagcaaaccatagaaaaaaaatgtctctctggcatgtgagcccgatctcttttaaaattttatttagaggtccatataaatttccaatccgacgccatacgcgcgcatccgatctatcgctcagacctggaggctggtcttgtagacggatccggccttgaagctagcgggaatggcgtcgtcgacgacacggtagccaccggacttggcggcaaagcggatggagaaggggcccttgagcggc

SEQ ID NO: 48632 - DNA, 309 bp, Setaria italica
  Peptide Sequence Number=SeqID_114606
gcgcacggaaatgaaccaactctacaccaagatcacagagctggagatggaggtcagtgagcactctcttgtgatcggcgcaatcgagccgctggacccctcaaggcgctgctacaggatgattggtgtcgtcctggtggagaggaccatcaaggaggtcctgcccgcagtgaagcgcaacaaggagggactcgaggaggtgatcgctcgcatgcacgaggcgctggagaggaagaagaaaggaagaatacaaccgaagtttagaagactacaaagtaataaagaataccgtaataccggaaaggacca

SEQ ID NO: 48633 - DNA, 504 bp, Setaria italica
  Peptide Sequence Number=SeqID_114607
agggattagtatcctggtcagctcccttctggttctttgtaccacaacaagatggaactgcagatcagatagtagaatttgctgtgtcaaaggagaatgcacaccaactttggagttccatcatgaacaaacaagaaacatcaaccaagtcagtcactccagttattccgcagcgtgatgggattcaagatgactataatgatcaatttttcttcccaggagttccaactgaagattataatacccctggagaatctgcggagtatcgtgctcccacacctgctgttgcaacaccaaaaccaagaaatgatgaaggggatgatgatgatgaacctcctcttaatgaagacgacgacgacgacgacgagttagatgacctcgagcaaggggaggatgaaccaaacacacaacatcttgtacttgcacaatttgacaaagttgtacgtagtaactaaagtaattcgtttggtaatttgtctactttgtaaggtattggtaattcta

SEQ ID NO: 48634 - DNA, 282 bp, Setaria italica
  Peptide Sequence Number=SeqID_114608
ctaatctgatctgcacttccatcttgttgtggtacaaaagaaccagaagggagctgaccagatagtagaatttgctgtgtcaaaggagaatgcacaccaactttggagttccatcatgaacaaacaagaaacatcaaccaagtcagtcactccagttattccgcagcgtgatgggattcaagatgactataatgatcaatttttcttcccaggagttccaactgaagattataatacccctggagaatctgcggagtatcgtgctcccacacctgctgttgc

SEQ ID NO: 48635 - DNA, 245 bp, Setaria italica
  Peptide Sequence Number=SeqID_114609
tctccgtcatcgatgacgtcatctccaaggttcgcgaggatttcatcacctacggagtcggcgacgccgtcctcaacgagcttcaggctgtaagtaccgctgatttctcgacctccaagctcttatccactcgaatttgtgattgatttccgcgattctgacggttgccccctccgatccggccggggaaaccctagctctgggagatgaagatgctgcactgcggcgcaatctcggggaacatc

SEQ ID NO: 48636 - DNA, 311 bp, Setaria italica
  Peptide Sequence Number=SeqID_114610
agctcctctgcccaaggctgtgaatcttgtccgaagccccaaaatgcctcttcgctctgttcccctgctatggtgctaggagctgggtcttcacacggcaacgacattccctgcccaagaaaatccatcgtccacaccttgtgatcgcgaccaagatccttcagttgcttctcgaaatggaatgtcccaactccaaaccccggcaggaagagcaccgcaggcgctttgctattctcagtgccagaacctactacaataagtaacaactagtacaagacttagttacaataccaagaaatacggtaactaaa

SEQ ID NO: 48637 - DNA, 194 bp, Setaria italica
  Peptide Sequence Number=SeqID_114611
taaggaactaaataaacaattagaaaaatagttaatccaattgctaataaataacacttacactgcttcagtaagtttcctcacaaatgatggaagaggaaatgtcccaacccatgggaaaatctttgacaaccgcggagatgtagcagggttaggaaaaaatccccaaaatggtgttgcattgagcaacgtga

SEQ ID NO: 48638 - DNA, 349 bp, Setaria italica
  Peptide Sequence Number=SeqID_114612
ggctgcaatggagaaaattagagagatcattgatcgaaattatatcaagagtctgaatggaactttatcatctgaagatattttcagtttatttgcacgtacagttagagcatattaaaacttggaaacagcaaaaaaaaaacctgctcgcagagggccatgtttgcgtcgaagaatgatctcagtgttccaatgtcctcccagtagtcagtgaagacatatgcctgcacgttgtgctcatgtaaagctttgggtagaatttcagaaccaaagtcatgcagttgagaatacctcgactttagaaggtttagaagaacattcttctttttgtaaaaacgttaaacttcct

SEQ ID NO: 48639 - DNA, 344 bp, Setaria italica
  Peptide Sequence Number=SeqID_114613
gcttatctttgtgttctccccccacgccaatggggaccttgccctctgacagtagcctcgaaatctcgtcttcagtctcgtacaaatcccgcacccatcatcatggtattcttgagctcacatccagagtttaggcgtgaacgaacaccgacaatagaatgctcaatggtacattcacgcaagaagcagccatgagaaatgatggcgtctttaatctgcacatgaatccaaagctcagataggcgcagcattaatctgcacattacagtttacagcttgcaggcatcattgttgcataggacgcgtaccctgctcttatccgacttcgttggttggtctaagtt

SEQ ID NO: 48640 - DNA, 181 bp, Setaria italica
  Peptide Sequence Number=SeqID_114614
catgtgcaatccccaatcctcatcctctcactcccagaaccttcactacctctcctcactgggctcacacatgcttttccctccaggggaaacacactgctgaactgcatagctgaagcacactttcttgcctagttcctgataatctcccacatgaagaagaaaaggaaccacactttct

SEQ ID NO: 48641 - DNA, 254 bp, Setaria italica
  Peptide Sequence Number=SeqID_114615
agttcaatgcttccagttgatgagggaagagcattcctccttgaagttcttttggctgatcaaccaatacagaacaacattggtgaaatgtacaacttattgaacttcttacaacctacttcttttccttctctttcatcatttgaggagaagtttaatgatcttacaacagcagaaaaggtggacgagctgaagaaactcgtagctcctcatatgcttcggaggttgaaaaaagatgcaatgcaaaatatccc

SEQ ID NO: 48642 - DNA, 452 bp, Setaria italica
  Peptide Sequence Number=SeqID_114616
gctgtttcaaacactggatgcccagtgttaccctccatgtagtatgtactctcattgaaatcaccaactcttgggatgtgattctacagtagtgtttatttagacacagcaaaagctttctgccagaagggaggaatagaaaatgcagctgaaggaaaagaaaaataaagtgacgtgcataccttccgatgaatgccaattatgtttccattatttccaattacaacagcagtattccaaatagtctccccatggtttacatccctttcaaggattgggctcacaattaccatgttatacttttgtgcaagttcttgaaggaactgagtagattctccatcaactggttcagcaaactcacaccatcttttctcacgagtgcagaaggcaaaaggcattgtccaggcttcctgtaagcacaaaatattgacaccagaagcaccagcagcatc

SEQ ID NO: 48643 - DNA, 311 bp, Setaria italica
  Peptide Sequence Number=SeqID_114617
ggggtgcaaagaagcgtcaggtgctgagaaatggctagatccatagaaatggccgaagtctgcatgctgaggtttcccatcaccagatgtgaatggatttgggaacacttctgtgccaacccgattaattgatccaacaaagtagctgtttgcaattgcagcgttccttgcctcaattggccacattggttcgctgagttcaccccatcactatcacgctaccgagatggcttgatcatctctgatatggacctcaacctatgccgccagatcaagtactctgatagcaaggaagcatacatctcataacg

SEQ ID NO: 48644 - DNA, 378 bp, Setaria italica
  Peptide Sequence Number=SeqID_114618
ttttaacttaattacctagaaacatatcacttagcttactatgaaatttttgtgtagaataataatatcagtttgttgtagtgaatttcgtccaggtgaactttttatccttggatcaagctgtagtgagaagtgagaatattgatcaaagaaattttatatgttgtatgatgtgtggtattttgtgaaattcaaagaaattggtagaatattgagtaccattggtgactgcctggtcacactcaacactgctgatgagaaccatgtgaaattagtcagtcaacaacatcttgaccctttgtttgtatttgataaatgcacttttatgtaatatacatgtacctatactgtatgaagctcaccaataactaggtgaat

SEQ ID NO: 48645 - DNA, 177 bp, Setaria italica
  Peptide Sequence Number=SeqID_114619
ttctcatcagcagtgttgagtgtgaccaggcagtcaccaatggtactcaatattctaccaatttctttgtatttgataaatgcacttttatgtaatatacatgtacctatactgtatgaagctcaccaataactaggtgagcttcatacacttttatgtaatatacatgtacctata

SEQ ID NO: 48646 - DNA, 414 bp, Setaria italica
  Peptide Sequence Number=SeqID_114620
atgtaaatatttttactaattatttgtagtcattatgaatacatatgatcagacatatatcaccatctatcatgtgaactaatctcagagaaacaatactaaacatccaaattttggagaattactatgtatccttctctgtttaaattcacgctaaaattgctgcaaatacctgtacaggaagagaaattccaagtgttgtttggatatcaagtactatattgggattgccatcccattgcaactcaagctccatggtgatggcagaatcatcactctccaagatttcaactccagtaaactgaggggcaacagtaccaagcgtcaactttgagaaatggagagaggccaaaatgaatgacttgtactgctcaaaaacaggctccacagaagttttaatcagctctgatgcag

SEQ ID NO: 48647 - DNA, 486 bp, Setaria italica
  Peptide Sequence Number=SeqID_114621
cagtctcagaattgttcccattgtacctggagactatagtgacttggagctgaaacctgttggggtattagaagtaaaacttgtggaagctagggaacaattacacgatttggccatgtcagtgtatcctcaatagtatcacgtattgtcccctcaattgcatcagaaattcctggaatagcagtcatttcgccgccaataaccttgagggtaaattccaccttgctcttctcccttaatgaacagcaaacagctccaaaaacaagggaattcagacaccagaggtttgaatacgaggcgaagtactcctgtacaggaagagaaattccaagtgttgtttggatatcaagtactatattgggattgccatcccattgcaactcaagctccatggtgatggcagaatcatcactctccaagatttcaactccagtaaactgaggggcaacagtaccaagcgtcaactttgagaaatggagagaggcc

SEQ ID NO: 48648 - DNA, 389 bp, Setaria italica
  Peptide Sequence Number=SeqID_114622
catgagcaaaatcatgcagcgcatcttctaccacaaaatcaaatgtctggttccatattggatttagcgtgtccttgtcttctttttcgattctcccttctttaagtacgggacgacaaatgggtcagccttgccaccaatgtccattggtggcaagtcctctgccgatacaaccgttacagaaagaactcctctcataataacattttttctctggttaatatcatatccattagattcagtctttagaactttctccaaagaagtcagttgaatctgattagcaaaaggattggaaaccccttcatgcttagagtaagggtagtagagaagctccaaggtagaaacctagaaccaacgaaggttttttagtacccgttacaaattta

SEQ ID NO: 48649 - DNA, 244 bp, Setaria italica
  Peptide Sequence Number=SeqID_114623
cgcaaattcatgagcatcgtggtttcatccgtcatcagcggcaacccactatctctgaagcaatggggtagtgttgtgatggtcttctctggcctctctatccaaatatttctcaaatggaagaaaaagaagggcagagagcacaaggaggaggagatgcaacaaattgtgttgcattgagagcaaagttgtacgatgaccattgtatttttgttctactctctcaaaagaaatctgtagaatt

SEQ ID NO: 48650 - DNA, 205 bp, Setaria italica
  Peptide Sequence Number=SeqID_114624
tttgcacctttcttgttgctggtggtgtatcatccttcgcattgttgaaggtaagatgatctttaatatattcattaacaaccatatcgattaactggactgctaaaatctgttttccgctactgtatcagacaagctccaagacaattaagaagcttgccaaccctaatgcaccccttggctatgcattgtgcttcctcaactt

SEQ ID NO: 48651 - DNA, 249 bp, Setaria italica
  misc_feature (237)..(237): n is a, c, g, or t
  misc_feature (246)..(246): n is a, c, g, or t
  Peptide Sequence Number=SeqID_114625
gttttgtttcacgtgtgcatctttgatcctcttctatgtcaatacacgccagtcgctgctttactggcagccgcttcaaaaaaagaaaactgacacgctgagaaaaatcactgaaaatgagtacaactggcatactgatgcgctgagaaaaaccactgaaaatgagtaccgtgtatacactggtaatcagatggccgacgggagcacccactgaaatttgcagaacgtgcgccccgnagatgggtnacg

SEQ ID NO: 48652 - DNA, 253 bp, Setaria italica
  Peptide Sequence Number=SeqID_114626
ctggcagcagggtattctctccatcttctcgctttgttcaatctgcaaatgatttcacatatgttttgttatccgattcctctgttgcagattcggacacattttgcaagaccaaattggagaaaagtattctctgatttggccaatgcccacaggaactctcgcatcggtgagctactttaacggattatcttgtcacaatattaatttctaactttcttaagttgtcgttaccgttctttaatttgtttaa

SEQ ID NO: 48653 - DNA, 279 bp, Setaria italica
  Peptide Sequence Number=SeqID_114627
gtacaacaaaacttgtaaagctaagtctgctataccaatcctattgtaatccttcctatacaagtatgtttgcattttgcaatctgtttgaaattcttctggtacatatggtcttagaagttttccttgtggaaatggaacctagtcgttgttgtctggctgaattcttttgaaagttctctgatttggccaatgcccacaggaactctcgcatcggcgttttctactgcggatctccaacgctcacaaaacaactcaaggaactttcaaagaattcag

SEQ ID NO: 48654 - DNA, 446 bp, Setaria italica
  Peptide Sequence Number=SeqID_114628
aacagatcatggctgatttagccactcctaattcccatgccagttcgaacaccactttgcataatctgcttagcctccgccatttttaacagtgatgtacacatcaatgtcagtaagtgattccttcatcctttcacatcaatctcacttagtaacaaagttctaatccgtccctgtactgacttaccaaatcaaccagaacttcatcagcgtgcccagataactcataggatataattggacattcaactggagtggaaatccatcgacgtgtaattcgccaataccatcaaggtaacaaattaccttggaatgaagtaaggaatactagaaaataccctagtaatacctagttagactacaaacaaacaagaagaaagaagacctagttactagaccaattagacttaaatagtaacttaatacaataggtaaagtaaggacca

SEQ ID NO: 48655 - DNA, 256 bp, Setaria italica
  Peptide Sequence Number=SeqID_114629
aatctcacttagtaacaaagttctaatccgtccctgtactgtacttaccaaatcaacctgctcatggttgaaagtatttatcaatgacatgtaaacattaaatttagcacaaatagagtgcaaaattcgttctaaattattaccagaacttcatcagcgtgcccagataactcataggatataattggacattcaactggagtggaaatccatcgacgtgtaattcgccaataccattcaaggtaacattcctgga

SEQ ID NO: 48656 - DNA, 389 bp, Setaria italica
  Peptide Sequence Number=SeqID_114630
ctgggaagtaatcagccgtccactgcaaggcaacaacaaacaacaataagcacatttccatgactttggaaaaacaatcaagcaagaatataaggcacagagcatttcagttaccccttgggatcaacatcaatgatgcccatcttctgcaattgctgcaggatgttgcgtgaaatggcaccactgctcttgcagaagtgtggtggacgggagccattcctctggcggccaccgtagatcttctggaagccacccaccaccaatgccttgcctcaggtagatcttccttgcaatggaggcagccctggtgtagtaccagtcagggtcataaggagggagctccttgaacctcgcagtcttcacaatgtcaacccactcaggaagctcca

SEQ ID NO: 48657 - DNA, 218 bp, Setaria italica
  Peptide Sequence Number=SeqID_114631
acgccttccctcgggaggtgatgagccgcccaccccttcggggatcaacatcaatgatgcccatcttctgcaactgctgcaggatgttacgtgaaatggcaccactactcttgcagaagtgcggtgggcgggagccgttcaaggagctccctccttatgaccctgactggtactacactagggctgccctcgattgcaaggaagatctacctgaggca

SEQ ID NO: 48658 - DNA, 281 bp, Setaria italica
  misc_feature (13)..(13): n is a, c, g, or t
  Peptide Sequence Number=SeqID_114632
ttccacgaaaccncgaattaccacaacccacacgagcttcccatccgctatttttcgtccagtaaagcatggaggcgcacagagctaatcccaaaaatctgcgaagcagaaggaaataggagagggatggtggttaccagatgtcctcggggaatccgtacttgataaggtcctcgttctcgtacttgtcgaggcccatgaagatggtgtagtcgccggcctcgggccgcgccttgaagtagaacaccatccccgactactcacgccggccgcccgaacgg

SEQ ID NO: 48659 - DNA, 145 bp, Setaria italica
  Peptide Sequence Number=SeqID_114633
cgttgctttagctgcaattctgcaaagagcttttccattgcttgtttacagtgcaggcagagattgctagctgcgtctcagaagacgcgaaagcctctgctgctagctgtataatctttgcagtagcagaccagcagtaaacaag

SEQ ID NO: 48660 - DNA, 290 bp, Setaria italica
  Peptide Sequence Number=SeqID_114634
caacctcctgcacatcgccaaccgattgagagggaccgtagccagctaggtaatgctgcagcaactggatgttggcggtgaagtccccagccaagagtcgcttccggactaggatgagcatagcacagcatatcctcatcagtgtgtccggtgggccttcgggggtcgcccaggatagcatcccatatatgtatacatacgttgaaactgaactccatcgtcaagagcaatgtatgtatacatatatgggatgctatcctcatcagtgtgtccggtgggccttcggggtc

SEQ ID NO: 48661 - DNA, 299 bp, Setaria italica
  Peptide Sequence Number=SeqID_114635
ttaaaggaaacgaaaataaagtaaagaacaaaggaaggtagaatcgaatgttaagtagctgggtaatgctgcagcaactggatgttggcggtgaagtccccagccaagagtcgcttccggactaggatgagcatagcacagcatatcctcatcagtgtgtccggtgggccttcggggtcgcccaggatagcatcccatatatgtatacatacgttgaaactgaactccatcgtcaagagcaatgtgatccatctaaatgcataatattgtgggtaaaccttcgtagtaacctccatgtg

SEQ ID NO: 48662 - DNA, 375 bp, Setaria italica
  Peptide Sequence Number=SeqID_114636
tagataatatttttcttgtgcacatactccaccataaatacatttcatattgatttgcagggttgcaaggttatatgtgattgcaactcgagatacttacgctagcgctaggtctgatcagtgtggtttgtgttatgcagatgagtctactgagcacaccattcatggacaacaatgaccttttcgaaactggcagcacaggaggcatgtcaagggaattgattgacaggatcccaaagatgaggtttgttgctgcaagcaactgcaatcaggaaactgatagcagctgctgttcagtctgccttcaggatttttggagcgcaacaatttgtgagggccctgcctcagtgccaacacgtattccatgtacgttgc

SEQ ID NO: 48663 - DNA, 448 bp, Setaria italica
  Peptide Sequence Number=SeqID_114637
attttcagtttccttttgactagaaacttcttagaattttcattttttcctgagtcgcaattcaatattagtagtctgaactttttttctatcagtaacaactaacaaagacatcagtgtatgcaattgagatgccctgtttttatccttcacggcacacccaaattatttgcagcaaacaaatgcttctgttttttgctatttaatagtaaatttttttcttgcacttaatggtacgctacttccgtagatcatattcttgttttgccctcggtaactatctcagatctcattctccagggagatgaattcagcttaacaagccagcaggaaaagtgggttgtggacatcatgctctcggtgacattggtgaaacttgccctggttatatattgccgctcgttcacaaatgaaatcgtcaaggcatatgcacaggatcactttttcg

SEQ ID NO: 48664 - DNA, 156 bp, Setaria italica
  Peptide Sequence Number=SeqID_114638
cctttcggccagctggacccttcccccatcagagataatggccatgagctccttgtcaatctgggagtacgacaaaacatctacttaggtagggtgggcacgcctttcgttttctcgtactcccagattgataatggccatgagctccttgtcaat

SEQ ID NO: 48665 - DNA, 236 bp, Setaria italica
  Peptide Sequence Number=SeqID_114639
tttaatttattttcttacctttgttgtagtagttattattgtcttgttattctctgttctgtgagtgtgtgtgacagtgtgagtggatggggatgaaaagggtttgatcagatggttatggatgcaccacgggactatggtttgcttcgaactctagtttagttggtcaccccgtgaatgtggcagtgtccatgtacgcctgtttccataacccagttaatcaatgttggtgggat

SEQ ID NO: 48666 - DNA, 461 bp, Setaria italica
  Peptide Sequence Number=SeqID_114640
gggatccgacgtgcagtcgctcgtcctcgagatcatcaccaccttctacctcatgttcgtcatctccggcgtcgccaccgacaacagagccatcggggagctggcagggctggccgtgggcgcaaccatcctgctcaacgtgctcattgccgggcccgtgtccggcgcgtcgatgaacccggcccggagcgtggcccggcgctggtgagcgggcagtaccggtccatctgggtgtacgtggtgggcccggtggtgggggccgtggcgggggcgtgggcctacaacctgatccgcttcaccaacaagcccctccgcgagatcaccaagagcacctccttcctcaagagcatgaacaaggaatgaaactaccgacctacctacctagaatacaacttacctaacctaacctaagtacaagacaagactaaaattaaaccgacgaagaccgtagacgaatagga

SEQ ID NO: 48667 - DNA, 430 bp, Setaria italica
  Peptide Sequence Number=SeqID_114641
tacttactaatttcttggtccgttacgtattctttgtagtagtctaactaagttgttttgggttgtattgtattgtaattaagtaacacttagaaggctttcgaaaatgccagatgaagtcagggctgagataggtccatatttcaatggtcgcacagccatatcagaggatcaaagtgagaagttggcgaagccaggaagcgcatctgatggtgacgctgcgaagcagttcatgaggaaggggctcactcctaggtggggagaccttgatgtcaaccagcatgtgaataatgtcaagtatattggttggattcttgagagtgcacctatttcgatcctggaaaagcacgagcttgcgagcatgacactggactacaggaaggagtgtggccgcgacagcatcctgcagtcactcaccaccgtggcaggt

SEQ ID NO: 48668 - DNA, 257 bp, Setaria italica
  Peptide Sequence Number=SeqID_114642
ggtaggggaggaggagagcgaggtgcgctgagagcgcgtggagtgaggagggacgagaggcgggcgagcaaaagattgtgctgcaggggacagtgttagtagtggttttaggccaggttgggtgtgtagaaggcattcccttttgtaacagcctaatttgtacattcttaccatcttatcctatcctattggttggttgaatcgcagccctcctgcgcttccatccaatgatgaataaccaaaaaaaaaaaaaaaaa

SEQ ID NO: 48669 - DNA, 295 bp, Setaria italica
  Peptide Sequence Number=SeqID_114643
taattttctaattaactacttcgggtctaaagttcttataccagaattgctttcttcatatcatccaggggatgctcaaactccagagattgagcatcccctggatgatatgaagaaagcaattctggctggttgacactcaatagcgaagtgagatccatgctatgcaacctacaaggccgatgcagagaagtgtgatttctctgcccattccgaagcacgagttgaggataatctgctgcatgccagacatgggcataactgttggcacatagcgttaggtataagtgttaat

SEQ ID NO: 48670 - DNA, 450 bp, Setaria italica
  Peptide Sequence Number=SeqID_114644
attttgagacttggaatgcaagaattctaggttccgtgatactggatggcctgaatggggcagaagagaattcacatggcagaaatggacctatcaggttacttaggatgtattaagctgaatttattttgtattgatgagaatctttttttctttgtagtgatattcgagattgacaagacactctaaaaattgctgttggagatggtcatcatgggccaagataatgctttgtcgaccagatatgggaggcatgggtgaagccatggagtgaaaattgggagataacaacttcgacaaaaaaaatgttatcatgtctgcttatccaaatatttttttataatttctccctttttttcagaatctacaatttttagtatgcacgtatcttcttttgcagctgcagtattccttcttagactaccatggatcatcatgcaaaatggttat

SEQ ID NO: 48671 - DNA, 233 bp, Setaria italica
  Peptide Sequence Number=SeqID_114645
taacgtaaccaaaaacaaataaggaacctaacggaacttacgacctaacaatacgtcgactgcatgcggttcgaggcggcgctggggaaggtggccaagtgaggtgatccgggtgctctccgcgcctttatctgtgactctgtgtcagttgaactgcatgcgcttctggcttctgcatcgcgttcgtgtgcgtgcccaatgcatcctagtgattgggtcccttgtgtgtatgc

SEQ ID NO: 48672 - DNA, 375 bp, Setaria italica
  Peptide Sequence Number=SeqID_114646
ttggcaaaactgaaagttgggccacctgaggacgactctgatatcaccccagttgtaacagaatcctcagccaacttcattgagggtctggtgatggatgcaaaggagaaaggagcaactttctgtcaggagtacaggagagagggcaacctcatctggccgttgctgctggatcatgtccgtcctgacatgaggatcgcatgggaagagcctttcggccccgtgttgcctgtaatcaggatcaactcagttgatctgaacggttccagtctccattgcatcactgatgaggattgccttgttgatgtctcttgtgaaaacacatccctgcagaccaaagttgctggcgttgcaatggtggatgccctcctcaac

SEQ ID NO: 48673 - DNA, 251 bp, Setaria italica
  Peptide Sequence Number=SeqID_114647
gtgctacaaaggcgaaggcgaaggcgatgggatcatgacgaggatgtctgcggctgtcgcgaccgctctatccataggatatgggggacggggttccggaatgggaggtgaccaaggtgatggacgcggccaaggtcgcgcagaaggcgtgggcccggacgccgctgtggaagcgtgccgagctcctgcacaaggccgccgcgatcctcaaggagcacaaggcaccgatcgccgagtgccttgtcaaggag

SEQ ID NO: 48674 - DNA, 121 bp, Setaria italica
  Peptide Sequence Number=SeqID_114648
tgctgctggatacaatagtaccgtacctagaacaatagaaggaatacgcaatgggaagagcctttcggccccgtgttgcctgtaatcaggatcaactcagttgaggagggcatccaccatg

SEQ ID NO: 48675 - DNA, 181 bp, Setaria italica
  Peptide Sequence Number=SeqID_114649
tatttaattgggttacgtcctacttagttattaactaactacgtattggttgtaagtttctactagtcgtttgtttgtcagggtcagacaattggacggtctgatcattcaaccggctcaagcaaggttttcctgtggcgtcagtgtccatcaatatcgtgtcaccaggcttgaactgtcc

SEQ ID NO: 48676 - DNA, 333 bp, Setaria italica
  Peptide Sequence Number=SeqID_114650
taacgaaagaatacaaggaaagaattggactagactagttaggaaatacgaccctacaataggaatggtcctgacggaacaacctggaggccatctgtgcctctttctgaggaggaaggggtggttgtgaagacttgatctgcgcaagaagtttttagggagacccacctacacctgttctcgccggtcgtgctggattgcaatattgtgcaccatttgcacgattgtgcgctcccgtgagggctacaaagtaatggaacgaaaagatagccaattttggttttcaccttcttgccttgcgattgacaagtagcattcttgacagccgttact

SEQ ID NO: 48677 - DNA, 249 bp, Setaria italica
  misc_feature (158)..(158): n is a, c, g, or t
  misc_feature (229)..(229): n is a, c, g, or t
  Peptide Sequence Number=SeqID_114651
tgtgtagttgatcggggacctgtagtgtgtgcccagtaagaacattctttaagttttttatggcattgaaagacatatttcacggatcttgccttttcttttaagcaccatttcagtgctgtaacttctaatcagagggctcacatgaacttttttgngtccacagacgttacacgattgtgaagagagttgccagcaacagcaagataactctggagactcattaccngctaataccttaaatcatcc

SEQ ID NO: 48678 - DNA, 254 bp, Setaria italica
  Peptide Sequence Number=SeqID_114652
atggcactagccctcgccatcttcttccttgaaggatgccctaaggctgtccaagaactccgggaagagcatctcgagattgcaaggagacaaaggctacgaggggcgtccaaattgagctgggaagactacaaggagatggttttcacgcaatgtgttataaatgagacattgagacttggcaacgttgtcaggttcctgcaccggaaggtcatccgagatgtgcattacaatgggtacgacataccgagggg

SEQ ID NO: 48679 - DNA, 153 bp, Setaria italica
  Peptide Sequence Number=SeqID_114653
tgcaagttcgatttcattattttcgtgcaccaaactccaaatcataaatatctgtcttttcctagagaaacaacagatatttatgatttggagtttggtgcacgaaaattacataaccacctcctgaagaaaaggacaaggacacacccatag

SEQ ID NO: 48680 - DNA, 451 bp, Setaria italica
  misc_feature (1)..(45): n is a, c, g, or t
  Peptide Sequence Number=SeqID_114654
nnnnnnnnnnnnnnnnnnnnnnnnnnnnnnnnnnnnnnnnnnnnngtaaagcacgatacgattgagacgatcagatgagaacaagtggagaagcagtagtgcacaaacatctcatgacatggattcaactctacaaaacaaatccacggttgcagcttacgagccaagcttacacgactatcagtttacaggaggacaaacccatactggcatgaggtcaccaatcatcctgcagaaatgattctagacatagccctccagcagcacacttccattcacctccctgtgctccacgttcttcagcgggaacgattggcttccaccaaacgccaggttgttgagcccttcgctcgctagccatacaggcagttaactcctacgtactaacctttcttgtaacctagttctttttcctttcctttggttaagtttcgttttttagtttaagttt

SEQ ID NO: 48681 - DNA, 341 bp, Setaria italica
  Peptide Sequence Number=SeqID_114655
cagtagtggccggtttctccttggtatgcccggacatttatattcttctacagcattggattgcatctccttgtatttacgttgctgtacagaatgtcagctttgagctatctccacatgacacctggacatgatgaaagcattctggatgctggcaatcagacgctatcacacatgctctaaattgaagttgcatgcgacagtatcatagaagctgagaccttgtgggttttgatcaatagaatctcttcataggatcacgactgaaattgcaattgacttgttttatctacagaaatatatccagacgcctaagggaacaagaagaaaacaagtcaaat

SEQ ID NO: 48682 - DNA, 336 bp, Setaria italica
  Peptide Sequence Number=SeqID_114656
cccccgtgccctccgatcccgccccatcccccgccgatccccgcccatcccctccgccgccgcgccggagcccgacgccgaggagctcgagcggtacgggatcaccgacgacctccgcgagttcgtcaagggcatgaccataagcactttccgcgacttccccctgcaagatgagccggagatgtcggatgtgcccacggtgtcgaatgtgcgtcaggatctgaacgagtggcaggccaagcacgccacactcgtcctctcgtccgtcaaggttttctcatcatcaactagtttcattcactgaacaatatttggtacacttgttgtaccttcggt

SEQ ID NO: 48683 - DNA, 298 bp, Setaria italica
  Peptide Sequence Number=SeqID_114657
atcgaaggcctcgccacgatgagcagattgggccgcaaccgcctgcagcaaccttcctacaattttagggattcatcaatttcagaattgtgcttcccttctagaacactttgcagagtgattacagcatcctttgttctcctgaggatattatttccctcagcagcttctagggcgaggaggtcactgtgtgatgatgtgaggcttctagcaagcgcaaattgggcagcttctgcccatcgattagaagccacccatctcctttgaatatcttgcagcttgatttcttctctccgtg

SEQ ID NO: 48684 - DNA, 458 bp, Setaria italica
  Peptide Sequence Number=SeqID_114658
tttggtacttagtattgtcttgtaggttttcttgtaagtcttggttgtaaaatttttagttgtttggtactaacggtctagtcttgtttgtagtctttagtcttcgtgcgctgctgagaagagcaaagatacttgttcttgatgaggcgacagcagcagttgatgtacggactgatgctcttattcagaaaaccatccgagaagaattcaagagttgcacaatgctcataattgctcaccgtttgaacactgtcattgactgtgacaggttgcttattctaagtgctgggaaggttctggaatttgactcacctgagaatcttctgagcaatgaggacagtgctttctccaagatggtgcagagtacaggacctagcaacgcagaatatctcaagagtcttgtattcggaagtggagaggagagatcacggagagaagaaatcaagctgcaagatatt

SEQ ID NO: 48685 - DNA, 226 bp, Setaria italica
  Peptide Sequence Number=SeqID_114659
tgtaattactttgtttctttgtattgtaggtcgtaactagtctagtctagtttgattgtacggactgatgctcttattcagaaaaccatccgagaagaattcaagagttgcacaatgctcataattgctcaccgtttgaacactgtcattgactgtgacaggttgcttattctaagtgctgggaaggttctggaatttgactcacctgagaatcttctgagcaatg

SEQ ID NO: 48686 - DNA, 433 bp, Setaria italica
  misc_feature (353)..(433): n is a, c, g, or t
  Peptide Sequence Number=SeqID_114660
tagtcttggttagttgttctaatttctaaaacttggttgttattgtcctatttgggcacgttgtatcctgagttcctgtgcaagcttaagcacctttgtatagtttagccagcatttcgatttggagttgcacaacgccacaacctgccagagtgttatgcacttatgctggtgggattcgtgctatcttggtagcgaacgtgttatgtacctgttctgggcaggagttatcagttaacttaaaatccaatacgtagtaggtagtaatgtggctgtcaaatcatcgggcatgtttgcatctcttaacaatttcgtttctcagaagcatgaatgcattatctccctttggaatnnnnnnnnnnnnnnnnnnnnnnnnnnnnnnnnnnnnnnnnnnnnnnnnnnnnnnnnnnnnnnnnnnnnnnnnnnnnnnnnn

SEQ ID NO: 48687 - DNA, 299 bp, Setaria italica
  Peptide Sequence Number=SeqID_114661
cgtgaaccaccccgagttcccgtcgcagaccctgttgcccggccaggagtacaagcacgacatggtcttcaagttctcgttctaggtgcatggttaaatctgctaaactgtgcacatgcaaaaccacgggatgtagaatcaggtcgttattggtttttaagtgaaataacaatactggatcagaggagagaacgcttattagaaagagggactagctcgtgcctgaacttcttctgtattttttaaaataacccattgcaacataaaatttttttaaaaaaaaaaaaacaaaaaaaaaa

SEQ ID NO: 48688 - DNA, 233 bp, Setaria italica
  Peptide Sequence Number=SeqID_114662
cgccacgccgtgctcgacggcgagctcctcccgtcgtcgggccgcgtcgcgccggtggccggcacgcccttcgacttccgggagccgacggcgatcggcgcgcgcatccgccaggtcatgggcggcaaagtcgtcgggtacgacgccaactacgtcatcgacgggagccggacggcatgcggccggttgcagaggtccgggacgtcgcgtccggcagggcggtggagctgtgg

SEQ ID NO: 48689 - DNA, 264 bp, Setaria italica
  Peptide Sequence Number=SeqID_114663
tctgccttttctcctcctataaacccgtttacgggaacgagctacagcaccagcactgttagtattttgaacacgatcgttcacaggttgttctttcagagattgactggtgttcggtgttgcacctgtttctagaacaacttcggtattctcagacccacttgtactaatctgcctcctcaaacgcaatatctcacctgttgccaggaaaagtttgtcagacctcgttcattccactgaagaggcactaaaagattccagaaa

SEQ ID NO: 48690 - DNA, 397 bp, Setaria italica
  Peptide Sequence Number=SeqID_114664
ttttaacgttactttaaactaagtactacaaattaacgtaacgtagaaactactaagacttcttatatgcatccagcagttctttgttaaggtcactatgtgcttctgaaacagaaactaattggttagagatgacttcaagttcttcctgtgaccttctaagtacctccctcactgatgccagttcatctgagagagttgtagaaactgactctgcctcttctacctttttagccagagcctgtctcacttcaatggcctcatctgttaattttgaaatctgggccatcaagtcctgatttgatctctttacttcatcaagatcttcagagagtttaaaacactttcatttctggaatcttttagtgcctcttcagtggaatgaacgaggtctgac

SEQ ID NO: 48691 - DNA, 405 bp, Setaria italica
  Peptide Sequence Number=SeqID_114665
gttcttgtaagtttatttttcacccagttgtttctgaaactctctggagagtttcagaaacaactgggtgaaactctccagagagtttcagaaacaactggagagcatgacgaagtgaatgctgtggagatttgtcttgaaaaataagcataaccatttgagaacaccagattttgtttgaatttcctccatcatgaatatttgaacatgtccatgtcataccaaacatctgatctagttttacataagtttatgtgatctttgcgagtaattgtgctcgagtttgccctttaatgtgaatggattggtggtttacctaacagaccatttacataagtttatgtgatctttgcgagtaattgtgctcgagtttgccctttaatgtgaatggattggtggtttacc

SEQ ID NO: 48692 - DNA, 247 bp, Setaria italica
  Peptide Sequence Number=SeqID_114666
gtttttttttttttgttttaggtaaaccaccaatccattcacattaaagggcaaactcgagcacaattactcgcaaagatcacataaacttatgtaaaactagatcagatgtttggtatgttactttttattggacatgttcaaatattcatgatggaggaaattcaagcataaccatttgagaacaccagattttgtttgaaatttcctccatcatgaatatttgacatggacatgttcaaatatt

SEQ ID NO: 48693 - DNA, 236 bp, Setaria italica
  Peptide Sequence Number=SeqID_114667
agcatgaggagtaatggcgatcaagcaactgttccttctgaagatgagttgggaacatctgaggtatccttgtagtcttataatcttatctggctcagagatttagttttgagcactcatggaattatggtgttgattgtggggaactatctaggtcatacattttgccatgatctttataatcatttgggttgattttcatgatatcatcaactagactgggacctgtggtgttt

SEQ ID NO: 48694 - DNA, 251 bp, Setaria italica
  Peptide Sequence Number=SeqID_114668
cctctcgtacgaggacagaggaccttgaagacattttcagcagatatgggaggttttgtgggcttacccaacctcggtgtccatggtgggagggtgttcttggtggcattgctggctgttctcccaaagtttctagcagagtgcgctatgtggatttgaagcatgaatttgcatttgttgagtttagtgatccccgggatgctgatgatgcaaggtacaaccttgatggtcgagagtttgatggaagccgc

SEQ ID NO: 48695 - DNA, 226 bp, Setaria italica
  Peptide Sequence Number=SeqID_114669
cgaggacagaggacctgaagacattttcagcagatatgggagagtgcgctatgtggatttgaagcatgaatttgcatttgttgtaagtattattgctctacttatttatctgagctcatgagttatcttgtccacttcgtagctcgttacatttttcaatatgagtccttttttctaaattatattgcaggagtttagtgatccccgggatgctgatgatgcaagg

SEQ ID NO: 48696 - DNA, 448 bp, Setaria italica
  Peptide Sequence Number=SeqID_114670
ctgagaaactgacagacgggagtatcttctgggagttgactcataaaggtaaagtgccaagctatcaccactgatgtagtcagaaataattaatctctcttgctccttaggaccccaatagaaggctctccatgaaactatatttggatggctgatagtgccaatcctctttacctccttaatgaactcttttttatgcttcacaagaccaacacgcagccatttcaccgtcaggacatgcccactttgtagaacagccttgtatgttgttccatgactgctccttccaagaacctctgctggtgcacgtgagaggtcctcagctgtgaaaaccaaagtgctgtccacgaaaatcaattctccaaccaaccgatctggcgagtaataacttacaaaaagactaacaaggttacctacaataggaaatactaggaagtacaaaagtaga

SEQ ID NO: 48697 - DNA, 265 bp, Setaria italica
  Peptide Sequence Number=SeqID_114671
cttcagattgccatgaggcaggcccttctcatgatgtaggaactggaggcagcgagctagctcgatggcaattctgagccgctgagaaactgacagacgggagtatcttctgggagttgactcataaaggtaaagtgccaagctatcaccactgatgtagtcagaaataattaatctctcttgctccttaggaccccaatagaaggctctccatccaaatatagtttcatggagagccttctcttgctccttaggaccccaatag

SEQ ID NO: 48698 - DNA, 414 bp, Setaria italica
  Peptide Sequence Number=SeqID_114672
ctgcggtggggagcgtagctcgggcaatcgaaggtttacatctgagggcggttacgacacgatatttcagcagactttttgagtgcttgcctgatgatctgctcctcctccgaaggccaaaatcctttcgtcttacatgtgaatgtcagcagcaccctgtaatatcttgctagtgtcattcaggttcatatctcgtcttgaaagttatttgtattgctggatttgtttgccagtctcgtctacatccttccgatccggctgctctcacatgacagaatagaactggaggtggtggcagacctccttctgcatctagaaacactttcatagattaaccttattgccacgtttgaggttacatggcattctacagctggattcttcatgaaaagtttgtaggcattcttgcatcct

SEQ ID NO: 48699 - DNA, 316 bp, Setaria italica
  Peptide Sequence Number=SeqID_114673
tttttttttaaattacttaaaacattcaggtaaaagttgcataactaggatacaaatatgagcctgaattcattaggcatttaggctagaccaacaatgtatcaaactgtcacttcactcccggagttaccaaaaatcctcagcaaaacgttacggctaggttaacagagaaagaactttctaatactgatggtaagacaaaatattgaggatattacctccttctgcatctagaaacactttcatagataaccttattgccacgtttgaggttaacatggccattcctacagctggattcttcatgaaaagtttg

SEQ ID NO: 48700 - DNA, 229 bp, Setaria italica
  Peptide Sequence Number=SeqID_114674
tgatcttggctgcctgcctgcctgcacccgtgtgccacaaagccctacttcgggtatcatttacgcaccatctgccaacatctggcaagcggtgcttcttctctacgctgcttggagctggggggtgagcttgtccagatccacaggaatgtcgagccccgactttgtcaggcagctgatcattgctgagacacgcaacagaggataggcaaggcacacaggggatagg

SEQ ID NO: 48701 - DNA, 225 bp, Setaria italica
  Peptide Sequence Number=SeqID_114675
ccgtcgatgtcgaagaggatggcttccagcggcgccagcttcgtcagggcgctgccgctccagatgagttcagacaacatagcccaacagatgaccatcagtgttcccttttatacagcaagagaggtcgctacgaccagaggtgttccggcggctcacctgtcggtcgccatgtccgccggagtagccgcgctcctcgtccaagaaatgcggcggcgcttcttc

SEQ ID NO: 48702 - DNA, 163 bp, Setaria italica
  Peptide Sequence Number=SeqID_114676
ttgacaacaccaaccaaatgagcacaacgttatcgaaaacttttcagaaatctattctgaaacaagcgtacttcgaatatgaaggtgtggtcaggcgatgcgccgatgagctcgagggccttgaggtaggggtccgggaagggcttggcccggtcgcactcgc

SEQ ID NO: 48703 - DNA, 385 bp, Setaria italica
  Peptide Sequence Number=SeqID_114677
actactacctagttaacgtaaagtttaacggtaaagtaagtaataatagaaataggtaaatagaatacaaggtgagaaaccatggcctttggcgaattcactgatcggttttgaagtgctgtctttagtgctccagaaaactccagtggattttcaaccttttcttggacaagttccacaaaggattcttgcacacccattcgaacttttgggacagtgctgctagattctgacagcaaatccctaacctgatcattgtagagctcacaggcagtaaaatagaagttaaaatgtgcagtagaagtagtgtctgagtttgaaagatcaaacagttcttcaaagctccgcagatataagccacgatcatgacttgatccttccagtg

SEQ ID NO: 48704 - DNA, 256 bp, Setaria italica
  Peptide Sequence Number=SeqID_114678
ccttgcccaatgtggggtccatagactctatcaaactcataatccttcttaggattggttagagattcatctcctgtgtttacacggatagtaaaatcatctggaaactctaccactgatgaaccctcatcttcgaatagtggtctgctacgacaaaacactttgacattgcctttcaaggtcaacaggtcattgaaaagccttttcttctcatgaatcaaaggggtgattctagcttcagtctcaagggcagctt

SEQ ID NO: 48705 - DNA, 184 bp, Setaria italica
  Peptide Sequence Number=SeqID_114679
aatgtgccagctatgtccttcaagtgctgtagttgtgatgtgtaaacacgctttgtgtattctgattaaaagcttggtccttagagcatccgtggttgggggctgagctgttccaaggccagccatccatccattcctattaattagcagtttgtactagtctagtttctaagtcttgttcctt

SEQ ID NO: 48706 - DNA, 271 bp, Setaria italica
  misc_feature (269)..(269): n is a, c, g, or t
  Peptide Sequence Number=SeqID_114680
cacggagggagtatctattagctccctggcgtccttttcttttgccctgttgttattcaaaattcaaccaattcattatggaacaggtatgcaaacggttgaagttgacccttgagttagtaaagagggagttagagattagtaagttgcaggaatccatagcaaaaacaattgaagaaaaagtaactggagagcagcgccgctacttgttgaatgagctacttaaagcaattaagaaggagttaggattggagacagatgataaaacngc

SEQ ID NO: 48707 - DNA, 250 bp, Setaria italica
  Peptide Sequence Number=SeqID_114681
gggctatgctggtattgaatggattcccgtcctttttgaagttcggtatgttcagtaaacttgcaggcaccggtccagaaaacatattattctctatattcctgttcagaatcaggaaatcagcaaacagttaataatcggaagcaatatttccaatacaagagttatatgtggttttagtgattcaagtcggaggctgaactgctgaacacttcttaactgctgatgaaatgctcatttgcaagatcat

SEQ ID NO: 48708 - DNA, 395 bp, Setaria italica
  Peptide Sequence Number=SeqID_114682
actattaccaggctcataaatttgtttggagttgacaatcctcaagcaagaaccattatccaagaaataaagctagcaaagagtcctgaagaggctgctagaataggaaggacccggcaaaaagagttcccagaactgggattagctgtagggcatataactctatggctgcaattacctttgcttttcaggtacctgaaaggtacgaacagattgggagactaaaaaaaatcgatgtgatgtacagagctatcaaatgcaagtttgcaacctaccctagtctgactaatatgttgctttcaacggcgggctcagttcttgtcgaggcatcgccccatgatttattttggggcggtgggcgcgagggtgaaggtttgaattacttgggtagattg

SEQ ID NO: 48709 - DNA, 223 bp, Setaria italica
  Peptide Sequence Number=SeqID_114683
agggatgagacttgggaggacgtgcgagagagctgtggagaactgaaaagtttgagccatcgatgtgagtgcatatgtttatactcctagtcagtcatatgagcttgctactcgacatactacaccgtttcggtcagtcaggttagtagttcctcttttctttttttggttgcaccaagccaagaacatcacaatcccagatctcaatagctgctgagtacta

SEQ ID NO: 48710 - DNA, 284 bp, Setaria italica
  Peptide Sequence Number=SeqID_114684
cctgaccgaggccgaggccgacgccgaggcgaaggccggcgatggcgccgcggaggagccccagccggagctccggcactcccggagcgtggggagcatcggcatgctacgccgtggcggtgccggtggcaacggtgacaacaagaaggcgaaggcgaaggcgaaggatcagaagaaggggcataaggaggacgcgcgcagcaaccagcaggtgttccggaccaaaggaacgtaggaccccggaacgtacgaacccgaccctacgaccgacgggtagtaccgta

SEQ ID NO: 48711 - DNA, 258 bp, Setaria italica
  misc_feature (54)..(54): n is a, c, g, or t
  Peptide Sequence Number=SeqID_114685
gcggaggggggctacgcgtaggctcggcgccatggccctggccgacgccaccgngttcccctacgggctgcgcgtcctcgtcgtggacgacgacccgacgtggctaaagatcctggagaagatgctcaggaagtgttcctacgaagtcaccacatgtggtttagccagtgttgccctccaaattcttcgggagaggagaaacaagtttgacattgtaataagtgatgtcaacatgcctgacatggatggttcaagctt

SEQ ID NO: 48712 - DNA, 155 bp, Setaria italica
  Peptide Sequence Number=SeqID_114686
ctgaacaacatcgatttatttcagtgcaatgatgcaatgatgctacatggactgcagaataactggtatgacgatccagagcttagtagtgaaataatggagggggatgtcagagacttctcggatgtaaaacgagatcttcttggctgtatgaa

SEQ ID NO: 48713 - DNA, 205 bp, Setaria italica
  Peptide Sequence Number=SeqID_114687
aaactacgtaggaacaaaaacccaagacccttacaaccaacaaacaagaaggaattaaggaatgcaaagcaggggtgaagaccttggcaggcgccacaggctgtggagcagggttcccagcagactctggcccgtgcgagaaggcacacctggcccttttggcgcacatgcctttctgaaagtaataacacgggacagcctgctt

SEQ ID NO: 48714 - DNA, 128 bp, Setaria italica
  Peptide Sequence Number=SeqID_114688
ccatagtattccaacgcagatttcttagactggatgttctttctcagacaacgttgattttcctcgcactgtcagtggtttcggcacgatccaaacaaaacagcgaacacaaattcgtatccgaagcc

SEQ ID NO: 48715 - DNA, 175 bp, Setaria italica
  Peptide Sequence Number=SeqID_114689
cggcggcggcggcggtggtggcgggacgtggtgcatggcgagccagagcgcgaacccgaccgcgctgcaggtggcgctggactacgcctgcggctacggcgcggactgctccccgatccagcaaggcgggagctgcttcaaccccgacaccgtgcacgaccacgcgtcctacgcc

SEQ ID NO: 48716 - DNA, 258 bp, Setaria italica
  Peptide Sequence Number=SeqID_114690
atcgcgcggaccaagacgtcgcgcaccgaggcgaacgccgacacggacatgtcgccggaggccaacgagttcaagcagattgttgaccagatcatcccgtacctcggcacggccaaccggtgggactacctgccggtgctgcggtggttcgacgtgttcggcgtgaggaacaagatcctggacgccgtgaccagaagggacgcgttcctgaagcggctcatagacgccgtgcggcagaggctggacgacggcagcgag

SEQ ID NO: 48717 - DNA, 229 bp, Setaria italica
  Peptide Sequence Number=SeqID_114691
gcagcagcagtgaggccacagtgtctacagctgtactgaagctgtcatttgcagccaaccatcccttccttccatttccatgcctagaatctctacgtatagatcattgcagtggcttgtcagaggttgccaatcttcctccgtctatcaagaccttgatcatttattactgtcacaatcttcaatccctatcaggagacctccggttgctggaaaaactcacgcttta

SEQ ID NO: 48718 - DNA, 150 bp, Setaria italica
  Peptide Sequence Number=SeqID_114692
gtcatctgcagccatagaatatctagatatagataattgcagtggcttgtcagaggttgccaatcttcctccgtctatcaagactttggacatttctcgctgtgacaatcttcaatccctatcaggagacctctggttgtcggaaaaact

SEQ ID NO: 48719 - DNA, 381 bp, Setaria italica
  Peptide Sequence Number=SeqID_114693
gcggcgccggcggcgagatgaagggcgcgacgatccccgcggtcgcgatcatgccctcgccgcttttcctctggcggtttaaggccatattgttcctcctatggggcttatgttgttgcaagataggttgggactcagttatgagaatgagtgctgatctgcgagacttatttctttatgaggctttcttgtactataatcctcttcttctcgtggccttgatgatttggttgtgggggagtaaaattttatggggtctttgcgcaatcatcggtcaactatgctaaagttttttgatcttgcgcaaacacatttatctcaccgagagatatggagggtatgtctattacactgttgtctttgcacttcacattttttaac

SEQ ID NO: 48720 - DNA, 314 bp, Setaria italica
  Peptide Sequence Number=SeqID_114694
acacctacaatcgctgctaatgggctttactctgttactgcagcatcctaaccaggattttcatgttcaaaaacccaagcatatggactaatcttctctatgggcagaactgggtattctactgggtactaggcagcaatttggttctgcgctgtacatggacatacaagctctcggcacatcttcgacacaactacctgacattattcaccatagcagcactggaaatactgagacggtggcagtgggtgtttttccgagttgagaacgagtggaacaagatgacagccaagcaaaacctggagatgtcatct

SEQ ID NO: 48721 - DNA, 229 bp, Setaria italica
  Peptide Sequence Number=SeqID_114695
atgcatgctttgagtcctagatgatttttgtaagatctgtggcatatttctgcttggttccttttgcagggcatatccacagatacaattctttggatggtcagcctgatattttgcggtcattatattctgcacttcagccatctaatacttttgaagatcgaagatattatgatgcccgcctttctgatcagcagatggcattacttcagtaccaaagggagaatta

SEQ ID NO: 48722 - DNA, 229 bp, Setaria italica
  Peptide Sequence Number=SeqID_114696
ccagatcgagttgctcttctatcaaaaacttagtgttgatcgtctggaatctagcatcccatgagatgattaccttagtcaattgtctcggtaaaattctggaactatctaaaatataccaaagatgtacatgttcctaaaaaggggaaatcaggcctcctgctctttgcaccggacatgatctctccattgttatgcagctccaatgttatccttctagttcttacag

SEQ ID NO: 48723 - DNA, 332 bp, Setaria italica
  Peptide Sequence Number=SeqID_114697
tgtcggtatttccgcgaggagccttcctcctcgcgccccctagccggccgcgccgacttcgactccctcggctccgacgacggccccggacctctcagatctattgaggggtggattattttggtaactggcgttcatgaagaagcacaggaggatgacctccataatgctttccgggaatttgggcaggtcaagaacctgcatttgaatttagatcgtcgtactgggtttgtcaatgctgatccctccttagatgaaagatccctggacatgcagaaaataagatgctgcttaaggatactaggctttaatgggatatgctttgattgaat

SEQ ID NO: 48724 - DNA, 252 bp, Setaria italica
  Peptide Sequence Number=SeqID_114698
gctcattttgatgttctacggtgcacctgcgatgcatcagctttttacatggtgtagctgtttgctgaggggtttattggatagtgccttttgtaatgtcctataccagaatagtcgataatttttatatttttttcagccaaacatgctagttattgatctggagaagtttgcctcggaaccaacagagaactggtttagtgttgatgagaagccacctattgcacatgctcgggtggagatcctggaagg

SEQ ID NO: 48725 - DNA, 385 bp, Setaria italica
  Peptide Sequence Number=SeqID_114699
agcgtctctgctttcatcatgattttcagaagcatcacccaactggatatgaaggcaaaaaatggttaaggaatcacttattgaaaaggcatttaagtcttactaaaaaaggcatctaagtcaactaacaaaagtcatctacatatgttggaaacgacctaagcggctaagctagccattctacaagtaaactatgagctacttactttcaagctccctaagttagctgacaagtcctcatttgtattctcctctccacttcctttgctcccatcattttcagtagcatcttgaagccccaaattctttaagctaagtgacacatcttcctgctgtttcttaagggtggtcctcagctcttggaaatctgaacgaagctgttcta

SEQ ID NO: 48726 - DNA, 238 bp, Setaria italica
  Peptide Sequence Number=SeqID_114700
cttgggtgtctaaattgctcctccaattctgcagatcctccttaagtcctcggagtctccctaaaagctctgattgtgattcattcaattccgccggggacggggtcggggagctctcgaaggacgccgcgggcgccgcggtgggcggagcgggctgctccgccggggacgcttcggagtccgacatccgggaggggggcggcggcgggtagggcagggttagggttccgcggggcgg

SEQ ID NO: 48727 - DNA, 468 bp, Setaria italica
  Peptide Sequence Number=SeqID_114701
acaagcaacacccccaccccctgtgttacgacttctggttcaaattaggacatgtaagagtttccaaaagaaggcctgcacatgcccattcttcatcttgaaaggttgtcaggtggcagatatgaaatgtgcaacaacacaacactgtcatcttcacgaccattgcataaacgactgctgtgaaaccggaatgatgatttgatcttccgtttcgtctcctgtaaaaaatttcctcagagggcggatgtttaccggtataaataacggatatgtcattttcatagtatttgggtcagctataaatctgattggaacagcaaagtttgctgctgctatacggttactgtagcacgatttcctgttttgtttctgcttgtgctgtctgcgcggctgggccgatgcttttggtgtacaaatacatgcatgtttcgactttctcgttcgtatatatatacatgaacatgttga

SEQ ID NO: 48728 - DNA, 437 bp, Setaria italica
  Peptide Sequence Number=SeqID_114702
gtgttgcttgtacttgtagaagtagcagtagtactagtagcagagatgctgtccgtagcccctgtgttacgacttctggttcaaattaggacatgttgtcaggtggcagatatgaaatgtgcaacaacacaacactgtcatcttcacgaccattgcataaacgactgctgtgaaaccggaatgatgatttgatgtattgggtggcttgatacttgggtggtgtggggggcctaggaaagccgatttgatcttccgtttcgtctcctgtaaaaaatttcctcagagggcggatgtttaccggtataaataacggatatgtcattttcatagtatttgggtcagctataaatctgattggaacagcaaagtttgctgctgctatacggttactgtagcacgatttcctgttttgtttctgcttgtgctgtctgcgcggc

SEQ ID NO: 48729 - DNA, 178 bp, Setaria italica
  Peptide Sequence Number=SeqID_114703
tgtttaccggtataaataacggatatgtcattttcatagtatttgggtcagctaataaaaatgacatatccgttatttataccggtaaacatccgcccttggaagaagggaggggcacaggggccgatctggctctcatggtcgtccacagttcctggttttctctgcacatccaaat

SEQ ID NO: 48730 - DNA, 322 bp, Setaria italica
  misc_feature (261)..(322): n is a, c, g, or t
  Peptide Sequence Number=SeqID_114704
tctaggtagttcttcttgtactttctttgtacttccttggttgggttggtagtaaaaggtaagtaaattttgggagaacattggaagtgctgccaatgagcctacatctgagcgggacaagtagtttgcgtttttgttctctaattcggttgtatttggatgctcgagttctgcattgcattctgaacaacattcgtagttccttttcttgtaaatattttggacctataagataaaagaagtgattggaacttgtgaacnnnnnnnnnnnnnnnnnnnnnnnnnnnnnnnnnnnnnnnnnnnnnnnnnnnnnnnnnnnnnn

SEQ ID NO: 48731 - DNA, 341 bp, Setaria italica
  Peptide Sequence Number=SeqID_114705
tgtactattgtcttcttttattactaattagtactattcggtcctaaaattgtattttctaccttctaaaccttaggtattcccttcggcgtcgaaacggtcaagcaaagtcttccttcagttgtcaaccaaatctcgtggacaatacaggatctgtataacatcggagcccgcaacttcatggtgttcaacatggcgcccatcggatgttacccggcattcctcacagagcttccacatagcagcaatgacttggacgaatttggatgcatgacaacatacaatagtggagtagtctactacaatgaactactgaacaacagtatggctgaggtcaggaa

SEQ ID NO: 48732 - DNA, 458 bp, Setaria italica
  Peptide Sequence Number=SeqID_114706
actcttctgtttggtggttccgatggtgatccaacatcagacaggggtggttggttatagatggatggttgaggctgtctgctgctgcacagactgctgtgttattcaagcaacttcgaataacacttgatgctgttctgaaagaactgacaagaaagccagagatggcaacttttgttgacaatgaagtggtcaggtccatcattcatttactgttagaagaagacaaggcccaactagcatgaattcatggtcatcgaattataatgtagataacagtggaactgtgtcagaatcaaccaaaggactttgggagcacattaaggtgtccggattaagcttgcacacgaccaggcatcaatattggttcttgctgccgtgcacattccatgctgatctgcaaagacaattacttaactagtaagaacaaagtaagtaagggtaagaaatttaaccaa

SEQ ID NO: 48733 - DNA, 241 bp, Setaria italica
  Peptide Sequence Number=SeqID_114707
catgaattcatggtcatcgaattataatgtagataacagtggaactgtgtcagaatcaaccaaaggactttgggagcacattaaggtgtccggattaagcttgcacacgaccagatactggccttttcgtaggacataatgatgtggaatctgtttgcacccacagatgttcagagtttgccagtttggtcattttgatattttgggttctgtgtaggcatcaatattggttcttgctgcc

SEQ ID NO: 48734 - DNA, 324 bp, Setaria italica
  Peptide Sequence Number=SeqID_114708
aacaaaagacaaaccaaatactagaatcggactctcttctcgtcttgttggccttcgcaagctcccagctccagcttggtgcctagcctgcggcggagcaagatgggcagaggagctcagccgtctgcgtcgctcctgctcttctctctgggtcttgtgctcctctgcttcaccgcaggcggtatcgtcgccgtcgccatgaacctctactacgcctacagcggccgacaccccctggaactgctacttcaacagctccgcgctcgtcgtccagtccgaccccagttatggatcttgcacgtactactgagacagagatcgccg

SEQ ID NO: 48735 - DNA, 254 bp, Setaria italica
  Peptide Sequence Number=SeqID_114709
gttttgttatagccaagatctacctgaccttgccgtgctgattttgcttcgcgaggcggtatcgtcggcgtcgcggcggcgcagaagacgtggtgcatcgccaagccgtcggcgtcgaacgagatcctggcgcagaacctcgactacgcgtgctcccaggtgagctgcgccgtgatccagaagggcgggccgtgctactacccggacagcctcgtctcccgcgccgccgtcgccatgaacctctactacgccta

SEQ ID NO: 48736 - DNA, 404 bp, Setaria italica
  Peptide Sequence Number=SeqID_114710
ttttctttttcttttaattttttgttttttgttttctttttaagtttaaaggttttgtttaacctttcttttgtatcttggagatgccatccgcctttttcacgatagccttgactatccatatgtgaataacactggagctgtagaagagttttatttgcttacaaaaccagaatattcaggaccagcaccaacaagagaaccaccccctgtcccagccaccacaccatcccccagttgtgataccaccaccagttgtggaatcagcaccagttactgtgtcatcacctgtcgctgctactaacttaacaaagtcacaatcatttgattctccaagcgagaaggaattgaccctagatgacattgaagacttcgaggatgatgaggatgaatttggatagccg

SEQ ID NO: 48737 - DNA, 380 bp, Setaria italica
  Peptide Sequence Number=SeqID_114711
taacctaccccttgttccctagtcctacctactacctattcccctagtttgttgtattacctaccaccagttgtggaatcagcaccagttactgtgtcatcacctgtcgctgctactaacttaacaaagtcacaatcatttgattctccaagcgagaaggaattgaccctagatgacattgaagacttcgaggatgatgaggatgaatttgatagccgaagggcttctagaagacatcaaactgatgctagtgatttatcactgcggctaccactatttgaaacaggtatcacggatgatgatcttcgtgagacagcatatgagatccttgttgctgcttctggagcttcaggggggcttattgttcctcaaaaagaaag

SEQ ID NO: 48738 - DNA, 342 bp, Setaria italica
  Peptide Sequence Number=SeqID_114712
gtgttgactcaaatgagaacaagggtgttcctagtcaaattatctacagggttgaagcgctaaaaaggcaacccttctctgagaaggttactatcattcttcctgtcactggccagactgaggaaatcgagatcagctatgatacaggagagaaggcagagccatcatcatcatggggcctaaccacatttgctgttatcctcacatgcatcgtggtaccggtagctacaattgcgttcttcatgaagtcactggagaggcctagcagacgggcaccgtcaaggaacacggcagcatccacaccagcacgaacaccggtggccagtcccgctgcgatggctg

SEQ ID NO: 48739 - DNA, 359 bp, Setaria italica
  Peptide Sequence Number=SeqID_114713
tgtagtaatgaaaagtttcatctaccttatcatggacccagtgccaccaccagtagaatctagagcattaccttgacaaagaaagcatatggtttagatcattatgacaataactcaaccaatttgacaaagctaaaattacaaggagaataatttacttactatttaacaacattgatacttactaataaagttataagttgtgccaggtagcaagaagtcacaagtatctaaaatcgaaacttttattttcccagcagacctgtcacaagaatgaaataacatattaggaggcacttattactatcaggtttactaaatgatgtttcattaatagtagttttagaaacaaaagaaga

SEQ ID NO: 48740 - DNA, 474 bp, Setaria italica
  Peptide Sequence Number=SeqID_114714
ccgtcgcgcttgtagtagggcgtgtcgtcgatggtcctcctcacgtactccatgaatggctgtggcgtgcgaggcgagagctgaccattagctggggatgcagggtcagccatcgcagcgggactggccaccggtgttcgtgctggtgtggatgctgccgtgttccttgacggtgcccgtctgctaggcctctccagtgacttcatgaagaacgcaattgtagctaccggtaccacgatgcatgtgaggataacagcaaatgtggttaggccccatgatgatgatggctctgccttctctcctgtatcatagctgatctcgatttcctcagtctggccagtgacaggaagaatgatagtaaccttctcagagaagggttgcctttttagcgcttcaacctacaagaagatgagaccagtgcatggttaccagcaataaacattggtaaacaaaaataaaaagaaaagaaaatag

SEQ ID NO: 48741 - DNA, 246 bp, Setaria italica
  Peptide Sequence Number=SeqID_114715
aacaaaccgccagcccaccgctaacctagcaacacacgctcagtacgtgttctgagggttgaatcgcctcctgccgtcgcgcttgtagtagggcgtgtcgtcgatggtcctcctcacgtactccatgaatggctgtggcgtgcgaggcgagagctgaccattagctggggatgcagggtcagcctagcagacgggcaccgtcaaggaacacggcagcatccacaccagcacgaacaccggtaggcc

SEQ ID NO: 48742 - DNA, 210 bp, Setaria italica
  Peptide Sequence Number=SeqID_114716
gaagtttgtggctgctgctgctgtaggaagtgtacatagtacaactaatgtgccaaaaatgattcatcctcctccattgagaagtgtacatagtacaactaatgtgccaatgattcatcaatggaggaggatgaagttttgtggctgctgctgctgtaggaatgagatgatatacctcttagaaacaaaaaaaaaaaaaaaaactaaaga

SEQ ID NO: 48743 - DNA, 244 bp, Setaria italica
  Peptide Sequence Number=SeqID_114717
gtctgcgacaactactactcgtgcccggagagcaccacctgctgctgcatctacgagtacggcaacggcggggaggggcagaagaggggcggcagcggcgggagcagcaaccgcatccaggtgtccaacaccaagaagcccctcttcttctacgtcaacctcgccaagaggtatatgcagcagcacggcgatgttgagctctccgcgctcggaatggccatagcgacagttgtgaccgtggcgg

SEQ ID NO: 48744 - DNA, 263 bp, Setaria italica
  Peptide Sequence Number=SeqID_114718
aaaggcaatggggggaaaggccaaggaaacgatggcggtggaggtggcggcggcggcggaggaggcggtggatacagcgatggcaatggtggcaagtgtggcaatggaggcaggtgtggaaggcactagaggtcaaatggatgataccttccaacaacaccaaagtgccaccctgcctcccgtttataacattggccccttgggattgcttgacacagaccaaagaactcacccatatatcctggactggtattacatgtgtc

SEQ ID NO: 48745 - DNA, 308 bp, Setaria italica
  Peptide Sequence Number=SeqID_114719
gtcagatgtgggaggtactggggaatagtggagcactgtggaataaggatggcagtggcagcagctggcacgaggacgacgaagacggtggctctcttgaaactgccccgctggtcaacggtgggctccctgacctgtacgatatcatcgtcggccgtcgcgccgacgtcaccatgctaggcaggcaagaagcggatctggcgcgtgccactgacattgcagtaggagataccgacgcaattgaagagcaggagcaggatagcgatgatgtcaaggaagatggggatgaagaagacatggggttctgc

SEQ ID NO: 48746 - DNA, 457 bp, Setaria italica
  Peptide Sequence Number=SeqID_114720
cggctttctactcacggccaagtacggcgaccagggctacatgatcttcctgacctccttcctggggctaaccaacgggtacctcaccgtgtgcgtgctcatggaggcgcccaaggggtacaaggctcccgagcagaacgccgggatgaacaggaaccgtgccaggatcgccgccatcgtgcccttccgggagatcagcttcaggcacgggatcagcggcacgtacctcccgataaggtcccacacgttgtacatggcgatcagcacgagcgcgtaccaggatcccaggctgtgtgctccggtgtcttcggacaaaaatcccgggaagatcgacagcgtcaggacgtatatcaggtagatatcgaacatatagtcaatgttctccatcactagctcttttgtggtcaggcgcttgtatttctgtggatcctcctcgacttgtgcctgttgttcagcg

SEQ ID NO: 48747 - DNA, 280 bp, Setaria italica
  Peptide Sequence Number=SeqID_114721
gttctaacatcagccttgagattagttaccaaagcagcttttgagagctcaaaagatggtcttcgcattggtgctagtaagtccaatttttttttttgtagacatttgcagactttggttaattcattttttaaataaaaaaatactgacatttctgaaataaaattatttgaattctaaagcaaatgtggggagttgaaagggatgatcaactgcatgaggttatactaagtggtttatatctgtgcgttttaggtaaagtttcactagaatataattg

SEQ ID NO: 48748 - DNA, 249 bp, Setaria italica
  misc_feature (38)..(38): n is a, c, g, or t
  misc_feature (45)..(45): n is a, c, g, or t
  Peptide Sequence Number=SeqID_114722
gcgtgcagggcgcgggggccgtcgcggcggcggagganaccgccngtacatgaccgccgacgcgcgctcccgcgtcaccccgccgctccccgacggctacctcggcggtggccaaggtgggcgacgtcgtctccgggtctctcgacgccgccgcggacatgatctccggcgccaccgcccggcttgacgacgagtacgtccggtcgctggtggaccacctggagcaggtggtgagcgacgcggcgggcc

SEQ ID NO: 48749 - DNA, 233 bp, Setaria italica
  Peptide Sequence Number=SeqID_114723
caagcactcactagaaggacaagggccaattgaaacatatgtttgaggttgtgtgctctgatcaccacagggatcactgccactgccgcagccatgacaacaacagctgcatgtgcagttcaagatgacagtaagaaaaaatatctaatccaacttgttactatttttctagtaattattttcagtaggcatctcaaaagggaaatatagtagcaagattagctcgcgtatct

SEQ ID NO: 48750 - DNA, 246 bp, Setaria italica
  Peptide Sequence Number=SeqID_114724
atagtcaaggtgctgaaccaggcgaagcttgacgcgtctgttcgagcttacggcagtggcacagagaagataacgaacaaatggccgagcccgtacgttctcttgtgtggagtttgtctgctcgtatcactcttcgagcacttgctatatccttggcgtcgccggctggggcctggggctcaagctcggcagcgagtccgtgggcgtcacctaccacccccaccgcaacatcggcatcgccatctt

SEQ ID NO: 48751 - DNA, 258 bp, Setaria italica
  misc_feature (254)..(254): n is a, c, g, or t
  Peptide Sequence Number=SeqID_114725
tcatgtccatgctcggtggtcatgggtagtggtgtgtatccgcgatgtgcacaagtggctgctcagcatggcaatgatgctcgtgctcatgatcatggtcgtggcaagcatgctcaactgtagaatgtgaatgcttgtgctcttcacagtggctatgctcatgctcacctgcagaatgtgaatggttgtgttcttcacagcaacagcacatgccatgagcatgagcatagccactgtgaatggttgtgttcttnacag

SEQ ID NO: 48752 - DNA, 255 bp, Setaria italica
  Peptide Sequence Number=SeqID_114726
gtaccctctttactctacctcgtctagcactagaaagtagtttgtgcaccagaaataaatttagcagtggtaaaaagcagtatgccttctaataaataaaagtgtgatgtttgtgaattattataactaatatagtatgataaaggatttactggaacttcctgtacattaccgataagatggttccacccactgctagtatcttgttatccaactgacacatccgtgcgagcatccacacctctttttgagcaa

SEQ ID NO: 48753 - DNA, 469 bp, Setaria italica
  Peptide Sequence Number=SeqID_114727
aaaatatgttgctgggtgtcaggtcacggtgtatgattccttgactatggacatgagctagaccttccacaatttgtcggaataggtgccatgcatggtcaacattgaaagatgaactgtatgtctcaaaatcctgtcgcaaggtccttttcaggaaaaaaagttcaaaagaagttagatgtagaaagactataatcaatatcttactgtagaatggcactcaatgactgaaaatgcagaaagaaagatcacactttctaaagttccaaaaattcaaactaccaggcccatgagaacccttcaaaattataactctgcaaatattaactagtttaacttacagcctccattttttttagaatacatatttctaatccagctaaaaccaagaaaacgattgaaggatatgactataatatcccatatactggttcaggaataaaagaattcttaatattattaagaggag

SEQ ID NO: 48754 - DNA, 344 bp, Setaria italica
  Peptide Sequence Number=SeqID_114728
aacagcagatggacggtcagatgggcttgaagacagtaagcgtcttaacagatttaactggccaggaaattgtgctgcccatgattttggaagatctcccttctgcttaagatcagaaagaacaagatgcctttccatcgctgtggcaaatggatgccaaagctcaaagaatataactcccaaactgtacatgtcaaccttttcatttatctgtggccatttctgctctaacctacaaggtagacggtaataaaaaataatagtaaccaaacttagaacctagttaccaataccaattagaaaacaacccaattagacctacaagtaaggaaagaataattaga

SEQ ID NO: 48755 - DNA, 253 bp, Setaria italica
  Peptide Sequence Number=SeqID_114729
ttccccgtataaaaaggccaacacaacctcaagagaagataatgaggtagtacttggtgtacaatacacatataattgcttcattcttcaatagacagttcaggtgcagaaccagtccaaatttaagcaggaagtagtatagaattcaggtgcagagcaagtaccagtccgaatttaagcagcaagttgtatagttctgttccttcaagaatttgatctgctaatgcatcttacttggctctggatttcagaa

SEQ ID NO: 48756 - DNA, 377 bp, Setaria italica
  Peptide Sequence Number=SeqID_114730
caaactaacccgtcaccttgtatttgaagcaaccttgcatgttgcatggctttggtcctcggaaggacaaccaggattacgccaattagccaatcaccacggcaccacgcccatcttcggttgagccatcctcggtccacagaagggcggacaagactccagagagccatgccttccccaaatttgggcggaagccagcatgcatgattgtgctgtgccttgacatgtttgaacagaaaatgctgctttcacctgtaagtttaagaggcaccagaagccacaaaattggctcaattcagtccgaatttaagcagcaagttgtatagttctgttccttcaagaatttgatctgctaatgcattcttacttggctctgg

SEQ ID NO: 48757 - DNA, 248 bp, Setaria italica
  Peptide Sequence Number=SeqID_114731
tgatcatttatctaacgagacacgatgtcacacggaagataacttattccacgaatccaagtgtgtgagttgcaatttccacattgtagtgctatcaaagatgctcctgtaatagttgccccctaatcaaactccactgtgacttgcggtcagcgttatttggccaatattgaacaagagttgaagatagaaactcagcaacattttgtcttcgttcctgagaaacccctgcccaggagcaaattgct

SEQ ID NO: 48758 - DNA, 374 bp, Setaria italica
  misc_feature (312)..(312): n is a, c, g, or t
  Peptide Sequence Number=SeqID_114732
taagaaacctaacccaaataaacccaaaaactagacaagaaattagacaaccaaactaacccgccaaccttaagtaaatttaagaacaagacaaaccttagacaatgttgcatggctttggtcctcggaaggacaaccaggattacgccaattaaccaatcactgcgcccatcttcggttgaggccgcaggccacagggcgtagcgttggccctcggtccacagaagggcacacaagactgcagagatgccttaataaatttgcgcggacgccagcatgcatgattgtgctgtgccttgacaagtttgaacngaaatgctgctttcacctgcacacaaatgactaaagagggccactggtcaggctccagatag

SEQ ID NO: 48759 - DNA, 376 bp, Setaria italica
  Peptide Sequence Number=SeqID_114733
tggaattgttgcttgctaccaagtgtttcatgttagcacggaaaattgtgcatctctacatgttgcagtaacagacaacgtgctcatgggtcatggctcataaatgatacccactaacataatctcctttcatgctatcttaccgtacaagaaggcaatctcatgctctaagttgactcttctaactcttctccaaatcgatccagccttgacacctctgcatcataatcacggattagagtatggttaacagagccatcatcttcactcgcatggatttgccgcccgccaaacctgcaatgtgaaaaaatgaataaattttatagtcgacagatcaatccaggagcacaaatggtacttgctcagcattctttat

SEQ ID NO: 48760 - DNA, 281 bp, Setaria italica
  Peptide Sequence Number=SeqID_114734
atatggaagaggcaacacgcaaaactttctaccaatgctatcttatcgtacaataaggcaatcccagttatcctctaagttgactcttctaactcttctccaaatcgatccagccgtgacacctctgcatcgtaatcacggattagagtatggttaacagagccatcatcttcactcgcatggatttgccgcccaccgaaccatctgtccatttctattctttcttcttattgttcttatttttggtttcgtttcctttatttttctttttttccgtttta

SEQ ID NO: 48761 - DNA, 420 bp, Setaria italica
  Peptide Sequence Number=SeqID_114735
cttcctttctttgtttatcagtttctttgcaatgaaacatcacctttctgctcaaatttggccggacttacagacatcagaatcttgccaccaggacggaatgatgtcccatccaacaactgaactgctaaagctacagaaggctccttgagatatgtcaccaatgcgtcgccttttttcctcccggtttccttgtcggtatagatcttcacccgaggctttttagtctcagggtcctgtaatattgattatcaacatgtgtccaatgcttaaagttcacgaagaaaaaataaatgccacaaaaaagatattagtaataagagaaacaaaatagttattcaagtaaagtaaatgtcaaataaatcttgtagtatttttttcagtttattttaaggcaccctactagtctatttcctatta

SEQ ID NO: 48762 - DNA, 247 bp, Setaria italica
  Peptide Sequence Number=SeqID_114736
cccggtttccttgtcggtatagatcttcacccgaggctttttagtctcagggtcctcctttattattccacacttggaaaatacctccacaatctcctccactgtgacatcatcaggcagaccatttacatagacatgcgtgttgactttgagatcaaaccaactgtctggaggtttgttagctccctgcttttcacggcgaccccctagaagcatcgacatttccgcgagacccaacccctttccg

SEQ ID NO: 48763 - DNA, 237 bp, Setaria italica
  Peptide Sequence Number=SeqID_114737
ctggggtacccgtagatccctccgtagagcagcgtgcggtggaagtcgccgacgaggctgccgatgtagcgcgcggagtagggatctacgggtaccccagggacaggaagagcaagaacggcaagctgcgcctgctctacgagtgcgcgcccatgagcttcatcgtcgagcaggccggcggcaagggatccgatggacaccagaggattcttgacatcacgcccacaggggcactct

SEQ ID NO: 48764 - DNA, 348 bp, Setaria italica
  Peptide Sequence Number=SeqID_114738
tacttggaatgtttagtgttacattaatctaaaagaagtaacttatacagagttgtttgcagtttcacttgattttaaacaacattatgctttaacccacaagttatgacttaagagctggtgaagctatctgcactagttatgacagagcccgcaaggctcataagcgaaaaagtgtaggctagtacactcgcagttctaaaccgaggcctgaaatctgacaagtgcctctgatttaacccacaagtgatgaaccacgtgtacattgctatgaacgcctcaacgcactcgacatgttgaaaaacggcttgaatgtcagaagtagcccgattatcgacaccatgttta

SEQ ID NO: 48765 - DNA, 294 bp, Setaria italica
  Peptide Sequence Number=SeqID_114739
ttagttttagtacaagttttacacttgattttaaacaactatttattgtcttttaaccctactaagtttattgtactttaagtagtcttggttgaagctatctgcactagttatgacagagccccgcaaggctcataagcgaaaaagtgtaggctagtacactcgcagttctaaaccgaggcctgaaatctgacaagtgcctctgatttaacccacaagtgatgaaccacgtgtacattgctatgaacgcctcaacgcactcgacatgttgaaaaacggcttgaatgtcagaag

SEQ ID NO: 48766 - DNA, 384 bp, Setaria italica
  Peptide Sequence Number=SeqID_114740
catcatttcaaatgctaaaagataagatttatgaagccacttcatctttatgttcttcagcatcgccctcaggagcatcggagtcaactattgtgataccctcaagatctaagggttttccagtcattggatgaatgggggcgcctatcacgaggcccacccttaggagtcatggcaagcattggaggtgggggaaggagtccagcccgaaagagaatgcgctgaactggatctgatggttgtgcccccaactgacagccaatacctatgccggaagaaagttatactttgttacatagccttcaaagcaggaaaggataacagcacagcatatatcttggaagtaacttgatcaaagaagaaatcaacgtcggtaaggttgct

SEQ ID NO: 48767 - DNA, 299 bp, Setaria italica
  Peptide Sequence Number=SeqID_114741
cctgccatttttttagaacaaaatggatgaaacattacatgtctaaaagtttgccacatcataggagtactcagtcttgtcagaagcacaacaaacaagttttctcttgcagtaccactacataaatgctaaaatagaaatttagcatcattttcaaatgctaaaagataagatttatgaagccacttcatctttatgttcttcagcatcgccctcaggagcatcggagtcaactattgtgataccctcgtgataggcgccccattcatccaatgactggaaaacccttagatcttgag

SEQ ID NO: 48768 - DNA, 266 bp, Setaria italica
  Peptide Sequence Number=SeqID_114742
cttctggatcgggccgcagtgggaggtcccgatgctgtggcaccctgcgcagtacgtgtcggaggcgacgcggccgttagctagcggtcgagtggagtggttggctcggctaagccgttgctgtcgctcacgcggaaaggaaaggaaaggaggaggagtaggcgggtgggcgggcagcgagaggtaccgaagaggacggcgatgtccttggagttgagcgacttgacgctgaagaaggtcttgacgtcgacgatgttggagtccgg

SEQ ID NO: 48769 - DNA, 271 bp, Setaria italica
  Peptide Sequence Number=SeqID_114743
cggtgcgtgcgtgacgcgagccttgaactcgagcgccccagcgacgctggaggagtcacgagggagccgagtacccgcgccgcgggagagaccgaccacctggccccagatcgggttccggtagccaggatttccggtggtggctggatctggtgccgtcccgatcggatcggcggcaccgggcagtccgggccgcacacgtggtcgccggtgggccactgcctcgcgggacccaccgactgggcttcgcgaaagaactccttgtctgatg

SEQ ID NO: 48770 - DNA, 381 bp, Setaria italica
  Peptide Sequence Number=SeqID_114744
aactgctagaggtgctgcggttggcgtattcccaaggagaaggattttcttcattagttctatcaagttgaaagaaataatgaagaaaatccttctccttgggaatacgctgaaccagggaactgctagaggtgctgcggttggcttccggttggacagtcttctaaaacttactgatacccgggctacaaataataagatgacactaatgcactacctctgcaaggtacttgctgcaagatctccacagcttttaaacttctatgtcgatcttgttagtttagatgctgcatcaaagatacaattaaaaatgttggctgaggaaatgcaagcatcatactccagctgaaccttttccagccctttagactaaactagaca

SEQ ID NO: 48771 - DNA, 366 bp, Setaria italica
  Peptide Sequence Number=SeqID_114745
ccctgtgaggcaaatcgacacccatccaatgcatttttgggcaaggggaaattttgtggatggatgcttgcatccaacgggtgcagcagcatgatcgcatcgaagcaactgtacaggacgccctctgtggtgtcgatggagaatgccgacttcttttttttccatgtcggccaggatggtccagtgccaacttctgactgctgtgaagagctgctaacactgacgctaacgtcattctttcttttgttgtttcatgttacttttccaattactttactaaacaaccggtaggaccaaagtaacaagaccaataggacttacgaaaaaagtaacaagacctaggtagacttaaggtaaaaaattaga

SEQ ID NO: 48772 - DNA, 420 bp, Setaria italica
  Peptide Sequence Number=SeqID_114746
cctcatcctcgtacatcttgaggacctgcgcgcatctgggcagagcaacatccttctggaatcccagagcattcgccatacgaacattagaggccacaccattgttgctggtgaggaagacaggggccctctcccgaccaggcacagttgtggcgcacctcatgtctgggctgctgatgaggacggactcacagagctcatcctcgtgctcatcagtgacgaggatgttgtaagtgccagtgcggtcagtgtgcccctcgtaggtgcatgacttcaatccagtggttttcgatctgcactcaactcttacctttgctcctgtagtaacaaagaatgccatattaacagcagttgacaaagaaagaaatgcatgactgaaaaatggatgctatcattttgttcattcagctctaattttct

SEQ ID NO: 48773 - DNA, 365 bp, Setaria italica
  Peptide Sequence Number=SeqID_114747
ttggtcttagtgctagatatagaggttccataacagttcagacactaggtaaatatatagctcgccgagcagtgtcaaactcttcacaattacaggtggtcgtcctcatcctcgtacatcttgaggacctgcgcgcatctgggcagagcaacatccttctggaatcccagagcattcgccatacgaacattagaggccacaccattgttgctggtgaggaagacaggggccctctcccgaccaggcacagttgtggcgcacctcatgtctgggctgctgatgaggacggactcacagagctcatcctcgtgactacaatacaagtagaacgaaggaatagttagtaaagtagaccaagtagacga

SEQ ID NO: 48774 - DNA, 425 bp, Setaria italica
  Peptide Sequence Number=SeqID_114748
actagcagaagctgcatttctcattggattggaaaggaacagtgatgtggtcgagatggcaagctgtgcaccccttttgtaaatgacaatgaccgcaggtggaacccagatgccatcgtcttcaattcgtggcagcactatggatgccccaactactggatgctacacttcttcaaggattcaagtggtgctgcccttcatcctacaaccattcagatctcgaactacgatcagctggttgcatctgccatcacttggcagaatgctaaagacaagagcacctacctcaggataaaggtggtcaatttcgggagcagagccgttgatctcaatgtctctgtggcagggctggcgaacggcatcaagaaagtactaggaatacgaaaacaagaacggttactaaacaataccaagacaagtaccga

SEQ ID NO: 48775 - DNA, 470 bp, Setaria italica
  Peptide Sequence Number=SeqID_114749
tggccatttcaatgatgcttgggcctactggactgatgatggacttggatttttttgagttcctccaactagcagaagaccttggtgcttgcccagtttgggtggtcaatgatggtaattgctatatcaacttatcaagggccagccttaacgaagaagttccatctgcaacaatagctgcttttgtaaaggatgttgttaatggtattgagtttgccaggggagatccccagactgcatgggtttcagttcgtgcagcaatgggacatccagagccctttcagctttattatgtttcagtagggaatcaagaattttctaaatactattataaagataactacgtgaagttctattctgcaataaaagcgtcctacccagacatcaaaatcatatcaagctgtgatagatctgctatttcaccagtcaacccagctgatttgtatgatgttcatgtctatacctcatca

SEQ ID NO: 48776 - DNA, 282 bp, Setaria italica
  Peptide Sequence Number=SeqID_114750
ggtgttggggtctacaatcctggttactggggaatggtatggtatttccatttacttatgtttttgtaaaaaatatgcatactggaactataaacttttgtgaagctgacgtgatattatctatcctataaaatgctgctaccttttctaccttgccatgtgtgatgtgtttctctctcttttccagaacattgaaaaagggaaggtttataagaggtagcaaagaaatcctttgcaaaatggacaaagatagaattccatttgaagtccagccaaaaataa

SEQ ID NO: 48777 - DNA, 203 bp, Setaria italica
  Peptide Sequence Number=SeqID_114751
aaagacctggccatttcaatgatgcttgggcctactggactgatgatggacttggattttttgagttcctccaactagcagaagaccttggtgcttgcccagtttgggtggtcaatgatgggccagccttaacgaagaagttcctattcttgtctaactaattagtcttgtcttttttgtttaaaaggttatttgttttgttt

SEQ ID NO: 48778 - DNA, 399 bp, Setaria italica
  Peptide Sequence Number=SeqID_114752
tgatggacttggattttttgagttcctccaactagcagaagaccttggtgcttgcccagtttgggtggtcaatgatggggccagccttaacgaagaagttccatctgcaacaatagctgcttttgtaaagataactacgtgaagttctattctgcaataaaagcgtcctacccagacatcaaaatcatatcaagctgtgatagatctgctatttcaccagtcaacccagctgatttgtatgatgttcatgtctatacctcatcaggtgatatgttttccaaatctagaatgtttgataatacagcccgcagtggacccaaggcaattgttagtgaatatgctgtgactggaaatgatgctggccgaggaacactgatagctgctttagctgaagctgca

SEQ ID NO: 48779 - DNA, 215 bp, Setaria italica
  Peptide Sequence Number=SeqID_114753
gttggaccatgggaagaaagacctggccatttcaatgatgcttgggcctactggactgatgatggacttggattttttgagttcctccaactagcagaagaccttggtgcttgcccagtttgggtggtcaatgatgggggccagccttaacgaagaagttccatctgcaacaatagctgcttttgtaaaggatgttgttaatggtattgagtttg

SEQ ID NO: 48780 - DNA, 425 bp, Setaria italica
  Peptide Sequence Number=SeqID_114754
ggtttagctagtgttgctggaaatgctgataagatttctgccttgcaaaatgagtttgacattgtgaagaagcgaatggatgatgaagctaagaaggcttctcgtcttgagcagaagattaagcttctcacacaaggataccaggtacgtgctggaaaactctggtcacaggtccaagacacattcaagcagatggacactgcatcaacagaactcaaatgcttccaagagctgcagaaacaggaacaccttgctgcttcctatcgaaccttaaatttgaccgaagaagtgaataaacagaaagcactagagcggactctccaaagccggtatggtgaatactagttagtaccggtttaccaagaaggaataccaaagaaacaagacttagaaggaagacgacaaagaagaacaaactacaaaga

SEQ ID NO: 48781 - DNA, 243 bp, Setaria italica
  Peptide Sequence Number=SeqID_114755
ctcttggaagcattcaagttctgttgcagcagtatccatctgtttgaatgtatcttggacctgcgaccacagttggcagcttcctaccgtgttagaaatttgactgaagaagtggataaacagaaagcattagaacggacactccaaagccgttatggtgatttggtgtctatttaccatagaatgcaagaacagcttgaggagcacaagattcaacttaggaaacaggaggcaatagaagca

SEQ ID NO: 48782 - DNA, 226 bp, Setaria italica
  Peptide Sequence Number=SeqID_114756
agctctacgacctctttgtgcagctcaaggtcaatctcaaggtcaatctgatgggatatgattactctggctatggtgcatctactggaaaggtaagaacttatttaccaagtgtaaactgtgttagattgcaccatcgacatgttgctggtgagttaaagtggtggtgaatggctgattgactgtttgaaaaacttctcttaatctcggtcgccctttcccaact

SEQ ID NO: 48783 - DNA, 362 bp, Setaria italica
  Peptide Sequence Number=SeqID_114757
acaggttttggagctcagggtttttgggacgtcaggcgtttggagcaggaggtgccgctttcccaaatgcagcaggtgttcaagcagcagcagctgcataccaaggagctggagctcctcctggttttcaagggccacctgggtttcaggttggccaagcaactacccagactagtactgcagcggcagctgcggcggccgctgccaatgctgctggttatcaggctggggctgctgggcagggccaagtatctggtgctcagattgggggcactggttttcagggtggatactgacggaactagccgtccagatggacaccgtgacgcccgcgcccctgcaagctgccgccggagccggcg

SEQ ID NO: 48784 - DNA, 230 bp, Setaria italica
  Peptide Sequence Number=SeqID_114758
tattcttctattttgtactttacctattaacgatgaacattttgtattatttaaatcccacctagcttgagcttatcagatttaatcccacaatgtcataccacggtctgctgagtaatacacttgtgcactgatgtgctattgcacttacaactgtaccagataccaaatgatgcaagaagtaatgcctgggtatcgtttgatggcaaaagaaggcagcaattgtcaag

SEQ ID NO: 48785 - DNA, 269 bp, Setaria italica
  Peptide Sequence Number=SeqID_114759
atttttgtacttcacacgatgtatgttttacttatcctctttcagagaatttcattagaagaacctgtttttgactcaaaactaagcatgttaatcattttatttacctcagtttgaaggtttcagacaagacttgagagctgtcatccatgggaacaatacacttggggtttatataacccttagaatgcgtctaagatgtgagatctttcgtaatggaaaagcaatgcctggaaaagtgtttgatgtgctaaacgaagtcgttgttg

SEQ ID NO: 48786 - DNA, 401 bp, Setaria italica
  Peptide Sequence Number=SeqID_114760
cacaatttcactgaggtagcgcgcccatctgcttttatctacactctccaaaatggattgaagcgtcacatccaaaggaatagggtccatttcacgtcttagatcataaggccgccctggatcccaataacagctttgaacaatgtcttcccccattttcctctatgatgtcaataataaatattggctctggttcaagtttcagtttattgtcaccccattcatttgccgagtaatccctgagatcatttttcagcgctcgaacacatcgcagtaactccaaggcagtgagccttatttgaacatcagcagaactgagaaagacaaggccaaacaagacaataccaatttactagaaggacaacgaaaattacaagaataacaatacctaggacctaata

SEQ ID NO: 48787 - DNA, 347 bp, Setaria italica
  Peptide Sequence Number=SeqID_114761
tgtaagtaatgcttgactgattcttcaagcaacaactatggcagctcttacatgcttgtcttgtataacttgttttgatgaaggccacgtccagaactggagattctcctgtcaatcttggtgacaatggtgctgcaagtggtcatgtggattcttcaaaagaccatggtgtaaatggcgcttccagtgctcatgcggattcttgagatgaccatgttggcaatggtgctagcatcccccgactcttcagggtagcatgccgtgtctgattggtttcatgattccagtcctctcccggcatgtacgatttgcttctgtggtgaactatgattgacaaggcattccac

SEQ ID NO: 48788 - DNA, 359 bp, Setaria italica
  Peptide Sequence Number=SeqID_114762
aaagaaccggaactaagtaaccaaatagaatacaatacctagactagaacctgaaagatgaagacgacccaactttattgaagatcctaccgccaaagaggtccttcccaatcctcgccttgaaggggaactgcttcttgaagcggttgcggaacaatgagctagaccgactgcgtctcggcacgatagcagaatggttcctcttcaagccgtgatcactgtgcggagggtttgcgctgctgctgctcccaccagcaccaccacccaatgaaaggttcctgcgagcagatcggagtgcaacatgcaggggttctgagaatgacacatgcccttcatcatcagtggctcgtgtgcacagc

SEQ ID NO: 48789 - DNA, 310 bp, Setaria italica
  Peptide Sequence Number=SeqID_114763
ctggttgtttactagaagatgctagctgacttgattctgagaatggggatgcagaactgaaactgctcgttgcagtcagttgcctctcacttgactgaggatagtcagaagtttctggtcttgatcctcctgctcggggtagagaattcacctcaatcaccatcattcttgtatctgatggagcactttcttattttgggagtccagctggacagccttcaaggctaccacgttggacgccctctcttcaaagatttgatcttggtgaattctctaccccagcagaagtttctggtcttgatcctcctgc

SEQ ID NO: 48790 - DNA, 310 bp, Setaria italica
  Peptide Sequence Number=SeqID_114764
taaaaggggaaaaactaaaaggttaaaagtttaaaactaaaagaaaagaaatagactaagctgaacttgattctgagaatgggggatgcagaactgaaactgctcgttgcagtcagttgcctctcacttgactgaggatagtcagaagtttctggtcttgatcctcctgctgggggtagagaattcaccaagatcaaatctttgaagagagggcgtccaacgtggagcctgaaggctgtcagctggactcccaaaatagaaagtgctccatcagatacagaatgatggtgattgaggtactgatcactcc

SEQ ID NO: 48791 - DNA, 239 bp, Setaria italica
  Peptide Sequence Number=SeqID_114765
gccggctgtccatgatcatcctgctgacctgaagatgaagacgacccaactttattgaagatcctaccgccaaagaggtccttcccaatcctcgccttgaaggggaactgcttcttgaagcggttgcggaacaatgagctgccgctgcgtctcggcacgatagcagaatggttcctcttcaagccgtgatccacctgagacacgcaacgaggggaaaggcaaggcacacaggggatagg

SEQ ID NO: 48792 - DNA, 252 bp, Setaria italica
  Peptide Sequence Number=SeqID_114766
tatgtgatttgaaaaacaaaactgtaacatataaaccaacgacaaatttcaaatttcactccatcaaatgcttgcgtcatgcggaatctgcgaacccaaccctcattttgccatagtcaaagatggtgtggtaggctcccatgaagacgtcacccaatatcctgcatcagtttcacgaatataattcagggatcgcgcatcccatgaaaaggtaaaccgtaaaaggagtgtggatagatcatgatccgcaga

SEQ ID NO: 48793 - DNA, 346 bp, Setaria italica
  Peptide Sequence Number=SeqID_114767
ctcaaggccacgttgatcaaccgccacttagtccaaccataattctgtactagagcatagtgttgtggcagcgaggcgggtacatacaagatggagtttggagagtactggagttcttgttgctatcggcctagctgtcattgttcttgcatggttggttgctccacatgttggcaaggttttcccgagaatccagtatgggtctatgcaatattgggcaatcttgtttgtgtcctggttccttgtgtttggtgtttgggcctctcgaactcgcagcatacgctcctcatgagcattattgttagttgttagtcgttgttagtttcttactttgtttggttcttta

SEQ ID NO: 48794 - DNA, 305 bp, Setaria italica
  Peptide Sequence Number=SeqID_114768
aaaatttaactaaaggaaaagaaccaaagtaaggaagttagactacaattcagctgaattggtgtcacaactacctagtagcaccaaccatgatgaactgattgagataaaagaaaagaaaggcgagggctcaaaatcagattcaggtgatagaagttttgagaagctagagtcagcatctactgaaattgaatgtgatttgcctgttagttcaatggggtcaaacacgggtagttctatagatccaaaagagacactacaccatcaactaaaaaagaaagaacaaagatgatggaagtctcgct

SEQ ID NO: 48795 - DNA, 466 bp, Setaria italica
  Peptide Sequence Number=SeqID_114769
ttcaccctcttttggtgagccaccctgcttttcatcgtccttcttcggtgtttcaaccctttcagtgttaatgttaagcttgccgtttgttgactcatcggtgccattctgcttgccctgtgagaaccaaggcagggtacggataacttcaaatcaggcaaagcataacagttcttgtatagtgaaagtcaaatcatcctagaagaggtaaggcccgaagcttatatgcgacaaatcaaactacatatgaacactccaagaaactgtatagtatatctcgaagagaagtagtaaaacaaagaatgttgttttccagaatagagaagaatccaggccctctaaaatgttcatgaggacgtacgattgtacgaaccaatagcttgcaacatcagtttggacgaactccagtataatagtagtccgagcttatatattcaccacgaagtaatatcatattgaaccactt

SEQ ID NO: 48796 - DNA, 387 bp, Setaria italica
  Peptide Sequence Number=SeqID_114770
attagctacttaattaataacaataattgaacaggaagcacattctaacagataaattggccgcgaaagaggttatactattttgcgaacttcagattcaacatgctggatcacaacaaattcaacaaacagtcaggcagagatgaaaaaccatcttttgtggttacctttgcacttaattcacgtctgttatcttgcttaaccatctccatcagtgctgtctctagttcatcagccctcagaacagctgatcttctctcctctagcagctggcacaattctcccttcaaccagatgacctgatctttaggatcaggcaaagagtcaatctcagagttgacagtgaggccacgatacatatcattcatattcccagaactggtttct

SEQ ID NO: 48797 - DNA, 175 bp, Setaria italica
  Peptide Sequence Number=SeqID_114771
cttgctccacacgcatcagaacctgaagcattgcttgctcctgttcctgtttgtccgatagagcttgccttagctctgataactcttgttccacctcctcgcccccgttcttatccccagaagcttcggcaaaagcgatcgatcgatccatccatctccaactccccaccgccgc

SEQ ID NO: 48798 - DNA, 411 bp, Setaria italica
  Peptide Sequence Number=SeqID_114772
gatctgaacccatcgtcatccacgaacttgcctgatggatccggctcgtcgccagctcctgaaagatagcaagcagcaattcagtgtacatatgcgcatcaaaactgtgccaagtcattatgaaaatttatcagaatggtaggtcaatctggatgttcagttcagtagttcaccgttctcatagattaggactggaggattcctgtacttgtgtatcaggaggtcgagcagtttcctcagagcccatggcgccgggtgattttctaacctgaggccgtcctgtttgatttccgaccatcatgtaaaactttcagctaacctttcttaaaattaagatatacttctgctgagctgaaaagtactttaccgcaccttgttcgttgagctctgaaaatggccctgtggaaaata

SEQ ID NO: 48799 - DNA, 439 bp, Setaria italica
  misc_feature (1)..(1): n is a, c, g, or t
  misc_feature (13)..(13): n is a, c, g, or t
  Peptide Sequence Number=SeqID_114773
ngtattattatcncaaaatcacatccagccatgcaagtacattcatacgcaagatctgatctcatatacatgggacatcacgcgcggcttgaccaatgatcactcagagtaggctccagagccggtcgtcgctgccgccggcctgagctcgccgccgtgaaggaagccggcgtaccaccgcgcggagtgccgggcgtaccgtgtcctgttctcagcaccgaagtcgaccccatacaggccgaaccggaacctgtaggcgaagaggacctcaaagacgtccaggaacgaccatacaaagtagccgtgcacgcttgagccgttcctgatcgagagaagtgttgcttcaatgtagtcctgcaggtaacgtgatctgaacccatcgtctattcctacgtaactttgtccttgtatttggttatttccggttctttcgtttctt

SEQ ID NO: 48800 - DNA, 399 bp, Setaria italica
  Peptide Sequence Number=SeqID_114774
ttgtaactgatgtgcacgaaagccaccagtaacagtaagacatgtgtgaactttccttttttattcctaagctcagtgtgaagctgttggaagagttgctgacattatcaaattccagctttcctctgtcgtcagactgatcttcttgtggctgctgctaagactggaaaaattatcaatatcaagaaaggccaattctgtgcatcctctgttatggtcagctctgcagagaaaataagacttgctggaaatccaaatgtgatggtctgcgagcgtggtaccatgtttggctacaatgatctaattgttgacccaaggaatcttgagtggcttagggaagctaactgcccagttgtagctgatataacacatgctcttactaactaacctagtcttggt

SEQ ID NO: 48801 - DNA, 131 bp, Setaria italica
  Peptide Sequence Number=SeqID_114775
ccaattctgtgcatcctctgttatggtcagctctgcagagaaaataagacttgctggaaatccaaatgtgatggtctgcgagcgtggtaccctgttgaaagttgaaacaaatggacagtggcattgtgcac

SEQ ID NO: 48802 - DNA, 466 bp, Setaria italica
  Peptide Sequence Number=SeqID_114776
agttgtcatctagaagtatattggaagggttgacgctagcatgtttgatgcaaccagaatcagacgagtgcatgtacgctaatgcttttgctgttctgattgcaatctgcaatcgcaattcgaggggaaaacatttggtaccattcaggaggtctgaaagagtactgttagcagcatactcgtgtataaaaattggaacatcaacctccagcaaaagccaaacagtttgataatattgatgtgggtgatcctacgccagaaacgatttgtgcgggcacgtcgaaatttatgtgcaggtgggcggaattaggcacccgccagcacaaaggtgaccggggccgccgggctagtacccgccagcacaaaatggctccgtgttggcgggctacctaagcgcccaccagcacaaatgggatcatcacttcgttaatgaaatgagatctatgcacctcatgtaactacagag

SEQ ID NO: 48803 - DNA, 305 bp, Setaria italica
  Peptide Sequence Number=SeqID_114777
tttaaaatttttttaaatttaactaacgaagtaatagctagactaaaaaaattggaacatcaacctccagcaaaagccaaacagtttgataatattgatgtgggtgatcctacgccagaaacgatttgtgcgggcacgtcgaaatttatgtgcaggtgggcggaattagcacccgccagcacaaaggtgaccggggccgccgggctagtacccgccagcacaaatggctccgtgttggcgggctacctaagcgcccaccagcacaaatgggatcatcacttcgttaatgaaatgagatctatgca

SEQ ID NO: 48804 - DNA, 248 bp, Setaria italica
  Peptide Sequence Number=SeqID_114778
attttcttcgatgcgttaggaaatacatctgcaactgctttctccaaagcctttaggctcattccttttaacatttctggctttagatcaatcgtgctggacccagctaatccatctgtcaagaatcaggccaaggcaatgactgctgcagctgtagaaggcaatatgcggaggatgaactggaagcagaagaatgaattgtttaaaaagaataaagctgccgttatcgcccctaccaaatcagttta

SEQ ID NO: 48805 - DNA, 163 bp, Setaria italica
  Peptide Sequence Number=SeqID_114779
tgaacagatcgacataggaacaaatatggattatacgactacatcaccatcaagtcttgtcaaatctcttggcggtgaagacaaattcagatcatctccaacttttgtttgtgctgtatttgctttgtcatcatcacttgtaatatccacaaatgcgtcagag

SEQ ID NO: 48806 - DNA, 380 bp, Setaria italica
  misc_feature (308)..(308): n is a, c, g, or t
  Peptide Sequence Number=SeqID_114780
actagtacaacaatgggggtgtttttccctggcaaggagattatccaacctacagttgttgattcgggaagttttatggtttggaaggatgaggcatttgaaatctggacagcaggatgggcctgtctgttccctgaggaggactcctcctctaaggagctactaaagaaggtccaggataactactatctggtcagccttgttgacaacgactacatccacggggatctgtttgctgccttcaaggagatctgatgacgctcttacacagtctgtgttgttgttgtatggctaattcccatgtgacngcattcacagcatttgctggaatattggaggctgatactccatacttgttcacagcaataaatgtgagagaa

SEQ ID NO: 48807 - DNA, 253 bp, Setaria italica
  Peptide Sequence Number=SeqID_114781
aagagcgtcatcagatctccttgaaggcagcaaacagatccccgtggatgtagtcgttgtcaacaaggctgaccagatagtagttatcctggaccttctttagtagctccttagaggaggagtcctctagtctgatttttcctgctttctttttggcttattcgaaccaaactttttcaataagagatagccatgctctttccattccctccatgaggaaatggcgcaatggctagattcatgatgtaaaatt

SEQ ID NO: 48808 - DNA, 295 bp, Setaria italica
  Peptide Sequence Number=SeqID_114782
tttggtaggtattgtttcgtaccttattatttcttgggtcttaactagaccaaagagctatattagaaggactctaggttgggatcagtatccgcatggacggtggggagattccaggaacccatcatatggagcacttactgaccaccagttcacaagacctcgtgggcgtggtaaaaagctccaagaggaatgggctgttccactgaaatctgtggaggacattagtgagcgctttacaaatttctgtcgagggaagcttacaagcagcccatggtcagagttggacggtctt

SEQ ID NO: 48809 - DNA, 109 bp, Setaria italica
  Peptide Sequence Number=SeqID_114783
gaacaagtatggagtatcagcctccaatattccagcaaatgctgtgaatgctgtcaacaaggctgaccagatagtagttatcctggaccttcttagtagctccttagag

SEQ ID NO: 48810 - DNA, 108 bp, Setaria italica
  Peptide Sequence Number=SeqID_114784
attcgggaagttttatggtttggaaggatgaggcattttgaaatctggacagcaggatgggcctgtctgtccagatttcaaatgcctcatccttccaaaccaataaaa

SEQ ID NO: 48811 - DNA, 248 bp, Setaria italica
  Peptide Sequence Number=SeqID_114785
acctttaacctaacgaagttagtaagaaatagtagacaatacaatacctgctctagagtcttcagaagcaagaaaggatggagaacaacagcaacagccagccgcctccaccaccaggctacccgaccgcgtcaggtgcagagcagcagggagggcggaaggggcgccgggggaagacgacctctcgcggagagaaaggattcatcgaaggatgcatcgcggcgctgtgctgctgctggatctgcgag

SEQ ID NO: 48812 - DNA, 194 bp, Setaria italica
  Peptide Sequence Number=SeqID_114786
gataagccgccggccttcaccgtgctgcatacagagcgtccattctgaaagcagaggcctccgctttcagaatggacgctctgtatgcagcacggtgaaggccggcggcttatcagtcgcagcacatctcgcagatccagcagcagcacagcgccgcgatgcatccttcgatgaatcctttctctccgcgagag

SEQ ID NO: 48813 - DNA, 482 bp, Setaria italica
  Peptide Sequence Number=SeqID_114787
taatatgtatacgcagagaaggaaaagatgttggcaaattgatagccggcagtgatatactgcaagagtgcagggtacaaacgtgtagtctgaggattttaatatggagtcagagtaaatttctttactgatgttgcttgtgtatgatcatttctgaactccttttcaggataacatcatttcggtcgatgagattgtgccaaatcagatcagttcatccagagtaagtgactgcataaaaagatgcctatcgataaaatatcttacttgtgatgaagtgattgaatacattagagaacatagtctgtttatggaagctgaaggaggtgacacaagattgtgaaatatcagtgtttggagttaaatgtcttctccttaaccaacatgtatgggctgtggacgctacctccagataacatctggattgttcacgcggatcagtcgtggaaatttcatgaaatagaaaataaagaggtaccaag

SEQ ID NO: 48814 - DNA, 252 bp, Setaria italica
  Peptide Sequence Number=SeqID_114788
ctcccgacggagaagctatccattgaaccaagcagggacggaggaacccgaggtggcgtcgtgctcgtggccaccgggagcttcaatcctcccacctacatgcacctgcgcatgtttgagctggcaaaggatgagcttcagcagcgagggtattgtgtgttgggtggctacatgtctccggtgaatgatgcgtataagaagaagatttgaagttgtttaggacctcttaccggctgctcaccggattcgctt

SEQ ID NO: 48815 - DNA, 255 bp, Setaria italica
  Peptide Sequence Number=SeqID_114789
gtcggttttgctcaggcgagcaacggtgcagaaggttcactgctcttccatttcctgctgtagtaagcgtacagcaccagctgcattgctcccaggatgactccaatcccattggggacctgaaaaatcaacatcaaaactcaaaagttggttaaccgaactctcggtgaacgcatctaccaaataagttcgacaatcagttcatgaaagcgtaagctgaaatgagaacgaatcgggtgctcacgtatatgaaag

SEQ ID NO: 48816 - DNA, 268 bp, Setaria italica
  Peptide Sequence Number=SeqID_114790
gtgccgttgacggtggccacgagggtcctgccgccgtcggagacccaggggaggccgtaccagaggcagatgcagcagttgagcagggagagcaggtaggggagcccatcgaaccgctccgtcgacttggccttcaccaccctcttgaacgtcggcctggcatccaccaatcgaacagcaacgccatgatcagatcgacgaaataaacgagcaggagagaaatgaaaaacaaagaggaaaaaaaatcagttggtagcttacaccggcg

SEQ ID NO: 48817 - DNA, 247 bp, Setaria italica
  misc_feature (20)..(20): n is a, c, g, or t
  misc_feature (32)..(32): n is a, c, g, or t
  Peptide Sequence Number=SeqID_114791
cgctcatgaggaaggtgganagggacaagtanaagggcatgaactccacgcactcggtccggatcaccaaaccctgaagaaccaggacgaaacacgcaaaagccgtgagaggtggtcatttcgtccggcggcaaagttagacgaggaagaaatcaatcgagcgctcagcttaggaaagcgtaccatgacggccagtggggaggcaaacatggagatcagagacgccatgctcacgccgccgatgaac

SEQ ID NO: 48818 - DNA, 154 bp, Setaria italica
  Peptide Sequence Number=SeqID_114792
gtaggtaaggttggtagtagggtactaagttagtaagggtctattgtaacttcctacgtctacttcggttccggtatcaccaaacccatgacggccagtggggaggcaaacatggagatcagagacgccatgctcacgccgccgatgaacagct

SEQ ID NO: 48819 - DNA, 255 bp, Setaria italica
  Peptide Sequence Number=SeqID_114793
gtgacattccaatgtcaataacatggaaatgctcattttatcctaatatgttccatttcattaatcacctgtaactgtcgataacagactagtaagtgcattgattctagaatagaccatgcgattgtgcaaatcttacactatgtttctttttttcccttgtcaccactaaactcttttttccctgatagtctatgcaaagggtgatccatcttgggagcgggtacatctacgctttctcaatctttgccggag

SEQ ID NO: 48820 - DNA, 271 bp, Setaria italica
  Peptide Sequence Number=SeqID_114794
cgattcgtgcctctcgcctctccccttccccgctgccgctgcccctcacatccttcccctccgccgccgcaccccacgaccctccggctcggcggctccccggcggtccgcctcgcccccgtgctccacacgggtccacgaccccgccgtggctgcgcttcggtgtgggcggcggagaggaggatgagggccgggagcgtggccgccgtggtggggacgagcgtcgagctgcaccaccgtgccacgcctctgcctgctttccgggtcaccg

SEQ ID NO: 48821 - DNA, 476 bp, Setaria italica
  Peptide Sequence Number=SeqID_114795
acaagctgaccttcaaatcaaatcaaataacaaaaccagtacgcctagactctaataaaatcaacagcgaccacctatgctacataaactgctgtatcaaaacacctcttttaggtaatccttcaaaacaaaactgatacttcaaattatcttaagaggaagaagctcaaaaacagtgtcagcactagggatgcaagttttgcctcctctgggtcattgggtcgacacaaaactcatttaattgaactaatccagatttcaaacaacagaagtgggacaaaaatgaactagttagctgagccactactttgtcgcttatctttcaaagggatctgctttatcattgatttcaggactgagataaaacaaaagctagagaattgaccttttgcgattttttgaataatttgacatagttggttcctcacatctttgctcaatttcataccccgcacctgcaaatcatgatcagagca

SEQ ID NO: 48822 - DNA, 248 bp, Setaria italica
  Peptide Sequence Number=SeqID_114796
gagttcgagggctggagctggttcatcaacctcagcgcctccgattacccgctcatgccccaagatgacatccttcatatcttctcatatattccaagagatctgaattttattgagcacacaagcaatattggttggaaagagtaagcatattcttttctctgttcatttatggctccaaattcttaaccactttttttgttctttattgtgattctcgggttgcatgtgcaggtatcaaagggcaa

SEQ ID NO: 48823 - DNA, 253 bp, Setaria italica
  Peptide Sequence Number=SeqID_114797
tagctgtcgactgacgagggcgctgaaattgtactgaaagtaactgcgaaggtcacctgaaaggagatgtggttgcccttggggttgatcgccggcggcctcgccgccgccggtgcgttggaatccgagccacgttgcagcaggtgtatccccatgccatacttgtgcagcctgcaataatgttttgccttgcccaaataaacatcaaacaagcattcatttccatcggaggtagcagggcaacagtacgaaa

SEQ ID NO: 48824 - DNA, 424 bp, Setaria italica
  misc_feature (1)..(75): n is a, c, g, or t
  Peptide Sequence Number=SeqID_114798
nnnnnnnnnnnnnnnnnnnnnnnnnnnnnnnnnnnnnnnnnnnnnnnnnnnnnnnnnnnnnnnnnnnnnnnnnnncgtttacttcagcatagtggtagcagaatcttcataaaaaatataaatgtgctcgtagctggaattaccgaccaacagagtctataattacttgccattgttccttctgagagcacaagcaattgccagaccaccagcaagggcacttgctgcaaccgcaaggatagctggggagctcctggattgcacatacgccaccgcccaacggaatatgaaatgcgctccacagctcgccttaaaattctccaatgagaagtcattaacggttattttacaagaattgatttcccatgattgcgtcattccatttcggctgctctgtttgccatctttagcactatgtgcatga

SEQ ID NO: 48825 - DNA, 364 bp, Setaria italica
  Peptide Sequence Number=SeqID_114799
attaatgtgttggtattaacatggagaagccccatatgaccatctgtgtgaccaggagcaaaaacaacttgtagttcttggtcacctatgcatatcttttcaccaccagttactgaagtgtactcaatctgccaattccctttcccgatacgattcattgtgttttggtgtgtcagaagaacagcatcaggattgcatctctgaacaacagaaagaccctcaatgtgatcatgatgatgatgtgtgacgaggactaacaacttttttggaagggaattgacaagatctgcaagctgaagatgataaggatgtaattattcaatagaatgggagaaccagaacctgaaaatggatggcttctact

SEQ ID NO: 48826 - DNA, 214 bp, Setaria italica
  Peptide Sequence Number=SeqID_114800
aattgcaacagctgcagcttgagcagcaacagaagttattgttgcagcagcaacaactactttctcatatggcacctcatggacatcccaatcagcagattgatgattcttttggattgaagcatgcttctcttccatctggtgatgctatgaatcttggtcttagaagaatgccagaggctattgaagttgaccgaaagttgcctgtccatgg

SEQ ID NO: 48827 - DNA, 258 bp, Setaria italica
  Peptide Sequence Number=SeqID_114801
tgtccggtagtacgtacggtcggtctaccggggttgtagttgtcttggtagtattgacggcatcccccagtctgcgtgttgtagtcgacggtggcgccgggattggatcggaggcaagggcgtccccggtgtgcgtgctggaggcgatggcggcggcgggattggatcggaggcgaggacgtccccagtctgcttgaggtgacggcgccggcggggttggaggcgacggacggcggctaagtttgggggcgatgccaa

SEQ ID NO: 48828 - DNA, 466 bp, Setaria italica
  Peptide Sequence Number=SeqID_114802
gcagatgcaatgactatttgaaagcacggaagcatctttcagttcatcaagctccaaatatactcactatcactctcaaaagatttcagagtggtagatttgggaaactgaacaagagagttacattccctatggagttagatctaacaccatacatgagtagtactgatggaagtgacctttatgatctctatgctgtcgttgttcatctggatatgctgaatgcgtcattttttggccattacatatgttacatcaaaggttctcgaggaaattggtataaaatcgatgattgcaaggtacactttcactttaatattgttaccacaaaaataaatctgtcataattgcaaatttttcagtttgcttgcttgcttttttgcatatgcaggttatgactgttgatgaggaggaagtacatgctcaaggtgcttatatgcttctatatagcaggagaactgctcgt

SEQ ID NO: 48829 - DNA, 295 bp, Setaria italica
  misc_feature (10)..(10): n is a, c, g, or t
  misc_feature (205)..(205): n is a, c, g, or t
  Peptide Sequence Number=SeqID_114803
tttccgtttntttttctttacttatttcttactaagttctttttatttctattttagtattctactaagcttattattttcgtagttcgtacacaggctgcgtgcatgcacacacaccaccgtcaaagtacgtacacacatacatacccggccggccggatacggtatacgcaaacttatactagcatcgtacatatggggggancacacacgcgcatacgtgacacgtggctcagatccagcagatacgtgttcgttgatggagctcgcgtgaagccggttagtcgtcggccct

SEQ ID NO: 48830 - DNA, 310 bp, Setaria italica
  misc_feature (1)..(33): n is a, c, g, or t
  misc_feature (231)..(231): n is a, c, g, or t
  Peptide Sequence Number=SeqID_114804
nnnnnnnnnnnnnnnnnnnnnnnnnnnnnnnnngtttggtttccgttatttctactattctactaagtctttttatttctattttagatcacaagcttattattttcgtagttcgtacacaggctgcgtgcatgcacacacaccaccgtcaaagtacgtacacacatacatacccggccggccggatacggtatacgcaaacttatactagcatcgtacatatggggggancacacacgcgcatacgtgacacgtggctcagatccagcagatacgtgttcgttgatggagctcgcgtgaagccggttag

SEQ ID NO: 48831 - DNA, 218 bp, Setaria italica
  Peptide Sequence Number=SeqID_114805
attttcgtagtacgtacagaggctgcgtgcaagcacgccagcaaagtacgtggataaggtagacctcgcacacacaaacttacaatttcatacatacggaggacatgcacatacacgtacgcgatacctgcctccggcccaatccagatacgtgcgtcgtcgtcgatctaccaccctccagctaggcacttgtttgccaagttgcttggtccttgtgg

SEQ ID NO: 48832 - DNA, 357 bp, Setaria italica
  Peptide Sequence Number=SeqID_114806
taggtactaaagtttacgacgacaacttacaacggaacgaacgaacgccggggaccctcttccggccgtcgccgcaacagccggccgccgggttcacgtcgtcgggcccgccggagcaccagccgttccagttccactcgagctgctggccgtcgtcgacggagcagacctgcagcagctcgcaatggtgggaattcgagtccctgagtgagtgagcaacaactacttgctttgtcgtcggatcatgcaacgatcacaagcggatcgctcggtcggtccagagcacgtaaggtcgagtccgtagagatgatcgatcagacccaagagcgacggtgtacatagcttcatcggtagatc

SEQ ID NO: 48833 - DNA, 324 bp, Setaria italica
  Peptide Sequence Number=SeqID_114807
ttcgcggacgccgggggcggggctttactcgtccgatggcgccgacggcggcaagttcgcgcacttcacggacgacgacgccggggccctcttccggccgtcgccgcaacagccggccgccgggttcacgtcgtcgggcccgccggagcaccagccgttccagttccactcgagctgctggccgtcgtcgacggagcagacctgcagcagctcgcaatggtgggaattcgagtccctgagtgagtgagcaacaactacttgctttgttcgttcggattctattgtctaacgtattctactaagtcggtattcgtcttcggttct

SEQ ID NO: 48834 - DNA, 218 bp, Setaria italica
  Peptide Sequence Number=SeqID_114808
acaaactatcatcgatggaaataaaatcatagttcgttaaacctacagatacatcaagatattattatttgaaataagtttgtcacaagtgctacactggaaataagagcaactgcaatagaggaaatgaaggacattgaaagtaccttcatcaagcagaaattagttactagaattttcaggaatattattgtttgtgagttatcccgccatagctt

SEQ ID NO: 48835 - DNA, 250 bp, Setaria italica
  Peptide Sequence Number=SeqID_114809
ttgatgtgacatgcagttagaattcaattcatttgcaataatgctcatttatcaacatccacaaaacaatggtactttttaggcagggacttcgcatggtgccgatattcttccctagagagaactgataatagcaaggaagtagtggatgcctcaagtgagaagttcttctcatcaattttggagaggtaaaccccatcgcctcatcttcttatcccccgcctcctcccgccgccgctgctcactcccg

SEQ ID NO: 48836 - DNA, 204 bp, Setaria italica
  Peptide Sequence Number=SeqID_114810
tctacttgttggctcatcctgtcggttcctgagatcactttcctgccgactgcatcaggactgtttctgtcatactctagaagttgataacaacagtcctgatgcagtcggcaggaaagtgatctcaggaaccgacaggatgagccacaagtgccaaaagatgacgaattttcaaggtgctgggtgcccttgctctttggaaat

SEQ ID NO: 48837 - DNA, 398 bp, Setaria italica
  Peptide Sequence Number=SeqID_114811
cttgaattgcataggcttccttgaaaccattctcgatcagtagctcagcaactctcaaagaattaccatcaaagctaccttacacagcataaacttaagttggtaacaaaatggcagcatgataaaagaccaaagggcctgtaggaatttaaatacaatctctttcacaagaagcaaatgtacaacaaatgcagccaaaaaaaattcattaactctgttcatgtagcaaactgagggacaaaaatttagacaacatccatttttaataggataattatgcaaattaaagcttattaaataataaacagaataacaaagttcctccttctattgaatagaataacacagtggtgctcgtgtgaatgcattcctcattctttgagatttgagaaggtaca

SEQ ID NO: 48838 - DNA, 353 bp, Setaria italica
  Peptide Sequence Number=SeqID_114812
gtgtctgaatttgtttagcaacagtctgacattgtctcagttctctaatgggaaccagtaccatccaatgtccaggatgtttcactggaaatttggtctgcatctaccctgccactagttatcttatttagaacagaaattgtgcaatttctatggttgaatgaacacatcaaattttatttggtatgggctatgcacattcatcaaatactgtactcacttattcaattcctttaggcccacgacatgtggctccatgttgatgctgcctatgcaggaagtgcctgcatatgccccgaataccgacatcacttgaatggaattgaagaagcggattcatttaatatgaatgc

SEQ ID NO: 48839 - DNA, 356 bp, Setaria italica
  Peptide Sequence Number=SeqID_114813
agtagtttatgcatcagatcagacacattcttctctgcagaaggcatgccagagaatgtgagagtggtgaaggctgactgcaataaaaattatgctgttgcacctgaagccatttttgaggccatttccacagacttgtcatctgtcttgataccatttttcatctgcgcaacagttggcacaacatcttcatcagctgtggaccccttgcctgagctaggacaaatagccaaggcccacgacatgtggctccatgttgatgctgcctatgcaggaagtgcctgcatatcgccccgaatacccgacatcacttgaatggaattgaagaagcggattcatttaatatgaatgcacat

SEQ ID NO: 48840 - DNA, 252 bp, Setaria italica
  Peptide Sequence Number=SeqID_114814
atacaacatgttttatttgcatatgcaaaatgagaactaatagatacactctctttcttgcaaaagaaaaataatagttatatgttatttctgataatatttgtcaatattcattttctgaatcaaataaggttgcatatttatgttgctggagtctgacattcagagttacttttgttgtttccctctttgcagcacttggtggaggtgtaatccagggtactgccagtgaagcagttcttgttgtacttc

SEQ ID NO: 48841 - DNA, 255 bp, Setaria italica
  Peptide Sequence Number=SeqID_114815
gggtagaatatttttcgttcagtttcattttgttgctcactttgattctgtttcatttaaaaggtatcgtcctggattctggagatggtgtcagtcacaccgtcccaatctacgaaggttatgctctcccgcatgccattctacgtctcgatcttgctggtagggacctcactgattccctcatgaagatcctgaccgagaggggctactctttcacaaccactgccgagcgggaaattgtccgtgacatcaagg

SEQ ID NO: 48842 - DNA, 262 bp, Setaria italica
  misc_feature (8)..(8): n is a, c, g, or t
  misc_feature (56)..(56): n is a, c, g, or t
  Peptide Sequence Number=SeqID_114816
ctgatgtnttgggggatgaatcgaatcaaatcgaaacgaattggaaagctaaagcncctaaaggtacctggcgatgtgagcatgttgcgcagggtgttggagaccatggccgccttcttatcgacgacgaactcgaaaccctcggcgctgatgagcttgacgacgcctccggtgtcctcctcctcctcctcgggctcacgcggagccggggcctctcccttccccatcatcccctctgctgggattggattggatttggtcg

SEQ ID NO: 48843 - DNA, 324 bp, Setaria italica
  Peptide Sequence Number=SeqID_114817
catcaggtcgtatggttgctggatgtaacaagtggggatagttcactacttgtttcatccattcataatacacctgagttgccacaacagttggcccttcaacttcatcctcctcaagtgtcaaggtagtttgcagccatcatcagctccagggttatctcgggctcaattggaaactccgtcgtctccttcccactggagtaatggagcgaccagtagaagtactggcagatcttctcgaggacgttgggtagtagtattcttccgggtaagcggtaccttcgtcccttggtcgttgtttctttcggttagttaatttccgtt

SEQ ID NO: 48844 - DNA, 233 bp, Setaria italica
  Peptide Sequence Number=SeqID_114818
caatatcagaagtatcaatgtttactgatggattggatttttcagttcttgtgcaaatagatttgttaagtcaactcctccaatctctaatctctttgatgctacgtgttgaacagctccttcacaaactggagcaatatctattttcccatgcccaatgtccactgtacatcctgaaatgcgtccaacagcatagagagacaatacagcctgttcagaggcataaaagcctg

SEQ ID NO: 48845 - DNA, 416 bp, Setaria italica
  Peptide Sequence Number=SeqID_114819
tttgctgccactgcagggtgtgtattcatttgatgagaagtcacgctcaatccaggtggatacatttctgtggtccacggcggacctgatggatacatcactgggtattcggggtagggtgcaatgcctgtctgaagaagacatggcgagtgctgagacagacctcgagaggcaggagatgatccgtgggaaatgttttctccggttcccaacactacccttcatacccaaggaaccctacgatgtccttgcaactgactatgacaattatgcagttgtatctggagctaaagatacaagctttattcaggtgaggaactaaactctgaactgctgaaggtcctttatttttgcagttgtaaccaggttccttggtaaatacatctgcatgttcttgattgtctagtttgttaatt

SEQ ID NO: 48846 - DNA, 307 bp, Setaria italica
  Peptide Sequence Number=SeqID_114820
ccttgcacgtctgcacatgtatagcctgctcgcaacgcaagggctgcctgattacctgaaggtcatttgatcgaggctgttgagtcatgcttttgttccctgtgttctccgactttatcagcggtgactgaaccgaagctgactgttttgcccgcagcaataggcagaggctgtacaattgctcacacaccatgtccggtgtgatgggcagagagccgttgaaattgatgtagattaggaccaatgcaagcagtgttgtagctgcagtttcgttctacttgctgcacagaagccaaaaactttcagt

SEQ ID NO: 48847 - DNA, 259 bp, Setaria italica
  misc_feature (41)..(41): n is a, c, g, or t
  Peptide Sequence Number=SeqID_114821
aagaagataaacagtagtgcggaggatcttgttgtaattcngttttactcagggtcgtttctcatgctagtggcggaggtgagagtgtacaccaccccggtgccaaacaagctgaagttgaggaagaagccgcagaacagatggctcctctcacctaggtagaggcgcacggcgtcgacgtaggtgcggttcctgacgacgccgcgctccgggtcgtgggaaatgtagcagtcggcgatgagggaggactgcacggcgg

SEQ ID NO: 48848 - DNA, 183 bp, Setaria italica
  Peptide Sequence Number=SeqID_114822
ttggcgacagctacttctagggaacaagataaacagtagtgcggaggatcttgttgtaattctgttttactcagggtcgtttctgcaagaaaggaatgtactcatgctagtggcggaggtgagagtgtacaccaccccggtgccaaacaagctgaagttgaggaagaagccgcagaacagatg

SEQ ID NO: 48849 - DNA, 468 bp, Setaria italica
  Peptide Sequence Number=SeqID_114823
cattgtttctcggtcaggttacgtaccatcaaacacaagagaggccctctaccagggattgccactaagggtcagaacggctctaccaaatagattaaaagcttcctcagtgcctcaggagggttcggatggagaaatcattgaaatggcttgttcctatggctgtcaataccacctgtgctcgaggcttcttgaggtttagcgaatgggctaaatcggggactgacagagtcgggagacgaccaggccaagcagacccaatcgaaacgctctaccatgccaacaaggcaacgaccgaggatcacatcctggagttggtcgtttggcttcaccaccttgtcaaccagagtaaccggccagcaatgcaaaagaccactgacctgcctctacatctaacaaaaaccgcaaaatgatcatggctgttatccgaaaaggctgtttttctagtggtcagcaaattcacgaagc

SEQ ID NO: 48850 - DNA, 226 bp, Setaria italica
  Peptide Sequence Number=SeqID_114824
ccggtgttgaaaattagcacatcatagaacttggtgacatttacccaatcatcagcagggatatcaacatccactctgtaagttccttttattccatccttctaaagttcgaatttgttaaacctccacccggccatttgtacttcttggcctgttttttctttttgagaaaaacaggattgtacttttgtaagcttcatataataaaatcatgaagctcacttgg

SEQ ID NO: 48851 - DNA, 263 bp, Setaria italica
  Peptide Sequence Number=SeqID_114825
ccgggttggagtcgaggccaggcccggacatgccccggctcgagttcctggagaaatggaatggtcagctgctgagcccagttaccctgttcagttcatccgagaaccagaagaagtacgccgagttcgataacaggttcaagaactccaaggtgctgcaggacctgctcgagaagtccaagaagaacaaagagaagaacgagaggatgatccaggacaagtactgcctgcggggcgccgagtggggcgtcggggactgctca

SEQ ID NO: 48852 - DNA, 347 bp, Setaria italica
  Peptide Sequence Number=SeqID_114826
gatgaagatttccacaaagggtttaataacgtctatgatagagcattggcaaatgctctcagaactatatttaagaagtacaaattttgttcacgtctcctcaaatcttgatgacatttgacatttgcactacttttatgaattctaacagctgatctttaggggcttgatcaaattttaggcatgcactcctttttcgaagatatggagggtgaatatgatatacccaaagcagctaatgcaaagactgttagagattttgatgaggggctaacccgagtttctttggtttcaagtcagtggatgattattactccaattcaagcagctctgattccatcaagatg

SEQ ID NO: 48853 - DNA, 312 bp, Setaria italica
  Peptide Sequence Number=SeqID_114827
acttaggtaattgctgatgaagatttccacaaagggtttaataacgctatgatagagcattggcaaatgctctcagaactatatttaagaagggcttgatcaaattttaggcatgcactccttttcgaagatatggagggtgaatatgatatacccaaagcagctaatgcaaagactgttagagattttgatgagggctaaccgagtttcttttggtttcaagtcagtggatgattattactccaattcaagcagctctgattccatcaagaatgtttgcatacccttattatgcatacaggcggataatga

SEQ ID NO: 48854 - DNA, 148 bp, Setaria italica
  misc_feature (3)..(3): n is a, c, g, or t
  misc_feature (7)..(7): n is a, c, g, or t
  Peptide Sequence Number=SeqID_114828
ccncccnttttcttaacaaaaaatggcagaggtagttgaatatgtccaaatcatgaactactttgtccattaccttttcatcattctcaaagtgttccagcttggagagttttccagttgtaactatttcatttatcttgctcagcac

SEQ ID NO: 48855 - DNA, 139 bp, Setaria italica
  Peptide Sequence Number=SeqID_114829
aatctgcgagctgccgcacctcaagaacttcacctactcgtacaacttcttctgcggcgagccgcaccggtgcctcgaggtgccgcgcatcgacgactcgtgccagcgcacggtggccggtgtggacctcaaccacggc

SEQ ID NO: 48856 - DNA, 344 bp, Setaria italica
  Peptide Sequence Number=SeqID_114830
taaccctttaagtaaacttacctaaacgtacttaaagtaaaattaacctacctaaaggtaagtctagtaaagttgttaacttctaattagtctattagtagtctaagttgtctatttcttttcaatgcatcgacatcgaaatcatacaatttaccacttcagcataatcaatagggttatctgagggaataaatacaaaaacatcttattgattattttgtgaaccttataaaatttccactgggtcacgagaagtgcatcctacagatatcagtaagggagtgtatagaagagccaggttttgaaaagtcatgacacttaaatacatttatgaaagataagtt

SEQ ID NO: 48857 - DNA, 394 bp, Setaria italica
  Peptide Sequence Number=SeqID_114831
tacgacaaccaacggaattgttcggtccctggaagaagattgggggaagcgggaagggagcgagctcggccgggatagttgcaggctaactatgctttaatgaagcatgggttgttttgaagaagtttcccaggaaggccctcaaaccaatcagcacactgacgagcgctccatatgcttacatgcattttctgatctatcacacgttccgccagccactttcatttatcttttaaaggactgctatgcgtatggtatgcctacatataatttgcatgtttcttagacttccatatttcactatctatgtttcttcatctattggaatcatagctgcagctggttttacttcactgcaccgcggattttctaaaagagcttgtgaagcattcca

SEQ ID NO: 48858 - DNA, 319 bp, Setaria italica
  Peptide Sequence Number=SeqID_114832
gagcgagctcggccgggatagttgcaggctaactatgctttaatgaagcatgggttgtttgaagaagtttcccaggaaggccctcaaaccaatcagcacactgacgagcgctccatatgcttacatgcatttctgatctatcacacgttccgccagccactttcatttatcttttaaaggactgctatgcgtatggtaccaacaaagcaacctcaaagtttaagatccttctgcagctggtgaaagcagcattgcataatgggccacagccaggccctttcacatatgctgtccagtgtatgtacattgtacctttgct

SEQ ID NO: 48859 - DNA, 340 bp, Setaria italica
  misc_feature (260)..(260): n is a, c, g, or t
  Peptide Sequence Number=SeqID_114833
tacggttttgttacgtagtaacttcttttacctattgtaaactttctatttgtaagtctagtatttgtctattcccttgagcctttctccatctctcaatgtttctttgtctacactgctaccttggtggaaactgaggaaagcctcaaggttagcctgaagctcactcagttgtgagtacttgctgtctagtgtcagtttggcatcaacaagcttcatctgtaccctttcttcacgccaaacctctgccattttgaacntcttcctttcttcctccacctcatctctgaccttcattgattcatgcttcaaagcctcaacctcagcctttgtcatctgc

SEQ ID NO: 48860 - DNA, 111 bp, Setaria italica
  Peptide Sequence Number=SeqID_114834
aaagaaacaatttccttacatggtggatccaaatacaagggtcgccatgtatgaatcggacgacatcatacaatacctgccgtgattgctgtcagtagaccgagttttagc

SEQ ID NO: 48861 - DNA, 166 bp, Setaria italica
  Peptide Sequence Number=SeqID_114835
cctgctactacatcagcgggagctacatgacgcaggatcacggctactgcatcaacaccaagcagatcagagacctggcctacgccgtctccttcctgccctactactggagagccatgcaggtaacagcaaggtctaccacgcagtagagtccgttcatcttcat

SEQ ID NO: 48862 - DNA, 297 bp, Setaria italica
  Peptide Sequence Number=SeqID_114836
gtcggtagaagattgcagattctgtaggatttggatcgcttgtttatttgcatacgatcatacctgccaaatatcatctcgtcgagatcatccaggatatcatcatccccacctgaccttgcccttgcagcagctggttttctgaccagggcatcttcattgccaacagcagcggaatcttcgtgttccgtggcaatcggtataaccactggacgttgttctgcattctccgaggccctgggttgcttcatctcttcgtatttggacagcactttctggatctcatcgttcacactc

SEQ ID NO: 48863 - DNA, 418 bp, Setaria italica
  Peptide Sequence Number=SeqID_114837
gtttgttcagttgttaagttgctgcactctctgaatcctctggtttcatgggtgagcccatgaatgtattggatggtgaattatgctctgatggaaataaacaagcgatccaaatcctacagaatctgcaatcttctaccgactgagtgcagcaccataaaatagcaagtactggctgcaatattggaaaggtgcttaaaagctgatgagatcatctttcttcggatctggctttttcggcgcttcctgggaactgctacctcccttcttgccaaatatcatctcgtcgagatcatccaggatatcatcatccccacctgaccttgcccttgcagcagctggtttctgccagggcatcttcattgccaacagcagcggaatcttcgtgttccgtggcaatcggtataaccactggacg

SEQ ID NO: 48864 - DNA, 379 bp, Setaria italica
  misc_feature (36)..(36): n is a, c, g, or t
  Peptide Sequence Number=SeqID_114838
gcagctataccaccacccatattccctggacagccngaaagtgcggatggcactggaagagaagggcatcgactacacatcctaccacatcaacccactcacgggcaagaacatgaatgtggacttcttccgcatgaacccctccgcgaagctccctgtcttccagaacggtgctcatgtcatctatcgtgccatcgacatcattcagtatgttcttccttcacattggacgtacctgagacgtgtacattttttctgctgctcttgaagcagaaatgtttatctatgtgcttcatgtttccataggtacttagacagacttgcggtgcatttaagtggtgagatcccccctgtgaatactgaggttcaccaatggatg

SEQ ID NO: 48865 - DNA, 267 bp, Setaria italica
  Peptide Sequence Number=SeqID_114839
cggagtcgccgctcgggagccccatgtccatactcgctccaggcgacacgccggagacggtgaagatgctgacccgccactgaacaactcatggacggccatgccgtcgccgccgctagcttgcattgggaggagagagaggaaaaaaaatcattcgagatgcagaagaaaggaatccccgccagcctcggatcagaaaaaggaggagaagaaaagaatttctgttactagggtttggtgggccgccgccttccaccctatcctatc

SEQ ID NO: 48866 - DNA, 240 bp, Setaria italica
  Peptide Sequence Number=SeqID_114840
atcattagagtttcgtttcgatctctgaccccgttcgttcatgcaggcgacacgccggagacggtgaagatgcggctgaagcagtgggcgcaggtggtggcgctatccatgctgacccgccactgaacaactcatggacggccatgccgtcgccgccgctagcttgcattgggaggagagagaggaaaaaaatcattcgagatgcagaagaaaggaatccccgccagcctcggatcagaa

SEQ ID NO: 48867 - DNA, 257 bp, Setaria italica
  Peptide Sequence Number=SeqID_114841
cccgccgcgccgtcgcccgctgatctcgaggacgtgtccggccccgcgccgtcggcgttcgacgtgaacgcgagcagccggcagcaccagcactggggcgtcgccgtcctgcagaccgccatggctgctcttttgctatcgctagcgtgaccggtgagattacccgcgggatctgtcataggaaccattggattgtggcttgtgataattttgacatgcttttgtacccattttttcgtttatcttggaataaaagg

SEQ ID NO: 48868 - DNA, 237 bp, Setaria italica
  Peptide Sequence Number=SeqID_114842
aattttgtgcatggcaattcctattgtgtcaccatgcctagattcagaaagttgcaaagtttcactttatggttgagtgatattaacttcatgcagtggtggaacgattgctggtctttgcttttaggatcaagattgagcagcttaaaggcaaaagtacgatctacccatctttgttgtgtatcctgttgaagttctcagactaatcatgggcttgtaagataggtccatgcattc

SEQ ID NO: 48869 - DNA, 242 bp, Setaria italica
  misc_feature (40)..(40): n is a, c, g, or t
  Peptide Sequence Number=SeqID_114843
atttgcctcgtgtttgattaataatatgtaaacataacangtttatgggtctggagtcaactgtcaagttagcaagaatacgaaattaaatgctataagggtctagatactgtctcaggaattcattcaagtgaattcagtttagaaagtgcaacttgatttttattaatcttactgttcaggggatatattgaggtgataagggagattgagcagcaaattcagcaatctgcagatgctca

SEQ ID NO: 48870 - DNA, 331 bp, Setaria italica
  Peptide Sequence Number=SeqID_114844
cagacgtggtggtagctgtgtgtgtgaaactgcgaatggtggacggacggtagcagtaaatggccatggtgggcggccgccacggcggacggacggatagggatcagttcttggcggccaccgcgtctgaggaagaggatgaggagaagatacatctgtttccgccatcaagaacacgaggaggaatcgaggcacgagacacgagagagagctcgatactccgaccaccaccatctgttcaatttcgttctcaataatccacgcgtgttgtttttaattaattccctgctgttataaaacttgaaaagtactatactaccacatcgatacc

SEQ ID NO: 48871 - DNA, 263 bp, Setaria italica
  Peptide Sequence Number=SeqID_114845
ggaggccatgctggtagctagtggtaggtgggtggtgattatggaggagcaagagagaggtcatctcagaacttgatggagttgttctttcctctgtagcacaggtatatctctgtttcttcttaatgcaatgttacacagttctgcgtgtttcgaggaaaaagggctgtcagtttgtaaatttggattttgagtaaatatgtcttaaatgttgccagattcatacaagattttaccctggtttccaacttggtcgattaaaa

SEQ ID NO: 48872 - DNA, 261 bp, Setaria italica
  Peptide Sequence Number=SeqID_114846
tatttactttatgaaattggtcgttttgtttcttcactgttggcattgcatactgtagatatgtggcgtatcaccagaaaattgtggagggattaaggttggcgatgtcatctcagaacttgatggagttgttctttcctctgtagcacaggtatatctctgtttcttcttaatgcaatgttacacagttctgcgtgtttcgaggaaaaagggctgtcagtttgtaaatttggattttgagtaaatatgtcttaaatgttg

SEQ ID NO: 48873 - DNA, 516 bp, Setaria italica
  misc_feature (32)..(32): n is a, c, g, or t
  Peptide Sequence Number=SeqID_114847
gtgtattttgtctttgcacagtttacttcaangtttcttgataaaatggacattgcagtgggtacaagaatacggtgacactccaggttagtttggctactacaatagtaataatagctttgatactatgttaatcttgccacgtataattaagtaggcatttgtacaaagacccacggatcagactacatttgtgtcaaacctgaacgcatgggaggtttcctctaataaatgcgatgagacattccaaaacagatgggcattgaggagaaagaagctatgcgatggtttatgtgagcactaagcagttgtagtgacgacaatctggaggtaatgcaagtacatccttagataatggtggaatgggtggaggagcatgttgcacagtagtttcttccttttcttttggtgcaaaaccacaaaaaagggtaagaaatagtcaaaagtccttaggtactaaagtctaaatttattattattattggttgcaaaaccacaaaaaaggtgagcattgta

SEQ ID NO: 48874 - DNA, 208 bp, Setaria italica
  Peptide Sequence Number=SeqID_114848
tttttttttttttggtcagagaagttactcagataagatctgtagcagatagtactaccatgctctcatgttccgattgagatctcaaacatccacgctacaaaacaaagcaggagccaacccactctctccctctctcgctcgccgtctctttcctcgcgccgccgcttcgcccagcaaacgcgcgtgcgccctcctctcatctcgc

SEQ ID NO: 48875 - DNA, 372 bp, Setaria italica
  Peptide Sequence Number=SeqID_114849
agacgccacctttcctcctcccttgcctggctgcctcgttgcctccgccaccgccgcccggagcccgcagccgtcgacctcccgggtccccggccgtcgattcctccgctaccaactcgcggctgaacttcaagatgatggcatccacactctcaacttcatgcactctcagaggcaactttggcattcaagtctcggttgctgcagtgaagagccctttatctgcgagttttctcagccacccctctgtgacctctagcctgaaaacctccaggaaacttggtcttgctgcaatggcttgttcttactaaggttgtaagtcttcgttcttctacctagtaaggggttacgttgttcttattgttagtttta

SEQ ID NO: 48876 - DNA, 175 bp, Setaria italica
  Peptide Sequence Number=SeqID_114850
cgccgcgctgcccacggtcgaggtggccgagcccgccgccgcctgcgccatctgcaaggaggacctgcccctcgcctcccaggcgcggaagctcccctgcgcccacctctaccactcctcctgcatcgtcacgtggctcgagttgcacaactcctgccccgtctgccgcttccgc

SEQ ID NO: 48877 - DNA, 374 bp, Setaria italica
  Peptide Sequence Number=SeqID_114851
agtcgtattggattgcccattagaatccgcatgatgaacttgtcggagaaaaagcattctgacatatgaaccgaaatatcaaccaaacattaaactcaagaacttgtacggcattatgatatccgtatcactggaagcctcctattcttacgaactcaagtcaccgatggacgatggccacacaagcacaagccgtcttccacactagactttgacttgccaacaccggcaaagaatgcacgcatcgaagttgcgtggaaaaataaactagggcacaacaagccgggaacaactaggcatagccatttactactactaaacttctattcgtactttctttctaggtatattattgttatttcctaacctaccta

SEQ ID NO: 48878 - DNA, 264 bp, Setaria italica
  Peptide Sequence Number=SeqID_114852
aatctccagccagctgacgccaccaaatctcacatctcagtttatggtgcctgcagtgtgctgacccccatggcgtcgcccatcaaggaatccttctgtttaacccaacgaggcaccgatttgagatgatgacaggcccaattcctcgccgtagccttcccaccaattggcctaaataaagccccgaattgaccttttgcagattggaataagaggtaggtgcctggaatttttaggtactgtagtataggaacaggtggggaa

SEQ ID NO: 48879 - DNA, 240 bp, Setaria italica
  Peptide Sequence Number=SeqID_114853
aacctccgtcgccaaatcagtttctgtctgtgggcacaccaagaatctccagccagctgacgccaccaaatctcacatctatgagcagcaataatggcaaatctcagtttatggtgcctgcagtgtgctgacccccatggcgtcgcccatcaaggaatccttctgtttaacccaacgaggcaccgatttgagatgatgacaggcccaattcctcgccgtagccaagaaacggccggcagg

SEQ ID NO: 48880 - DNA, 339 bp, Setaria italica
  Peptide Sequence Number=SeqID_114854
gttcttgaagttctcccagacagacgcacgagcacctcttgcatagtaaccaccctccggatcgttgctggtgtcgtagaacagaccacggaagtacacaaagatggatcgaggcgtgtctggggggataaggtgagcctgcattttctggggaggcgcaaatggtgggattgtgatggatccgtccttcaggcagacatggttcttctgtccaaacgtctgaaccagtgtcgcacgctgaagcaagggaaggatcccccgtccaattgctttctcttcctgatagttggtaagtctaagtctacctaaagttctattgttggttgttgtactaaagta

SEQ ID NO: 48881 - DNA, 241 bp, Setaria italica
  Peptide Sequence Number=SeqID_114855
aggatgcaatgggatggaagaagaacaagaggcagatatagaggtgttgactctatcacttgtagacatagagatgatttaccttgcatagtaaccaccctccggatcgttgctggtgtcgtagaacagaccacggaagtacacaaagatggatcgaggcgtgtctgggggataaggtgagcctgcattttctggggaggcgcaaatggtgggattgtgatggatccgtccttcaggcaga

SEQ ID NO: 48882 - DNA, 200 bp, Setaria italica
  Peptide Sequence Number=SeqID_114856
cccgggcagaggaagacgttgtcaccgtgcgggcttgaggaagacgttgtcaccgtgcgggagcttgcgcgcgagcccgttcaggatctggtggaatgcatctcctcaagcccgggcagagggtcctgaactggaccgctggaccaccgggtgacctgaagccttggtagcatctggcataaatctttgtcttttttcct

SEQ ID NO: 48883 - DNA, 121 bp, Setaria italica
  Peptide Sequence Number=SeqID_114857
ctgacctgaagccaaatgcagccatggtaattcaaaggcgcatgtatattatcatgtctgcatagtgctgaaatgaagatatatagtatagcagctataggtaaagaacatacaaaaatgt

SEQ ID NO: 48884 - DNA, 403 bp, Setaria italica
  Peptide Sequence Number=SeqID_114858
gtaattttgtgttactttttggggtttaaaagtaaaatgaacattctagtgacttgtgatgataaacacagagatatccattttattccgtgtagtgggggatgctactgtcataatcttttgagcggtgtatccttgttcccttttcttcttgataagcatgtagtgccgatagaggtctttgattcttcatctcttgatgcatagtcaagtagacaatttgatagaagagtaagcttgatacggtacttcatagcttgagtttagtttggtttatgcagcctgaccttactttcacttatcttacgatgttgcctatgatgtttcacaggcaatcaacatcaagtcggtctctttctctggtttaaggaaggataatgttgccttccgcctgcagccagtg

SEQ ID NO: 48885 - DNA, 239 bp, Setaria italica
  misc_feature (9)..(9): n is a, c, g, or t
  Peptide Sequence Number=SeqID_114859
ccaccgtcncctttttagtcaggacagcagactgcaaatctttgtgctgattcattggacactgttgagattgttatgggccttgaggaggctttcgggatcagtgtggaggagtcgagcgcgcagtcaatcgcaaccgtggaagatgctgctaatctcatcgatgaccttgtcgccactggtgcaaagtcgtcctaaaatctagcagggaaaggggcatagaacaagggatgccctgg

SEQ ID NO: 48886 - DNA, 399 bp, Setaria italica
  Peptide Sequence Number=SeqID_114860
ctgacttatcatttagttagttaaaagttaaattattgtggccgtctacggagaaggagaaatgctctatgctcctcagttgttcaaagtgagaaaccaatgtgatacctgcataccttgttcgcaagccactgatgctgtcatcaaactccagacatgctattttgcatctttaaatgcaagcgtgatggagtctcgtgtattctctgtgccatccgacaacacagccatcgactcaatgttaccgtgaagcctgtaatggcacacaagctccagtcgagccccagagatcccggtccaggacggcacctgtcgacgaagaagactcccccatccctccggcccccgtcgcggcgtcagtcctcacggcgtacacctcgagcacgttggccgccgcca

SEQ ID NO: 48887 - DNA, 189 bp, Setaria italica
  Peptide Sequence Number=SeqID_114861
cttggaagcgcatcgatcactgttgctacaaatgggcctgtcagtcacattagcttagtagattgatatccagatctctctgagggtggaaggcatcgccagcagcaacagtaactaatcacagcccttgcaacaaagcgtggatttaactgaaatggtaattacacacaagaaggccatcacacatac

SEQ ID NO: 48888 - DNA, 232 bp, Setaria italica
  Peptide Sequence Number=SeqID_114862
tacaagcctggttacactgctccaccccaggtgcatcatgatgaaactaccatagagataagtggtggagattggaccatctctatggtagtttcatcatgatgcacctggggtggagcagtgtaaccaggcttgtacgactgatggcagatttcacaggttatgtctcctttctcattgcaccaacgttgcacacattccctgtgggcatacttgaggctaccgctgcacg

SEQ ID NO: 48889 - DNA, 234 bp, Setaria italica
  Peptide Sequence Number=SeqID_114863
acatctggtatgcacaatgcactcacaagacgggcctgctgctgattgttctattggtttggttcaggctgaggggaggtcggagattctggtggtgctactgcaaattgcattgttcttccattccggtgcagaatgattgccacttccgttggtaatagcattgcttcttcctgatgtatcgaatgaaaaacatgaactgttaatacatatattaacagaatggagatacac

SEQ ID NO: 48890 - DNA, 215 bp, Setaria italica
  Peptide Sequence Number=SeqID_114864
gcagagtaaattgaattgaaaagatgttgatctttctatggatattatgacttcaaatattagaggttaaaagagtccgctttctagaatagaaactacagcacttacaatcagaaatatagagcggcaaaatgcagcagcattgttgtttgttgcagtatattcatcatactcatcttcaagtaaacggtgttgagcagcagccattgaccaag

SEQ ID NO: 48891 - DNA, 263 bp, Setaria italica
  Peptide Sequence Number=SeqID_114865
cttgcccgtcggaattcgtttagctgttcaattgatctcctctctttctctcgggctgcattccattctattccccgtataataatatccggtccttttggtgcaaccgtgcaagggagtgaagagctgaaaatggtagtctaggccctgtacaaaggcttgaagatggcaataaaactcagctcccctcttgcttggcatgttgtaatccgaatctgactgtcggcacttgcaacttacttttagtaattaactaaaaaaaa

SEQ ID NO: 48892 - DNA, 227 bp, Setaria italica
  Peptide Sequence Number=SeqID_114866
cgcccatccatccatccgtcagctaggtcacagcaggtcaggcatgcatgcacctccgcccccgctcccggagatgcccgccgcccacctggggagcatggtgcaaccatccttggtatcagaatatgaccttggaggagaaggggacctgttcaaagctccagaagtcatcatcgaagaaccgttgctcagccttgatcctgttgcagctgctatttcaatgatgt

SEQ ID NO: 48893 - DNA, 412 bp, Setaria italica
  Peptide Sequence Number=SeqID_114867
accgccatgactagaagagaaggtcgtcgcagcagatcggcagcgcatggccacccacaaattctagtcttttcaactgctgagtccacttctggtggttctatgtcttcaaattcacgggaagaaggggatcatgaacatgctcctgcagtaatttctgctcgcccattgcctattgtggactctacagacgaaacagctgcagacacatctgtgcatgacactgtcttggctaataatggccctgttatgtcaaataatagagtttctaggaaccaatcttcacctgtcagccaagatgaagccggaccatctgacgtgcagtcattctcagactcactgaaatcacgcctgcaatcagtttcaacaaagtacaaggattctataacgaatagtacacgtggatggaagg

SEQ ID NO: 48894 - DNA, 475 bp, Setaria italica
  Peptide Sequence Number=SeqID_114868
acaattagctgctcatgagaaatacaacattgatgctggtgatggtctgatagtggaaagcaagtgaaattgatagaagggatgaaaatggtgaaaacaatgcatcagctgacacgttgagactacatgcattatatgatccacgacacagagagccttcttactgcaatgcagatcgtgtcagttggtgggagctgacagtattggcttcacatgtgcacccttcagtttctactatggccagaacattgctatctggcaacaatattgtttatagtggcgatccgctgacagacctatcacttcctgccttccttgacaaattcatggaaaagaaaccaaaaggaaaccgcatcgctgaagaaaaatggcatggtggatcacaaattgccccagctaaaaagcttgacatgaatccttcctctttgaccttaaataaggggaccaagaacttagttacaataataagaaaaca

SEQ ID NO: 48895 - DNA, 152 bp, Setaria italica
  Peptide Sequence Number=SeqID_114869
tgatggttctgatagtggaaagcaagtgaaattgatagaaagggatgaaaatggtgaaaacaatgcatcagctgacacgttgagactacatgcattaatgttgtatttctcatgagcagctaatttgtcattatgtttatctagcactgctg

SEQ ID NO: 48896 - DNA, 251 bp, Setaria italica
  Peptide Sequence Number=SeqID_114870
cgccgtcacccagaagctgcaggagaccttcaacgccgcgccgggcacgctccgcctcttcttccacgactgcttcgtcaggggctgcgacgcgtcggtgctgctgtcgggccccgacgacgagcacagcgccggcgccgacacgacgctgtccccggacgcgctggacctcatcacccgcgccaaggccgccgtcgacggcgacgcgcagtgcgccaacaaggtctcctgcgccgacatcctcgccctcc

SEQ ID NO: 48897 - DNA, 441 bp, Setaria italica
  Peptide Sequence Number=SeqID_114871
agtgtagcaggactgaatggatatatatagaagaaaataatcaacttcttaactcaaatattaggttctccttattatctgtaatattatgaacaactgattagaatgtactgaagaaaatcttcaccgagccttttccctttgtaacatgtgctctgattactatgaatctcaaagaattatattgaattgaagatgttcctatcttaccacaattttttcttatctcagtcctgtcagaatgagcaagtacatcctatcttgtgcatttattacaggtaatgaatcttattggagatgttagaggaaaagtggctgttatgatggatgatatgattgacacagcaggaactattgccaaaggagctgagctactgcatcaggaaggcgctcgagaagtatatgcttgctgtacacatgctgtttttagcccgcctgcca

SEQ ID NO: 48898 - DNA, 265 bp, Setaria italica
  Peptide Sequence Number=SeqID_114872
cttgattatctcgccagcaagacaatatgttcaaatgacttggtggttgtatctcctgatgttggaggtgttgccagggcacgtgcttttgccaaaaagctttcagatgcacctctagctattgtagataaaagaaggcatggacacaatgtcgctgaggcaagtattattgtactatattatttgtttaaacagtgtagcaggctgaatggatatatatagaagaaaatatcaacttcttaactcaaatattaggttctcctta

SEQ ID NO: 48899 - DNA, 236 bp, Setaria italica
  Peptide Sequence Number=SeqID_114873
aagctggtgctaaccgtgtacttgtttgtgatcttcattccagtcaagcaatgggatacttcgacatcccagtagatcatgtttatggtcaggtatgtactgaagcatgctgcttaaaatcaatcaatgcctttaaaacttatgtgtgatggcattcgttcttcttacaattgttttctattttgcctctttgaattgtcaagcctgttattcttgattatctcgccagcaagaca

SEQ ID NO: 48900 - DNA, 346 bp, Setaria italica
  Peptide Sequence Number=SeqID_114874
ttaagtaccttagtacctacctaaaacttctagtaaacttgtctaactactacttgacacacaaaaccacaaaatttagatgatgccgatcttgttggccacatcaagagcatcgtagtctggtgtaagcttcacgtaagccttcttcttcccatcaggcctgatcagagtgttgactttcttcgcctggatgtcatacatcttcttgacggctgccttaatcttcttcttgtccgccttaaggtcaacaatgaagacaagggtgttgttgtcttcaatcttcttcatcgcagattcagtcgtgaggggggtacttgaggatttggtactggtcaagcttgtccct

SEQ ID NO: 48901 - DNA, 283 bp, Setaria italica
  Peptide Sequence Number=SeqID_114875
aaactttaacttaacgaacctaaggaatagtacaataacaatcttcttgacggctgccttaatcttcttcttgtccgccttaaggtcaacaatgaagacaagggtgttgttgtcttcaatcttcttcatcgcagattcagtcgtgagggggtacttgaggatttggtactggtcaagcttgtccctcccaggtgcactgattcttgggtacttggggtcccttggcttcttaagggtccttggccggtggaacgtcacagatgtgcggatcttcttgaccttt

SEQ ID NO: 48902 - DNA, 358 bp, Setaria italica
  Peptide Sequence Number=SeqID_114876
cgcctctggctgcaatttggaatgctaagacacttgaatcaacatcatggtacgagccatcaaccagcactgctcggaagtccacaactgggtaaccggcaaggacaccgttgggtaagctttcttccaatcccttcataactcctggtacatattctttgggcactgaccctcccttgatttcactcttgaattcgtacccacttccagcttccaaaggttcaaagcgcacaataatgtctgcaaaactagacccaagaataccaaccaagaactagactttttagtaggaacgtaattagtaacttactagacgaactttaggaaaattaactttacaacggttaagttagaacta

SEQ ID NO: 48903 - DNA, 354 bp, Setaria italica
  Peptide Sequence Number=SeqID_114877
aacagtttcctcatctggttcaattccttcaagatatttctccataacttcatcatccaattcaataatagtttccaacatctgaacacgatagtcttcagccatctcttggagattagcaggtatgtcttgatattcaaatttcgcacccagctcctcccctgtccatacaatagctttcatcctgactagatcaacaactccttggaaactgtcctctgaaccaataaggcaactgaaatacaaccaagaaggtttaggacaacccaaagtttagacaaactaatacaatagtactactaagttactaaaagaaagttaagactaaccaaaaggaacgaaataaccaattta

SEQ ID NO: 48904 - DNA, 263 bp, Setaria italica
  Peptide Sequence Number=SeqID_114878
ggttgatggctcgtaagtccacaactgggtaaccggcaaggacaccgttgggtaagctttcttccaatcccttcataactcctggttcatatgttctgaatgcaaacaaagataaaaaggaaagaattggaaggcttctagaaatgcatgcaaacagtaaggaagatataacagttgctgtgactggggacatagtagcgcttgctggcctgaaagacacaattactggtgaaacactatgtgaaccagataagcctgtagtg

SEQ ID NO: 48905 - DNA, 261 bp, Setaria italica
  Peptide Sequence Number=SeqID_114879
tgctttttgtggacgtattgtacttctgcgactttggaaatactttcacggtagttgacttgtggagctccaacgtttgcttcaaccctgaactctctctttagtctgtctacaatgatatcaagatgtaattctcccattccttcaataacagtttggttggtttcctcatctggttcaattccttcaagatatttctccataacttcatcatccaattcaataatagtttccaacatctgaacacgatagtcttcagcc

SEQ ID NO: 48906 - DNA, 247 bp, Setaria italica
  Peptide Sequence Number=SeqID_114880
ggcgttgatggcgagggcgggggcgctgtggccggccccgcagccggactccgcccgcgcccgcgcaagccgcggctctcggtcgtcgccatggccggcagtgatcgccaagtgcccttggaggattatcgcaatatcggtattatggcccatatagatgcaggaaagacgacaactacagaacgcattctgtattacactggaagaaactacaagattggcgaggttcatgagggaacagctacga

SEQ ID NO: 48907 - DNA, 247 bp, Setaria italica
  Peptide Sequence Number=SeqID_114881
ggactccgcccgcgcccgcgcaagccgcggctctcggtcgtcgccatggccggcagtgatcgccaagtgcccttggaggattatcgcaatatcggtattatggcccatatagatgcaggaaagacgacaactacagaacgcattctgtattacactggaagaaactacaagattggcgaggttcatgagggaacagctacgatggattggatggaacaagaacaggagagaggaataaccattacat

SEQ ID NO: 48908 - DNA, 242 bp, Setaria italica
  Peptide Sequence Number=SeqID_114882
caccatccaacaccctgagagcacgttcaacctcaagagtgaagtcgacatgcccaggagtatcaataatgttgatcctgtgtttgttccagaaggccgtggttgctgcagatgtaatggttattcctctctcctgttcttgttccatccaatccatcgtagctgttccctcatgaacctcgcaatatcggtattatggcccatatagatgcaggaaagacgacaactacaagaacgcattc

SEQ ID NO: 48909 - DNA, 246 bp, Setaria italica
  Peptide Sequence Number=SeqID_114883
cgcagccggactccgcccgcgcccgcgcaagccgcggctctcggtcgtcgccatggccggcagtgatcgccaagtgcccttggaggattatcgcaatatcggtattatggcccatatagatgcaggaaagacgacaactacagaacgcatttctgtattacactggaagaaactacaagattggcgaggttcatgagggaacagctacgatggattggatggaacaagaacaggagagaggaataa

SEQ ID NO: 48910 - DNA, 171 bp, Setaria italica
  Peptide Sequence Number=SeqID_114884
gcaatatcggtattatggcccatatagatgcaggaaagacgacaactacagaacgcattctgtattacactggaagaaactacaagattggcgaggttcatgagggaacagctacgatggattggatggaacaagaacaggagagaggaataaccattacatctgcagcaa

SEQ ID NO: 48911 - DNA, 320 bp, Setaria italica
  Peptide Sequence Number=SeqID_114885
ttggtgcgcactttcttcttcgttgcctttgatcttgaacggtttgttctgcatgtagtgaaggagtttgaacctttgattcagaagccatatacaattgtatacttgcactctgcagcatcattacaaccggaacatcttgttgaatttccaggcaaccagatttaggattcatgaagcgattacaacaaatacttggacggaaacatcagcgcaaccttcatgcgatttatgttctccacccaacattgggattgagaacagctgttttggcaatgcaagaatagttttagttaagaataggaagaaggttacttaga

SEQ ID NO: 48912 - DNA, 352 bp, Setaria italica
  Peptide Sequence Number=SeqID_114886
agttgctgctcctgcatctgctgtggtgtcaaaggtgtcctcggagggaacataggaacctgtgacatgtattgccctaccccaggtgatgcaccaggtggcgccatctgagggcggcttacagcagtctgtggctgggcatctgcgattgcagcaagatacaagagattcttctgaagctgtgtttgatacctgaaagtttcgtggaaaaataaatttactatgaaacagcatccatttcagtacagttgtagtcatatttacataacaagaaagtgcttgagtgagaacttgttagatgcatttacatactaaaatgtatataacagaaagtagaattagaaaaaactct

SEQ ID NO: 48913 - DNA, 338 bp, Setaria italica
  Peptide Sequence Number=SeqID_114887
acgtagggaaggggtacgtagggaagaaggtacgaccgtaggtaggaacgtaggaagacttaggaaggaaggtttagtacaataaactcaatgaacaatttgtggagaaccaatctagcaagccagctggcctaaaggtggagatagcagatgaggtcccagatgcaactgaagcaaaggaggctacaccagtgagcagtgccagggcttccatcaggaacattgacttaaatttggatccagctgaagaagatgatgaggttgcagtgccacccgaagcccagccatcagctcctgcaactgatccagctgcagccaatttaggactgactgctcca

SEQ ID NO: 48914 - DNA, 395 bp, Setaria italica
  Peptide Sequence Number=SeqID_114888
tgcttcgtgctgggctgacctccgtggaggtgctgcaccgcttgaggaagccgtcaagcgtcttctgctgctttgaggggcttggcctggagtcgatctgggaaacatccagcgtattctcctgcccatccagcatctgtcccagacttttcaagtttgccttgaacagcgtcccacataagatcatctatagtgtcatttgagagaaggtaataaatgttgactgatgaaacttgaccgatccggtgggcacgatcttcagcttgaataatgtcgccaggagtccatgataactcagcaaagattactgtacttgctgctgtcaaagttaacccgtagcctccagctcacagcttgtcccttgtattgttctattcctttatttttggtaaatt

SEQ ID NO: 48915 - DNA, 238 bp, Setaria italica
  Peptide Sequence Number=SeqID_114889
tcgactgggggccgtccgcgtagaagaactccagctgcgcgatgccgcagaacacgtcggagcacgacaggatcacgaactgggggagctgccacccgatgctcaggttgcccccggcccgcacgcggcgcagccgcagcgtctccatcagcgccgccgcctccatgaactccgcctcggtcatcttcatgatgatctgggtggcgttccaggacagcgtcgtcatcccgatcgcccg

SEQ ID NO: 48916 - DNA, 411 bp, Setaria italica
  misc_feature (82)..(82): n is a, c, g, or t
  Peptide Sequence Number=SeqID_114890
tgtctctgatactgtagggagccaagcagtagctgtttaattggtttactatggtcatgagctttcaagatgcacagtatcngttttttatacatcttgttgattgcactttgattatgaggttatatgtactatcatgaaattaataactcaactttatgcagtgttatgcagcttggtatgcgcatgttccaggccttaaagttctcacaccatactctgcagaagatgctagaggcttgctaaaagctgctattagggatcctgatcctgttattttcttggaaaatgaattgctttatggagaatcattccctgtttctgctgaagtgcttgattctagtttctgcctgccgattggcaaagctaagatagaacgtgagggtaaagatgttacctatttacttacta

SEQ ID NO: 48917 - DNA, 241 bp, Setaria italica
  Peptide Sequence Number=SeqID_114891
tattatttttcttagtaaccaacattttgttgagattcttttatactatttgcagttatggagaatcattccctgtttctgctgaagtgcttgattctagtttctgcctgccgattggcaaagctaagatagaacgtgagggtaaagatgttaccattactacattctccaagatggttggctatgctctccaggctgcagagatactgtccaaggaaggaatcagtgctgaggtgatcaa

SEQ ID NO: 48918 - DNA, 297 bp, Setaria italica
  Peptide Sequence Number=SeqID_114892
atatagtgtttttgtagtatctttcttggaggaacggtgtaactgatcagcctttgacacgtaactcatcgctgcatcgccacatagataactgcatgcgataaaaaggttctttttgagactaatataactacaatatcaataaaaaaatgtcctaatatttttacctcaaacatcaggtcctctatttgggcattgtacaaattagcagccatcattctagccaacaagcatacatcccttgtaacctctggtgtgactcttggattccctgtagtgggtatcaaattagaagaa

SEQ ID NO: 48919 - DNA, 466 bp, Setaria italica
  Peptide Sequence Number=SeqID_114893
catcttagtcgattgccaaggggcagcaagccaccaccttacttgatttaatgattataagagcattccacagcaagatcctgcgccgatttagtcttggtacagcaataggttttagaatcaggaaaggaacattgactgacacacctgccatccttgtgtttgttgctcgtaaggttcacaggaagtggctcagcaatacacagtgtcttccagctgcccttgagttttgtaaaattccataacagggacctgggggtgtgtggtgtgatgttgatgttgttgaattttcttattatggtgcaccagccccgacaccaaaggaacaactgtatgatgagcttgttgatggattgcgtggtagtgaccctattgtaggatcaggttcacaggtggctagtcttgagacctatggaactttgggtgccattgtgaagagtcgaactggcaataagcaagttgggtt

SEQ ID NO: 48920 - DNA, 405 bp, Setaria italica
  Peptide Sequence Number=SeqID_114894
acgactacttagaagtaacaaatagaatagaagaaagggaaataatagacttacttacaactgactttcttgtcgttggggagaaccaacaaacatttgatcttgaaggggacagtggaagcctcataatcttaacaggacaagatggtgagaagccacagcctatagggattatatggggtggtacagctaaccggggaaggttgaagctaaaaagtggccagggtccggagaactggacaagtggagttgatctcggccgccttcttgatctcttggagcttgatctgattacgacaagtgaagggctacaagctgccctggaagaacaaaggatcactctagctgctgctgctgcggctgctaattcaactgccgcagaatcatcacctgttgctggtcctc

SEQ ID NO: 48921 - DNA, 225 bp, Setaria italica
  Peptide Sequence Number=SeqID_114895
tcccgacatcaagtggactcaatatccagttggagtccttcagccctgacttgtcatcaacatcatccagaataacatgctctgatgatagatgtacagctgcacttcaaacaggggaagcagtctgcgaaacctcggattcctcaagcagcccttgtgggtacactttcacctatggtgatggcagtctgctcatttcccatgacagtatcaaaatacatcgtg

SEQ ID NO: 48922 - DNA, 243 bp, Setaria italica
  Peptide Sequence Number=SeqID_114896
ttgtctgtcatctcacaactgaattcacttggagtgtcccctagagtattttctcattgcctgaaaggttctgacaatggtggtggcattcttgtgcttggtgaaattgtggagccaggcttagtctatactccactggttccatcacagtaagtttcatccctggaattactttgggtgtaaaacttcggaaatctgcattgctattctttttttgatactcctctgcattgctatcttatg

SEQ ID NO: 48923 - DNA, 337 bp, Setaria italica
  Peptide Sequence Number=SeqID_114897
cttggccctggttcctttgccagccaatgcaccacaatacattgttgtcaacagaagccagagaactatcttttgcagcaggcttctgttgacaacaatgtattgtggtgcattggctggcaaaggaaccagggccaagaaataactatactcggagatcttgtgttgaaggataagatattcgtgtacgacttggcgaacatgcgcatgggctgggccgattacgattgttcaatgtcggtgaacgtcaccacgtcgtcggggaagaaccagttcgtgaacaccgggcagtacgacgtgaacggctccacgcggcgcgcatcgttcaagagcttga

SEQ ID NO: 48924 - DNA, 413 bp, Setaria italica
  Peptide Sequence Number=SeqID_114898
tgaataactgtcaatgggaaatgagcagactgccaattcgtccgcctctattgttttcggatgtagcaactcacagtcaggagacctgacgaaggcagatagagcagttgatgggatttttggatttggacagcatcaattgtctgtcatctcacaactgaattcacttggagtgtcccctagagtattttctcattgcctgaaaggttctgacaatggtggtggcattcttgtgcttggtgaaattgtggagccaggcttagtctatactccactggttccatcacagaacaattgtggattcagggacaacattggcataccttgcagatggagcctatgatccatttgttacggcgatagctgctgcagtctctccatctgtacgttctcttgtcagcaaaggaccaatg

SEQ ID NO: 48925 - DNA, 184 bp, Setaria italica
  Peptide Sequence Number=SeqID_114899
tggtaactatcagggtactatgtgtctgacacgatgtattttgatactgtcatgggaaatgagcagactgccaattcgtccgcctctattgttttcgggtacagtttccttggagccctatattattttaagtaattgaaacttacaattagtacctgatgataattttagctgagatgccact

SEQ ID NO: 48926 - DNA, 230 bp, Setaria italica
  misc_feature (33)..(33): n is a, c, g, or t
  Peptide Sequence Number=SeqID_114900
gtattcctgacactaattgctgcttataacaanattttaaatgaaatatagacctcattacaacttgaatctgcaaagcatcgctgtcaatggtcaaaagctgcccattgattcctccttgtttacaacatcaaatacacaaggaacaattgtggattcagggacaacattggcataccttgcagatggagcctaatagaataccaatttagttaacggacgaataagac

SEQ ID NO: 48927 - DNA, 354 bp, Setaria italica
  Peptide Sequence Number=SeqID_114901
cacaagagaatgcctccggaagctatagaccttgtggaaaatcttgtgccaaggatgagcctttatctgaggaaacctgaactcagtatagttggggttcatacatcttatttcctcacgggttggagtaccaagaaccttgattatctccactagttggtcaaccgcactctctcctggaaacagtggctgaccaagaagtaactccgcgagaacacacccagctgaccatatgtctatcgaagttgaatactcagttgctccaaatatgagctcaggagcacgataataacgagagcatatgtaagatatatttggttcaccaggaatcaggactttagcgcttccaaagtc

SEQ ID NO: 48928 - DNA, 375 bp, Setaria italica
  Peptide Sequence Number=SeqID_114902
tctactaagtagtaattgtccttccggtaagtcttattagtacctttgttggtaaaattctttgttgtccaaggattgagcctttatctgaggaaacctgaactcagtatagttggggttcatacatcttatttcctcacgggttggagtaccaagaaccttgattatctccactagttggtcaaccgcactctctcctggaaacagtggctgaccaagaagtaactccgcgagaacacacccagctgaccatatgtctatcgaagttgaatactcagttgctccaaatatgagctcaggagcacgataataacgagagcatatgtaagatatatttggttcaccaggaatcaggactttagcgcttccaaagtc

SEQ ID NO: 48929 - DNA, 228 bp, Setaria italica
  Peptide Sequence Number=SeqID_114903
aatagtgtctgagataattttgggctttacagccatgataattggtgggagtgagagataatgatgggcctcaggctcagctcaatcactatcaatcttttataatgcactgaagatgttctgtaaacttttgcaggtactggtacccacctgattatccattccaacaggcattgtacaatcctcaagtgctgcaacattactaccctcagatgtatggtccaacct

SEQ ID NO: 48930 - DNA, 183 bp, Setaria italica
  Peptide Sequence Number=SeqID_114904
ctttcagcagccaacggcacagatggagggttctttcccatcggggtcttcactcccacctaatttcagactccagctgccccctcatacagtctcaagggaatctgatgatgcttccggtatgccactcctatcattctttttcagttagttttggtgctgaaaccagcaagagaaacacat

SEQ ID NO: 48931 - DNA, 231 bp, Setaria italica
  Peptide Sequence Number=SeqID_114905
gtgttgagaagaaggaagcggttgatcatgtaaggcaggacaacgtggtcatggagaacatggttaatgccaatgaggagaaaattgtgatgacaaatgatgatgacaagggggatggtgtggttgatcggctgattgatgagcagattgctgacgtagcccttgtgccagcttgtatggaagctcctgaggaggacagtggattgaaagataaggatatggaaatatcta

SEQ ID NO: 48932 - DNA, 213 bp, Setaria italica
  Peptide Sequence Number=SeqID_114906
ttcaccaagctgaggtgaatcaggagttgggttcaataccaatacagccaagggagcattctggtgaagaacttgaaggagagagagctgcacaggctgggctggaacaagagtgtgactctatgccaattgattctggggaacatgcttgcatgacttcatatgcttgtactgatgatgagcaggttgagatgaagcagaaagtcactttag

SEQ ID NO: 48933 - DNA, 275 bp, Setaria italica
  Peptide Sequence Number=SeqID_114907
caacaacggcgatggcggtgagggtcccggcggcggagctcaaacagcacccctcgtcgccgttcaccgcatcccgctgccgcagtccacgcgacgccgcccttccggcgcctctccgggtggcatccagaacgccgcggcggccgggggtatccaacaggatcatctgccggtgcacatacacagcgatccttccaatttatgcccaaaatttgcgcaaaagtgtaataatacaataaaagtttctcacaaattcttccaaaaaaaagtttcag

SEQ ID NO: 48934 - DNA, 262 bp, Setaria italica
  Peptide Sequence Number=SeqID_114908
gtcccggcggcggagctcaaacagcacccctcgtcgccgttcaccgcatcccgctgccgcagtccacgtgcgtgcctgtcctttctcactcgtctctaaagtctaacccgccattcctttctagcattttcctgttcccaccgctgcttccctgcaggcgacgccgcccttccggcgcctctccgggtggcatccagaacgccgcggcggccgggggtatccaacaggatcatctgccggtgcacatacacagcgatcctta

SEQ ID NO: 48935 - DNA, 235 bp, Setaria italica
  Peptide Sequence Number=SeqID_114909
agattgaccgagctgtgcatcagatgatcatcgacgcaggcgcctacccttctccccttggatacggtgggtttccgaagagtgtctgcacgtcagtgaacgagtgcacctgtcatggaatccctgattctcgcgagctacaggttgatcgatttttttggctttgaattgctttaagtgtagcagttaatcagatgcatttcttgttgagccatagaagcagaataacatacta

SEQ ID NO: 48936 - DNA, 215 bp, Setaria italica
  Peptide Sequence Number=SeqID_114910
tttgtcgaggacggactggagcgcgtggcgcacggactcggcgacgcctctcacgtcgccgccgggcgcgccgcacggcggcggcgacacgaggaaggtgaagcggacgcggccgccgagcgtggtgacctgcaccgacaagataggaaaaggccgcgctgctcgccgaagtaataacgcatgtcaagaagctcaaggccagcgcggcgcgcatc

SEQ ID NO: 48937 - DNA, 381 bp, Setaria italica
  misc_feature (337)..(337): n is a, c, g, or t
  Peptide Sequence Number=SeqID_114911
acgggctcccctacgcccgctttccggacctgaaccccaattcgaccagcgcaggcgcagcgcaggggggacgcggctcagtgaagcggggggcgatggggtacctgccggcgctgggcgggaaggcggcacacctggtgtccgacctcgccaccgtcatcctcaaccccgtctccgagcgggagcgccagcgacaccacccctcccacctcccggaggccactgaaggaaaagatacactatttggtgatgaagattctgacaaaaattctgagactcctgatggtcctgacacatcttccttcagagcatttcttatgtcatttatgtcttcctnaacctccagcaaggattcaatggagaccatacctgagcatgatc

SEQ ID NO: 48938 - DNA, 238 bp, Setaria italica
  Peptide Sequence Number=SeqID_114912
ctcatcaggttctagggtgttctccatctcgtgcatcttcctcttcaccttggccttcaccttcttggcatatttgcctgccttctgccgcttctctagtgcacggatctggaaggaaccaacaaagcaggccagatgtaagtgttggaagggtacagtaagcatgttctagttggataaaatcacatgtacaatgataccaagtcctcaaatgaaccatgcaccagcagatgaccaa

SEQ ID NO: 48939 - DNA, 200 bp, Setaria italica
  Peptide Sequence Number=SeqID_114913
ggtcaagtctcctggaggaccatcagtgaaatttctagttaatgctgttcacactatggaggagttgaagcttactggtaaccatctaaaagtaaagatccttctgttttctgcactcgaagaagaggcagctggagcagctcctgagctcgagcagctcgttcagcgcgttacccttgctctgcttcgactcgaccttg

SEQ ID NO: 48940 - DNA, 380 bp, Setaria italica
  Peptide Sequence Number=SeqID_114914
tattgtcttcggtcctactattctagtttacctattaacgtcttagtaagtcttccttgtaattaattcttattactagtattgttcttcgcttcccctgtggttttctactgcacatcagaatcgctaaatctccaactgcaactcaaccgcgcggttacaaccaaacccgctctaccaacaaatccacccaacacatctatgcacgctatcaccctaagttactatgcgattacacagcaggctcacaattgcagccgaaccaggtcgcggtgcggctgatcagcagctaccagaaaacccccaatgttgaggttggtgggtgcggctaaggccctcgtcgcttggtgccggtcacggccatgaccggaagtgggcac

SEQ ID NO: 48941 - DNA, 456 bp, Setaria italica
  misc_feature (354)..(354): n is a, c, g, or t
  Peptide Sequence Number=SeqID_114915
tgtctttgtactagtaacttcctattttgatcaaggtaacttagctatcccggtgatgattgtactgggtgatgttagaagaccattcgtgtttgactaagtatatcgatttgttgctgatacattagcaggtggcacaaaatggaaaaagggcgagagggaaagggatcacaacagggatgcatctgcaaagggctctggtttgaagtcagggcgccactcatcaggcggcagcgggaggagcggcgagcgcaaaaataagacaaagccaaagcaaaagctggcgcagctatcaacttctggaaacgtgctgggtagagtggtggagccattgtcatcgccggcagtgcaagngcccccaccgagccaccaagtgagagaaagactcagcatccaacaaggaatacttccagcaacgctgcccagcgcggtaccacggatgctgccctgccagtc

SEQ ID NO: 48942 - DNA, 213 bp, Setaria italica
  Peptide Sequence Number=SeqID_114916
tgcgctcaccagcatttttgttgcattccctcgaaaccaatcacagttggtcatcatgtctaatccaagcttatgctgatgcatgatttaggaagacatggcgatgggcaatggggtcttacattagctctgactctctgaagcctgtgtggtgctcgagcgtgtcagtccaaagtggagacttcttaagagtaagccttgctgcatagacag

SEQ ID NO: 48943 - DNA, 241 bp, Setaria italica
  Peptide Sequence Number=SeqID_114917
tttttttaaagtaagttttaggtaaggtactaagtaactactaattgtctttaatttaagaaaagaaacactggatccatttctatttacaggacaggtgagtttgggattttaacaacgggacacatggcaagcgcaaataggtagtttttcactccccataaattacaggcgctatagtctgcaccgactcacgcagccagctgcaactgagataagattactgtattgtcacactcag

SEQ ID NO: 48944 - DNA, 232 bp, Setaria italica
  Peptide Sequence Number=SeqID_114918
cggagcagcagccatggcgtcgttgcacctgactgggccgcgggtggcggtggccgcgaagccggccgcgctgggcgggctccgcctgccgacgccgtcgattgccgtgccgacggggcggagggcccgggggctcgtggtgagggccgccaccgtcgtgtcacccaagtatacttccagtatcagttcagtcaagaccaacaggaggggaagttgttgctgttggagaggg

SEQ ID NO: 48945 - DNA, 284 bp, Setaria italica
  Peptide Sequence Number=SeqID_114919
ttcggggttttagggttcttgtcttaaaggtctaacgtagtcgtcctaccgcggggccagagccggcgttgtactggtagtggagcaagccctgggggaacaccatgatgtcgcccgcgttcagcgtcttggtgtagggggtgttcgacccggagctgatgaagccggcggcgacggtgccctgggtgacgaagaggagctcggagccggccgggtgggtgtgcagcggcacgacgccgcccacctccatgtcgagcctggccgcggagatgccgaggccgttg

SEQ ID NO: 48946 - DNA, 264 bp, Setaria italica
  Peptide Sequence Number=SeqID_114920
tttcatggacagcatgggccttggagtgcttgttgagcagcttggggagttaaaattgggtgagcttttggacacgccaccaccaggattggatgaagcaatagcaatttcaaaggttatgcaatttcttgaagcacaggagtacagcatgtttagccgcattgtatttgatactgcccctacgggacatacacttcggttactatcatttgcctagtactttccttggtattgtctattccttatttggttaaagttatttcc

SEQ ID NO: 48947 - DNA, 338 bp, Setaria italica
  Peptide Sequence Number=SeqID_114921
caatcttgaaattcaaagtttgcatcaggttggcacttatgcatcatgaacgtgtgtatagttccgtaatgattctcacttgaagtaaacccacgtgtttcttgacactttttgtatcaggttggcacatatgcagcagctgtgaaaaggcagtgcactatatgtgctacacttgtacatactccctctgcaaagtttgcatcaagcaaggtaaattcttcagtgtcagggggaccaagggcttctgcgacacgtgttttgggactatacttttgtattagtaattcctaaagtattgtaaagtcgtcttactaaaggtttgtatttttgtatgacat

SEQ ID NO: 48948 - DNA, 258 bp, Setaria italica
  Peptide Sequence Number=SeqID_114922
tggtatattcgggtaattctgatgggatgattggatctgcgccaatctctgctgatgctgagaaaataggagtgatgacattgggctattaggaagtgataattgtttatgtaataagttgggcagtagattaagatgctccccagtgaaagggttagcttggtttgaccaatagtgggcgtagtttttagcctacgaagaagacaaccactgctagactgctagggaatagacaaaatagaagacctagacccctta

SEQ ID NO: 48949 - DNA, 246 bp, Setaria italica
  Peptide Sequence Number=SeqID_114923
attaggaagtgataattgtttatgtaataagttgggcagtagattaagatgctccccagtgaaagggttagcttggtttgaccaatcattttgcattggattgtttacaggcaggttgagagcaccatacggcatgcctcctgtgtatggtagcccatgagatggtccaaccaataatagaataataggaagaaagacaagaaaagtagaacaatagactacggaagaaaccccaatttaggaaga

SEQ ID NO: 48950 - DNA, 214 bp, Setaria italica
  Peptide Sequence Number=SeqID_114924
ttacaataaaacaatcaagttacatccattccttgccttcatgtttatgagatgcacattttgctgtatcttgtttgtaagatgagctatatagcgagtgtagaagttggtagtatgatcagtagactgcagtgcccccaaacttctacactcgctatatagctcatcttacaaacatgaaggcaaggaatggatgtaacttgatgtttatgag

SEQ ID NO: 48951 - DNA, 439 bp, Setaria italica
  Peptide Sequence Number=SeqID_114925
aaagttaacaaaacgtagaaaatttactaggaaggagtaataatattgatgaaggaagaaccaattaattactcctcctgatagttcaacgtgaaatttctggttgttttcagatctagattagaaattagtttaactatcaatcatgctatagctgattatggaagatagattgactgcagattagagcaagtagtaaactaaggtattttagaataaagtaaatcttaggtatcttgaaatttcgattttacaagaaaccttgtgtttaaaatgtgatcttgcatagttttcccctgaaatctttcaaaccatcttgagaaatctaagatattttctttcctgcacaatttctcatggagtaatctcataattgcatgtcataagtttgtagtctgcaggaagttttcagtttaagtatctttgaactcaactgcac

SEQ ID NO: 48952 - DNA, 343 bp, Setaria italica
  Peptide Sequence Number=SeqID_114926
atggatggaaagctgttgaaatagaactgtttattgtatgctctgtgaaatcaatatgagtgtgcagtgcaggtatcttctcgcgaagaaacatcaggttcatatatttcttacacttacccatttagtattatgtttcatctctagacgagtttcgcggtctccacatagcaagcattctcaccgcaggcattcgccttattcatctgccaacaggacgaggcggtcgagatcaagaactccagccaaaagaagatagaagacaatgggaagggacagatgcctgggcatccccgtgagacaatggaaggcatatggcattactgctgtggtgctatctagt

SEQ ID NO: 48953 - DNA, 320 bp, Setaria italica
  Peptide Sequence Number=SeqID_114927
tgcgaaatgtcagctatgatcgacagcctggttagagtttctcggtaacgtgcacatttctggagaaggcgcactgatatattggagatgaattgtcgagctttaatgaagcactcaaatttcaattggaaaaaacttcactcaagcagtgatatctaagagtatgttttgataaagcgtatgattttctgtcatagctcctatatgttgtatgatatggccgtcaggtgtaagagcgacaaaaagaaaagcgaaaaaggctggaaaatacccaatcaaacctagactaggtaacaataattaagacaaaagttttttta

SEQ ID NO: 48954 - DNA, 412 bp, Setaria italica
  misc_feature (28)..(28): n is a, c, g, or t
  Peptide Sequence Number=SeqID_114928
catctgcttctaatttaccatggcgcanccgggaccttgaactctgaccaggccagggacttcgacctcgccttgaaggagcggttctacctgcagccgctgccgccggcggaaggccgcggcgagggccaagtcgtcggcgcaggacatcctcaacctcaagccgctcatcgacaagaaggcgtggccgtacgtcatgaacgacctccgcctccgagcctcctacctgcgctacgacctcaacaccgtcatcgcctccaaacccaaggatgagaagaagagcctcaaggagctcaccggcaagctcttcagcaccatcgacgatgtaagccatgctgccattgaactgagaacaattggccaataatttttttttcttcacttttttcaccatagcttattggtaaattaa

SEQ ID NO: 48955 - DNA, 443 bp, Setaria italica
  Peptide Sequence Number=SeqID_114929
atatgatccgaatttaaggcttccattgtggtcatcagctgaggatgctagagatggtatcttgagcatatgggaaacagctgatgttatcaagataagtgaagaggaggtttcttttctgacgaacggggaggatccatatgatgatgctgttgtaaagaaacttattcaccccaacctgaagttgcttcttgtcactgaaggtccagagggatgaatttagtgggagagttggtgggctgaaggtaactgctgttgatacaactggtgctggagatgctttcgttgctggaatgctatctcaattagccacagatttttcactgctccaggacgaaggccgattgcgagaagcactgaagttcgcaaacgtctgtggagctctcacggtaacagagagaggcgcgattccagcactgcccacccgacagcaagttgcttct

SEQ ID NO: 48956 - DNA, 259 bp, Setaria italica
  Peptide Sequence Number=SeqID_114930
cgggcgatggcggacgcgcggccggcgccccaagcagcctcgacgccttcttcgcctcgcggtcgcggtggcagaggcggcgtaggtcgcgcgggctcgacgccgaggtcgtcgaggcgttccccaccatgacgtacaccgaagccaaggcgctgcgagtcggaaagggcggcggcgcgctcgagtgcgcggtgtgccttagcgagttcgagggcggggaccggctccgcctgctgctgcccaagtgcagtcacgcctt

SEQ ID NO: 48957 - DNA, 404 bp, Setaria italica
  Peptide Sequence Number=SeqID_114931
ttgtttgtcattttatcaaattcagctattttgccatacatataccttcaaaatattagagaggtaacctttaaaatgaagccttctaggattctaccaagcttatattttaaaatgaatggttctcttttagggagttaatcattttaaagtttacatcaactattttgtcccagtaactgctgtcacttcttgagtgatggttttctttatttatttaaggctatgacatcaaatatggattgattcagtcattttttttgtgttgtggatcttttcacctgcttggtgcttagtttacctagcgtatgagttaattacttaactcataatttgtggttttactttccgttttccactcagcactcgttaacataattttgctgatacaatcatattaacca

SEQ ID NO: 48958 - DNA, 358 bp, Setaria italica
  Peptide Sequence Number=SeqID_114932
tatgtcttatcttcttcactgtccgaattcactaaatgagtactaatcttgggtgatgtagtagcttcatgttcaaaacattgcgactgacgttctgatttcatttgatcatcagaataggtgttgccggcacattcatgatgacttgcatctttccatggatactgatcctgatacagggcttagcaaagggttgaagtttgaggtgggctctgcagaagaagaacttgacatgctcctcaattcatttagtggaactcacctttctagctccaacttggatgaatcatttggacatgattcaacttctcaaggtgcaaagatcagttggtcgaacaagaaagttacacctagcatg

SEQ ID NO: 48959 - DNA, 407 bp, Setaria italica
  Peptide Sequence Number=SeqID_114933
cttcagacccagtatatgatgtcctccactgattttctcgatcagctgtacgtcttggtgtaattggactttgaggcgtatcaaatctactatccttggtggaggcagcctgaggggggccttgaaacaactcggacagttcctgtgccctctgatctatcaggcaaatcccagcctgtagctttcctgactgttccttgactcaaaggtggagctgcatcttttgccctatcaaccttgatagtacctgtaccaacatcatcttcttcaacatgtgtttggccattttgtgtggcatccaatagtgttttgctgacaaaatttttaggaccgactactacttaattactactacaaagaaagactttaggaagtactttacgggacaattttttaatagaaaccga

SEQ ID NO: 48960 - DNA, 384 bp, Setaria italica
  Peptide Sequence Number=SeqID_114934
aattttaccagttgccaatacttgaaatttggatatgtcggcgctgttcctgagatgttatacaagtacggcggtggaagttacatcagaaaatgagcaggaaatatgctattcaccatgaacacaacaaatgaaacaacagatgcctggaaccatatagctgaaagagagttctaaagattgcattatgtacactctttcagatgcctggaaccatatagctgaaagagagttctaaagattgcattatgtacactcaaaattaattatacaccgaatcaaagatgaaatatctcttctttttctatcgcataaatcaaccggaattgagatcttgcgaaacttggttttgccacctgcaacaacggcagaaactagtgcgac

SEQ ID NO: 48961 - DNA, 439 bp, Setaria italica
  Peptide Sequence Number=SeqID_114935
cacagtactccagatcagcttgaaaccaggtccagcatttacaataaacatttggtgtagtgtctcaggataatagtcaccatctattttttgcatacaacgcaccagatccctcgcaatcttgctaaaattcttccagccctatatcacagggaacataaaaagaaaatagaaatcttaaacattgtgcatacagcacaaagatgctaaacaagaaaaggttctttaccaaaaaatatcatagattcagatatgccaaacgtataaggaatgaagtaacagagctaatgaattaatgcagttctgtcggcatcagtagtacaaaggaacttaacctgctgctctaccaatttttttttcattcgtggattttatacccccaagcattttgtaaaaattgttctaacctaattttatttagtaaactaaattcttactt

SEQ ID NO: 48962 - DNA, 371 bp, Setaria italica
  misc_feature (365)..(365): n is a, c, g, or t
  misc_feature (369)..(369): n is a, c, g, or t
  Peptide Sequence Number=SeqID_114936
ttactttactaaagtaaagtacttagactttagaataattttagttacctaagaaacaataggattttaagatgatgtcttggggtcaagaagtcccttcacagtactccagatcagcttgaaaccaggtccagcatttacaataaacatttggtgtagtgtctcaggataatagtcaccatctattttttgcatacaacgcaccagatccctcgcaatcttgctaaaaattcttaccaagcccaacgccatggacatccaatattgtagttgtggtatctatgtgcctttttggcagcaattgagcatgcaggaaatttctcaccgggaaaagctctctcgaactcttgcacatgatacttaangtancg

SEQ ID NO: 48963 - DNA, 120 bp, Setaria italica
  misc_feature (113)..(113): n is a, c, g, or t
  Peptide Sequence Number=SeqID_114937
tttgaagaatactcaaatgtgagcaggataatgaaagtatgtgattatgttatacttaccctaagatcagactccttcacagcttccaaggtctcagccatctgcatttgttnataactg

SEQ ID NO: 48964 - DNA, 289 bp, Setaria italica
  misc_feature (260)..(260): n is a, c, g, or t
  Peptide Sequence Number=SeqID_114938
ctttttcggcagtgccacagtagccgaacgggttcttcttggcccagttccactggtccctgcacatgtcctcgattccgtactgtgctctccatccaagctccctttcagccttctccagtggacgcgtaaacctccgtcgcgtcacccggcctcctggggcagaacttggtggaaatctccttgccggacgccttcttgaacgccgccaccatctaccaagaaacggaatagtagaccgacgaccctagtagaccaanaattagtaaggaccaacaaacaaaccgaa

SEQ ID NO: 48965 - DNA, 160 bp, Setaria italica
  Peptide Sequence Number=SeqID_114939
gcagtttcgtcagccagaaacgtcagtttcggggtcggttttctaccggattagagagacacgatgatccatccatgcacggataaaaccttagccggacgccttcttgaacgccgccaccatctccagaacggatgtgccgcgccctgtgcccagattg

SEQ ID NO: 48966 - DNA, 330 bp, Setaria italica
  Peptide Sequence Number=SeqID_114940
ggttcaggtagagatatgcgggaaaattatatgctgctatgcgggaaaattatatgctgctaaatcgttgagccactccggtggtttgagacagacagacaaatgtagcatgccgttgtgtaacgcagcagtgcaccctttgcaatgtggatttgcgggatgactgatatcccaaattctggagggtgcttatggtaacaagaagagcgttgtatgcctgtaaactctaacaggtggtgtaccttggtgcagggatggccatgtgtgtgtgctggatacaatctcttcctgattaagctaacttaattacatcccgcgcctttgacaaaa

SEQ ID NO: 48967 - DNA, 266 bp, Setaria italica
  Peptide Sequence Number=SeqID_114941
ttaacctaagtaagactttagactagggacgacttagatacaatgttgctcgattcctaaggacgtaattttacacgctcttctttatacaggtctagacgcaacataatccagacatttatgtactttcatttgttgaagctgatgtaccatgctcctgtcacatccggataccaccagagcgtttgggcaagaataggccgggcggtaaaccccctacatttatcgatatgcaccattcctcaacactcccatttcggcagttc

SEQ ID NO: 48968 - DNA, 479 bp, Setaria italica
  Peptide Sequence Number=SeqID_114942
taaaatcaattctgtgccatcttcacttctcatactttcaagagcttttactgtatctgggaaagtgaaacctgaggaggctgttgtagcaacaatatcttcactaccagatgaagttgtggatacagttgggacagtactgccatctgaagattctgtttcagagaggaggagaaaactggaattccttgagatgcaggaagaacttatcaaggtgatgtatacataggacaatcttttttattgttagtagatataatataacacatatattataacaactaaacatttggttttaacctcctattctgccaatgcagccataatatttggggatataaaaccactgtactaataatttgatagagaaattctctccgttgcgtggtgcgcctgcatctttctttctttttgggggtggaggtggtaatgggcttgtgctggcccatagttttagaacttatgttactagtgcgact

SEQ ID NO: 48969 - DNA, 250 bp, Setaria italica
  Peptide Sequence Number=SeqID_114943
ttgttgcaacactatcttctctaccagatgaagttgtggatacagttgggacagtattgccatctgaggattcagtttctgagaggagaagaaaattggaattccttgagatgcaggaagagcttatcaagataatctgatgaaggaggatgaattacaaaatttggtttggactttggataaatagagattatgcccaattgcttctgattggtggataaactgaagcttatttaaaggaggaagagaa

SEQ ID NO: 48970 - DNA, 241 bp, Setaria italica
  misc_feature (230)..(230): n is a, c, g, or t
  Peptide Sequence Number=SeqID_114944
gtatgccgaaaggagtggatgaagagtatgggggtggacagaagaagtcagggaagttagtgaaggagagatctaagggtttgctgagaggctgaggatgttggacactttgaaggcgcagcagcagcagagaaaagctctggcttcggctcggcgggctgcgtcagagactgattcggagagcagggagtctggtgaaaaggtcttaaatcagctgaagctagataagntctctccttca

SEQ ID NO: 48971 - DNA, 239 bp, Setaria italica
  Peptide Sequence Number=SeqID_114945
ccacatcacgtaaataaccagtctctgaaacctttcctttgaatccattgctccgagagggttctaaatctgcatcagcagtaggctaacgacactcgcgttgggtctgaccctagaagcaagatatcacaggtgaagatggcaggtaaacccagcagccaatttgataggattggccagaagcattccaggggcaatgctgtctattctcaaagtgaggagacagaatctgattcatc

SEQ ID NO: 48972 - DNA, 249 bp, Setaria italica
  Peptide Sequence Number=SeqID_114946
gctatagtcctacatagaagacctgacttcatcataagcgtaatcagtgtccacaatcaatcctgcctctttccaggaagctcaccggcaggaaaattatttcagcaagtaagccccaagctagccattaaaatattgaaggccttgcaagggcacgaaaatgttgtacatttttacaatgcattcgaagatgacaactatgtgtatatagtcatggaattatgtgagggtggtgaattacttgatcgg

SEQ ID NO: 48973 - DNA, 208 bp, Setaria italica
  Peptide Sequence Number=SeqID_114947
aatgcataaagttacatatttcattggagtttcagaaattgacagtcaatattccattctcgggcagattgacagtaatacagatgggctagttgattttgaagagtttgttgcggcaacactacacgttcatcagctggtggaacatgataccgagaagtggaaattattgtctcaagctgctatttgaattaaatttgatgtcgac

SEQ ID NO: 48974 - DNA, 407 bp, Setaria italica
  Peptide Sequence Number=SeqID_114948
cgccgtcgtcgagggggatcgttctcgccttcctgccccacgctcatcatggttcgaaaccctaacgctgcgagctaccactgaatatttgctggaatcgaattttttagtaccttctcctcatatcttcctatttctcggtcgcagccggcgctgtcgatcggaaacgtgggtcagctcgccgtcgacctgctgatatcctcggcgaggtcgaggcggtggcctacctcgacgagccctccgtgctgccctgcgccggcaacgacgccttcggccccgacgccgtcggtgacctcgcactcgccctcgaaggttgggtattggattctaattgactctactgtgatattcctacctcctgtttgatgagttgcgtcagcgttgttgcttgcattcctgtgctgcta

SEQ ID NO: 48975 - DNA, 165 bp, Setaria italica
  Peptide Sequence Number=SeqID_114949
tttgaaggtttcttgtgtactgtgctactgctcagaaggtgacaacatgccagaatctttccagttagctgaggcagtatgtaaacttctaggtcatgagcctgagaaattccatggaagtttacatactgcctcagctaactggaaagattctggcatgttgtc

SEQ ID NO: 48976 - DNA, 246 bp, Setaria italica
  Peptide Sequence Number=SeqID_114950
cttttggaaatggtttgtctacagcttgtgttgtcaacattggcgctcaagttacgcaagtagtttgtgttgaggatggagtagctttgccccacacagcattggcgcttccgtatggtggagatgacatctctagatgcctgctttgggttcaacgtcgccatcacacatggccaaactttcaaactgatccagtgagcaagcccactccttatttggctatatgactcttttattttgttgagc

SEQ ID NO: 48977 - DNA, 284 bp, Setaria italica
  Peptide Sequence Number=SeqID_114951
tactcaaggaagaacaacaagaagagcggtgaggctgaagccgaggagtaagatgaagtttatgctcatggagaagcatggatgtgtttccccttcctagctcagttttacctttaggatctggagtttcgcttaagatggaatttaaatggtcttatgtatgatggcaaggaccatttaaattccatctggagtttcgcttaagatggaatttaaatggtcttatgtatgatggcaaggaccatttaaattccatctttaggatctggagtttcgcttaagat

SEQ ID NO: 48978 - DNA, 166 bp, Setaria italica
  Peptide Sequence Number=SeqID_114952
ctcgtcgccctcctctccttcgcgagcgctcgcttcgcaagggattcgagatggccaagtcgaagaaccacacggcgcacaaccagtcgtacaaggcgcacaagaacggcatcaagaaggccaagcgcacgcagacctccaccaagggggatggacccaaagttcc

SEQ ID NO: 48979 - DNA, 217 bp, Setaria italica
  Peptide Sequence Number=SeqID_114953
cagcttccgaactgaaggttgtagaacatctgtaggtagcgctgtttggcctgcctctcttctttgtccatagtcctccagtttcggaagctggcaaaggctgtgccgaaagtgggcgaacgacctgagcaacctacggcagccacagtgcctgatagattggtatcaaggccaaaagaagaaagacgcagataaggatccagaggattgcgagcag

SEQ ID NO: 48980 - DNA, 406 bp, Setaria italica
  Peptide Sequence Number=SeqID_114954
atcccatgactctgctatggtcaggacggcatcactgacatgttttgctggcatgacttctgatgttttcttctccctgccagaaaataagagagactatgtgaccaccacatctgtccatgcagcattaagtgatgtggttcctagtgtaagatcagctgcatgtcgagctattggcatcatcgcatgtttccctgaaatactggctagccctagcctacctggcaagttcatagatgccattgagtttaatacacggaacccatcagctccggttcgtgttaccgcttcatgggctttggcaaatctctgctcttgcattcgttttaaagcattggaagtgcatacagatccctattggaggtcgttacttacttctactacttgttagtttcggtttagttta

SEQ ID NO: 48981 - DNA, 316 bp, Setaria italica
  Peptide Sequence Number=SeqID_114955
ttcttcttcattgcatagaagaggaaatgcatttcagcattagatgtggagctttccaggtgttgagatcagccgttcacaattacccaagttgtgcaaacatgatctgggaaaaaattcgagacaatgttcttgatttgttgcaaatacaaagctttgaagaccaaaagttggatgctaactttgggcctcctggacctaaagaagaatcatctatcaagggaaggtgtcttgtggctggaataaaggtaatggatgacgatccagcaacttcaacttcgaagtggggtgcagatttaataactttgtttatggt

SEQ ID NO: 48982 - DNA, 193 bp, Setaria italica
  Peptide Sequence Number=SeqID_114956
atcactgtatatatcagtattatctttgtgacattttattgaattttttatgctccctttggtgtaggactgtactatcatttgccaaagcgagcagctggtattcgttatgtattcattggcaagccaatgaatcagaggcctaggtatcagattttgggtatttttctgttgattcagctgtgtaattaca

SEQ ID NO: 48983 - DNA, 233 bp, Setaria italica
  Peptide Sequence Number=SeqID_114957
ctaattcccatgtcatgcaagaagctgacaacaaaattcaactgttagtagatcctaactcgatgtattgtcgacagaataacagttgacatacctggtgcaaatgcaacacaagttgctgaagaaaactcagtgtgttctctgaggatgtaggttagtaatgcagcagtgccaccacccaatgaatggccaacaatcttgatttggtaatctgggcactgtctgactgcttc

SEQ ID NO: 48984 - DNA, 243 bp, Setaria italica
  Peptide Sequence Number=SeqID_114958
gaatgcatgaaaattgcatgaattacgacatactgtcagccatgtcctttgtcttgtgaagaagaaatgtcccagaaaggatagtcaggaaaccacacatctctgtaacaatttgtgttggattttgatggtcccaatcctgcacatcaagaaacaaaccgatgataaacttaaaaggtatactttttgtgaggtagataattcaacataaaaggcacaatcaccatgcatatataacaatta

SEQ ID NO: 48985 - DNA, 237 bp, Setaria italica
  Peptide Sequence Number=SeqID_114959
aaaaaaaaacaaagaaatcaatttcagagcttcaacccgattccagtatccagcgaagcaaccacatggctggcaacaggccaacagcacaactcgtccgcacgacgaaagcatgatagacagaatgggtttgccattgaagtcatgccactaaaatgtcaagattctgtggatgatgagaccttgacgttgtcacttcccaaggttggcaatggctacctaaaggaagggcgccct

SEQ ID NO: 48986 - DNA, 262 bp, Setaria italica
  Peptide Sequence Number=SeqID_114960
ttttatttttttttttttggttatgatgaatctattcacgtgctccacggttgaagtatcatccatccccgagaacttggtgaagtcaggaactttataccgatggggaaacggcagtaggtcatatgtagacgagtatggtgtcctggacggcgctgacgcagccgaacagctgggcggtgacggcgttgagcatccagaacctctgctcgttccaccacgtccgcactgccagcccgcgcctcgccaccgacacctcgac

SEQ ID NO: 48987 - DNA, 431 bp, Setaria italica
  Peptide Sequence Number=SeqID_114961
atatcttcctttcagcctagttggagctgttacctttatatgagttccatctaaagactacccaaaacaattcttaaaatatttccatttaccatccgtgctattctctggtataggtttaggggccttaagtagcaagtggtgcaactttagaacagctacaagacagaagttgagctgtctactaactgtctcaccacttcgaaagaaaaattcttttattattgaattcttcaaatgatgggatagtgtgtataggaattgagccactatctcctctagagatatattccgtgttgctttcatcccgccaacatcactaagcatttcacacaaagtgtaggatgttctcctgtccattcgaagctggattgcaataaggttgctcaaccgcacattcctttgctctattgttttttttatcctttgtt

SEQ ID NO: 48988 - DNA, 355 bp, Setaria italica
  misc_feature (333)..(333): n is a, c, g, or t
  Peptide Sequence Number=SeqID_114962
tccttggtaatatatatatgaattgcatgtcaggagcacaaacaccgagaacattcgttacaatatctccttttcttgacctatatcttcctttcagcctagttggagctgttacctttatatgagttccatctaaagctcccaaacaattctagaaacagaagacacaacaaataaaagaatatcacaaaaactacttcttaattaggattttttctgaaaataaaattgtttgataagtcatttaccttaaaatatttccatttaccatccgtgctattctctggttataggtttaggggccttaagtagcaagtggtgcaactttgaacngctacaagacagaagttgagct

SEQ ID NO: 48989 - DNA, 274 bp, Setaria italica
  Peptide Sequence Number=SeqID_114963
cgctccaccgcgtccggggtccggagaacatctgccaggtaggcctggttccacgccacctccacgccgcgctcctcgtcgaaaccacggtacaccgacttcatcgcccccttgccaaggagctcatccaactgcacacaatcaaattagcaagcaattagtttttatatatgcatgattttaattaagttcataattgtcacattaattatagtatttattatgcgcatcctggaaaggggaaaaaacaaaagattatcgtagttaaatccct

SEQ ID NO: 48990 - DNA, 245 bp, Setaria italica
  Peptide Sequence Number=SeqID_114964
ctgctgtcccctaccaccgctggccgcctgctgccgcaccgccgaggcccggacatgctcgaccgcgcttgctacttgctggttgctccactgatgaagagaacagaattgctcgctaggttgtggaagaaaatggaccacaagaggcgtgtgtcttagtaggtccgggtcttggcgaagttgtgagtgtcgtaggtgaagaagaggagccagctgaggttggagcagtcgacgacgatccaacg

SEQ ID NO: 48991 - DNA, 458 bp, Setaria italica
  Peptide Sequence Number=SeqID_114965
tcgttctttccttgctgttcagcaatctcttcaacggtatctttgaatttcttgcagttatcgacagatccgaaacggatggcgaacatctcctccttaagctcgccatcagcgaagtccagggcgtgccacacgcacgacttgtcgctccctgcgtgctcctgcatcttggtagtcgccaccacaaggtgattagcgcagatcttgagagtcttggcctggcgcatgacaaggcggaccttggagttctccttgtgcttcaacagcttcaccgtgcccgttccccgctccttccactggttcccatccttgtcaaaccggtacagctttgccttcatgtcaaggaggacgtcctcatcctcctcgccggcggccggcgaggacgaggacaccggcgcccaggtcgctcccatcgtgaagctggaggaggtcgccgtgacctcctcgaccggtaggta

SEQ ID NO: 48992 - DNA, 385 bp, Setaria italica
  misc_feature (152)..(152): n is a, c, g, or t
  Peptide Sequence Number=SeqID_114966
gtcaaacatgctgacccagccactccatcccagataaacaggagacttcaagaacagtctatcaaccacgaatgccaagtagatgaccgacacaactagattccacccaacacaaacattcatcccgaagaaaacacaaatgaaaatttgtnaagggaagatgaaccctgacaacaaaatgaatggaatgacactcatttgacacttgtttcagtatacaaatgccaaaaacgcataggaagcgaatgcaggtgccttcactctttgacatccttcttatcatctgctgctggagattcctctttctccacagtttccttcctttctttggtccttctagttctaccgtttaactttcttcctacctaacttctagtctagtcta

SEQ ID NO: 48993 - DNA, 386 bp, Setaria italica
  Peptide Sequence Number=SeqID_114967
ttcctttcaactatattagatgaccttctgggcaaaggaagagattttgggagcttgaagaggaacattctttctttgctatcatgttcttgctgctacaattgcaagtgaagcatgtgagagttcagaaactatgaatacaatttagcagagctcaaaggttcatacaagcaaatgaagctcctctgctggacatgttgaagcttcgcattcaattgaacttggctgagtctcctgcaactcaacattgccattatcgtcgtcgctgtcgtcaaaatcactactctcttcactgtcaaatgttcctgtcaagagttgaatattcccatgaaaattcttattggaaagtattgttcagaagaatggaactcatgaatcgtcacatt

SEQ ID NO: 48994 - DNA, 247 bp, Setaria italica
  misc_feature (221)..(221): n is a, c, g, or t
  Peptide Sequence Number=SeqID_114968
gcacacattgtgtcttcccatgtgagcattagaaacccaggacgaattttatactaggataaatcagtatagacgcatggagagaaatttccgcttccaaccagctgcaaagtggggccaaaagctcaccagaggaatcaaccgctgctgttgcctgcgaaggaaggagcgatgcggagtccacgggtgctcgggatgcagctaggatggcacgctccctnttggagacgtacctgccgctggccgg

SEQ ID NO: 48995 - DNA, 231 bp, Setaria italica
  Peptide Sequence Number=SeqID_114969
gccgccgcggcggtggcgccgggcttccgcttcagccccaccgacgaggagctcgtcctctacttcctcaagcgccggatcgtctctgcccggccctcaccctacgtcgccgacgtcgacgtctacaagtcccacccctcccacctcccagagaggtcggcgctgcagacgggggacaggcagtggttcttcttcagccggacggaccgcaagtaccccaacggctcgcgc

SEQ ID NO: 48996 - DNA, 265 bp, Setaria italica
  Peptide Sequence Number=SeqID_114970
aacgacatgccgagctcctcctcggggtatgaggacgggccacttctccccgccgtcgcggaacatctgctcggtgtcgatgagccgcccgcggggcgaggatctgggtccccggatgccctgcgcggtggcgccctccgcggcgacgatggcctcctccgcgccgttgaggtaggtgacgaggacccgcggcggcgccttctccctcgtcctcgcgctccaccaccaccttggacaggaacttgagcatctctcctccctgtcg

SEQ ID NO: 48997 - DNA, 356 bp, Setaria italica
  Peptide Sequence Number=SeqID_114971
aatgggtaagcttattggattaattagtctagtacgctttggaatccatgcagttcttagaaaagggtctaccggagcatttctgatatccttataatctgacgttctcatacgcagtcttaagttgctaggcctctagatgccattgctaattttgtttgctttgttgaaggttattcaagaatatgttctaggtgaatacgacaatgatgcaactactgcttaccatgaaaaataacacctctgaattcgctgacgatgaccatcgcgtgaaagatatttctaagagatatcatgtccacttgtacacaaatgggactgtatgtgacctcacagagataccccgggagacctgg

SEQ ID NO: 48998 - DNA, 331 bp, Setaria italica
  Peptide Sequence Number=SeqID_114972
cctgcaaatatgttgtaacaattcaaagcccgatgctttgcaaaaacccgttgttccatcagaaaaacgcaccctttccatccactgcaacgagttgcctgctgaagaagaacccagggtcactgtggaggacgacttgcttccaaaagaagcgccgatctcaatcattcccgatcaggatgaactacatgatttcacagcttatgctacttgatttccctccaataatgtatgtcatgtagagaaactgttattttggaggcgcagtggcaactgaatattctacttgttctttgtacttgttccctattgtaaccgttactagttggtt

SEQ ID NO: 48999 - DNA, 269 bp, Setaria italica
  Peptide Sequence Number=SeqID_114973
gtcagaaaaatcatatctgaatttttcgtcttatgttgctcaaaagatggctgcttggaataattcaaaccttactctttatcctaaccagaggtacttgtggtgcattcaacaggaaaatggccaggaatcggagccaatggctaaccatgaggggaaacattatatgtgctttctaccagttgaggaaactaaaaccatgaagtcaatcctcccacaaaatgcaactaatgttataatagaaagtgacaggagaattaagccaaagg

SEQ ID NO: 49000 - DNA, 222 bp, Setaria italica
  Peptide Sequence Number=SeqID_114974
tcgtacttaaactaatttcttcctttcttaattaagtaatctctatctttgcaatatctaagctcgtcatgttgttctgcgcaggttgttccatcaagaaaaacgcaccctttccatccactgcaacgagttgcctgctgaagaagaacccagggtcactgtggaggacgacttgcttccaaaagaagcgccgatctcaatcattcccgatcaggatgaact

SEQ ID NO: 49001 - DNA, 271 bp, Setaria italica
  Peptide Sequence Number=SeqID_114975
ttaaaagacagcaattgatatcagagggcaaatattctttagaaaccaaggtaacctgtcaaccataaatagaagaaaaaagtgaaggtaaaatataatacaacacataagttttttttggtcagaataatacagttttgaagtttacaatacaagaaaaaagaaatctgaaaagaaaccaccgaaaacataaattcgtgaactgtatgttgttggggtgaacccgcgcggccatcatcgcgcgcgctccgaccgcgggcagtcgtcatcg

SEQ ID NO: 49002 - DNA, 476 bp, Setaria italica
  Peptide Sequence Number=SeqID_114976
ctgatgatcagacatggaggcaatcaatcaagcaagaaagaaagaaaacagagagagcaagatcatcacttcaccagccgctcaattcagaatcagaaggcgagctcgactgctactgaaacacacgagctggggcctaaaacgaagctgagcaagtaccggtctccctgatgaccacctcgccgttgccgtcgcactggaagtggttccagctgttccacccccatgggaggtgccgagccgaggccattggccagcatgctccgccggtgcggctcctccacgtgcaccaccttggcctccgccgcaaccgccgccgcgagaagcagcaccatcagcgccagcctcgccggcgacggaccagtacgacggccaccacccgccatcgctgccctccccgaaccagaaaaaccttcactccgcacgagatcaagactttgtccactcgtgccttcgtctcggactttcgtcgctcc

SEQ ID NO: 49003 - DNA, 430 bp, Setaria italica
  Peptide Sequence Number=SeqID_114977
caccaggatatcaattatacagacaggtctcggatagcaaaattccatctctcaggtctctcaatgaaatcagctctcctgaaggaagaccatcctcttccatgctctcagtctgtagcaatgacctgtcagcagcaggatcccatggtgagtcatctgatggttggtcaatgcgcacgttttctgaaatggttgcgacatcccaaagagagaggtggtcacttgacagtgagctcttaggatccatttccagtaaaatgacaagatcaaatgcttcaaattccacaagccttcctccggatcaagaggtgtgcaagctgtgtttaaaattgttaaaggaaagatcgacttggaatgctcaggagcttgctgttgttgcttgttttgttgtgtggccatgttaccatgctgactgtctggatagcataac

SEQ ID NO: 49004 - DNA, 393 bp, Setaria italica
  Peptide Sequence Number=SeqID_114978
ccaacagattcagattcgatgaagaaagcacggcgttcaccaggatactaagggtggtgttgaaggaacagatgctgatgtcttcaaatccaaagcaacacttcccatgtccagtgatttcctggtaagcttcgcctcaggggaagaaattcctactctgttctccaaccatagcagtggaagcattcggcctgaaaccaagagtggttccattgcaccaactgaaggcctttctaatggaaatagccttggaactagcccttctgacgtgcttcacaggacaaagtggcacaaatctgataagaaaatggaagctcctaaggctacaaaggctgatcctcatgccgaccgctccacagcaagtatttcttcccctgaggcgaagcttaccag

SEQ ID NO: 49005 - DNA, 496 bp, Setaria italica
  Peptide Sequence Number=SeqID_114979
ttatttctttagttttcttttcttttccttttgttttaaggttttaagtttacctttatttcctttctttccttattgctctcagtctgtagcaatgacctgtcagcagcaggatcccatggtgagtcatctgatggttggtcaatgcgcacgttttctgaaatggttgcgacatcccaaagagagaggtggtcacttgacagtgagctcttaggatccatttccagtaaaatgacaagatcaaatgcttcaaattccacaagccttcctccggatcaagaggtgtgcaagctgtgtttaaaatgttaaaggaagatcgacttggaatgctcaggagcttgctgttgttgctgttttgttgtgtggccatgtttaccatgctgactgtctggatagcataactacagaagctgacaaatatgatcctccatgccctgtatgcacacacggggagaaatgtacagtgaagctatttgggaagctggaatcaaagatc

SEQ ID NO: 49006 - DNA, 171 bp, Setaria italica
  Peptide Sequence Number=SeqID_114980
agtgccttacattcctgtatgctgatacttctatcggagtaatgcatggctgtgtcctctcctttgcagctatgcagcaattagctcccatgttgcttaaagaaagaattaatatgctgggcaaggcactggagagagtaggattgcttccaatcatcataaggaagaatc

SEQ ID NO: 49007 - DNA, 428 bp, Setaria italica
  Peptide Sequence Number=SeqID_114981
agagctgttggaagagagagaagcgggggaataacccttaatattttggctcaatgcatatgcagccttcttcccgataaactcatcatcttcgccaataatatgtctacgctcagagtgcccaagaataacccattgacagccgatgtctaccaattgttctgcactgatctctccagtgtaggctcctcctttcccaatccatacattctgagcagatacctcaatgcggccagttagtgaattcttgacctggtcaatgtagatgttgtggtggcacccccgttcatttatattgaccaggtcaagaattcactaactggccaatataatgacggggtgccaccacaacatctacatcagcttcaagtgtagcagcattcaattcagagacaagcttgcaatggaacaaaggactccattagcaa

SEQ ID NO: 49008 - DNA, 247 bp, Setaria italica
  Peptide Sequence Number=SeqID_114982
caataaccttaatattttggctcaatgcatatgcagccttcttcccgataaactcatcatcttcgccaataatatgtctacgctcagagtgcccaagaataacccattgacagccgatgtctaccaattgttctgcactgatctctccagtgtaggctcctcttgtccctatccatccacccgtcacctacctcactcatcgctaccaaaaaccctaaaccccattccgcacctcaccgccgccgcc

SEQ ID NO: 49009 - DNA, 246 bp, Setaria italica
  Peptide Sequence Number=SeqID_114983
gagagatcgagcacgctgcaggcagggggcgtgcggggggttggtgcgtgtggtatataatgcatgctatgcgtccggtttgtctcaccttgttgattcgagctttagatgagacggtcgccatggacggtctcaaagttgtaatattattgcaaattcgaggataaaaccgttcttgtttcgttacatgagagatcatctctgtgttagctcttccttgagcccttgacaccggatctgtggcga

SEQ ID NO: 49010 - DNA, 267 bp, Setaria italica
  Peptide Sequence Number=SeqID_114984
cccggtgaggcggcgtcgccgccgcggcggccgccgattggacggtgcctccgttcatggtccctcgctccaccggcctagatctagacgtggagtgcgagtcaaagatggggtgcggcgcccctgatgcgtggaccggctgaatggattcttcccgtggtgggaggcgttactggtctagtggctggtgtggtcgtgggatgtagatgttgtggtggcacccccgttcatttatattgaccaggtcaagaattcactaactggccg

SEQ ID NO: 49011 - DNA, 331 bp, Setaria italica
  Peptide Sequence Number=SeqID_114985
ttagttactttacttaagtttttaagtttgttcttaggttcttaacccttctaaatttttactagtcctacttgtctttctaagtaatttggggtaaactaaaattccccaggttcatgcagctgatccaggaaaaccaagcagaattcatgcgcttgatcaatgaacctctggagggagatgaagagaatgaaatgaacatgctggaccagattgcggatgcagctgagaccattgctgtcactccagaggagaacgaagctatacttcgtcttgaagggatgggctttgacagggcgcttgtcctggaagtgttctttgcctgcaacag

SEQ ID NO: 49012 - DNA, 310 bp, Setaria italica
  Peptide Sequence Number=SeqID_114986
ttttaagttttactttttaaaggttttactttaatttttacttttagtttactttaaaatttcttaggttcgttcctttccttacttctagtactagtttccttgtcttacttccttgtctaccttctaaactaccttgttggcaccagctgcaccggcaccaactgtacctgtcagtgcacctgctccaactgccacagcctccccagctcctgctgttgctgtatccactgaagcagatagttatggtcaggctgcctcaaaccttgttgctggcggcaacttagaaggaacattcaatccattcttg

SEQ ID NO: 49013 - DNA, 354 bp, Setaria italica
  Peptide Sequence Number=SeqID_114987
cggaaataggtgggatgaaaaggcagcggaacaaatcccagaatacctgaggcccttcttcacaaatgtgattcgctgtaccgataaggtcataggggagttaaaacttcagaataacaagcatgccgaggtggtaaaagaaatggtaagtggctcctaataagagagaaaaaaacagggagtgtttttattgttttgctttggaagtcaatgttaacatctggacatccaactgaatgttcaggcacttcacgttaccaaatcctaccacgctgaggtcacatggcgtgatgaacactacgtgcctgccgatgttgacgagcatctgcagatctcgttgggaagcgttacagc

SEQ ID NO: 49014 - DNA, 260 bp, Setaria italica
  Peptide Sequence Number=SeqID_114988
ggaggtgtagctaggggacttgaagccggtggaggagttttgtcacttggaggtgtggctggtgggctagacattggtggtggtggtgactgttgcccataggttggggttgtggccgggggactggattctgatgatgtgggtggtgagcttggagccactggaggaggcttaaaagcaggccaggtaatgatggagccaaagccagtctttgcaaggatagaaactgagacggaagctgaagctcaagcaacttcaaa

SEQ ID NO: 49015 - DNA, 241 bp, Setaria italica
  Peptide Sequence Number=SeqID_114989
gctacatctgggggcatgcctacagcgacgtggaggaggtggtggtatatgtggccaggatgatgctggtcatcgcagtgacaatattcttcgatggaatcatgactgttctttcaggtacagagttccaaaaatttagctgacgcatttctctgtggaaaatattcatatcttgcaagcagaacatggactgtaggaagctgtccagttccaataggaattcaaaaaccccttctagtaa

SEQ ID NO: 49016 - DNA, 179 bp, Setaria italica
  Peptide Sequence Number=SeqID_114990
acgagcacggacacgtcgaacccgaggctcgccgccatgtccgccatcgcgcgctcgttcatgaacgcgcgatggcggacatggcggccgagccctcggggttcgacgtcgtcgggatcggggagcccgacacgagcacggacacgtccaagtttgcacggctggtgaactcgtgcgac

SEQ ID NO: 49017 - DNA, 338 bp, Setaria italica
  misc_feature (324)..(324): n is a, c, g, or t
  Peptide Sequence Number=SeqID_114991
tcttttcgtattgttgtacttgggtttgtattggttctaattggtaaaactaggtaattcacagaatacattgaaagcaaaatttaaacaaggcgccaaggttgaagtcagcagcgacgatgaaggttttcatggagcttggtttgaggcaactgttcttaaatccgctggcagcaagtttgtggtggaatatgctacactgaaggccgacgatgagaccaaacctttgacagaagctgtagaatcgcggcacattagaccaccacctccacatatcccctgttgttgatggattcaagttacttgatgaggttgatgccttcngcaacgatgcatgg

SEQ ID NO: 49018 - DNA, 443 bp, Setaria italica
  misc_feature (16)..(16): n is a, c, g, or t
  misc_feature (29)..(29): n is a, c, g, or t
  misc_feature (61)..(61): n is a, c, g, or t
  Peptide Sequence Number=SeqID_114992
gttcaacagcaggtangggttttgcagtntcccacaattccttccacaagttccttctagntaaaaccagaccacatcaaatgaaaatacttaagcttataagttggcatgcagaagagacagatagagagagttatcagttatcaccttttgtttgcattctatcacttaatcggccacgtctagatgagccttcccctactgtggtactgtttgcagcacaatcttcggaccaatcaggtggagagtgccatctaacaaagtcttccaggacacagccaggatttgctgccttgaaagcctgcatgtctgatagaagttgagagcatccagcaccaagactccctgttcgtaatacaagctcctctgtttcttttataagctctgctgtcatgatggggccttcctggagtgttggggcatagataagctcaccagtctcc

SEQ ID NO: 49019 - DNA, 244 bp, Setaria italica
  Peptide Sequence Number=SeqID_114993
ccttgtattctctgagaagaacatttttaaacttgccttgaaagcctgcatgtctgatagaagttgagagcatccagcaccaagactgagaaataataaaaagcatcacaaacattgttttattacttagtgacagaaatgaagatataggatgactgcacaaggatcagatttgcaaaaggaagcagttgccaatgacaccccaataaaaactgaaatgtattacatggatcagtattgaact

SEQ ID NO: 49020 - DNA, 253 bp, Setaria italica
  Peptide Sequence Number=SeqID_114994
aaagcatacctaatttgaacaaggagtacatcagagattgagtttcatcatcaccaaaaaattcagaactagatctttcttccttgtcgcgccgaacaagtgatttaacaacagacaagctcaagcctcccttgtctttcagaaattggtctccagtagccctcatatgactcattgacttgaaatttttcccatgtctacaagagcacgacatggtttatacatttcccatgtacaacattcaaatagccta

SEQ ID NO: 49021 - DNA, 244 bp, Setaria italica
  Peptide Sequence Number=SeqID_114995
ttccagagtggcgggcgatctttggtcataaagttgagcttcagtttgaagcgatttttattttcaatagacttttcgtcaggttgctccatgatctggagagcttcttcagggtgggttactatggcttccatcgtctcgtacacctggcatgtcactagtgtgttcatactacactacaactgcagcattacaatttctggatgaataaataaaaatagaataccttgcagatctcatctag

SEQ ID NO: 49022 - DNA, 225 bp, Setaria italica
  Peptide Sequence Number=SeqID_114996
ctgtatcaaattagatgcgtgtaaggatgcacatgaatggtctcaacagacattgattcatataaatccttgtgtgcaagactgcaaacctgaagagggtctccgcggacttgccagggctgcagaagacaatcttgctcttggtgcgctgagtcaggaatgggctcatcaccttgtttgccgcaaggtaccaccacggcacattgatgaacacctgcaattgat

SEQ ID NO: 49023 - DNA, 221 bp, Setaria italica
  misc_feature (174)..(174): n is a, c, g, or t
  Peptide Sequence Number=SeqID_114997
ttaaagttaaacaaaacgaaaataaacaaaagaaacaaaccaaaccttagaccgggactacgactacaaccttagaaaagactaccccttacaatagaatcggctcctcgtgggcgggaaccttcctcgtcttctgcacgatcacggtgtagccgccctctgcgtcggggggtnaattcggcgccgtagctcacctcccatcccagcacgcggagctccca

SEQ ID NO: 49024 - DNA, 301 bp, Setaria italica
  Peptide Sequence Number=SeqID_114998
cgttcacctctgtcaaggttagatcattccctccagtgatattccatacaattccagtagctctttcaataccaatatcaagtagaggagactgtatggcattaagtgcggcatctctggctcgtgtttttacctgttgctgttccaatacccatcaatgatgaacctgcatctgacataactgaccgaacatcagcgaagtccacattcaccaaacctggcacctgaaagccaaagaaggtagcagcgagtgacatgtttagccatgtagtcatgtagatcacatgtaattgtcataacg

SEQ ID NO: 49025 - DNA, 239 bp, Setaria italica
  Peptide Sequence Number=SeqID_114999
tgacacatgccctgcagctaccagtctccggtggctgtgacgacgactgacgacggccgtgcgtgtgttgtggttgcagctgagactctggggttcgagagctacgcgccgccgtacctcagcccgcaggcgtcggggaagaacctgctcatcggcgccaacttcgcctcggcggcgtccagctactacgacgacacggcggccgtgtatgacgcgatcacgctgacccagcagctcaa

SEQ ID NO: 49026 - DNA, 233 bp, Setaria italica
  Peptide Sequence Number=SeqID_115000
cggcgccaacttcgcctcggcggcgtccagctactacgacgacacggcggccgtgtatgtaagtatcataagttcatcgcaccatgtcagcatgttgctacatatagagcaaaagactttgggtcagtacagccatttttagcagcacaagattttgcatcatgagactacgtgacaggtacgtctactacttgttgtgcacacgtgcaggacgcgatcacgctgacccagca

SEQ ID NO: 49027 - DNA, 244 bp, Setaria italica
  Peptide Sequence Number=SeqID_115001
agcaccatggcttcccttgttctcctcatggcgctgctgctctcgtgcagcggcatgagcggcgcggcgcgggtgctggaggaggtggcacccaaggaggagtacccgcaccctgccgtgccggagctgccaaagcccgagctgccgccgcaccccacggtgccagagctaccaaagccggagctgccccacccggacgtgccggaggtaccagagcatgagctgccgccgaaacccgagagcc

SEQ ID NO: 49028 - DNA, 246 bp, Setaria italica
  Peptide Sequence Number=SeqID_115002
tgcaagtcaagatcctagcacattgggaacacacaaatattaattttaatattcttccacaagagcaagtatagatttttaaaatggaagaacaatatatatacatcactggtagcctttccattttccatcagaatataataggctattatgacctccttgacctcctgttgaatcacatcgtcgcagaggtgcagtagtgtgcctttcccactatctagttgtttgtcatacattgattgagtg

SEQ ID NO: 49029 - DNA, 325 bp, Setaria italica
  Peptide Sequence Number=SeqID_115003
gaagacatgcttccttagagaacgtctactattctgaaatgaaagagaatgatagcacacggttgtgaggttatacaaccataaaccaaatccagctccacttgcaacaaggaaacagccaaacagtgatactccattcagtagcaacatcgcgcacacatagttgtagtatgctggttttgcaggtagcctgtccctccatcttgagtgatgcatgaaaacaatcaggccatacactccagtaagcaccagtttgtggagaatccataggccccatttcccaccagttccttgatcagcatcaatgaacaaaggaacaccgaag

SEQ ID NO: 49030 - DNA, 284 bp, Setaria italica
  Peptide Sequence Number=SeqID_115004
tgctaaaatctgctggatgattcatgctcgtaagctcctctcatgggttttggaaaatcattagacgttacacaaattggcattcaagttgatagctaaagatttgccttttttttttcaaaactgaagttttatgttttgttgtctgtgcatgattgttcacatgcaaagcagtcactgaacctgaaactggtttgcaggattgggagcacggctggagttgagtgagttcttgttggatatggaaccatcaagaataccatcttgtaaaaacttttttacaa

SEQ ID NO: 49031 - DNA, 497 bp, Setaria italica
  Peptide Sequence Number=SeqID_115005
agaaagtaatggaattatttaactgattatatatgccacaatcaattttgatccttagcttcaaaacttgtagaagatcttgtaagttgctttgcggatttcaatctgaggcagctgcatcattaactccttatttctgaaacgaaatcaacttctctttttttgacgtatatacagtgagggaggccccagctgtttaggattttattgaaaccaaaagaactaaaaagaaaactgtacaaaactgccaaagtagtgagagagcagagagagaggagagggttgtacacaactaaaaaaaccaaaagatcaaagccagaggaaagagctgataatctctacaggaggtctgtccaactaaggaaagccgctcttctatcttcactgaatctatgagcttgtagtagactttcatcaatgaaatgctgtttccaaataattagacaaagacttaaggtacttagtaattttacttttactaactaagtaattagtaa

SEQ ID NO: 49032 - DNA, 360 bp, Setaria italica
  misc_feature (50)..(50): n is a, c, g, or t
  Peptide Sequence Number=SeqID_115006
tttgtgctcaataacatcccgctagcagaacagcagcacacggcaagtancctacattggggaagcaagatcagacatgtgagtacagagttagtgttactgtattaggtacacaggcaaaacatcatttcagatatatccaagtttgcattcggatgatgaatcatgcattaggcatggctgaggccattcttgggtcagatagttcaaaaggagattgcttgtaccagtcccatggcaatatgtgcatcttttcttctcttgttgcctgacgtttctcacttcaaccaacattaaagctgagataacgccaaccgcgccacctgaaaaggatgccactatggggtctacctgactcat

SEQ ID NO: 49033 - DNA, 258 bp, Setaria italica
  Peptide Sequence Number=SeqID_115007
tgatctgttctcttctgtaaccaggaacaatttttgtgcaaaactgaattgaagcactaaatatctgtttaatctgcattatcaccttgcaattttacctaaagacaaatacctaaagaataataaccgttccattgtttccgattcaatcttttaccagcatcaaactgataaatgtgaaacacaatggcaatagacagcatacctttccagctcctgaacaactctgacaccttccattcattgaccgcatattta

SEQ ID NO: 49034 - DNA, 280 bp, Setaria italica
  Peptide Sequence Number=SeqID_115008
tagactacaacaacgggacaaaaaacgaagcatcttctatcctacctcaataagcaagctcatgtaggcagcaacggttgcctctcatcagtgccaatccgatggcttgcatcatcagcagcaccggcagtcatatttacaaaagaagattcagatgacctgtgaaagaacaagcacattaggaggacacacttaaataatccttaaaaaacagcttgttatttctataaaatattaacaggcagcatcccaaggcaacacacggggaataggatagaca

SEQ ID NO: 49035 - DNA, 375 bp, Setaria italica
  Peptide Sequence Number=SeqID_115009
tgtcggcgaagcggttgaggcggagcttgtacggctcgtcccgcttcgccgacatgaccgccgacgagttccgccgccactacgccgggtccagggtcgcccaccaccgcatgttccgcggcgaccgccgccagggcgggttcatgtacgccggcgcccgcgacctcccggcctccgtcgactggcgccagaagggcgccgtcaccgacgtcaaggaccagggccagtgcggaagctgctgggcgttctcgacgatcgccgccgttgagggcatcaacgcgatcaagacgaagaacctgacgtctctgtcggagcagcagctggtggactgcgacaccaaggccaacgccggctgcaacggcggcctcatggact

SEQ ID NO: 49036 - DNA, 306 bp, Setaria italica
  Peptide Sequence Number=SeqID_115010
gaacacgacgagctctgaatattatcggtcgtcctgcgagcatctgatgacatgaattacccagtgactgatgaataagcagcatatcatactctagttattgatgatcgatgtatgcacggacagacaagatcacgccatggactgtgaattggcatacgtaacatgttataccccagcagtaatttctatgattaatgcaattctatgattaatgtaattcatgtgaaattagacaattacaagtaatagtaaatagtaaattacaattaaagaactttagaaaacaatacaaacaaaaaaaaa

SEQ ID NO: 49037 - DNA, 238 bp, Setaria italica
  misc_feature (151)..(151): n is a, c, g, or t
  Peptide Sequence Number=SeqID_115011
acgacatctggtccgccagctccagctgcgagcccttcttctactggctggacatcggcgccggtagagaccagcatcaccccaaatgcccaagaagcaagctctattcgcaactcatcatgtacctcggaccggtatgtactgtgcccanaacatccttctaaataaacatatacaaaaaaatattctaattgtattgcaacatatataaatagcttgcgactgatctgaatgttac

SEQ ID NO: 49038 - DNA, 463 bp, Setaria italica
  Peptide Sequence Number=SeqID_115012
aagaaactctagtccttgctcttcaatgtgcttggatacaggttcatctatacgacgaactagttccttcaatctaaaaacaagacgctgaattcctggttgtgcaaaggtgtaatgatcctgcattccatcaagaaacttcgagagacaccaatagcagtctgcttctatgttagaaatgtcctgtgctgaaagattgtccatcgaccaaccgtccatgttgccctctaggtgctctgataagaacacgatcaagaatggcgtgacaaggtcatttattccttggacgtagccgcttgctgggtgacgaatagccctgaaaaccccacatcagaacaatggagataagcaaattaacacaaccctggttgtattaaatacgaatgacaacgccaacagtcaaaaaatattagtaaaagtcatgtttgcactaacagaacggctgcatgtggatgataattgg

SEQ ID NO: 49039 - DNA, 295 bp, Setaria italica
  Peptide Sequence Number=SeqID_115013
tcctaagtctaagtaaaattgtgattgatacggttcccttgatcgtctctcctagctcccttctgtcgttgtatcatacacgcatcccaatgtaatgtgattgattaatcgacagaagggagctaggagagacgatcaagggaaccgtaccaagcaagaaaatgtgttcgttctttttcttttctattttagctctaactttatcatagattctagtactagagatatcagaagtatacatactgaaaaattggaatttcttcttaacctaaaaaaaaaaaaaaaaaaaaaaaaa

SEQ ID NO: 49040 - DNA, 373 bp, Setaria italica
  Peptide Sequence Number=SeqID_115014
tgtctaaactttgtttgtcttgtctattgtcttgtctaattaagtcttgtttctactattgtccgtatttcttgtcctattgtattaaagtttagttgtaccatacaatggaaaggaaagcaacacaggagatgatgtgcatggtatgcctgaagattcaacctgttggtccaatctgccaaaccccgtcttgcaatgggctatccatggcaaagtattactgtaacatctgcaaatttttcgatgatgaaaggaccgtttaccactgcccgtttttgtaatttgtgccgtcttgggaaaggtctcggtgtcgatttcttccattgcatgaaatgcaattgctgtcttggaatgaaattagctgagcacaaat

SEQ ID NO: 49041 - DNA, 247 bp, Setaria italica
  Peptide Sequence Number=SeqID_115015
cttgcagctctgtccaacctagaattgtgtgtattaacttctctagacatcctcctagttctgttcaaacaaaacttatgtcactccgcattttctctactagacgtctcctacacatttcagagagtataataaaccaacactatttgatatttctaggaaagcaacacaggagatgatgtgcatggtatgcctgaagattcaacctgttggtccaatctgccaaaccccgtcttgcaattgggtc

SEQ ID NO: 49042 - DNA, 380 bp, Setaria italica
  Peptide Sequence Number=SeqID_115016
tcaatgcagctccagatcccagaaatgcattatttccaggtgtgcaactgtgagttaacatcttgttaaggaactatgtcataacaactgaacatgggtgtgagtgtgtgtggttgtaagtgtgtaagggttatctacccttttttctcttcttaatataaagatatgcagtctttcctgcgtgttcaaggaaaaaaaaagaaccactaaaaacttgcctcgagtcgtagctatctgacgtaagatcatccccagctgttgttacatgaagatagtaatcagtatccagctcccaaagagctggttttcctcttgtggttgaaaatatcccagaaatagatttatagcatcttgtttctcaccatcagtgtaggcattac

SEQ ID NO: 49043 - DNA, 405 bp, Setaria italica
  misc_feature (18)..(18): n is a, c, g, or t
  misc_feature (63)..(63): n is a, c, g, or t
  misc_feature (96)..(96): n is a, c, g, or t
  Peptide Sequence Number=SeqID_115017
tgcgcaggaaggcattcncttttttgccgtgccatggatgtcacggaagttcagcagggcatncgatctatggatgccagaggcggtgcgcctaancttttccatgcccttggaccagcactcctgatatctatgggggtacattgatcttggaaagtgggtggcagcagtggaagctggttctcggttcggattcgaccttgttctgctggctctcattttcaacttcactgccattgtatgccagtaccttgctgcttgcattggcactgtcacagggaagaatcttgcagaggtattggtttacctgtgttgttccttggttttgctgacttctcttgagatatagttcactcaacattttttccatttcacaaatcacaatgctcatggtggtttgatgtt

SEQ ID NO: 49044 - DNA, 359 bp, Setaria italica
  Peptide Sequence Number=SeqID_115018
aactaagtaacgaaaggttaaataactaaggtttagggtacgtagacaagacaaaggaaggcaagctagcagccattcttgatgagttctgggggcatctctttgattaccatggtaagctcactcaagaagctagcactaaaaagtttgatatcttacttgggctagaccttagagcacctagctcagctgcaagaacggataaacaagctattgaaatccccaagagtccgatggtgagagacacaatgcgagggccagctttcatgccaagctcagtggacctgatgtcccctaagaatgagatgtcgaacttagaacttacatatgggacttcagaggggcacaagcatgggatc

SEQ ID NO: 49045 - DNA, 272 bp, Setaria italica
  Peptide Sequence Number=SeqID_115019
tcctaccttggtctttttgtctatttttatttgtactttttgtattgtattaagtagtagtacgtctgaggatgcaatccgtgatctagatggcaagaatggatggagggttgagatatcacgtaattccagcagtggtcgtggtggtcgtgatcggacaaaggtgggtactgagtctaagtgctacgagtgtggtgagactgggcactttgctcgtgagtgtcgtttgaggattggttctggaggtctaggcagtggagcgccgaagcagg

SEQ ID NO: 49046 - DNA, 219 bp, Setaria italica
  Peptide Sequence Number=SeqID_115020
taaaaactaaaaacgtaaaaaggaaaaacgaaaacaaaagaaactaaataaagaacaaggtaacaaccgacaagtaacaaaccgtagacaacgaagaggcgtctccataatgataatgggtaccgccgcagcaggagctagagccagatacttgtctgatgagtgttctgtgacagatgttgctctttggcctgccagttatgatcagtaacctaccgg

SEQ ID NO: 49047 - DNA, 220 bp, Setaria italica
  Peptide Sequence Number=SeqID_115021
cccctcgtcatcatggcaaccctcccacctgctctgtggctcagcctcctcgccttcatcctcaacctcctcttcatcatcctcttcatcctcatccctgtcttcatcagcatcgtcaggatcagctgcatcaaagtcacttccaatggccatggcctgaggttgggcgattggttgaacaagatattctgtgtcttcatcctcatcatccgcatcctca

SEQ ID NO: 49048 - DNA, 452 bp, Setaria italica
  Peptide Sequence Number=SeqID_115022
atgcaattgctggcgggatgatacaattttgatggacaccgcctaagagtggaacctgctcatggtggtagaggtaatgcttcctcacatgatcgtggttcaggtggctttggtgtggggcacgccgtggtgtgtcaaggcactcggagtatcgtgttcttgtcactggactgccttcttctgcatcatggcaggatctgaaggatcatatgcggaaggctggagatgtttgtttctctgaagtttaccgtgaaggcggtggcaccgtaggaattgtggactacacaaactatgatgacatgaaatatgcgataaagaagctggatgatactgaattcaggaacgcctttgggcgagcttatataagggtgaaggaatatgatggcaaaacgtaggtacgactaccgaactacaacgtaagaccgaaagacccaaagtacgtaagactaaca

SEQ ID NO: 49049 - DNA, 245 bp, Setaria italica
  Peptide Sequence Number=SeqID_115023
atcatctgttgtgaagttttttttctatcactttattgagaggtcactccttccttttctctgaggaatatggtttttggcggcaagttcttcacatgtatttcttatttttgttacaggcaccgtaggaattgtggactacacaaactatgatgacatgaaatatgcgataaagaaggctggatgatactgaattcaggaacgcctttgggcgagcttatataagggtgaaggaatatgatggc

SEQ ID NO: 49050 - DNA, 215 bp, Setaria italica
  Peptide Sequence Number=SeqID_115024
cgcttccgtactcacgtagccgaagcccaagtcgtagctacagcagaagcaggagcccgagcaaatcacccagggctcgccgctcagcatctagatcccggtctaggtctgtttcttcccgttcaaggtctccatcaaaaggccgttctccgtcaagcaccctggtgccatcaattaagtgaacacagctacattcccagacctcaattgtctcg

SEQ ID NO: 49051 - DNA, 323 bp, Setaria italica
  Peptide Sequence Number=SeqID_115025
tacggaaaccccttactacttaagaccttttagactagtagatggatgctccctccagccagtcatgtaaattacttgaaaggttgctggaatagatccgtcctctaacccaaacattgactggtaaattgctgcagtcgccaaggctgtatccctttttaacacaggatttctttgaaacagagcatttgtttcccccattgctctcagatgttcaacaagttccaaagctagttgacaaaagcagcaaaaaccacagcacatttaagtaacccataaaatctccatagccaaaatcatcatatttctgtgatttaagaagg

SEQ ID NO: 49052 - DNA, 244 bp, Setaria italica
  Peptide Sequence Number=SeqID_115026
tggatgagatccgatccttgaggtttggttttcctccaacaagcttgctagctctttgtggagcctctcgtgatcttggtcatctgcaagagcacattttgtttgatgtggattatattttcaatgttacattattaaccatcaaacattacaggcttacctttgttacgcttttttgaatcgctagcattgataaaagagaggaaatatggagacatgtctggattgtccatgtcagtttcaa

SEQ ID NO: 49053 - DNA, 379 bp, Setaria italica
  Peptide Sequence Number=SeqID_115027
catgccatcacagtagtatattattattatacacagccaaagcctgtaaatattgtaaagatttgtttgtttttttgattttttgtacctgtttctgaatctctctctgttatcaggcgctacatgttgctggccaggttgcaggtgcatccgtttcaacctcaccctcccatatggcacaatgactagtcaatgtgaagcccttggattgggcacgaggaagaagctatcaagctggcttgtcagtggccacgaatcgactccagacaatcctatgccaagtcttcctactgcccatcattccatcattcccaaggtaaattcttgtggtttcgagagcatccaccgtgtgttcattctagtagtcctattgttccta

SEQ ID NO: 49054 - DNA, 372 bp, Setaria italica
  Peptide Sequence Number=SeqID_115028
ttaaaagaaaaactaaaagggaaactaaaaaacttaaaacaaaaacgggaaacaaaaggaacgttttaactaagaatagaaataccctttacttttagaatagaaggaaatgttacaaagaacctcttcagtagattgcggcttgcacgaatcaccaattacgaacacagctagctccatctcaaagattactctaccacagtctgttccacatgttttaggtgttggtcaattgttggaatcagcgctacatgttgctggccaggttgcaggtgcatccgtttcaacctcacccctcccatatggcacaatgactagtcaatgtgaagcccttggattgggcacggaggaagaagctatcaagctggcttg

SEQ ID NO: 49055 - DNA, 233 bp, Setaria italica
  Peptide Sequence Number=SeqID_115029
gctgttttcatgatattatccctgcttgcttatgtgttattctcttgcaggcaacgagcaattgattttaaccgctgtcatccggcatttggatcacaaaaatgtttcacatgatcctcagacaaaatcagatattattcagacagcaacatccttggcacggcagcttcgatcccgaggatttactgctgaacttgtagtagcaggtgacttgtgcaagcacttaaggaaac

SEQ ID NO: 49056 - DNA, 192 bp, Setaria italica
  Peptide Sequence Number=SeqID_115030
aattacgaacacagctagctccatctcaaagattactctaccacagtctgttccacatgttttaggtgttggtcaattgttggaatcagcgctacatgttgatagcttcttcctcgtgcccaatccaagggcttcacattgactagtcattgtgccatatgggaggggtgaggttgaaacggattgcacctg

SEQ ID NO: 49057 - DNA, 389 bp, Setaria italica
  Peptide Sequence Number=SeqID_115031
tattagttgttcttagtactagtcgtaactaattggtaggtaagtaggattcttgaatgggatgagatcgaagatcttggagagcatgaagaaaagaagggcagcacccatgactcaagccctgctctgaaggaggagctgcgaaagaggctgagtgtggctgaagatgacgaagatttgagctgggatatcgaggatgacgatgataagtcttgaatacccatgcatgctggtatggaggtgccaattgcatttcaacatttacctttcattactcacgaggatacagttattcagccaataaatattggttaattatgctgcttatgcaatgaaatacacgtgtaaactgtaaactctcaagtttgatgatatcaagtggcaattgg

SEQ ID NO: 49058 - DNA, 284 bp, Setaria italica
  Peptide Sequence Number=SeqID_115032
gtcatcatccaatagggatgctgaggcaagcacatccactagcatgaagcctgttaaaactgaagaaccaggagatattgttattgagaccgacacttaactgatgacaaacctatgcgaatagaccaagaaatcctcgtcatccatccaatagggatgctggaggcaagcacatccactagcatgaagcctgttaaaactgaagaaccaggaacagatctgcttccgaagaaatgaatgatatgacaatcagtgatgataaagctagatggcctacaatagat

SEQ ID NO: 49059 - DNA, 265 bp, Setaria italica
  Peptide Sequence Number=SeqID_115033
ctccaacaagagaagaaatcaggtgcatgaacccaaattactctgaattcaagttccccagataaaagcccatccctggcacaagcttttggtaagcgcatgccacctgaagctgttgatcttgtgtcaaggctacttcagtactcaccaaatctgcgttgcacagctgtaagaactaatttgagatctcaactgtaccaattagtaaagtcacattagtatagttgtatccctattgatactaagctttacaagttattctgac

SEQ ID NO: 49060 - DNA, 438 bp, Setaria italica
  misc_feature (186)..(186): n is a, c, g, or t
  Peptide Sequence Number=SeqID_115034
tcctccactctccagctcatcaggggtctgctcaccgcgaagcctgcggcatcaaaaggaatgcaatggcattcatgtccacagactggcggtcgcaataggcattcatcagcttcttcagctgggtggacctcttgatgcggaagaacacctcgttgccatcctataatacaagagtaagagacntaaaaaacttggcaatgagaaatcagaacattgaaacctaaaacaatccaatctgtaatgtaaaaatgctgcaacatccaacctaatcttgatcagtaaagggagaatgcaatcttaatctcccaaatcaattgatcgtactaaaaaacttagttaaatgcaagtttcaactttttcataagacacatgcttggatttctggataatgcttgaaggatgtctcaagttaaaaaagaatagccaagcagaata

SEQ ID NO: 49061 - DNA, 309 bp, Setaria italica
  misc_feature (145)..(145): n is a, c, g, or t
  Peptide Sequence Number=SeqID_115035
ttttgttattttccttattttgtttcttaattttgttctatttctaagttgtccttctaactaaagtctttttattattatttgcaagatacaggcggtgaacatcttcatgatcctcattaacccccaagctccttagcaattntctccttaccaaaatgcttgtagacaagtccagcgctgctaagcttagtgttgaatccatgtccaaacacctcattaaagccttttctggtgatgatcgtatcgatgccggctgggatcatagacaccaccgacatcaagcacggcatccagtgtatcaaaggg

SEQ ID NO: 49062 - DNA, 412 bp, Setaria italica
  Peptide Sequence Number=SeqID_115036
gaaatccgaaaatagggtcctcttccctttgttcttaaatgtagaccaagccttgtcccagtccgtagaagtttcacctgacaagtaagaaaatatatggttactacattcatacagatatccaaataaactacctatgaacagataagtaaaagtacatattttggttcttatttaaaaaaggaaggcaggagcgctgccatcttaattaaaaagggaaacacattcttttgaaaggtacattggattgcatcagcagatccaaacaataaaaacttacaatttacaaaaaatgagaactgattgctcataaagctgttcataaaagtttagcctcctaatgctaaatttctttgagaaatgtcctccgagatcaggtagtgggttctatctggttgtcagagttgatttt

SEQ ID NO: 49063 - DNA, 228 bp, Setaria italica
  Peptide Sequence Number=SeqID_115037
tgtaactcgtggagcacagaattttcatgcataagcagcagcatatagacggttagattcagcagtatcactctcctcgccttccactcccaaaaactgagatgtctttccactcgagcagttcctttcagagagcaacttctcttcagataaagccttctcaagcctctcttcaaatggcgttgcatgccaactcaccttttgatcttctttgtactttatttgtcg

SEQ ID NO: 49064 - DNA, 434 bp, Setaria italica
  misc_feature (385)..(385): n is a, c, g, or t
  Peptide Sequence Number=SeqID_115038
tgctatcagtctcaatttgcttaagcagtgtgtcccgccaagaaggctcaacataaaaatgaatagcttagatccaagtctttcagggttgtgttctcatcaattgtaattttgtccgttgaacggcctaaggatgaacctttcaagtcaaacctccggtgaattctaagttccgtgcaaaacatgtttcccatcactacaaaatggaacttttgaccgctggatggtttaactctgtggagaccaaaaaacttgttatgagtgtgttctcataggtccgcacatggtaaataatactctggaagcattcgcagagaacctgcaagagttttttcgttttagttgatccaagtgtcaacaagtgaaccgtcaaaggttttaaagntaactctatatgacaagtcaagcaccaaagccagataagctaaaagctc

SEQ ID NO: 49065 - DNA, 266 bp, Setaria italica
  misc_feature (241)..(241): n is a, c, g, or t
  Peptide Sequence Number=SeqID_115039
ggggaatatatgcgtatcaatatcttcacaaagtcatcagcccttttagacatgaagggtaaaaagataaaaataccattccactagaattttatcaattttttcctacacccgctaagaatagaatggacttttaccaataaataagctaaaaattagctttgtccatccaaacatgcccacaatacatgcatcatcgaaaaccaaatcaaactttgttatgtgtgcaaagcaccaaatntataaatatacttgcagaattgatg

SEQ ID NO: 49066 - DNA, 181 bp, Setaria italica
  Peptide Sequence Number=SeqID_115040
taatggattatagcttgattccttagaaatttgctatcagtctcaatttgcttaagcagtgtgtcccgccaagaaggctcaacataaaatgaatagcttagatccaagtctttcagggttgtgttctcatctattcattttatgttgagccttcttggcgggacacactgctatcagtctc

SEQ ID NO: 49067 - DNA, 495 bp, Setaria italica
  misc_feature (2)..(2): n is a, c, g, or t
  Peptide Sequence Number=SeqID_115041
cntaaaatgatagcttagatccaagtctttcagggttgtgttctcatcaattgtaattttgtccgttgaacggcctaaggatgaacctttcaagtcaaacctccggtgaattctaagttccgtgcaaaacatgtttcccatcactacaaaatggaacttttgaccgctggatggtttaactctgtggagaccaaaaacttagttatgagtgtgttctcataggtccgcacatggtaataatactctggaagcattcgcagaagaacctgcacttcagacttccgtagagtcttgatcataaatcgatcatcctgtgataggaagaagacacttccactctttccaggagacgataactccctaagtgcatcacttccacaaatggaaaccatgtaatctgctgcatcgatcttgaacatctccctcaaagtttactagaaaaaccaattagggacaagtaagtactttaccaatttaaaaatacaatacaagaca

SEQ ID NO: 49068 - DNA, 238 bp, Setaria italica
  Peptide Sequence Number=SeqID_115042
aagcaataatcccttgtgaagatttgaggaagcctccgttgtctgagagctcgtcatgcgtacggctcagcaggagcaagaaatatacgggaacaggctgcactgcacaagatggaggagatagatgggttactcttgcaagtggtggaacaaaacaaagtgctttctgcgtattaatgaaccttgatgatagcgtcaaaagccgagagcatagtaacgactgatctgatccgatccg

SEQ ID NO: 49069 - DNA, 401 bp, Setaria italica
  Peptide Sequence Number=SeqID_115043
aagtgaatcacagaaagtggaagcttcagcaacatgagacagctcatctgctcagatgtaaattagtgcattagttggtcaaaaacaaatgcagtagggaattccagatttgtaagttgtgaagaacctgaggaaacatcgtaaccattcatccttaaaaggcgaaatgccattgcacatgttgcaatgtccatcatgattcttcatctttctgtaaccagcgactgaatgtcatgtccaggatgcttttatttcactgacaaagcgctgagagattcccattttttcaagcgcatccaccattagaagctgccaatgtattttagaaggatacactgctggtactgcactgccaaattcactgacaagcaaatttaggtattgaagggcttgatcattgt

SEQ ID NO: 49070 - DNA, 398 bp, Setaria italica
  Peptide Sequence Number=SeqID_115044
tacaaaataggtagacgacttactacctaggaaaggactaatacaatctaatatggtgttctgagatataactggaagttgctccctgtatctcttcgccattgcctcagcttccgagaacactttctctctgtctgaaagaaacaaaccaggtgcactttcgaggtctgctatgctcaacgcaattttgtctgggacatttgacttgatcacgagaactttcacctcatcatctatctttaggatgtcgcttactgacaaaacacgacctctactaatgttcgatatgtgcaataatccacttctgtttgtcccagcaatcctaatttgtgcaccgtatggaaaaattttgcgaacactcccttgtaggagagttccttctctaagataagtcattt

SEQ ID NO: 49071 - DNA, 364 bp, Setaria italica
  misc_feature (175)..(175): n is a, c, g, or t
  Peptide Sequence Number=SeqID_115045
agaaaaagaaacaataagaactttaacaaggttaggtagaataggtagaagacaagacaataacaagaagaaagccaattaactacagattatgacaagagaagagccatttcacagcctgaagagcctcaagcttctgcacaatctcatagtattggctccagatctgaagggngacgcagtcggtctgggaaagaaaggggaaaaagagacctgctcgccgcagaacacaacagaaaatggatgaattgtaactgtagaaggaggaagtaactattcttcacgcagagatgatgataaccaagtgctaagttctagttcacgatttgcatcacctgaggactccaaaaatagcagaaatctt

SEQ ID NO: 49072 - DNA, 455 bp, Setaria italica
  Peptide Sequence Number=SeqID_115046
ggccctcaatgaagataataggaattacaagtacaacgactaccaacaaaagatgctgttgatacgaagtgtgaagatagtcttttggatcctatagcagaaaatgccatcatcgagaatgtgaacgaaatcagcacagctgattctgtaacagtagaaactgccataattgaaaatgtgaaggatgttagcacaactgcagacaatgttaatcatggtgagctgtatgtttcatctcagttggcagagggaaacactgacaatggtatgactggtgcaggaaacactgacaatggtacgactggtgttagcacagcttccctggcttaaaagaggaaaatattgacaaagtagtggcagatgactgtacacatgaaagtgatataaatgccaagtatagctctgagttgaaagtgggaaatactgacattggtggtattacagtttcctctgat

SEQ ID NO: 49073 - DNA, 331 bp, Setaria italica
  Peptide Sequence Number=SeqID_115047
taaaattttaaagtaaacttaaaattaaacctaaggaaagaaaagtaacgacgaacaatactaaaagaataggtgaatgcgaagctcgcagctgaacttccatgtattttacacatggattcacttaaaggaagtcatactggactcaaggatatcattcaaagttatttatgggaagagtggaaggaaaggcaccctgaatcagcatcagatatttcagacaagttcttgaacttgagatttgtctcccttgagctccccccagcaggataattcatttgattgtgggttgttctttgctccattatgtggaactattttttgatggatg

SEQ ID NO: 49074 - DNA, 232 bp, Setaria italica
  Peptide Sequence Number=SeqID_115048
gctcttttttcgtcaagctggcagatcttgacaaagatcaggggagagctccagaaggtagagcagccttcttgcgtgttcgcaaatggacccgcaaaataaatgtatttgagaaggattttctgttcattccagtcaatttcaattacgtacctgtgttgcagcttgcattggagcttaattgttatttgctatcctggagaagtcgcgacatctaaagatggtgatgcga

SEQ ID NO: 49075 - DNA, 169 bp, Setaria italica
  Peptide Sequence Number=SeqID_115049
ctgacaattgcaaacacttcgcaatggatggtgcagcaccttgtgcagatgccgcaacctgcactgatggcgtggttctatccatagatgtaccctgcagcacgatcaatgaaacagtttcggagaacatatctgctggtgccatcaggcagaggactttgagcatcag

SEQ ID NO: 49076 - DNA, 443 bp, Setaria italica
  Peptide Sequence Number=SeqID_115050
aagaagctatgtaccgcacccttcgctggattgacaggtgcatagctggtatgattattaatctggctgacagaactaccgagttatctgtcattaagtgagagtctagttagaacttgtatcatttcacttactggctctatatatgtgagcattaaccaaaagaacatttgaaactgatagtgatgtattatctaatgacaacaatgctttatgggtgtgtgttctgttcaatgttcaattgtagctcacaagaaacctgatgtccagaacttatttgggattgtgcaaggaggattggatccagttcttagagatatctgcgtaaggggcttggttgagcggaatcttcctggatatgcaattggtggtcttgctggtggtgaagataaggactcattttggcgtgtcgttgcccagtgcactgctggatttgtcctgaa

SEQ ID NO: 49077 - DNA, 480 bp, Setaria italica
  misc_feature (28)..(28): n is a, c, g, or t
  Peptide Sequence Number=SeqID_115051
aacggaagtctcgaatccacaagatgangaaccatggaatcactgtgccaactgtggaagcttatggattcgcctgaagaagagaagcggcaatttagcaaagtaatgagcagtctcatattaccagagagggaatcacatcacctggcgttctctcccaggaaaaaaattgagaagatggaagctgaagttgagaggttaacaaactaaaaaccagcagactgaaggaaattgtcaagaaaaggaggacagaattagaagagatctgccaaaatgcacacatagaacctgatgtcagcacggcccctgaacaaactgatgctctgatcgattctggcctcatcgacccctctgagctcctagcaaatattgagtcacagatattaaaagcaaaagaagaatcccttagccgaaaagatataatggacaggaataaaataaagtaggaattagactagacttagtagaatagaaggaaga

SEQ ID NO: 49078 - DNA, 288 bp, Setaria italica
  Peptide Sequence Number=SeqID_115052
tttccttttcgtttcttttctttttcttttttgtttcggtttaatttttgttttggtttgtttcttttgttctttggtttcttcttggtagtagtggagagcgaaggtctcctgcacttgttcttcaatggtgggcgtaggtgctggcctgggcttgggcatggaaggtaccagctgcggtgctctgctcaaagagcttcagcaaatctgggcagaggtaggagaaagtgagagcgagaagaacaaggtgttgttggacatcgaaagagagtgcttggaagtctaccg

SEQ ID NO: 49079 - DNA, 410 bp, Setaria italica
  Peptide Sequence Number=SeqID_115053
cttcacgtgtattcataatcacccgatggtcgacactcttgtacttatcatagacatgatctgatgaagaataggatacaaaaagaagtttgataagatgatggcatcatagaactgaaccacgcttacggtgggtgtgcaatgtgcgagcaggtgtattttgtatagtgcatgccagcatgacacattttgatttacctatggatacttgtagtcatatcaaagactaatgcctaaagctatacactcccttcttgaagccaaacatgttctgagtttttgcttggaagctaataggcatttctatacatggtatctgtcagaaattgtaagatatcaaagtcttcaaacaggacaagtaatactggagttgcattaacttagtaggaagacaagtaactaagttaacc

SEQ ID NO: 49080 - DNA, 348 bp, Setaria italica
  misc_feature (57)..(57): n is a, c, g, or t
  Peptide Sequence Number=SeqID_115054
caaatatcataactgtaacatccaactgaaaggcacaaaaatctgtcttgtggatgntaaatgctcaaactgaatacagagtagcagtgtagtattcatttacataacaatgtaatatacagttgaaattcactaaacaaaatctttatatgactaattctactatgatgagtagttttttattaatttgtgtaggaaatagaatcaaccttttgtcaaattttgtattcccctctgtttgaaattactattacctgttcaattgaaggttggtactggtgctcgatctgagaagataaggacgtacaattacaaggacaaccgagtgacagaccatcggttgaagat

SEQ ID NO: 49081 - DNA, 463 bp, Setaria italica
  Peptide Sequence Number=SeqID_115055
cttcttggttaaagccagcaggagctactggtcttgatgccttgcacctatcaagtcagcaggcgttgaagcttctgtggtcgcctccgactcaaatggaaacccggatcttcagcgtgctctctctcttctgtcaaacaattcggccgatgctggtaacaaccagccgaccacccagctgcacccgggcctgagcgccctcgccagcacatccaacgcagtgatgcaacaagcctcaccaccagggctctggcaagacggcacggcccttgatcttcatgcgcggtttcaggctctcgatcccatgggcaacggcagtgccattgcagcagctcacgagctccagctcccgagaccgccctcgtacaacggctcctcttcccactatgacctgacgcgctgatgcttcctcggttagcgcctccgtggtcggttgcaggaatcagactggttctgatgtctg

SEQ ID NO: 49082 - DNA, 278 bp, Setaria italica
  Peptide Sequence Number=SeqID_115056
cttctgtcaaacaattcggccgatgctggtaacaaccagccgaccacccagctgcaccgggcctgagcgccctcgccagcacatccaacgcagttgatgcaacaagcctcaccaccagggctctggcaagacggcacggcccttgatcttcatgcgcggtttcaggctctcgatcccatgggcaacggcagtgccaattagacaagacaagactacaacgaagactaccaagacttacccgtaagtaaccgtacccttacgttaactaaacggtacta

SEQ ID NO: 49083 - DNA, 211 bp, Setaria italica
  Peptide Sequence Number=SeqID_115057
ccctggttcccctttccttccttccccactgcccttgccagttgccacagttgcagtgcaagaattttcagcaagacacagattcttcattcgccatcatcagaaaaggagctaggagaacggctgggatttttggttctggaatgggttcctttgggatggactggagccagaaggctccgtgttgtgggattgggagaatttgccaccg

SEQ ID NO: 49084 - DNA, 433 bp, Setaria italica
  Peptide Sequence Number=SeqID_115058
aagtagaattagtaagttctgttcctttctcatatgggagttctgctggttcagacgatccaaattcattgggatcgtattatcgcccatcattttatgtgccagacagcttgttgaataagctgttgatccagcaataattgtccaaggtgcatatgttcttctaaggattaaatgcctgtttcagatggttcgagcagagatgaagttcctactagtgatccacattgtttccttgcaatgtatcttgacgtaaggaataggcaggtgggattagaatgattcaaatgctacctataacaaactgaatgggatggttgttatacaatatacctgttttttatactaattcattctgtcttttttatatactaattcattctgcttagacatgattttgtgtctttttgtgctctctagccattactgaggc

SEQ ID NO: 49085 - DNA, 231 bp, Setaria italica
  Peptide Sequence Number=SeqID_115059
atcgtattatcgcccatcattttatgtgccagacagcttgttgaataagctgcaataattgtccaaggtgcatatgttcttctaaggattaaatgcctgtttcagatggttcgagcagagatgaagttcctactagtgatccacattgtttccttgcaatgtatcttgacgtaaggaataggcagcctccttctgagaaggcacatcagataattgcaagaacggctttat

SEQ ID NO: 49086 - DNA, 229 bp, Setaria italica
  misc_feature (192)..(192): n is a, c, g, or t
  Peptide Sequence Number=SeqID_115060
ttcgtctagttactacctattcccggtcctattggtcttattgtattggtcttgtcttcgtaagcttgcccttcgccgctcatctcaccatcaacgagcactggatccaggacctgcccgatgaccgcaccggcgaactccacaacttgctctccttcatccacaataacctcgacctatgcaaatgggttnctcttgccatcttcgccacgcaggcactctcactgtt

SEQ ID NO: 49087 - DNA, 355 bp, Setaria italica
  misc_feature (125)..(125): n is a, c, g, or t
  misc_feature (235)..(235): n is a, c, g, or t
  Peptide Sequence Number=SeqID_115061
tggccgcctgcatcgcctccgtcaggaggcccgacctcttttcccacctcgtcctcctctgcgcgtcccctaggcgagagctactccctccatctcaaattactattcattttaattttttaaanatataatttttctacgtatttagacataatatatatatatatatatgcaataaaaaactacataagaaaaaataaaatgaatagtattttaggacggagcaacacggccnctcctgctttcctccatgcgtgcatgcctcatccatgtgcgagccaggtggctgcttcgctaccaaaagcatggttattagcaaagttttatagaacaagatgtaaaaatttctagccct

SEQ ID NO: 49088 - DNA, 440 bp, Setaria italica
  misc_feature (315)..(315): n is a, c, g, or t
  Peptide Sequence Number=SeqID_115062
atataggtaccgagtttactttgcactctttatggcactctttatggcagtgtcaatttgatttaagatgtccttgtcattctgatatctccaatttggtactttttatcatttaaatgattgcccttcagttcctttgccttccagatttgaaaggacattgcttaatgaccttcccaagcgtacatttaattatatgcatatttcttatgactccattgctatttctattagattgtgagtatatagggagcaaatatttgtaactagcatgacataatataatttcacctcttctttttcttgtgctgaatnttactggtttttagttattaagttgttctaatttttttagaaaacttattgtgcatagacagacttgatatagatgccatcacaagtaatactgcttacagacatagatgtctttgtattttgag

SEQ ID NO: 49089 - DNA, 412 bp, Setaria italica
  Peptide Sequence Number=SeqID_115063
atagtctaagggcaaatactaacggaactggtagtggtagcaagtcagctcaaggtacagctgggacttgtactccactgcacctcacaattctgtcattcagattggatgcaacaacctccagcctggagaggatgaatgatcttatgatttgttgcggacgctcactcccttgatcatgatggctattcctggaacccaaaattttcccaaaagtaatcagttagcaaccatccagttccaaccaccacatcaggtatgctcacttcagaattcagatcacaacacatctagtcatagcaatgcaaagctatagagtaacaataaatttccttctcacggtcattgtatcagtgaaaagaaagtaaggtcaacaaaacaaatacaaatacgacaacaatagaagttacta

SEQ ID NO: 49090 - DNA, 477 bp, Setaria italica
  Peptide Sequence Number=SeqID_115064
tttttttagaccaaaagttaacaacaaatttagttagacgttagttgtattttttaacaattccaatatattgtttcttcatcctccactaattacaaatattagtttcaaattccaatctcttctaactaattgttacttgttgcttcagatccgcaacctgaaaagagcacatcgacaaatacttatcaggtagcaatatatgtgatggaaactactaaaatactctatggcacagttatcacaacattaaatacaatatgtttggtaaatatactcctccagcaaatatgtctctaatattgaactggctgaatcatactaacactaactttaagaaagtaattattgcaatttccaggagataatttctaaaccaactaattatgtcttgcaaaacagaggtcacaagaggaatgggaaaatagtcaaacttaaagggaaatacgctgtttttgagagaatatagcaaatcaa

SEQ ID NO: 49091 - DNA, 460 bp, Setaria italica
  Peptide Sequence Number=SeqID_115065
gggcttgccattggatggctcctccgcatcgttttcgactgccttcttgtagtcgtttggcctgaggtcggggccgatgtccctgacccaggacgcgccgtacagccgagtgacctccttgaggatgcaccagcggtcgtgccatgtgagcttaggcctcttcttgatgtgtggaggatcgggcagcgacgacgggaaggcgatctccttgaggtcgtagcgcacgtagtcgtacagcttcctgcatacaactctgaacttcatcttgattcttgctttctactgcaacttgttccttatggtgggtggttcaagatgaatacccgtgctaaaacgaacctgcagatcaaagaaaagaaatgtcatcgactagcactaactactaccagcttcatgattgtgagctgatacaaaatgataacactattctaactaaaacacgaaaactgtaatgggaagc

SEQ ID NO: 49092 - DNA, 284 bp, Setaria italica
  Peptide Sequence Number=SeqID_115066
tatgcatgtgacattgcttgtcagatccaatattgcatagaatgaaatgccacatgctgcttttttcatgcatttaaatatacacaagcaggtacaagtaaatagttgtcgagcattgaggcatttaatcaaacagattctctttcagtctttcttgattgtaggcaaaatatatgttggttcgacatgaagaaattaatctacctcatcttaaatgcacttgtttttagacactgaacttttggctcaccaattcgctcaaaaatcaaagacatctatgtctg

SEQ ID NO: 49093 - DNA, 435 bp, Setaria italica
  Peptide Sequence Number=SeqID_115067
gatcccacctgcgcagctttttaccagcagcttctcccattagtccacttctggattctggaggagcagaaccgaagatgcagatcggcaataaggcaataacgtccgcgccctggtgccagccttatctgttggtctcccttaaaatagcacgcgacaggcacgcgcagctcacgtcggcgtcgatcttgccggcctagctcgagttgacaaaaaggcgaggccgggataaccggagacggtggatgagccgaggcttgaggccctgatggagagctagaggaggcgggcgaagagctccccttgcctgcaggatccaatccggcttacccgatctgactctcccacaaggtaaagaagctccctgaattggtcagcccatcccttgacttcttgtttgattgatgccaaatcaggtctcctttttcgagttgc

SEQ ID NO: 49094 - DNA, 371 bp, Setaria italica
  Peptide Sequence Number=SeqID_115068
agctgatggctgacaacagcattcatcaagcatttatagaggatcctcctaatgtactaaaagagaagccatctgaaggagctaaatggttttgacgatgcaggtcaactcccgcatatcccactgatcagaagccctcagaacacgtctctgcagaacgcatctctgcgtttcaagccaaggacttattcaaaggatatatggccaagcttcaggcttgtaggcctcctcgtctttgtctacctggctacctgctagtgggtgtcatcatcttttactgtttcatggatcagatatctgggaagagaactaacagagtgcttgatgccttgtactttgttattgtcacaatgaccgcagttggctatggg

SEQ ID NO: 49095 - DNA, 358 bp, Setaria italica
  Peptide Sequence Number=SeqID_115069
tattccttctattggtcttctagtttctttccttgttacctttgtcttgtagctctataccgagcgacggcagaaaatgctcgccaaatgggtgcttaacaggaggataacaaccatggaccttgaggcagcggatctggatggcgaccgtcaagttggtgctgctgaatttgtactttacaagctaaaagagctgggcaagatcagccaagaggagatatcttcttttctggaggagtttgacaaactcgatgtcgaccagtctggcacaatctcaacgtacgaccttactctggcacaacaaatcagtctataactgctgtacgtatctgtattagattttgctgcttgatggttt

SEQ ID NO: 49096 - DNA, 356 bp, Setaria italica
  Peptide Sequence Number=SeqID_115070
cattgctactacatcctcaatatttgattgcttccttatctggggttcccatgctctggcatacatgccatgctcaagtatattttggcatcagctacccacatattctctcacgcttaaggccgcagcttgggttgggagaaccatgcgccagttcagttcagttcagttcagcatttcacataagttgtgttctaaagatccccgattcttcgactcctctccgagaagaaacttggcttgaattttactagcacggtcctgtctgtaccagctctcttctgacacatggcaaggtttctgcacaagactaaaagaccaacaatacgacaattaaaccgaacttaaagaaagaa

SEQ ID NO: 49097 - DNA, 473 bp, Setaria italica
  misc_feature (20)..(20): n is a, c, g, or t
  misc_feature (66)..(66): n is a, c, g, or t
  Peptide Sequence Number=SeqID_115071
tcatggtgtccatgagcgtnagggatgttgggctgctgcatttgaatcatgtgccagtcgaggcanaaccatataaggattcagagggtttctttggtgcgggatgcaatctggatgagacttattttagcaccgcatggaagggtgactcacacaacgatactggtggtacaaaggagggttctgaacacgttcaaagtagtgccaacggtgtgaaggatggccaaggtccttcggtgccaaatgccaaaaaatgttctaatggaaatgttggagaaggaacagaaggcatgcaggatacaaatagcagtgcaaaggatgtccatgcagaaccccatcccgatgagaacatatttcagagttctagtgatgcttgtaagggaggtgtgcaaaataatactggcgtttcaaaggatcaaccaataggacccttacttacaagacgacctaagtagaccaaaggaaataagtta

SEQ ID NO: 49098 - DNA, 324 bp, Setaria italica
  Peptide Sequence Number=SeqID_115072
aaagtttaaacaaaaactaacctaacgaacgacaagaataggaaacctttagtactaataaatttgtactctgcgaatatggtgtttcccggaaactcctcagcagatcggaaagatggaagtcctccaatgtctgtcagtactcctgataagattgatgagaaaatacctgatggtgaatattcacaaaaggatcagtcaccaccggaaccatcacatgcttcagtgattggtgaacgtgaaagacacaaagaatcaattgagtacaaacgggcagcagaggaggagtgggcttccagacagcggcagctacaaatacaggct

SEQ ID NO: 49099 - DNA, 177 bp, Setaria italica
  Peptide Sequence Number=SeqID_115073
ttaaaaaggttaagttactaagttaattacggggtcgttagttaagtaaaggtaactttgtaagtattcttggaaaggagatattgggatatgacttcaatattgcgtgcgctaggcatccccgttgaaggtggtgaggttaaagcctataagcaagcacttctgaaattccatcct

SEQ ID NO: 49100 - DNA, 364 bp, Setaria italica
  Peptide Sequence Number=SeqID_115074
ggccgcagcagcagcaacctccaccgccaccgccgctgccgccggagggccggggcctggggggggctgagatgaaggaggtggtgctccacgtgtacgacgtgaccaacagcgactccgagaagacgaacaacaccatcctccagatcaaccgcatcttcaaggaccgcatcggcctcggcggcatcttccacagcgccatccaggtctatggcgaggatgagtggtcgttcgggttctgcgagaccggcagcggcgtcttcagctgccccatcgggaagaaccccatgtacacgtaccgggagcgcatcgttgctcggggtagacggtagttgtcggtctattcgtccgtccgttgtaacct

SEQ ID NO: 49101 - DNA, 437 bp, Setaria italica
  Peptide Sequence Number=SeqID_115075
aatataacccagacaaaaaatagccaaaaatagcaacaggaacagggttgccttccaaccctggtatctgcctactaaactgaattctgtataataccatacactaacgacagagcaatcttcacgcccttgagtacttcgagctccacattggtaccttcaggggttcatcatctggggtactgcccccgttttcagcagcatttaaagagtctgagatcaacgggtttgactcactctccttcccctgaatgacttgcggagagacttctgcaggttttttgctgggtctctctagtgcagaagtatgaatacaaaaaccatcccaatcacagcaattaggattcccagtatatttctccagctaaatggatcatgaagcagtacattagcctaaaaggttgtagtaacctaagtctattgttttttctaaattt

SEQ ID NO: 49102 - DNA, 254 bp, Setaria italica
  Peptide Sequence Number=SeqID_115076
ttaattttgttagttattgttcctatttgtagtctacttcctaaattccctattgacagttcttgcatcgaaaggtttgtgctcaaagagcttcatacataacgccacatggagagagcagaacgtaaccaggagatgccagctcgtcaaagtagtggcaaagttgaagccgagggagctcatgagggccttgttgcagatgacgatggagaccgaggacaccaccgacaggctcagcgcccccacgtccccag

SEQ ID NO: 49103 - DNA, 147 bp, Setaria italica
  Peptide Sequence Number=SeqID_115077
cacgctaagtgagagtttgatattccggctaaatttcttcctgaagaaaagggtctccaatataacagtacagggaataatagccagctttgtcatctgaacaaagtatttcattattagttcatggagtgattagtatgcaagata

SEQ ID NO: 49104 - DNA, 332 bp, Setaria italica
  Peptide Sequence Number=SeqID_115078
cataacctgtctcttggatataaatgggaaggttcccataggcttcattcagatactccaccaaaagttgcatcctcgggatcagccggaatagatgttggcggcccttcagtgtttttcttttctagtctctgttgagtgtagaggtaaatcaatttgttcatcaatacaggattgctcacaatctgttatatccctaggatttttttgttcacatacatagtggagtctgatgcttctgaaacatacttgtattgttatgaaatcgtcaagccaagtggtgcatttaacgaaaccattctctcaagcaggttcaagaattgatccgccaa

SEQ ID NO: 49105 - DNA, 278 bp, Setaria italica
  Peptide Sequence Number=SeqID_115079
taaaaaggaaaactaaagaaccaaaatttttaaggtttaacaataaaacctagtactacttaggaataataaatgggaaggttcccaataggcttcattcagatactccaaccaaaagttgcaatccttcgggatcagccggaatagatgttgggcggccctgaccaattggcggatcaattcttgaacctctacactcaacagagatgtcaagtgcgaagtcgtgaatgcctttttcaaagggtggtcgttgacatacaaagaataatagtagttta

SEQ ID NO: 49106 - DNA, 204 bp, Setaria italica
  misc_feature (17)..(17): n is a, c, g, or t
  misc_feature (184)..(184): n is a, c, g, or t
  Peptide Sequence Number=SeqID_115080
ggcgcgtgccgcgcctnccgcgcaattcgctcgcagcaggcccctgctcatccggatccgccgacgccggagaagtacgatcatgctggtgcccccaggcacggccgttctggttctctaaaggtgaatgtttgattcctctgttcatcgtttcctatgtgcattgtgatgaccgtgacaaaantcgtgaggtgatttgtgcag

SEQ ID NO: 49107 - DNA, 239 bp, Setaria italica
  Peptide Sequence Number=SeqID_115081
ttagtggagggaggtcttagatcttgggagtcttgctgagaggaagctaaagggcagacctgaaccatgagagtatcaggatcagaggaggaaatgccatgcaacacaactgcagaaccttggtatggaatggacaaattcactaaatatggtcacttcattcctcttgcacaccccttcactgctgctattatggcaggccatggagcttgtatatgttgtcaaagaaagtccttgcc

SEQ ID NO: 49108 - DNA, 264 bp, Setaria italica
  misc_feature (105)..(105): n is a, c, g, or t
  misc_feature (245)..(245): n is a, c, g, or t
  Peptide Sequence Number=SeqID_115082
taaaccaaaaataaaataaagaaacaaaaccaaaaaaccttaaagggaaactaaagaactaagaacttaagtagaaagtctaccaaagtgaaccacttccccaanattatccccatagaactgccaggacaatgtgaagactctggagtagaagaatggtaggtaatcaatgtccctggcttttgaagcctccaagatggatgcaactgcatgcctagcagttctacgagctgaatcaacatgcncaagccgtcggatatcacc

SEQ ID NO: 49109 - DNA, 395 bp, Setaria italica
  Peptide Sequence Number=SeqID_115083
aaaggcgatctcagcatgagcatcgatgagataatacatgagtgcaagatgttcttctttgctggtcatgacaccacatcgcttcttctaacatgggcaatcttcttgctcagcgcataccccgaatggcaagaaaggctccggaaggaggttttcagggaaattggaagggaacagcccagtgccgatgcccttagcaaactgaaagagacgacgatggttctcctcgagacattgaggctctatggccctgctcttttcatgcaaagaaagcccgtcactgataatcaacaagtagggaagacaaacaaaaactagacccaaagggacgtaaacggttagtacaataacccaattaacctaaattaaattaacaaacccgaacaaataacgaa

SEQ ID NO: 49110 - DNA, 334 bp, Setaria italica
  Peptide Sequence Number=SeqID_115084
aggaatagacttgaaaagaagcttaggagctcgcttctgcaaatcatacaaccacgattagcgtctacctgccgtgactacggaaacgatctgctcggtttgatgcttgagtcttgcattgcaacagagcaaggaggaaagtactttaatcctggtatctgaacatcaaggagactttccaagtagattgccatcagggcatgttgtgtctggaatacttgtttccctaacttgtaactgcttccaaaggcggcatgggatataacatcagctgtgagctctctcaactctatgtcgaaatccacttctatttctccattcttgctttggcatg

SEQ ID NO: 49111 - DNA, 372 bp, Setaria italica
  Peptide Sequence Number=SeqID_115085
ggcgatctcagcatgagcatcgatgagataatacatgagtgcaagatgttcttctttgctggtcatgacaccacatcgcttcttctaacatgggcaatcttcttgctcagcgcatacccgaatggcaagaaaggctccggaaggaggttttcagggaaattggaagggaacagcccagtgccgatgcccttagcaaactgaaagagacgacgatggttctcctcgagacattgaggctctatggccctgctcttttcatgcaaagaaagcccgtcactgatatcacagtgggagcaacaaaactgcccaagggcgtaacggttgtcataacccaattacctaattaatagacaaccgaagaagaaaggaaga

SEQ ID NO: 49112 - DNA, 243 bp, Setaria italica
  Peptide Sequence Number=SeqID_115086
tacatgagtgcaagatgttcttctttgctggtcatgacaccacatcgcttcttctaacatgggcaatcttcttgctcagcgcataccccgaatggcaagaaaggtcttccggtaaggaggttttcagggaaattggaagggaacagcccagtgccgatgcccttagcaaactgaaagaggctgtagctgactagccatatcttgcagacgacgatggttctcctcgagacattgaggctacta

SEQ ID NO: 49113 - DNA, 171 bp, Setaria italica
  Peptide Sequence Number=SeqID_115087
cttttgctggtggccatttcccctgactgtacattagaatggtaagcattggtaaattttgcaggaaggcacaggtgggtagaatatgcagagaaagggcgctacaatgcatcccaagtgcctgctgaatggcatggatggctgcatcacatcacagataacactggtgat

SEQ ID NO: 49114 - DNA, 435 bp, Setaria italica
  misc_feature (353)..(435): n is a, c, g, or t
  Peptide Sequence Number=SeqID_115088
tccgactcagtgtgagtagttatccattcctacccaacattcaaggtgttttatgaaggcgaagaagtagcaaaatataaaggtatactttgcttcatgggttcaccatgctttttgcaaaacatccatcttaaaccatgtttgggtcttctagttttgatccaccgcccttatgagcatctatgggttatggtcagagtaggagtcggatttcaaaggctaaaatctcagtcacgttaaactgaattttgaattttacattttaaaccatctgtatattaatgaagcgcccacttctgtgaagaattgacttttagatcagtaggtcatctcacctatggctaaaactaacnnnnnnnnnnnnnnnnnnnnnnnnnnnnnnnnnnnnnnnnnnnnnnnnnnnnnnnnnnnnnnnnnnnnnnnnnnnnnnnnnnn

SEQ ID NO: 49115 - DNA, 167 bp, Setaria italica
  Peptide Sequence Number=SeqID_115089
gagactgctgtcctgttccgtactgcatgcagattcaagttgctttgatgccacatgtttgtttttggttcaatcgagtttgattctgtgaaatttctctcttgtttagataaaggaaaaggacacagtatggtttgtgcaattttgcgtcccctggtgtaaacact

SEQ ID NO: 49116 - DNA, 297 bp, Setaria italica
  Peptide Sequence Number=SeqID_115090
ataaagctccgctcccccgggggcgccgctccggtctgcccctggttcctatagcgtggtgcgacccgggattccctcgtgctctcctgtcccctccccccgccccccctgaggggaggaccccgcagatcccatcggaattcacggccgcatccaggccggccctccccgcctcccggcgacgaccaattctcccctgttctcgtttctcctacccttcatgatgtttagataatcaacggtgctgggttttagccctgttttgaattttgaattgtgctaaggattcagtcttag

SEQ ID NO: 49117 - DNA, 336 bp, Setaria italica
  Peptide Sequence Number=SeqID_115091
gtaatggtagatatttttgggtgtgattggaggtcaccttgcaatattgctaaccttctgatgaaactgacttaaagtgatagcgtttctttcaagtaaattatgctaacttaagtcttaaatagcaacagtatgctaacatctgatcagtaatgttgactttttttgcagttctcgtttctcctacccttcatgatgtttagataatcaacggtgctgggttttagccctgttttgaaattttgaattgtgctaaggattcagtcttagtcgtgaaagatgaatggttcaaatggttcccaagagcatcatgtcagtggagaggaggaagtgcat

SEQ ID NO: 49118 - DNA, 284 bp, Setaria italica
  misc_feature (260)..(284): n is a, c, g, or t
  Peptide Sequence Number=SeqID_115092
agcaaattaaggctgttagaggagcaaactcagtgaaacgtcgctaatatggccatgatgcaggtatacaattgaactgctcattgacatatcactacttaattgtgtactagtatgatggattgatggatggctaaccacctgactcgctgattattttgccatgagttgaacacaatagctgtttgcccttacggttgtaaggtctggatcatcataagtttcctcgtataccaaccagcatcctgttgtattgaccnnnnnnnnnnnnnnnnnnnnnnnnn

SEQ ID NO: 49119 - DNA, 347 bp, Setaria italica
  Peptide Sequence Number=SeqID_115093
aaaaataaagaacaatagtagttactactttagaccaataaagcgcattgcaaatagtgcttttgcaatttatccaaaatggacagacattggtgcattttgtctgctttagagaatcacagcaaattaaggctgttagaggagcaaaactcagtgaaacgtcgctaatatggccatgatgcaggtcagagcgtcaatcatcaggaattcatgttacgcacctgggcaagagcaacctaacaagcttagcagaatttgattatgcttggagaaagctgttctgaatgtggctgcctactctccagctatgccaatatgctttgcttaagatacagtgataacataac

SEQ ID NO: 49120 - DNA, 252 bp, Setaria italica
  Peptide Sequence Number=SeqID_115094
atccctctccagcttcaagtctaggctatcctttgtgcaacctgcgtcgtctctggcggaatagccattcagctttctgattccattactgatatctcttagcaattcctccagtgagaaatatgctcttgctctgcatttctggccctgaaatccagtgtagcacagacttattttgctggtgattgttttcgttcctagtttgtcttccgtcttgtcggttgttccttaaatttagttatttcttttgtt

SEQ ID NO: 49121 - DNA, 160 bp, Setaria italica
  Peptide Sequence Number=SeqID_115095
tggttcttaaatccttatgctaccatacaggtgattacaaaccaaactagttcaggctaaagttacaagttagatcttcatggcggcaataacgcccttgctttggacatgtgtatgcactgacctgaaaacatccagcagcgacagaatgcttcatcag

SEQ ID NO: 49122 - DNA, 301 bp, Setaria italica
  Peptide Sequence Number=SeqID_115096
aggagaatgatgatggtgatgcttccattcctgtgaagaagatcaaggttgaggaagcaccacattccggagccactcagctggggtcttctcatttggcttcccatgcttatcaaggaggccctcagcaatcagctttttcttcttgagggccactgggccaagcccccacttcctcgggtatgtgtctctgtccatcacaaccctcttgatctttgcgaccgcaccatggtcacaagtcgccatgacagcagtggtcatctcagcaatacctatagcaatggcctccccctttgttgtc

SEQ ID NO: 49123 - DNA, 272 bp, Setaria italica
  Peptide Sequence Number=SeqID_115097
ccgcgggccgtgtcaggcacggcggcgtggaagcgcgcgacgcagacgtactccttcccggcgccctgctgcgacttgacgaggcgcgtggcgcggtcgacgcagacgatgaggttgcctgtgaccttgggatcgagcgtgccgctgtggccggtcttctcggcgcggaggaggcgcttgatccaggccaccacctcgtgggaggacgggttggatggcttgtcgaggttgtattgtacgtccgttaccggttaggtttactttctttgttt

SEQ ID NO: 49124 - DNA, 246 bp, Setaria italica
  Peptide Sequence Number=SeqID_115098
tttaactaactaactaattttacttaacccttttgtcttggtttttactattcctaagttggtacttctaagtaagaccggtgagctgcatttggctgtgcggtttacctgcatggcttgggtgaacatgatggcgctgtatggtcgtccactgctaccgaaaatgcactacacacagccgatcccagtgatgcaattggactacctgaggcaccaggcaatgcagattgttgcagcaaggcttag

SEQ ID NO: 49125 - DNA, 289 bp, Setaria italica
  Peptide Sequence Number=SeqID_115099
ggaggtgagcacaatagtagcagtgtgagtgctgttccaactagtaaccaaactggtagtcttgcattggcaggggagaaagaagttggatctcccagtaagaacaacatggttgtagcatccccggctgtaaagaatcaggaacagacaagcagtggagttgcttccggtggaagcagtggtgcagtgaataagcagaagggagatgctactcagggaagcgctggctcatcaaaagccattcggcccaagcagtcacctcaaaatctggaaacgacagtaagggtaa

SEQ ID NO: 49126 - DNA, 441 bp, Setaria italica
  Peptide Sequence Number=SeqID_115100
gatggcacgaactgatcatcccatttgcgccagcctggataaacacgccatggactgatcagcctattagttgtataccgcagatcacactgcatagatgattatcttcacttcaacgaggcttctgagcctttgcccgagatgcattcttcctcattgtccagaatgctgcacggtatcgattctgcaactcgattgaggtacgaataagattttggttgacatatcacattaaaacaagtggctcatggacattcacagtaaattggcagggattggaacgtcagatgtcaattaacagaattcagcacagcttaaccccaactgttcagaattgagagctttcaaagttagattaacccatacacaccaagaccagctatgatcatgtgagtaacaacacttaagcattcaaacttgcccatccagcaactgattatg

SEQ ID NO: 49127 - DNA, 382 bp, Setaria italica
  Peptide Sequence Number=SeqID_115101
gcaggttctataccacgagcagacaagggctctgcagcagccaccatccgagctgacagcatcggcattggttccttgcgggagtcctcttggggtgctcctgtcttggcaagatggcgctgtcagatgaatccgagctgctgcgctccccagcctgtcctttgctcgacatcatcttccccagcgccttcttcggcgttgcaccgcctttcgccctgccattggccgctttgttgcctccatggttcttctcagcgtcagtaccagcggtgtcacatttgtcgagctttgtggtcttggacaggctgaggtcttccacggccatgactccgtcccactcgtcttcagtgttcgttgtggcacctgatcttgagctctcgta

SEQ ID NO: 49128 - DNA, 247 bp, Setaria italica
  Peptide Sequence Number=SeqID_115102
taaatggaggttgaatacatcagtttgtgtactttaagatctgcatgcaccaacaaatattggttcttccgcatgtgagggatacatcgttactcttgttgttttacaacaataatgctttccttttgtgcaggatgtggagggaatcaaagagtacggaatggataagctcatccagattgcagctacccaacttagtgaccagcttccggaatcaagggaggctgctcgcaacctggcactggaa

SEQ ID NO: 49129 - DNA, 344 bp, Setaria italica
  misc_feature (35)..(35): n is a, c, g, or t
  misc_feature (40)..(40): n is a, c, g, or t
  Peptide Sequence Number=SeqID_115103
tttggtctagttctcttttagtttttttgtttttnttttnttttttgttatcacacagaagccaaaagaatatcacgaacgagcataagtgccacattataaagcaacacaggtatgtgaggaaagaaaccaggaatactgagtacgaaagcaaaagtaataagagtttacacgatgtaacacagaatactacgaggtactaggtcccaaaggagctgcaacatcacactacaatttccaaccacatcaacttcacagcaggacactcatgcttgatcccttagttaacaaggccaccacggaggcgcaagacaagatgaagagtggattccttctggatgttg

SEQ ID NO: 49130 - DNA, 235 bp, Setaria italica
  Peptide Sequence Number=SeqID_115104
ctgctgtgaagttgatgtggttggaaattgtagtgtgatgttgcagcaggacactcatgcttgatcccttagttaacaaggccaccacggaggcgcaagacaagatgaagagtggattccttctggatgttgtaatctgccaaagtacggccgtcctccagctgcttaccagcgaagatgagcctctgctgatctggagaactcccctcttgtcctggatcgttggccttcacta

SEQ ID NO: 49131 - DNA, 209 bp, Setaria italica
  Peptide Sequence Number=SeqID_115105
gttcaagttggagccgttgcaacaataatggctggtgaccagattttccccagacttggaatggttccacctccatggtactactcgctacgtgccaatagatttggaactatggcgacaatatggctatttggcactatggcgacaatatggctatttggcaattttgctcagtccttccttcaaaggcgccggagctttgtaggaag

SEQ ID NO: 49132 - DNA, 478 bp, Setaria italica
  Peptide Sequence Number=SeqID_115106
taagaaatgggagggattctgaaagaggaggccacagatacaggagtggtgatatgacaaatgaccgagggagaatgaggagcaggtcacgttctccaagcaggcatggctatggaagatctagaagtccagatcattagctgaacatttagatagttttattcacagttgggactcatgagctctgttggaaccctacagtcttcctttttacatgggaaaaaaatctcagctgaaaaatagtacaatgagaccagtactggacttcatgtatggatgctgatatttacagcctatggcagattttacaccactcaggccaggtctctattactgtcaaaaattatgtataattgtgtacttttgtagctgtaattgttatgaggtaatgtcttcgggaagaacaatcaggcaaaatgatccaggaacagttctagtcaccaacatatttgttttgtggaaccattgtaatactctt

SEQ ID NO: 49133 - DNA, 309 bp, Setaria italica
  Peptide Sequence Number=SeqID_115107
agaatatagaacaaatgaccgagggagaatgaggagcaggtcacgttctccaagcaggcatggctatggaagatctagaagtccagatcattagctgaacatttagatagttttattcacagttgggactcatgagctctgttggaacccttacagtcttcctttttacatgggaaaaaaatctcagctgaaaaatagtacaatgagaccagtactggacttcatgtatggatgctgatatttacagcctatggcaggtaaaccttgaacattaatttttcatgttacacactttttgtttcccttcta

SEQ ID NO: 49134 - DNA, 230 bp, Setaria italica
  Peptide Sequence Number=SeqID_115108
tgtgccccttcttctcctcctccgtcaagttgcgagctgtgcccatgagctcgtcgaggagcttggtgaggctggtaaagtggatgaggctgaggcacttatgaggagggttgacattctaaatgctgagaagacagctttagctaaccaagcggacaacaaagtggccatgcttgagaagaagatggaactttgcgaaacatgcggatcattcttagttgctgatgatg

SEQ ID NO: 49135 - DNA, 276 bp, Setaria italica
  Peptide Sequence Number=SeqID_115109
cagacatctcagcacgcgccattagtggactgcattaggacacggtggccgcgagcagtttgtagctgggctggagatatgccaagtattgtctgacacagtgaaccttgtgccagtcactctagctatattgctcataatcccattcagaagaatctaactacaagaagacaaaggaactaagaacttaagaaagaacttaaccaaaggaactagttacaatagaccctagacgaataaaggaggaaagaatagggactaggtagttgtaaattg

SEQ ID NO: 49136 - DNA, 447 bp, Setaria italica
  Peptide Sequence Number=SeqID_115110
aatatcactggaaaccagtcccaatatccaatctggcttcaactggccaactatgcctacacatttaaatgctaaaatacttactctagttgattcttgtagagcttgtgcacattggtcaagatcatctttcgcagcaactatcaggcaaggaacttcctagccagtattttctccatgtgtaaccacctgcacaagcaggtctcttgctctttgccaagaatattcacagctgccaacacaacagattccgagtcagaatatttagtaatataagcacggaaagtaaatttatgtcgatcaaggtcataggctcgaaaagaagatatagcagtataaacaagagttacttgtccaacttttgaaagctcttaaaggaagactgaagaccagaagatttgttagcaccactttgatttctttcaggcagtcaagaaccaccctgca

SEQ ID NO: 49137 - DNA, 442 bp, Setaria italica
  Peptide Sequence Number=SeqID_115111
ttcaaatctctcaacctcacactgatcggaattggtgtttcaattcccatgtcctggctcactctagttgactcttgtagagcttgtggacattggtcaagatcatctttcgaagcaactatcaggcaaggaacttcatagccagtattttctccatgtgtagccacctgcacaagcaagtctcttgctctatgccaagaatattcatcacagctatcgtaaacaaagactgctacatcgcagggcgccaatgattccttatcagacagtaaggatctcacatcacatcaggcagttcaacagaatttgttgcaaaccgttcagtgttagatggcagagcatcagaaggttgccttccaatgaaggattgtagcaatgacgtctttccagaacctctggcaccgaaaacataacactggaatacatttctctgtgtctgttg

SEQ ID NO: 49138 - DNA, 233 bp, Setaria italica
  Peptide Sequence Number=SeqID_115112
caaatctctcaacctcacactgatcggaattggtgtttcaattcccatgtcctggctcactctagttgactcttgtagagcttgtggacattggtcaagatcatctttcgaagcaactatcaggcaaggaacttcatagccagtattttctccatgtgtagccacctgcacatggagaaaatactggctatgaagttccttgccagtattttctccatgtgcaggtggctaca

SEQ ID NO: 49139 - DNA, 138 bp, Setaria italica
  misc_feature (5)..(5): n is a, c, g, or t
  Peptide Sequence Number=SeqID_115113
tttcngtaggctggagaggagcactgaaacatcggacctggaattcattttatgtgatagtgacaaggatggtgctctcagtgatgtggagctcaatccttgtcactatcacataaaatgaatatccgctttaacgct

SEQ ID NO: 49140 - DNA, 109 bp, Setaria italica
  Peptide Sequence Number=SeqID_115114
ttgtcaattctgactagaatcacatatgttgcttttcctgcaggtgcctgaggtcttctactatgcccagaaggcagtgcttcacccaactgctcctctctttgatcaa

SEQ ID NO: 49141 - DNA, 220 bp, Setaria italica
  Peptide Sequence Number=SeqID_115115
tcgttagcgctgggcgtggaggcgggcggtgttgatgaggatgttggcgtcggacatgatccccgcgacggcgcaggcgaggtgggagtcgatcttgtacatcttctcggcggatcgggaggtctggaggagcttggaggtcaccttcttctcgccgacggcgttgtcctcgtcggcgagaagaaggtgacctccaagctcctccagacctcccgatccg

SEQ ID NO: 49142 - DNA, 261 bp, Setaria italica
  Peptide Sequence Number=SeqID_115116
ccttgagtttacagcaatgtttcctgatggcatgatctccacttatgggttatggcaaaatcttcatatggttgctacatattttaattcaatgatgtggtttaactgtaattggaaaacacatgctgtaattggaccaaacttaacacatgcatgcggtgaattggcagtaacttcacatttaaaagaaaggaagcaacgatagaaaaattctgaagcattgaaggctaagaggccgttaaccgttccttcacaagaaca

SEQ ID NO: 49143 - DNA, 398 bp, Setaria italica
  misc_feature (17)..(17): n is a, c, g, or t
  misc_feature (42)..(42): n is a, c, g, or t
  misc_feature (73)..(73): n is a, c, g, or t
  Peptide Sequence Number=SeqID_115117
atccagctgatagtacncaaaaatttaggccttgcttcatancctttgtaatctgaagaccatgtactcaaanatttcagccaaggattcataatttttaagtcaagatgcatatttctaaagtaattgacatgccacacactctgtcactagtcaatgctcttgctattattgtttttccattctcaaaacttcagcttatagaagaatacatgcagataatcccattaccgtcaggttccttgtgcaggtttttggtatagctttgttgcggatgtaagcaagcttgtcagtcacattagcagggacacatgcatcatcataccgatcaacaatctcgacaacctgttgtgaagctcgcagacgaaagacaaacaaccaaattagggaacaaaaaa

SEQ ID NO: 49144 - DNA, 270 bp, Setaria italica
  Peptide Sequence Number=SeqID_115118
gatgttgttctggtagctgatggaacagagaaacctatcggatggggtctctataactctgtgtccatgttttgtgttaggctgatgcaactggaagaagaggcaagaagagatcccacttgtgcacttaatatggaaacactgcttgaagcaaggatttcatctgctgtgaatttgcggaaaagtttgggtctcccttcagctaacacaaatgcttatccccttcactgttgatgaggcgataagcatttgtgttagctgaagggagac

SEQ ID NO: 49145 - DNA, 367 bp, Setaria italica
  misc_feature (37)..(37): n is a, c, g, or t
  Peptide Sequence Number=SeqID_115119
aagatctaatctttttatatccttataacattctgcnggttttacagacagaatatttcaaccaccgtagtcattttcaggcattgattcatcgggatcagcactagaccttgccaatgagaatatcattctcaatgagctaaatcctggaaggatctcatttgtaaaaggagatgcaactgcattcatgaaaggagctatctcaaaaaatgaactgtgggacttggtaatccttgaccctccaaagttggcacctcgaaagaaggtgctacaaagtgcatctggtatgtatagaaacttgaatgctcttgcaatgcaagtagtgaagccgggggggattactcatgacatgctcttgttctggagc

SEQ ID NO: 49146 - DNA, 449 bp, Setaria italica
  Peptide Sequence Number=SeqID_115120
cagcattgctagatcttgatagtgagacagcattctttggtgttttttgatggtcatggaggaagagtggttgccaaattctgtgcaaaatatctgcacagtcaagttctcaaaactgaagcttattcagctggtgacctaggcagtgctgtgcatagagctttcttcagaatggatgaaatgatgcgaggacagagaggttggcgagaactatctgcacttggagataagataaacaagtttagtggtatgatagaggggtgtgataacatgaccatgatcctggtgcagttcaaaaaaccagtcgatcggaggaagaagtccgaagtggctgagcaatctagcagcagcgcggatggaactgagattcatgttgccgaggagtaaaaagagctcgacactcgcaagggcgcaatgcaaccgtctggattgagaagagctggaaaggc

SEQ ID NO: 49147 - DNA, 234 bp, Setaria italica
  Peptide Sequence Number=SeqID_115121
tgaccatgatcctggtgcagttcaaaaaaccagtcgataggaggaagaagtccgaagtggctgagcaatctagcagcagcgcggatggaactgagattcagtgagtacatgccttgtttgcttcctgatttcaccaccaatctttcctgcatcttcgtcatgcattaaccagaatgcttcggaccagtgttgccgaggagtaaaaagagctcaatccagacggttgcattgcgc

SEQ ID NO: 49148 - DNA, 292 bp, Setaria italica
  misc_feature (269)..(292): n is a, c, g, or t
  Peptide Sequence Number=SeqID_115122
aaggaacaaagaacaaaggaaagaaagacccaactagtaccgcaacagattcggatgaataaagatctggtgccatggtgacttagtcctttctacaggtgttttgaagtgttgtgcaagctctggaacttgctgtttagctggcttgattttatggtcaacgctgaagaataaatacttttgcgacaattgatctttttgaacaatgccatgttattattgttgctaattgggctttgctctgcttatcaatcatgtcaacttcaatnnnnnnnnnnnnnnnnnnnnnnnn

SEQ ID NO: 49149 - DNA, 393 bp, Setaria italica
  Peptide Sequence Number=SeqID_115123
aaagaaacgaaaaagaacggaaaggaacgaaacgaagaatagtacaagacgaacgaacggcggcggtgcccttctggcgcgcggcggggatgacctacatcggctactccaacatctgcgctgcgctggtgcggagctgcctcaaggagcccttcaagtccgaggccgcgtcccgcgagaaggtccacttctccgtcgccaagtgggcggacggcaagcaggagaagcccactgtccgcacagattcggatgaataaagatactaggtgccaatggtgacttagtcctttctacaggtgttttgaagtgttgtgcaagctctggaacttgctgtttagctggcttgatttttatggtcaacgctgaagaataaatacttttgcgacaattgat

SEQ ID NO: 49150 - DNA, 279 bp, Setaria italica
  Peptide Sequence Number=SeqID_115124
gcggaggcgacgagatgtcagcgacgacggcggcggtgcccttctggcgcgcggcggggatgacctacatcggctactccaacatctgcgctgcgctggtgcggagctgcctcaaggagcccttcaagtccgaggccgcgtcccgcgagaaggtccacttctccgtcgccaagtgggcgggagagaggaaaaatcttctccccctcccccaaaaaatcccaaaaccctaggcttcggatctcccccggatctcgatggcgaacccccgcgtgttcttcg

SEQ ID NO: 49151 - DNA, 403 bp, Setaria italica
  Peptide Sequence Number=SeqID_115125
ggcaacgccaagatggcgtactacaaggagatcgacgacctgctcaagcgccgcgggaaagcgagcggcagcggcggctgcgttggcagcggcagtgttagtgttaatggcgccgggaagagccccacgtccaattccaagatcgagtcctacctgcagttcactacagataacggtgcgcctctgcgttatgctttgctcgatgaaacaatgactagatttgtcttaaactccacatctgagactttgtcaatgcagaactttgggtcttgggatacaagtcaacgattttggtatatagcagtgtgaatttatgctgttgcaacgggttgttaattgtgtgacgccagtcacacttcagtcgctagaaacttaagctatccgaagggccttagtgtacaat

SEQ ID NO: 49152 - DNA, 422 bp, Setaria italica
  misc_feature (398)..(422): n is a, c, g, or t
  Peptide Sequence Number=SeqID_115126
ttaattagtaactaaaggggtaaactaaattactaatttagtaaggttagtaaattagtttaagttgtaaactttggttcttggttaaacttccttgtcttggtaaaaagtttgtttggggttaaatacgctcaagtaacaaacaacccagagaatgatgggtgtatcaatgctgtcttgttagtgtagagccatagtgaaattccgttttgcttgttcatcttaccatttgtatccgctctgatgaagatgcatttttgaccgatgttgtggcaattcaggtagtctgttgtgcaccatggggcataacatgtggcagattccagtagcttattgtgcaccatgaacataacatatctgtattgtggcttcacaacaaatggctttcaacaaatttnnnnnnnnnnnnnnnnnnnnnnnnn

SEQ ID NO: 49153 - DNA, 420 bp, Setaria italica
  Peptide Sequence Number=SeqID_115127
tggacctctctcctcaacttcctgctcctctcattccgatccatctgagctccccggctcttccgtttgctcatcgatttcgcttttttttaaaaaaattgtgctgatttttcccgtgcacgagttggctgcagccgcagggagaccacatagagctgcaccagaagcgccatgggcggcgcctggactacgaggagcgcaagcgcaagcgcgaggcgcgcaaggtgcacagactttcgaaggatgcccagaagttgcttggtgctaagggtaagaggttcgccaagaaacggtatgccgagaaggcgcagatgaagaagaccctgaaaatgcacgatgaatcaacttcacggcagaaggctgatgatgtccaagagggtgcccttcctccgtatctgctggatcgtgatcagacacagc

SEQ ID NO: 49154 - DNA, 262 bp, Setaria italica
  Peptide Sequence Number=SeqID_115128
attctataaacacttcataagatagcacacaaaattgtacatctctttccttcgatctgaatactgtagttgatcttatttccttattaatgcagccaagcagtggaagagaatggttactaaagaccacctttagttggaagctgggtttacaaggaagccggccaaagtatgaacggttcatccggccaactggtctgacgtttcactaaagctcatgtgactcacccagaactgaaatgtactttcaacctggacatta

SEQ ID NO: 49155 - DNA, 400 bp, Setaria italica
  Peptide Sequence Number=SeqID_115129
cactaactatttaccacccaatctaacagcaagtggcttacacttggctagcacagcagcttgcaacagttacaagcagaagtccttagtctgaccagtacccaagacaaaaaacaaaactatgtgttctttactcagggttgacctttttgcttctttgagtgctccttgtttttcttggcctcgcggcgctccctcttcagtcccttaatgtcgttcgataaggtcaactttccaacctgttggtctggcatgtagaccttgcccaacctgccctgaactggatccttggtgacattttttcaccttcttagcatgttcagcagtcttcatagcttctttcttcaagctttcaactggaagcctgtgcctcctaaccaccagatccattgaaggtcca

SEQ ID NO: 49156 - DNA, 303 bp, Setaria italica
  Peptide Sequence Number=SeqID_115130
ctcaaagaagcaaaaaggtcaaccctgagtaaagaacacatagtttttcttggcctcgcggcgctccctcttcagtcccttaatgtcgttcgataaggtcaactttccaacctgttggtctggcatgtagaccttgcccaacctgccctgaactggatccttggtgacatttttcaccttcttagcatgttcagcagtcttcatagcttctttcttcaagctttcaactggaagcctgtgcctcctaaccaccagatccattgaaggtccaacttcaaccagctccatctattcctagaatgg

SEQ ID NO: 49157 - DNA, 342 bp, Setaria italica
  misc_feature (14)..(14): n is a, c, g, or t
  Peptide Sequence Number=SeqID_115131
gctctttgagtgcncctgttttcttggcctcgcggcgctccctccttcagtcccttaatgtcgttcgataaggtcaactttccaacctgttggtctggcatgtagaccttgcccaacctgccctgaactggatccttggtgacatttttcacctgcaagaaggttcatgatagtgactcaggaagatttcagtgagaatgtaacacaaaggaagatttcaaggctaatggaaccaaagttcatgagcaatatccaatacaagataacagtgattcagatataccttcttagcatgttcagcagtcttcatagcttctttcttcaagctttcaactggaagcc

SEQ ID NO: 49158 - DNA, 183 bp, Setaria italica
  Peptide Sequence Number=SeqID_115132
acagaagaggtggtggcgcggtacacaatattcttgtgaaagccaccacaaaggttcttagcctaagaagatggcactaaacgtactttccaccaatctaacagcaagttgcttcctcttctcccttaccccaaaccgggcacaacaagcaactccagccatggcgcagcagctgctgctcct

SEQ ID NO: 49159 - DNA, 393 bp, Setaria italica
  Peptide Sequence Number=SeqID_115133
catctgtggtatatatctgctagaaatgcctctttgcttcatcaaagtcagtactttggtctgcctttgtacttggtaccaggaattcatatcctcccacgcaggctccagatgagaagggctggagcctacatacaacaaataggttttggtaggctcttccacaggagtagaactataaataggaggatcactgtctgttagaatgtcattgatctggaaacctttctggctgtaagcatcatccatcaatacaacagatccaatttcaagcttcaagatttcctgtggtttcacatcaacagctgtttcctcctgtacttcgacaatttcaggagagtgacttcacggctacaaagtcgaagatcggaaagacatctggttgacagacaa

SEQ ID NO: 49160 - DNA, 207 bp, Setaria italica
  Peptide Sequence Number=SeqID_115134
ttcactttcacacaaagtgaaaccacggaacagtaaacagtgacagtgatccgattgaggatagcagcagcagattgctattttggaaatacccttgttgaagtaatggttcaaggcatccatattttgtgcttattggatggggtcatgctatcctagaagaacagattcatcacaggtcgatccctatcttctaggatagcatga

SEQ ID NO: 49161 - DNA, 160 bp, Setaria italica
  Peptide Sequence Number=SeqID_115135
gaagagtcccaactgtctccccacgttagcattcccaagtttgttccatactcgatctatggatgaaactgaaactctggcactgttctttgctttgcgtgttctactatctcgaagccttagcagatcttccaccgttcttcgcaattcagattgtgtt

SEQ ID NO: 49162 - DNA, 250 bp, Setaria italica
  Peptide Sequence Number=SeqID_115136
cacgagagagatgaataggcttgaactcttccatagtatgcattgttgaaaacgaatcatctatgaatttggcagctacaacaaccaaacatttaacatgacgtcgatttaggtgttcatcgcttgctgattacaagtgttgttgttgctgccaaattcagttcaagcctattcatctctctcgtgctaattcctccaactcttccatagtatgcattgttgaaaaacgaatcatctatgaatttggcag

SEQ ID NO: 49163 - DNA, 372 bp, Setaria italica
  Peptide Sequence Number=SeqID_115137
atggtgatgaattctggacagcaaacagtggtgctcacagctgcagtcttcacctcactttggagagtccaaaccactgtctcgcacgtcttcgtatcccgatcaaccactacagcaccgctcaagtgaacctattcttctacacagatctacttcatttacatcatatccaccaccaggtggcagcgctgggttgccttatcctgctcaaggtcttacacggcacgcgagcattccatcacctggtgctggtcaccacatgggttctccaagttcgtcactttctggttctccatatcatatgtctggtttatctcatggactgccttatggacgaagcacatctttaacaaccgtacttagtactaagta

SEQ ID NO: 49164 - DNA, 242 bp, Setaria italica
  Peptide Sequence Number=SeqID_115138
agactatgttcagagcctcccttcaagaattatcgctctatcaaaagcagcaaccttgtcttctctttcaatttccaaatctcttagtctggcattctctgtctgtaaggatttgctttggtctcggcctgatggacggcaagcaggttcggcctggacgagtgctgaggagtgcgttcagggggcagtgcacgggatcgccgtcacgcgtgatgcggcgccgtcgcttccaggagcaccac

SEQ ID NO: 49165 - DNA, 387 bp, Setaria italica
  Peptide Sequence Number=SeqID_115139
catcatcgttactgccgactagttgtagaaacatgggattgtgagttccatgcttcttctagtgagaggaggttatctttgctgtacctcgccaaatgatattatgcagaatagcagaaaagaaggtaatggggtatataactgaattcatgagggtcatccccgctgccttgaatgaagtgttgactatcagagatgatcttggacggaatgtcgtaaaaagactggtatgtcgtacatattctttatattgttgttcatggaagagtataagtacccatgccattcataattgttgttttagttatcattgcataacaaatgtgttgacaacttcatgtccatttctatgttcttacttagggtcaaacttactagaatggcaag

SEQ ID NO: 49166 - DNA, 274 bp, Setaria italica
  Peptide Sequence Number=SeqID_115140
ggcggcggcggccgcgtgccgcgctacttcagcgacaaggcctccggcaggttgctcagcgaggaggagcgcgccgccgagaacgtctacatacagaagatggagcgggagaaactggagaagctgaggaggaaaggcggacaaggacaaggccgaggccgccaagagggccgccgccgccaaaggggagaagaaggtaacctacacgccggggatttcgatcttgccaccagcttgattacttgtgatttttcccccaaatttgccttgggtt

SEQ ID NO: 49167 - DNA, 188 bp, Setaria italica
  Peptide Sequence Number=SeqID_115141
tgaattttgtctactctgtaaggtattttcatctagcaacagtccctcatagttacatctccacgtgctgctattcatgtatgcctgatggatatattgctgcactttccagttcaaagggatctatcaatcctccaaacataagtctgacggcaatagggtgggagtgtatttcctgtcaatgatcc

SEQ ID NO: 49168 - DNA, 404 bp, Setaria italica
  Peptide Sequence Number=SeqID_115142
aatactgatctaacatgcctgcctgcataaccggatcaaagcataactactctatcggccattctcagtttattatgtgtgctgcatgttttgtctgatttactcctcttctcagatacaagcttattgcacatctcttattaagaaaatgaaagactcgtatggctgccctggtgatgtattcattgatgcacgtattggagcatgggttggagaactacctgactgcttcaagggaatcaatagccaggatgacactgcttctggcaatgttcagcatcctgacacttttagccaagaaaatcaatcccagttggtgccaactaatattaagatgtccgatttggaacaaatgatagaactcaggaaactctgcagaatattgctagtttcaggtggtcatg

SEQ ID NO: 49169 - DNA, 244 bp, Setaria italica
  Peptide Sequence Number=SeqID_115143
caactggcggaactagggaacattatagacatgtactttgaagaccaattcacattaccaggcaaaactttccatcctcactggaattcagatccatcaaagattaaaaagaaacaatggacaaaagactattcaacggaagttcaaatgtctcaccatctcagagctactgttctgatatcaactctctcgatagcagtgagatacaagcttattgcacatctcttattaagaaaatgaaaga

SEQ ID NO: 49170 - DNA, 449 bp, Setaria italica
  Peptide Sequence Number=SeqID_115144
aataaggcctcaaaggaacaccagaaaaacggatacatgtggaacaggggttagccctcagctaagttccccctaatcaaccctattcattgagggaagcactcgctcaagcgcaatcttcaagaattgggtcaaccgccagggcattgagagagtctctacatccagtactaagacaaaaattggaactttgggaagaaaatctcagtactgctgtgagcctggaagtgttaggaataaccgagaagttttcagtcgctgcaggcactcgaagcattactactgattatgctaagttagattgtgtaacaatcaaatacttgaatagggtacttttagtactaaggaagaccaagacccttaggaccttttaggaaaagactttaccttacccgtaggtttaataaataataatttaaatactaccaataggacgacaaacaacttaa

SEQ ID NO: 49171 - DNA, 410 bp, Setaria italica
  Peptide Sequence Number=SeqID_115145
ctttgcaagctttgaagccttggtagttgatcaccttcaaagcttgcaaaggatactccaaggaagtgtggctgttcaggtcaacagtggagtattaagtgtgtgcacagcattcttatctggtgagcctgcgactaggctccgatcacaagaactgcagcagctcatcgctgcattgcttgaattcatggctgtctgcaagcgcgcaatccgtgtgcatttcagattgataggcgaagaagaccaggaattccacacccaactcgtcaatgggttccagtcactcaccgctgagctgtctcactatatccctgctatactctcggagctatgatagtactgtagcaagctggaagtttaggttagtctacgttgtaattggtttgtttctatttcttttctagttcgtt

SEQ ID NO: 49172 - DNA, 304 bp, Setaria italica
  Peptide Sequence Number=SeqID_115146
tacctagacgaactaaggactaccgaatacaacaagaactgcagcagctcatcgctgcattgcttgaattcatggctgtcttcttcgcctatcaatctgaaatgcacacggattgcgcgcttgcagacagccatgaattccacacccaactcgtcaatgggttccagtcactcaccgctgagctgtctcactatatccctgctatactctcggagctatgatagtactgtagcaagctggaagttaggtagcacgtgaatggttgttcattctttcagtcgtcggtccccaccaaatgtccata

SEQ ID NO: 49173 - DNA, 257 bp, Setaria italica
  Peptide Sequence Number=SeqID_115147
atttcctaaggcgacgtgcttcgccactttcttcaagagaaccgccagggcattgagagagtctctacatccagtactaagacaaaaattggaactttgggaagaaaatctcagtactgctgtgagcctggaagtgttaggaataaccgagaagttttcagtcgctgcaggcactcgaagcattactactgattatgctaagttagattgtgtaacatcaatcttgatgggtcttttgtctaggagccagcccttgg

SEQ ID NO: 49174 - DNA, 253 bp, Setaria italica
  Peptide Sequence Number=SeqID_115148
tattgcctcttcacatttccttgattaagtttctttctgttgtccgatttgtatatcaattaaagccgcactctaaattgactccttgtacaggatgttcttgggcagtgttagcaactactgcatcaatcatgtgggttgccctgttgttgtgatcaaggggacctaagctacccttgattaaaattctttggcgcacttcaattcaagtgtttcgaggctgctattgtgccatttgtaatcctgtacaata

SEQ ID NO: 49175 - DNA, 274 bp, Setaria italica
  Peptide Sequence Number=SeqID_115149
ccgccgcccaacatcgccgcgggggctcaacccggcgcccatccccttcggcggggcccagcgggctggaggtgccggcgttcacgcaggccatcgaggcgcaccagcggcgtatcacgcaggcgatcctggagcacgccctcaagatttgctccgccaaaaatgtcgaggtcaagacggaggtgatcgtgggtgatcccaaggagaagatctgcgaggacgaacggaccaaaccgaacaaaataagaaccgaaataactaagaactaaagtaa

SEQ ID NO: 49176 - DNA, 328 bp, Setaria italica
  Peptide Sequence Number=SeqID_115150
ttcgttctttttctttagtttaggtttattttgtttttctttttgggtttcttagtttgttttagttcttaactttactttgttcttattcttaatttctattgttgggttgccctgttgttgtgatcaaggggacctaagctacccttgattaaaattctttggcgcacttcaattcaagtgtttcgaggctgctattgtgccatttgtaatcctgtacaatattgcacatttctcattttgaaggccagggatgagggttcctctgtggtctccgtgtttgtaaaggaaaatgtgtatttggttgtgtaatcctggaaataagcct

SEQ ID NO: 49177 - DNA, 408 bp, Setaria italica
  Peptide Sequence Number=SeqID_115151
gctcgggcccttgccgctgggtgggctggatgcacacaatgcatgtgcagccagggcgatgccgggggtggctttgtggttgtcgcaactgaagctgtaccttggttcccgacatcaccaaacaccgcagcagtggccaaggcatcaaggctggatgcatccatttcagccacattcagcttcagaccgtagctgccctttcgcctcctcatttctgcagtaacaggtaactagttgatactatgttccattgttatgttgtactcccctctgttccaaatcgtaggtcgttttgactttttagattcatagatattattattcaccaagacatacactatatctagatgcataataatatctatgaacctaaaaaagctaaaatgacctacaatttggtaacggtag

SEQ ID NO: 49178 - DNA, 327 bp, Setaria italica
  Peptide Sequence Number=SeqID_115152
gggcccttgccgctgggtggctggatgcacacaatgcatgtgcagccagggcgatgccgggggtgctttgtggttgtcgcaactgaagctgtaccttggttcccgacatcaccaaacaccgcagcagtggccaaggcatcaaggctggatgcatccatttcagccacattcagcttcagaccgtagctgccctttcgcctcctcatttcttcatactgctgcagaacactttgcaactcttttggggtcaattcttcaaggggcaagaagacaaggaagacaagacttttaagggtacccaatagaagttagtacaagtagacaaca

SEQ ID NO: 49179 - DNA, 198 bp, Setaria italica
  Peptide Sequence Number=SeqID_115153
gggtcaattcttcaggggcagagcaggagcagcttttagggtcccatgagttgtcagtgcacgtccatttggaagcaacaataacagtaagaggcaaccggcgccattttgagcaatcgtcacactgaatccattgatcttgttccctacaaatacaaaatgaaaaaaaatgacaaaactggcacactgatgcgaata

SEQ ID NO: 49180 - DNA, 372 bp, Setaria italica
  Peptide Sequence Number=SeqID_115154
taggaaccaaataattgcgacttcgtttttgtagaaactgcagagacccctcatctggcctgctgccgaatttatctgctactcctaagttctcatttgcagtagaaaagagtgtctcactgagaagggaaccattcgcaatagctgagatctgcgagtctggcagactgacagtatttgtggccttccggaagcccataacaagtttccctccaggttctatccgactaaaggtcactgtatcaccagcttgtaattgcaaggactgtatgcatggtgtgacaccctccaagacgtacattcggctgttattatttggccaaaacctaaactgaaaatgccatttattttcctcttgcatcttgaattgtc

SEQ ID NO: 49181 - DNA, 447 bp, Setaria italica
  Peptide Sequence Number=SeqID_115155
gaaaattgggactatttccaagtcacagaagcttgtggaatattaaaggtctgtctaatgtaaaggaggaagtttatggcgcacttgactcatttgttgcatgggaactggagtttcccttgatagtagtaaagaaggcactgaagacacttgaggatgaaaaggaatggaagcgtataattcaggtgttaaatggattttgatttgaactctgattctgatctaaattctttttcctacatatcgctttcaattgtcatggatttctagtgaaatgttcatactgtcttgtagatataacacaaaattcccttacctacggagaattttactagtaatcccatccttggacaggtcaagattttgctgtttccagttctagagtagaataattgctcccctttaatattgtataaacccttttcccgtatcaagactacaactagg

SEQ ID NO: 49182 - DNA, 197 bp, Setaria italica
  Peptide Sequence Number=SeqID_115156
tggatccttttatttcctcaagaagcagggccccatcagctgtatcaaatctgcgtgcggattcccctgcagattacgataatggtatgggacaaagaagatccattgtttgaaaacggaggtttgcaatcttcaaagcaattgaggatgccaccttcagagcaaatgagattgcacacttcagccagatcaccgcc

SEQ ID NO: 49183 - DNA, 339 bp, Setaria italica
  Peptide Sequence Number=SeqID_115157
tacgtaaaacaaagtaccaacaagaagaggaaaaaatggtttgccggcggcacaccagccgtcgaatcgccgccgccgccacagacttcggaggaggaggcgaccccgccgtacggctctgtggtcctcggcggcaccttcgaccgcctccacgacggccaccgctgccttctcaaggcgtcggcggatttggcgagggaacggatcgtggtgggcgtctgcacgggccctatgctcgccaagaaggaggcaagaatctcgcctttttctttccttctctcatcaattgttgctgttggggcttctgatggttcgtggttctgctggttctgtgttttg

SEQ ID NO: 49184 - DNA, 260 bp, Setaria italica
  Peptide Sequence Number=SeqID_115158
ctaaatggtggacttgctgtaaatagaaaagagaagagaaagggttgccactgttgaaggtgtattagcgcttgcttttatatttcctttaattgatatcagtctactactcgatggactatgtaacagatacaaatgtggatgacctaaatttcaggttgaggtcgtcgatctactttctggaggtgtggaaggggagaaactgagttcgtctgctttgaggaagcttgaggcagagcaagctgaacaaagcgaagcaa

SEQ ID NO: 49185 - DNA, 380 bp, Setaria italica
  Peptide Sequence Number=SeqID_115159
tccgtacttctagttcgtctacttagttgtttgtccgttgtcgtacgtccgttgggttcccgttggtagttggtattgttgcgccacgccgcgcgccgccgcgagcgcgatcgccgaccgcgtctcccagtccagcggcgtccgcccggaggcccggttcccgtgcagcagggcggagaggctgcccatggacatgtagtcgtagacgaggagcttctcgtccttgctgaagtagtaggcgcggaggggcaccaccagctcgtgctgcaccgcgccgatggccgcgatgcgctcccggaactccggctccgggaggtccacgtccttgagccgcttcaccgccacggccgacccgttctccatcaccgccttgtacgccg

SEQ ID NO: 49186 - DNA, 172 bp, Setaria italica
  Peptide Sequence Number=SeqID_115160
tcaatggcttcgccaaataaatctgttgagttacaggaaacatccttgcatccagcagcaaaggttgtttgtgtaacataggcctgaatgcccttaaggaaggttgtagggttgcagggaacacctgtctgagacacgcaacagaggataggcaaggcacacaggggatagg

SEQ ID NO: 49187 - DNA, 395 bp, Setaria italica
  Peptide Sequence Number=SeqID_115161
cgtcaacattatcccatggtgcatacttttgcggcagcaatctccctggctccatagccctagttgaagtcctaagctagttacatcacctctcagttccactagaatctattaacaacttatccagcaacctctaaacctactcgaggaaaaccaccccaagcaaccacatcacaggtgcaatttgcgtaagcagatggcgttacttgcggagctagtaatcgtgtatcacaatcgggaagagatcaattactttcgtcgagggcaagcacggggaagtcgatccacgcctcgggccgcgccgcgagggcgcgcgctgctcccacgacatcatcgggtacctgcgaggcggcggcggcggcagcagtagcaggttggtaggttgggtaagtcct

SEQ ID NO: 49188 - DNA, 369 bp, Setaria italica
  Peptide Sequence Number=SeqID_115162
acttacgctcggatcttgtcttgggcaaagcctggccatctgaggattgatagccttcttggttgcttttcacactttctatctcacagacatgaggcggagaatctgactctatctcattgacgtggcgtgcagagtttggcacgcttcggttgtcttcctgcatgtagaattcaaaaagatgactaaacaatataatctcatatcttaaaccatatccataactagattaaccaatgggtagggtttcatcagagatgctgcttttgaataagcttaaaagatgcacttatgacaaaaattcatactatcttttagcgcctcagtctgaacttaggcaaaaaaatgggaagaatgcctccaggagac

SEQ ID NO: 49189 - DNA, 389 bp, Setaria italica
  Peptide Sequence Number=SeqID_115163
caaaacaatgtctcctgtcaacgtgtcaggagcttcatcagcttgaccctggaatacaatcttttggccatgctgcattcctttctccacatgaacctccaagaccttcttctcctgggataccttgcttcctttacagcctgggcatttatccttctcacttatgatctcacctgaacattgaacaaccataagaccaaaaccagcagaacaatatttccgaagggagatacaacatcagtatacctgatcccttgcattcagggcaaatagtgttcatctgttggatcatgcccatgcctatctgtcttgtgattgtcctcattccagcaccacgacaaccatggcaagttcctgatgccccactcttggatcctttccccttgcac

SEQ ID NO: 49190 - DNA, 258 bp, Setaria italica
  Peptide Sequence Number=SeqID_115164
agggggaaggtagactacaaagaggacgcagacaaaaggtgccagaacccggaaaaagttgctcaaatatgtcgaacgggctatggaaatcactgctgctgcctcctcccattccctctttaagtgcatcttctccatactggtcatagatctccctcttttccgggtcactaagtacctcataagcttgagacccggaaaagagggagatctatgaccaatatgtcgaacgggctatggaaatcactgctgctgcct

SEQ ID NO: 49191 - DNA, 233 bp, Setaria italica
  Peptide Sequence Number=SeqID_115165
aggcttgccgagttatcaaacaaggaagagtctttggtgaagagatcagatgagttaaaggaagaagagagaaagctctcctctcatagagacacggtgcacagcgaattacaaaaagaaagggaggaaattcagaatatgaaattggatttggagaaggaaaaatccaatttcatattctgaattccctccctcatttcgccactcgctacaccccaaaaacctcacgcgct

SEQ ID NO: 49192 - DNA, 482 bp, Setaria italica
  Peptide Sequence Number=SeqID_115166
attcaatcttcagctcttctaattcattaagctgctgaagattgaatccgagaacaatcaactgtctttgagacagtgtgggagatcaaaacatggtgatgtagaaacccagaaagagaatggtgttcacctgtctcctgatgaggatcaaaatgctagtcccaagaagtgttcatcaccaaaagtcattcttggaaagaaattagaagtgtccccctcagtttcaacaccaatttcatgggttcgaaaatgcgctcaggtgatattcaaacgctctccagaaaagagtgctgaccatgataatgatagatctgcacatgcaacattgggaaatgtcaaacgacttcagcttagtggaaaatggtggattattgcttgtcagctggaaaatggtgccggagaagtaccacatgctgtcgatggtcttaaagttgggaaaaagaggcttaattatgcactctctcatgatcagagtgtaaaaa

SEQ ID NO: 49193 - DNA, 345 bp, Setaria italica
  Peptide Sequence Number=SeqID_115167
gatgcagcaagagcatgctagttggctaagcaggatacaacaagaaagagaagatcttaagagagacattgatatccagagaacagagttgatgaattctgcaaaggcaaggcagatggaaatagagtcatatttaagggaaaaggaagaggagtttgagcagaaaaaatccaaggagcttgagtacatcaattctgaaaaggaaacgatcagctcaaaattggagcatgtcaggattgaattgcagaaacttgaggatgagaggaaagaagcttttgtcttggtaacgtagtcgtaggtagtagtagtctaagtagctgtctgaattaaagtagctaacttaaa

SEQ ID NO: 49194 - DNA, 274 bp, Setaria italica
  Peptide Sequence Number=SeqID_115168
gggaggtggcgcgcttccacatggcggccggtgaaggcagcggcggcacgagcgaattacaaaaagaaagggaggaaattcagaatatgaaattggatttggagaaggaaaaatctttctttgaagaggagaaacgtgaagcgattcaagctcaggagaaactactaataacccaaagtgagagagaggatttgctaattttgcagatgaaacttaaagaagaaattgatagtctgagagcccaaaaagttgaacttatggttgatgcagaaag

SEQ ID NO: 49195 - DNA, 224 bp, Setaria italica
  Peptide Sequence Number=SeqID_115169
gtgggcgattatggctttggattgggctcggtggattggtggtgggctggtggctatgcttcttagttagtgcctgttgggattaataaaggagggaaatcgtcttagagacgagtcctttttgccccttgaatcttgtgagagacagcattgcgtcaatgtagctgaagagggtattgcaatctattgcgaagaatttaacaattccaagaaagatgacaaca

SEQ ID NO: 49196 - DNA, 315 bp, Setaria italica
  Peptide Sequence Number=SeqID_115170
ttcctagtgtgtttaacaacaagaaaatgaacccacgaaggatggcaaatcatgatttgacatagtcctttcctacatagcaaactacttcaatcagtaaactcaccaggtgtttcccctcctcctgaagtgctctgtccatctgaacaaagagagatttccaccgcgccgcatgtgcttctgaaactgctttgtcagtacatccagactcagaagtattcgcaatagatgattcattctcttgattagatgaaaactctgttgaaattaggtaaggtagttccgtgtgaagagcatttctgactctcttcctgc

SEQ ID NO: 49197 - DNA, 153 bp, Setaria italica
  Peptide Sequence Number=SeqID_115171
aaacttgcttgctatttctcacatggttaatgattccagggtttagcccagataataggccactaggagcagcaaccttcacaaacttgttagcctggccatgtggtaggcagtgtttggtgaaacatcgcattattatctttcatcatgaaa

SEQ ID NO: 49198 - DNA, 472 bp, Setaria italica
  Peptide Sequence Number=SeqID_115172
tggtccaatggctacatactccagtaacctttcaatatcatcaagaattatgatgctgaattgagatttgtatgcatcctcaaaaccttgcaaatctgtgcgcatttgctgctttcactgaaaccaatcatagtttctgctgatataattttgacatatgcaaaatcactgtcaatgccaacactagctgccatagctgatttaccacttccagcaggaccttccaagaggcaagtcacaagtgggctacctttgcttactttaacttgctccacaaggagcatagctctttggtaaatgtgcttatgtgccttgccacagtcaacaataccacgcaatctgcatatttttcaaataaaggtgaaggcgtcgaatataaaaccaaacaatattttgttcactaaatatgaaggccaacagtatttattaaataagatacaacaggaaactaactacaaaaacacatatacgt

SEQ ID NO: 49199 - DNA, 296 bp, Setaria italica
  Peptide Sequence Number=SeqID_115173
tgtttagttgtaggttctattcctattagttattctgccgtattcaaagcaaacgagacagcacttttgactacaccttccaattctgctccactgtagttctttgtccgtgcagcttcattcagaagatcaggtgtcatttggatatagttttaacaatcattaatccattcgatacataaagaatttccaatgataaactcagtgctaatgtatacataagtaatgttgcaataaatatttcgaaagaaaatttcaaatatcacaagttcaacaaatagcactagcatgattca

SEQ ID NO: 49200 - DNA, 190 bp, Setaria italica
  Peptide Sequence Number=SeqID_115174
acggaataaataatcaactacaaagaatagactaaaagaaaataggttagaataatctaatcttctcctctccggcgtaaattgcttctgcgcttccccctgttggcccctgtgcagacatctcaacaagtgtgtacaacttcttgattggcatatcgtccagtgcttctgctgctgcatcaagatcgcc

SEQ ID NO: 49201 - DNA, 201 bp, Setaria italica
  Peptide Sequence Number=SeqID_115175
gcaggcggtccaggaggacaatgccggcaactacgtcaaggcgttcccgctctacatgaacgcgctcgagtacttcaagacccacctcaagtacgagaagaaccccaagatcagggaggcaatcaccgccaagttcaccaagcaaccgcccgccgcccctccccttccctcccgaatccgccgccgcggtgcctaatccgg

SEQ ID NO: 49202 - DNA, 460 bp, Setaria italica
  Peptide Sequence Number=SeqID_115176
ttagttaacggttaagtttcttacttaatttgttacctacctacttcgtctttgtacgtctagtttgtcccactgagtgggtgactggggacaccctagcgaggatcatgtatgacacctgttggtaggcatggaagcagaatgcagcaatcagggatctggtgtatatctgttttaagttcaagccagcagactgcaacactgcaggactgactttgacaccctctgttagtaaggtgactggggccaagaggcagaatgacatgactgtaatgatagagaagaggttaatgttgtccagagattcctctttcttcaccatcagcttcttgcttagcacattcctggactggaaggttacatttgaagccattgcactccaaaagccagcccagttaaaggaagcctcagtaagagatgccagtgccacaccaccaacaattggaagaagagacaacac

SEQ ID NO: 49203 - DNA, 293 bp, Setaria italica
  Peptide Sequence Number=SeqID_115177
gagagatccctctggtttgctgtcagttaatgtgatcgtttgcgatttaactactagcatttttgaactacggcactcactagccactccaacagcatggcaaggcttcgacagttctactggatagacctgaccatatatgcgatcaagcagcctttgccttgggcttaagcctcttcagttgcgagtagaggaaaactcctgcgagggcaaccccggtaccgagagagttgacaggtgaaacaggggtcctgaagaacagaacggaagtcacaatgaccaccactcgcttg

SEQ ID NO: 49204 - DNA, 265 bp, Setaria italica
  Peptide Sequence Number=SeqID_115178
atcatgtatgacacctgttggtaggcatggaagcagaatgcagcaatcagggatctggtgtatatctgttttaagttcaagccagcagactgcaacactgcaggactgactttgacaccctctgttagtaaggtgtcatacatgatcctcgctagggtgtccccagtcacccactcagtgggcaactgcgtcaagcgagtggtggtcattgtgacttccgttctgttcttcaggacccctgtttcacctgcgagggcaaccccgg

SEQ ID NO: 49205 - DNA, 444 bp, Setaria italica
  misc_feature (11)..(11): n is a, c, g, or t
  Peptide Sequence Number=SeqID_115179
ctgccagcctnaagaaatggaaggttatttacatggatgatgaggatgatatgatgctggtcggggatgatccgtggcatgaattttgcatcatgtgaaaaagatatacatttactcctacgagaggccaagtctttgattcccaaggcaaagctgccggtcattggtgacaccatcaagccaaacccagacaaattgtcaccggaatctgaggagagcgctcactgcttgctgctggggcatctgttttgttggcatgggatggctgtgacagctgatcagactcaacatctactgagacagcaggtggttggtcttgaccaacactagcagcagtaaccactggtgataccgcattacttatctcaataccaaacaatctgcagccagcagtaacagattcttgcttcctttcaggtggaggtttgtgaatcctactctgct

SEQ ID NO: 49206 - DNA, 302 bp, Setaria italica
  misc_feature (12)..(12): n is a, c, g, or t
  Peptide Sequence Number=SeqID_115180
gttggaggagangttttgatatccagggagagctttctgccagcctcaagaaatggaaggttatttacatggatgatgaggatgatatgatgctgtcggggatgatccgtggcatgaattttgcatcatggtgaaaaagatatacattttactcctacgaggaggccaagtctttgattcccaaggcaaagctgccggtcattggtgacaccatcaagccaaacccagacaaattgtcaccggaatctgaacatagaccgacaagaagtagaactacaaaacaaacaaaccgtaaacttaaa

SEQ ID NO: 49207 - DNA, 182 bp, Setaria italica
  Peptide Sequence Number=SeqID_115181
ttttggttatttgtttttgggttaggttcttaatttgtccctattgtcttccttgggtacttgctaagagttatctgtttgtttctccgcgggcccaaaaggacgtgttgccctgcaatctgcctgactgccttggtttggaatgcctgtgctggaccagcggtggtcctttgccagcaagg

SEQ ID NO: 49208 - DNA, 236 bp, Setaria italica
  Peptide Sequence Number=SeqID_115182
gtaaaaatagggatgtttgatgatcgctcgctgatagatttgtttctgctgttccccaacgacggctgctagggataaataggagctgtatgtttgactggctgctatttatccccaacgacggctgctagggataaataggagctgtatgtttgactggctgctaatgggtgtaattttttttgtgtaataaatcgctcattggcgatggtcacatcaaatcaaaattacatgtg

SEQ ID NO: 49209 - DNA, 225 bp, Setaria italica
  Peptide Sequence Number=SeqID_115183
cccacggagaccatccgtgggcttgtgtttgactctataattatttattctttgtgcgcctgactgcctaagtattaacattattggtttgggtaagttaacaaggcctggttggcgcacaaagaataaataattattgaaccccagcttctagagtgattggccaaccaggccttattaacattattggtttgggtaagttaacaaggcctggttggcgcaaca

SEQ ID NO: 49210 - DNA, 441 bp, Setaria italica
  Peptide Sequence Number=SeqID_115184
tggatagcaaaatggtcagatcaagaatcagcttctgccaacgaagtagtttccactgctagggatcaagtttaagaaattaggtgaaagagaagctgcatcattggcttatctgtaaaataaatgatgatggaaagggtcccaatgtgctgtgcaaggaaggacagggtgtaattcatctggtagcagcactgggttatgattgggctatcagaccgataattgttgctggtgtaaatgtgaacttccgggatgctcatggatggactgcacttcactgggcggcatcttcaggaaggtatgtccacacattcttcataaagctgttccaacatgggatgcccatgttcaacagaactttatgtaaaagaagttaccttatttctttctcaaccctttgtcttgcacttcgtttgtactttaataggaactcggtccttt

SEQ ID NO: 49211 - DNA, 312 bp, Setaria italica
  Peptide Sequence Number=SeqID_115185
ctgttcgtaaatccactcaagctgcagctcggatatttcaagccttccgggtggagtcattccacagaaagaaaatcgtggaatacggagatgataattgtggattatctgatgaactcacactttcacttgtttctctcaaaggacaacatgatccacatctgcattctgctgctgttcgtatacaaaataagtttcgtggatggaagggaagaaaggaatttatgatcatccggcagagaattgtcaagttacaggctcatgtacgaggacaccaagtgaggagaaacttattcggtaaggtttgttctt

SEQ ID NO: 49212 - DNA, 296 bp, Setaria italica
  Peptide Sequence Number=SeqID_115186
taaattggtagtcttgtctagtactaaggttagtactaatttgtactagtattcctaacttctgagttcccttctggaagaagtccagctgatttagcatcagtaaatggacacaaggggattgctggttttctagcggaagctgctttgacaagccatctgtcagcacttactattagagaatcaaaggattccactgtagaagtgtgtgggttaccagctgttgaaggtctgactggcattaattctgcccagctagctggagaagattctcatgctgaatcacttgaaggttc

SEQ ID NO: 49213 - DNA, 355 bp, Setaria italica
  Peptide Sequence Number=SeqID_115187
aagacaatgggggatttaacaccttaatcctcaatagttgcacaaaaaattggtggtagagaaaatagcaaagtcccccagtaaagtctcctggaaattctacaagcctaagagaaagatttagaacaaccggtacacctttcccatagtgctcttcaggtacaggcatctcacctgcaaacacaaacaaaaggtgtcagcaaaactcagtgatctatcataacggaacaagcacgaattttacacagatgcaagggaatcgagggttgagacatacattctgccaattcttcttcaagagtgacacaaggaagttgacgctcatttgcacattctggaagattttgctttctcc

SEQ ID NO: 49214 - DNA, 244 bp, Setaria italica
  Peptide Sequence Number=SeqID_115188
gacgaggaatttgcttaatgatggcctcagatgcaaggaaagcatggtatttctttgcgagcttcttaactagcttcttgtttttgttcatcttcttgagggcttccacatccatactgtccagacctattctccctgcctcctcaacgtgctgagcatcaccaagcatgcaaaccttcatcttagggcgagatgttttcgttcttgatatcgaacctatggtaatatcttatttcaacatttt

SEQ ID NO: 49215 - DNA, 324 bp, Setaria italica
  Peptide Sequence Number=SeqID_115189
tccctgcctcctcaacgtgctgagcatcaccaagcatgcaaaccttcatcttagggcgagggatgtgaggcagcttaacagaaccactgaaacgcttgtccttttgagggtcatagttcttcagtccaatctgtagctcaatggtttcgacaaacttgcgctgcttttcacgggagtcattggtaactgaggcaattgcctccctcagagcgtcgctctgcaacttacttctattggtcgtccggttggttgtcttggttgttcgttagttctttagtttcgttttttcctttttcgtttttaaggttttttaggggtttttta

SEQ ID NO: 49216 - DNA, 314 bp, Setaria italica
  Peptide Sequence Number=SeqID_115190
tgtcgtaagtaagtattgtcgtcctagtaaccgtcccctattccccttacttggtattccgtctattgtcgtctaccgacaacaccattcaggtacaacgcgaagcgcaggcactggcgccgcaccaagctcggcttctgagcgaggggatggaccggctgctgcgtcggaaggctagggtttaagagctatcttatgttttatgggtgtttcagtgtttctgcaagataggaagtgattccaggatgcttttattaagattttggtgatgttaagagagttgcagtactctggataccatgctgcattgctat

SEQ ID NO: 49217 - DNA, 204 bp, Setaria italica
  Peptide Sequence Number=SeqID_115191
ttagaaacatcgttaggctactttttattcataaaataaagatgcatgctgacatgttcatctgcaaaagggtgtttcagtgtttctgcaagataggaagtgattccaggatgcttttattaagattttggtgatgttaagagagttgcagtactctggataccatgctgcattgctatgagtaaaggacccctgttaaaccct

SEQ ID NO: 49218 - DNA, 251 bp, Setaria italica
  Peptide Sequence Number=SeqID_115192
tacaaggacaactggcgccgcaaaccaaagactacggaattactagaagacgggggaaatacaaatagactgggcaaccgaatgcttggtgaagcctggggtttacgagccggcctcgggacgcctccatgtctccgcaagctaggaagctcttgttaagattttgcttatgttaatgggatcttatcagttgtgcttgtagcgtactgagatatcatgtttttgctaatggttgaagaacctcctttaat

SEQ ID NO: 49219 - DNA, 482 bp, Setaria italica
  Peptide Sequence Number=SeqID_115193
aagcactactctgatctgtccgccaagcccttcttccagggccttgtggactacatcatctctggccctgtggttgccatggtctgggagggcaagagcgttgtcacaactggccgcaagatcatcggtgccaccaacccccctggcttccgagcctggcaccatccgtggtgactttgctgtcgacattggcaggaatgtcattcatggaagtgacagcattgagagtgctaccaaggagattgccctgtggttccccgagggcctcgccaactggcagagcagccagcacccctggatctatgagaagtaaaccgtgtcgcttcactccaaacctcaagagcctgagagcgtggcaccagccctactttagtaatatttagagttccaggaaattattatctgtatcgttgaaccgtatttccataaacaaaacgtcaagcatgcatagcatgcgagccaaggaaggaaattcggttcat

SEQ ID NO: 49220 - DNA, 231 bp, Setaria italica
  Peptide Sequence Number=SeqID_115194
cgacttgtgaacgtggagaggtgcttcgctgagaagcactactctgatctgtccgccaagcccttcttccagggccttgtggactacatcatctctggccctgtggttgccatggtctgggagggcaagagcgttgtcacaactggccgcaagatcatcggtgccaccaatctccttggtagcactctcaatgctgtcacttccatgaatgacattcctgccaatgtcgac

SEQ ID NO: 49221 - DNA, 254 bp, Setaria italica
  Peptide Sequence Number=SeqID_115195
gcctgcgcaaatggccatggtactggtggcatggcgcggtggcagcacatagtctctgaaggccagtccgacctccatgctcttgagcatctcatcggtgatctccatgctcaccctgggcggactcgtcatggtgtcagttccccaaatttttcctcaagtaaaccttaatcggcaccagggaccacgaaacgaaggaaccaaaccgattgacgcccggctggcacgatggatggacccttagcccggttacg

SEQ ID NO: 49222 - DNA, 386 bp, Setaria italica
  misc_feature (267)..(267): n is a, c, g, or t
  Peptide Sequence Number=SeqID_115196
tcatctctgatgtgctcaggcttaagagagacaggcttttccattgcaaccaaacagaaaacctgcaataaatggttctgaatgatatcacgaatgattctgtagcaacaggagcagagtcagatatttatagagcgagtaatgaaggtatgcagaaaaaaaatgcgaaaatatttaaacaatgtgccagagatgggcggcatcatccagttgtctttatccttaactgacataaagcctttgtttgcaattcagtatcaaagggancatatttcatgttatttggttgctgtagtattgtaattttactctctggattttacaagtttaagcaacaatggaaagcatgcatcctcagtttcaaataagtacatctatacattaat

SEQ ID NO: 49223 - DNA, 372 bp, Setaria italica
  misc_feature (14)..(14): n is a, c, g, or t
  Peptide Sequence Number=SeqID_115197
cggctgcaggttgntattggaggccttcatcttgccctcgtcgatgtcatgcagcaaaggagtgaagatttgccaagcagcctttaactcgtctctgcgaacaaagtgctgttggtctcctcgtattgtatccaggatgaggcgttcatatgcctcaggaattttgacattttggtagcgcatcccatatgacagatcaagctcactctgttcagtagccatttctaacccaggtttcttaacagttagtttcatgtacatggcttctgatggctggaaggcgtaatagaacaaaactacaatttacttaccttagacttacttaacaatttaaaaaatagtacaaccaaggaaacaataccttagaaatta

SEQ ID NO: 49224 - DNA, 272 bp, Setaria italica
  misc_feature (25)..(25): n is a, c, g, or t
  Peptide Sequence Number=SeqID_115198
ctgaaagtaaaaatactatgatagnaaagggcatgctgaactacagaagaaagggacagagtaagtatttcaattatatccttcaaacaccagtttatatacttttctagtctaacatgtaaagatgtggtcatgtgggtgacagagataccttcccatctttcattgtgcacccgaagaacaacagacgcaaaagttggggtattagagtcatctggcactgtagggtcatccttgtagccatcgtattgtcccaggaccacctctttcta

SEQ ID NO: 49225 - DNA, 392 bp, Setaria italica
  misc_feature (302)..(302): n is a, c, g, or t
  Peptide Sequence Number=SeqID_115199
cttcactcctttgctgcatgacatcgacgagggcaagatgaaggccgtccaatatcaacctggcagccgaggccccaaggaagctgacgaattgagcgctagagttggttatgtccagacccacggttacatatgggtaccacccacccttgcatagaagagaagatttgccaagcagcctttaactcgtctctgcgaacaaagtgctgttggtctcctcgtattgtatccaggatgaggcgttcatatgcctcaggaattttgacattttggtagcgcatcccatatgacagatcaagctnactctgttcagtagccatttctaacccaggtttcttaacagttagtttcatgtacatggcttctgatggctggaggcgtatgacaaactc

SEQ ID NO: 49226 - DNA, 191 bp, Setaria italica
  Peptide Sequence Number=SeqID_115200
ttttaggttttacttttaccttttacgtttaatttttagtttatttccttaggtattgtaggtcgtttaattattgtccttctaggtaatttttgtactatttttggttagtcgtctattccctattattgactagattcaagctcactctgttcagtagccatttctaacccaggtttcttaacagttag

SEQ ID NO: 49227 - DNA, 180 bp, Setaria italica
  misc_feature (59)..(59): n is a, c, g, or t
  Peptide Sequence Number=SeqID_115201
ctgctttctttgagcttaatgctttaccagctttaagaatgaatggaacaccttcccanctttcattgtgcacccgaagaacaacagacgcaaaagttggggtattagagtcatctggcactgtagggtcatccttgtaagaccaatacgtaattagtacccaaggaaccaacctactta

SEQ ID NO: 49228 - DNA, 235 bp, Setaria italica
  Peptide Sequence Number=SeqID_115202
acaccacgtacgatgcagaggatcttctccgcgagctggatgaccaggtgttgcggaaaagaatagaggacgctgaccggagcagagcagggtttgaatcgaagaatggaggggaagacgacgagggcggcggttcttgccgccagcctgctcgtcctgctgctgtcaggccagccggcgccagtgtccgggtccgtcatgtcaagtacaagtactgcaagtgcttccggaagtg

SEQ ID NO: 49229 - DNA, 220 bp, Setaria italica
  Peptide Sequence Number=SeqID_115203
tacgggttaggttcttgtaaggtcctaagtcgtcgttcttaggtaacttgtcttgatcgagaggttgatgcctgaactgcgacggccagtttgattaaataaataaatgtaatagtgcggccttcctttgagatgtctggttctgaaccagtttgatatgcttgtaattgttagttactgaatataaaataacacgtcttctacgtgatcgatactattc

SEQ ID NO: 49230 - DNA, 220 bp, Setaria italica
  Peptide Sequence Number=SeqID_115204
gagctgcagcaaagatgtgtatggctagacagaggcgaagcctgcactgcgtgctaggctgcgactgcgagtaataaagagttcttgaaagttgaaacttgatcgtgtgtaatttaagcaagcagtgcaggcttcgcctctgtctagctcaggagctgcagcaaagatagtagtaataggactagtttgcttgcgatgtgtgctagcaaggaggcgcagg

SEQ ID NO: 49231 - DNA, 427 bp, Setaria italica
  Peptide Sequence Number=SeqID_115205
tttaagtaagaaaccaaaacaaaataaaaataacaaaataaggaaaggactacgaaagactaggacaggagtcttcttggtaatatcattgggaatctggtccagagtgtaacctactgagagcttagcagccatcttggctatgggaaaccctgtggcctttgaggcaagcgccgatgacctggacaccctgggattcatctcgatgaccatcacctccccgtccgcaggattcacggcgaattgaacattggagccaccgcactccacaccaatctccctgatgatggccacagagtagtccctgagcctctggtactccttgtcagtgagcgtctgcgcaggagccacagtgatggagtctcccgtgtgcacgcccatgggatcgatgtctcgatggagcagatgatgacgacattgtcggcca

SEQ ID NO: 49232 - DNA, 360 bp, Setaria italica
  Peptide Sequence Number=SeqID_115206
aagacaaagtggaacaccccctcttcttcaggcgcgcatgtgcatcccgaaggagagggggtgttccacttgctgcaaaccaggtgaattacagcctgatatacagaacccctgagttgaatggtgtgaaggcagcttgtgatgagctcggcatcaccttgattgcctattccccaatagcccaaggtgttttgacagggaaatacactccagaaaatccccctaccggtcctcgagcaaatacatacactcctgagttcctcaccaagctccaaccactcatgaacaggatcaaagagattggagcaagctatggcaagaatccaaaccccaggttgtctctgaactggctgacctgcc

SEQ ID NO: 49233 - DNA, 318 bp, Setaria italica
  Peptide Sequence Number=SeqID_115207
ctggccttcacaccattcaactcaggggttctgtatatcaggctgtaattcacctgggttgaatggtgtgaaggcagcttgtgatgagctcggcatcaccttgattgcctattccccaatagcccaaggtgttttgacaggggaaatacactccagaaaaatccccctaccggtcctcgagcaaatacatacactcctgagttccctcaccaagctccaaccactcatgaacagggatcaaaaggagattggagcaagctatggcaagaatccaaacccaggtgtctcgtgaactggctgacctgccagggactggtg

SEQ ID NO: 49234 - DNA, 272 bp, Setaria italica
  misc_feature (205)..(205): n is a, c, g, or t
  Peptide Sequence Number=SeqID_115208
ttggttagtttcgttccggtttgttcgttcttcgggttggtagtccttgtaccggtcgtacgaggttcgaagagcttcggactctggcgcgcgagatcaagggcatcaagatgcccatcgaggagtcgtgaatactttgcatttcaccatccaatggaatgtcgctgataggagattaacgttcttttataagggagaaaaaacnctaagatgcagaaatgaaacagaagtttcagcatgtgtaagtagaaaatggttatatgtagctgcca

SEQ ID NO: 49235 - DNA, 267 bp, Setaria italica
  misc_feature (91)..(91): n is a, c, g, or t
  Peptide Sequence Number=SeqID_115209
agggcgggccgccggcagttccacggcgccaaggagctgttcctctccgaccacttcgacctgcagagcgcccacaccatcgagggcaagngtgttgtacactctttcaagaactacaccaagctcgacaatgtcgggcccgaggacttcttctgccgattcgagtataaggcggcgaccggctcatttacccctgatcgtgtcgcagtgtacggagctcaatggagcctccccttgttgattgttattttcagttgttgggttttg

SEQ ID NO: 49236 - DNA, 454 bp, Setaria italica
  Peptide Sequence Number=SeqID_115210
tgcgccattacctgtggcattgtgctgtgtcaaggtctctaggccaaaataccctagtgggaattatacttccacatactaatgtagcatgaacttctactacttgtgcgacaacacttggggttctttcatttactccgcaaacgcttatgctaagaccaatctatgcatcttgattggcatcgtgttctgcatttacatgtttgtttttaatgcaggtactggaattacctcaggaaacaaacttttgtccttgagtcatatgtgtcaaatgtcaactggctgatgaaccgtgcattatttacatcgcattgctatttgtcatggggatttgtttggccctatattatggctttggtgcatcttttgaccgctctgcgagcgccgtacagcaaaattgtaaaggaagcatctgattcatcttggggtcagttcctcggccctctcaatccca

SEQ ID NO: 49237 - DNA, 253 bp, Setaria italica
  Peptide Sequence Number=SeqID_115211
ccgccgccgacgctatgctcgccgccgcgagccgcgccttctctagcacctcagccatcgccatccagatccagggttgcgtgatctgtttagtacttgctcttggatgggcggccgcttcaattgtcaggtaaagaaaggagtttgtgatttaaggttttacttgatgagaccggaaataatgtagcagctgattttcttttacaatctatgctctcttaccagaaaaagggttatactgaacatgaggcgc

SEQ ID NO: 49238 - DNA, 243 bp, Setaria italica
  Peptide Sequence Number=SeqID_115212
caatagcaggacagcacaaaaggctcatatcctcacctcctgttgctgtgtttccgcaccctcttgccagtgatcttagcttctccagcaaaattgtaaaggaagcatctgattcatcttggggtttgcacctagtgggcctcttgtttatatgcactctcatagaacttgtttcaatgtggaatttgacaaaggtggaaattcaactgtgcaatatgttgtctcccgaaggaccaaatgtat

SEQ ID NO: 49239 - DNA, 253 bp, Setaria italica
  Peptide Sequence Number=SeqID_115213
ggcgtttggttggcatcttttgtaccgctctgcgagcgccgtacagcaaaattagtaaaggaaagcatctgattcatcttggggtggaaattcactgtgcaatatgttgtctcccgaaggaccaaatgtatctcttgattcatacaactgggggcttgtgttcattgctgttttggtagacaattttctctaccctatatctgcattccgatcacatttctcccagtcaattaattggtctggtatcagatta

SEQ ID NO: 49240 - DNA, 167 bp, Setaria italica
  Peptide Sequence Number=SeqID_115214
gatgcgatcctgaggcgtttcaagcagctagaagatgcattatgtgttggccaaccttgtgcttgttggagacattttgttgaatctgacttcgtggcatgttcactattattataacattgtggttgtttccctttttctattctaattttactattacgttctta

SEQ ID NO: 49241 - DNA, 164 bp, Setaria italica
  Peptide Sequence Number=SeqID_115215
ccgtccatctatgacatgcaagagcgcacggtggacggcaagaactactggacgtttgagtacgatctggaggcaccgggctacggcgtttctgcctttgacaaacggtacgaccaattaaggaaaaacggaaccggtaaactaaacaaaacgaactaaagaaa

SEQ ID NO: 49242 - DNA, 366 bp, Setaria italica
  Peptide Sequence Number=SeqID_115216
tctacttgtaaggtaacttgtaagtaactacctatttcttggtatttttaacttccgtagaaggattgcagcacttcttgaacaacaaaagtcattggagaaagcatctgatttggagttagaactctcaaagatgcagttagaaatggagaagcatgaacagaaaatccagttactggagctagaaattgcacagaagaatgaaaatgtcgacagcttggagttgagtttgaaagatgaatgtgagaagaggctgcaaacccaaacatcacttgtgtcaatggagagaatgtattctcaatctcaggaagatgtgagtaggttgcatctagagattgagaagcagaatggcaagttgaatgagtt

SEQ ID NO: 49243 - DNA, 187 bp, Setaria italica
  Peptide Sequence Number=SeqID_115217
aagtgctgcggaaaccatcaagcttacagccagtacaagagtgatgaacgggggccagcgggccactgaacgccggcgaggcgctgaagtcgcttccggcttcgctgaacatgaggctgtgacccgtaacggtaagacggacctagtaaccggaacaaagaactaaccggtaaaacgtaaaccaaaa

SEQ ID NO: 49244 - DNA, 317 bp, Setaria italica
  Peptide Sequence Number=SeqID_115218
tagtttaactaattggttagtctagtcgtcttccttcgtctacgtaggtcctattgtttgtctaggtatcaaactactgcatcatgaatgtctttgaggatagaattcctggaagggccatcatcatctctgtcatagataatcttgtgaagggagcatctggtcaggctgtgcagaaccttaatctgatgatgggactgcctgagaacatggggctgcaataccagcccctgtttccctgatctttcatgtcaatacttcatccatgatgacagtacatgggagtacgacttccattccatcagagaactatctgg

SEQ ID NO: 49245 - DNA, 163 bp, Setaria italica
  Peptide Sequence Number=SeqID_115219
aaactgttcaccagcttttctatctgcagtcatcacttttatatgaaactgaggttggctccccagaatggaatccttggatctaattcgaagccattcgctggtgtcatgctcaagaaagctcagcaggttggacccctgtcgctccgtgtgaggggatccg

SEQ ID NO: 49246 - DNA, 150 bp, Setaria italica
  Peptide Sequence Number=SeqID_115220
gtaccatgtggcaagcaacaaaaaacagcatcaacacctgaaaagtcagcatctgtatttcctcacttgatatcgcaggacctgccaagactggttgcaataaaagatgctgacttttcaccagcttttctatctgcagtcatcactttt

SEQ ID NO: 49247 - DNA, 408 bp, Setaria italica
  misc_feature (35)..(35): n is a, c, g, or t
  Peptide Sequence Number=SeqID_115221
attggttcaatggctgtcgcacaaatatttttccncggttttacttcagcgcatggtccaacaagtcatatttcaaaccacttattttcagcagtattgttcttttcttggggaatgtatgttatgcaatagcatatgatatgaagtccctcacagtccttattattggccgcttactatgtgggtaagtgtccttgcatagaagtactcttcacgagtgggcacttgattattcagctatagtgttgttttcattcgggtttttctttagttgtcagttctatattctagtggaagatcaaacaacaggaaattatttcttcactcttcagtagccagtgccctttcagattaataattaaattcttcatagcaagtgtcccttttcagaactgtgctgatcagaaa

SEQ ID NO: 49248 - DNA, 127 bp, Setaria italica
  Peptide Sequence Number=SeqID_115222
cccacatgcttgaagacctgctgtagctgagagtagggctgttgtaggagccttgtcacgtaaccttgctgaacttcaggagcgtcaaggagttattgtcaattatgatcagccatcttctgctctt

SEQ ID NO: 49249 - DNA, 279 bp, Setaria italica
  Peptide Sequence Number=SeqID_115223
gccgggaatgccgcggaggaggaggaggcggtggcggtggcgcgcgtcgaggaggagaaagaaggcggggccggccggaggccgtgtttgacagtggccgcccagccacggaggaggcgctgttctcggaggacgaggaggatgaagaagaggaggcaccggcggccgctcctcctcctccgccaccgccggtgatcgctgtaccggtgtccggtgagctgctcgttgactcttagtgctaaaattgcgttcttttccttgataaagttgcgttcttcg

SEQ ID NO: 49250 - DNA, 254 bp, Setaria italica
  Peptide Sequence Number=SeqID_115224
cttcaagtgttccactgaagacaagcgctagatccaggtgttgatggttggccataagatccaggtgttgatggttggccataagatccaggtgctgaagggccaccagtcctaaaacctcctccctgcccttgcgagaagttcctgtgctcttgggggttgttgtaaccttgaccttgaccagctggatttacatgcccttggtaactagaaggtagacttagaaccttaggaaagaccaaccaaggtaggta

SEQ ID NO: 49251 - DNA, 449 bp, Setaria italica
  Peptide Sequence Number=SeqID_115225
gaacttcagaaaataggcatccaaagggcaatttgcagacatgaccactcaacctgcacagcacccatgaaatcactgcaactgatggaagatcctacagataaaaagacataagccataagaaactcatagcccatgaataaaaggaagcggaataaaattcttgtgtacacaaaatgacataagatacatgactaagggtcatgtaacagaactaattttcttttatcgctttcaatattgctcactgcagcatctgtctaatgtaccttgaggtattatttatatccagggacgcacaccaagatcctagacaacaaacacaaataaaactgttgcagctctaagcaagtatgcataagaatactagtttatcttattattcaaaaaagtcttaggtcaacataatgcaagaaatgtattttagtgactttggaacttcaggattc

SEQ ID NO: 49252 - DNA, 321 bp, Setaria italica
  Peptide Sequence Number=SeqID_115226
tacgttacctgtaaactgtaattgacgaagcacctatgatatacactttgttacaaaagaaaaaagaacttcagaaaaataggcatccaaagggcaatttgcagacatgaccactcaaccctgcacagcacccatgaaatcactgcaactgatggaagatcctagacaagctcaatatacgccataggtgcattatctccccgccttgggaatgtcgggatgatccttgtgtaacccaccctctctgtctccatacctgtctgcaacctcagccaaacaatgcatggacgatatgccttctcatatatgaatgcgagagcc

SEQ ID NO: 49253 - DNA, 357 bp, Setaria italica
  Peptide Sequence Number=SeqID_115227
cttattagcattctgacatttttttcgttcaggtagttattgtaggttactagaaacatggtatgtttggctgccaccagtgataagtgattactttctgggactgctcattctaattcttctgtattgtccaattaactacataaattcttgtttccagatctcgttgggctttgctcaatgtagttagaatgcagtgctattgtgctaataattgtctatgcaggtagatcttgacaacatggatttgaaggagttccctagggctgaaaacctggaattcatggattgtgtactgaggagggtgagctgctttacatcccaccaaaatggtggcactacgttcgatctctctcc

SEQ ID NO: 49254 - DNA, 237 bp, Setaria italica
  Peptide Sequence Number=SeqID_115228
ttcattttcattgtatgtaatgattattttttggtccacttatgaagttgattctcgtcaggttggaaaaaattaatgtgtgtagtgattggaagcaggagcttatcacattttctcagttccttgagaggatgtggtcaactggttgtccatcaaacttgacatatctagctcagcatccattgtttgagcaggtatccaatctgtcactgttgatctctagtagattggctttgt

SEQ ID NO: 49255 - DNA, 241 bp, Setaria italica
  Peptide Sequence Number=SeqID_115229
ccgccgacacgttcaggcttcctgacgagatcgacattgctcatcttagctgagcttggcttctgcattgctctgggcattccgaccgtaccaatatggtttgtaaccatttcttttcttttgaattgatttgctatatgattgccgcagccctgtataaagtgaatcaattcaaaagaaaagaatggttacaaaccatattggtcaggtcagcatgctggcgaacgagccctgcaggtcc

SEQ ID NO: 49256 - DNA, 235 bp, Setaria italica
  Peptide Sequence Number=SeqID_115230
cgcaggctcatgtccattaggggccaacaggaccagcccatgcctggcacaaggagagcagcagatagggagttcactgcaccttttgtcgacgatggacttattgaagttgtcggcttccgtgatgcctggcatgggctggtcctgttggcccctaatggacatggtactcgcattgcgcaggctcatagaatccgtttcgagttccacaaaggcgtggcagaccacacgttca

SEQ ID NO: 49257 - DNA, 165 bp, Setaria italica
  Peptide Sequence Number=SeqID_115231
tacccgaacggaacgaatagaacaaccgtacgtacgtaggagatactcccacctcggtcaggtcagcatgctggcgaacgagccctgcaggtccaagagcgtcagcgacccgtcatcattgccattgccagcccaggacagccatggtgatggcaaggatcccgc

SEQ ID NO: 49258 - DNA, 220 bp, Setaria italica
  Peptide Sequence Number=SeqID_115232
cctagtgactctgttgcttcagccagatccttatctttcacagcaagagagctttgagcttcttgtagagaactgtagtgctggctttgcttattttctgcttctgtcaagtccaggcaatgcatgcagctgaagaggcactcaagtcacagctaaaagaagctgacgcaagtgtgcaagctgctgagaagaaaggttcaatctcattgagttgttgatc

SEQ ID NO: 49259 - DNA, 259 bp, Setaria italica
  Peptide Sequence Number=SeqID_115233
tggaagtcccaacaacactaagcctaacagcagcttctttaacaacaatgatgattcaagtttctcttttacttttatggatctctctagttctgccgttggaagcttgagtcgaaaacttgacatcctcttctcagagtgtacttggtttggaatgagactcactttagcatttctacaaatcaaagaatacaaggcaaatataccacctgcggaatcatagaatcaatgggagatgtaagcctccggcacacttttg

SEQ ID NO: 49260 - DNA, 289 bp, Setaria italica
  misc_feature (1)..(1): n is a, c, g, or t
  Peptide Sequence Number=SeqID_115234
ngtcgtgttactgtataatgtccttatgtcaaggtcaaatgatgggtttggtgaccaagcactgcaaaaggagaaatggacgcacgaaggaagagcatatgaccgctgcctctgcacatccaccaaccaattcctacccaagtaaacccttctctataatgggaaactatcagtgcagtggacagatggcagaactagagtggacatatcgccacccctaagtttagtaaattacttgtctattactactttgttcttacttatttttactttagttttgtttctttaa

SEQ ID NO: 49261 - DNA, 182 bp, Setaria italica
  Peptide Sequence Number=SeqID_115235
gttaattaatggtgatggttcatcatttgtgcttaacccatgatgatttattttattattctatcttgtacagataataataaatcatcatgggttaagcacaaatgatgaaccatcaccattaattaacatcaaatctaaagacttctccagctcaaagtagaatgcatgaactgaaagct

SEQ ID NO: 49262 - DNA, 294 bp, Setaria italica
  misc_feature (18)..(18): n is a, c, g, or t
  Peptide Sequence Number=SeqID_115236
gatttcatcagggactangtttttgctgatggatatattcaagtagctgtacatcaatgccataaacttagcaatgaccagtgcctcatagcatctttaacagcatccaagaatgtgaaaaaaagtcttgcttccctgaatatcaagaagacccacaaaggaagagatagcatataatggagccattagcacaataataagtatagctttctgctccttggtgtcacaacatcttttctattggaaaaaccccaaggagcacaattaattaagttattagtcttttcttgtcta

SEQ ID NO: 49263 - DNA, 219 bp, Setaria italica
  Peptide Sequence Number=SeqID_115237
aaagagctggcacctcacaagccgcttgcaaagttcttatgcatcaaagggattgtcttcttctctttctggcagcgtattgctggatgacggagaacacgaccatctcaaggatcaccagcacgttctggatcgcctcctggatatgctccacgtccagccagaaatggtgggactggatcacgcctacttcagttaaaacattgagcgcaataccct

SEQ ID NO: 49264 - DNA, 270 bp, Setaria italica
  Peptide Sequence Number=SeqID_115238
ccacctcaactccaaccgcttctgcggcctcgtgccccgatccttcgataagctctgcgcgctccacgagctcgacctcagcaacaaccgcctcgtggggccgttccccgacgtcgtgctccggatgccggggctcaggtatctcgacctccgctacaacgacttcgagggccccgtgccgccagagctcttcgaccgccagctcgacgccaccttccccttctcccaccaccaccttcacctcctccgccgtctcctccacctccatca

SEQ ID NO: 49265 - DNA, 311 bp, Setaria italica
  Peptide Sequence Number=SeqID_115239
aacttctgatgatgttgcctctgagcctcttgatgaaggcggcgaacatgctctcgctgttgcagcagatcaacatgttcagagaacaacttttccttctgattttccgtgatatcatcaaatctggacagaaaggagaggttagatgtagcgaatctatgaggaaactacataccatcaagaaaaagaaagacagcatttatttatcatgaacccagagcttaaggatgtatttgatcagcataagtttatcatgaacatattgcaggttattttttttacaggatcgctgaaagtggacacaacaaatg

SEQ ID NO: 49266 - DNA, 403 bp, Setaria italica
  Peptide Sequence Number=SeqID_115240
cttcgctcggacgatagtacttgttggggggaagtacaaaccgaagtttgtaacctggctgctgtacaggcatgcaaatctctcgacctgatgagcaaatcgggaattttggtaaccagtcttcatgagctgtccccacaccttatgaaacttctgatgatgttgcctctgagcctcttgatgaaggcggcgaacatgctctcgctgttgcagcagatcaacatgttcagagaacaacttttccttctgattttccgtgatatcatcaaatttgagagaccattcaagatgatggattctgtcttcaaattagaaatacaacgttaccaattactaaagaatagtactaaagactaccttaccgtagtacgaacttacgaatttacttagtaaaagtaaagta

SEQ ID NO: 49267 - DNA, 228 bp, Setaria italica
  Peptide Sequence Number=SeqID_115241
ttgttaggaatcaatatttttacaagcaactgagctattcataccttccgtgtcgacttcgattctgaaagaagcttcacctcatgctccagttctggaatcaccagcatagtccgccagcccagaactttcttgctgcgcagaatatctccatatatgtgatcaccaacatagagaatctgtgaactagaagcaatagaaagtaatctgtgaagatgaccgactatt

SEQ ID NO: 49268 - DNA, 381 bp, Setaria italica
  Peptide Sequence Number=SeqID_115242
taacttctaaattctacccttccttatcctgctctggttcagttacaacggggagctctgagcatcggcagggattgctcctacagcccaagcacatcgaactcatggggcatgtaatcttcgctcggacgatagtacttgttgggggaatacaaaccgaagtttgtaacctggctgctgtacaggcatgcaaatctctcgacctgtggaaaaagacaaaaacaaaaccttgcgtcaacaacacattgctgcacataacattttttcagtattattaaatgccaaatgtggttaaacgttctgcacctgatgagcaaatcgggaattttggtaaccagtcttcatgagctgtccccacaccttatgaaacttctgactgat

SEQ ID NO: 49269 - DNA, 433 bp, Setaria italica
  Peptide Sequence Number=SeqID_115243
catcaagaagatgaccgtcatgttgaccatcgtggacgatctcgtgtctgttgacagtcttattgaggaccatcttacggtggagcccatcaacgagtatgtccagagttgcgacattgttgccttcaacaagatctagaatcccagttactgtgcaccaaatttgctgctggggtcttggacctgggattggttgcgacgacaagcgctcaagtttctcgtgggatgcgagctcttatcccttttagttactctgctatagaaatgtcagtcttgagtctattgttgagtgctgccatgtttttaaccgtaagcacgtttctcatcctcattcaaaactagcattgcaaagaaaactgttgtactttagacacagcagatgtttcaccgcccagcagttcgactattcttaagacaaacggatattcaaaac

SEQ ID NO: 49270 - DNA, 387 bp, Setaria italica
  Peptide Sequence Number=SeqID_115244
cgagtatgtccagagttgatgggctccaccgtaagatggtcctcaataagactgtcaacagacacgagatcgtccacgatggtcaacatgacggtcatcttcttgatgaccatcttacggtggagcccatcaacgagtatgtccagagttgcgacattgttgccttcaacaagatctagaatcccagttactgtgcaccaaatttgctgctggggtcttggacctgggattggttgcgacgacaagcgctcaagtttctcgtgggatgcgagctcttatcccttttagttactctgctatagaaatgtcagtcttgagtctattgttgagtgctgccaggtttttgaatatccgttcgactattcttaagacaaacggatattcaaa

SEQ ID NO: 49271 - DNA, 311 bp, Setaria italica
  Peptide Sequence Number=SeqID_115245
tagtttacttgttgtctacctaaattttgtcttgtcttggggttctttggtaccttgggtattggtttgcgacgacaagcgctcaagtttctcgtgggatgcgagctcttatcccttttagttactctgctatagaaatgtcagtcttgagtctattgttgagtgctgccaggtttttgaatatccgtttgtcttaagaatagtcgaactgctgggcggtaagaacatctgctgtgtctaaagtacaacagttttctttgcaatgctagttttgaatgaggatgagaaacgtgcttacggttactgctttc

SEQ ID NO: 49272 - DNA, 238 bp, Setaria italica
  Peptide Sequence Number=SeqID_115246
atgacttggatcttttcggtgatgaaaccgaggaggacaagaaggctgcagatgagcgtgcggctgccaaggcctccaccaagaagaaagaaagtatgcataattttcgtctggagtgttagcctacattgtttactaaaattactgggcaatcctgccactgcttagtttagttttgcattcaggtcttttcagttctgctatgcattgcttgcacatgtgcttatacatatctatg

SEQ ID NO: 49273 - DNA, 414 bp, Setaria italica
  misc_feature (411)..(411): n is a, c, g, or t
  Peptide Sequence Number=SeqID_115247
tctaagtctttgtttgtacccgttttggtttattggtctattctaagtaagtattgtaccgttctattgtttgacctatcgtggacgatctcgtgtctgttgacagtcttattgaggaccatcttacggtggagcccatcaacgagtatgtccagagttgcgacattgttgccttcaacaagatctagaatcccagttactgtgcaccaaatttgctgctggggtcttggacctgggattggttgcgacgacaagcgctcaagtttctcgtgggatgcgagctcttatcccttttagttactctgctataggaaatgtcagtcttgagtctattgttgagtgctgccaggtttttgaattatccgtttgtcttaagaatagtcgaactgctgggcgtgaaacatctgctgngtc

SEQ ID NO: 49274 - DNA, 213 bp, Setaria italica
  Peptide Sequence Number=SeqID_115248
cttttcggtgatgaaaccgaggaggacaagaaggctgcagatgagcgtgcggctgccaaggcctccaccaagaagaaagaaagtggcaagtcctctgtccttatggacgtgaagccgtgggatgatgaaactgacatgaagaagcttgaggaggctgtgcacagtaactgggattctagatcttgttgaaggcaacaatgtcgcaactctgga

SEQ ID NO: 49275 - DNA, 163 bp, Setaria italica
  Peptide Sequence Number=SeqID_115249
tgggactttagccgccgccgccggtcctcaccccccctcgagaagtcgcagccgacgtagtcctcgccggatccgatggccgcgactttctccgaccttcacaccgccgacggcctcaaggccctcgaggcgcacctcgccggcaaggcacacaggggatagg

SEQ ID NO: 49276 - DNA, 124 bp, Setaria italica
  Peptide Sequence Number=SeqID_115250
ggagccatcaacgagtatgtccagagttgcgacattgtcctcgccggatccgatggctgcgactttctccgaccttcacaccgccgacggcctcaaggcctcgaggcgcacctcgccggcaagg

SEQ ID NO: 49277 - DNA, 427 bp, Setaria italica
  Peptide Sequence Number=SeqID_115251
tggcggcggacggggaggcggacgcgcggtccgtggactgctgggacctcgacgccgggcttgaggcggcggcgtggtggacgtggggcgtggacgaggagaagctgctcgggtggtttcccttcgtcgaggaggacttccggtgcaccggcggccgcgccggcgacgccgaggtggacgcattcgaccacgacatctggagcatttggtgaaatcgggtagagggatagggacgagccgccggagcaggtgccgctgccttttgcccgtgttgctccggccggggtattgttttggtacaggaaccgggaagaatggcggtggaggaatatgtaggcgaggtagctaggagactagtgtatgctatcaatcaatcgaaaaatgctcttggttgctccatacaaaaaaaaaaaaaaaaaactaaaca

SEQ ID NO: 49278 - DNA, 330 bp, Setaria italica
  misc_feature (243)..(330): n is a, c, g, or t
  Peptide Sequence Number=SeqID_115252
tcgtcgaggaggacttccggtgcaccggcggccgcgccggcgacgccgaggtggacgcattcgaccacgacatctggagcatttggtgaaatcgggtagagggatagggacgagccgccggagcaggtgccgctgccttttgcccgtgttgctccggccggggtattgttttggtacagaaacagagatgatgacgaagaacaatcgaataaattaattggcgattaaaaaaaaaaaaaaaannnnnnnnnnnnnnnnnnnnnnnnnnnnnnnnnnnnnnnnnnnnnnnnnnnnnnnnnnnnnnnnnnnnnnnnnnnnnnnnnnnnnnnn

SEQ ID NO: 49279 - DNA, 440 bp, Setaria italica
  Peptide Sequence Number=SeqID_115253
gctatctgtgcattctagtttgcaagtatcctgccttgccattgtttattgctgtgcccttctcagttcctactattatatttatttgctcattaagttaagtgcagactgaacttcatggaagggctgctttgcaatggtccatctgtctcgattcactctgcaggtccaaggaagcaatgagcatgtatagcaaactcaaaaaccacccgaatagtgagattagcaagaaggcaaacatgtttgtgttcagctttcaggcgatggacttcatgaaggtgaacagcacgccggtgcccaagagcacaggctacgagacgtacttcacaaagtttagcgggcagaagaactactacgcgagcctggacgagcccgaggtgggattcgaccagatcatcccttacatgctcttcctcgtctccccgatatttatagtcgcg

SEQ ID NO: 49280 - DNA, 279 bp, Setaria italica
  Peptide Sequence Number=SeqID_115254
gggagagcatggtggcgataagggggagaagcaggggagggagggacggaaacagggaggaaacggacaacggccgcaggacggagagtacgagtttgatgagactgattttttgggcctcgatttttttgagaaaaagcgttataaaggtccaccacctgggctggctccagcttttgagcctttgacagataacgattttcctgaggtggagataataattggagaccgtagcaaatttgagaagtctcgtggctcaacaggaatccaaccagcaga

SEQ ID NO: 49281 - DNA, 240 bp, Setaria italica
  Peptide Sequence Number=SeqID_115255
atgctcgccgggctcataaaggatagcgttgctcgagaccatgtcatccaccacattgctcttggagatctccttggagcggaatgtttgaggggctgacaggttcatgccatcgttgtttcccaagtggttgtagctcacaattgaggtgggctgcaggagcataaacaaaaattatttttaggatggcatttcccgataatatttcgtcaatttaatgtaagagaaatatggtttctc

SEQ ID NO: 49282 - DNA, 473 bp, Setaria italica
  misc_feature (135)..(135): n is a, c, g, or t
  Peptide Sequence Number=SeqID_115256
aacgaggtggcagcattagcaatggaagatatgctatcctggatgcaggaaggtggtcaggtaaggcattagttaggtaacactgtgttagtgttttctaattattaactttttatctggtccacaggttggtanctttgatgccacaaacagcacaagaatacggagaaacatgctgatgaaaatggctgaaggaaaatatcatctttttggaaacgatatgtaatgacaaggatgttctcgagagaaatatacgattgaaagttcaacaaagtcccgattatgcagagcagacagattttgaagctggtgtgcaggattttaaagagcgattgacctattatgaaaaggtatatgaaccggtggaagaaggctcttacataaaaatgatcgacatggttagtgggaagggaggccaactacagattaatgacataagtggttacttgcctggacggattgtttcttcttgg

SEQ ID NO: 49283 - DNA, 362 bp, Setaria italica
  Peptide Sequence Number=SeqID_115257
taattactaaaaaattttacccccttcgttctttaaagtagtaatttttagttctaagtctatttcgttacttgttagttttttaaattttggtttggtgacaccttgtacatgatctgttattacaattattcagtatgatctctcattctattcacttcatgagtgccttcagatcacgtcgaaaaagacaagctgaggtatcgttatccaagaggagaatcctaccttgacgtcattcaaagactagaacctgtaataattgagcttgaacgacagcgtgcaccagttgtagtcatagctcaccaaggccgtgttaagagcactttatgcataatttttgcttgacaaaccacttgagg

SEQ ID NO: 49284 - DNA, 250 bp, Setaria italica
  Peptide Sequence Number=SeqID_115258
ggcgtaggcggtggggagggtcttcctgcccaggttggtgagcgtggcgagcgcggcggtgcggccctcggcggcctggaacagcttcctggaggcgctcatggttgctcgcttcgtgcgtggtgggtttgcggcggggtggatcgggaggacgcaaggtttcctctggcgctcgtcggtggtagtagcagagagtgagggggaggatggcgaccagatgggtgggtgtgctgtgcgctgagacacgcaa

SEQ ID NO: 49285 - DNA, 215 bp, Setaria italica
  Peptide Sequence Number=SeqID_115259
ttttctttttgttttatttttaacgttttcccttttcttttccctttccctaaaccattgcaagtacagggccagagctgagaaagtcacacagtccattgaagaaaggtctgtctttgagatcatggtagtgcttctgagcgaattctttggatggaacaatcagcttgatggcaacaagcttgtagcctttttctctcaaatcgagacacaat

SEQ ID NO: 49286 - DNA, 225 bp, Setaria italica
  misc_feature (17)..(17): n is a, c, g, or t
  Peptide Sequence Number=SeqID_115260
ttttctttttgtttttnttttttaacgtttttccctttttctttttcccttttccctttaaacctattgcaagtacagggccagagctgagaaagtcacacagtccattgaagaaaggtctgtctttgagatcatggtagtgcttctgagcgaattctttggatggaacaatcagcttgatggcaacaagcttgtagcctttttctctcaaaatcgagacacaat

SEQ ID NO: 49287 - DNA, 163 bp, Setaria italica
  Peptide Sequence Number=SeqID_115261
caaccatcaggggtgatcttgctgttgctgtctccgggccatcacttccatgaatgatgtttcttacaacaacaacagcaagatcacccctgatggttcctggttcagatttctgcgggtctgtggtttgagcccaaggagctggtctcttactccagcaacg

SEQ ID NO: 49288 - DNA, 236 bp, Setaria italica
  Peptide Sequence Number=SeqID_115262
tttctttttgtttttatttttaacgtttttccctttttcttttttccctttttccctttttaaaccttttattttgttctaagtacagggccagagctgagaaagtcacacagtccattgaagaaaggtctgtctttgagatcatggtagtgcttctgagcgaattctttggatggaacaatcagcttgatggcaacaagcttgtagccctttttctctcaaaatcgagacacaat

SEQ ID NO: 49289 - DNA, 387 bp, Setaria italica
  Peptide Sequence Number=SeqID_115263
cccgcacctaaaagttaatactacctcctaaaagttaatgcaatgtttgctaagtaaaacagtgtactctatacggggaggaaagaggaggtgaaataaggagacataaatatgtgagaacatccattctggaagattttacatgaaaatagaaccacaacgtatgcagtttccagtcagagtagaaccacattttacatgtcatatcacaatagattagtttaatagttttggggcttagaatgcccacctagtacttcttcttcccttcttttgtaatctgcaggatcaagctttcgaagcaagtgatgcatgagctggcagatacttggaaaatgtttaaagggctgcctacacacagcacaatgggattcctggaagatatgc

SEQ ID NO: 49290 - DNA, 170 bp, Setaria italica
  Peptide Sequence Number=SeqID_115264
cgttgttctctgcgctttgtatgggatcaccgtacgttgcattgtgcgcgcgacactgactggcacacggcgccgggcgttgttcctgcaggatcttcgagatcgcgccgtcggcgaagcagatgttctcgttcctgcgcgactccgacgtgccgctggagaagaacccc

SEQ ID NO: 49291 - DNA, 232 bp, Setaria italica
  Peptide Sequence Number=SeqID_115265
atcacttgtgaaatggcttgaagctggtgacaagcccatatatattggttttggtagccttgtaagatcagttgacctggcttatttttagttcatacaaagttttaatctcatttgatctgatcgactgtattgtttaatctgttgactgtattgtttaatgcgttgtacttaagtattatagatatgctggttaatttgctgacttgcatgtgtatgaagtttgcacttc

SEQ ID NO: 49292 - DNA, 306 bp, Setaria italica
  Peptide Sequence Number=SeqID_115266
cagcagagaatgtcggtttatatctacagcagagaatgtcagattatatccacagcagacatagcacaagttaaggagaatgaactcagggtgattcactatgtgcagacttataccacataccataatctgaaattctaatggaagtcagttgccggagcttaggcacatccgcacacgacggcgatagctgataccttgtcatctgaacgacgactctgagcacagtaaattgatcctcaaacaattgtggcttattgaaggaggttcttgggtggatatgaacaaattatatatacaaaaatc

SEQ ID NO: 49293 - DNA, 265 bp, Setaria italica
  Peptide Sequence Number=SeqID_115267
tttctattcaatggaggcgacgcaggattgctaccttcatgtccgagacctccattgatgaatggcgccggtggcgacgactcccggaccggcaaggatgctggtgccggcagtaaacagtgaaggcagtgttcttgacttctcgggaggttgtgtgctcagaaggtggtcttggaggggtggaattgtcaaatggcacagcaggccttttcccttcacctttcctggccccttttgtttgtttataagaaatgatgtttaatca

SEQ ID NO: 49294 - DNA, 261 bp, Setaria italica
  Peptide Sequence Number=SeqID_115268
acaggcaaaaatagcattgaacagactaatgtaagtcattaagacaaatgagaatgtatcagttaggtaagataaagtgttccaagagagttcagcttaaagtagcaaaaagaatatttgtatagtgtccacacaacagtagctaaatatttaacctatggaaaatggtaccgacatcatgcataccttatcaagaaaacccatacacggccactccgatgtctgctccatagcttaaataacagaatactttccagtttg

SEQ ID NO: 49295 - DNA, 438 bp, Setaria italica
  Peptide Sequence Number=SeqID_115269
gcaagatattgaaatctcagatagacttgattcttattcagaaaccgagcaatatttggatcatgaaatgtacagtaatgatgaagaggaagctaatatggagacggcttcctatgctattgtcaaactgaagaatcatatggccctacttcttgtagtgattcaggtattgaagtttttatttttgccaaatgtatttagattacccttttttggatggccagatgcaagacatcggggtttggccaaattatttggattttcaagtgcctataaaatcctaaatacaaaagctagggtttggttttcttccactagaatgctaacttttgagagatcgggggtgaaataatgacatcgggaggaagggatgcatggccccactgatttgttttcgatcgagaaaaatctatcatccaatttgatctctaagataga

SEQ ID NO: 49296 - DNA, 181 bp, Setaria italica
  Peptide Sequence Number=SeqID_115270
ctgagtttgtgaccaagcaagtgaagtgatacacagggatacttaaagcaggtgctggcaatcaggatttgtacttttcagcaaacaatgccgcatctggagctgtattatcaccaagtggctttcatttctccttgcctccttggagaacgctgtattgtttgctgaaaagtacagcgtt

SEQ ID NO: 49297 - DNA, 238 bp, Setaria italica
  Peptide Sequence Number=SeqID_115271
tcggttggcaggtttcgccgtgaaataaacgggggcgcccgctggtgaggtgccgttagggtgctctgctctcccatcataggtagcacaatgaaggtcaagattcttcagtggcatgcggtagcttcttggacgtgggatgagcaagatgagacatgtggcataatgcaggatggcatttgacgggctgctgccctgacttaagttccctggtgacgattgcccgctcatctggggt

SEQ ID NO: 49298 - DNA, 377 bp, Setaria italica
  Peptide Sequence Number=SeqID_115272
agcatcagcctatcagagctccaggctcgcaatgtgaaatctgaagttgacacagtgacaaaacatttcatcttttccattcgacagatctatgcgtcatcggatcaggatgactggggcaccaaagcgttccctgatatcgtctcggccatggacaaggccaagaagtccaacacgaccgaatcctggcggtcgctgcagcatgagatttacagagttgcaagggccgtgtccaaggcttctgcagtcctggatggtggactaacatgatatgtgctgcagcttccattctatatagatcaaagtactgggtagcttcagtcttttattttacttttttttttgaaaaaaaggtcttaggaagcgagtcagatgta

SEQ ID NO: 49299 - DNA, 398 bp, Setaria italica
  Peptide Sequence Number=SeqID_115273
taaacaaaaaaaagaaaacaaataacgtaaagaaataaaatagtaaaaggaatttacctagtacaagtttctctcctttgcagaagtccatcaagcagcttgagagggcagccaccaaaattcacaaagagaagatgttgctacaagcagaaaactggagcctaaagacgagacagtacacactgaaagtcagggagatgaatgaccggttgatgatggccgagcgagccttcaccaaccgagagggactcgcgggcagaccatggtacaagcatatgatctatgcgtcatcggatcaggatgactggggcaccaaagcgttccctgatatcgtctcggccatggacaaggccaagaagtccaacacgaccgaatcctggcggtcgctgcagcatgag

SEQ ID NO: 49300 - DNA, 252 bp, Setaria italica
  Peptide Sequence Number=SeqID_115274
gttccttaggtaattggggtccttgttattctaagttgtcggtaattctttggttaattctattctttgtccagtttttcctacggtaccatgagactcgtcatcgtgccagtcatcaggctcctcttggagatgatcatgctccctatcgtcatcctccacagtttcactgtgtaaatcttctgcattgtctccccaatttctgtcagcaccctcttcgatctcactgggccatctatccagcctgctata

SEQ ID NO: 49301 - DNA, 247 bp, Setaria italica
  Peptide Sequence Number=SeqID_115275
gctgctgccgataccggagggagtgtctctgacggacgcagccggattgcctgaggtggcctgcaccgtctggtcaaccgtgttcatgatcagtcacctctcccccggcgaatcattccttgtaagaacaactctcttattatatatcctccacggctgcgtccaagagaacctagtagccactagccagtcgatacacatcctctagggaatggattgacagctggatcctttgatcccaattttg

SEQ ID NO: 49302 - DNA, 412 bp, Setaria italica
  Peptide Sequence Number=SeqID_115276
tcgttttttgttagtttcttatttcctttgtttcttagttattccgtaaaattggtatttgtactaattctaggtttaggtaacttgtattattacgtagtccttgttctaactacgtattcttttgtttctacctgagcacctgctgggtttgtggagattgggctatagaagatccatactaggacaaaattgttagctaacagattcgttgccacatgtgtgcgtgtagtaagcatgtaaccacattcgtcataccgccacatgtgtgctctgtaatagcccttggtgtatgatattggctcccccatttgatttccatagacaggactgaagtagcagtcagcaatgctagagtggtggaaacccaacgggccaacggtgtagattcatactggtctcatttttgttg

SEQ ID NO: 49303 - DNA, 194 bp, Setaria italica
  Peptide Sequence Number=SeqID_115277
acagagatggaaaacaaataaagtttaaggaacaaaacctttactactacggacaatacgaccaaagggaactaggatcacctccacacaggtttggagaagccgatggttcacggcaacctcaagacgagcaacatccttctcgacgccaactacgagtgcaggatatcggactacggcatctacctcctgct

SEQ ID NO: 49304 - DNA, 231 bp, Setaria italica
  Peptide Sequence Number=SeqID_115278
tatccttcttcatcacctttgccacggccatatcaaatcctcctgggtgaggtggtcacctctcgtgccagggccaatgcttccgtgctgagacagctgaagggctgaagcgaatggtcgtgcgttgtcggattaactgttgtgagattctgaaaatgtttgtcaaacctgtcgatgacgtgtactcgtgtaacagctttataagttaaatttcgttcattggttcatcaa

SEQ ID NO: 49305 - DNA, 357 bp, Setaria italica
  Peptide Sequence Number=SeqID_115279
ctatcggatctgctagaatggagtctggaactggtaacggtgatagtgaagtgcagcgcaccatgcttgagcttctaaaccagcttgatggttttgaagcatcaacaaaattaaggttctgatggcaacgaacagaatagacatcttggatcaagcccttctgaggcctggacgcatagacaggaagattgaatttccaaatcccaatgaggattctcgtttcgatatcttgaagattcattcaagaaaaatgaacttgatgcgtggtattgatctgaaaaagatcgcggtaaaagtattgtaattggggtccttcttaggttagttctttgttagttctttgttaaggttcggttt

SEQ ID NO: 49306 - DNA, 204 bp, Setaria italica
  Peptide Sequence Number=SeqID_115280
cgccatgtgcctttttaagtttacgccgtgcatgcctatgtttaaaagttgttttctgataacagatgtagtatgttgttgaaaagttgagatttatcggatcagctagatacgagataatgcattgcttgctcgcgatgtaccaagtagtagcatagtacgtggtacatcgcgagcaagcaatgcattatctcgtatctagct

SEQ ID NO: 49307 - DNA, 131 bp, Setaria italica
  Peptide Sequence Number=SeqID_115281
ggtcattgagcttccaatcaaacatccggagctatttgagagcctcggaattgcccagccaaagggtgttctcctttctgaaccaactcagaaccagaaaccctgatgaaggtgcagtcagtgtgatgagc

SEQ ID NO: 49308 - DNA, 247 bp, Setaria italica
  Peptide Sequence Number=SeqID_115282
gaatacaagacctgcagagacccagggcagggaagaagaagaggagctgttagatgcattgtggaactctgcattttctgaaacacatgatactgaactgaatatggcacgcatgaggtgacatgaaagggtcctctctttttcgaactcacgctttgaagtctgggggatagcccttgagctttcccttcagtgatggccgcaccccctcgaaccggattgagtgtcctgaatcctctggtgttct

SEQ ID NO: 49309 - DNA, 335 bp, Setaria italica
  Peptide Sequence Number=SeqID_115283
aaatcaacatggcacgtgatcctccaccttaacagcactcagtctcccccccggaaggagacgcgttcgcagcgatatgtacacaaagaaggcgagcaggccatgtcatttccaaatcttcagcgagtccttccagctcccttgcttggcgcagtgcgcgtagatcttgtccagccggatgatgatctccgagaacgtcggccgagccatggcctgagggtgccagcattcctcgatcagcgctttgaagtctgggggatagcccttgagctttcccttcagtgatggccgcaccccctcgaaccggattgagtgtcctgaatcctctaggtaga

SEQ ID NO: 49310 - DNA, 233 bp, Setaria italica
  misc_feature (12)..(12): n is a, c, g, or t
  Peptide Sequence Number=SeqID_115284
ttcgaggaggcngtttgttattcagaacacagtgctgtcaaatgtattggcatgacaattgagacgagacctgattattgcttggggcctcatctgcgccagatgctatcttatggttgtacccggataaagcatcatgaagatttctgataaaataatcgcgataatcagctggcaaggaccatgaaagtcccacccatcaagatgaattcgacctgcaaagtatattaaaa

SEQ ID NO: 49311 - DNA, 395 bp, Setaria italica
  Peptide Sequence Number=SeqID_115285
tttatccaacacttgtgattcgtggaactggtctttatgagctctggaaaactggcagatatagaaattatccacctgagctgttggtggatattgtagctaggattctgtctatggtaccaccgtggacacgagtgtatcgggtccagagagatattcctatgcctctcgtaacttctggtgtcgagaaaggtaacctgcgtgagcttgctttggctcgaatggaggatctaggcttgaaatgccgagatgtcagaacccgtgaggcagggattcaggatatccatcacaaaatcaggccagatgaagtagagcttgtcaggcgtgactatgctagacaaaaatagaagggttagggaagaacgttacctactacttaatagaaggaataacaa

SEQ ID NO: 49312 - DNA, 162 bp, Setaria italica
  Peptide Sequence Number=SeqID_115286
gcggtaatagtggcgagtaccgactcctgaatgtttgcataatgtaacttcattttcatgggataataatgtaaaactaagcgtttgtcatgtaacatgagtagttttgaaatgttatcattgctctcattttcagtgttgagtagtgagtaatccaaaaaa

SEQ ID NO: 49313 - DNA, 276 bp, Setaria italica
  Peptide Sequence Number=SeqID_115287
tacgactacgacgactacctacgtacgtacccggaccaataggaacgaccgcaataacgtcaaggggaggcccgggatgtacggggcattcgacatcaccgtcgcggcaaccgtcctgtgcggcgccgccgacgcgctcgtgcaggggggagtcaatcgggttcgccggggagctgccggagaggtacatgcaggccgtcgtcgccggaaccgccgcctcaggtgtgcttgtctcagcaatgagagtatttaccaaggcactcaccgataaggatg

SEQ ID NO: 49314 - DNA, 392 bp, Setaria italica
  Peptide Sequence Number=SeqID_115288
ggaggtccaggacgagatcgagaaggttaatgaggaaagcaagcaatgaggtttttagaggtggaacagaaatacaatgaaattcgcagaccagtttatgctcgacgcaatgaagttatccagaaaattccagatttctggctgacagcgttcctaagccatcctatgctcgctgatcttttaaccgaggatgatacacagatttttaaacacttggaatctgtatttgtggactcagaggatgttaaatcgggctgctctattactctaaccttttcttccaatccatatttcgaagataaaaagcttacaaagacgtattccatgagtgatgaataggaaacaaatacaacaagtaaaaggactaacctaccaattaaagtaggaaagga

SEQ ID NO: 49315 - DNA, 312 bp, Setaria italica
  Peptide Sequence Number=SeqID_115289
tcttaagtcctattccttattgtcttcgtcttgtattcttttttaaccgtaggtattgtatacacagatttttaaacacttggaatctgtatttgtggactcagaggatgttaaatcgggctgctctattactctaaccttttcttccaatccatatttcgaagataaaaagcttacaaagacgtattccatgagtgatgatggaacaatcacagtaaaggctacctccattaagtggaaggaaggaatggatattgtcaatggaaaggcatgcaccaagcagggtgacaagcgactactggttgatgaaag

SEQ ID NO: 49316 - DNA, 253 bp, Setaria italica
  Peptide Sequence Number=SeqID_115290
ctcctcgccctcgtctccgagcttcgccttctccgggagcgggagcgcggcgcccgcgacgagctccgcgacgccggccagaggtgggaggaggcggaggaggagcaccgcagggaggctcgggagctacgcgcggaggtggccgcgcgggacgacgcgctgcggaagctcgaggcgaggataaagtgccttgagaatgagaatgagttgctggagaagaatgaaaacaacttgaaagaaaccatggaggggc

SEQ ID NO: 49317 - DNA, 272 bp, Setaria italica
  misc_feature (233)..(233): n is a, c, g, or t
  misc_feature (248)..(248): n is a, c, g, or t
  Peptide Sequence Number=SeqID_115291
gaaaagaaaatttaaaacaaaaagaaaatttaaaatttaacaagtaagcattgggcatgggaggatgagcaccgcagggaggctcgggagctacgcgcggaggtggccgcgcgggacgacgcgctgcggaagctcgaggcgaggataaagtgccttgagaatgagaatgagttgctggagaagaatgaaaacaacttgaaagaaaccatggaggggctgcttcaatcaagggnggctttcataaaacnttatgaggcaggactctacttgtt

SEQ ID NO: 49318 - DNA, 246 bp, Setaria italica
  Peptide Sequence Number=SeqID_115292
aggataggcaccaaaatagggagatgcaaacactctcaggattgttatgggaggaatgtacacagctgtgatgtttgttggtatcaacaattgctcaaccgtgcagccaattgtttcaattgagaggacagttttctaccgagagagggctgctgggatgtactctgcattgccctatgccattgtcttctaggtttgttcttatttggttagttatttcccctttatttgtttgttttttgttta

SEQ ID NO: 49319 - DNA, 227 bp, Setaria italica
  Peptide Sequence Number=SeqID_115293
ggcgcgcaggaccgccgcggaggaggaagaggtggtggcgtggtagagcgcggtggtggagaagagcaggaagaagaggagaaagagaagaaaaagcacaagcatcgccaccataagtcaaagagcaagaggcatcactcagatgaggattcagatttagatgaaataagtgatggcaaggatgagagaaggaagagggttcattccttcccctgaccgaaagaagg

SEQ ID NO: 49320 - DNA, 456 bp, Setaria italica
  misc_feature (454)..(454): n is a, c, g, or t
  Peptide Sequence Number=SeqID_115294
tgggtacctagtctattattattaagtttgtcccttcctacgtctttctattgtaactaaaagtcttctattctaaaattgtatttcgtaattattgttctaattacttggctgatggatggtgcagacaatagtccggcctgtattaacaatatttctcactgtcctcatcacaatggctgcagatcgagcatccaatcctgatagtgggttcgtccatgaaaacaatagaaggatttgcaacaagctcaacagcaattgtcaaccttttacgttgttctgtagacaaaccgtttacccccggcaaaccaacaagagcaccacttaagggattcaactcaacaagttccatcacctcttcaacaaaagccctttgagtgtctgcatcaacatgagaaggcaaccggaggcatgctgagtataaacaaagactcaagcacagtcaagcaaggtnaa

SEQ ID NO: 49321 - DNA, 421 bp, Setaria italica
  Peptide Sequence Number=SeqID_115295
aatatttttccttgaataacccatatccagtgagtatcgcttcacccattgtaatgttctggtttgcaaattgcttgctccatgaatgcccatggaattcattgatggaaatagcgtttttgtgcgtacatcataggagagatccaataaccccaaatccaccagactggtatgctttctttggttatgatgaatcctccaagaatcataacaaccaacaaagcaaatgatccaaaggtattagcaactatcatattacggcccaaagatgccatgacccgaaaaagagccaaagatgtttggtgcagaaagaaaagcaacaaaaattgtcccaaaatcttgtgaattggggatcattagccaacctactattaattattgtttacttaagtttacccttacttattttccttgtatttct

SEQ ID NO: 49322 - DNA, 436 bp, Setaria italica
  Peptide Sequence Number=SeqID_115296
atcgaactgcggtatattgagggttcctccagtatgataggttttgcttccataagcaagcaatatactgagcacaaaatggttgggcatactttgtggcgaagtaagtctttcgattcactgctcggtctgctcaggacctcaaccatttctctggttgaaataattttgattttcgatagtattcagcgaaatccactccaagaatctgctccatttgagtacttgtgacttccaacatccatgcagcaggattatagccatccctgattttaggcactcctggaattgcctcaaaaaagtcaaccagattgcgtgatttggcacctaagggaccagcatatataagttgccctccacgcttcatgaacaaaagctcatcaaatgattcgaatatgttaatacaggccggactattgtctgcaccatccatcag

SEQ ID NO: 49323 - DNA, 322 bp, Setaria italica
  Peptide Sequence Number=SeqID_115297
aacaagctagtcttgttaggcggtcttctgctataccttgctttttcaattcctctggtacatcaacgtagtagttgatattcctaaagcacatagaaaggggttgaaaaaggcaacaccatccccttctgttccttgagattaccacttaatgaatttgagtgcagataagatcgtagctccagggctaccctatcattcttcctcctagaatccctgtgtcgaatttcatctttggacacaacagcttgcagatttccaatagggttgagaatcgtcaagaacattgtgaacaagatgttcaaaacaatagcataaccaa

SEQ ID NO: 49324 - DNA, 269 bp, Setaria italica
  Peptide Sequence Number=SeqID_115298
tatggataatcgtagtggcaccaatactgctgctgatctttcttggacaaaacttcttgcaaaaaatctgccacattttttctttctggacacttgaatcccatagcagcaaaaaaatcaacagcatattcacggggaccctggtatacaatttgaccttcagctatcagaatgacatcatcgaatagttcataagtctctggagctggctgcagcaaggaataatagaatacgtaagtagaccgtacaaagtaagaacaaataagtaa

SEQ ID NO: 49325 - DNA, 425 bp, Setaria italica
  Peptide Sequence Number=SeqID_115299
attctattacatcacagtaccaaagagaaaattcgacattaacgaaagagaatccatagttacatcatcacttcatatccctagatggcgagcatcatctcatctcttgaccaagaaaccgatgaacagcacagcttaacttccgaatcgaagcactttgttttcagaccagctacattgcgtttttgaagaccagcagtgtgcagcagcaccgccttaatttcttcaggcacgagtccaggaccatccccgcattgctcagctcggaagacatccattgcaaacccattgaagcagctgatgactgcctgctcgatgtcgagaacccaaggaccgtaccaagaagactagtacaattagtaggaacaagacaaggaatagacctaggacctaacgacgacgacaagaaacaatagtaggaataa

SEQ ID NO: 49326 - DNA, 472 bp, Setaria italica
  Peptide Sequence Number=SeqID_115300
tagtaaggaacaaacaaagaacggctcaaaccaaaccgcaagaaaaaagaaaacaacgtagctaaggaattcacaagctcaggtgtctccggttccagggggtgacagaaccagctttcgtcttttaacagtttgggaaggccctcttgttgtcctacatcacgccatggaatccggtggattgcaggaggacggtcttgatttcctccggcatgagcccagggccatccttgcacagctcagccttgaagacgtctagggtgaatccattgaagcaactgacaacagcctgctggacatcgaggccaaggccttcgatcgccttcatagcattaagcagagaccaggcctgcgagcacagaacatgtggatgttcactgctcggccttccctcatccttacctcaaccctaggttgctgtgaagtagggcttggcaatgcgcttgtgcacagctcttccttcacacgagac

SEQ ID NO: 49327 - DNA, 416 bp, Setaria italica
  Peptide Sequence Number=SeqID_115301
agaacttttaaattaagaagtacttaagaaaccctagaagaagggccttcccaaactgttaaaagacgaaagctggttctgtcaccccctggaaccggagacacctgagcttgtgaattccttagctacgttgttttcttttttcttgcggtttggttgagccgtcttgttgtcctacatcacgccatggaatccggtggattgcaggaggacggtcttgatttcctccggcatgagcccagggccatccttgcacagctcagccttgaagacgtctagggtgaatccattgaagcaactgacaacagcctgctggacatcgaggccaaggccttcgatcgccttcatagcattaagcagaagaccaggcctgcgagcacagaacatgtggatgttcactgctcggccttccctca

SEQ ID NO: 49328 - DNA, 477 bp, Setaria italica
  Peptide Sequence Number=SeqID_115302
ttcttccgtactcagtcgcactagtgctatcaaggttcagagaccagggattgaaccaataatataccgagatcttttcctcttccgcactttggcttcatttttgaatgggattagtcttcagaaattagggtgcaatgcagagcttattgttgatgaatttggtgaaaaacttttggaagaacttgattacacactcgtaagcattttcatagcctttaactgtcattgtcaatttagagaattagctattacagctgtcatgttgctaatataaagtgcattgattctgtatcaacaacaacttccttatgttttctttctttttgtataagtttattagaaggctaatgcttttaattcccttttgtcaacatattaggaagctacaaatatcgaggatttcctagaaattttaaggatgatccaactgtcaagatacctcgagtgtataagcagctttcaggttctcgtgtt

SEQ ID NO: 49329 - DNA, 188 bp, Setaria italica
  Peptide Sequence Number=SeqID_115303
cctatcccctgtgtgccttgcctaccctgttgcgtgtctcagattccagtggaaacgactagaaaaccttatagtgcttgccaaggagaatgtgtccaagatgagcagcaatcctgcactgaaaaagaatagttcgcaagctatgagaagtcgtcaactggagagcaaacttgatctcagtgaaacaa

SEQ ID NO: 49330 - DNA, 338 bp, Setaria italica
  Peptide Sequence Number=SeqID_115304
tttaaactttaaaggttaaaataaccgttaacgttaagttagaacaacaaagaaaggaatttagactttaaccctaaaagcctgattttaagtttcttgaggttgcatatccatatgttgcaaagcgtctgttgacagatccaaaccctgctctgagggaacgcctgattcaggtattattcaaagatggggcattccagtggaaacgactagaaaaccttatagtgcttgccaaggagaatgtgtccaagatgagcagcaatcctgcactgaaaaagatagttcgcaagctatgagaagtcgtcaactggagagcaaacttgatctcagtgaaacaa

SEQ ID NO: 49331 - DNA, 179 bp, Setaria italica
  Peptide Sequence Number=SeqID_115305
ctccaagttgcatgtagaagagcttgttgatgtgtacagactggtcgaagatcaaatagatatgccttcactagcccgtgaggttctccttatcgatgctgggatcaggagacaactcatactagctttcactgaagactccaagttgcatgtagaagagcttgttgatcttcgaccag

SEQ ID NO: 49332 - DNA, 198 bp, Setaria italica
  Peptide Sequence Number=SeqID_115306
cggcggcatcccggcggcgttcgccgacctgcccaaccgccggtgagcttgttgtgggagaggtccacggtgttgatctcgtcctgcgcgtcgtcgcgcgggacgagatcaacaccgtggacctctcccacaacaagctcaccggcgacccctcccacctcttcgtccccggccggcccatcggcaaggtggacctgt

SEQ ID NO: 49333 - DNA, 181 bp, Setaria italica
  Peptide Sequence Number=SeqID_115307
cttagaattgatgcgcatagaaggatcgcagttcaaggaattcgaagactaaaccttcgaaaactttgagcagcaagaaccagtttaggaagagatatctgacttgagaagatttggattctgctaggctcacaatgagaatctctgagcagctgggcagtggtgcctattacatgcaagt

SEQ ID NO: 49334 - DNA, 374 bp, Setaria italica
  Peptide Sequence Number=SeqID_115308
agacatattttgcatatacttcagagtttatctgtgcataacaagaggatcatttgaactagcctttgggtttctggaaccaatgcaatgtccaagagctgcaaaacatcttttccatattctgacagagttagctatctatgcataacaagatcatttgaactaacctgttgagctgtttcattctctgttccttcagtgcatgttttcttttctaacaaacttttttgctttcatatgctaataatcgtgctgcttgtccaggtagagatatgggccagtaatagaatacagcgagaagatcgtacattcatagtaaagtgggatgtacaagatataatatcttcatctccgcagctttgtggaacctgaaa

SEQ ID NO: 49335 - DNA, 417 bp, Setaria italica
  Peptide Sequence Number=SeqID_115309
gaaacatcagttgcctcccatgtgattcttgtaaatgtagctattgtggtgccgcagtggaagtatccacgacacagttttgaactgtaagttaatgaactgaaattgtacaataatgaagcatgcttgttacaaaaatcacatgggaggcaactgatgtttctatacaaaaactacctgaacaccctacaccggtcaaacgaatacacaaaactgggtagacaattatcaaaaccaaatccaccaacagcaaaaagttatgcacgaccatgtcacaaaaagagatcgagcatggtagaaattcaacacccatcatctcaggctgtatactccatagcctcatatagacatggtcatggggagaatcttctgaggtgttggttgtggttaatttccatgatgccttttcatccgact

SEQ ID NO: 49336 - DNA, 179 bp, Setaria italica
  Peptide Sequence Number=SeqID_115310
ttggtgtcaagaaattgcaaaagctgggattcatcctccttcttggcatacagtgatagcaacagattatggcagagcttaggaagaagctgtggcttaaggttgctaagcatgtcatcgagcaagagaaaggtgtcaagagagaaaacataaagaaagcaatagaattccttttcaga

SEQ ID NO: 49337 - DNA, 382 bp, Setaria italica
  misc_feature (21)..(21): n is a, c, g, or t
  Peptide Sequence Number=SeqID_115311
tcaactgcgactgacacaccnggtttttgtccaacaaagcaaaacagaacagactcaactgtgactaacacgcaccagcagcatttcgtttttgatcagaccccataggcagtactgaagaacttttggtggtgctgctagtcagtatctgcaggaccttggtgttcatcgggttgacgaaccgaggcgtcttgaactgacccacagcacaaccaaggctcacgaagtgatctaggatctccttgaaggttcccttcttcagaacccgcagctccagggggccaatggccttggtcttcctcgaacccagatagcctccatcgacgaaggctaggtccaaagacaagtttagacgacaagacttttagttaaagtaacgtaa

SEQ ID NO: 49338 - DNA, 327 bp, Setaria italica
  misc_feature (288)..(288): n is a, c, g, or t
  Peptide Sequence Number=SeqID_115312
ttaataagaagaaggaagaaccttttaagtaagtagactaaattagaagaattaagacgactacctacgtagtagaccaaccgtttgacagagcaacaattggacatctccacgcaggaacagttgaacatcaagatacagcacggcgcttcattgaggccatgataccttcttgagctgtgtcatcatggcacatgtaatatgtgtgccaagggatcagtagccgtttatcttccgctgggaagggctggagtgtaatgctctgttgtcagtgagcctggaaacccngactgatccctaccacctgggctcggaggaacccttgga

SEQ ID NO: 49339 - DNA, 170 bp, Setaria italica
  Peptide Sequence Number=SeqID_115313
agatggttcaggagcctcgactggcttggatcgaggaagcagcttcaactttggtctctccggcacctccgcgactctcccatccccaacccttccttcatgcgacgcgggtctcactggtgccggagagaccaaagttgaagctgctgcctcgactggcttggatcgag
